United States Patent Application Publication US 2015/0232836 A1 - sequence listing, part 6

SEQ ID NO: 86451 - DNA, 15 bp, Homo sapiens
aaagtaggtcccaca

SEQ ID NO: 86452 - DNA, 15 bp, Homo sapiens
taaagtaggtcccac

SEQ ID NO: 86453 - DNA, 15 bp, Homo sapiens
ttaaagtaggtccca

SEQ ID NO: 86454 - DNA, 15 bp, Homo sapiens
attaaagtaggtccc

SEQ ID NO: 86455 - DNA, 15 bp, Homo sapiens
cattaaagtaggtcc

SEQ ID NO: 86456 - DNA, 15 bp, Homo sapiens
ccattaaagtaggtc

SEQ ID NO: 86457 - DNA, 15 bp, Homo sapiens
accattaaagtaggt

SEQ ID NO: 86458 - DNA, 15 bp, Homo sapiens
gaccattaaagtagg

SEQ ID NO: 86459 - DNA, 15 bp, Homo sapiens
tgaccattaaagtag

SEQ ID NO: 86460 - DNA, 15 bp, Homo sapiens
ctgaccattaaagta

SEQ ID NO: 86461 - DNA, 15 bp, Homo sapiens
cctgaccattaaagt

SEQ ID NO: 86462 - DNA, 15 bp, Homo sapiens
gcctgaccattaaag

SEQ ID NO: 86463 - DNA, 15 bp, Homo sapiens
ggcctgaccattaaa

SEQ ID NO: 86464 - DNA, 15 bp, Homo sapiens
tggcctgaccattaa

SEQ ID NO: 86465 - DNA, 15 bp, Homo sapiens
gtggcctgaccatta

SEQ ID NO: 86466 - DNA, 15 bp, Homo sapiens
ggtggcctgaccatt

SEQ ID NO: 86467 - DNA, 15 bp, Homo sapiens
gggtggcctgaccat

SEQ ID NO: 86468 - DNA, 15 bp, Homo sapiens
ggggtggcctgacca

SEQ ID NO: 86469 - DNA, 15 bp, Homo sapiens
gggggtggcctgacc

SEQ ID NO: 86470 - DNA, 15 bp, Homo sapiens
agggggtggcctgac

SEQ ID NO: 86471 - DNA, 15 bp, Homo sapiens
tagggggtggcctga

SEQ ID NO: 86472 - DNA, 15 bp, Homo sapiens
gtagggggtggcctg

SEQ ID NO: 86473 - DNA, 15 bp, Homo sapiens
agtagggggtggcct

SEQ ID NO: 86474 - DNA, 15 bp, Homo sapiens
aagtagggggtggcc

SEQ ID NO: 86475 - DNA, 15 bp, Homo sapiens
aaagtagggggtggc

SEQ ID NO: 86476 - DNA, 15 bp, Homo sapiens
taaagtagggggtgg

SEQ ID NO: 86477 - DNA, 15 bp, Homo sapiens
ataaagtagggggtg

SEQ ID NO: 86478 - DNA, 15 bp, Homo sapiens
aataaagtagggggt

SEQ ID NO: 86479 - DNA, 15 bp, Homo sapiens
gaataaagtaggggg

SEQ ID NO: 86480 - DNA, 15 bp, Homo sapiens
agaataaagtagggg

SEQ ID NO: 86481 - DNA, 15 bp, Homo sapiens
gagaataaagtaggg

SEQ ID NO: 86482 - DNA, 15 bp, Homo sapiens
agagaataaagtagg

SEQ ID NO: 86483 - DNA, 15 bp, Homo sapiens
cagagaataaagtag

SEQ ID NO: 86484 - DNA, 15 bp, Homo sapiens
tcagagaataaagta

SEQ ID NO: 86485 - DNA, 15 bp, Homo sapiens
ctcagagaataaagt

SEQ ID NO: 86486 - DNA, 15 bp, Homo sapiens
tctcagagaataaag

SEQ ID NO: 86487 - DNA, 15 bp, Homo sapiens
ctctcagagaataaa

SEQ ID NO: 86488 - DNA, 15 bp, Homo sapiens
cctctcagagaataa

SEQ ID NO: 86489 - DNA, 15 bp, Homo sapiens
tcctctcagagaata

SEQ ID NO: 86490 - DNA, 15 bp, Homo sapiens
ctcctctcagagaat

SEQ ID NO: 86491 - DNA, 15 bp, Homo sapiens
gctcctctcagagaa

SEQ ID NO: 86492 - DNA, 15 bp, Homo sapiens
agctcctctcagaga

SEQ ID NO: 86493 - DNA, 15 bp, Homo sapiens
aagctcctctcagag

SEQ ID NO: 86494 - DNA, 15 bp, Homo sapiens
gaagctcctctcaga

SEQ ID NO: 86495 - DNA, 15 bp, Homo sapiens
cgaagctcctctcag

SEQ ID NO: 86496 - DNA, 15 bp, Homo sapiens
acgaagctcctctca

SEQ ID NO: 86497 - DNA, 15 bp, Homo sapiens
gacgaagctcctctc

SEQ ID NO: 86498 - DNA, 15 bp, Homo sapiens
ggacgaagctcctct

SEQ ID NO: 86499 - DNA, 15 bp, Homo sapiens
gggacgaagctcctc

SEQ ID NO: 86500 - DNA, 15 bp, Homo sapiens
cgggacgaagctcct

SEQ ID NO: 86501 - DNA, 15 bp, Homo sapiens
ccgggacgaagctcc

SEQ ID NO: 86502 - DNA, 15 bp, Homo sapiens
tccgggacgaagctc

SEQ ID NO: 86503 - DNA, 15 bp, Homo sapiens
gtccgggacgaagct

SEQ ID NO: 86504 - DNA, 15 bp, Homo sapiens
cgtccgggacgaagc

SEQ ID NO: 86505 - DNA, 15 bp, Homo sapiens
ccgtccgggacgaag

SEQ ID NO: 86506 - DNA, 15 bp, Homo sapiens
accgtccgggacgaa

SEQ ID NO: 86507 - DNA, 15 bp, Homo sapiens
gaccgtccgggacga

SEQ ID NO: 86508 - DNA, 15 bp, Homo sapiens
tgaccgtccgggacg

SEQ ID NO: 86509 - DNA, 15 bp, Homo sapiens
ttgaccgtccgggac

SEQ ID NO: 86510 - DNA, 15 bp, Homo sapiens
cttgaccgtccggga

SEQ ID NO: 86511 - DNA, 15 bp, Homo sapiens
acttgaccgtccggg

SEQ ID NO: 86512 - DNA, 15 bp, Homo sapiens
cacttgaccgtccgg

SEQ ID NO: 86513 - DNA, 15 bp, Homo sapiens
acacttgaccgtccg

SEQ ID NO: 86514 - DNA, 15 bp, Homo sapiens
cacacttgaccgtcc

SEQ ID NO: 86515 - DNA, 15 bp, Homo sapiens
tcacacttgaccgtc

SEQ ID NO: 86516 - DNA, 15 bp, Homo sapiens
ttcacacttgaccgt

SEQ ID NO: 86517 - DNA, 15 bp, Homo sapiens
cttcacacttgaccg

SEQ ID NO: 86518 - DNA, 15 bp, Homo sapiens
tcttcacacttgacc

SEQ ID NO: 86519 - DNA, 15 bp, Homo sapiens
ttcttcacacttgac

SEQ ID NO: 86520 - DNA, 15 bp, Homo sapiens
attcttcacacttga

SEQ ID NO: 86521 - DNA, 15 bp, Homo sapiens
aattcttcacacttg

SEQ ID NO: 86522 - DNA, 15 bp, Homo sapiens
taattcttcacactt

SEQ ID NO: 86523 - DNA, 15 bp, Homo sapiens
gtaattcttcacact

SEQ ID NO: 86524 - DNA, 15 bp, Homo sapiens
tgtaattcttcacac

SEQ ID NO: 86525 - DNA, 15 bp, Homo sapiens
gtgtaattcttcaca

SEQ ID NO: 86526 - DNA, 15 bp, Homo sapiens
ggtgtaattcttcac

SEQ ID NO: 86527 - DNA, 15 bp, Homo sapiens
gggtgtaattcttca

SEQ ID NO: 86528 - DNA, 15 bp, Homo sapiens
tgggtgtaattcttc

SEQ ID NO: 86529 - DNA, 15 bp, Homo sapiens
ctgggtgtaattctt

SEQ ID NO: 86530 - DNA, 15 bp, Homo sapiens
actgggtgtaattct

SEQ ID NO: 86531 - DNA, 15 bp, Homo sapiens
tactgggtgtaattc

SEQ ID NO: 86532 - DNA, 15 bp, Homo sapiens
ctactgggtgtaatt

SEQ ID NO: 86533 - DNA, 15 bp, Homo sapiens
tctactgggtgtaat

SEQ ID NO: 86534 - DNA, 15 bp, Homo sapiens
ctctactgggtgtaa

SEQ ID NO: 86535 - DNA, 15 bp, Homo sapiens
gctctactgggtgta

SEQ ID NO: 86536 - DNA, 15 bp, Homo sapiens
tgctctactgggtgt

SEQ ID NO: 86537 - DNA, 15 bp, Homo sapiens
atgctctactgggtg

SEQ ID NO: 86538 - DNA, 15 bp, Homo sapiens
aatgctctactgggt

SEQ ID NO: 86539 - DNA, 15 bp, Homo sapiens
caatgctctactggg

SEQ ID NO: 86540 - DNA, 15 bp, Homo sapiens
gcaatgctctactgg

SEQ ID NO: 86541 - DNA, 15 bp, Homo sapiens
ggcaatgctctactg

SEQ ID NO: 86542 - DNA, 15 bp, Homo sapiens
cggcaatgctctact

SEQ ID NO: 86543 - DNA, 15 bp, Homo sapiens
tcggcaatgctctac

SEQ ID NO: 86544 - DNA, 15 bp, Homo sapiens
gtcggcaatgctcta

SEQ ID NO: 86545 - DNA, 15 bp, Homo sapiens
ggtcggcaatgctct

SEQ ID NO: 86546 - DNA, 15 bp, Homo sapiens
gggtcggcaatgctc

SEQ ID NO: 86547 - DNA, 15 bp, Homo sapiens
agggtcggcaatgct

SEQ ID NO: 86548 - DNA, 15 bp, Homo sapiens
aagggtcggcaatgc

SEQ ID NO: 86549 - DNA, 15 bp, Homo sapiens
aaagggtcggcaatg

SEQ ID NO: 86550 - DNA, 15 bp, Homo sapiens
aaaagggtcggcaat

SEQ ID NO: 86551 - DNA, 15 bp, Homo sapiens
caaaagggtcggcaa

SEQ ID NO: 86552 - DNA, 15 bp, Homo sapiens
acaaaagggtcggca

SEQ ID NO: 86553 - DNA, 15 bp, Homo sapiens
cacaaaagggtcggc

SEQ ID NO: 86554 - DNA, 15 bp, Homo sapiens
ccacaaaagggtcgg

SEQ ID NO: 86555 - DNA, 15 bp, Homo sapiens
accacaaaagggtcg

SEQ ID NO: 86556 - DNA, 15 bp, Homo sapiens
aaccacaaaagggtc

SEQ ID NO: 86557 - DNA, 15 bp, Homo sapiens
gaaccacaaaagggt

SEQ ID NO: 86558 - DNA, 15 bp, Homo sapiens
ggaaccacaaaaggg

SEQ ID NO: 86559 - DNA, 15 bp, Homo sapiens
gggaaccacaaaagg

SEQ ID NO: 86560 - DNA, 15 bp, Homo sapiens
tgggaaccacaaaag

SEQ ID NO: 86561 - DNA, 15 bp, Homo sapiens
gtgggaaccacaaaa

SEQ ID NO: 86562 - DNA, 15 bp, Homo sapiens
agtgggaaccacaaa

SEQ ID NO: 86563 - DNA, 15 bp, Homo sapiens
cagtgggaaccacaa

SEQ ID NO: 86564 - DNA, 15 bp, Homo sapiens
gcagtgggaaccaca

SEQ ID NO: 86565 - DNA, 15 bp, Homo sapiens
ggcagtgggaaccac

SEQ ID NO: 86566 - DNA, 15 bp, Homo sapiens
tggcagtgggaacca

SEQ ID NO: 86567 - DNA, 15 bp, Homo sapiens
atggcagtgggaacc

SEQ ID NO: 86568 - DNA, 15 bp, Homo sapiens
gatggcagtgggaac

SEQ ID NO: 86569 - DNA, 15 bp, Homo sapiens
agatggcagtgggaa

SEQ ID NO: 86570 - DNA, 15 bp, Homo sapiens
tagatggcagtggga

SEQ ID NO: 86571 - DNA, 15 bp, Homo sapiens
ctagatggcagtggg

SEQ ID NO: 86572 - DNA, 15 bp, Homo sapiens
tctagatggcagtgg

SEQ ID NO: 86573 - DNA, 15 bp, Homo sapiens
ttctagatggcagtg

SEQ ID NO: 86574 - DNA, 15 bp, Homo sapiens
tttctagatggcagt

SEQ ID NO: 86575 - DNA, 15 bp, Homo sapiens
ttttctagatggcag

SEQ ID NO: 86576 - DNA, 15 bp, Homo sapiens
tttttctagatggca

SEQ ID NO: 86577 - DNA, 15 bp, Homo sapiens
ctttttctagatggc

SEQ ID NO: 86578 - DNA, 15 bp, Homo sapiens
gctttttctagatgg

SEQ ID NO: 86579 - DNA, 15 bp, Homo sapiens
ggctttttctagatg

SEQ ID NO: 86580 - DNA, 15 bp, Homo sapiens
tggctttttctagat

SEQ ID NO: 86581 - DNA, 15 bp, Homo sapiens
gtggctttttctaga

SEQ ID NO: 86582 - DNA, 15 bp, Homo sapiens
agtggctttttctag

SEQ ID NO: 86583 - DNA, 15 bp, Homo sapiens
cagtggctttttcta

SEQ ID NO: 86584 - DNA, 15 bp, Homo sapiens
ccagtggctttttct

SEQ ID NO: 86585 - DNA, 15 bp, Homo sapiens
tccagtggctttttc

SEQ ID NO: 86586 - DNA, 15 bp, Homo sapiens
gtccagtggcttttt

SEQ ID NO: 86587 - DNA, 15 bp, Homo sapiens
tgtccagtggctttt

SEQ ID NO: 86588 - DNA, 15 bp, Homo sapiens
ctgtccagtggcttt

SEQ ID NO: 86589 - DNA, 15 bp, Homo sapiens
actgtccagtggctt

SEQ ID NO: 86590 - DNA, 15 bp, Homo sapiens
cactgtccagtggct

SEQ ID NO: 86591 - DNA, 15 bp, Homo sapiens
ccactgtccagtggc

SEQ ID NO: 86592 - DNA, 15 bp, Homo sapiens
tccactgtccagtgg

SEQ ID NO: 86593 - DNA, 15 bp, Homo sapiens
gtccactgtccagtg

SEQ ID NO: 86594 - DNA, 15 bp, Homo sapiens
tgtccactgtccagt

SEQ ID NO: 86595 - DNA, 15 bp, Homo sapiens
ctgtccactgtccag

SEQ ID NO: 86596 - DNA, 15 bp, Homo sapiens
tctgtccactgtcca

SEQ ID NO: 86597 - DNA, 15 bp, Homo sapiens
gtctgtccactgtcc

SEQ ID NO: 86598 - DNA, 15 bp, Homo sapiens
ggtctgtccactgtc

SEQ ID NO: 86599 - DNA, 15 bp, Homo sapiens
gggtctgtccactgt

SEQ ID NO: 86600 - DNA, 15 bp, Homo sapiens
tgggtctgtccactg

SEQ ID NO: 86601 - DNA, 15 bp, Homo sapiens
ctgggtctgtccact

SEQ ID NO: 86602 - DNA, 15 bp, Homo sapiens
actgggtctgtccac

SEQ ID NO: 86603 - DNA, 15 bp, Homo sapiens
cactgggtctgtcca

SEQ ID NO: 86604 - DNA, 15 bp, Homo sapiens
acactgggtctgtcc

SEQ ID NO: 86605 - DNA, 15 bp, Homo sapiens
tacactgggtctgtc

SEQ ID NO: 86606 - DNA, 15 bp, Homo sapiens
ttacactgggtctgt

SEQ ID NO: 86607 - DNA, 15 bp, Homo sapiens
tttacactgggtctg

SEQ ID NO: 86608 - DNA, 15 bp, Homo sapiens
ctttacactgggtct

SEQ ID NO: 86609 - DNA, 15 bp, Homo sapiens
tctttacactgggtc

SEQ ID NO: 86610 - DNA, 15 bp, Homo sapiens
ttctttacactgggt

SEQ ID NO: 86611 - DNA, 15 bp, Homo sapiens
tttctttacactggg

SEQ ID NO: 86612 - DNA, 15 bp, Homo sapiens
gtttctttacactgg

SEQ ID NO: 86613 - DNA, 15 bp, Homo sapiens
tgtttctttacactg

SEQ ID NO: 86614 - DNA, 15 bp, Homo sapiens
ctgtttctttacact

SEQ ID NO: 86615 - DNA, 15 bp, Homo sapiens
tctgtttctttacac

SEQ ID NO: 86616 - DNA, 15 bp, Homo sapiens
ttctgtttctttaca

SEQ ID NO: 86617 - DNA, 15 bp, Homo sapiens
tttctgtttctttac

SEQ ID NO: 86618 - DNA, 15 bp, Homo sapiens
ctttctgtttcttta

SEQ ID NO: 86619 - DNA, 15 bp, Homo sapiens
actttctgtttcttt

SEQ ID NO: 86620 - DNA, 15 bp, Homo sapiens
tactttctgtttctt

SEQ ID NO: 86621 - DNA, 15 bp, Homo sapiens
ttactttctgtttct

SEQ ID NO: 86622 - DNA, 15 bp, Homo sapiens
tttactttctgtttc

SEQ ID NO: 86623 - DNA, 15 bp, Homo sapiens
ttttactttctgttt

SEQ ID NO: 86624 - DNA, 15 bp, Homo sapiens
gttttactttctgtt

SEQ ID NO: 86625 - DNA, 15 bp, Homo sapiens
tgttttactttctgt

SEQ ID NO: 86626 - DNA, 15 bp, Homo sapiens
gtgttttactttctg

SEQ ID NO: 86627 - DNA, 15 bp, Homo sapiens
tgtgttttactttct

SEQ ID NO: 86628 - DNA, 15 bp, Homo sapiens
gtgtgttttactttc

SEQ ID NO: 86629 - DNA, 15 bp, Homo sapiens
agtgtgttttacttt

SEQ ID NO: 86630 - DNA, 15 bp, Homo sapiens
cagtgtgttttactt

SEQ ID NO: 86631 - DNA, 15 bp, Homo sapiens
acagtgtgttttact

SEQ ID NO: 86632 - DNA, 15 bp, Homo sapiens
tacagtgtgttttac

SEQ ID NO: 86633 - DNA, 15 bp, Homo sapiens
ttacagtgtgtttta

SEQ ID NO: 86634 - DNA, 15 bp, Homo sapiens
tttacagtgtgtttt

SEQ ID NO: 86635 - DNA, 15 bp, Homo sapiens
ttttacagtgtgttt

SEQ ID NO: 86636 - DNA, 15 bp, Homo sapiens
attttacagtgtgtt

SEQ ID NO: 86637 - DNA, 15 bp, Homo sapiens
cattttacagtgtgt

SEQ ID NO: 86638 - DNA, 15 bp, Homo sapiens
acattttacagtgtg

SEQ ID NO: 86639 - DNA, 15 bp, Homo sapiens
aacattttacagtgt

SEQ ID NO: 86640 - DNA, 15 bp, Homo sapiens
gaacattttacagtg

SEQ ID NO: 86641 - DNA, 15 bp, Homo sapiens
agaacattttacagt

SEQ ID NO: 86642 - DNA, 15 bp, Homo sapiens
gagaacattttacag

SEQ ID NO: 86643 - DNA, 15 bp, Homo sapiens
agagaacattttaca

SEQ ID NO: 86644 - DNA, 15 bp, Homo sapiens
aagagaacattttac

SEQ ID NO: 86645 - DNA, 15 bp, Homo sapiens
gaagagaacatttta

SEQ ID NO: 86646 - DNA, 15 bp, Homo sapiens
cgaagagaacatttt

SEQ ID NO: 86647 - DNA, 15 bp, Homo sapiens
acgaagagaacattt

SEQ ID NO: 86648 - DNA, 15 bp, Homo sapiens
cacgaagagaacatt

SEQ ID NO: 86649 - DNA, 15 bp, Homo sapiens
ccacgaagagaacat

SEQ ID NO: 86650 - DNA, 15 bp, Homo sapiens
cccacgaagagaaca

SEQ ID NO: 86651 - DNA, 15 bp, Homo sapiens
ccccacgaagagaac

SEQ ID NO: 86652 - DNA, 15 bp, Homo sapiens
accccacgaagagaa

SEQ ID NO: 86653 - DNA, 15 bp, Homo sapiens
aaccccacgaagaga

SEQ ID NO: 86654 - DNA, 15 bp, Homo sapiens
gaaccccacgaagag

SEQ ID NO: 86655 - DNA, 15 bp, Homo sapiens
tgaaccccacgaaga

SEQ ID NO: 86656 - DNA, 15 bp, Homo sapiens
ctgaaccccacgaag

SEQ ID NO: 86657 - DNA, 15 bp, Homo sapiens
tctgaaccccacgaa

SEQ ID NO: 86658 - DNA, 15 bp, Homo sapiens
atctgaaccccacga

SEQ ID NO: 86659 - DNA, 15 bp, Homo sapiens
catctgaaccccacg

SEQ ID NO: 86660 - DNA, 15 bp, Homo sapiens
tcatctgaaccccac

SEQ ID NO: 86661 - DNA, 15 bp, Homo sapiens
ttcatctgaacccca

SEQ ID NO: 86662 - DNA, 15 bp, Homo sapiens
attcatctgaacccc

SEQ ID NO: 86663 - DNA, 15 bp, Homo sapiens
cattcatctgaaccc

SEQ ID NO: 86664 - DNA, 15 bp, Homo sapiens
acattcatctgaacc

SEQ ID NO: 86665 - DNA, 15 bp, Homo sapiens
aacattcatctgaac

SEQ ID NO: 86666 - DNA, 15 bp, Homo sapiens
gaacattcatctgaa

SEQ ID NO: 86667 - DNA, 15 bp, Homo sapiens
agaacattcatctga

SEQ ID NO: 86668 - DNA, 15 bp, Homo sapiens
tagaacattcatctg

SEQ ID NO: 86669 - DNA, 15 bp, Homo sapiens
atagaacattcatct

SEQ ID NO: 86670 - DNA, 15 bp, Homo sapiens
gatagaacattcatc

SEQ ID NO: 86671 - DNA, 15 bp, Homo sapiens
agatagaacattcat

SEQ ID NO: 86672 - DNA, 15 bp, Homo sapiens
gagatagaacattca

SEQ ID NO: 86673 - DNA, 15 bp, Homo sapiens
ggagatagaacattc

SEQ ID NO: 86674 - DNA, 15 bp, Homo sapiens
gggagatagaacatt

SEQ ID NO: 86675 - DNA, 15 bp, Homo sapiens
tgggagatagaacat

SEQ ID NO: 86676 - DNA, 15 bp, Homo sapiens
atgggagatagaaca

SEQ ID NO: 86677 - DNA, 15 bp, Homo sapiens
gatgggagatagaac

SEQ ID NO: 86678 - DNA, 15 bp, Homo sapiens
ggatgggagatagaa

SEQ ID NO: 86679 - DNA, 15 bp, Homo sapiens
aggatgggagataga

SEQ ID NO: 86680 - DNA, 15 bp, Homo sapiens
caggatgggagatag

SEQ ID NO: 86681 - DNA, 15 bp, Homo sapiens
acaggatgggagata

SEQ ID NO: 86682 - DNA, 15 bp, Homo sapiens
cacaggatgggagat

SEQ ID NO: 86683 - DNA, 15 bp, Homo sapiens
tcacaggatgggaga

SEQ ID NO: 86684 - DNA, 15 bp, Homo sapiens
ctcacaggatgggag

SEQ ID NO: 86685 - DNA, 15 bp, Homo sapiens
actcacaggatggga

SEQ ID NO: 86686 - DNA, 15 bp, Homo sapiens
aactcacaggatggg

SEQ ID NO: 86687 - DNA, 15 bp, Homo sapiens
aaactcacaggatgg

SEQ ID NO: 86688 - DNA, 15 bp, Homo sapiens
gaaactcacaggatg

SEQ ID NO: 86689 - DNA, 15 bp, Homo sapiens
ggaaactcacaggat

SEQ ID NO: 86690 - DNA, 15 bp, Homo sapiens
tggaaactcacagga

SEQ ID NO: 86691 - DNA, 15 bp, Homo sapiens
atggaaactcacagg

SEQ ID NO: 86692 - DNA, 15 bp, Homo sapiens
tatggaaactcacag

SEQ ID NO: 86693 - DNA, 15 bp, Homo sapiens
atatggaaactcaca

SEQ ID NO: 86694 - DNA, 15 bp, Homo sapiens
aatatggaaactcac

SEQ ID NO: 86695 - DNA, 15 bp, Homo sapiens
gaatatggaaactca

SEQ ID NO: 86696 - DNA, 15 bp, Homo sapiens
tgaatatggaaactc

SEQ ID NO: 86697 - DNA, 15 bp, Homo sapiens
ctgaatatggaaact

SEQ ID NO: 86698 - DNA, 15 bp, Homo sapiens
gctgaatatggaaac

SEQ ID NO: 86699 - DNA, 15 bp, Homo sapiens
tgctgaatatggaaa

SEQ ID NO: 86700 - DNA, 15 bp, Homo sapiens
gtgctgaatatggaa

SEQ ID NO: 86701 - DNA, 15 bp, Homo sapiens
agtgctgaatatgga

SEQ ID NO: 86702 - DNA, 15 bp, Homo sapiens
aagtgctgaatatgg

SEQ ID NO: 86703 - DNA, 15 bp, Homo sapiens
aaagtgctgaatatg

SEQ ID NO: 86704 - DNA, 15 bp, Homo sapiens
aaaagtgctgaatat

SEQ ID NO: 86705 - DNA, 15 bp, Homo sapiens
aaaaagtgctgaata

SEQ ID NO: 86706 - DNA, 15 bp, Homo sapiens
caaaaagtgctgaat

SEQ ID NO: 86707 - DNA, 15 bp, Homo sapiens
gcaaaaagtgctgaa

SEQ ID NO: 86708 - DNA, 15 bp, Homo sapiens
agcaaaaagtgctga

SEQ ID NO: 86709 - DNA, 15 bp, Homo sapiens
aagcaaaaagtgctg

SEQ ID NO: 86710 - DNA, 15 bp, Homo sapiens
aaagcaaaaagtgct

SEQ ID NO: 86711 - DNA, 15 bp, Homo sapiens
aaaagcaaaaagtgc

SEQ ID NO: 86712 - DNA, 15 bp, Homo sapiens
gaaaagcaaaaagtg

SEQ ID NO: 86713 - DNA, 15 bp, Homo sapiens
tgaaaagcaaaaagt

SEQ ID NO: 86714 - DNA, 15 bp, Homo sapiens
ctgaaaagcaaaaag

SEQ ID NO: 86715 - DNA, 15 bp, Homo sapiens
gctgaaaagcaaaaa

SEQ ID NO: 86716 - DNA, 15 bp, Homo sapiens
tgctgaaaagcaaaa

SEQ ID NO: 86717 - DNA, 15 bp, Homo sapiens
ctgctgaaaagcaaa

SEQ ID NO: 86718 - DNA, 15 bp, Homo sapiens
actgctgaaaagcaa

SEQ ID NO: 86719 - DNA, 15 bp, Homo sapiens
tactgctgaaaagca

SEQ ID NO: 86720 - DNA, 15 bp, Homo sapiens
ttactgctgaaaagc

SEQ ID NO: 86721 - DNA, 15 bp, Homo sapiens
tttactgctgaaaag

SEQ ID NO: 86722 - DNA, 15 bp, Homo sapiens
ttttactgctgaaaa

SEQ ID NO: 86723 - DNA, 15 bp, Homo sapiens
cttttactgctgaaa

SEQ ID NO: 86724 - DNA, 15 bp, Homo sapiens
gcttttactgctgaa

SEQ ID NO: 86725 - DNA, 15 bp, Homo sapiens
tgcttttactgctga

SEQ ID NO: 86726 - DNA, 15 bp, Homo sapiens
atgcttttactgctg

SEQ ID NO: 86727 - DNA, 15 bp, Homo sapiens
aatgcttttactgct

SEQ ID NO: 86728 - DNA, 15 bp, Homo sapiens
gaatgcttttactgc

SEQ ID NO: 86729 - DNA, 15 bp, Homo sapiens
agaatgcttttactg

SEQ ID NO: 86730 - DNA, 15 bp, Homo sapiens
gagaatgcttttact

SEQ ID NO: 86731 - DNA, 15 bp, Homo sapiens
agagaatgcttttac

SEQ ID NO: 86732 - DNA, 15 bp, Homo sapiens
cagagaatgctttta

SEQ ID NO: 86733 - DNA, 15 bp, Homo sapiens
acagagaatgctttt

SEQ ID NO: 86734 - DNA, 15 bp, Homo sapiens
cacagagaatgcttt

SEQ ID NO: 86735 - DNA, 15 bp, Homo sapiens
ccacagagaatgctt

SEQ ID NO: 86736 - DNA, 15 bp, Homo sapiens
cccacagagaatgct

SEQ ID NO: 86737 - DNA, 15 bp, Homo sapiens
tcccacagagaatgc

SEQ ID NO: 86738 - DNA, 15 bp, Homo sapiens
ctcccacagagaatg

SEQ ID NO: 86739 - DNA, 15 bp, Homo sapiens
cctcccacagagaat

SEQ ID NO: 86740 - DNA, 15 bp, Homo sapiens
tcctcccacagagaa

SEQ ID NO: 86741 - DNA, 15 bp, Homo sapiens
ctcctcccacagaga

SEQ ID NO: 86742 - DNA, 15 bp, Homo sapiens
tctcctcccacagag

SEQ ID NO: 86743 - DNA, 15 bp, Homo sapiens
ttctcctcccacaga

SEQ ID NO: 86744 - DNA, 15 bp, Homo sapiens
attctcctcccacag

SEQ ID NO: 86745 - DNA, 15 bp, Homo sapiens
aattctcctcccaca

SEQ ID NO: 86746 - DNA, 15 bp, Homo sapiens
aaattctcctcccac

SEQ ID NO: 86747 - DNA, 15 bp, Homo sapiens
taaattctcctccca

SEQ ID NO: 86748 - DNA, 15 bp, Homo sapiens
ttaaattctcctccc

SEQ ID NO: 86749 - DNA, 15 bp, Homo sapiens
gttaaattctcctcc

SEQ ID NO: 86750 - DNA, 15 bp, Homo sapiens
agttaaattctcctc

SEQ ID NO: 86751 - DNA, 15 bp, Homo sapiens
aagttaaattctcct

SEQ ID NO: 86752 - DNA, 15 bp, Homo sapiens
aaagttaaattctcc

SEQ ID NO: 86753 - DNA, 15 bp, Homo sapiens
caaagttaaattctc

SEQ ID NO: 86754 - DNA, 15 bp, Homo sapiens
tcaaagttaaattct

SEQ ID NO: 86755 - DNA, 15 bp, Homo sapiens
atcaaagttaaattc

SEQ ID NO: 86756 - DNA, 15 bp, Homo sapiens
gatcaaagttaaatt

SEQ ID NO: 86757 - DNA, 15 bp, Homo sapiens
agatcaaagttaaat

SEQ ID NO: 86758 - DNA, 15 bp, Homo sapiens
aagatcaaagttaaa

SEQ ID NO: 86759 - DNA, 15 bp, Homo sapiens
aaagatcaaagttaa

SEQ ID NO: 86760 - DNA, 15 bp, Homo sapiens
taaagatcaaagtta

SEQ ID NO: 86761 - DNA, 15 bp, Homo sapiens
ctaaagatcaaagtt

SEQ ID NO: 86762 - DNA, 15 bp, Homo sapiens
tctaaagatcaaagt

SEQ ID NO: 86763 - DNA, 15 bp, Homo sapiens
ctctaaagatcaaag

SEQ ID NO: 86764 - DNA, 15 bp, Homo sapiens
tctctaaagatcaaa

SEQ ID NO: 86765 - DNA, 15 bp, Homo sapiens
atctctaaagatcaa

SEQ ID NO: 86766 - DNA, 15 bp, Homo sapiens
catctctaaagatca

SEQ ID NO: 86767 - DNA, 15 bp, Homo sapiens
gcatctctaaagatc

SEQ ID NO: 86768 - DNA, 15 bp, Homo sapiens
ggcatctctaaagat

SEQ ID NO: 86769 - DNA, 15 bp, Homo sapiens
gggcatctctaaaga

SEQ ID NO: 86770 - DNA, 15 bp, Homo sapiens
agggcatctctaaag

SEQ ID NO: 86771 - DNA, 15 bp, Homo sapiens
aagggcatctctaaa

SEQ ID NO: 86772 - DNA, 15 bp, Homo sapiens
aaagggcatctctaa

SEQ ID NO: 86773 - DNA, 15 bp, Homo sapiens
taaagggcatctcta

SEQ ID NO: 86774 - DNA, 15 bp, Homo sapiens
ttaaagggcatctct

SEQ ID NO: 86775 - DNA, 15 bp, Homo sapiens
tttaaagggcatctc

SEQ ID NO: 86776 - DNA, 15 bp, Homo sapiens
atttaaagggcatct

SEQ ID NO: 86777 - DNA, 15 bp, Homo sapiens
catttaaagggcatc

SEQ ID NO: 86778 - DNA, 15 bp, Homo sapiens
acatttaaagggcat

SEQ ID NO: 86779 - DNA, 15 bp, Homo sapiens
cacatttaaagggca

SEQ ID NO: 86780 - DNA, 15 bp, Homo sapiens
ccacatttaaagggc

SEQ ID NO: 86781 - DNA, 15 bp, Homo sapiens
accacatttaaaggg

SEQ ID NO: 86782 - DNA, 15 bp, Homo sapiens
aaccacatttaaagg

SEQ ID NO: 86783 - DNA, 15 bp, Homo sapiens
taaccacatttaaag

SEQ ID NO: 86784 - DNA, 15 bp, Homo sapiens
ataaccacatttaaa

SEQ ID NO: 86785 - DNA, 15 bp, Homo sapiens
cataaccacatttaa

SEQ ID NO: 86786 - DNA, 15 bp, Homo sapiens
ccataaccacattta

SEQ ID NO: 86787 - DNA, 15 bp, Homo sapiens
accataaccacattt

SEQ ID NO: 86788 - DNA, 15 bp, Homo sapiens
gaccataaccacatt

SEQ ID NO: 86789 - DNA, 15 bp, Homo sapiens
tgaccataaccacat

SEQ ID NO: 86790 - DNA, 15 bp, Homo sapiens
ttgaccataaccaca

SEQ ID NO: 86791 - DNA, 15 bp, Homo sapiens
tttgaccataaccac

SEQ ID NO: 86792 - DNA, 15 bp, Homo sapiens
ttttgaccataacca

SEQ ID NO: 86793 - DNA, 15 bp, Homo sapiens
tttttgaccataacc

SEQ ID NO: 86794 - DNA, 15 bp, Homo sapiens
ttttttgaccataac

SEQ ID NO: 86795 - DNA, 15 bp, Homo sapiens
cttttttgaccataa

SEQ ID NO: 86796 - DNA, 15 bp, Homo sapiens
acttttttgaccata

SEQ ID NO: 86797 - DNA, 15 bp, Homo sapiens
cacttttttgaccat

SEQ ID NO: 86798 - DNA, 15 bp, Homo sapiens
tcacttttttgacca

SEQ ID NO: 86799 - DNA, 15 bp, Homo sapiens
gtcacttttttgacc

SEQ ID NO: 86800 - DNA, 15 bp, Homo sapiens
agtcacttttttgac

SEQ ID NO: 86801 - DNA, 15 bp, Homo sapiens
cagtcacttttttga

SEQ ID NO: 86802 - DNA, 15 bp, Homo sapiens
acagtcacttttttg

SEQ ID NO: 86803 - DNA, 15 bp, Homo sapiens
cacagtcactttttt

SEQ ID NO: 86804 - DNA, 15 bp, Homo sapiens
tcacagtcacttttt

SEQ ID NO: 86805 - DNA, 15 bp, Homo sapiens
ttcacagtcactttt

SEQ ID NO: 86806 - DNA, 15 bp, Homo sapiens
gttcacagtcacttt

SEQ ID NO: 86807 - DNA, 15 bp, Homo sapiens
tgttcacagtcactt

SEQ ID NO: 86808 - DNA, 15 bp, Homo sapiens
gtgttcacagtcact

SEQ ID NO: 86809 - DNA, 15 bp, Homo sapiens
agtgttcacagtcac

SEQ ID NO: 86810 - DNA, 15 bp, Homo sapiens
gagtgttcacagtca

SEQ ID NO: 86811 - DNA, 15 bp, Homo sapiens
tgagtgttcacagtc

SEQ ID NO: 86812 - DNA, 15 bp, Homo sapiens
ttgagtgttcacagt

SEQ ID NO: 86813 - DNA, 15 bp, Homo sapiens
tttgagtgttcacag

SEQ ID NO: 86814 - DNA, 15 bp, Homo sapiens
ctttgagtgttcaca

SEQ ID NO: 86815 - DNA, 15 bp, Homo sapiens
actttgagtgttcac

SEQ ID NO: 86816 - DNA, 15 bp, Homo sapiens
gactttgagtgttca

SEQ ID NO: 86817 - DNA, 15 bp, Homo sapiens
tgactttgagtgttc

SEQ ID NO: 86818 - DNA, 15 bp, Homo sapiens
ttgactttgagtgtt

SEQ ID NO: 86819 - DNA, 15 bp, Homo sapiens
gttgactttgagtgt

SEQ ID NO: 86820 - DNA, 15 bp, Homo sapiens
tgttgactttgagtg

SEQ ID NO: 86821 - DNA, 15 bp, Homo sapiens
ctgttgactttgagt

SEQ ID NO: 86822 - DNA, 15 bp, Homo sapiens
cctgttgactttgag

SEQ ID NO: 86823 - DNA, 15 bp, Homo sapiens
gcctgttgactttga

SEQ ID NO: 86824 - DNA, 15 bp, Homo sapiens
tgcctgttgactttg

SEQ ID NO: 86825 - DNA, 15 bp, Homo sapiens
ttgcctgttgacttt

SEQ ID NO: 86826 - DNA, 15 bp, Homo sapiens
tttgcctgttgactt

SEQ ID NO: 86827 - DNA, 15 bp, Homo sapiens
ctttgcctgttgact

SEQ ID NO: 86828 - DNA, 15 bp, Homo sapiens
cctttgcctgttgac

SEQ ID NO: 86829 - DNA, 15 bp, Homo sapiens
acctttgcctgttga

SEQ ID NO: 86830 - DNA, 15 bp, Homo sapiens
tacctttgcctgttg

SEQ ID NO: 86831 - DNA, 15 bp, Homo sapiens
ttacctttgcctgtt

SEQ ID NO: 86832 - DNA, 15 bp, Homo sapiens
tttacctttgcctgt

SEQ ID NO: 86833 - DNA, 15 bp, Homo sapiens
atttacctttgcctg

SEQ ID NO: 86834 - DNA, 15 bp, Homo sapiens
tatttacctttgcct

SEQ ID NO: 86835 - DNA, 15 bp, Homo sapiens
gtatttacctttgcc

SEQ ID NO: 86836 - DNA, 15 bp, Homo sapiens
ggtatttacctttgc

SEQ ID NO: 86837 - DNA, 15 bp, Homo sapiens
tggtatttacctttg

SEQ ID NO: 86838 - DNA, 15 bp, Homo sapiens
gtggtatttaccttt

SEQ ID NO: 86839 - DNA, 15 bp, Homo sapiens
cgtggtatttacctt

SEQ ID NO: 86840 - DNA, 15 bp, Homo sapiens
ccgtggtatttacct

SEQ ID NO: 86841 - DNA, 15 bp, Homo sapiens
cccgtggtatttacc

SEQ ID NO: 86842 - DNA, 15 bp, Homo sapiens
tcccgtggtatttac

SEQ ID NO: 86843 - DNA, 15 bp, Homo sapiens
ctcccgtggtattta

SEQ ID NO: 86844 - DNA, 15 bp, Homo sapiens
tctcccgtggtattt

SEQ ID NO: 86845 - DNA, 15 bp, Homo sapiens
gtctcccgtggtatt

SEQ ID NO: 86846 - DNA, 15 bp, Homo sapiens
ggtctcccgtggtat

SEQ ID NO: 86847 - DNA, 15 bp, Homo sapiens
aggtctcccgtggta

SEQ ID NO: 86848 - DNA, 15 bp, Homo sapiens
caggtctcccgtggt

SEQ ID NO: 86849 - DNA, 15 bp, Homo sapiens
ccaggtctcccgtgg

SEQ ID NO: 86850 - DNA, 15 bp, Homo sapiens
tccaggtctcccgtg

SEQ ID NO: 86851 - DNA, 15 bp, Homo sapiens
ctccaggtctcccgt

SEQ ID NO: 86852 - DNA, 15 bp, Homo sapiens
gctccaggtctcccg

SEQ ID NO: 86853 - DNA, 15 bp, Homo sapiens
tgctccaggtctccc

SEQ ID NO: 86854 - DNA, 15 bp, Homo sapiens
ctgctccaggtctcc

SEQ ID NO: 86855 - DNA, 15 bp, Homo sapiens
gctgctccaggtctc

SEQ ID NO: 86856 - DNA, 15 bp, Homo sapiens
tgctgctccaggtct

SEQ ID NO: 86857 - DNA, 15 bp, Homo sapiens
gtgctgctccaggtc

SEQ ID NO: 86858 - DNA, 15 bp, Homo sapiens
agtgctgctccaggt

SEQ ID NO: 86859 - DNA, 15 bp, Homo sapiens
cagtgctgctccagg

SEQ ID NO: 86860 - DNA, 15 bp, Homo sapiens
tcagtgctgctccag

SEQ ID NO: 86861 - DNA, 15 bp, Homo sapiens
ttcagtgctgctcca

SEQ ID NO: 86862 - DNA, 15 bp, Homo sapiens
gttcagtgctgctcc

SEQ ID NO: 86863 - DNA, 15 bp, Homo sapiens
cgttcagtgctgctc

SEQ ID NO: 86864 - DNA, 15 bp, Homo sapiens
ccgttcagtgctgct

SEQ ID NO: 86865 - DNA, 15 bp, Homo sapiens
cccgttcagtgctgc

SEQ ID NO: 86866 - DNA, 15 bp, Homo sapiens
tcccgttcagtgctg

SEQ ID NO: 86867 - DNA, 15 bp, Homo sapiens
ctcccgttcagtgct

SEQ ID NO: 86868 - DNA, 15 bp, Homo sapiens
cctcccgttcagtgc

SEQ ID NO: 86869 - DNA, 15 bp, Homo sapiens
gcctcccgttcagtg

SEQ ID NO: 86870 - DNA, 15 bp, Homo sapiens
ggcctcccgttcagt

SEQ ID NO: 86871 - DNA, 15 bp, Homo sapiens
gggcctcccgttcag

SEQ ID NO: 86872 - DNA, 15 bp, Homo sapiens
cgggcctcccgttca

SEQ ID NO: 86873 - DNA, 15 bp, Homo sapiens
acgggcctcccgttc

SEQ ID NO: 86874 - DNA, 15 bp, Homo sapiens
cacgggcctcccgtt

SEQ ID NO: 86875 - DNA, 15 bp, Homo sapiens
tcacgggcctcccgt

SEQ ID NO: 86876 - DNA, 15 bp, Homo sapiens
ctcacgggcctcccg

SEQ ID NO: 86877 - DNA, 15 bp, Homo sapiens
cctcacgggcctccc

SEQ ID NO: 86878 - DNA, 15 bp, Homo sapiens
gcctcacgggcctcc

SEQ ID NO: 86879 - DNA, 15 bp, Homo sapiens
tgcctcacgggcctc

SEQ ID NO: 86880 - DNA, 15 bp, Homo sapiens
gtgcctcacgggcct

SEQ ID NO: 86881 - DNA, 15 bp, Homo sapiens
tgtgcctcacgggcc

SEQ ID NO: 86882 - DNA, 15 bp, Homo sapiens
ctgtgcctcacgggc

SEQ ID NO: 86883 - DNA, 15 bp, Homo sapiens
tctgtgcctcacggg

SEQ ID NO: 86884 - DNA, 15 bp, Homo sapiens
ttctgtgcctcacgg

SEQ ID NO: 86885 - DNA, 15 bp, Homo sapiens
cttctgtgcctcacg

SEQ ID NO: 86886 - DNA, 15 bp, Homo sapiens
ccttctgtgcctcac

SEQ ID NO: 86887 - DNA, 15 bp, Homo sapiens
gccttctgtgcctca

SEQ ID NO: 86888 - DNA, 15 bp, Homo sapiens
ggccttctgtgcctc

SEQ ID NO: 86889 - DNA, 15 bp, Homo sapiens
tggccttctgtgcct

SEQ ID NO: 86890 - DNA, 15 bp, Homo sapiens
atggccttctgtgcc

SEQ ID NO: 86891 - DNA, 15 bp, Homo sapiens
catggccttctgtgc

SEQ ID NO: 86892 - DNA, 15 bp, Homo sapiens
ccatggccttctgtg

SEQ ID NO: 86893 - DNA, 15 bp, Homo sapiens
gccatggccttctgt

SEQ ID NO: 86894 - DNA, 15 bp, Homo sapiens
agccatggccttctg

SEQ ID NO: 86895 - DNA, 15 bp, Homo sapiens
gagccatggccttct

SEQ ID NO: 86896 - DNA, 15 bp, Homo sapiens
agagccatggccttc

SEQ ID NO: 86897 - DNA, 15 bp, Homo sapiens
cagagccatggcctt

SEQ ID NO: 86898 - DNA, 15 bp, Homo sapiens
ccagagccatggcct

SEQ ID NO: 86899 - DNA, 15 bp, Homo sapiens
tccagagccatggcc

SEQ ID NO: 86900 - DNA, 15 bp, Homo sapiens
atccagagccatggc

SEQ ID NO: 86901 - DNA, 15 bp, Homo sapiens
aatccagagccatgg

SEQ ID NO: 86902 - DNA, 15 bp, Homo sapiens
gaatccagagccatg

SEQ ID NO: 86903 - DNA, 15 bp, Homo sapiens
agaatccagagccat

SEQ ID NO: 86904 - DNA, 15 bp, Homo sapiens
cagaatccagagcca

SEQ ID NO: 86905 - DNA, 15 bp, Homo sapiens
acagaatccagagcc

SEQ ID NO: 86906 - DNA, 15 bp, Homo sapiens
aacagaatccagagc

SEQ ID NO: 86907 - DNA, 15 bp, Homo sapiens
taacagaatccagag

SEQ ID NO: 86908 - DNA, 15 bp, Homo sapiens
gtaacagaatccaga

SEQ ID NO: 86909 - DNA, 15 bp, Homo sapiens
tgtaacagaatccag

SEQ ID NO: 86910 - DNA, 15 bp, Homo sapiens
ctgtaacagaatcca

SEQ ID NO: 86911 - DNA, 15 bp, Homo sapiens
cctgtaacagaatcc

SEQ ID NO: 86912 - DNA, 15 bp, Homo sapiens
ccctgtaacagaatc

SEQ ID NO: 86913 - DNA, 15 bp, Homo sapiens
accctgtaacagaat

SEQ ID NO: 86914 - DNA, 15 bp, Homo sapiens
taccctgtaacagaa

SEQ ID NO: 86915 - DNA, 15 bp, Homo sapiens
gtaccctgtaacaga

SEQ ID NO: 86916 - DNA, 15 bp, Homo sapiens
tgtaccctgtaacag

SEQ ID NO: 86917 - DNA, 15 bp, Homo sapiens
ctgtaccctgtaaca

SEQ ID NO: 86918 - DNA, 15 bp, Homo sapiens
actgtaccctgtaac

SEQ ID NO: 86919 - DNA, 15 bp, Homo sapiens
gactgtaccctgtaa

SEQ ID NO: 86920 - DNA, 15 bp, Homo sapiens
ggactgtaccctgta

SEQ ID NO: 86921 - DNA, 15 bp, Homo sapiens
aggactgtaccctgt

SEQ ID NO: 86922 - DNA, 15 bp, Homo sapiens
caggactgtaccctg

SEQ ID NO: 86923 - DNA, 15 bp, Homo sapiens
ccaggactgtaccct

SEQ ID NO: 86924 - DNA, 15 bp, Homo sapiens
cccaggactgtaccc

SEQ ID NO: 86925 - DNA, 15 bp, Homo sapiens
tcccaggactgtacc

SEQ ID NO: 86926 - DNA, 15 bp, Homo sapiens
ctcccaggactgtac

SEQ ID NO: 86927 - DNA, 15 bp, Homo sapiens
cctcccaggactgta

SEQ ID NO: 86928 - DNA, 15 bp, Homo sapiens
tcctcccaggactgt

SEQ ID NO: 86929 - DNA, 15 bp, Homo sapiens
atcctcccaggactg

SEQ ID NO: 86930 - DNA, 15 bp, Homo sapiens
catcctcccaggact

SEQ ID NO: 86931 - DNA, 15 bp, Homo sapiens
gcatcctcccaggac

SEQ ID NO: 86932 - DNA, 15 bp, Homo sapiens
tgcatcctcccagga

SEQ ID NO: 86933 - DNA, 15 bp, Homo sapiens
ctgcatcctcccagg

SEQ ID NO: 86934 - DNA, 15 bp, Homo sapiens
tctgcatcctcccag

SEQ ID NO: 86935 - DNA, 15 bp, Homo sapiens
ctctgcatcctccca

SEQ ID NO: 86936 - DNA, 15 bp, Homo sapiens
tctctgcatcctccc

SEQ ID NO: 86937 - DNA, 15 bp, Homo sapiens
atctctgcatcctcc

SEQ ID NO: 86938 - DNA, 15 bp, Homo sapiens
gatctctgcatcctc

SEQ ID NO: 86939 - DNA, 15 bp, Homo sapiens
ggatctctgcatcct

SEQ ID NO: 86940 - DNA, 15 bp, Homo sapiens
aggatctctgcatcc

SEQ ID NO: 86941 - DNA, 15 bp, Homo sapiens
gaggatctctgcatc

SEQ ID NO: 86942 - DNA, 15 bp, Homo sapiens
agaggatctctgcat

SEQ ID NO: 86943 - DNA, 15 bp, Homo sapiens
aagaggatctctgca

SEQ ID NO: 86944 - DNA, 15 bp, Homo sapiens
gaagaggatctctgc

SEQ ID NO: 86945 - DNA, 15 bp, Homo sapiens
agaagaggatctctg

SEQ ID NO: 86946 - DNA, 15 bp, Homo sapiens
gagaagaggatctct

SEQ ID NO: 86947 - DNA, 15 bp, Homo sapiens
agagaagaggatctc

SEQ ID NO: 86948 - DNA, 15 bp, Homo sapiens
cagagaagaggatct

SEQ ID NO: 86949 - DNA, 15 bp, Homo sapiens
acagagaagaggatc

SEQ ID NO: 86950 - DNA, 15 bp, Homo sapiens
cacagagaagaggat

SEQ ID NO: 86951 - DNA, 15 bp, Homo sapiens
gcacagagaagagga

SEQ ID NO: 86952 - DNA, 15 bp, Homo sapiens
agcacagagaagagg

SEQ ID NO: 86953 - DNA, 15 bp, Homo sapiens
gagcacagagaagag

SEQ ID NO: 86954 - DNA, 15 bp, Homo sapiens
tgagcacagagaaga

SEQ ID NO: 86955 - DNA, 15 bp, Homo sapiens
gtgagcacagagaag

SEQ ID NO: 86956 - DNA, 15 bp, Homo sapiens
agtgagcacagagaa

SEQ ID NO: 86957 - DNA, 15 bp, Homo sapiens
aagtgagcacagaga

SEQ ID NO: 86958 - DNA, 15 bp, Homo sapiens
taagtgagcacagag

SEQ ID NO: 86959 - DNA, 15 bp, Homo sapiens
ctaagtgagcacaga

SEQ ID NO: 86960 - DNA, 15 bp, Homo sapiens
cctaagtgagcacag

SEQ ID NO: 86961 - DNA, 15 bp, Homo sapiens
gcctaagtgagcaca

SEQ ID NO: 86962 - DNA, 15 bp, Homo sapiens
agcctaagtgagcac

SEQ ID NO: 86963 - DNA, 15 bp, Homo sapiens
tagcctaagtgagca

SEQ ID NO: 86964 - DNA, 15 bp, Homo sapiens
atagcctaagtgagc

SEQ ID NO: 86965 - DNA, 15 bp, Homo sapiens
tatagcctaagtgag

SEQ ID NO: 86966 - DNA, 15 bp, Homo sapiens
gtatagcctaagtga

SEQ ID NO: 86967 - DNA, 15 bp, Homo sapiens
ggtatagcctaagtg

SEQ ID NO: 86968 - DNA, 15 bp, Homo sapiens
gggtatagcctaagt

SEQ ID NO: 86969 - DNA, 15 bp, Homo sapiens
agggtatagcctaag

SEQ ID NO: 86970 - DNA, 15 bp, Homo sapiens
aagggtatagcctaa

SEQ ID NO: 86971 - DNA, 15 bp, Homo sapiens
gaagggtatagccta

SEQ ID NO: 86972 - DNA, 15 bp, Homo sapiens
tgaagggtatagcct

SEQ ID NO: 86973 - DNA, 15 bp, Homo sapiens
atgaagggtatagcc

SEQ ID NO: 86974 - DNA, 15 bp, Homo sapiens
aatgaagggtatagc

SEQ ID NO: 86975 - DNA, 15 bp, Homo sapiens
aaatgaagggtatag

SEQ ID NO: 86976 - DNA, 15 bp, Homo sapiens
caaatgaagggtata

SEQ ID NO: 86977 - DNA, 15 bp, Homo sapiens
acaaatgaagggtat

SEQ ID NO: 86978 - DNA, 15 bp, Homo sapiens
tacaaatgaagggta

SEQ ID NO: 86979 - DNA, 15 bp, Homo sapiens
ttacaaatgaagggt

SEQ ID NO: 86980 - DNA, 15 bp, Homo sapiens
tttacaaatgaaggg

SEQ ID NO: 86981 - DNA, 15 bp, Homo sapiens
ttttacaaatgaagg

SEQ ID NO: 86982 - DNA, 15 bp, Homo sapiens
gttttacaaatgaag

SEQ ID NO: 86983 - DNA, 15 bp, Homo sapiens
tgttttacaaatgaa

SEQ ID NO: 86984 - DNA, 15 bp, Homo sapiens
gtgttttacaaatga

SEQ ID NO: 86985 - DNA, 15 bp, Homo sapiens
ggtgttttacaaatg

SEQ ID NO: 86986 - DNA, 15 bp, Homo sapiens
tggtgttttacaaat

SEQ ID NO: 86987 - DNA, 15 bp, Homo sapiens
atggtgttttacaaa

SEQ ID NO: 86988 - DNA, 15 bp, Homo sapiens
aatggtgttttacaa

SEQ ID NO: 86989 - DNA, 15 bp, Homo sapiens
taatggtgttttaca

SEQ ID NO: 86990 - DNA, 15 bp, Homo sapiens
ttaatggtgttttac

SEQ ID NO: 86991 - DNA, 15 bp, Homo sapiens
tttaatggtgtttta

SEQ ID NO: 86992 - DNA, 15 bp, Homo sapiens
atttaatggtgtttt

SEQ ID NO: 86993 - DNA, 15 bp, Homo sapiens
tatttaatggtgttt

SEQ ID NO: 86994 - DNA, 15 bp, Homo sapiens
ttatttaatggtgtt

SEQ ID NO: 86995 - DNA, 15 bp, Homo sapiens
tttatttaatggtgt

SEQ ID NO: 86996 - DNA, 15 bp, Homo sapiens
ctttatttaatggtg

SEQ ID NO: 86997 - DNA, 15 bp, Homo sapiens
actttatttaatggt

SEQ ID NO: 86998 - DNA, 15 bp, Homo sapiens
tactttatttaatgg

SEQ ID NO: 86999 - DNA, 15 bp, Homo sapiens
gtactttatttaatg

SEQ ID NO: 87000 - DNA, 15 bp, Homo sapiens
agtactttatttaat

SEQ ID NO: 87001 - DNA, 15 bp, Homo sapiens
aagtactttatttaa

SEQ ID NO: 87002 - DNA, 15 bp, Homo sapiens
aaagtactttattta

SEQ ID NO: 87003 - DNA, 15 bp, Homo sapiens
gaaagtactttattt

SEQ ID NO: 87004 - DNA, 15 bp, Homo sapiens
cgaaagtactttatt

SEQ ID NO: 87005 - DNA, 15 bp, Homo sapiens
acgaaagtactttat

SEQ ID NO: 87006 - DNA, 15 bp, Homo sapiens
gacgaaagtacttta

SEQ ID NO: 87007 - DNA, 15 bp, Homo sapiens
agacgaaagtacttt

SEQ ID NO: 87008 - DNA, 15 bp, Homo sapiens
cagacgaaagtactt

SEQ ID NO: 87009 - DNA, 15 bp, Homo sapiens
gcagacgaaagtact

SEQ ID NO: 87010 - DNA, 15 bp, Homo sapiens
tgcagacgaaagtac

SEQ ID NO: 87011 - DNA, 15 bp, Homo sapiens
ttgcagacgaaagta

SEQ ID NO: 87012 - DNA, 15 bp, Homo sapiens
tttgcagacgaaagt

SEQ ID NO: 87013 - DNA, 15 bp, Homo sapiens
atttgcagacgaaag

SEQ ID NO: 87014 - DNA, 15 bp, Homo sapiens
tatttgcagacgaaa

SEQ ID NO: 87015 - DNA, 15 bp, Homo sapiens
ttatttgcagacgaa

SEQ ID NO: 87016 - DNA, 15 bp, Homo sapiens
attatttgcagacga

SEQ ID NO: 87017 - DNA, 15 bp, Homo sapiens
aattatttgcagacg

SEQ ID NO: 87018 - DNA, 15 bp, Homo sapiens
caattatttgcagac

SEQ ID NO: 87019 - DNA, 15 bp, Homo sapiens
gcaattatttgcaga

SEQ ID NO: 87020 - DNA, 15 bp, Homo sapiens
tgcaattatttgcag

SEQ ID NO: 87021 - DNA, 15 bp, Homo sapiens
ttgcaattatttgca

SEQ ID NO: 87022 - DNA, 15 bp, Homo sapiens
attgcaattatttgc

SEQ ID NO: 87023 - DNA, 15 bp, Homo sapiens
aattgcaattatttg

SEQ ID NO: 87024 - DNA, 15 bp, Homo sapiens
caattgcaattattt

SEQ ID NO: 87025 - DNA, 15 bp, Homo sapiens
gcaattgcaattatt

SEQ ID NO: 87026 - DNA, 15 bp, Homo sapiens
tgcaattgcaattat

SEQ ID NO: 87027 - DNA, 15 bp, Homo sapiens
atgcaattgcaatta

SEQ ID NO: 87028 - DNA, 15 bp, Homo sapiens
gatgcaattgcaatt

SEQ ID NO: 87029 - DNA, 15 bp, Homo sapiens
agatgcaattgcaat

SEQ ID NO: 87030 - DNA, 15 bp, Homo sapiens
aagatgcaattgcaa

SEQ ID NO: 87031 - DNA, 15 bp, Homo sapiens
gaagatgcaattgca

SEQ ID NO: 87032 - DNA, 15 bp, Homo sapiens
agaagatgcaattgc

SEQ ID NO: 87033 - DNA, 15 bp, Homo sapiens
tagaagatgcaattg

SEQ ID NO: 87034 - DNA, 15 bp, Homo sapiens
ctagaagatgcaatt

SEQ ID NO: 87035 - DNA, 15 bp, Homo sapiens
cctagaagatgcaat

SEQ ID NO: 87036 - DNA, 15 bp, Homo sapiens
tcctagaagatgcaa

SEQ ID NO: 87037 - DNA, 15 bp, Homo sapiens
ttcctagaagatgca

SEQ ID NO: 87038 - DNA, 15 bp, Homo sapiens
attcctagaagatgc

SEQ ID NO: 87039 - DNA, 15 bp, Homo sapiens
aattcctagaagatg

SEQ ID NO: 87040 - DNA, 15 bp, Homo sapiens
gaattcctagaagat

SEQ ID NO: 87041 - DNA, 15 bp, Homo sapiens
agaattcctagaaga

SEQ ID NO: 87042 - DNA, 15 bp, Homo sapiens
aagaattcctagaag

SEQ ID NO: 87043 - DNA, 15 bp, Homo sapiens
aaagaattcctagaa

SEQ ID NO: 87044 - DNA, 15 bp, Homo sapiens
gaaagaattcctaga

SEQ ID NO: 87045 - DNA, 15 bp, Homo sapiens
agaaagaattcctag

SEQ ID NO: 87046 - DNA, 15 bp, Homo sapiens
gagaaagaattccta

SEQ ID NO: 87047 - DNA, 15 bp, Homo sapiens
agagaaagaattcct

SEQ ID NO: 87048 - DNA, 15 bp, Homo sapiens
cagagaaagaattcc

SEQ ID NO: 87049 - DNA, 15 bp, Homo sapiens
ccagagaaagaattc

SEQ ID NO: 87050 - DNA, 15 bp, Homo sapiens
cccagagaaagaatt

SEQ ID NO: 87051 - DNA, 15 bp, Homo sapiens
acccagagaaagaat

SEQ ID NO: 87052 - DNA, 15 bp, Homo sapiens
gacccagagaaagaa

SEQ ID NO: 87053 - DNA, 15 bp, Homo sapiens
tgacccagagaaaga

SEQ ID NO: 87054 - DNA, 15 bp, Homo sapiens
atgacccagagaaag

SEQ ID NO: 87055 - DNA, 15 bp, Homo sapiens
gatgacccagagaaa

SEQ ID NO: 87056 - DNA, 15 bp, Homo sapiens
ggatgacccagagaa

SEQ ID NO: 87057 - DNA, 15 bp, Homo sapiens
tggatgacccagaga

SEQ ID NO: 87058 - DNA, 15 bp, Homo sapiens
gtggatgacccagag

SEQ ID NO: 87059 - DNA, 15 bp, Homo sapiens
agtggatgacccaga

SEQ ID NO: 87060 - DNA, 15 bp, Homo sapiens
cagtggatgacccag

SEQ ID NO: 87061 - DNA, 15 bp, Homo sapiens
gcagtggatgaccca

SEQ ID NO: 87062 - DNA, 15 bp, Homo sapiens
agcagtggatgaccc

SEQ ID NO: 87063 - DNA, 15 bp, Homo sapiens
cagcagtggatgacc

SEQ ID NO: 87064 - DNA, 15 bp, Homo sapiens
tcagcagtggatgac

SEQ ID NO: 87065 - DNA, 15 bp, Homo sapiens
ctcagcagtggatga

SEQ ID NO: 87066 - DNA, 15 bp, Homo sapiens
gctcagcagtggatg

SEQ ID NO: 87067 - DNA, 15 bp, Homo sapiens
ggctcagcagtggat

SEQ ID NO: 87068 - DNA, 15 bp, Homo sapiens
gggctcagcagtgga

SEQ ID NO: 87069 - DNA, 15 bp, Homo sapiens
ggggctcagcagtgg

SEQ ID NO: 87070 - DNA, 15 bp, Homo sapiens
gggggctcagcagtg

SEQ ID NO: 87071 - DNA, 15 bp, Homo sapiens
agggggctcagcagt

SEQ ID NO: 87072 - DNA, 15 bp, Homo sapiens
gagggggctcagcag

SEQ ID NO: 87073 - DNA, 15 bp, Homo sapiens
ggagggggctcagca

SEQ ID NO: 87074 - DNA, 15 bp, Homo sapiens
gggagggggctcagc

SEQ ID NO: 87075 - DNA, 15 bp, Homo sapiens
ggggagggggctcag

SEQ ID NO: 87076 - DNA, 15 bp, Homo sapiens
tggggagggggctca

SEQ ID NO: 87077 - DNA, 15 bp, Homo sapiens
ctggggagggggctc

SEQ ID NO: 87078 - DNA, 15 bp, Homo sapiens
cctggggagggggct

SEQ ID NO: 87079 - DNA, 15 bp, Homo sapiens
tcctggggagggggc

SEQ ID NO: 87080 - DNA, 15 bp, Homo sapiens
ttcctggggaggggg

SEQ ID NO: 87081 - DNA, 15 bp, Homo sapiens
cttcctggggagggg

SEQ ID NO: 87082 - DNA, 15 bp, Homo sapiens
acttcctggggaggg

SEQ ID NO: 87083 - DNA, 15 bp, Homo sapiens
cacttcctggggagg

SEQ ID NO: 87084 - DNA, 15 bp, Homo sapiens
ccacttcctggggag

SEQ ID NO: 87085 - DNA, 15 bp, Homo sapiens
tccacttcctgggga

SEQ ID NO: 87086 - DNA, 15 bp, Homo sapiens
ttccacttcctgggg

SEQ ID NO: 87087 - DNA, 15 bp, Homo sapiens
attccacttcctggg

SEQ ID NO: 87088 - DNA, 15 bp, Homo sapiens
aattccacttcctgg

SEQ ID NO: 87089 - DNA, 15 bp, Homo sapiens
caattccacttcctg

SEQ ID NO: 87090 - DNA, 15 bp, Homo sapiens
acaattccacttcct

SEQ ID NO: 87091 - DNA, 15 bp, Homo sapiens
tacaattccacttcc

SEQ ID NO: 87092 - DNA, 15 bp, Homo sapiens
ttacaattccacttc

SEQ ID NO: 87093 - DNA, 15 bp, Homo sapiens
cttacaattccactt

SEQ ID NO: 87094 - DNA, 15 bp, Homo sapiens
acttacaattccact

SEQ ID NO: 87095 - DNA, 15 bp, Homo sapiens
cacttacaattccac

SEQ ID NO: 87096 - DNA, 15 bp, Homo sapiens
tcacttacaattcca

SEQ ID NO: 87097 - DNA, 15 bp, Homo sapiens
ttcacttacaattcc

SEQ ID NO: 87098 - DNA, 15 bp, Homo sapiens
tttcacttacaattc

SEQ ID NO: 87099 - DNA, 15 bp, Homo sapiens
ctttcacttacaatt

SEQ ID NO: 87100 - DNA, 15 bp, Homo sapiens
cctttcacttacaat

SEQ ID NO: 87101 - DNA, 15 bp, Homo sapiens
ccctttcacttacaa

SEQ ID NO: 87102 - DNA, 15 bp, Homo sapiens
cccctttcacttaca

SEQ ID NO: 87103 - DNA, 15 bp, Homo sapiens
tcccctttcacttac

SEQ ID NO: 87104 - DNA, 15 bp, Homo sapiens
ttcccctttcactta

SEQ ID NO: 87105 - DNA, 15 bp, Homo sapiens
tttcccctttcactt

SEQ ID NO: 87106 - DNA, 15 bp, Homo sapiens
ctttcccctttcact

SEQ ID NO: 87107 - DNA, 15 bp, Homo sapiens
cctttcccctttcac

SEQ ID NO: 87108 - DNA, 15 bp, Homo sapiens
gcctttcccctttca

SEQ ID NO: 87109 - DNA, 15 bp, Homo sapiens
tgcctttcccctttc

SEQ ID NO: 87110 - DNA, 15 bp, Homo sapiens
gtgcctttccccttt

SEQ ID NO: 87111 - DNA, 15 bp, Homo sapiens
agtgcctttcccctt

SEQ ID NO: 87112 - DNA, 15 bp, Homo sapiens
aagtgcctttcccct

SEQ ID NO: 87113 - DNA, 15 bp, Homo sapiens
caagtgcctttcccc

SEQ ID NO: 87114 - DNA, 15 bp, Homo sapiens
ccaagtgcctttccc

SEQ ID NO: 87115 - DNA, 15 bp, Homo sapiens
cccaagtgcctttcc

SEQ ID NO: 87116 - DNA, 15 bp, Homo sapiens
tcccaagtgcctttc

SEQ ID NO: 87117 - DNA, 15 bp, Homo sapiens
ctcccaagtgccttt

SEQ ID NO: 87118 - DNA, 15 bp, Homo sapiens
cctcccaagtgcctt

SEQ ID NO: 87119 - DNA, 15 bp, Homo sapiens
ccctcccaagtgcct

SEQ ID NO: 87120 - DNA, 15 bp, Homo sapiens
cccctcccaagtgcc

SEQ ID NO: 87121 - DNA, 15 bp, Homo sapiens
ccccctcccaagtgc

SEQ ID NO: 87122 - DNA, 15 bp, Homo sapiens
tccccctcccaagtg

SEQ ID NO: 87123 - DNA, 15 bp, Homo sapiens
ttccccctcccaagt

SEQ ID NO: 87124 - DNA, 15 bp, Homo sapiens
attccccctcccaag

SEQ ID NO: 87125 - DNA, 15 bp, Homo sapiens
cattccccctcccaa

SEQ ID NO: 87126 - DNA, 15 bp, Homo sapiens
tcattccccctccca

SEQ ID NO: 87127 - DNA, 15 bp, Homo sapiens
atcattccccctccc

SEQ ID NO: 87128 - DNA, 15 bp, Homo sapiens
catcattccccctcc

SEQ ID NO: 87129 - DNA, 15 bp, Homo sapiens
acatcattccccctc

SEQ ID NO: 87130 - DNA, 15 bp, Homo sapiens
aacatcattccccct

SEQ ID NO: 87131 - DNA, 15 bp, Homo sapiens
gaacatcattccccc

SEQ ID NO: 87132 - DNA, 15 bp, Homo sapiens
tgaacatcattcccc

SEQ ID NO: 87133 - DNA, 15 bp, Homo sapiens
ttgaacatcattccc

SEQ ID NO: 87134 - DNA, 15 bp, Homo sapiens
gttgaacatcattcc

SEQ ID NO: 87135 - DNA, 15 bp, Homo sapiens
tgttgaacatcattc

SEQ ID NO: 87136 - DNA, 15 bp, Homo sapiens
ttgttgaacatcatt

SEQ ID NO: 87137 - DNA, 15 bp, Homo sapiens
cttgttgaacatcat

SEQ ID NO: 87138 - DNA, 15 bp, Homo sapiens
tcttgttgaacatca

SEQ ID NO: 87139 - DNA, 15 bp, Homo sapiens
gtcttgttgaacatc

SEQ ID NO: 87140 - DNA, 15 bp, Homo sapiens
agtcttgttgaacat

SEQ ID NO: 87141 - DNA, 15 bp, Homo sapiens
gagtcttgttgaaca

SEQ ID NO: 87142 - DNA, 15 bp, Homo sapiens
ggagtcttgttgaac

SEQ ID NO: 87143 - DNA, 15 bp, Homo sapiens
aggagtcttgttgaa

SEQ ID NO: 87144 - DNA, 15 bp, Homo sapiens
aaggagtcttgttga

SEQ ID NO: 87145 - DNA, 15 bp, Homo sapiens
caaggagtcttgttg

SEQ ID NO: 87146 - DNA, 15 bp, Homo sapiens
tcaaggagtcttgtt

SEQ ID NO: 87147 - DNA, 15 bp, Homo sapiens
ttcaaggagtcttgt

SEQ ID NO: 87148 - DNA, 15 bp, Homo sapiens
tttcaaggagtcttg

SEQ ID NO: 87149 - DNA, 15 bp, Homo sapiens
ttttcaaggagtctt

SEQ ID NO: 87150 - DNA, 15 bp, Homo sapiens
cttttcaaggagtct

SEQ ID NO: 87151 - DNA, 15 bp, Homo sapiens
acttttcaaggagtc

SEQ ID NO: 87152 - DNA, 15 bp, Homo sapiens
gacttttcaaggagt

SEQ ID NO: 87153 - DNA, 15 bp, Homo sapiens
tgacttttcaaggag

SEQ ID NO: 87154 - DNA, 15 bp, Homo sapiens
ctgacttttcaagga

SEQ ID NO: 87155 - DNA, 15 bp, Homo sapiens
gctgacttttcaagg

SEQ ID NO: 87156 - DNA, 15 bp, Homo sapiens
ggctgacttttcaag

SEQ ID NO: 87157 - DNA, 15 bp, Homo sapiens
cggctgacttttcaa

SEQ ID NO: 87158 - DNA, 15 bp, Homo sapiens
ccggctgacttttca

SEQ ID NO: 87159 - DNA, 15 bp, Homo sapiens
cccggctgacttttc

SEQ ID NO: 87160 - DNA, 15 bp, Homo sapiens
ccccggctgactttt

SEQ ID NO: 87161 - DNA, 15 bp, Homo sapiens
accccggctgacttt

SEQ ID NO: 87162 - DNA, 15 bp, Homo sapiens
gaccccggctgactt

SEQ ID NO: 87163 - DNA, 15 bp, Homo sapiens
ggaccccggctgact

SEQ ID NO: 87164 - DNA, 15 bp, Homo sapiens
tggaccccggctgac

SEQ ID NO: 87165 - DNA, 15 bp, Homo sapiens
ctggaccccggctga

SEQ ID NO: 87166 - DNA, 15 bp, Homo sapiens
cctggaccccggctg

SEQ ID NO: 87167 - DNA, 15 bp, Homo sapiens
gcctggaccccggct

SEQ ID NO: 87168 - DNA, 15 bp, Homo sapiens
tgcctggaccccggc

SEQ ID NO: 87169 - DNA, 15 bp, Homo sapiens
gtgcctggaccccgg

SEQ ID NO: 87170 - DNA, 15 bp, Homo sapiens
cgtgcctggaccccg

SEQ ID NO: 87171 - DNA, 15 bp, Homo sapiens
ccgtgcctggacccc

SEQ ID NO: 87172 - DNA, 15 bp, Homo sapiens
accgtgcctggaccc

SEQ ID NO: 87173 - DNA, 15 bp, Homo sapiens
caccgtgcctggacc

SEQ ID NO: 87174 - DNA, 15 bp, Homo sapiens
ccaccgtgcctggac

SEQ ID NO: 87175 - DNA, 15 bp, Homo sapiens
gccaccgtgcctgga

SEQ ID NO: 87176 - DNA, 15 bp, Homo sapiens
gtgctgggattacag

SEQ ID NO: 87177 - DNA, 15 bp, Homo sapiens
agtgctgggattaca

SEQ ID NO: 87178 - DNA, 15 bp, Homo sapiens
aagtgctgggattac

SEQ ID NO: 87179 - DNA, 15 bp, Homo sapiens
tgcctcggcctccca

SEQ ID NO: 87180 - DNA, 15 bp, Homo sapiens
ctgcctcggcctccc

SEQ ID NO: 87181 - DNA, 15 bp, Homo sapiens
cctgcctcggcctcc

SEQ ID NO: 87182 - DNA, 15 bp, Homo sapiens
acctgcctcggcctc

SEQ ID NO: 87183 - DNA, 15 bp, Homo sapiens
cacctgcctcggcct

SEQ ID NO: 87184 - DNA, 15 bp, Homo sapiens
ccacctgcctcggcc

SEQ ID NO: 87185 - DNA, 15 bp, Homo sapiens
cccacctgcctcggc

SEQ ID NO: 87186 - DNA, 15 bp, Homo sapiens
acccacctgcctcgg

SEQ ID NO: 87187 - DNA, 15 bp, Homo sapiens
gacccacctgcctcg

SEQ ID NO: 87188 - DNA, 15 bp, Homo sapiens
tgacccacctgcctc

SEQ ID NO: 87189 - DNA, 15 bp, Homo sapiens
gtgacccacctgcct

SEQ ID NO: 87190 - DNA, 15 bp, Homo sapiens
ggtgacccacctgcc

SEQ ID NO: 87191 - DNA, 15 bp, Homo sapiens
aggtgacccacctgc

SEQ ID NO: 87192 - DNA, 15 bp, Homo sapiens
caggtgacccacctg

SEQ ID NO: 87193 - DNA, 15 bp, Homo sapiens
tcaggtgacccacct

SEQ ID NO: 87194 - DNA, 15 bp, Homo sapiens
ctcaggtgacccacc

SEQ ID NO: 87195 - DNA, 15 bp, Homo sapiens
cctcaggtgacccac

SEQ ID NO: 87196 - DNA, 15 bp, Homo sapiens
acctcaggtgaccca

SEQ ID NO: 87197 - DNA, 15 bp, Homo sapiens
gacctcaggtgaccc

SEQ ID NO: 87198 - DNA, 15 bp, Homo sapiens
tgacctcaggtgacc

SEQ ID NO: 87199 - DNA, 15 bp, Homo sapiens
ctgacctcaggtgac

SEQ ID NO: 87200 - DNA, 15 bp, Homo sapiens
aaactcctgacctca

SEQ ID NO: 87201 - DNA, 15 bp, Homo sapiens
caaactcctgacctc

SEQ ID NO: 87202 - DNA, 15 bp, Homo sapiens
tcaaactcctgacct

SEQ ID NO: 87203 - DNA, 15 bp, Homo sapiens
ctcaaactcctgacc

SEQ ID NO: 87204 - DNA, 15 bp, Homo sapiens
tctcaaactcctgac

SEQ ID NO: 87205 - DNA, 15 bp, Homo sapiens
gtctcaaactcctga

SEQ ID NO: 87206 - DNA, 15 bp, Homo sapiens
ggtctcaaactcctg

SEQ ID NO: 87207 - DNA, 15 bp, Homo sapiens
tggtctcaaactcct

SEQ ID NO: 87208 - DNA, 15 bp, Homo sapiens
ctggtctcaaactcc

SEQ ID NO: 87209 - DNA, 15 bp, Homo sapiens
gctggtctcaaactc

SEQ ID NO: 87210 - DNA, 15 bp, Homo sapiens
ggctggtctcaaact

SEQ ID NO: 87211 - DNA, 15 bp, Homo sapiens
aggctggtctcaaac

SEQ ID NO: 87212 - DNA, 15 bp, Homo sapiens
caggctggtctcaaa

SEQ ID NO: 87213 - DNA, 15 bp, Homo sapiens
tcaggctggtctcaa

SEQ ID NO: 87214 - DNA, 15 bp, Homo sapiens
gtcaggctggtctca

SEQ ID NO: 87215 - DNA, 15 bp, Homo sapiens
ggtcaggctggtctc

SEQ ID NO: 87216 - DNA, 15 bp, Homo sapiens
tggtcaggctggtct

SEQ ID NO: 87217 - DNA, 15 bp, Homo sapiens
ttggtcaggctggtc

SEQ ID NO: 87218 - DNA, 15 bp, Homo sapiens
gttggtcaggctggt

SEQ ID NO: 87219 - DNA, 15 bp, Homo sapiens
tgttggtcaggctgg

SEQ ID NO: 87220 - DNA, 15 bp, Homo sapiens
atgttggtcaggctg

SEQ ID NO: 87221 - DNA, 15 bp, Homo sapiens
catgttggtcaggct

SEQ ID NO: 87222 - DNA, 15 bp, Homo sapiens
ccatgttggtcaggc

SEQ ID NO: 87223 - DNA, 15 bp, Homo sapiens
accatgttggtcagg

SEQ ID NO: 87224 - DNA, 15 bp, Homo sapiens
caccatgttggtcag

SEQ ID NO: 87225 - DNA, 15 bp, Homo sapiens
tcaccatgttggtca

SEQ ID NO: 87226 - DNA, 15 bp, Homo sapiens
ttcaccatgttggtc

SEQ ID NO: 87227 - DNA, 15 bp, Homo sapiens
tttcaccatgttggt

SEQ ID NO: 87228 - DNA, 15 bp, Homo sapiens
ggtttcaccatgttg

SEQ ID NO: 87229 - DNA, 15 bp, Homo sapiens
gggtttcaccatgtt

SEQ ID NO: 87230 - DNA, 15 bp, Homo sapiens
agggtttcaccatgt

SEQ ID NO: 87231 - DNA, 15 bp, Homo sapiens
cagggtttcaccatg

SEQ ID NO: 87232 - DNA, 15 bp, Homo sapiens
gagacagggtttcac

SEQ ID NO: 87233 - DNA, 15 bp, Homo sapiens
agagacagggtttca

SEQ ID NO: 87234 - DNA, 15 bp, Homo sapiens
attagtagagacagg

SEQ ID NO: 87235 - DNA, 15 bp, Homo sapiens
aattagtagagacag

SEQ ID NO: 87236 - DNA, 15 bp, Homo sapiens
taattagtagagaca

SEQ ID NO: 87237 - DNA, 15 bp, Homo sapiens
ctaattagtagagac

SEQ ID NO: 87238 - DNA, 15 bp, Homo sapiens
tctaattagtagaga

SEQ ID NO: 87239 - DNA, 15 bp, Homo sapiens
atctaattagtagag

SEQ ID NO: 87240 - DNA, 15 bp, Homo sapiens
catctaattagtaga

SEQ ID NO: 87241 - DNA, 15 bp, Homo sapiens
ccatctaattagtag

SEQ ID NO: 87242 - DNA, 15 bp, Homo sapiens
cccatctaattagta

SEQ ID NO: 87243 - DNA, 15 bp, Homo sapiens
gcccatctaattagt

SEQ ID NO: 87244 - DNA, 15 bp, Homo sapiens
cgcccatctaattag

SEQ ID NO: 87245 - DNA, 15 bp, Homo sapiens
acgcccatctaatta

SEQ ID NO: 87246 - DNA, 15 bp, Homo sapiens
cacgcccatctaatt

SEQ ID NO: 87247 - DNA, 15 bp, Homo sapiens
ccacgcccatctaat

SEQ ID NO: 87248 - DNA, 15 bp, Homo sapiens
accacgcccatctaa

SEQ ID NO: 87249 - DNA, 15 bp, Homo sapiens
caccacgcccatcta

SEQ ID NO: 87250 - DNA, 15 bp, Homo sapiens
ccaccacgcccatct

SEQ ID NO: 87251 - DNA, 15 bp, Homo sapiens
accaccacgcccatc

SEQ ID NO: 87252 - DNA, 15 bp, Homo sapiens
caccaccacgcccat

SEQ ID NO: 87253 - DNA, 15 bp, Homo sapiens
ccaccaccacgccca

SEQ ID NO: 87254 - DNA, 15 bp, Homo sapiens
cccaccaccacgccc

SEQ ID NO: 87255 - DNA, 15 bp, Homo sapiens
gcccaccaccacgcc

SEQ ID NO: 87256 - DNA, 15 bp, Homo sapiens
cgcccaccaccacgc

SEQ ID NO: 87257 - DNA, 15 bp, Homo sapiens
gcgcccaccaccacg

SEQ ID NO: 87258 - DNA, 15 bp, Homo sapiens
ggcgcccaccaccac

SEQ ID NO: 87259 - DNA, 15 bp, Homo sapiens
aggcgcccaccacca

SEQ ID NO: 87260 - DNA, 15 bp, Homo sapiens
caggcgcccaccacc

SEQ ID NO: 87261 - DNA, 15 bp, Homo sapiens
acaggcgcccaccac

SEQ ID NO: 87262 - DNA, 15 bp, Homo sapiens
tacaggcgcccacca

SEQ ID NO: 87263 - DNA, 15 bp, Homo sapiens
ttacaggcgcccacc

SEQ ID NO: 87264 - DNA, 15 bp, Homo sapiens
attacaggcgcccac

SEQ ID NO: 87265 - DNA, 15 bp, Homo sapiens
ctgggattacaggcg

SEQ ID NO: 87266 - DNA, 15 bp, Homo sapiens
gctgggattacaggc

SEQ ID NO: 87267 - DNA, 15 bp, Homo sapiens
agctgggattacagg

SEQ ID NO: 87268 - DNA, 15 bp, Homo sapiens
tagctgggattacag

SEQ ID NO: 87269 - DNA, 15 bp, Homo sapiens
gtagctgggattaca

SEQ ID NO: 87270 - DNA, 15 bp, Homo sapiens
agtagctgggattac

SEQ ID NO: 87271 - DNA, 15 bp, Homo sapiens
gagtagctgggatta

SEQ ID NO: 87272 - DNA, 15 bp, Homo sapiens
tgagtagctgggatt

SEQ ID NO: 87273 - DNA, 15 bp, Homo sapiens
ctgagtagctgggat

SEQ ID NO: 87274 - DNA, 15 bp, Homo sapiens
cctgagtagctggga

SEQ ID NO: 87275 - DNA, 15 bp, Homo sapiens
tcctgagtagctggg

SEQ ID NO: 87276 - DNA, 15 bp, Homo sapiens
ctcctgagtagctgg

SEQ ID NO: 87277 - DNA, 15 bp, Homo sapiens
cctcctgagtagctg

SEQ ID NO: 87278 - DNA, 15 bp, Homo sapiens
gcctcctgagtagct

SEQ ID NO: 87279 - DNA, 15 bp, Homo sapiens
agcctcctgagtagc

SEQ ID NO: 87280 - DNA, 15 bp, Homo sapiens
cagcctcctgagtag

SEQ ID NO: 87281 - DNA, 15 bp, Homo sapiens
tcagcctcctgagta

SEQ ID NO: 87282 - DNA, 15 bp, Homo sapiens
ctcagcctcctgagt

SEQ ID NO: 87283 - DNA, 15 bp, Homo sapiens
cctcagcctcctgag

SEQ ID NO: 87284 - DNA, 15 bp, Homo sapiens
gcctcagcctcctga

SEQ ID NO: 87285 - DNA, 15 bp, Homo sapiens
tgcctcagcctcctg

SEQ ID NO: 87286 - DNA, 15 bp, Homo sapiens
ctgcctcagcctcct

SEQ ID NO: 87287 - DNA, 15 bp, Homo sapiens
aattctcctgcctca

SEQ ID NO: 87288 - DNA, 15 bp, Homo sapiens
taattctcctgcctc

SEQ ID NO: 87289 - DNA, 15 bp, Homo sapiens
gtaattctcctgcct

SEQ ID NO: 87290 - DNA, 15 bp, Homo sapiens
agtaattctcctgcc

SEQ ID NO: 87291 - DNA, 15 bp, Homo sapiens
aagtaattctcctgc

SEQ ID NO: 87292 - DNA, 15 bp, Homo sapiens
caagtaattctcctg

SEQ ID NO: 87293 - DNA, 15 bp, Homo sapiens
tcaagtaattctcct

SEQ ID NO: 87294 - DNA, 15 bp, Homo sapiens
gtcaagtaattctcc

SEQ ID NO: 87295 - DNA, 15 bp, Homo sapiens
ggtcaagtaattctc

SEQ ID NO: 87296 - DNA, 15 bp, Homo sapiens
gggtcaagtaattct

SEQ ID NO: 87297 - DNA, 15 bp, Homo sapiens
agggtcaagtaattc

SEQ ID NO: 87298 - DNA, 15 bp, Homo sapiens
cagggtcaagtaatt

SEQ ID NO: 87299 - DNA, 15 bp, Homo sapiens
ccagggtcaagtaat

SEQ ID NO: 87300 - DNA, 15 bp, Homo sapiens
cccagggtcaagtaa

SEQ ID NO: 87301 - DNA, 15 bp, Homo sapiens
tcccagggtcaagta

SEQ ID NO: 87302 - DNA, 15 bp, Homo sapiens
ctcccagggtcaagt

SEQ ID NO: 87303 - DNA, 15 bp, Homo sapiens
cctcccagggtcaag

SEQ ID NO: 87304 - DNA, 15 bp, Homo sapiens
gcctcccagggtcaa

SEQ ID NO: 87305 - DNA, 15 bp, Homo sapiens
tgcctcccagggtca

SEQ ID NO: 87306 - DNA, 15 bp, Homo sapiens
ctgcctcccagggtc

SEQ ID NO: 87307 - DNA, 15 bp, Homo sapiens
tctgcctcccagggt

SEQ ID NO: 87308 - DNA, 15 bp, Homo sapiens
ctctgcctcccaggg

SEQ ID NO: 87309 - DNA, 15 bp, Homo sapiens
cctctgcctcccagg

SEQ ID NO: 87310 - DNA, 15 bp, Homo sapiens
acctctgcctcccag

SEQ ID NO: 87311 - DNA, 15 bp, Homo sapiens
aacctctgcctccca

SEQ ID NO: 87312 - DNA, 15 bp, Homo sapiens
caacctctgcctccc

SEQ ID NO: 87313 - DNA, 15 bp, Homo sapiens
gcaacctctgcctcc

SEQ ID NO: 87314 - DNA, 15 bp, Homo sapiens
cgcaacctctgcctc

SEQ ID NO: 87315 - DNA, 15 bp, Homo sapiens
ccgcaacctctgcct

SEQ ID NO: 87316 - DNA, 15 bp, Homo sapiens
accgcaacctctgcc

SEQ ID NO: 87317 - DNA, 15 bp, Homo sapiens
taccgcaacctctgc

SEQ ID NO: 87318 - DNA, 15 bp, Homo sapiens
ttaccgcaacctctg

SEQ ID NO: 87319 - DNA, 15 bp, Homo sapiens
cttaccgcaacctct

SEQ ID NO: 87320 - DNA, 15 bp, Homo sapiens
gcttaccgcaacctc

SEQ ID NO: 87321 - DNA, 15 bp, Homo sapiens
agcttaccgcaacct

SEQ ID NO: 87322 - DNA, 15 bp, Homo sapiens
cagcttaccgcaacc

SEQ ID NO: 87323 - DNA, 15 bp, Homo sapiens
tcagcttaccgcaac

SEQ ID NO: 87324 - DNA, 15 bp, Homo sapiens
ctcagcttaccgcaa

SEQ ID NO: 87325 - DNA, 15 bp, Homo sapiens
tctcagcttaccgca

SEQ ID NO: 87326 - DNA, 15 bp, Homo sapiens
atctcagcttaccgc

SEQ ID NO: 87327 - DNA, 15 bp, Homo sapiens
gatctcagcttaccg

SEQ ID NO: 87328 - DNA, 15 bp, Homo sapiens
cgatctcagcttacc

SEQ ID NO: 87329 - DNA, 15 bp, Homo sapiens
gcgatctcagcttac

SEQ ID NO: 87330 - DNA, 15 bp, Homo sapiens
cgcgatctcagctta

SEQ ID NO: 87331 - DNA, 15 bp, Homo sapiens
gcgcgatctcagctt

SEQ ID NO: 87332 - DNA, 15 bp, Homo sapiens
ggcgcgatctcagct

SEQ ID NO: 87333 - DNA, 15 bp, Homo sapiens
aggcgcgatctcagc

SEQ ID NO: 87334 - DNA, 15 bp, Homo sapiens
gaggcgcgatctcag

SEQ ID NO: 87335 - DNA, 15 bp, Homo sapiens
agaggcgcgatctca

SEQ ID NO: 87336 - DNA, 15 bp, Homo sapiens
cagaggcgcgatctc

SEQ ID NO: 87337 - DNA, 15 bp, Homo sapiens
gcagaggcgcgatct

SEQ ID NO: 87338 - DNA, 15 bp, Homo sapiens
tgcagaggcgcgatc

SEQ ID NO: 87339 - DNA, 15 bp, Homo sapiens
gtgcagaggcgcgat

SEQ ID NO: 87340 - DNA, 15 bp, Homo sapiens
agtgcagaggcgcga

SEQ ID NO: 87341 - DNA, 15 bp, Homo sapiens
gagtgcagaggcgcg

SEQ ID NO: 87342 - DNA, 15 bp, Homo sapiens
ggagtgcagaggcgc

SEQ ID NO: 87343 - DNA, 15 bp, Homo sapiens
tggagtgcagaggcg

SEQ ID NO: 87344 - DNA, 15 bp, Homo sapiens
cgcccaggctggagt

SEQ ID NO: 87345 - DNA, 15 bp, Homo sapiens
tcgcccaggctggag

SEQ ID NO: 87346 - DNA, 15 bp, Homo sapiens
gtcgcccaggctgga

SEQ ID NO: 87347 - DNA, 15 bp, Homo sapiens
tgtcgcccaggctgg

SEQ ID NO: 87348 - DNA, 15 bp, Homo sapiens
ttgtcgcccaggctg

SEQ ID NO: 87349 - DNA, 15 bp, Homo sapiens
cttgtcgcccaggct

SEQ ID NO: 87350 - DNA, 15 bp, Homo sapiens
tcttgtcgcccaggc

SEQ ID NO: 87351 - DNA, 15 bp, Homo sapiens
ctcttgtcgcccagg

SEQ ID NO: 87352 - DNA, 15 bp, Homo sapiens
actcttgtcgcccag

SEQ ID NO: 87353 - DNA, 15 bp, Homo sapiens
cactcttgtcgccca

SEQ ID NO: 87354 - DNA, 15 bp, Homo sapiens
tcactcttgtcgccc

SEQ ID NO: 87355 - DNA, 15 bp, Homo sapiens
ttcactcttgtcgcc

SEQ ID NO: 87356 - DNA, 15 bp, Homo sapiens
tttcactcttgtcgc

SEQ ID NO: 87357 - DNA, 15 bp, Homo sapiens
gtttcactcttgtcg

SEQ ID NO: 87358 - DNA, 15 bp, Homo sapiens
agtttcactcttgtc

SEQ ID NO: 87359 - DNA, 15 bp, Homo sapiens
gagtttcactcttgt

SEQ ID NO: 87360 - DNA, 15 bp, Homo sapiens
agagtttcactcttg

SEQ ID NO: 87361 - DNA, 15 bp, Homo sapiens
cagagtttcactctt

SEQ ID NO: 87362 - DNA, 15 bp, Homo sapiens
acagagtttcactct

SEQ ID NO: 87363 - DNA, 15 bp, Homo sapiens
gacagagtttcactc

SEQ ID NO: 87364 - DNA, 15 bp, Homo sapiens
agacagagtttcact

SEQ ID NO: 87365 - DNA, 15 bp, Homo sapiens
gagacagagtttcac

SEQ ID NO: 87366 - DNA, 15 bp, Homo sapiens
tgagacagagtttca

SEQ ID NO: 87367 - DNA, 15 bp, Homo sapiens
ttgagacagagtttc

SEQ ID NO: 87368 - DNA, 15 bp, Homo sapiens
tttgagacagagttt

SEQ ID NO: 87369 - DNA, 15 bp, Homo sapiens
ttttgagacagagtt

SEQ ID NO: 87370 - DNA, 15 bp, Homo sapiens
tttttgagacagagt

SEQ ID NO: 87371 - DNA, 15 bp, Homo sapiens
ttttttgagacagag

SEQ ID NO: 87372 - DNA, 15 bp, Homo sapiens
tttttttgagacaga

SEQ ID NO: 87373 - DNA, 15 bp, Homo sapiens
ttttttttgagacag

SEQ ID NO: 87374 - DNA, 15 bp, Homo sapiens
tttttttttgagaca

SEQ ID NO: 87375 - DNA, 15 bp, Homo sapiens
ctttctttttttttt

SEQ ID NO: 87376 - DNA, 15 bp, Homo sapiens
tctttcttttttttt

SEQ ID NO: 87377 - DNA, 15 bp, Homo sapiens
ttctttctttttttt

SEQ ID NO: 87378 - DNA, 15 bp, Homo sapiens
tttctttcttttttt

SEQ ID NO: 87379 - DNA, 15 bp, Homo sapiens
ctttctttctttttt

SEQ ID NO: 87380 - DNA, 15 bp, Homo sapiens
tctttctttcttttt

SEQ ID NO: 87381 - DNA, 15 bp, Homo sapiens
ttctttctttctttt

SEQ ID NO: 87382 - DNA, 15 bp, Homo sapiens
tttctttctttcttt

SEQ ID NO: 87383 - DNA, 15 bp, Homo sapiens
ttttctttctttctt

SEQ ID NO: 87384 - DNA, 15 bp, Homo sapiens
ttcttttctttcttt

SEQ ID NO: 87385 - DNA, 15 bp, Homo sapiens
tttcttttctttctt

SEQ ID NO: 87386 - DNA, 15 bp, Homo sapiens
ttttcttttctttct

SEQ ID NO: 87387 - DNA, 15 bp, Homo sapiens
cttttcttttctttc

SEQ ID NO: 87388 - DNA, 15 bp, Homo sapiens
acttttcttttcttt

SEQ ID NO: 87389 - DNA, 15 bp, Homo sapiens
gacttttcttttctt

SEQ ID NO: 87390 - DNA, 15 bp, Homo sapiens
tgacttttcttttct

SEQ ID NO: 87391 - DNA, 15 bp, Homo sapiens
ctgacttttcttttc

SEQ ID NO: 87392 - DNA, 15 bp, Homo sapiens
gctgacttttctttt

SEQ ID NO: 87393 - DNA, 15 bp, Homo sapiens
ggctgacttttcttt

SEQ ID NO: 87394 - DNA, 15 bp, Homo sapiens
cggctgacttttctt

SEQ ID NO: 87395 - DNA, 15 bp, Homo sapiens
ccggctgacttttct

SEQ ID NO: 87396 - DNA, 15 bp, Homo sapiens
tccggctgacttttc

SEQ ID NO: 87397 - DNA, 15 bp, Homo sapiens
gtccggctgactttt

SEQ ID NO: 87398 - DNA, 15 bp, Homo sapiens
tgtccggctgacttt

SEQ ID NO: 87399 - DNA, 15 bp, Homo sapiens
gtgtccggctgactt

SEQ ID NO: 87400 - DNA, 15 bp, Homo sapiens
agtgtccggctgact

SEQ ID NO: 87401 - DNA, 15 bp, Homo sapiens
gagtgtccggctgac

SEQ ID NO: 87402 - DNA, 15 bp, Homo sapiens
agagtgtccggctga

SEQ ID NO: 87403 - DNA, 15 bp, Homo sapiens
cagagtgtccggctg

SEQ ID NO: 87404 - DNA, 15 bp, Homo sapiens
tcagagtgtccggct

SEQ ID NO: 87405 - DNA, 15 bp, Homo sapiens
ttcagagtgtccggc

SEQ ID NO: 87406 - DNA, 15 bp, Homo sapiens
cttcagagtgtccgg

SEQ ID NO: 87407 - DNA, 15 bp, Homo sapiens
gcttcagagtgtccg

SEQ ID NO: 87408 - DNA, 15 bp, Homo sapiens
agcttcagagtgtcc

SEQ ID NO: 87409 - DNA, 15 bp, Homo sapiens
gagcttcagagtgtc

SEQ ID NO: 87410 - DNA, 15 bp, Homo sapiens
agagcttcagagtgt

SEQ ID NO: 87411 - DNA, 15 bp, Homo sapiens
cagagcttcagagtg

SEQ ID NO: 87412 - DNA, 15 bp, Homo sapiens
acagagcttcagagt

SEQ ID NO: 87413 - DNA, 15 bp, Homo sapiens
cacagagcttcagag

SEQ ID NO: 87414 - DNA, 15 bp, Homo sapiens
ccacagagcttcaga

SEQ ID NO: 87415 - DNA, 15 bp, Homo sapiens
gccacagagcttcag

SEQ ID NO: 87416 - DNA, 15 bp, Homo sapiens
tgccacagagcttca

SEQ ID NO: 87417 - DNA, 15 bp, Homo sapiens
ctgccacagagcttc

SEQ ID NO: 87418 - DNA, 15 bp, Homo sapiens
tctgccacagagctt

SEQ ID NO: 87419 - DNA, 15 bp, Homo sapiens
atctgccacagagct

SEQ ID NO: 87420 - DNA, 15 bp, Homo sapiens
aatctgccacagagc

SEQ ID NO: 87421 - DNA, 15 bp, Homo sapiens
aaatctgccacagag

SEQ ID NO: 87422 - DNA, 15 bp, Homo sapiens
caaatctgccacaga

SEQ ID NO: 87423 - DNA, 15 bp, Homo sapiens
ccaaatctgccacag

SEQ ID NO: 87424 - DNA, 15 bp, Homo sapiens
gccaaatctgccaca

SEQ ID NO: 87425 - DNA, 15 bp, Homo sapiens
agccaaatctgccac

SEQ ID NO: 87426 - DNA, 15 bp, Homo sapiens
cagccaaatctgcca

SEQ ID NO: 87427 - DNA, 15 bp, Homo sapiens
acagccaaatctgcc

SEQ ID NO: 87428 - DNA, 15 bp, Homo sapiens
cacagccaaatctgc

SEQ ID NO: 87429 - DNA, 15 bp, Homo sapiens
acacagccaaatctg

SEQ ID NO: 87430 - DNA, 15 bp, Homo sapiens
cacacagccaaatct

SEQ ID NO: 87431 - DNA, 15 bp, Homo sapiens
gcacacagccaaatc

SEQ ID NO: 87432 - DNA, 15 bp, Homo sapiens
agcacacagccaaat

SEQ ID NO: 87433 - DNA, 15 bp, Homo sapiens
tagcacacagccaaa

SEQ ID NO: 87434 - DNA, 15 bp, Homo sapiens
gtagcacacagccaa

SEQ ID NO: 87435 - DNA, 15 bp, Homo sapiens
cgtagcacacagcca

SEQ ID NO: 87436 - DNA, 15 bp, Homo sapiens
ccgtagcacacagcc

SEQ ID NO: 87437 - DNA, 15 bp, Homo sapiens
gccgtagcacacagc

SEQ ID NO: 87438 - DNA, 15 bp, Homo sapiens
ggccgtagcacacag

SEQ ID NO: 87439 - DNA, 15 bp, Homo sapiens
aggccgtagcacaca

SEQ ID NO: 87440 - DNA, 15 bp, Homo sapiens
taggccgtagcacac

SEQ ID NO: 87441 - DNA, 15 bp, Homo sapiens
ttaggccgtagcaca

SEQ ID NO: 87442 - DNA, 15 bp, Homo sapiens
tttaggccgtagcac

SEQ ID NO: 87443 - DNA, 15 bp, Homo sapiens
ttttaggccgtagca

SEQ ID NO: 87444 - DNA, 15 bp, Homo sapiens
attttaggccgtagc

SEQ ID NO: 87445 - DNA, 15 bp, Homo sapiens
aattttaggccgtag

SEQ ID NO: 87446 - DNA, 15 bp, Homo sapiens
caattttaggccgta

SEQ ID NO: 87447 - DNA, 15 bp, Homo sapiens
ccaattttaggccgt

SEQ ID NO: 87448 - DNA, 15 bp, Homo sapiens
tccaattttaggccg

SEQ ID NO: 87449 - DNA, 15 bp, Homo sapiens
ctccaattttaggcc

SEQ ID NO: 87450 - DNA, 15 bp, Homo sapiens
tctccaattttaggc

SEQ ID NO: 87451 - DNA, 15 bp, Homo sapiens
gtctccaattttagg

SEQ ID NO: 87452 - DNA, 15 bp, Homo sapiens
cgtctccaattttag

SEQ ID NO: 87453 - DNA, 15 bp, Homo sapiens
ccgtctccaatttta

SEQ ID NO: 87454 - DNA, 15 bp, Homo sapiens
gccgtctccaatttt

SEQ ID NO: 87455 - DNA, 15 bp, Homo sapiens
tgccgtctccaattt

SEQ ID NO: 87456 - DNA, 15 bp, Homo sapiens
ttgccgtctccaatt

SEQ ID NO: 87457 - DNA, 15 bp, Homo sapiens
tttgccgtctccaat

SEQ ID NO: 87458 - DNA, 15 bp, Homo sapiens
ctttgccgtctccaa

SEQ ID NO: 87459 - DNA, 15 bp, Homo sapiens
actttgccgtctcca

SEQ ID NO: 87460 - DNA, 15 bp, Homo sapiens
cactttgccgtctcc

SEQ ID NO: 87461 - DNA, 15 bp, Homo sapiens
ccactttgccgtctc

SEQ ID NO: 87462 - DNA, 15 bp, Homo sapiens
tccactttgccgtct

SEQ ID NO: 87463 - DNA, 15 bp, Homo sapiens
ttccactttgccgtc

SEQ ID NO: 87464 - DNA, 15 bp, Homo sapiens
tttccactttgccgt

SEQ ID NO: 87465 - DNA, 15 bp, Homo sapiens
gtttccactttgccg

SEQ ID NO: 87466 - DNA, 15 bp, Homo sapiens
cgtttccactttgcc

SEQ ID NO: 87467 - DNA, 15 bp, Homo sapiens
ccgtttccactttgc

SEQ ID NO: 87468 - DNA, 15 bp, Homo sapiens
accgtttccactttg

SEQ ID NO: 87469 - DNA, 15 bp, Homo sapiens
aaccgtttccacttt

SEQ ID NO: 87470 - DNA, 15 bp, Homo sapiens
aaaccgtttccactt

SEQ ID NO: 87471 - DNA, 15 bp, Homo sapiens
taaaccgtttccact

SEQ ID NO: 87472 - DNA, 15 bp, Homo sapiens
ctaaaccgtttccac

SEQ ID NO: 87473 - DNA, 15 bp, Homo sapiens
cctaaaccgtttcca

SEQ ID NO: 87474 - DNA, 15 bp, Homo sapiens
ccctaaaccgtttcc

SEQ ID NO: 87475 - DNA, 15 bp, Homo sapiens
cccctaaaccgtttc

SEQ ID NO: 87476 - DNA, 15 bp, Homo sapiens
tcccctaaaccgttt

SEQ ID NO: 87477 - DNA, 15 bp, Homo sapiens
ctcccctaaaccgtt

SEQ ID NO: 87478 - DNA, 15 bp, Homo sapiens
cctcccctaaaccgt

SEQ ID NO: 87479 - DNA, 15 bp, Homo sapiens
tcctcccctaaaccg

SEQ ID NO: 87480 - DNA, 15 bp, Homo sapiens
ctcctcccctaaacc

SEQ ID NO: 87481 - DNA, 15 bp, Homo sapiens
actcctcccctaaac

SEQ ID NO: 87482 - DNA, 15 bp, Homo sapiens
tactcctcccctaaa

SEQ ID NO: 87483 - DNA, 15 bp, Homo sapiens
ctactcctcccctaa

SEQ ID NO: 87484 - DNA, 15 bp, Homo sapiens
tctactcctccccta

SEQ ID NO: 87485 - DNA, 15 bp, Homo sapiens
ttctactcctcccct

SEQ ID NO: 87486 - DNA, 15 bp, Homo sapiens
cttctactcctcccc

SEQ ID NO: 87487 - DNA, 15 bp, Homo sapiens
gcttctactcctccc

SEQ ID NO: 87488 - DNA, 15 bp, Homo sapiens
agcttctactcctcc

SEQ ID NO: 87489 - DNA, 15 bp, Homo sapiens
aagcttctactcctc

SEQ ID NO: 87490 - DNA, 15 bp, Homo sapiens
aaagcttctactcct

SEQ ID NO: 87491 - DNA, 15 bp, Homo sapiens
caaagcttctactcc

SEQ ID NO: 87492 - DNA, 15 bp, Homo sapiens
gcaaagcttctactc

SEQ ID NO: 87493 - DNA, 15 bp, Homo sapiens
tgcaaagcttctact

SEQ ID NO: 87494 - DNA, 15 bp, Homo sapiens
ctgcaaagcttctac

SEQ ID NO: 87495 - DNA, 15 bp, Homo sapiens
actgcaaagcttcta

SEQ ID NO: 87496 - DNA, 15 bp, Homo sapiens
gactgcaaagcttct

SEQ ID NO: 87497 - DNA, 15 bp, Homo sapiens
tgactgcaaagcttc

SEQ ID NO: 87498 - DNA, 15 bp, Homo sapiens
ctgactgcaaagctt

SEQ ID NO: 87499 - DNA, 15 bp, Homo sapiens
cctgactgcaaagct

SEQ ID NO: 87500 - DNA, 15 bp, Homo sapiens
gcctgactgcaaagc

SEQ ID NO: 87501 - DNA, 15 bp, Homo sapiens
ggcctgactgcaaag

SEQ ID NO: 87502 - DNA, 15 bp, Homo sapiens
tggcctgactgcaaa

SEQ ID NO: 87503 - DNA, 15 bp, Homo sapiens
ctggcctgactgcaa

SEQ ID NO: 87504 - DNA, 15 bp, Homo sapiens
gctggcctgactgca

SEQ ID NO: 87505 - DNA, 15 bp, Homo sapiens
tgctggcctgactgc

SEQ ID NO: 87506 - DNA, 15 bp, Homo sapiens
ctgctggcctgactg

SEQ ID NO: 87507 - DNA, 15 bp, Homo sapiens
gctgctggcctgact

SEQ ID NO: 87508 - DNA, 15 bp, Homo sapiens
tgctgctggcctgac

SEQ ID NO: 87509 - DNA, 15 bp, Homo sapiens
atgctgctggcctga

SEQ ID NO: 87510 - DNA, 15 bp, Homo sapiens
catgctgctggcctg

SEQ ID NO: 87511 - DNA, 15 bp, Homo sapiens
ccatgctgctggcct

SEQ ID NO: 87512 - DNA, 15 bp, Homo sapiens
tccatgctgctggcc

SEQ ID NO: 87513 - DNA, 15 bp, Homo sapiens
ctccatgctgctggc

SEQ ID NO: 87514 - DNA, 15 bp, Homo sapiens
tctccatgctgctgg

SEQ ID NO: 87515 - DNA, 15 bp, Homo sapiens
gtctccatgctgctg

SEQ ID NO: 87516 - DNA, 15 bp, Homo sapiens
agtctccatgctgct

SEQ ID NO: 87517 - DNA, 15 bp, Homo sapiens
gagtctccatgctgc

SEQ ID NO: 87518 - DNA, 15 bp, Homo sapiens
tgagtctccatgctg

SEQ ID NO: 87519 - DNA, 15 bp, Homo sapiens
atgagtctccatgct

SEQ ID NO: 87520 - DNA, 15 bp, Homo sapiens
catgagtctccatgc

SEQ ID NO: 87521 - DNA, 15 bp, Homo sapiens
tcatgagtctccatg

SEQ ID NO: 87522 - DNA, 15 bp, Homo sapiens
ctcatgagtctccat

SEQ ID NO: 87523 - DNA, 15 bp, Homo sapiens
cctcatgagtctcca

SEQ ID NO: 87524 - DNA, 15 bp, Homo sapiens
acctcatgagtctcc

SEQ ID NO: 87525 - DNA, 15 bp, Homo sapiens
cacctcatgagtctc

SEQ ID NO: 87526 - DNA, 15 bp, Homo sapiens
tcacctcatgagtct

SEQ ID NO: 87527 - DNA, 15 bp, Homo sapiens
ctcacctcatgagtc

SEQ ID NO: 87528 - DNA, 15 bp, Homo sapiens
cctcacctcatgagt

SEQ ID NO: 87529 - DNA, 15 bp, Homo sapiens
ccctcacctcatgag

SEQ ID NO: 87530 - DNA, 15 bp, Homo sapiens
cccctcacctcatga

SEQ ID NO: 87531 - DNA, 15 bp, Homo sapiens
gcccctcacctcatg

SEQ ID NO: 87532 - DNA, 15 bp, Homo sapiens
ggcccctcacctcat

SEQ ID NO: 87533 - DNA, 15 bp, Homo sapiens
tggcccctcacctca

SEQ ID NO: 87534 - DNA, 15 bp, Homo sapiens
ctggcccctcacctc

SEQ ID NO: 87535 - DNA, 15 bp, Homo sapiens
tctggcccctcacct

SEQ ID NO: 87536 - DNA, 15 bp, Homo sapiens
ctctggcccctcacc

SEQ ID NO: 87537 - DNA, 15 bp, Homo sapiens
cctctggcccctcac

SEQ ID NO: 87538 - DNA, 15 bp, Homo sapiens
gcctctggcccctca

SEQ ID NO: 87539 - DNA, 15 bp, Homo sapiens
tgcctctggcccctc

SEQ ID NO: 87540 - DNA, 15 bp, Homo sapiens
ttgcctctggcccct

SEQ ID NO: 87541 - DNA, 15 bp, Homo sapiens
cttgcctctggcccc

SEQ ID NO: 87542 - DNA, 15 bp, Homo sapiens
acttgcctctggccc

SEQ ID NO: 87543 - DNA, 15 bp, Homo sapiens
tacttgcctctggcc

SEQ ID NO: 87544 - DNA, 15 bp, Homo sapiens
ctacttgcctctggc

SEQ ID NO: 87545 - DNA, 15 bp, Homo sapiens
gctacttgcctctgg

SEQ ID NO: 87546 - DNA, 15 bp, Homo sapiens
tgctacttgcctctg

SEQ ID NO: 87547 - DNA, 15 bp, Homo sapiens
ttgctacttgcctct

SEQ ID NO: 87548 - DNA, 15 bp, Homo sapiens
tttgctacttgcctc

SEQ ID NO: 87549 - DNA, 15 bp, Homo sapiens
gtttgctacttgcct

SEQ ID NO: 87550 - DNA, 15 bp, Homo sapiens
ggtttgctacttgcc

SEQ ID NO: 87551 - DNA, 15 bp, Homo sapiens
aggtttgctacttgc

SEQ ID NO: 87552 - DNA, 15 bp, Homo sapiens
gaggtttgctacttg

SEQ ID NO: 87553 - DNA, 15 bp, Homo sapiens
agaggtttgctactt

SEQ ID NO: 87554 - DNA, 15 bp, Homo sapiens
aagaggtttgctact

SEQ ID NO: 87555 - DNA, 15 bp, Homo sapiens
aaagaggtttgctac

SEQ ID NO: 87556 - DNA, 15 bp, Homo sapiens
taaagaggtttgcta

SEQ ID NO: 87557 - DNA, 15 bp, Homo sapiens
ttaaagaggtttgct

SEQ ID NO: 87558 - DNA, 15 bp, Homo sapiens
cttaaagaggtttgc

SEQ ID NO: 87559 - DNA, 15 bp, Homo sapiens
gcttaaagaggtttg

SEQ ID NO: 87560 - DNA, 15 bp, Homo sapiens
ggcttaaagaggttt

SEQ ID NO: 87561 - DNA, 15 bp, Homo sapiens
aggcttaaagaggtt

SEQ ID NO: 87562 - DNA, 15 bp, Homo sapiens
gaggcttaaagaggt

SEQ ID NO: 87563 - DNA, 15 bp, Homo sapiens
tgaggcttaaagagg

SEQ ID NO: 87564 - DNA, 15 bp, Homo sapiens
ttgaggcttaaagag

SEQ ID NO: 87565 - DNA, 15 bp, Homo sapiens
attgaggcttaaaga

SEQ ID NO: 87566 - DNA, 15 bp, Homo sapiens
aattgaggcttaaag

SEQ ID NO: 87567 - DNA, 15 bp, Homo sapiens
aaattgaggcttaaa

SEQ ID NO: 87568 - DNA, 15 bp, Homo sapiens
aaaattgaggcttaa

SEQ ID NO: 87569 - DNA, 15 bp, Homo sapiens
gaaaattgaggctta

SEQ ID NO: 87570 - DNA, 15 bp, Homo sapiens
agaaaattgaggctt

SEQ ID NO: 87571 - DNA, 15 bp, Homo sapiens
aagaaaattgaggct

SEQ ID NO: 87572 - DNA, 15 bp, Homo sapiens
aaagaaaattgaggc

SEQ ID NO: 87573 - DNA, 15 bp, Homo sapiens
aaaagaaaattgagg

SEQ ID NO: 87574 - DNA, 15 bp, Homo sapiens
gaaaagaaaattgag

SEQ ID NO: 87575 - DNA, 15 bp, Homo sapiens
tgaaaagaaaattga

SEQ ID NO: 87576 - DNA, 15 bp, Homo sapiens
ttgaaaagaaaattg

SEQ ID NO: 87577 - DNA, 15 bp, Homo sapiens
attgaaaagaaaatt

SEQ ID NO: 87578 - DNA, 15 bp, Homo sapiens
tattgaaaagaaaat

SEQ ID NO: 87579 - DNA, 15 bp, Homo sapiens
ttattgaaaagaaaa

SEQ ID NO: 87580 - DNA, 15 bp, Homo sapiens
attattgaaaagaaa

SEQ ID NO: 87581 - DNA, 15 bp, Homo sapiens
tattattgaaaagaa

SEQ ID NO: 87582 - DNA, 15 bp, Homo sapiens
atattattgaaaaga

SEQ ID NO: 87583 - DNA, 15 bp, Homo sapiens
catattattgaaaag

SEQ ID NO: 87584 - DNA, 15 bp, Homo sapiens
tcatattattgaaaa

SEQ ID NO: 87585 - DNA, 15 bp, Homo sapiens
ctcatattattgaaa

SEQ ID NO: 87586 - DNA, 15 bp, Homo sapiens
cctcatattattgaa

SEQ ID NO: 87587 - DNA, 15 bp, Homo sapiens
tcctcatattattga

SEQ ID NO: 87588 - DNA, 15 bp, Homo sapiens
atcctcatattattg

SEQ ID NO: 87589 - DNA, 15 bp, Homo sapiens
gatcctcatattatt

SEQ ID NO: 87590 - DNA, 15 bp, Homo sapiens
ggatcctcatattat

SEQ ID NO: 87591 - DNA, 15 bp, Homo sapiens
aggatcctcatatta

SEQ ID NO: 87592 - DNA, 15 bp, Homo sapiens
taggatcctcatatt

SEQ ID NO: 87593 - DNA, 15 bp, Homo sapiens
ttaggatcctcatat

SEQ ID NO: 87594 - DNA, 15 bp, Homo sapiens
gttaggatcctcata

SEQ ID NO: 87595 - DNA, 15 bp, Homo sapiens
agttaggatcctcat

SEQ ID NO: 87596 - DNA, 15 bp, Homo sapiens
gagttaggatcctca

SEQ ID NO: 87597 - DNA, 15 bp, Homo sapiens
tgagttaggatcctc

SEQ ID NO: 87598 - DNA, 15 bp, Homo sapiens
atgagttaggatcct

SEQ ID NO: 87599 - DNA, 15 bp, Homo sapiens
tatgagttaggatcc

SEQ ID NO: 87600 - DNA, 15 bp, Homo sapiens
atatgagttaggatc

SEQ ID NO: 87601 - DNA, 15 bp, Homo sapiens
aatatgagttaggat

SEQ ID NO: 87602 - DNA, 15 bp, Homo sapiens
aaatatgagttagga

SEQ ID NO: 87603 - DNA, 15 bp, Homo sapiens
aaaatatgagttagg

SEQ ID NO: 87604 - DNA, 15 bp, Homo sapiens
taaaatatgagttag

SEQ ID NO: 87605 - DNA, 15 bp, Homo sapiens
ttaaaatatgagtta

SEQ ID NO: 87606 - DNA, 15 bp, Homo sapiens
tttaaaatatgagtt

SEQ ID NO: 87607 - DNA, 15 bp, Homo sapiens
ttttaaaatatgagt

SEQ ID NO: 87608 - DNA, 15 bp, Homo sapiens
cttttaaaatatgag

SEQ ID NO: 87609 - DNA, 15 bp, Homo sapiens
ccttttaaaatatga

SEQ ID NO: 87610 - DNA, 15 bp, Homo sapiens
accttttaaaatatg

SEQ ID NO: 87611 - DNA, 15 bp, Homo sapiens
aaccttttaaaatat

SEQ ID NO: 87612 - DNA, 15 bp, Homo sapiens
taaccttttaaaata

SEQ ID NO: 87613 - DNA, 15 bp, Homo sapiens
ttaaccttttaaaat

SEQ ID NO: 87614 - DNA, 15 bp, Homo sapiens
tttaaccttttaaaa

SEQ ID NO: 87615 - DNA, 15 bp, Homo sapiens
atttaaccttttaaa

SEQ ID NO: 87616 - DNA, 15 bp, Homo sapiens
catttaaccttttaa

SEQ ID NO: 87617 - DNA, 15 bp, Homo sapiens
tcatttaacctttta

SEQ ID NO: 87618 - DNA, 15 bp, Homo sapiens
ctcatttaacctttt

SEQ ID NO: 87619 - DNA, 15 bp, Homo sapiens
cctcatttaaccttt

SEQ ID NO: 87620 - DNA, 15 bp, Homo sapiens
acctcatttaacctt

SEQ ID NO: 87621 - DNA, 15 bp, Homo sapiens
cacctcatttaacct

SEQ ID NO: 87622 - DNA, 15 bp, Homo sapiens
tcacctcatttaacc

SEQ ID NO: 87623 - DNA, 15 bp, Homo sapiens
atcacctcatttaac

SEQ ID NO: 87624 - DNA, 15 bp, Homo sapiens
catcacctcatttaa

SEQ ID NO: 87625 - DNA, 15 bp, Homo sapiens
tcatcacctcattta

SEQ ID NO: 87626 - DNA, 15 bp, Homo sapiens
atcatcacctcattt

SEQ ID NO: 87627 - DNA, 15 bp, Homo sapiens
tatcatcacctcatt

SEQ ID NO: 87628 - DNA, 15 bp, Homo sapiens
ctatcatcacctcat

SEQ ID NO: 87629 - DNA, 15 bp, Homo sapiens
actatcatcacctca

SEQ ID NO: 87630 - DNA, 15 bp, Homo sapiens
tactatcatcacctc

SEQ ID NO: 87631 - DNA, 15 bp, Homo sapiens
ttactatcatcacct

SEQ ID NO: 87632 - DNA, 15 bp, Homo sapiens
tttactatcatcacc

SEQ ID NO: 87633 - DNA, 15 bp, Homo sapiens
ttttactatcatcac

SEQ ID NO: 87634 - DNA, 15 bp, Homo sapiens
cttttactatcatca

SEQ ID NO: 87635 - DNA, 15 bp, Homo sapiens
acttttactatcatc

SEQ ID NO: 87636 - DNA, 15 bp, Homo sapiens
aacttttactatcat

SEQ ID NO: 87637 - DNA, 15 bp, Homo sapiens
gaacttttactatca

SEQ ID NO: 87638 - DNA, 15 bp, Homo sapiens
ggaacttttactatc

SEQ ID NO: 87639 - DNA, 15 bp, Homo sapiens
aggaacttttactat

SEQ ID NO: 87640 - DNA, 15 bp, Homo sapiens
aaggaacttttacta

SEQ ID NO: 87641 - DNA, 15 bp, Homo sapiens
caaggaacttttact

SEQ ID NO: 87642 - DNA, 15 bp, Homo sapiens
ccaaggaacttttac

SEQ ID NO: 87643 - DNA, 15 bp, Homo sapiens
tccaaggaactttta

SEQ ID NO: 87644 - DNA, 15 bp, Homo sapiens
ttccaaggaactttt

SEQ ID NO: 87645 - DNA, 15 bp, Homo sapiens
tttccaaggaacttt

SEQ ID NO: 87646 - DNA, 15 bp, Homo sapiens
gtttccaaggaactt

SEQ ID NO: 87647 - DNA, 15 bp, Homo sapiens
agtttccaaggaact

SEQ ID NO: 87648 - DNA, 15 bp, Homo sapiens
aagtttccaaggaac

SEQ ID NO: 87649 - DNA, 15 bp, Homo sapiens
gaagtttccaaggaa

SEQ ID NO: 87650 - DNA, 15 bp, Homo sapiens
tgaagtttccaagga

SEQ ID NO: 87651 - DNA, 15 bp, Homo sapiens
ttgaagtttccaagg

SEQ ID NO: 87652 - DNA, 15 bp, Homo sapiens
cttgaagtttccaag

SEQ ID NO: 87653 - DNA, 15 bp, Homo sapiens
acttgaagtttccaa

SEQ ID NO: 87654 - DNA, 15 bp, Homo sapiens
gacttgaagtttcca

SEQ ID NO: 87655 - DNA, 15 bp, Homo sapiens
tgacttgaagtttcc

SEQ ID NO: 87656 - DNA, 15 bp, Homo sapiens
atgacttgaagtttc

SEQ ID NO: 87657 - DNA, 15 bp, Homo sapiens
gatgacttgaagttt

SEQ ID NO: 87658 - DNA, 15 bp, Homo sapiens
tgatgacttgaagtt

SEQ ID NO: 87659 - DNA, 15 bp, Homo sapiens
ttgatgacttgaagt

SEQ ID NO: 87660 - DNA, 15 bp, Homo sapiens
tttgatgacttgaag

SEQ ID NO: 87661 - DNA, 15 bp, Homo sapiens
atttgatgacttgaa

SEQ ID NO: 87662 - DNA, 15 bp, Homo sapiens
tatttgatgacttga

SEQ ID NO: 87663 - DNA, 15 bp, Homo sapiens
ttatttgatgacttg

SEQ ID NO: 87664 - DNA, 15 bp, Homo sapiens
attatttgatgactt

SEQ ID NO: 87665 - DNA, 15 bp, Homo sapiens
tattatttgatgact

SEQ ID NO: 87666 - DNA, 15 bp, Homo sapiens
gtattatttgatgac

SEQ ID NO: 87667 - DNA, 15 bp, Homo sapiens
tgtattatttgatga

SEQ ID NO: 87668 - DNA, 15 bp, Homo sapiens
atgtattatttgatg

SEQ ID NO: 87669 - DNA, 15 bp, Homo sapiens
catgtattatttgat

SEQ ID NO: 87670 - DNA, 15 bp, Homo sapiens
acatgtattatttga

SEQ ID NO: 87671 - DNA, 15 bp, Homo sapiens
aacatgtattatttg

SEQ ID NO: 87672 - DNA, 15 bp, Homo sapiens
gaacatgtattattt

SEQ ID NO: 87673 - DNA, 15 bp, Homo sapiens
agaacatgtattatt

SEQ ID NO: 87674 - DNA, 15 bp, Homo sapiens
tagaacatgtattat

SEQ ID NO: 87675 - DNA, 15 bp, Homo sapiens
atagaacatgtatta

SEQ ID NO: 87676 - DNA, 15 bp, Homo sapiens
aatagaacatgtatt

SEQ ID NO: 87677 - DNA, 15 bp, Homo sapiens
aaatagaacatgtat

SEQ ID NO: 87678 - DNA, 15 bp, Homo sapiens
caaatagaacatgta

SEQ ID NO: 87679 - DNA, 15 bp, Homo sapiens
tcaaatagaacatgt

SEQ ID NO: 87680 - DNA, 15 bp, Homo sapiens
atcaaatagaacatg

SEQ ID NO: 87681 - DNA, 15 bp, Homo sapiens
gatcaaatagaacat

SEQ ID NO: 87682 - DNA, 15 bp, Homo sapiens
cgatcaaatagaaca

SEQ ID NO: 87683 - DNA, 15 bp, Homo sapiens
acgatcaaatagaac

SEQ ID NO: 87684 - DNA, 15 bp, Homo sapiens
aacgatcaaatagaa

SEQ ID NO: 87685 - DNA, 15 bp, Homo sapiens
gaacgatcaaataga

SEQ ID NO: 87686 - DNA, 15 bp, Homo sapiens
agaacgatcaaatag

SEQ ID NO: 87687 - DNA, 15 bp, Homo sapiens
gagaacgatcaaata

SEQ ID NO: 87688 - DNA, 15 bp, Homo sapiens
tgagaacgatcaaat

SEQ ID NO: 87689 - DNA, 15 bp, Homo sapiens
atgagaacgatcaaa

SEQ ID NO: 87690 - DNA, 15 bp, Homo sapiens
aatgagaacgatcaa

SEQ ID NO: 87691 - DNA, 15 bp, Homo sapiens
aaatgagaacgatca

SEQ ID NO: 87692 - DNA, 15 bp, Homo sapiens
taaatgagaacgatc

SEQ ID NO: 87693 - DNA, 15 bp, Homo sapiens
ttaaatgagaacgat

SEQ ID NO: 87694 - DNA, 15 bp, Homo sapiens
tttaaatgagaacga

SEQ ID NO: 87695 - DNA, 15 bp, Homo sapiens
ttttaaatgagaacg

SEQ ID NO: 87696 - DNA, 15 bp, Homo sapiens
tttttaaatgagaac

SEQ ID NO: 87697 - DNA, 15 bp, Homo sapiens
atttttaaatgagaa

SEQ ID NO: 87698 - DNA, 15 bp, Homo sapiens
catttttaaatgaga

SEQ ID NO: 87699 - DNA, 15 bp, Homo sapiens
acatttttaaatgag

SEQ ID NO: 87700 - DNA, 15 bp, Homo sapiens
cacatttttaaatga

SEQ ID NO: 87701 - DNA, 15 bp, Homo sapiens
ccacatttttaaatg

SEQ ID NO: 87702 - DNA, 15 bp, Homo sapiens
accacatttttaaat

SEQ ID NO: 87703 - DNA, 15 bp, Homo sapiens
gaccacatttttaaa

SEQ ID NO: 87704 - DNA, 15 bp, Homo sapiens
ggaccacatttttaa

SEQ ID NO: 87705 - DNA, 15 bp, Homo sapiens
aggaccacattttta

SEQ ID NO: 87706 - DNA, 15 bp, Homo sapiens
aaggaccacattttt

SEQ ID NO: 87707 - DNA, 15 bp, Homo sapiens
caaggaccacatttt

SEQ ID NO: 87708 - DNA, 15 bp, Homo sapiens
acaaggaccacattt

SEQ ID NO: 87709 - DNA, 15 bp, Homo sapiens
aacaaggaccacatt

SEQ ID NO: 87710 - DNA, 15 bp, Homo sapiens
aaacaaggaccacat

SEQ ID NO: 87711 - DNA, 15 bp, Homo sapiens
caaacaaggaccaca

SEQ ID NO: 87712 - DNA, 15 bp, Homo sapiens
ccaaacaaggaccac

SEQ ID NO: 87713 - DNA, 15 bp, Homo sapiens
accaaacaaggacca

SEQ ID NO: 87714 - DNA, 15 bp, Homo sapiens
aaccaaacaaggacc

SEQ ID NO: 87715 - DNA, 15 bp, Homo sapiens
aaaccaaacaaggac

SEQ ID NO: 87716 - DNA, 15 bp, Homo sapiens
aaaaccaaacaagga

SEQ ID NO: 87717 - DNA, 15 bp, Homo sapiens
aaaaaccaaacaagg

SEQ ID NO: 87718 - DNA, 15 bp, Homo sapiens
caaaaaccaaacaag

SEQ ID NO: 87719 - DNA, 15 bp, Homo sapiens
acaaaaaccaaacaa

SEQ ID NO: 87720 - DNA, 15 bp, Homo sapiens
gacaaaaaccaaaca

SEQ ID NO: 87721 - DNA, 15 bp, Homo sapiens
agacaaaaaccaaac

SEQ ID NO: 87722 - DNA, 15 bp, Homo sapiens
cagacaaaaaccaaa

SEQ ID NO: 87723 - DNA, 15 bp, Homo sapiens
acagacaaaaaccaa

SEQ ID NO: 87724 - DNA, 15 bp, Homo sapiens
aacagacaaaaacca

SEQ ID NO: 87725 - DNA, 15 bp, Homo sapiens
caacagacaaaaacc

SEQ ID NO: 87726 - DNA, 15 bp, Homo sapiens
acaacagacaaaaac

SEQ ID NO: 87727 - DNA, 15 bp, Homo sapiens
aacaacagacaaaaa

SEQ ID NO: 87728 - DNA, 15 bp, Homo sapiens
aaacaacagacaaaa

SEQ ID NO: 87729 - DNA, 15 bp, Homo sapiens
taaacaacagacaaa

SEQ ID NO: 87730 - DNA, 15 bp, Homo sapiens
ataaacaacagacaa

SEQ ID NO: 87731 - DNA, 15 bp, Homo sapiens
aataaacaacagaca

SEQ ID NO: 87732 - DNA, 15 bp, Homo sapiens
aaataaacaacagac

SEQ ID NO: 87733 - DNA, 15 bp, Homo sapiens
aaaataaacaacaga

SEQ ID NO: 87734 - DNA, 15 bp, Homo sapiens
caaaataaacaacag

SEQ ID NO: 87735 - DNA, 15 bp, Homo sapiens
acaaaataaacaaca

SEQ ID NO: 87736 - DNA, 15 bp, Homo sapiens
aacaaaataaacaac

SEQ ID NO: 87737 - DNA, 15 bp, Homo sapiens
aaacaaaataaacaa

SEQ ID NO: 87738 - DNA, 15 bp, Homo sapiens
aaaacaaaataaaca

SEQ ID NO: 87739 - DNA, 15 bp, Homo sapiens
aaaaacaaaataaac

SEQ ID NO: 87740 - DNA, 15 bp, Homo sapiens
caaaaacaaaataaa

SEQ ID NO: 87741 - DNA, 15 bp, Homo sapiens
acaaaaacaaaataa

SEQ ID NO: 87742 - DNA, 15 bp, Homo sapiens
gacaaaaacaaaata

SEQ ID NO: 87743 - DNA, 15 bp, Homo sapiens
cgacaaaaacaaaat

SEQ ID NO: 87744 - DNA, 15 bp, Homo sapiens
acgacaaaaacaaaa

SEQ ID NO: 87745 - DNA, 15 bp, Homo sapiens
aacgacaaaaacaaa

SEQ ID NO: 87746 - DNA, 15 bp, Homo sapiens
aaacgacaaaaacaa

SEQ ID NO: 87747 - DNA, 15 bp, Homo sapiens
caaacgacaaaaaca

SEQ ID NO: 87748 - DNA, 15 bp, Homo sapiens
ccaaacgacaaaaac

SEQ ID NO: 87749 - DNA, 15 bp, Homo sapiens
tccaaacgacaaaaa

SEQ ID NO: 87750 - DNA, 15 bp, Homo sapiens
ctccaaacgacaaaa

SEQ ID NO: 87751 - DNA, 15 bp, Homo sapiens
tctccaaacgacaaa

SEQ ID NO: 87752 - DNA, 15 bp, Homo sapiens
atctccaaacgacaa

SEQ ID NO: 87753 - DNA, 15 bp, Homo sapiens
tatctccaaacgaca

SEQ ID NO: 87754 - DNA, 15 bp, Homo sapiens
ttatctccaaacgac

SEQ ID NO: 87755 - DNA, 15 bp, Homo sapiens
attatctccaaacga

SEQ ID NO: 87756 - DNA, 15 bp, Homo sapiens
aattatctccaaacg

SEQ ID NO: 87757 - DNA, 15 bp, Homo sapiens
gaattatctccaaac

SEQ ID NO: 87758 - DNA, 15 bp, Homo sapiens
ggaattatctccaaa

SEQ ID NO: 87759 - DNA, 15 bp, Homo sapiens
tggaattatctccaa

SEQ ID NO: 87760 - DNA, 15 bp, Homo sapiens
gtggaattatctcca

SEQ ID NO: 87761 - DNA, 15 bp, Homo sapiens
agtggaattatctcc

SEQ ID NO: 87762 - DNA, 15 bp, Homo sapiens
tagtggaattatctc

SEQ ID NO: 87763 - DNA, 15 bp, Homo sapiens
atagtggaattatct

SEQ ID NO: 87764 - DNA, 15 bp, Homo sapiens
catagtggaattatc

SEQ ID NO: 87765 - DNA, 15 bp, Homo sapiens
acatagtggaattat

SEQ ID NO: 87766 - DNA, 15 bp, Homo sapiens
cacatagtggaatta

SEQ ID NO: 87767 - DNA, 15 bp, Homo sapiens
acacatagtggaatt

SEQ ID NO: 87768 - DNA, 15 bp, Homo sapiens
gacacatagtggaat

SEQ ID NO: 87769 - DNA, 15 bp, Homo sapiens
agacacatagtggaa

SEQ ID NO: 87770 - DNA, 15 bp, Homo sapiens
tagacacatagtgga

SEQ ID NO: 87771 - DNA, 15 bp, Homo sapiens
atagacacatagtgg

SEQ ID NO: 87772 - DNA, 15 bp, Homo sapiens
gatagacacatagtg

SEQ ID NO: 87773 - DNA, 15 bp, Homo sapiens
tgatagacacatagt

SEQ ID NO: 87774 - DNA, 15 bp, Homo sapiens
ctgatagacacatag

SEQ ID NO: 87775 - DNA, 15 bp, Homo sapiens
tctgatagacacata

SEQ ID NO: 87776 - DNA, 15 bp, Homo sapiens
ctctgatagacacat

SEQ ID NO: 87777 - DNA, 15 bp, Homo sapiens
cctctgatagacaca

SEQ ID NO: 87778 - DNA, 15 bp, Homo sapiens
tcctctgatagacac

SEQ ID NO: 87779 - DNA, 15 bp, Homo sapiens
gtcctctgatagaca

SEQ ID NO: 87780 - DNA, 15 bp, Homo sapiens
agtcctctgatagac

SEQ ID NO: 87781 - DNA, 15 bp, Homo sapiens
aagtcctctgataga

SEQ ID NO: 87782 - DNA, 15 bp, Homo sapiens
taagtcctctgatag

SEQ ID NO: 87783 - DNA, 15 bp, Homo sapiens
ctaagtcctctgata

SEQ ID NO: 87784 - DNA, 15 bp, Homo sapiens
tctaagtcctctgat

SEQ ID NO: 87785 - DNA, 15 bp, Homo sapiens
gtctaagtcctctga

SEQ ID NO: 87786 - DNA, 15 bp, Homo sapiens
agtctaagtcctctg

SEQ ID NO: 87787 - DNA, 15 bp, Homo sapiens
aagtctaagtcctct

SEQ ID NO: 87788 - DNA, 15 bp, Homo sapiens
aaagtctaagtcctc

SEQ ID NO: 87789 - DNA, 15 bp, Homo sapiens
taaagtctaagtcct

SEQ ID NO: 87790 - DNA, 15 bp, Homo sapiens
ttaaagtctaagtcc

SEQ ID NO: 87791 - DNA, 15 bp, Homo sapiens
attaaagtctaagtc

SEQ ID NO: 87792 - DNA, 15 bp, Homo sapiens
aattaaagtctaagt

SEQ ID NO: 87793 - DNA, 15 bp, Homo sapiens
gaattaaagtctaag

SEQ ID NO: 87794 - DNA, 15 bp, Homo sapiens
agaattaaagtctaa

SEQ ID NO: 87795 - DNA, 15 bp, Homo sapiens
cagaattaaagtcta

SEQ ID NO: 87796 - DNA, 15 bp, Homo sapiens
tcagaattaaagtct

SEQ ID NO: 87797 - DNA, 15 bp, Homo sapiens
ctcagaattaaagtc

SEQ ID NO: 87798 - DNA, 15 bp, Homo sapiens
tctcagaattaaagt

SEQ ID NO: 87799 - DNA, 15 bp, Homo sapiens
atctcagaattaaag

SEQ ID NO: 87800 - DNA, 15 bp, Homo sapiens
gatctcagaattaaa

SEQ ID NO: 87801 - DNA, 15 bp, Homo sapiens
cgatctcagaattaa

SEQ ID NO: 87802 - DNA, 15 bp, Homo sapiens
tcgatctcagaatta

SEQ ID NO: 87803 - DNA, 15 bp, Homo sapiens
atcgatctcagaatt

SEQ ID NO: 87804 - DNA, 15 bp, Homo sapiens
aatcgatctcagaat

SEQ ID NO: 87805 - DNA, 15 bp, Homo sapiens
gaatcgatctcagaa

SEQ ID NO: 87806 - DNA, 15 bp, Homo sapiens
ggaatcgatctcaga

SEQ ID NO: 87807 - DNA, 15 bp, Homo sapiens
gggaatcgatctcag

SEQ ID NO: 87808 - DNA, 15 bp, Homo sapiens
ggggaatcgatctca

SEQ ID NO: 87809 - DNA, 15 bp, Homo sapiens
gggggaatcgatctc

SEQ ID NO: 87810 - DNA, 15 bp, Homo sapiens
ggggggaatcgatct

SEQ ID NO: 87811 - DNA, 15 bp, Homo sapiens
aggggggaatcgatc

SEQ ID NO: 87812 - DNA, 15 bp, Homo sapiens
gaggggggaatcgat

SEQ ID NO: 87813 - DNA, 15 bp, Homo sapiens
tgaggggggaatcga

SEQ ID NO: 87814 - DNA, 15 bp, Homo sapiens
gtgaggggggaatcg

SEQ ID NO: 87815 - DNA, 15 bp, Homo sapiens
agtgaggggggaatc

SEQ ID NO: 87816 - DNA, 15 bp, Homo sapiens
cagtgaggggggaat

SEQ ID NO: 87817 - DNA, 15 bp, Homo sapiens
acagtgaggggggaa

SEQ ID NO: 87818 - DNA, 15 bp, Homo sapiens
cacagtgagggggga

SEQ ID NO: 87819 - DNA, 15 bp, Homo sapiens
acacagtgagggggg

SEQ ID NO: 87820 - DNA, 15 bp, Homo sapiens
cacacagtgaggggg

SEQ ID NO: 87821 - DNA, 15 bp, Homo sapiens
tcacacagtgagggg

SEQ ID NO: 87822 - DNA, 15 bp, Homo sapiens
ttcacacagtgaggg

SEQ ID NO: 87823 - DNA, 15 bp, Homo sapiens
gttcacacagtgagg

SEQ ID NO: 87824 - DNA, 15 bp, Homo sapiens
ggttcacacagtgag

SEQ ID NO: 87825 - DNA, 15 bp, Homo sapiens
aggttcacacagtga

SEQ ID NO: 87826 - DNA, 15 bp, Homo sapiens
taggttcacacagtg

SEQ ID NO: 87827 - DNA, 15 bp, Homo sapiens
ctaggttcacacagt

SEQ ID NO: 87828 - DNA, 15 bp, Homo sapiens
tctaggttcacacag

SEQ ID NO: 87829 - DNA, 15 bp, Homo sapiens
ttctaggttcacaca

SEQ ID NO: 87830 - DNA, 15 bp, Homo sapiens
cttctaggttcacac

SEQ ID NO: 87831 - DNA, 15 bp, Homo sapiens
ccttctaggttcaca

SEQ ID NO: 87832 - DNA, 15 bp, Homo sapiens
cccttctaggttcac

SEQ ID NO: 87833 - DNA, 15 bp, Homo sapiens
acccttctaggttca

SEQ ID NO: 87834 - DNA, 15 bp, Homo sapiens
aacccttctaggttc

SEQ ID NO: 87835 - DNA, 15 bp, Homo sapiens
taacccttctaggtt

SEQ ID NO: 87836 - DNA, 15 bp, Homo sapiens
ataacccttctaggt

SEQ ID NO: 87837 - DNA, 15 bp, Homo sapiens
cataacccttctagg

SEQ ID NO: 87838 - DNA, 15 bp, Homo sapiens
gcataacccttctag

SEQ ID NO: 87839 - DNA, 15 bp, Homo sapiens
agcataacccttcta

SEQ ID NO: 87840 - DNA, 15 bp, Homo sapiens
aagcataacccttct

SEQ ID NO: 87841 - DNA, 15 bp, Homo sapiens
aaagcataacccttc

SEQ ID NO: 87842 - DNA, 15 bp, Homo sapiens
caaagcataaccctt

SEQ ID NO: 87843 - DNA, 15 bp, Homo sapiens
acaaagcataaccct

SEQ ID NO: 87844 - DNA, 15 bp, Homo sapiens
cacaaagcataaccc

SEQ ID NO: 87845 - DNA, 15 bp, Homo sapiens
gcacaaagcataacc

SEQ ID NO: 87846 - DNA, 15 bp, Homo sapiens
ggcacaaagcataac

SEQ ID NO: 87847 - DNA, 15 bp, Homo sapiens
aggcacaaagcataa

SEQ ID NO: 87848 - DNA, 15 bp, Homo sapiens
gaggcacaaagcata

SEQ ID NO: 87849 - DNA, 15 bp, Homo sapiens
tgaggcacaaagcat

SEQ ID NO: 87850 - DNA, 15 bp, Homo sapiens
ctgaggcacaaagca

SEQ ID NO: 87851 - DNA, 15 bp, Homo sapiens
actgaggcacaaagc

SEQ ID NO: 87852 - DNA, 15 bp, Homo sapiens
aactgaggcacaaag

SEQ ID NO: 87853 - DNA, 15 bp, Homo sapiens
aaactgaggcacaaa

SEQ ID NO: 87854 - DNA, 15 bp, Homo sapiens
gaaactgaggcacaa

SEQ ID NO: 87855 - DNA, 15 bp, Homo sapiens
ggaaactgaggcaca

SEQ ID NO: 87856 - DNA, 15 bp, Homo sapiens
gggaaactgaggcac

SEQ ID NO: 87857 - DNA, 15 bp, Homo sapiens
ggggaaactgaggca

SEQ ID NO: 87858 - DNA, 15 bp, Homo sapiens
tggggaaactgaggc

SEQ ID NO: 87859 - DNA, 15 bp, Homo sapiens
gtggggaaactgagg

SEQ ID NO: 87860 - DNA, 15 bp, Homo sapiens
ggtggggaaactgag

SEQ ID NO: 87861 - DNA, 15 bp, Homo sapiens
aggtggggaaactga

SEQ ID NO: 87862 - DNA, 15 bp, Homo sapiens
caggtggggaaactg

SEQ ID NO: 87863 - DNA, 15 bp, Homo sapiens
ccaggtggggaaact

SEQ ID NO: 87864 - DNA, 15 bp, Homo sapiens
tccaggtggggaaac

SEQ ID NO: 87865 - DNA, 15 bp, Homo sapiens
gtccaggtggggaaa

SEQ ID NO: 87866 - DNA, 15 bp, Homo sapiens
tgtccaggtggggaa

SEQ ID NO: 87867 - DNA, 15 bp, Homo sapiens
ctgtccaggtgggga

SEQ ID NO: 87868 - DNA, 15 bp, Homo sapiens
actgtccaggtgggg

SEQ ID NO: 87869 - DNA, 15 bp, Homo sapiens
gactgtccaggtggg

SEQ ID NO: 87870 - DNA, 15 bp, Homo sapiens
tgactgtccaggtgg

SEQ ID NO: 87871 - DNA, 15 bp, Homo sapiens
atgactgtccaggtg

SEQ ID NO: 87872 - DNA, 15 bp, Homo sapiens
catgactgtccaggt

SEQ ID NO: 87873 - DNA, 15 bp, Homo sapiens
ccatgactgtccagg

SEQ ID NO: 87874 - DNA, 15 bp, Homo sapiens
accatgactgtccag

SEQ ID NO: 87875 - DNA, 15 bp, Homo sapiens
caccatgactgtcca

SEQ ID NO: 87876 - DNA, 15 bp, Homo sapiens
gcaccatgactgtcc

SEQ ID NO: 87877 - DNA, 15 bp, Homo sapiens
agcaccatgactgtc

SEQ ID NO: 87878 - DNA, 15 bp, Homo sapiens
cagcaccatgactgt

SEQ ID NO: 87879 - DNA, 15 bp, Homo sapiens
tcagcaccatgactg

SEQ ID NO: 87880 - DNA, 15 bp, Homo sapiens
atcagcaccatgact

SEQ ID NO: 87881 - DNA, 15 bp, Homo sapiens
aatcagcaccatgac

SEQ ID NO: 87882 - DNA, 15 bp, Homo sapiens
gaatcagcaccatga

SEQ ID NO: 87883 - DNA, 15 bp, Homo sapiens
ggaatcagcaccatg

SEQ ID NO: 87884 - DNA, 15 bp, Homo sapiens
aggaatcagcaccat

SEQ ID NO: 87885 - DNA, 15 bp, Homo sapiens
caggaatcagcacca

SEQ ID NO: 87886 - DNA, 15 bp, Homo sapiens
gcaggaatcagcacc

SEQ ID NO: 87887 - DNA, 15 bp, Homo sapiens
ggcaggaatcagcac

SEQ ID NO: 87888 - DNA, 15 bp, Homo sapiens
tggcaggaatcagca

SEQ ID NO: 87889 - DNA, 15 bp, Homo sapiens
ctggcaggaatcagc

SEQ ID NO: 87890 - DNA, 15 bp, Homo sapiens
gctggcaggaatcag

SEQ ID NO: 87891 - DNA, 15 bp, Homo sapiens
ggctggcaggaatca

SEQ ID NO: 87892 - DNA, 15 bp, Homo sapiens
tggctggcaggaatc

SEQ ID NO: 87893 - DNA, 15 bp, Homo sapiens
ctggctggcaggaat

SEQ ID NO: 87894 - DNA, 15 bp, Homo sapiens
actggctggcaggaa

SEQ ID NO: 87895 - DNA, 15 bp, Homo sapiens
cactggctggcagga

SEQ ID NO: 87896 - DNA, 15 bp, Homo sapiens
acactggctggcagg

SEQ ID NO: 87897 - DNA, 15 bp, Homo sapiens
gacactggctggcag

SEQ ID NO: 87898 - DNA, 15 bp, Homo sapiens
tgacactggctggca

SEQ ID NO: 87899 - DNA, 15 bp, Homo sapiens
ttgacactggctggc

SEQ ID NO: 87900 - DNA, 15 bp, Homo sapiens
attgacactggctgg

SEQ ID NO: 87901 - DNA, 15 bp, Homo sapiens
tattgacactggctg

SEQ ID NO: 87902 - DNA, 15 bp, Homo sapiens
ttattgacactggct

SEQ ID NO: 87903 - DNA, 15 bp, Homo sapiens
gttattgacactggc

SEQ ID NO: 87904 - DNA, 15 bp, Homo sapiens
ggttattgacactgg

SEQ ID NO: 87905 - DNA, 15 bp, Homo sapiens
tggttattgacactg

SEQ ID NO: 87906 - DNA, 15 bp, Homo sapiens
gtggttattgacact

SEQ ID NO: 87907 - DNA, 15 bp, Homo sapiens
tgtggttattgacac

SEQ ID NO: 87908 - DNA, 15 bp, Homo sapiens
ctgtggttattgaca

SEQ ID NO: 87909 - DNA, 15 bp, Homo sapiens
actgtggttattgac

SEQ ID NO: 87910 - DNA, 15 bp, Homo sapiens
cactgtggttattga

SEQ ID NO: 87911 - DNA, 15 bp, Homo sapiens
tcactgtggttattg

SEQ ID NO: 87912 - DNA, 15 bp, Homo sapiens
ttcactgtggttatt

SEQ ID NO: 87913 - DNA, 15 bp, Homo sapiens
tttcactgtggttat

SEQ ID NO: 87914 - DNA, 15 bp, Homo sapiens
ctttcactgtggtta

SEQ ID NO: 87915 - DNA, 15 bp, Homo sapiens
cctttcactgtggtt

SEQ ID NO: 87916 - DNA, 15 bp, Homo sapiens
tcctttcactgtggt

SEQ ID NO: 87917 - DNA, 15 bp, Homo sapiens
atcctttcactgtgg

SEQ ID NO: 87918 - DNA, 15 bp, Homo sapiens
tatcctttcactgtg

SEQ ID NO: 87919 - DNA, 15 bp, Homo sapiens
gtatcctttcactgt

SEQ ID NO: 87920 - DNA, 15 bp, Homo sapiens
agtatcctttcactg

SEQ ID NO: 87921 - DNA, 15 bp, Homo sapiens
gagtatcctttcact

SEQ ID NO: 87922 - DNA, 15 bp, Homo sapiens
tgagtatcctttcac

SEQ ID NO: 87923 - DNA, 15 bp, Homo sapiens
ctgagtatcctttca

SEQ ID NO: 87924 - DNA, 15 bp, Homo sapiens
tctgagtatcctttc

SEQ ID NO: 87925 - DNA, 15 bp, Homo sapiens
gtctgagtatccttt

SEQ ID NO: 87926 - DNA, 15 bp, Homo sapiens
tgtctgagtatcctt

SEQ ID NO: 87927 - DNA, 15 bp, Homo sapiens
ctgtctgagtatcct

SEQ ID NO: 87928 - DNA, 15 bp, Homo sapiens
actgtctgagtatcc

SEQ ID NO: 87929 - DNA, 15 bp, Homo sapiens
gactgtctgagtatc

SEQ ID NO: 87930 - DNA, 15 bp, Homo sapiens
tgactgtctgagtat

SEQ ID NO: 87931 - DNA, 15 bp, Homo sapiens
gtgactgtctgagta

SEQ ID NO: 87932 - DNA, 15 bp, Homo sapiens
ggtgactgtctgagt

SEQ ID NO: 87933 - DNA, 15 bp, Homo sapiens
aggtgactgtctgag

SEQ ID NO: 87934 - DNA, 15 bp, Homo sapiens
gaggtgactgtctga

SEQ ID NO: 87935 - DNA, 15 bp, Homo sapiens
agaggtgactgtctg

SEQ ID NO: 87936 - DNA, 15 bp, Homo sapiens
tagaggtgactgtct

SEQ ID NO: 87937 - DNA, 15 bp, Homo sapiens
gtagaggtgactgtc

SEQ ID NO: 87938 - DNA, 15 bp, Homo sapiens
tgtagaggtgactgt

SEQ ID NO: 87939 - DNA, 15 bp, Homo sapiens
ctgtagaggtgactg

SEQ ID NO: 87940 - DNA, 15 bp, Homo sapiens
gctgtagaggtgact

SEQ ID NO: 87941 - DNA, 15 bp, Homo sapiens
ggctgtagaggtgac

SEQ ID NO: 87942 - DNA, 15 bp, Homo sapiens
aggctgtagaggtga

SEQ ID NO: 87943 - DNA, 15 bp, Homo sapiens
aaggctgtagaggtg

SEQ ID NO: 87944 - DNA, 15 bp, Homo sapiens
aaaggctgtagaggt

SEQ ID NO: 87945 - DNA, 15 bp, Homo sapiens
caaaggctgtagagg

SEQ ID NO: 87946 - DNA, 15 bp, Homo sapiens
tcaaaggctgtagag

SEQ ID NO: 87947 - DNA, 15 bp, Homo sapiens
ttcaaaggctgtaga

SEQ ID NO: 87948 - DNA, 15 bp, Homo sapiens
attcaaaggctgtag

SEQ ID NO: 87949 - DNA, 15 bp, Homo sapiens
tattcaaaggctgta

SEQ ID NO: 87950 - DNA, 15 bp, Homo sapiens
atattcaaaggctgt

SEQ ID NO: 87951 - DNA, 15 bp, Homo sapiens
catattcaaaggctg

SEQ ID NO: 87952 - DNA, 15 bp, Homo sapiens
ccatattcaaaggct

SEQ ID NO: 87953 - DNA, 15 bp, Homo sapiens
cccatattcaaaggc

SEQ ID NO: 87954 - DNA, 15 bp, Homo sapiens
acccatattcaaagg

SEQ ID NO: 87955 - DNA, 15 bp, Homo sapiens
aacccatattcaaag

SEQ ID NO: 87956 - DNA, 15 bp, Homo sapiens
aaacccatattcaaa

SEQ ID NO: 87957 - DNA, 15 bp, Homo sapiens
aaaacccatattcaa

SEQ ID NO: 87958 - DNA, 15 bp, Homo sapiens
gaaaacccatattca

SEQ ID NO: 87959 - DNA, 15 bp, Homo sapiens
cgaaaacccatattc

SEQ ID NO: 87960 - DNA, 15 bp, Homo sapiens
ccgaaaacccatatt

SEQ ID NO: 87961 - DNA, 15 bp, Homo sapiens
accgaaaacccatat

SEQ ID NO: 87962 - DNA, 15 bp, Homo sapiens
aaccgaaaacccata

SEQ ID NO: 87963 - DNA, 15 bp, Homo sapiens
caaccgaaaacccat

SEQ ID NO: 87964 - DNA, 15 bp, Homo sapiens
gcaaccgaaaaccca

SEQ ID NO: 87965 - DNA, 15 bp, Homo sapiens
agcaaccgaaaaccc

SEQ ID NO: 87966 - DNA, 15 bp, Homo sapiens
cagcaaccgaaaacc

SEQ ID NO: 87967 - DNA, 15 bp, Homo sapiens
tcagcaaccgaaaac

SEQ ID NO: 87968 - DNA, 15 bp, Homo sapiens
ctcagcaaccgaaaa

SEQ ID NO: 87969 - DNA, 15 bp, Homo sapiens
actcagcaaccgaaa

SEQ ID NO: 87970 - DNA, 15 bp, Homo sapiens
tactcagcaaccgaa

SEQ ID NO: 87971 - DNA, 15 bp, Homo sapiens
ttactcagcaaccga

SEQ ID NO: 87972 - DNA, 15 bp, Homo sapiens
tttactcagcaaccg

SEQ ID NO: 87973 - DNA, 15 bp, Homo sapiens
ttttactcagcaacc

SEQ ID NO: 87974 - DNA, 15 bp, Homo sapiens
attttactcagcaac

SEQ ID NO: 87975 - DNA, 15 bp, Homo sapiens
cattttactcagcaa

SEQ ID NO: 87976 - DNA, 15 bp, Homo sapiens
gcattttactcagca

SEQ ID NO: 87977 - DNA, 15 bp, Homo sapiens
agcattttactcagc

SEQ ID NO: 87978 - DNA, 15 bp, Homo sapiens
gagcattttactcag

SEQ ID NO: 87979 - DNA, 15 bp, Homo sapiens
cgagcattttactca

SEQ ID NO: 87980 - DNA, 15 bp, Homo sapiens
ccgagcattttactc

SEQ ID NO: 87981 - DNA, 15 bp, Homo sapiens
tccgagcattttact

SEQ ID NO: 87982 - DNA, 15 bp, Homo sapiens
ctccgagcattttac

SEQ ID NO: 87983 - DNA, 15 bp, Homo sapiens
tctccgagcatttta

SEQ ID NO: 87984 - DNA, 15 bp, Homo sapiens
gtctccgagcatttt

SEQ ID NO: 87985 - DNA, 15 bp, Homo sapiens
cgtctccgagcattt

SEQ ID NO: 87986 - DNA, 15 bp, Homo sapiens
acgtctccgagcatt

SEQ ID NO: 87987 - DNA, 15 bp, Homo sapiens
aacgtctccgagcat

SEQ ID NO: 87988 - DNA, 15 bp, Homo sapiens
gaacgtctccgagca

SEQ ID NO: 87989 - DNA, 15 bp, Homo sapiens
ggaacgtctccgagc

SEQ ID NO: 87990 - DNA, 15 bp, Homo sapiens
cggaacgtctccgag

SEQ ID NO: 87991 - DNA, 15 bp, Homo sapiens
ccggaacgtctccga

SEQ ID NO: 87992 - DNA, 15 bp, Homo sapiens
accggaacgtctccg

SEQ ID NO: 87993 - DNA, 15 bp, Homo sapiens
aaccggaacgtctcc

SEQ ID NO: 87994 - DNA, 15 bp, Homo sapiens
taaccggaacgtctc

SEQ ID NO: 87995 - DNA, 15 bp, Homo sapiens
gtaaccggaacgtct

SEQ ID NO: 87996 - DNA, 15 bp, Homo sapiens
agtaaccggaacgtc

SEQ ID NO: 87997 - DNA, 15 bp, Homo sapiens
tagtaaccggaacgt

SEQ ID NO: 87998 - DNA, 15 bp, Homo sapiens
atagtaaccggaacg

SEQ ID NO: 87999 - DNA, 15 bp, Homo sapiens
catagtaaccggaac

SEQ ID NO: 88000 - DNA, 15 bp, Homo sapiens
ccatagtaaccggaa

SEQ ID NO: 88001 - DNA, 15 bp, Homo sapiens
gccatagtaaccgga

SEQ ID NO: 88002 - DNA, 15 bp, Homo sapiens
agccatagtaaccgg

SEQ ID NO: 88003 - DNA, 15 bp, Homo sapiens
tagccatagtaaccg

SEQ ID NO: 88004 - DNA, 15 bp, Homo sapiens
gtagccatagtaacc

SEQ ID NO: 88005 - DNA, 15 bp, Homo sapiens
tgtagccatagtaac

SEQ ID NO: 88006 - DNA, 15 bp, Homo sapiens
atgtagccatagtaa

SEQ ID NO: 88007 - DNA, 15 bp, Homo sapiens
tatgtagccatagta

SEQ ID NO: 88008 - DNA, 15 bp, Homo sapiens
ttatgtagccatagt

SEQ ID NO: 88009 - DNA, 15 bp, Homo sapiens
cttatgtagccatag

SEQ ID NO: 88010 - DNA, 15 bp, Homo sapiens
tcttatgtagccata

SEQ ID NO: 88011 - DNA, 15 bp, Homo sapiens
ttcttatgtagccat

SEQ ID NO: 88012 - DNA, 15 bp, Homo sapiens
tttcttatgtagcca

SEQ ID NO: 88013 - DNA, 15 bp, Homo sapiens
atttcttatgtagcc

SEQ ID NO: 88014 - DNA, 15 bp, Homo sapiens
aatttcttatgtagc

SEQ ID NO: 88015 - DNA, 15 bp, Homo sapiens
taatttcttatgtag

SEQ ID NO: 88016 - DNA, 15 bp, Homo sapiens
gtaatttcttatgta

SEQ ID NO: 88017 - DNA, 15 bp, Homo sapiens
ggtaatttcttatgt

SEQ ID NO: 88018 - DNA, 15 bp, Homo sapiens
gggtaatttcttatg

SEQ ID NO: 88019 - DNA, 15 bp, Homo sapiens
ggggtaatttcttat

SEQ ID NO: 88020 - DNA, 15 bp, Homo sapiens
cggggtaatttctta

SEQ ID NO: 88021 - DNA, 15 bp, Homo sapiens
tcggggtaatttctt

SEQ ID NO: 88022 - DNA, 15 bp, Homo sapiens
ttcggggtaatttct

SEQ ID NO: 88023 - DNA, 15 bp, Homo sapiens
tttcggggtaatttc

SEQ ID NO: 88024 - DNA, 15 bp, Homo sapiens
gtttcggggtaattt

SEQ ID NO: 88025 - DNA, 15 bp, Homo sapiens
ggtttcggggtaatt

SEQ ID NO: 88026 - DNA, 15 bp, Homo sapiens
aggtttcggggtaat

SEQ ID NO: 88027 - DNA, 15 bp, Homo sapiens
taggtttcggggtaa

SEQ ID NO: 88028 - DNA, 15 bp, Homo sapiens
ctaggtttcggggta

SEQ ID NO: 88029 - DNA, 15 bp, Homo sapiens
actaggtttcggggt

SEQ ID NO: 88030 - DNA, 15 bp, Homo sapiens
cactaggtttcgggg

SEQ ID NO: 88031 - DNA, 15 bp, Homo sapiens
ccactaggtttcggg

SEQ ID NO: 88032 - DNA, 15 bp, Homo sapiens
gccactaggtttcgg

SEQ ID NO: 88033 - DNA, 15 bp, Homo sapiens
tgccactaggtttcg

SEQ ID NO: 88034 - DNA, 15 bp, Homo sapiens
atgccactaggtttc

SEQ ID NO: 88035 - DNA, 15 bp, Homo sapiens
tatgccactaggttt

SEQ ID NO: 88036 - DNA, 15 bp, Homo sapiens
ttatgccactaggtt

SEQ ID NO: 88037 - DNA, 15 bp, Homo sapiens
tttatgccactaggt

SEQ ID NO: 88038 - DNA, 15 bp, Homo sapiens
gtttatgccactagg

SEQ ID NO: 88039 - DNA, 15 bp, Homo sapiens
ggtttatgccactag

SEQ ID NO: 88040 - DNA, 15 bp, Homo sapiens
tggtttatgccacta

SEQ ID NO: 88041 - DNA, 15 bp, Homo sapiens
ttggtttatgccact

SEQ ID NO: 88042 - DNA, 15 bp, Homo sapiens
attggtttatgccac

SEQ ID NO: 88043 - DNA, 15 bp, Homo sapiens
aattggtttatgcca

SEQ ID NO: 88044 - DNA, 15 bp, Homo sapiens
taattggtttatgcc

SEQ ID NO: 88045 - DNA, 15 bp, Homo sapiens
ataattggtttatgc

SEQ ID NO: 88046 - DNA, 15 bp, Homo sapiens
aataattggtttatg

SEQ ID NO: 88047 - DNA, 15 bp, Homo sapiens
taataattggtttat

SEQ ID NO: 88048 - DNA, 15 bp, Homo sapiens
ctaataattggttta

SEQ ID NO: 88049 - DNA, 15 bp, Homo sapiens
cctaataattggttt

SEQ ID NO: 88050 - DNA, 15 bp, Homo sapiens
gcctaataattggtt

SEQ ID NO: 88051 - DNA, 15 bp, Homo sapiens
agcctaataattggt

SEQ ID NO: 88052 - DNA, 15 bp, Homo sapiens
gagcctaataattgg

SEQ ID NO: 88053 - DNA, 15 bp, Homo sapiens
tgagcctaataattg

SEQ ID NO: 88054 - DNA, 15 bp, Homo sapiens
atgagcctaataatt

SEQ ID NO: 88055 - DNA, 15 bp, Homo sapiens
catgagcctaataat

SEQ ID NO: 88056 - DNA, 15 bp, Homo sapiens
tcatgagcctaataa

SEQ ID NO: 88057 - DNA, 15 bp, Homo sapiens
ctcatgagcctaata

SEQ ID NO: 88058 - DNA, 15 bp, Homo sapiens
actcatgagcctaat

SEQ ID NO: 88059 - DNA, 15 bp, Homo sapiens
aactcatgagcctaa

SEQ ID NO: 88060 - DNA, 15 bp, Homo sapiens
aaactcatgagccta

SEQ ID NO: 88061 - DNA, 15 bp, Homo sapiens
aaaactcatgagcct

SEQ ID NO: 88062 - DNA, 15 bp, Homo sapiens
caaaactcatgagcc

SEQ ID NO: 88063 - DNA, 15 bp, Homo sapiens
acaaaactcatgagc

SEQ ID NO: 88064 - DNA, 15 bp, Homo sapiens
aacaaaactcatgag

SEQ ID NO: 88065 - DNA, 15 bp, Homo sapiens
taacaaaactcatga

SEQ ID NO: 88066 - DNA, 15 bp, Homo sapiens
ataacaaaactcatg

SEQ ID NO: 88067 - DNA, 15 bp, Homo sapiens
gataacaaaactcat

SEQ ID NO: 88068 - DNA, 15 bp, Homo sapiens
ggataacaaaactca

SEQ ID NO: 88069 - DNA, 15 bp, Homo sapiens
aggataacaaaactc

SEQ ID NO: 88070 - DNA, 15 bp, Homo sapiens
aaggataacaaaact

SEQ ID NO: 88071 - DNA, 15 bp, Homo sapiens
gaaggataacaaaac

SEQ ID NO: 88072 - DNA, 15 bp, Homo sapiens
tgaaggataacaaaa

SEQ ID NO: 88073 - DNA, 15 bp, Homo sapiens
gtgaaggataacaaa

SEQ ID NO: 88074 - DNA, 15 bp, Homo sapiens
agtgaaggataacaa

SEQ ID NO: 88075 - DNA, 15 bp, Homo sapiens
cagtgaaggataaca

SEQ ID NO: 88076 - DNA, 15 bp, Homo sapiens
tcagtgaaggataac

SEQ ID NO: 88077 - DNA, 15 bp, Homo sapiens
ttcagtgaaggataa

SEQ ID NO: 88078 - DNA, 15 bp, Homo sapiens
cttcagtgaaggata

SEQ ID NO: 88079 - DNA, 15 bp, Homo sapiens
ccttcagtgaaggat

SEQ ID NO: 88080 - DNA, 15 bp, Homo sapiens
gccttcagtgaagga

SEQ ID NO: 88081 - DNA, 15 bp, Homo sapiens
agccttcagtgaagg

SEQ ID NO: 88082 - DNA, 15 bp, Homo sapiens
gagccttcagtgaag

SEQ ID NO: 88083 - DNA, 15 bp, Homo sapiens
cgagccttcagtgaa

SEQ ID NO: 88084 - DNA, 15 bp, Homo sapiens
acgagccttcagtga

SEQ ID NO: 88085 - DNA, 15 bp, Homo sapiens
aacgagccttcagtg

SEQ ID NO: 88086 - DNA, 15 bp, Homo sapiens
gaacgagccttcagt

SEQ ID NO: 88087 - DNA, 15 bp, Homo sapiens
tgaacgagccttcag

SEQ ID NO: 88088 - DNA, 15 bp, Homo sapiens
gtgaacgagccttca

SEQ ID NO: 88089 - DNA, 15 bp, Homo sapiens
agtgaacgagccttc

SEQ ID NO: 88090 - DNA, 15 bp, Homo sapiens
gagtgaacgagcctt

SEQ ID NO: 88091 - DNA, 15 bp, Homo sapiens
agagtgaacgagcct

SEQ ID NO: 88092 - DNA, 15 bp, Homo sapiens
gagagtgaacgagcc

SEQ ID NO: 88093 - DNA, 15 bp, Homo sapiens
tgagagtgaacgagc

SEQ ID NO: 88094 - DNA, 15 bp, Homo sapiens
ttgagagtgaacgag

SEQ ID NO: 88095 - DNA, 15 bp, Homo sapiens
cttgagagtgaacga

SEQ ID NO: 88096 - DNA, 15 bp, Homo sapiens
acttgagagtgaacg

SEQ ID NO: 88097 - DNA, 15 bp, Homo sapiens
gacttgagagtgaac

SEQ ID NO: 88098 - DNA, 15 bp, Homo sapiens
agacttgagagtgaa

SEQ ID NO: 88099 - DNA, 15 bp, Homo sapiens
cagacttgagagtga

SEQ ID NO: 88100 - DNA, 15 bp, Homo sapiens
ccagacttgagagtg

SEQ ID NO: 88101 - DNA, 15 bp, Homo sapiens
tccagacttgagagt

SEQ ID NO: 88102 - DNA, 15 bp, Homo sapiens
ctccagacttgagag

SEQ ID NO: 88103 - DNA, 15 bp, Homo sapiens
cctccagacttgaga

SEQ ID NO: 88104 - DNA, 15 bp, Homo sapiens
acctccagacttgag

SEQ ID NO: 88105 - DNA, 15 bp, Homo sapiens
aacctccagacttga

SEQ ID NO: 88106 - DNA, 15 bp, Homo sapiens
caacctccagacttg

SEQ ID NO: 88107 - DNA, 15 bp, Homo sapiens
tcaacctccagactt

SEQ ID NO: 88108 - DNA, 15 bp, Homo sapiens
gtcaacctccagact

SEQ ID NO: 88109 - DNA, 15 bp, Homo sapiens
cgtcaacctccagac

SEQ ID NO: 88110 - DNA, 15 bp, Homo sapiens
gcgtcaacctccaga

SEQ ID NO: 88111 - DNA, 15 bp, Homo sapiens
agcgtcaacctccag

SEQ ID NO: 88112 - DNA, 15 bp, Homo sapiens
cagcgtcaacctcca

SEQ ID NO: 88113 - DNA, 15 bp, Homo sapiens
acagcgtcaacctcc

SEQ ID NO: 88114 - DNA, 15 bp, Homo sapiens
cacagcgtcaacctc

SEQ ID NO: 88115 - DNA, 15 bp, Homo sapiens
ccacagcgtcaacct

SEQ ID NO: 88116 - DNA, 15 bp, Homo sapiens
accacagcgtcaacc

SEQ ID NO: 88117 - DNA, 15 bp, Homo sapiens
aaccacagcgtcaac

SEQ ID NO: 88118 - DNA, 15 bp, Homo sapiens
caaccacagcgtcaa

SEQ ID NO: 88119 - DNA, 15 bp, Homo sapiens
ccaaccacagcgtca

SEQ ID NO: 88120 - DNA, 15 bp, Homo sapiens
gccaaccacagcgtc

SEQ ID NO: 88121 - DNA, 15 bp, Homo sapiens
agccaaccacagcgt

SEQ ID NO: 88122 - DNA, 15 bp, Homo sapiens
cagccaaccacagcg

SEQ ID NO: 88123 - DNA, 15 bp, Homo sapiens
acagccaaccacagc

SEQ ID NO: 88124 - DNA, 15 bp, Homo sapiens
cacagccaaccacag

SEQ ID NO: 88125 - DNA, 15 bp, Homo sapiens
ccacagccaaccaca

SEQ ID NO: 88126 - DNA, 15 bp, Homo sapiens
gccacagccaaccac

SEQ ID NO: 88127 - DNA, 15 bp, Homo sapiens
ggccacagccaacca

SEQ ID NO: 88128 - DNA, 15 bp, Homo sapiens
aggccacagccaacc

SEQ ID NO: 88129 - DNA, 15 bp, Homo sapiens
gaggccacagccaac

SEQ ID NO: 88130 - DNA, 15 bp, Homo sapiens
cgaggccacagccaa

SEQ ID NO: 88131 - DNA, 15 bp, Homo sapiens
ccgaggccacagcca

SEQ ID NO: 88132 - DNA, 15 bp, Homo sapiens
accgaggccacagcc

SEQ ID NO: 88133 - DNA, 15 bp, Homo sapiens
aaccgaggccacagc

SEQ ID NO: 88134 - DNA, 15 bp, Homo sapiens
gaaccgaggccacag

SEQ ID NO: 88135 - DNA, 15 bp, Homo sapiens
ggaaccgaggccaca

SEQ ID NO: 88136 - DNA, 15 bp, Homo sapiens
aggaaccgaggccac

SEQ ID NO: 88137 - DNA, 15 bp, Homo sapiens
gaggaaccgaggcca

SEQ ID NO: 88138 - DNA, 15 bp, Homo sapiens
agaggaaccgaggcc

SEQ ID NO: 88139 - DNA, 15 bp, Homo sapiens
gagaggaaccgaggc

SEQ ID NO: 88140 - DNA, 15 bp, Homo sapiens
ggagaggaaccgagg

SEQ ID NO: 88141 - DNA, 15 bp, Homo sapiens
aggagaggaaccgag

SEQ ID NO: 88142 - DNA, 15 bp, Homo sapiens
caggagaggaaccga

SEQ ID NO: 88143 - DNA, 15 bp, Homo sapiens
gcaggagaggaaccg

SEQ ID NO: 88144 - DNA, 15 bp, Homo sapiens
cgcaggagaggaacc

SEQ ID NO: 88145 - DNA, 15 bp, Homo sapiens
ccgcaggagaggaac

SEQ ID NO: 88146 - DNA, 15 bp, Homo sapiens
cccgcaggagaggaa

SEQ ID NO: 88147 - DNA, 15 bp, Homo sapiens
gcccgcaggagagga

SEQ ID NO: 88148 - DNA, 15 bp, Homo sapiens
ggcccgcaggagagg

SEQ ID NO: 88149 - DNA, 15 bp, Homo sapiens
aggcccgcaggagag

SEQ ID NO: 88150 - DNA, 15 bp, Homo sapiens
gaggcccgcaggaga

SEQ ID NO: 88151 - DNA, 15 bp, Homo sapiens
agaggcccgcaggag

SEQ ID NO: 88152 - DNA, 15 bp, Homo sapiens
gagaggcccgcagga

SEQ ID NO: 88153 - DNA, 15 bp, Homo sapiens
ggagaggcccgcagg

SEQ ID NO: 88154 - DNA, 15 bp, Homo sapiens
tggagaggcccgcag

SEQ ID NO: 88155 - DNA, 15 bp, Homo sapiens
atggagaggcccgca

SEQ ID NO: 88156 - DNA, 15 bp, Homo sapiens
tatggagaggcccgc

SEQ ID NO: 88157 - DNA, 15 bp, Homo sapiens
gtatggagaggcccg

SEQ ID NO: 88158 - DNA, 15 bp, Homo sapiens
cgtatggagaggccc

SEQ ID NO: 88159 - DNA, 15 bp, Homo sapiens
ccgtatggagaggcc

SEQ ID NO: 88160 - DNA, 15 bp, Homo sapiens
accgtatggagaggc

SEQ ID NO: 88161 - DNA, 15 bp, Homo sapiens
aaccgtatggagagg

SEQ ID NO: 88162 - DNA, 15 bp, Homo sapiens
caaccgtatggagag

SEQ ID NO: 88163 - DNA, 15 bp, Homo sapiens
gcaaccgtatggaga

SEQ ID NO: 88164 - DNA, 15 bp, Homo sapiens
agcaaccgtatggag

SEQ ID NO: 88165 - DNA, 15 bp, Homo sapiens
gagcaaccgtatgga

SEQ ID NO: 88166 - DNA, 15 bp, Homo sapiens
tgagcaaccgtatgg

SEQ ID NO: 88167 - DNA, 15 bp, Homo sapiens
ctgagcaaccgtatg

SEQ ID NO: 88168 - DNA, 15 bp, Homo sapiens
gctgagcaaccgtat

SEQ ID NO: 88169 - DNA, 15 bp, Homo sapiens
agctgagcaaccgta

SEQ ID NO: 88170 - DNA, 15 bp, Homo sapiens
aagctgagcaaccgt

SEQ ID NO: 88171 - DNA, 15 bp, Homo sapiens
caagctgagcaaccg

SEQ ID NO: 88172 - DNA, 15 bp, Homo sapiens
ccaagctgagcaacc

SEQ ID NO: 88173 - DNA, 15 bp, Homo sapiens
cccaagctgagcaac

SEQ ID NO: 88174 - DNA, 15 bp, Homo sapiens
gcccaagctgagcaa

SEQ ID NO: 88175 - DNA, 15 bp, Homo sapiens
agcccaagctgagca

SEQ ID NO: 88176 - DNA, 15 bp, Homo sapiens
tagcccaagctgagc

SEQ ID NO: 88177 - DNA, 15 bp, Homo sapiens
ttagcccaagctgag

SEQ ID NO: 88178 - DNA, 15 bp, Homo sapiens
attagcccaagctga

SEQ ID NO: 88179 - DNA, 15 bp, Homo sapiens
gattagcccaagctg

SEQ ID NO: 88180 - DNA, 15 bp, Homo sapiens
agattagcccaagct

SEQ ID NO: 88181 - DNA, 15 bp, Homo sapiens
cagattagcccaagc

SEQ ID NO: 88182 - DNA, 15 bp, Homo sapiens
tcagattagcccaag

SEQ ID NO: 88183 - DNA, 15 bp, Homo sapiens
ctcagattagcccaa

SEQ ID NO: 88184 - DNA, 15 bp, Homo sapiens
gctcagattagccca

SEQ ID NO: 88185 - DNA, 15 bp, Homo sapiens
agctcagattagccc

SEQ ID NO: 88186 - DNA, 15 bp, Homo sapiens
aagctcagattagcc

SEQ ID NO: 88187 - DNA, 15 bp, Homo sapiens
gaagctcagattagc

SEQ ID NO: 88188 - DNA, 15 bp, Homo sapiens
ggaagctcagattag

SEQ ID NO: 88189 - DNA, 15 bp, Homo sapiens
aggaagctcagatta

SEQ ID NO: 88190 - DNA, 15 bp, Homo sapiens
gaggaagctcagatt

SEQ ID NO: 88191 - DNA, 15 bp, Homo sapiens
tgaggaagctcagat

SEQ ID NO: 88192 - DNA, 15 bp, Homo sapiens
gtgaggaagctcaga

SEQ ID NO: 88193 - DNA, 15 bp, Homo sapiens
tgtgaggaagctcag

SEQ ID NO: 88194 - DNA, 15 bp, Homo sapiens
ctgtgaggaagctca

SEQ ID NO: 88195 - DNA, 15 bp, Homo sapiens
gctgtgaggaagctc

SEQ ID NO: 88196 - DNA, 15 bp, Homo sapiens
tgctgtgaggaagct

SEQ ID NO: 88197 - DNA, 15 bp, Homo sapiens
atgctgtgaggaagc

SEQ ID NO: 88198 - DNA, 15 bp, Homo sapiens
catgctgtgaggaag

SEQ ID NO: 88199 - DNA, 15 bp, Homo sapiens
ccatgctgtgaggaa

SEQ ID NO: 88200 - DNA, 15 bp, Homo sapiens
accatgctgtgagga

SEQ ID NO: 88201 - DNA, 15 bp, Homo sapiens
caccatgctgtgagg

SEQ ID NO: 88202 - DNA, 15 bp, Homo sapiens
ccaccatgctgtgag

SEQ ID NO: 88203 - DNA, 15 bp, Homo sapiens
gccaccatgctgtga

SEQ ID NO: 88204 - DNA, 15 bp, Homo sapiens
cgccaccatgctgtg

SEQ ID NO: 88205 - DNA, 15 bp, Homo sapiens
tcgccaccatgctgt

SEQ ID NO: 88206 - DNA, 15 bp, Homo sapiens
atcgccaccatgctg

SEQ ID NO: 88207 - DNA, 15 bp, Homo sapiens
aatcgccaccatgct

SEQ ID NO: 88208 - DNA, 15 bp, Homo sapiens
aaatcgccaccatgc

SEQ ID NO: 88209 - DNA, 15 bp, Homo sapiens
gaaatcgccaccatg

SEQ ID NO: 88210 - DNA, 15 bp, Homo sapiens
ggaaatcgccaccat

SEQ ID NO: 88211 - DNA, 15 bp, Homo sapiens
tggaaatcgccacca

SEQ ID NO: 88212 - DNA, 15 bp, Homo sapiens
gtggaaatcgccacc

SEQ ID NO: 88213 - DNA, 15 bp, Homo sapiens
cgtggaaatcgccac

SEQ ID NO: 88214 - DNA, 15 bp, Homo sapiens
ccgtggaaatcgcca

SEQ ID NO: 88215 - DNA, 15 bp, Homo sapiens
tccgtggaaatcgcc

SEQ ID NO: 88216 - DNA, 15 bp, Homo sapiens
gtccgtggaaatcgc

SEQ ID NO: 88217 - DNA, 15 bp, Homo sapiens
agtccgtggaaatcg

SEQ ID NO: 88218 - DNA, 15 bp, Homo sapiens
tagtccgtggaaatc

SEQ ID NO: 88219 - DNA, 15 bp, Homo sapiens
ctagtccgtggaaat

SEQ ID NO: 88220 - DNA, 15 bp, Homo sapiens
tctagtccgtggaaa

SEQ ID NO: 88221 - DNA, 15 bp, Homo sapiens
ctctagtccgtggaa

SEQ ID NO: 88222 - DNA, 15 bp, Homo sapiens
cctctagtccgtgga

SEQ ID NO: 88223 - DNA, 15 bp, Homo sapiens
gcctctagtccgtgg

SEQ ID NO: 88224 - DNA, 15 bp, Homo sapiens
ggcctctagtccgtg

SEQ ID NO: 88225 - DNA, 15 bp, Homo sapiens
gggcctctagtccgt

SEQ ID NO: 88226 - DNA, 15 bp, Homo sapiens
tgggcctctagtccg

SEQ ID NO: 88227 - DNA, 15 bp, Homo sapiens
ttgggcctctagtcc

SEQ ID NO: 88228 - DNA, 15 bp, Homo sapiens
cttgggcctctagtc

SEQ ID NO: 88229 - DNA, 15 bp, Homo sapiens
tcttgggcctctagt

SEQ ID NO: 88230 - DNA, 15 bp, Homo sapiens
ctcttgggcctctag

SEQ ID NO: 88231 - DNA, 15 bp, Homo sapiens
tctcttgggcctcta

SEQ ID NO: 88232 - DNA, 15 bp, Homo sapiens
ctctcttgggcctct

SEQ ID NO: 88233 - DNA, 15 bp, Homo sapiens
tctctcttgggcctc

SEQ ID NO: 88234 - DNA, 15 bp, Homo sapiens
ttctctcttgggcct

SEQ ID NO: 88235 - DNA, 15 bp, Homo sapiens
gttctctcttgggcc

SEQ ID NO: 88236 - DNA, 15 bp, Homo sapiens
tgttctctcttgggc

SEQ ID NO: 88237 - DNA, 15 bp, Homo sapiens
ttgttctctcttggg

SEQ ID NO: 88238 - DNA, 15 bp, Homo sapiens
cttgttctctcttgg

SEQ ID NO: 88239 - DNA, 15 bp, Homo sapiens
tcttgttctctcttg

SEQ ID NO: 88240 - DNA, 15 bp, Homo sapiens
ttcttgttctctctt

SEQ ID NO: 88241 - DNA, 15 bp, Homo sapiens
cttcttgttctctct

SEQ ID NO: 88242 - DNA, 15 bp, Homo sapiens
gcttcttgttctctc

SEQ ID NO: 88243 - DNA, 15 bp, Homo sapiens
tgcttcttgttctct

SEQ ID NO: 88244 - DNA, 15 bp, Homo sapiens
ctgcttcttgttctc

SEQ ID NO: 88245 - DNA, 15 bp, Homo sapiens
cctgcttcttgttct

SEQ ID NO: 88246 - DNA, 15 bp, Homo sapiens
acctgcttcttgttc

SEQ ID NO: 88247 - DNA, 15 bp, Homo sapiens
cacctgcttcttgtt

SEQ ID NO: 88248 - DNA, 15 bp, Homo sapiens
ccacctgcttcttgt

SEQ ID NO: 88249 - DNA, 15 bp, Homo sapiens
tccacctgcttcttg

SEQ ID NO: 88250 - DNA, 15 bp, Homo sapiens
ttccacctgcttctt

SEQ ID NO: 88251 - DNA, 15 bp, Homo sapiens
cttccacctgcttct

SEQ ID NO: 88252 - DNA, 15 bp, Homo sapiens
acttccacctgcttc

SEQ ID NO: 88253 - DNA, 15 bp, Homo sapiens
gacttccacctgctt

SEQ ID NO: 88254 - DNA, 15 bp, Homo sapiens
tgacttccacctgct

SEQ ID NO: 88255 - DNA, 15 bp, Homo sapiens
atgacttccacctgc

SEQ ID NO: 88256 - DNA, 15 bp, Homo sapiens
tatgacttccacctg

SEQ ID NO: 88257 - DNA, 15 bp, Homo sapiens
ttatgacttccacct

SEQ ID NO: 88258 - DNA, 15 bp, Homo sapiens
attatgacttccacc

SEQ ID NO: 88259 - DNA, 15 bp, Homo sapiens
tattatgacttccac

SEQ ID NO: 88260 - DNA, 15 bp, Homo sapiens
gtattatgacttcca

SEQ ID NO: 88261 - DNA, 15 bp, Homo sapiens
ggtattatgacttcc

SEQ ID NO: 88262 - DNA, 15 bp, Homo sapiens
aggtattatgacttc

SEQ ID NO: 88263 - DNA, 15 bp, Homo sapiens
aaggtattatgactt

SEQ ID NO: 88264 - DNA, 15 bp, Homo sapiens
aaaggtattatgact

SEQ ID NO: 88265 - DNA, 15 bp, Homo sapiens
taaaggtattatgac

SEQ ID NO: 88266 - DNA, 15 bp, Homo sapiens
ataaaggtattatga

SEQ ID NO: 88267 - DNA, 15 bp, Homo sapiens
gataaaggtattatg

SEQ ID NO: 88268 - DNA, 15 bp, Homo sapiens
tgataaaggtattat

SEQ ID NO: 88269 - DNA, 15 bp, Homo sapiens
gtgataaaggtatta

SEQ ID NO: 88270 - DNA, 15 bp, Homo sapiens
ggtgataaaggtatt

SEQ ID NO: 88271 - DNA, 15 bp, Homo sapiens
aggtgataaaggtat

SEQ ID NO: 88272 - DNA, 15 bp, Homo sapiens
aaggtgataaaggta

SEQ ID NO: 88273 - DNA, 15 bp, Homo sapiens
caaggtgataaaggt

SEQ ID NO: 88274 - DNA, 15 bp, Homo sapiens
acaaggtgataaagg

SEQ ID NO: 88275 - DNA, 15 bp, Homo sapiens
gacaaggtgataaag

SEQ ID NO: 88276 - DNA, 15 bp, Homo sapiens
ggacaaggtgataaa

SEQ ID NO: 88277 - DNA, 15 bp, Homo sapiens
gggacaaggtgataa

SEQ ID NO: 88278 - DNA, 15 bp, Homo sapiens
cgggacaaggtgata

SEQ ID NO: 88279 - DNA, 15 bp, Homo sapiens
ccgggacaaggtgat

SEQ ID NO: 88280 - DNA, 15 bp, Homo sapiens
tccgggacaaggtga

SEQ ID NO: 88281 - DNA, 15 bp, Homo sapiens
ttccgggacaaggtg

SEQ ID NO: 88282 - DNA, 15 bp, Homo sapiens
cttccgggacaaggt

SEQ ID NO: 88283 - DNA, 15 bp, Homo sapiens
acttccgggacaagg

SEQ ID NO: 88284 - DNA, 15 bp, Homo sapiens
gacttccgggacaag

SEQ ID NO: 88285 - DNA, 15 bp, Homo sapiens
tgacttccgggacaa

SEQ ID NO: 88286 - DNA, 15 bp, Homo sapiens
gtgacttccgggaca

SEQ ID NO: 88287 - DNA, 15 bp, Homo sapiens
cgtgacttccgggac

SEQ ID NO: 88288 - DNA, 15 bp, Homo sapiens
gcgtgacttccggga

SEQ ID NO: 88289 - DNA, 15 bp, Homo sapiens
tgcgtgacttccggg

SEQ ID NO: 88290 - DNA, 15 bp, Homo sapiens
ttgcgtgacttccgg

SEQ ID NO: 88291 - DNA, 15 bp, Homo sapiens
cttgcgtgacttccg

SEQ ID NO: 88292 - DNA, 15 bp, Homo sapiens
ccttgcgtgacttcc

SEQ ID NO: 88293 - DNA, 15 bp, Homo sapiens
gccttgcgtgacttc

SEQ ID NO: 88294 - DNA, 15 bp, Homo sapiens
ggccttgcgtgactt

SEQ ID NO: 88295 - DNA, 15 bp, Homo sapiens
tggccttgcgtgact

SEQ ID NO: 88296 - DNA, 15 bp, Homo sapiens
atggccttgcgtgac

SEQ ID NO: 88297 - DNA, 15 bp, Homo sapiens
aatggccttgcgtga

SEQ ID NO: 88298 - DNA, 15 bp, Homo sapiens
aaatggccttgcgtg

SEQ ID NO: 88299 - DNA, 15 bp, Homo sapiens
gaaatggccttgcgt

SEQ ID NO: 88300 - DNA, 15 bp, Homo sapiens
agaaatggccttgcg

SEQ ID NO: 88301 - DNA, 15 bp, Homo sapiens
aagaaatggccttgc

SEQ ID NO: 88302 - DNA, 15 bp, Homo sapiens
caagaaatggccttg

SEQ ID NO: 88303 - DNA, 15 bp, Homo sapiens
tcaagaaatggcctt

SEQ ID NO: 88304 - DNA, 15 bp, Homo sapiens
ctcaagaaatggcct

SEQ ID NO: 88305 - DNA, 15 bp, Homo sapiens
cctcaagaaatggcc

SEQ ID NO: 88306 - DNA, 15 bp, Homo sapiens
gcctcaagaaatggc

SEQ ID NO: 88307 - DNA, 15 bp, Homo sapiens
tgcctcaagaaatgg

SEQ ID NO: 88308 - DNA, 15 bp, Homo sapiens
ttgcctcaagaaatg

SEQ ID NO: 88309 - DNA, 15 bp, Homo sapiens
attgcctcaagaaat

SEQ ID NO: 88310 - DNA, 15 bp, Homo sapiens
gattgcctcaagaaa

SEQ ID NO: 88311 - DNA, 15 bp, Homo sapiens
tgattgcctcaagaa

SEQ ID NO: 88312 - DNA, 15 bp, Homo sapiens
atgattgcctcaaga

SEQ ID NO: 88313 - DNA, 15 bp, Homo sapiens
tatgattgcctcaag

SEQ ID NO: 88314 - DNA, 15 bp, Homo sapiens
ttatgattgcctcaa

SEQ ID NO: 88315 - DNA, 15 bp, Homo sapiens
tttatgattgcctca

SEQ ID NO: 88316 - DNA, 15 bp, Homo sapiens
ctttatgattgcctc

SEQ ID NO: 88317 - DNA, 15 bp, Homo sapiens
actttatgattgcct

SEQ ID NO: 88318 - DNA, 15 bp, Homo sapiens
aactttatgattgcc

SEQ ID NO: 88319 - DNA, 15 bp, Homo sapiens
gaactttatgattgc

SEQ ID NO: 88320 - DNA, 15 bp, Homo sapiens
ggaactttatgattg

SEQ ID NO: 88321 - DNA, 15 bp, Homo sapiens
tggaactttatgatt

SEQ ID NO: 88322 - DNA, 15 bp, Homo sapiens
atggaactttatgat

SEQ ID NO: 88323 - DNA, 15 bp, Homo sapiens
gatggaactttatga

SEQ ID NO: 88324 - DNA, 15 bp, Homo sapiens
agatggaactttatg

SEQ ID NO: 88325 - DNA, 15 bp, Homo sapiens
cagatggaactttat

SEQ ID NO: 88326 - DNA, 15 bp, Homo sapiens
tcagatggaacttta

SEQ ID NO: 88327 - DNA, 15 bp, Homo sapiens
ctcagatggaacttt

SEQ ID NO: 88328 - DNA, 15 bp, Homo sapiens
actcagatggaactt

SEQ ID NO: 88329 - DNA, 15 bp, Homo sapiens
aactcagatggaact

SEQ ID NO: 88330 - DNA, 15 bp, Homo sapiens
gaactcagatggaac

SEQ ID NO: 88331 - DNA, 15 bp, Homo sapiens
tgaactcagatggaa

SEQ ID NO: 88332 - DNA, 15 bp, Homo sapiens
ttgaactcagatgga

SEQ ID NO: 88333 - DNA, 15 bp, Homo sapiens
cttgaactcagatgg

SEQ ID NO: 88334 - DNA, 15 bp, Homo sapiens
ccttgaactcagatg

SEQ ID NO: 88335 - DNA, 15 bp, Homo sapiens
cccttgaactcagat

SEQ ID NO: 88336 - DNA, 15 bp, Homo sapiens
ccccttgaactcaga

SEQ ID NO: 88337 - DNA, 15 bp, Homo sapiens
cccccttgaactcag

SEQ ID NO: 88338 - DNA, 15 bp, Homo sapiens
tcccccttgaactca

SEQ ID NO: 88339 - DNA, 15 bp, Homo sapiens
ttcccccttgaactc

SEQ ID NO: 88340 - DNA, 15 bp, Homo sapiens
cttcccccttgaact

SEQ ID NO: 88341 - DNA, 15 bp, Homo sapiens
tcttcccccttgaac

SEQ ID NO: 88342 - DNA, 15 bp, Homo sapiens
ttcttcccccttgaa

SEQ ID NO: 88343 - DNA, 15 bp, Homo sapiens
tttcttcccccttga

SEQ ID NO: 88344 - DNA, 15 bp, Homo sapiens
ttttcttcccccttg

SEQ ID NO: 88345 - DNA, 15 bp, Homo sapiens
attttcttccccctt

SEQ ID NO: 88346 - DNA, 15 bp, Homo sapiens
tattttcttccccct

SEQ ID NO: 88347 - DNA, 15 bp, Homo sapiens
ttattttcttccccc

SEQ ID NO: 88348 - DNA, 15 bp, Homo sapiens
cttattttcttcccc

SEQ ID NO: 88349 - DNA, 15 bp, Homo sapiens
gcttattttcttccc

SEQ ID NO: 88350 - DNA, 15 bp, Homo sapiens
agcttattttcttcc

SEQ ID NO: 88351 - DNA, 15 bp, Homo sapiens
gagcttattttcttc

SEQ ID NO: 88352 - DNA, 15 bp, Homo sapiens
agagcttattttctt

SEQ ID NO: 88353 - DNA, 15 bp, Homo sapiens
cagagcttattttct

SEQ ID NO: 88354 - DNA, 15 bp, Homo sapiens
gcagagcttattttc

SEQ ID NO: 88355 - DNA, 15 bp, Homo sapiens
ggcagagcttatttt

SEQ ID NO: 88356 - DNA, 15 bp, Homo sapiens
aggcagagcttattt

SEQ ID NO: 88357 - DNA, 15 bp, Homo sapiens
aaggcagagcttatt

SEQ ID NO: 88358 - DNA, 15 bp, Homo sapiens
aaaggcagagcttat

SEQ ID NO: 88359 - DNA, 15 bp, Homo sapiens
aaaaggcagagctta

SEQ ID NO: 88360 - DNA, 15 bp, Homo sapiens
caaaaggcagagctt

SEQ ID NO: 88361 - DNA, 15 bp, Homo sapiens
tcaaaaggcagagct

SEQ ID NO: 88362 - DNA, 15 bp, Homo sapiens
atcaaaaggcagagc

SEQ ID NO: 88363 - DNA, 15 bp, Homo sapiens
catcaaaaggcagag

SEQ ID NO: 88364 - DNA, 15 bp, Homo sapiens
ccatcaaaaggcaga

SEQ ID NO: 88365 - DNA, 15 bp, Homo sapiens
cccatcaaaaggcag

SEQ ID NO: 88366 - DNA, 15 bp, Homo sapiens
tcccatcaaaaggca

SEQ ID NO: 88367 - DNA, 15 bp, Homo sapiens
ttcccatcaaaaggc

SEQ ID NO: 88368 - DNA, 15 bp, Homo sapiens
cttcccatcaaaagg

SEQ ID NO: 88369 - DNA, 15 bp, Homo sapiens
tcttcccatcaaaag

SEQ ID NO: 88370 - DNA, 15 bp, Homo sapiens
ctcttcccatcaaaa

SEQ ID NO: 88371 - DNA, 15 bp, Homo sapiens
tctcttcccatcaaa

SEQ ID NO: 88372 - DNA, 15 bp, Homo sapiens
ctctcttcccatcaa

SEQ ID NO: 88373 - DNA, 15 bp, Homo sapiens
tctctcttcccatca

SEQ ID NO: 88374 - DNA, 15 bp, Homo sapiens
ctctctcttcccatc

SEQ ID NO: 88375 - DNA, 15 bp, Homo sapiens
cctctctcttcccat

SEQ ID NO: 88376 - DNA, 15 bp, Homo sapiens
gcctctctcttccca

SEQ ID NO: 88377 - DNA, 15 bp, Homo sapiens
tgcctctctcttccc

SEQ ID NO: 88378 - DNA, 15 bp, Homo sapiens
ttgcctctctcttcc

SEQ ID NO: 88379 - DNA, 15 bp, Homo sapiens
tttgcctctctcttc

SEQ ID NO: 88380 - DNA, 15 bp, Homo sapiens
ctttgcctctctctt

SEQ ID NO: 88381 - DNA, 15 bp, Homo sapiens
tctttgcctctctct

SEQ ID NO: 88382 - DNA, 15 bp, Homo sapiens
atctttgcctctctc

SEQ ID NO: 88383 - DNA, 15 bp, Homo sapiens
tatctttgcctctct

SEQ ID NO: 88384 - DNA, 15 bp, Homo sapiens
ttatctttgcctctc

SEQ ID NO: 88385 - DNA, 15 bp, Homo sapiens
cttatctttgcctct

SEQ ID NO: 88386 - DNA, 15 bp, Homo sapiens
tcttatctttgcctc

SEQ ID NO: 88387 - DNA, 15 bp, Homo sapiens
ttcttatctttgcct

SEQ ID NO: 88388 - DNA, 15 bp, Homo sapiens
tttcttatctttgcc

SEQ ID NO: 88389 - DNA, 15 bp, Homo sapiens
atttcttatctttgc

SEQ ID NO: 88390 - DNA, 15 bp, Homo sapiens
tatttcttatctttg

SEQ ID NO: 88391 - DNA, 15 bp, Homo sapiens
atatttcttatcttt

SEQ ID NO: 88392 - DNA, 15 bp, Homo sapiens
aatatttcttatctt

SEQ ID NO: 88393 - DNA, 15 bp, Homo sapiens
gaatatttcttatct

SEQ ID NO: 88394 - DNA, 15 bp, Homo sapiens
agaatatttcttatc

SEQ ID NO: 88395 - DNA, 15 bp, Homo sapiens
cagaatatttcttat

SEQ ID NO: 88396 - DNA, 15 bp, Homo sapiens
tcagaatatttctta

SEQ ID NO: 88397 - DNA, 15 bp, Homo sapiens
atcagaatatttctt

SEQ ID NO: 88398 - DNA, 15 bp, Homo sapiens
catcagaatatttct

SEQ ID NO: 88399 - DNA, 15 bp, Homo sapiens
ccatcagaatatttc

SEQ ID NO: 88400 - DNA, 15 bp, Homo sapiens
accatcagaatattt

SEQ ID NO: 88401 - DNA, 15 bp, Homo sapiens
gaccatcagaatatt

SEQ ID NO: 88402 - DNA, 15 bp, Homo sapiens
tgaccatcagaatat

SEQ ID NO: 88403 - DNA, 15 bp, Homo sapiens
atgaccatcagaata

SEQ ID NO: 88404 - DNA, 15 bp, Homo sapiens
aatgaccatcagaat

SEQ ID NO: 88405 - DNA, 15 bp, Homo sapiens
aaatgaccatcagaa

SEQ ID NO: 88406 - DNA, 15 bp, Homo sapiens
aaaatgaccatcaga

SEQ ID NO: 88407 - DNA, 15 bp, Homo sapiens
caaaatgaccatcag

SEQ ID NO: 88408 - DNA, 15 bp, Homo sapiens
tcaaaatgaccatca

SEQ ID NO: 88409 - DNA, 15 bp, Homo sapiens
ctcaaaatgaccatc

SEQ ID NO: 88410 - DNA, 15 bp, Homo sapiens
tctcaaaatgaccat

SEQ ID NO: 88411 - DNA, 15 bp, Homo sapiens
ttctcaaaatgacca

SEQ ID NO: 88412 - DNA, 15 bp, Homo sapiens
tttctcaaaatgacc

SEQ ID NO: 88413 - DNA, 15 bp, Homo sapiens
ttttctcaaaatgac

SEQ ID NO: 88414 - DNA, 15 bp, Homo sapiens
attttctcaaaatga

SEQ ID NO: 88415 - DNA, 15 bp, Homo sapiens
cattttctcaaaatg

SEQ ID NO: 88416 - DNA, 15 bp, Homo sapiens
gcattttctcaaaat

SEQ ID NO: 88417 - DNA, 15 bp, Homo sapiens
cgcattttctcaaaa

SEQ ID NO: 88418 - DNA, 15 bp, Homo sapiens
tcgcattttctcaaa

SEQ ID NO: 88419 - DNA, 15 bp, Homo sapiens
gtcgcattttctcaa

SEQ ID NO: 88420 - DNA, 15 bp, Homo sapiens
agtcgcattttctca

SEQ ID NO: 88421 - DNA, 15 bp, Homo sapiens
cagtcgcattttctc

SEQ ID NO: 88422 - DNA, 15 bp, Homo sapiens
acagtcgcattttct

SEQ ID NO: 88423 - DNA, 15 bp, Homo sapiens
cacagtcgcattttc

SEQ ID NO: 88424 - DNA, 15 bp, Homo sapiens
gcacagtcgcatttt

SEQ ID NO: 88425 - DNA, 15 bp, Homo sapiens
ggcacagtcgcattt

SEQ ID NO: 88426 - DNA, 15 bp, Homo sapiens
aggcacagtcgcatt

SEQ ID NO: 88427 - DNA, 15 bp, Homo sapiens
gaggcacagtcgcat

SEQ ID NO: 88428 - DNA, 15 bp, Homo sapiens
tgaggcacagtcgca

SEQ ID NO: 88429 - DNA, 15 bp, Homo sapiens
atgaggcacagtcgc

SEQ ID NO: 88430 - DNA, 15 bp, Homo sapiens
catgaggcacagtcg

SEQ ID NO: 88431 - DNA, 15 bp, Homo sapiens
gcatgaggcacagtc

SEQ ID NO: 88432 - DNA, 15 bp, Homo sapiens
tgcatgaggcacagt

SEQ ID NO: 88433 - DNA, 15 bp, Homo sapiens
ttgcatgaggcacag

SEQ ID NO: 88434 - DNA, 15 bp, Homo sapiens
tttgcatgaggcaca

SEQ ID NO: 88435 - DNA, 15 bp, Homo sapiens
ctttgcatgaggcac

SEQ ID NO: 88436 - DNA, 15 bp, Homo sapiens
cctttgcatgaggca

SEQ ID NO: 88437 - DNA, 15 bp, Homo sapiens
tcctttgcatgaggc

SEQ ID NO: 88438 - DNA, 15 bp, Homo sapiens
ctcctttgcatgagg

SEQ ID NO: 88439 - DNA, 15 bp, Homo sapiens
actcctttgcatgag

SEQ ID NO: 88440 - DNA, 15 bp, Homo sapiens
aactcctttgcatga

SEQ ID NO: 88441 - DNA, 15 bp, Homo sapiens
aaactcctttgcatg

SEQ ID NO: 88442 - DNA, 15 bp, Homo sapiens
aaaactcctttgcat

SEQ ID NO: 88443 - DNA, 15 bp, Homo sapiens
gaaaactcctttgca

SEQ ID NO: 88444 - DNA, 15 bp, Homo sapiens
tgaaaactcctttgc

SEQ ID NO: 88445 - DNA, 15 bp, Homo sapiens
ctgaaaactcctttg

SEQ ID NO: 88446 - DNA, 15 bp, Homo sapiens
actgaaaactccttt

SEQ ID NO: 88447 - DNA, 15 bp, Homo sapiens
aactgaaaactcctt

SEQ ID NO: 88448 - DNA, 15 bp, Homo sapiens
taactgaaaactcct

SEQ ID NO: 88449 - DNA, 15 bp, Homo sapiens
ttaactgaaaactcc

SEQ ID NO: 88450 - DNA, 15 bp, Homo sapiens
attaactgaaaactc

SEQ ID NO: 88451 - DNA, 15 bp, Homo sapiens
cattaactgaaaact

SEQ ID NO: 88452 - DNA, 15 bp, Homo sapiens
gcattaactgaaaac

SEQ ID NO: 88453 - DNA, 15 bp, Homo sapiens
agcattaactgaaaa

SEQ ID NO: 88454 - DNA, 15 bp, Homo sapiens
aagcattaactgaaa

SEQ ID NO: 88455 - DNA, 15 bp, Homo sapiens
caagcattaactgaa

SEQ ID NO: 88456 - DNA, 15 bp, Homo sapiens
tcaagcattaactga

SEQ ID NO: 88457 - DNA, 15 bp, Homo sapiens
atcaagcattaactg

SEQ ID NO: 88458 - DNA, 15 bp, Homo sapiens
catcaagcattaact

SEQ ID NO: 88459 - DNA, 15 bp, Homo sapiens
tcatcaagcattaac

SEQ ID NO: 88460 - DNA, 15 bp, Homo sapiens
gtcatcaagcattaa

SEQ ID NO: 88461 - DNA, 15 bp, Homo sapiens
agtcatcaagcatta

SEQ ID NO: 88462 - DNA, 15 bp, Homo sapiens
cagtcatcaagcatt

SEQ ID NO: 88463 - DNA, 15 bp, Homo sapiens
tcagtcatcaagcat

SEQ ID NO: 88464 - DNA, 15 bp, Homo sapiens
gtcagtcatcaagca

SEQ ID NO: 88465 - DNA, 15 bp, Homo sapiens
agtcagtcatcaagc

SEQ ID NO: 88466 - DNA, 15 bp, Homo sapiens
tagtcagtcatcaag

SEQ ID NO: 88467 - DNA, 15 bp, Homo sapiens
ttagtcagtcatcaa

SEQ ID NO: 88468 - DNA, 15 bp, Homo sapiens
attagtcagtcatca

SEQ ID NO: 88469 - DNA, 15 bp, Homo sapiens
cattagtcagtcatc

SEQ ID NO: 88470 - DNA, 15 bp, Homo sapiens
acattagtcagtcat

SEQ ID NO: 88471 - DNA, 15 bp, Homo sapiens
aacattagtcagtca

SEQ ID NO: 88472 - DNA, 15 bp, Homo sapiens
aaacattagtcagtc

SEQ ID NO: 88473 - DNA, 15 bp, Homo sapiens
gaaacattagtcagt

SEQ ID NO: 88474 - DNA, 15 bp, Homo sapiens
ggaaacattagtcag

SEQ ID NO: 88475 - DNA, 15 bp, Homo sapiens
gggaaacattagtca

SEQ ID NO: 88476 - DNA, 15 bp, Homo sapiens
tgggaaacattagtc

SEQ ID NO: 88477 - DNA, 15 bp, Homo sapiens
gtgggaaacattagt

SEQ ID NO: 88478 - DNA, 15 bp, Homo sapiens
ggtgggaaacattag

SEQ ID NO: 88479 - DNA, 15 bp, Homo sapiens
aggtgggaaacatta

SEQ ID NO: 88480 - DNA, 15 bp, Homo sapiens
aaggtgggaaacatt

SEQ ID NO: 88481 - DNA, 15 bp, Homo sapiens
gaaggtgggaaacat

SEQ ID NO: 88482 - DNA, 15 bp, Homo sapiens
agaaggtgggaaaca

SEQ ID NO: 88483 - DNA, 15 bp, Homo sapiens
aagaaggtgggaaac

SEQ ID NO: 88484 - DNA, 15 bp, Homo sapiens
gaagaaggtgggaaa

SEQ ID NO: 88485 - DNA, 15 bp, Homo sapiens
ggaagaaggtgggaa

SEQ ID NO: 88486 - DNA, 15 bp, Homo sapiens
aggaagaaggtggga

SEQ ID NO: 88487 - DNA, 15 bp, Homo sapiens
aaggaagaaggtggg

SEQ ID NO: 88488 - DNA, 15 bp, Homo sapiens
taaggaagaaggtgg

SEQ ID NO: 88489 - DNA, 15 bp, Homo sapiens
ataaggaagaaggtg

SEQ ID NO: 88490 - DNA, 15 bp, Homo sapiens
gataaggaagaaggt

SEQ ID NO: 88491 - DNA, 15 bp, Homo sapiens
ggataaggaagaagg

SEQ ID NO: 88492 - DNA, 15 bp, Homo sapiens
tggataaggaagaag

SEQ ID NO: 88493 - DNA, 15 bp, Homo sapiens
ttggataaggaagaa

SEQ ID NO: 88494 - DNA, 15 bp, Homo sapiens
gttggataaggaaga

SEQ ID NO: 88495 - DNA, 15 bp, Homo sapiens
agttggataaggaag

SEQ ID NO: 88496 - DNA, 15 bp, Homo sapiens
aagttggataaggaa

SEQ ID NO: 88497 - DNA, 15 bp, Homo sapiens
aaagttggataagga

SEQ ID NO: 88498 - DNA, 15 bp, Homo sapiens
gaaagttggataagg

SEQ ID NO: 88499 - DNA, 15 bp, Homo sapiens
ggaaagttggataag

SEQ ID NO: 88500 - DNA, 15 bp, Homo sapiens
tggaaagttggataa

SEQ ID NO: 88501 - DNA, 15 bp, Homo sapiens
atggaaagttggata

SEQ ID NO: 88502 - DNA, 15 bp, Homo sapiens
tatggaaagttggat

SEQ ID NO: 88503 - DNA, 15 bp, Homo sapiens
ttatggaaagttgga

SEQ ID NO: 88504 - DNA, 15 bp, Homo sapiens
tttatggaaagttgg

SEQ ID NO: 88505 - DNA, 15 bp, Homo sapiens
ttttatggaaagttg

SEQ ID NO: 88506 - DNA, 15 bp, Homo sapiens
attttatggaaagtt

SEQ ID NO: 88507 - DNA, 15 bp, Homo sapiens
aattttatggaaagt

SEQ ID NO: 88508 - DNA, 15 bp, Homo sapiens
aaattttatggaaag

SEQ ID NO: 88509 - DNA, 15 bp, Homo sapiens
taaattttatggaaa

SEQ ID NO: 88510 - DNA, 15 bp, Homo sapiens
gtaaattttatggaa

SEQ ID NO: 88511 - DNA, 15 bp, Homo sapiens
ggtaaattttatgga

SEQ ID NO: 88512 - DNA, 15 bp, Homo sapiens
aggtaaattttatgg

SEQ ID NO: 88513 - DNA, 15 bp, Homo sapiens
gaggtaaattttatg

SEQ ID NO: 88514 - DNA, 15 bp, Homo sapiens
ggaggtaaattttat

SEQ ID NO: 88515 - DNA, 15 bp, Homo sapiens
aggaggtaaatttta

SEQ ID NO: 88516 - DNA, 15 bp, Homo sapiens
gaggaggtaaatttt

SEQ ID NO: 88517 - DNA, 15 bp, Homo sapiens
agaggaggtaaattt

SEQ ID NO: 88518 - DNA, 15 bp, Homo sapiens
aagaggaggtaaatt

SEQ ID NO: 88519 - DNA, 15 bp, Homo sapiens
gaagaggaggtaaat

SEQ ID NO: 88520 - DNA, 15 bp, Homo sapiens
ggaagaggaggtaaa

SEQ ID NO: 88521 - DNA, 15 bp, Homo sapiens
gggaagaggaggtaa

SEQ ID NO: 88522 - DNA, 15 bp, Homo sapiens
agggaagaggaggta

SEQ ID NO: 88523 - DNA, 15 bp, Homo sapiens
aagggaagaggaggt

SEQ ID NO: 88524 - DNA, 15 bp, Homo sapiens
aaagggaagaggagg

SEQ ID NO: 88525 - DNA, 15 bp, Homo sapiens
aaaagggaagaggag

SEQ ID NO: 88526 - DNA, 15 bp, Homo sapiens
gaaaagggaagagga

SEQ ID NO: 88527 - DNA, 15 bp, Homo sapiens
ggaaaagggaagagg

SEQ ID NO: 88528 - DNA, 15 bp, Homo sapiens
gggaaaagggaagag

SEQ ID NO: 88529 - DNA, 15 bp, Homo sapiens
agggaaaagggaaga

SEQ ID NO: 88530 - DNA, 15 bp, Homo sapiens
gagggaaaagggaag

SEQ ID NO: 88531 - DNA, 15 bp, Homo sapiens
ggagggaaaagggaa

SEQ ID NO: 88532 - DNA, 15 bp, Homo sapiens
gggagggaaaaggga

SEQ ID NO: 88533 - DNA, 15 bp, Homo sapiens
agggagggaaaaggg

SEQ ID NO: 88534 - DNA, 15 bp, Homo sapiens
cagggagggaaaagg

SEQ ID NO: 88535 - DNA, 15 bp, Homo sapiens
gcagggagggaaaag

SEQ ID NO: 88536 - DNA, 15 bp, Homo sapiens
ggcagggagggaaaa

SEQ ID NO: 88537 - DNA, 15 bp, Homo sapiens
gggcagggagggaaa

SEQ ID NO: 88538 - DNA, 15 bp, Homo sapiens
agggcagggagggaa

SEQ ID NO: 88539 - DNA, 15 bp, Homo sapiens
aagggcagggaggga

SEQ ID NO: 88540 - DNA, 15 bp, Homo sapiens
aaagggcagggaggg

SEQ ID NO: 88541 - DNA, 15 bp, Homo sapiens
taaagggcagggagg

SEQ ID NO: 88542 - DNA, 15 bp, Homo sapiens
gtaaagggcagggag

SEQ ID NO: 88543 - DNA, 15 bp, Homo sapiens
cgtaaagggcaggga

SEQ ID NO: 88544 - DNA, 15 bp, Homo sapiens
gcgtaaagggcaggg

SEQ ID NO: 88545 - DNA, 15 bp, Homo sapiens
tgcgtaaagggcagg

SEQ ID NO: 88546 - DNA, 15 bp, Homo sapiens
ctgcgtaaagggcag

SEQ ID NO: 88547 - DNA, 15 bp, Homo sapiens
actgcgtaaagggca

SEQ ID NO: 88548 - DNA, 15 bp, Homo sapiens
cactgcgtaaagggc

SEQ ID NO: 88549 - DNA, 15 bp, Homo sapiens
ccactgcgtaaaggg

SEQ ID NO: 88550 - DNA, 15 bp, Homo sapiens
tccactgcgtaaagg

SEQ ID NO: 88551 - DNA, 15 bp, Homo sapiens
ttccactgcgtaaag

SEQ ID NO: 88552 - DNA, 15 bp, Homo sapiens
tttccactgcgtaaa

SEQ ID NO: 88553 - DNA, 15 bp, Homo sapiens
atttccactgcgtaa

SEQ ID NO: 88554 - DNA, 15 bp, Homo sapiens
catttccactgcgta

SEQ ID NO: 88555 - DNA, 15 bp, Homo sapiens
tcatttccactgcgt

SEQ ID NO: 88556 - DNA, 15 bp, Homo sapiens
ctcatttccactgcg

SEQ ID NO: 88557 - DNA, 15 bp, Homo sapiens
cctcatttccactgc

SEQ ID NO: 88558 - DNA, 15 bp, Homo sapiens
tcctcatttccactg

SEQ ID NO: 88559 - DNA, 15 bp, Homo sapiens
ctcctcatttccact

SEQ ID NO: 88560 - DNA, 15 bp, Homo sapiens
gctcctcatttccac

SEQ ID NO: 88561 - DNA, 15 bp, Homo sapiens
tgctcctcatttcca

SEQ ID NO: 88562 - DNA, 15 bp, Homo sapiens
ttgctcctcatttcc

SEQ ID NO: 88563 - DNA, 15 bp, Homo sapiens
cttgctcctcatttc

SEQ ID NO: 88564 - DNA, 15 bp, Homo sapiens
tcttgctcctcattt

SEQ ID NO: 88565 - DNA, 15 bp, Homo sapiens
ttcttgctcctcatt

SEQ ID NO: 88566 - DNA, 15 bp, Homo sapiens
tttcttgctcctcat

SEQ ID NO: 88567 - DNA, 15 bp, Homo sapiens
atttcttgctcctca

SEQ ID NO: 88568 - DNA, 15 bp, Homo sapiens
catttcttgctcctc

SEQ ID NO: 88569 - DNA, 15 bp, Homo sapiens
gcatttcttgctcct

SEQ ID NO: 88570 - DNA, 15 bp, Homo sapiens
cgcatttcttgctcc

SEQ ID NO: 88571 - DNA, 15 bp, Homo sapiens
gcgcatttcttgctc

SEQ ID NO: 88572 - DNA, 15 bp, Homo sapiens
tgcgcatttcttgct

SEQ ID NO: 88573 - DNA, 15 bp, Homo sapiens
gtgcgcatttcttgc

SEQ ID NO: 88574 - DNA, 15 bp, Homo sapiens
tgtgcgcatttcttg

SEQ ID NO: 88575 - DNA, 15 bp, Homo sapiens
atgtgcgcatttctt

SEQ ID NO: 88576 - DNA, 15 bp, Homo sapiens
catgtgcgcatttct

SEQ ID NO: 88577 - DNA, 15 bp, Homo sapiens
acatgtgcgcatttc

SEQ ID NO: 88578 - DNA, 15 bp, Homo sapiens
tacatgtgcgcattt

SEQ ID NO: 88579 - DNA, 15 bp, Homo sapiens
ctacatgtgcgcatt

SEQ ID NO: 88580 - DNA, 15 bp, Homo sapiens
tctacatgtgcgcat

SEQ ID NO: 88581 - DNA, 15 bp, Homo sapiens
ctctacatgtgcgca

SEQ ID NO: 88582 - DNA, 15 bp, Homo sapiens
tctctacatgtgcgc

SEQ ID NO: 88583 - DNA, 15 bp, Homo sapiens
ctctctacatgtgcg

SEQ ID NO: 88584 - DNA, 15 bp, Homo sapiens
cctctctacatgtgc

SEQ ID NO: 88585 - DNA, 15 bp, Homo sapiens
tcctctctacatgtg

SEQ ID NO: 88586 - DNA, 15 bp, Homo sapiens
ctcctctctacatgt

SEQ ID NO: 88587 - DNA, 15 bp, Homo sapiens
tctcctctctacatg

SEQ ID NO: 88588 - DNA, 15 bp, Homo sapiens
ctctcctctctacat

SEQ ID NO: 88589 - DNA, 15 bp, Homo sapiens
tctctcctctctaca

SEQ ID NO: 88590 - DNA, 15 bp, Homo sapiens
ctctctcctctctac

SEQ ID NO: 88591 - DNA, 15 bp, Homo sapiens
tctctctcctctcta

SEQ ID NO: 88592 - DNA, 15 bp, Homo sapiens
ttctctctcctctct

SEQ ID NO: 88593 - DNA, 15 bp, Homo sapiens
cttctctctcctctc

SEQ ID NO: 88594 - DNA, 15 bp, Homo sapiens
gcttctctctcctct

SEQ ID NO: 88595 - DNA, 15 bp, Homo sapiens
tgcttctctctcctc

SEQ ID NO: 88596 - DNA, 15 bp, Homo sapiens
ttgcttctctctcct

SEQ ID NO: 88597 - DNA, 15 bp, Homo sapiens
tttgcttctctctcc

SEQ ID NO: 88598 - DNA, 15 bp, Homo sapiens
ttttgcttctctctc

SEQ ID NO: 88599 - DNA, 15 bp, Homo sapiens
cttttgcttctctct

SEQ ID NO: 88600 - DNA, 15 bp, Homo sapiens
ccttttgcttctctc

SEQ ID NO: 88601 - DNA, 15 bp, Homo sapiens
gccttttgcttctct

SEQ ID NO: 88602 - DNA, 15 bp, Homo sapiens
agccttttgcttctc

SEQ ID NO: 88603 - DNA, 15 bp, Homo sapiens
aagccttttgcttct

SEQ ID NO: 88604 - DNA, 15 bp, Homo sapiens
caagccttttgcttc

SEQ ID NO: 88605 - DNA, 15 bp, Homo sapiens
ccaagccttttgctt

SEQ ID NO: 88606 - DNA, 15 bp, Homo sapiens
gccaagccttttgct

SEQ ID NO: 88607 - DNA, 15 bp, Homo sapiens
ggccaagccttttgc

SEQ ID NO: 88608 - DNA, 15 bp, Homo sapiens
aggccaagccttttg

SEQ ID NO: 88609 - DNA, 15 bp, Homo sapiens
aaggccaagcctttt

SEQ ID NO: 88610 - DNA, 15 bp, Homo sapiens
caaggccaagccttt

SEQ ID NO: 88611 - DNA, 15 bp, Homo sapiens
gcaaggccaagcctt

SEQ ID NO: 88612 - DNA, 15 bp, Homo sapiens
agcaaggccaagcct

SEQ ID NO: 88613 - DNA, 15 bp, Homo sapiens
tagcaaggccaagcc

SEQ ID NO: 88614 - DNA, 15 bp, Homo sapiens
ttagcaaggccaagc

SEQ ID NO: 88615 - DNA, 15 bp, Homo sapiens
gttagcaaggccaag

SEQ ID NO: 88616 - DNA, 15 bp, Homo sapiens
tgttagcaaggccaa

SEQ ID NO: 88617 - DNA, 15 bp, Homo sapiens
ctgttagcaaggcca

SEQ ID NO: 88618 - DNA, 15 bp, Homo sapiens
gctgttagcaaggcc

SEQ ID NO: 88619 - DNA, 15 bp, Homo sapiens
cgctgttagcaaggc

SEQ ID NO: 88620 - DNA, 15 bp, Homo sapiens
ccgctgttagcaagg

SEQ ID NO: 88621 - DNA, 15 bp, Homo sapiens
gccgctgttagcaag

SEQ ID NO: 88622 - DNA, 15 bp, Homo sapiens
ggccgctgttagcaa

SEQ ID NO: 88623 - DNA, 15 bp, Homo sapiens
tggccgctgttagca

SEQ ID NO: 88624 - DNA, 15 bp, Homo sapiens
gtggccgctgttagc

SEQ ID NO: 88625 - DNA, 15 bp, Homo sapiens
ggtggccgctgttag

SEQ ID NO: 88626 - DNA, 15 bp, Homo sapiens
aggtggccgctgtta

SEQ ID NO: 88627 - DNA, 15 bp, Homo sapiens
caggtggccgctgtt

SEQ ID NO: 88628 - DNA, 15 bp, Homo sapiens
gcaggtggccgctgt

SEQ ID NO: 88629 - DNA, 15 bp, Homo sapiens
agcaggtggccgctg

SEQ ID NO: 88630 - DNA, 15 bp, Homo sapiens
gagcaggtggccgct

SEQ ID NO: 88631 - DNA, 15 bp, Homo sapiens
agagcaggtggccgc

SEQ ID NO: 88632 - DNA, 15 bp, Homo sapiens
aagagcaggtggccg

SEQ ID NO: 88633 - DNA, 15 bp, Homo sapiens
caagagcaggtggcc

SEQ ID NO: 88634 - DNA, 15 bp, Homo sapiens
ccaagagcaggtggc

SEQ ID NO: 88635 - DNA, 15 bp, Homo sapiens
gccaagagcaggtgg

SEQ ID NO: 88636 - DNA, 15 bp, Homo sapiens
tgccaagagcaggtg

SEQ ID NO: 88637 - DNA, 15 bp, Homo sapiens
gtgccaagagcaggt

SEQ ID NO: 88638 - DNA, 15 bp, Homo sapiens
agtgccaagagcagg

SEQ ID NO: 88639 - DNA, 15 bp, Homo sapiens
aagtgccaagagcag

SEQ ID NO: 88640 - DNA, 15 bp, Homo sapiens
gaagtgccaagagca

SEQ ID NO: 88641 - DNA, 15 bp, Homo sapiens
tgaagtgccaagagc

SEQ ID NO: 88642 - DNA, 15 bp, Homo sapiens
ctgaagtgccaagag

SEQ ID NO: 88643 - DNA, 15 bp, Homo sapiens
tctgaagtgccaaga

SEQ ID NO: 88644 - DNA, 15 bp, Homo sapiens
atctgaagtgccaag

SEQ ID NO: 88645 - DNA, 15 bp, Homo sapiens
catctgaagtgccaa

SEQ ID NO: 88646 - DNA, 15 bp, Homo sapiens
tcatctgaagtgcca

SEQ ID NO: 88647 - DNA, 15 bp, Homo sapiens
ctcatctgaagtgcc

SEQ ID NO: 88648 - DNA, 15 bp, Homo sapiens
tctcatctgaagtgc

SEQ ID NO: 88649 - DNA, 15 bp, Homo sapiens
gtctcatctgaagtg

SEQ ID NO: 88650 - DNA, 15 bp, Homo sapiens
agtctcatctgaagt

SEQ ID NO: 88651 - DNA, 15 bp, Homo sapiens
aagtctcatctgaag

SEQ ID NO: 88652 - DNA, 15 bp, Homo sapiens
caagtctcatctgaa

SEQ ID NO: 88653 - DNA, 15 bp, Homo sapiens
ccaagtctcatctga

SEQ ID NO: 88654 - DNA, 15 bp, Homo sapiens
tccaagtctcatctg

SEQ ID NO: 88655 - DNA, 15 bp, Homo sapiens
ctccaagtctcatct

SEQ ID NO: 88656 - DNA, 15 bp, Homo sapiens
actccaagtctcatc

SEQ ID NO: 88657 - DNA, 15 bp, Homo sapiens
cactccaagtctcat

SEQ ID NO: 88658 - DNA, 15 bp, Homo sapiens
tcactccaagtctca

SEQ ID NO: 88659 - DNA, 15 bp, Homo sapiens
gtcactccaagtctc

SEQ ID NO: 88660 - DNA, 15 bp, Homo sapiens
ggtcactccaagtct

SEQ ID NO: 88661 - DNA, 15 bp, Homo sapiens
gggtcactccaagtc

SEQ ID NO: 88662 - DNA, 15 bp, Homo sapiens
ggggtcactccaagt

SEQ ID NO: 88663 - DNA, 15 bp, Homo sapiens
tggggtcactccaag

SEQ ID NO: 88664 - DNA, 15 bp, Homo sapiens
ttggggtcactccaa

SEQ ID NO: 88665 - DNA, 15 bp, Homo sapiens
gttggggtcactcca

SEQ ID NO: 88666 - DNA, 15 bp, Homo sapiens
ggttggggtcactcc

SEQ ID NO: 88667 - DNA, 15 bp, Homo sapiens
gggttggggtcactc

SEQ ID NO: 88668 - DNA, 15 bp, Homo sapiens
tgggttggggtcact

SEQ ID NO: 88669 - DNA, 15 bp, Homo sapiens
ctgggttggggtcac

SEQ ID NO: 88670 - DNA, 15 bp, Homo sapiens
cctgggttggggtca

SEQ ID NO: 88671 - DNA, 15 bp, Homo sapiens
gcctgggttggggtc

SEQ ID NO: 88672 - DNA, 15 bp, Homo sapiens
agcctgggttggggt

SEQ ID NO: 88673 - DNA, 15 bp, Homo sapiens
cagcctgggttgggg

SEQ ID NO: 88674 - DNA, 15 bp, Homo sapiens
tcagcctgggttggg

SEQ ID NO: 88675 - DNA, 15 bp, Homo sapiens
atcagcctgggttgg

SEQ ID NO: 88676 - DNA, 15 bp, Homo sapiens
gatcagcctgggttg

SEQ ID NO: 88677 - DNA, 15 bp, Homo sapiens
tgatcagcctgggtt

SEQ ID NO: 88678 - DNA, 15 bp, Homo sapiens
gtgatcagcctgggt

SEQ ID NO: 88679 - DNA, 15 bp, Homo sapiens
ggtgatcagcctggg

SEQ ID NO: 88680 - DNA, 15 bp, Homo sapiens
gggtgatcagcctgg

SEQ ID NO: 88681 - DNA, 15 bp, Homo sapiens
ggggtgatcagcctg

SEQ ID NO: 88682 - DNA, 15 bp, Homo sapiens
gggggtgatcagcct

SEQ ID NO: 88683 - DNA, 15 bp, Homo sapiens
tgggggtgatcagcc

SEQ ID NO: 88684 - DNA, 15 bp, Homo sapiens
gtgggggtgatcagc

SEQ ID NO: 88685 - DNA, 15 bp, Homo sapiens
agtgggggtgatcag

SEQ ID NO: 88686 - DNA, 15 bp, Homo sapiens
cagtgggggtgatca

SEQ ID NO: 88687 - DNA, 15 bp, Homo sapiens
gcagtgggggtgatc

SEQ ID NO: 88688 - DNA, 15 bp, Homo sapiens
agcagtgggggtgat

SEQ ID NO: 88689 - DNA, 15 bp, Homo sapiens
cagcagtgggggtga

SEQ ID NO: 88690 - DNA, 15 bp, Homo sapiens
gcagcagtgggggtg

SEQ ID NO: 88691 - DNA, 15 bp, Homo sapiens
tgcagcagtgggggt

SEQ ID NO: 88692 - DNA, 15 bp, Homo sapiens
ctgcagcagtggggg

SEQ ID NO: 88693 - DNA, 15 bp, Homo sapiens
tctgcagcagtgggg

SEQ ID NO: 88694 - DNA, 15 bp, Homo sapiens
ctctgcagcagtggg

SEQ ID NO: 88695 - DNA, 15 bp, Homo sapiens
gctctgcagcagtgg

SEQ ID NO: 88696 - DNA, 15 bp, Homo sapiens
ggctctgcagcagtg

SEQ ID NO: 88697 - DNA, 15 bp, Homo sapiens
aggctctgcagcagt

SEQ ID NO: 88698 - DNA, 15 bp, Homo sapiens
caggctctgcagcag

SEQ ID NO: 88699 - DNA, 15 bp, Homo sapiens
gcaggctctgcagca

SEQ ID NO: 88700 - DNA, 15 bp, Homo sapiens
agcaggctctgcagc

SEQ ID NO: 88701 - DNA, 15 bp, Homo sapiens
cagcaggctctgcag

SEQ ID NO: 88702 - DNA, 15 bp, Homo sapiens
ccagcaggctctgca

SEQ ID NO: 88703 - DNA, 15 bp, Homo sapiens
accagcaggctctgc

SEQ ID NO: 88704 - DNA, 15 bp, Homo sapiens
aaccagcaggctctg

SEQ ID NO: 88705 - DNA, 15 bp, Homo sapiens
aaaccagcaggctct

SEQ ID NO: 88706 - DNA, 15 bp, Homo sapiens
gaaaccagcaggctc

SEQ ID NO: 88707 - DNA, 15 bp, Homo sapiens
ggaaaccagcaggct

SEQ ID NO: 88708 - DNA, 15 bp, Homo sapiens
gggaaaccagcaggc

SEQ ID NO: 88709 - DNA, 15 bp, Homo sapiens
tgggaaaccagcagg

SEQ ID NO: 88710 - DNA, 15 bp, Homo sapiens
ttgggaaaccagcag

SEQ ID NO: 88711 - DNA, 15 bp, Homo sapiens
tttgggaaaccagca

SEQ ID NO: 88712 - DNA, 15 bp, Homo sapiens
ctttgggaaaccagc

SEQ ID NO: 88713 - DNA, 15 bp, Homo sapiens
gctttgggaaaccag

SEQ ID NO: 88714 - DNA, 15 bp, Homo sapiens
tgctttgggaaacca

SEQ ID NO: 88715 - DNA, 15 bp, Homo sapiens
ctgctttgggaaacc

SEQ ID NO: 88716 - DNA, 15 bp, Homo sapiens
tctgctttgggaaac

SEQ ID NO: 88717 - DNA, 15 bp, Homo sapiens
ctctgctttgggaaa

SEQ ID NO: 88718 - DNA, 15 bp, Homo sapiens
tctctgctttgggaa

SEQ ID NO: 88719 - DNA, 15 bp, Homo sapiens
ttctctgctttggga

SEQ ID NO: 88720 - DNA, 15 bp, Homo sapiens
gttctctgctttggg

SEQ ID NO: 88721 - DNA, 15 bp, Homo sapiens
tgttctctgctttgg

SEQ ID NO: 88722 - DNA, 15 bp, Homo sapiens
gtgttctctgctttg

SEQ ID NO: 88723 - DNA, 15 bp, Homo sapiens
tgtgttctctgcttt

SEQ ID NO: 88724 - DNA, 15 bp, Homo sapiens
ctgtgttctctgctt

SEQ ID NO: 88725 - DNA, 15 bp, Homo sapiens
tctgtgttctctgct

SEQ ID NO: 88726 - DNA, 15 bp, Homo sapiens
ctctgtgttctctgc

SEQ ID NO: 88727 - DNA, 15 bp, Homo sapiens
cctctgtgttctctg

SEQ ID NO: 88728 - DNA, 15 bp, Homo sapiens
ccctctgtgttctct

SEQ ID NO: 88729 - DNA, 15 bp, Homo sapiens
gccctctgtgttctc

SEQ ID NO: 88730 - DNA, 15 bp, Homo sapiens
agccctctgtgttct

SEQ ID NO: 88731 - DNA, 15 bp, Homo sapiens
aagccctctgtgttc

SEQ ID NO: 88732 - DNA, 15 bp, Homo sapiens
aaagccctctgtgtt

SEQ ID NO: 88733 - DNA, 15 bp, Homo sapiens
caaagccctctgtgt

SEQ ID NO: 88734 - DNA, 15 bp, Homo sapiens
gcaaagccctctgtg

SEQ ID NO: 88735 - DNA, 15 bp, Homo sapiens
tgcaaagccctctgt

SEQ ID NO: 88736 - DNA, 15 bp, Homo sapiens
gtgcaaagccctctg

SEQ ID NO: 88737 - DNA, 15 bp, Homo sapiens
ggtgcaaagccctct

SEQ ID NO: 88738 - DNA, 15 bp, Homo sapiens
aggtgcaaagccctc

SEQ ID NO: 88739 - DNA, 15 bp, Homo sapiens
taggtgcaaagccct

SEQ ID NO: 88740 - DNA, 15 bp, Homo sapiens
ttaggtgcaaagccc

SEQ ID NO: 88741 - DNA, 15 bp, Homo sapiens
cttaggtgcaaagcc

SEQ ID NO: 88742 - DNA, 15 bp, Homo sapiens
acttaggtgcaaagc

SEQ ID NO: 88743 - DNA, 15 bp, Homo sapiens
tacttaggtgcaaag

SEQ ID NO: 88744 - DNA, 15 bp, Homo sapiens
atacttaggtgcaaa

SEQ ID NO: 88745 - DNA, 15 bp, Homo sapiens
gatacttaggtgcaa

SEQ ID NO: 88746 - DNA, 15 bp, Homo sapiens
agatacttaggtgca

SEQ ID NO: 88747 - DNA, 15 bp, Homo sapiens
aagatacttaggtgc

SEQ ID NO: 88748 - DNA, 15 bp, Homo sapiens
caagatacttaggtg

SEQ ID NO: 88749 - DNA, 15 bp, Homo sapiens
acaagatacttaggt

SEQ ID NO: 88750 - DNA, 15 bp, Homo sapiens
aacaagatacttagg

SEQ ID NO: 88751 - DNA, 15 bp, Homo sapiens
gaacaagatacttag

SEQ ID NO: 88752 - DNA, 15 bp, Homo sapiens
cgaacaagatactta

SEQ ID NO: 88753 - DNA, 15 bp, Homo sapiens
gcgaacaagatactt

SEQ ID NO: 88754 - DNA, 15 bp, Homo sapiens
tgcgaacaagatact

SEQ ID NO: 88755 - DNA, 15 bp, Homo sapiens
atgcgaacaagatac

SEQ ID NO: 88756 - DNA, 15 bp, Homo sapiens
aatgcgaacaagata

SEQ ID NO: 88757 - DNA, 15 bp, Homo sapiens
aaatgcgaacaagat

SEQ ID NO: 88758 - DNA, 15 bp, Homo sapiens
gaaatgcgaacaaga

SEQ ID NO: 88759 - DNA, 15 bp, Homo sapiens
tgaaatgcgaacaag

SEQ ID NO: 88760 - DNA, 15 bp, Homo sapiens
atgaaatgcgaacaa

SEQ ID NO: 88761 - DNA, 15 bp, Homo sapiens
tatgaaatgcgaaca

SEQ ID NO: 88762 - DNA, 15 bp, Homo sapiens
atatgaaatgcgaac

SEQ ID NO: 88763 - DNA, 15 bp, Homo sapiens
aatatgaaatgcgaa

SEQ ID NO: 88764 - DNA, 15 bp, Homo sapiens
gaatatgaaatgcga

SEQ ID NO: 88765 - DNA, 15 bp, Homo sapiens
agaatatgaaatgcg

SEQ ID NO: 88766 - DNA, 15 bp, Homo sapiens
gagaatatgaaatgc

SEQ ID NO: 88767 - DNA, 15 bp, Homo sapiens
agagaatatgaaatg

SEQ ID NO: 88768 - DNA, 15 bp, Homo sapiens
gagagaatatgaaat

SEQ ID NO: 88769 - DNA, 15 bp, Homo sapiens
ggagagaatatgaaa

SEQ ID NO: 88770 - DNA, 15 bp, Homo sapiens
cggagagaatatgaa

SEQ ID NO: 88771 - DNA, 15 bp, Homo sapiens
tcggagagaatatga

SEQ ID NO: 88772 - DNA, 15 bp, Homo sapiens
gtcggagagaatatg

SEQ ID NO: 88773 - DNA, 15 bp, Homo sapiens
agtcggagagaatat

SEQ ID NO: 88774 - DNA, 15 bp, Homo sapiens
cagtcggagagaata

SEQ ID NO: 88775 - DNA, 15 bp, Homo sapiens
ccagtcggagagaat

SEQ ID NO: 88776 - DNA, 15 bp, Homo sapiens
gccagtcggagagaa

SEQ ID NO: 88777 - DNA, 15 bp, Homo sapiens
tgccagtcggagaga

SEQ ID NO: 88778 - DNA, 15 bp, Homo sapiens
ttgccagtcggagag

SEQ ID NO: 88779 - DNA, 15 bp, Homo sapiens
cttgccagtcggaga

SEQ ID NO: 88780 - DNA, 15 bp, Homo sapiens
tcttgccagtcggag

SEQ ID NO: 88781 - DNA, 15 bp, Homo sapiens
ctcttgccagtcgga

SEQ ID NO: 88782 - DNA, 15 bp, Homo sapiens
tctcttgccagtcgg

SEQ ID NO: 88783 - DNA, 15 bp, Homo sapiens
ttctcttgccagtcg

SEQ ID NO: 88784 - DNA, 15 bp, Homo sapiens
cttctcttgccagtc

SEQ ID NO: 88785 - DNA, 15 bp, Homo sapiens
ccttctcttgccagt

SEQ ID NO: 88786 - DNA, 15 bp, Homo sapiens
cccttctcttgccag

SEQ ID NO: 88787 - DNA, 15 bp, Homo sapiens
tcccttctcttgcca

SEQ ID NO: 88788 - DNA, 15 bp, Homo sapiens
gtcccttctcttgcc

SEQ ID NO: 88789 - DNA, 15 bp, Homo sapiens
agtcccttctcttgc

SEQ ID NO: 88790 - DNA, 15 bp, Homo sapiens
aagtcccttctcttg

SEQ ID NO: 88791 - DNA, 15 bp, Homo sapiens
gaagtcccttctctt

SEQ ID NO: 88792 - DNA, 15 bp, Homo sapiens
cgaagtcccttctct

SEQ ID NO: 88793 - DNA, 15 bp, Homo sapiens
acgaagtcccttctc

SEQ ID NO: 88794 - DNA, 15 bp, Homo sapiens
cacgaagtcccttct

SEQ ID NO: 88795 - DNA, 15 bp, Homo sapiens
acacgaagtcccttc

SEQ ID NO: 88796 - DNA, 15 bp, Homo sapiens
gacacgaagtccctt

SEQ ID NO: 88797 - DNA, 15 bp, Homo sapiens
tgacacgaagtccct

SEQ ID NO: 88798 - DNA, 15 bp, Homo sapiens
atgacacgaagtccc

SEQ ID NO: 88799 - DNA, 15 bp, Homo sapiens
aatgacacgaagtcc

SEQ ID NO: 88800 - DNA, 15 bp, Homo sapiens
taatgacacgaagtc

SEQ ID NO: 88801 - DNA, 15 bp, Homo sapiens
ataatgacacgaagt

SEQ ID NO: 88802 - DNA, 15 bp, Homo sapiens
cataatgacacgaag

SEQ ID NO: 88803 - DNA, 15 bp, Homo sapiens
gcataatgacacgaa

SEQ ID NO: 88804 - DNA, 15 bp, Homo sapiens
tgcataatgacacga

SEQ ID NO: 88805 - DNA, 15 bp, Homo sapiens
ttgcataatgacacg

SEQ ID NO: 88806 - DNA, 15 bp, Homo sapiens
tttgcataatgacac

SEQ ID NO: 88807 - DNA, 15 bp, Homo sapiens
atttgcataatgaca

SEQ ID NO: 88808 - DNA, 15 bp, Homo sapiens
tatttgcataatgac

SEQ ID NO: 88809 - DNA, 15 bp, Homo sapiens
ttatttgcataatga

SEQ ID NO: 88810 - DNA, 15 bp, Homo sapiens
attatttgcataatg

SEQ ID NO: 88811 - DNA, 15 bp, Homo sapiens
cattatttgcataat

SEQ ID NO: 88812 - DNA, 15 bp, Homo sapiens
acattatttgcataa

SEQ ID NO: 88813 - DNA, 15 bp, Homo sapiens
tacattatttgcata

SEQ ID NO: 88814 - DNA, 15 bp, Homo sapiens
ttacattatttgcat

SEQ ID NO: 88815 - DNA, 15 bp, Homo sapiens
attacattatttgca

SEQ ID NO: 88816 - DNA, 15 bp, Homo sapiens
tattacattatttgc

SEQ ID NO: 88817 - DNA, 15 bp, Homo sapiens
ttattacattatttg

SEQ ID NO: 88818 - DNA, 15 bp, Homo sapiens
tttattacattattt

SEQ ID NO: 88819 - DNA, 15 bp, Homo sapiens
ttttattacattatt

SEQ ID NO: 88820 - DNA, 15 bp, Homo sapiens
tttttattacattat

SEQ ID NO: 88821 - DNA, 15 bp, Homo sapiens
ctttttattacatta

SEQ ID NO: 88822 - DNA, 15 bp, Homo sapiens
gctttttattacatt

SEQ ID NO: 88823 - DNA, 15 bp, Homo sapiens
ggctttttattacat

SEQ ID NO: 88824 - DNA, 15 bp, Homo sapiens
tggctttttattaca

SEQ ID NO: 88825 - DNA, 15 bp, Homo sapiens
ttggctttttattac

SEQ ID NO: 88826 - DNA, 15 bp, Homo sapiens
tttggctttttatta

SEQ ID NO: 88827 - DNA, 15 bp, Homo sapiens
ttttggctttttatt

SEQ ID NO: 88828 - DNA, 15 bp, Homo sapiens
gttttggctttttat

SEQ ID NO: 88829 - DNA, 15 bp, Homo sapiens
agttttggcttttta

SEQ ID NO: 88830 - DNA, 15 bp, Homo sapiens
tagttttggcttttt

SEQ ID NO: 88831 - DNA, 15 bp, Homo sapiens
ctagttttggctttt

SEQ ID NO: 88832 - DNA, 15 bp, Homo sapiens
gctagttttggcttt

SEQ ID NO: 88833 - DNA, 15 bp, Homo sapiens
cgctagttttggctt

SEQ ID NO: 88834 - DNA, 15 bp, Homo sapiens
acgctagttttggct

SEQ ID NO: 88835 - DNA, 15 bp, Homo sapiens
ttataaccaaaatgt

SEQ ID NO: 88836 - DNA, 15 bp, Homo sapiens
gttataaccaaaatg

SEQ ID NO: 88837 - DNA, 15 bp, Homo sapiens
ggttataaccaaaat

SEQ ID NO: 88838 - DNA, 15 bp, Homo sapiens
aggttataaccaaaa

SEQ ID NO: 88839 - DNA, 15 bp, Homo sapiens
caggttataaccaaa

SEQ ID NO: 88840 - DNA, 15 bp, Homo sapiens
acaggttataaccaa

SEQ ID NO: 88841 - DNA, 15 bp, Homo sapiens
aacaggttataacca

SEQ ID NO: 88842 - DNA, 15 bp, Homo sapiens
aaacaggttataacc

SEQ ID NO: 88843 - DNA, 15 bp, Homo sapiens
taaacaggttataac

SEQ ID NO: 88844 - DNA, 15 bp, Homo sapiens
ataaacaggttataa

SEQ ID NO: 88845 - DNA, 15 bp, Homo sapiens
cataaacaggttata

SEQ ID NO: 88846 - DNA, 15 bp, Homo sapiens
acataaacaggttat

SEQ ID NO: 88847 - DNA, 15 bp, Homo sapiens
aacataaacaggtta

SEQ ID NO: 88848 - DNA, 15 bp, Homo sapiens
aaacataaacaggtt

SEQ ID NO: 88849 - DNA, 15 bp, Homo sapiens
aaaacataaacaggt

SEQ ID NO: 88850 - DNA, 15 bp, Homo sapiens
caaaacataaacagg

SEQ ID NO: 88851 - DNA, 15 bp, Homo sapiens
gcaaaacataaacag

SEQ ID NO: 88852 - DNA, 15 bp, Homo sapiens
ggcaaaacataaaca

SEQ ID NO: 88853 - DNA, 15 bp, Homo sapiens
aggcaaaacataaac

SEQ ID NO: 88854 - DNA, 15 bp, Homo sapiens
gaggcaaaacataaa

SEQ ID NO: 88855 - DNA, 15 bp, Homo sapiens
agaggcaaaacataa

SEQ ID NO: 88856 - DNA, 15 bp, Homo sapiens
gagaggcaaaacata

SEQ ID NO: 88857 - DNA, 15 bp, Homo sapiens
tgagaggcaaaacat

SEQ ID NO: 88858 - DNA, 15 bp, Homo sapiens
ctgagaggcaaaaca

SEQ ID NO: 88859 - DNA, 15 bp, Homo sapiens
cctgagaggcaaaac

SEQ ID NO: 88860 - DNA, 15 bp, Homo sapiens
acctgagaggcaaaa

SEQ ID NO: 88861 - DNA, 15 bp, Homo sapiens
aacctgagaggcaaa

SEQ ID NO: 88862 - DNA, 15 bp, Homo sapiens
gaacctgagaggcaa

SEQ ID NO: 88863 - DNA, 15 bp, Homo sapiens
tgaacctgagaggca

SEQ ID NO: 88864 - DNA, 15 bp, Homo sapiens
gtgaacctgagaggc

SEQ ID NO: 88865 - DNA, 15 bp, Homo sapiens
agtgaacctgagagg

SEQ ID NO: 88866 - DNA, 15 bp, Homo sapiens
cagtgaacctgagag

SEQ ID NO: 88867 - DNA, 15 bp, Homo sapiens
gcagtgaacctgaga

SEQ ID NO: 88868 - DNA, 15 bp, Homo sapiens
agcagtgaacctgag

SEQ ID NO: 88869 - DNA, 15 bp, Homo sapiens
cagcagtgaacctga

SEQ ID NO: 88870 - DNA, 15 bp, Homo sapiens
ccagcagtgaacctg

SEQ ID NO: 88871 - DNA, 15 bp, Homo sapiens
gccagcagtgaacct

SEQ ID NO: 88872 - DNA, 15 bp, Homo sapiens
ggccagcagtgaacc

SEQ ID NO: 88873 - DNA, 15 bp, Homo sapiens
aggccagcagtgaac

SEQ ID NO: 88874 - DNA, 15 bp, Homo sapiens
taggccagcagtgaa

SEQ ID NO: 88875 - DNA, 15 bp, Homo sapiens
ataggccagcagtga

SEQ ID NO: 88876 - DNA, 15 bp, Homo sapiens
tataggccagcagtg

SEQ ID NO: 88877 - DNA, 15 bp, Homo sapiens
ttataggccagcagt

SEQ ID NO: 88878 - DNA, 15 bp, Homo sapiens
attataggccagcag

SEQ ID NO: 88879 - DNA, 15 bp, Homo sapiens
tattataggccagca

SEQ ID NO: 88880 - DNA, 15 bp, Homo sapiens
gtattataggccagc

SEQ ID NO: 88881 - DNA, 15 bp, Homo sapiens
tgtattataggccag

SEQ ID NO: 88882 - DNA, 15 bp, Homo sapiens
ttgtattataggcca

SEQ ID NO: 88883 - DNA, 15 bp, Homo sapiens
gttgtattataggcc

SEQ ID NO: 88884 - DNA, 15 bp, Homo sapiens
ggttgtattataggc

SEQ ID NO: 88885 - DNA, 15 bp, Homo sapiens
aggttgtattatagg

SEQ ID NO: 88886 - DNA, 15 bp, Homo sapiens
gaggttgtattatag

SEQ ID NO: 88887 - DNA, 15 bp, Homo sapiens
ggaggttgtattata

SEQ ID NO: 88888 - DNA, 15 bp, Homo sapiens
gggaggttgtattat

SEQ ID NO: 88889 - DNA, 15 bp, Homo sapiens
tgggaggttgtatta

SEQ ID NO: 88890 - DNA, 15 bp, Homo sapiens
gtgggaggttgtatt

SEQ ID NO: 88891 - DNA, 15 bp, Homo sapiens
tgtgggaggttgtat

SEQ ID NO: 88892 - DNA, 15 bp, Homo sapiens
gtgtgggaggttgta

SEQ ID NO: 88893 - DNA, 15 bp, Homo sapiens
ggtgtgggaggttgt

SEQ ID NO: 88894 - DNA, 15 bp, Homo sapiens
cggtgtgggaggttg

SEQ ID NO: 88895 - DNA, 15 bp, Homo sapiens
tcggtgtgggaggtt

SEQ ID NO: 88896 - DNA, 15 bp, Homo sapiens
gtcggtgtgggaggt

SEQ ID NO: 88897 - DNA, 15 bp, Homo sapiens
ggtcggtgtgggagg

SEQ ID NO: 88898 - DNA, 15 bp, Homo sapiens
tggtcggtgtgggag

SEQ ID NO: 88899 - DNA, 15 bp, Homo sapiens
ttggtcggtgtggga

SEQ ID NO: 88900 - DNA, 15 bp, Homo sapiens
attggtcggtgtggg

SEQ ID NO: 88901 - DNA, 15 bp, Homo sapiens
gattggtcggtgtgg

SEQ ID NO: 88902 - DNA, 15 bp, Homo sapiens
ggattggtcggtgtg

SEQ ID NO: 88903 - DNA, 15 bp, Homo sapiens
aggattggtcggtgt

SEQ ID NO: 88904 - DNA, 15 bp, Homo sapiens
gaggattggtcggtg

SEQ ID NO: 88905 - DNA, 15 bp, Homo sapiens
tgaggattggtcggt

SEQ ID NO: 88906 - DNA, 15 bp, Homo sapiens
gtgaggattggtcgg

SEQ ID NO: 88907 - DNA, 15 bp, Homo sapiens
cgtgaggattggtcg

SEQ ID NO: 88908 - DNA, 15 bp, Homo sapiens
tcgtgaggattggtc

SEQ ID NO: 88909 - DNA, 15 bp, Homo sapiens
atcgtgaggattggt

SEQ ID NO: 88910 - DNA, 15 bp, Homo sapiens
aatcgtgaggattgg

SEQ ID NO: 88911 - DNA, 15 bp, Homo sapiens
caatcgtgaggattg

SEQ ID NO: 88912 - DNA, 15 bp, Homo sapiens
tcaatcgtgaggatt

SEQ ID NO: 88913 - DNA, 15 bp, Homo sapiens
ctcaatcgtgaggat

SEQ ID NO: 88914 - DNA, 15 bp, Homo sapiens
actcaatcgtgagga

SEQ ID NO: 88915 - DNA, 15 bp, Homo sapiens
cactcaatcgtgagg

SEQ ID NO: 88916 - DNA, 15 bp, Homo sapiens
acactcaatcgtgag

SEQ ID NO: 88917 - DNA, 15 bp, Homo sapiens
gacactcaatcgtga

SEQ ID NO: 88918 - DNA, 15 bp, Homo sapiens
tgacactcaatcgtg

SEQ ID NO: 88919 - DNA, 15 bp, Homo sapiens
ttgacactcaatcgt

SEQ ID NO: 88920 - DNA, 15 bp, Homo sapiens
tttgacactcaatcg

SEQ ID NO: 88921 - DNA, 15 bp, Homo sapiens
ctttgacactcaatc

SEQ ID NO: 88922 - DNA, 15 bp, Homo sapiens
tctttgacactcaat

SEQ ID NO: 88923 - DNA, 15 bp, Homo sapiens
ttctttgacactcaa

SEQ ID NO: 88924 - DNA, 15 bp, Homo sapiens
cttctttgacactca

SEQ ID NO: 88925 - DNA, 15 bp, Homo sapiens
ccttctttgacactc

SEQ ID NO: 88926 - DNA, 15 bp, Homo sapiens
accttctttgacact

SEQ ID NO: 88927 - DNA, 15 bp, Homo sapiens
taccttctttgacac

SEQ ID NO: 88928 - DNA, 15 bp, Homo sapiens
ttaccttctttgaca

SEQ ID NO: 88929 - DNA, 15 bp, Homo sapiens
cttaccttctttgac

SEQ ID NO: 88930 - DNA, 15 bp, Homo sapiens
acttaccttctttga

SEQ ID NO: 88931 - DNA, 15 bp, Homo sapiens
aacttaccttctttg

SEQ ID NO: 88932 - DNA, 15 bp, Homo sapiens
aaacttaccttcttt

SEQ ID NO: 88933 - DNA, 15 bp, Homo sapiens
caaacttaccttctt

SEQ ID NO: 88934 - DNA, 15 bp, Homo sapiens
acaaacttaccttct

SEQ ID NO: 88935 - DNA, 15 bp, Homo sapiens
aacaaacttaccttc

SEQ ID NO: 88936 - DNA, 15 bp, Homo sapiens
gaacaaacttacctt

SEQ ID NO: 88937 - DNA, 15 bp, Homo sapiens
agaacaaacttacct

SEQ ID NO: 88938 - DNA, 15 bp, Homo sapiens
aagaacaaacttacc

SEQ ID NO: 88939 - DNA, 15 bp, Homo sapiens
aaagaacaaacttac

SEQ ID NO: 88940 - DNA, 15 bp, Homo sapiens
aaaagaacaaactta

SEQ ID NO: 88941 - DNA, 15 bp, Homo sapiens
caaaagaacaaactt

SEQ ID NO: 88942 - DNA, 15 bp, Homo sapiens
acaaaagaacaaact

SEQ ID NO: 88943 - DNA, 15 bp, Homo sapiens
cacaaaagaacaaac

SEQ ID NO: 88944 - DNA, 15 bp, Homo sapiens
gcacaaaagaacaaa

SEQ ID NO: 88945 - DNA, 15 bp, Homo sapiens
tgcacaaaagaacaa

SEQ ID NO: 88946 - DNA, 15 bp, Homo sapiens
gtgcacaaaagaaca

SEQ ID NO: 88947 - DNA, 15 bp, Homo sapiens
agtgcacaaaagaac

SEQ ID NO: 88948 - DNA, 15 bp, Homo sapiens
aagtgcacaaaagaa

SEQ ID NO: 88949 - DNA, 15 bp, Homo sapiens
taagtgcacaaaaga

SEQ ID NO: 88950 - DNA, 15 bp, Homo sapiens
ttaagtgcacaaaag

SEQ ID NO: 88951 - DNA, 15 bp, Homo sapiens
tttaagtgcacaaaa

SEQ ID NO: 88952 - DNA, 15 bp, Homo sapiens
ttttaagtgcacaaa

SEQ ID NO: 88953 - DNA, 15 bp, Homo sapiens
attttaagtgcacaa

SEQ ID NO: 88954 - DNA, 15 bp, Homo sapiens
aattttaagtgcaca

SEQ ID NO: 88955 - DNA, 15 bp, Homo sapiens
aaattttaagtgcac

SEQ ID NO: 88956 - DNA, 15 bp, Homo sapiens
aaaattttaagtgca

SEQ ID NO: 88957 - DNA, 15 bp, Homo sapiens
gaaaattttaagtgc

SEQ ID NO: 88958 - DNA, 15 bp, Homo sapiens
agaaaattttaagtg

SEQ ID NO: 88959 - DNA, 15 bp, Homo sapiens
aagaaaattttaagt

SEQ ID NO: 88960 - DNA, 15 bp, Homo sapiens
gaagaaaattttaag

SEQ ID NO: 88961 - DNA, 15 bp, Homo sapiens
agaagaaaattttaa

SEQ ID NO: 88962 - DNA, 15 bp, Homo sapiens
cagaagaaaatttta

SEQ ID NO: 88963 - DNA, 15 bp, Homo sapiens
acagaagaaaatttt

SEQ ID NO: 88964 - DNA, 15 bp, Homo sapiens
tacagaagaaaattt

SEQ ID NO: 88965 - DNA, 15 bp, Homo sapiens
gtacagaagaaaatt

SEQ ID NO: 88966 - DNA, 15 bp, Homo sapiens
ggtacagaagaaaat

SEQ ID NO: 88967 - DNA, 15 bp, Homo sapiens
tggtacagaagaaaa

SEQ ID NO: 88968 - DNA, 15 bp, Homo sapiens
ctggtacagaagaaa

SEQ ID NO: 88969 - DNA, 15 bp, Homo sapiens
tctggtacagaagaa

SEQ ID NO: 88970 - DNA, 15 bp, Homo sapiens
gtctggtacagaaga

SEQ ID NO: 88971 - DNA, 15 bp, Homo sapiens
tgtctggtacagaag

SEQ ID NO: 88972 - DNA, 15 bp, Homo sapiens
atgtctggtacagaa

SEQ ID NO: 88973 - DNA, 15 bp, Homo sapiens
catgtctggtacaga

SEQ ID NO: 88974 - DNA, 15 bp, Homo sapiens
tcatgtctggtacag

SEQ ID NO: 88975 - DNA, 15 bp, Homo sapiens
gtcatgtctggtaca

SEQ ID NO: 88976 - DNA, 15 bp, Homo sapiens
tgtcatgtctggtac

SEQ ID NO: 88977 - DNA, 15 bp, Homo sapiens
gtgtcatgtctggta

SEQ ID NO: 88978 - DNA, 15 bp, Homo sapiens
tgtgtcatgtctggt

SEQ ID NO: 88979 - DNA, 15 bp, Homo sapiens
ctgtgtcatgtctgg

SEQ ID NO: 88980 - DNA, 15 bp, Homo sapiens
cctgtgtcatgtctg

SEQ ID NO: 88981 - DNA, 15 bp, Homo sapiens
gcctgtgtcatgtct

SEQ ID NO: 88982 - DNA, 15 bp, Homo sapiens
ggcctgtgtcatgtc

SEQ ID NO: 88983 - DNA, 15 bp, Homo sapiens
gggcctgtgtcatgt

SEQ ID NO: 88984 - DNA, 15 bp, Homo sapiens
tgggcctgtgtcatg

SEQ ID NO: 88985 - DNA, 15 bp, Homo sapiens
atgggcctgtgtcat

SEQ ID NO: 88986 - DNA, 15 bp, Homo sapiens
catgggcctgtgtca

SEQ ID NO: 88987 - DNA, 15 bp, Homo sapiens
gcatgggcctgtgtc

SEQ ID NO: 88988 - DNA, 15 bp, Homo sapiens
agcatgggcctgtgt

SEQ ID NO: 88989 - DNA, 15 bp, Homo sapiens
cagcatgggcctgtg

SEQ ID NO: 88990 - DNA, 15 bp, Homo sapiens
acagcatgggcctgt

SEQ ID NO: 88991 - DNA, 15 bp, Homo sapiens
aacagcatgggcctg

SEQ ID NO: 88992 - DNA, 15 bp, Homo sapiens
taacagcatgggcct

SEQ ID NO: 88993 - DNA, 15 bp, Homo sapiens
ttaacagcatgggcc

SEQ ID NO: 88994 - DNA, 15 bp, Homo sapiens
cttaacagcatgggc

SEQ ID NO: 88995 - DNA, 15 bp, Homo sapiens
ccttaacagcatggg

SEQ ID NO: 88996 - DNA, 15 bp, Homo sapiens
accttaacagcatgg

SEQ ID NO: 88997 - DNA, 15 bp, Homo sapiens
aaccttaacagcatg

SEQ ID NO: 88998 - DNA, 15 bp, Homo sapiens
caaccttaacagcat

SEQ ID NO: 88999 - DNA, 15 bp, Homo sapiens
acaaccttaacagca

SEQ ID NO: 89000 - DNA, 15 bp, Homo sapiens
aacaaccttaacagc

SEQ ID NO: 89001 - DNA, 15 bp, Homo sapiens
caacaaccttaacag

SEQ ID NO: 89002 - DNA, 15 bp, Homo sapiens
gcaacaaccttaaca

SEQ ID NO: 89003 - DNA, 15 bp, Homo sapiens
tgcaacaaccttaac

SEQ ID NO: 89004 - DNA, 15 bp, Homo sapiens
ctgcaacaaccttaa

SEQ ID NO: 89005 - DNA, 15 bp, Homo sapiens
tctgcaacaacctta

SEQ ID NO: 89006 - DNA, 15 bp, Homo sapiens
ttctgcaacaacctt

SEQ ID NO: 89007 - DNA, 15 bp, Homo sapiens
tttctgcaacaacct

SEQ ID NO: 89008 - DNA, 15 bp, Homo sapiens
ttttctgcaacaacc

SEQ ID NO: 89009 - DNA, 15 bp, Homo sapiens
gttttctgcaacaac

SEQ ID NO: 89010 - DNA, 15 bp, Homo sapiens
ggttttctgcaacaa

SEQ ID NO: 89011 - DNA, 15 bp, Homo sapiens
tggttttctgcaaca

SEQ ID NO: 89012 - DNA, 15 bp, Homo sapiens
ctggttttctgcaac

SEQ ID NO: 89013 - DNA, 15 bp, Homo sapiens
gctggttttctgcaa

SEQ ID NO: 89014 - DNA, 15 bp, Homo sapiens
agctggttttctgca

SEQ ID NO: 89015 - DNA, 15 bp, Homo sapiens
aagctggttttctgc

SEQ ID NO: 89016 - DNA, 15 bp, Homo sapiens
caagctggttttctg

SEQ ID NO: 89017 - DNA, 15 bp, Homo sapiens
gcaagctggttttct

SEQ ID NO: 89018 - DNA, 15 bp, Homo sapiens
cgcaagctggttttc

SEQ ID NO: 89019 - DNA, 15 bp, Homo sapiens
acgcaagctggtttt

SEQ ID NO: 89020 - DNA, 15 bp, Homo sapiens
cacgcaagctggttt

SEQ ID NO: 89021 - DNA, 15 bp, Homo sapiens
acacgcaagctggtt

SEQ ID NO: 89022 - DNA, 15 bp, Homo sapiens
aacacgcaagctggt

SEQ ID NO: 89023 - DNA, 15 bp, Homo sapiens
gaacacgcaagctgg

SEQ ID NO: 89024 - DNA, 15 bp, Homo sapiens
ggaacacgcaagctg

SEQ ID NO: 89025 - DNA, 15 bp, Homo sapiens
tggaacacgcaagct

SEQ ID NO: 89026 - DNA, 15 bp, Homo sapiens
gtggaacacgcaagc

SEQ ID NO: 89027 - DNA, 15 bp, Homo sapiens
agtggaacacgcaag

SEQ ID NO: 89028 - DNA, 15 bp, Homo sapiens
gagtggaacacgcaa

SEQ ID NO: 89029 - DNA, 15 bp, Homo sapiens
tgagtggaacacgca

SEQ ID NO: 89030 - DNA, 15 bp, Homo sapiens
ttgagtggaacacgc

SEQ ID NO: 89031 - DNA, 15 bp, Homo sapiens
gttgagtggaacacg

SEQ ID NO: 89032 - DNA, 15 bp, Homo sapiens
agttgagtggaacac

SEQ ID NO: 89033 - DNA, 15 bp, Homo sapiens
aagttgagtggaaca

SEQ ID NO: 89034 - DNA, 15 bp, Homo sapiens
aaagttgagtggaac

SEQ ID NO: 89035 - DNA, 15 bp, Homo sapiens
aaaagttgagtggaa

SEQ ID NO: 89036 - DNA, 15 bp, Homo sapiens
gaaaagttgagtgga

SEQ ID NO: 89037 - DNA, 15 bp, Homo sapiens
ggaaaagttgagtgg

SEQ ID NO: 89038 - DNA, 15 bp, Homo sapiens
aggaaaagttgagtg

SEQ ID NO: 89039 - DNA, 15 bp, Homo sapiens
taggaaaagttgagt

SEQ ID NO: 89040 - DNA, 15 bp, Homo sapiens
ctaggaaaagttgag

SEQ ID NO: 89041 - DNA, 15 bp, Homo sapiens
gctaggaaaagttga

SEQ ID NO: 89042 - DNA, 15 bp, Homo sapiens
tgctaggaaaagttg

SEQ ID NO: 89043 - DNA, 15 bp, Homo sapiens
atgctaggaaaagtt

SEQ ID NO: 89044 - DNA, 15 bp, Homo sapiens
tatgctaggaaaagt

SEQ ID NO: 89045 - DNA, 15 bp, Homo sapiens
gtatgctaggaaaag

SEQ ID NO: 89046 - DNA, 15 bp, Homo sapiens
tgtatgctaggaaaa

SEQ ID NO: 89047 - DNA, 15 bp, Homo sapiens
ttgtatgctaggaaa

SEQ ID NO: 89048 - DNA, 15 bp, Homo sapiens
tttgtatgctaggaa

SEQ ID NO: 89049 - DNA, 15 bp, Homo sapiens
ctttgtatgctagga

SEQ ID NO: 89050 - DNA, 15 bp, Homo sapiens
tctttgtatgctagg

SEQ ID NO: 89051 - DNA, 15 bp, Homo sapiens
gtctttgtatgctag

SEQ ID NO: 89052 - DNA, 15 bp, Homo sapiens
tgtctttgtatgcta

SEQ ID NO: 89053 - DNA, 15 bp, Homo sapiens
ttgtctttgtatgct

SEQ ID NO: 89054 - DNA, 15 bp, Homo sapiens
cttgtctttgtatgc

SEQ ID NO: 89055 - DNA, 15 bp, Homo sapiens
gcttgtctttgtatg

SEQ ID NO: 89056 - DNA, 15 bp, Homo sapiens
ggcttgtctttgtat

SEQ ID NO: 89057 - DNA, 15 bp, Homo sapiens
tggcttgtctttgta

SEQ ID NO: 89058 - DNA, 15 bp, Homo sapiens
ttggcttgtctttgt

SEQ ID NO: 89059 - DNA, 15 bp, Homo sapiens
tttggcttgtctttg

SEQ ID NO: 89060 - DNA, 15 bp, Homo sapiens
ttttggcttgtcttt

SEQ ID NO: 89061 - DNA, 15 bp, Homo sapiens
attttggcttgtctt

SEQ ID NO: 89062 - DNA, 15 bp, Homo sapiens
aattttggcttgtct

SEQ ID NO: 89063 - DNA, 15 bp, Homo sapiens
aaattttggcttgtc

SEQ ID NO: 89064 - DNA, 15 bp, Homo sapiens
aaaattttggcttgt

SEQ ID NO: 89065 - DNA, 15 bp, Homo sapiens
gaaaattttggcttg

SEQ ID NO: 89066 - DNA, 15 bp, Homo sapiens
cgaaaattttggctt

SEQ ID NO: 89067 - DNA, 15 bp, Homo sapiens
gcgaaaattttggct

SEQ ID NO: 89068 - DNA, 15 bp, Homo sapiens
ggcgaaaattttggc

SEQ ID NO: 89069 - DNA, 15 bp, Homo sapiens
tggcgaaaattttgg

SEQ ID NO: 89070 - DNA, 15 bp, Homo sapiens
gtggcgaaaattttg

SEQ ID NO: 89071 - DNA, 15 bp, Homo sapiens
agtggcgaaaatttt

SEQ ID NO: 89072 - DNA, 15 bp, Homo sapiens
aagtggcgaaaattt

SEQ ID NO: 89073 - DNA, 15 bp, Homo sapiens
caagtggcgaaaatt

SEQ ID NO: 89074 - DNA, 15 bp, Homo sapiens
acaagtggcgaaaat

SEQ ID NO: 89075 - DNA, 15 bp, Homo sapiens
cacaagtggcgaaaa

SEQ ID NO: 89076 - DNA, 15 bp, Homo sapiens
gcacaagtggcgaaa

SEQ ID NO: 89077 - DNA, 15 bp, Homo sapiens
agcacaagtggcgaa

SEQ ID NO: 89078 - DNA, 15 bp, Homo sapiens
tagcacaagtggcga

SEQ ID NO: 89079 - DNA, 15 bp, Homo sapiens
gtagcacaagtggcg

SEQ ID NO: 89080 - DNA, 15 bp, Homo sapiens
ggtagcacaagtggc

SEQ ID NO: 89081 - DNA, 15 bp, Homo sapiens
tggtagcacaagtgg

SEQ ID NO: 89082 - DNA, 15 bp, Homo sapiens
ctggtagcacaagtg

SEQ ID NO: 89083 - DNA, 15 bp, Homo sapiens
actggtagcacaagt

SEQ ID NO: 89084 - DNA, 15 bp, Homo sapiens
aactggtagcacaag

SEQ ID NO: 89085 - DNA, 15 bp, Homo sapiens
caactggtagcacaa

SEQ ID NO: 89086 - DNA, 15 bp, Homo sapiens
gcaactggtagcaca

SEQ ID NO: 89087 - DNA, 15 bp, Homo sapiens
tgcaactggtagcac

SEQ ID NO: 89088 - DNA, 15 bp, Homo sapiens
ttgcaactggtagca

SEQ ID NO: 89089 - DNA, 15 bp, Homo sapiens
tttgcaactggtagc

SEQ ID NO: 89090 - DNA, 15 bp, Homo sapiens
ttttgcaactggtag

SEQ ID NO: 89091 - DNA, 15 bp, Homo sapiens
tttttgcaactggta

SEQ ID NO: 89092 - DNA, 15 bp, Homo sapiens
atttttgcaactggt

SEQ ID NO: 89093 - DNA, 15 bp, Homo sapiens
tatttttgcaactgg

SEQ ID NO: 89094 - DNA, 15 bp, Homo sapiens
gtatttttgcaactg

SEQ ID NO: 89095 - DNA, 15 bp, Homo sapiens
tgtatttttgcaact

SEQ ID NO: 89096 - DNA, 15 bp, Homo sapiens
ctgtatttttgcaac

SEQ ID NO: 89097 - DNA, 15 bp, Homo sapiens
actgtatttttgcaa

SEQ ID NO: 89098 - DNA, 15 bp, Homo sapiens
tactgtatttttgca

SEQ ID NO: 89099 - DNA, 15 bp, Homo sapiens
ttactgtatttttgc

SEQ ID NO: 89100 - DNA, 15 bp, Homo sapiens
tttactgtatttttg

SEQ ID NO: 89101 - DNA, 15 bp, Homo sapiens
ctttactgtattttt

SEQ ID NO: 89102 - DNA, 15 bp, Homo sapiens
tctttactgtatttt

SEQ ID NO: 89103 - DNA, 15 bp, Homo sapiens
ttctttactgtattt

SEQ ID NO: 89104 - DNA, 15 bp, Homo sapiens
tttctttactgtatt

SEQ ID NO: 89105 - DNA, 15 bp, Homo sapiens
ctttctttactgtat

SEQ ID NO: 89106 - DNA, 15 bp, Homo sapiens
actttctttactgta

SEQ ID NO: 89107 - DNA, 15 bp, Homo sapiens
aactttctttactgt

SEQ ID NO: 89108 - DNA, 15 bp, Homo sapiens
aaactttctttactg

SEQ ID NO: 89109 - DNA, 15 bp, Homo sapiens
aaaactttctttact

SEQ ID NO: 89110 - DNA, 15 bp, Homo sapiens
taaaactttctttac

SEQ ID NO: 89111 - DNA, 15 bp, Homo sapiens
gtaaaactttcttta

SEQ ID NO: 89112 - DNA, 15 bp, Homo sapiens
tgtaaaactttcttt

SEQ ID NO: 89113 - DNA, 15 bp, Homo sapiens
ctgtaaaactttctt

SEQ ID NO: 89114 - DNA, 15 bp, Homo sapiens
actgtaaaactttct

SEQ ID NO: 89115 - DNA, 15 bp, Homo sapiens
tactgtaaaactttc

SEQ ID NO: 89116 - DNA, 15 bp, Homo sapiens
atactgtaaaacttt

SEQ ID NO: 89117 - DNA, 15 bp, Homo sapiens
gatactgtaaaactt

SEQ ID NO: 89118 - DNA, 15 bp, Homo sapiens
agatactgtaaaact

SEQ ID NO: 89119 - DNA, 15 bp, Homo sapiens
aagatactgtaaaac

SEQ ID NO: 89120 - DNA, 15 bp, Homo sapiens
caagatactgtaaaa

SEQ ID NO: 89121 - DNA, 15 bp, Homo sapiens
acaagatactgtaaa

SEQ ID NO: 89122 - DNA, 15 bp, Homo sapiens
tacaagatactgtaa

SEQ ID NO: 89123 - DNA, 15 bp, Homo sapiens
ttacaagatactgta

SEQ ID NO: 89124 - DNA, 15 bp, Homo sapiens
attacaagatactgt

SEQ ID NO: 89125 - DNA, 15 bp, Homo sapiens
tattacaagatactg

SEQ ID NO: 89126 - DNA, 15 bp, Homo sapiens
ttattacaagatact

SEQ ID NO: 89127 - DNA, 15 bp, Homo sapiens
attattacaagatac

SEQ ID NO: 89128 - DNA, 15 bp, Homo sapiens
tattattacaagata

SEQ ID NO: 89129 - DNA, 15 bp, Homo sapiens
atattattacaagat

SEQ ID NO: 89130 - DNA, 15 bp, Homo sapiens
gatattattacaaga

SEQ ID NO: 89131 - DNA, 15 bp, Homo sapiens
tgatattattacaag

SEQ ID NO: 89132 - DNA, 15 bp, Homo sapiens
gtgatattattacaa

SEQ ID NO: 89133 - DNA, 15 bp, Homo sapiens
tgtgatattattaca

SEQ ID NO: 89134 - DNA, 15 bp, Homo sapiens
ttgtgatattattac

SEQ ID NO: 89135 - DNA, 15 bp, Homo sapiens
tttgtgatattatta

SEQ ID NO: 89136 - DNA, 15 bp, Homo sapiens
ctttgtgatattatt

SEQ ID NO: 89137 - DNA, 15 bp, Homo sapiens
tctttgtgatattat

SEQ ID NO: 89138 - DNA, 15 bp, Homo sapiens
atctttgtgatatta

SEQ ID NO: 89139 - DNA, 15 bp, Homo sapiens
tatctttgtgatatt

SEQ ID NO: 89140 - DNA, 15 bp, Homo sapiens
gtatctttgtgatat

SEQ ID NO: 89141 - DNA, 15 bp, Homo sapiens
tgtatctttgtgata

SEQ ID NO: 89142 - DNA, 15 bp, Homo sapiens
ttgtatctttgtgat

SEQ ID NO: 89143 - DNA, 15 bp, Homo sapiens
gttgtatctttgtga

SEQ ID NO: 89144 - DNA, 15 bp, Homo sapiens
agttgtatctttgtg

SEQ ID NO: 89145 - DNA, 15 bp, Homo sapiens
aagttgtatctttgt

SEQ ID NO: 89146 - DNA, 15 bp, Homo sapiens
caagttgtatctttg

SEQ ID NO: 89147 - DNA, 15 bp, Homo sapiens
tcaagttgtatcttt

SEQ ID NO: 89148 - DNA, 15 bp, Homo sapiens
ttcaagttgtatctt

SEQ ID NO: 89149 - DNA, 15 bp, Homo sapiens
cttcaagttgtatct

SEQ ID NO: 89150 - DNA, 15 bp, Homo sapiens
acttcaagttgtatc

SEQ ID NO: 89151 - DNA, 15 bp, Homo sapiens
aacttcaagttgtat

SEQ ID NO: 89152 - DNA, 15 bp, Homo sapiens
caacttcaagttgta

SEQ ID NO: 89153 - DNA, 15 bp, Homo sapiens
acaacttcaagttgt

SEQ ID NO: 89154 - DNA, 15 bp, Homo sapiens
gacaacttcaagttg

SEQ ID NO: 89155 - DNA, 15 bp, Homo sapiens
tgacaacttcaagtt

SEQ ID NO: 89156 - DNA, 15 bp, Homo sapiens
gtgacaacttcaagt

SEQ ID NO: 89157 - DNA, 15 bp, Homo sapiens
agtgacaacttcaag

SEQ ID NO: 89158 - DNA, 15 bp, Homo sapiens
gagtgacaacttcaa

SEQ ID NO: 89159 - DNA, 15 bp, Homo sapiens
ggagtgacaacttca

SEQ ID NO: 89160 - DNA, 15 bp, Homo sapiens
tggagtgacaacttc

SEQ ID NO: 89161 - DNA, 15 bp, Homo sapiens
atggagtgacaactt

SEQ ID NO: 89162 - DNA, 15 bp, Homo sapiens
catggagtgacaact

SEQ ID NO: 89163 - DNA, 15 bp, Homo sapiens
gcatggagtgacaac

SEQ ID NO: 89164 - DNA, 15 bp, Homo sapiens
tgcatggagtgacaa

SEQ ID NO: 89165 - DNA, 15 bp, Homo sapiens
ctgcatggagtgaca

SEQ ID NO: 89166 - DNA, 15 bp, Homo sapiens
cctgcatggagtgac

SEQ ID NO: 89167 - DNA, 15 bp, Homo sapiens
tcctgcatggagtga

SEQ ID NO: 89168 - DNA, 15 bp, Homo sapiens
ttcctgcatggagtg

SEQ ID NO: 89169 - DNA, 15 bp, Homo sapiens
tttcctgcatggagt

SEQ ID NO: 89170 - DNA, 15 bp, Homo sapiens
ttttcctgcatggag

SEQ ID NO: 89171 - DNA, 15 bp, Homo sapiens
gttttcctgcatgga

SEQ ID NO: 89172 - DNA, 15 bp, Homo sapiens
tgttttcctgcatgg

SEQ ID NO: 89173 - DNA, 15 bp, Homo sapiens
atgttttcctgcatg

SEQ ID NO: 89174 - DNA, 15 bp, Homo sapiens
catgttttcctgcat

SEQ ID NO: 89175 - DNA, 15 bp, Homo sapiens
acatgttttcctgca

SEQ ID NO: 89176 - DNA, 15 bp, Homo sapiens
aacatgttttcctgc

SEQ ID NO: 89177 - DNA, 15 bp, Homo sapiens
taacatgttttcctg

SEQ ID NO: 89178 - DNA, 15 bp, Homo sapiens
gtaacatgttttcct

SEQ ID NO: 89179 - DNA, 15 bp, Homo sapiens
agtaacatgttttcc

SEQ ID NO: 89180 - DNA, 15 bp, Homo sapiens
aagtaacatgttttc

SEQ ID NO: 89181 - DNA, 15 bp, Homo sapiens
aaagtaacatgtttt

SEQ ID NO: 89182 - DNA, 15 bp, Homo sapiens
aaaagtaacatgttt

SEQ ID NO: 89183 - DNA, 15 bp, Homo sapiens
taaaagtaacatgtt

SEQ ID NO: 89184 - DNA, 15 bp, Homo sapiens
ctaaaagtaacatgt

SEQ ID NO: 89185 - DNA, 15 bp, Homo sapiens
tctaaaagtaacatg

SEQ ID NO: 89186 - DNA, 15 bp, Homo sapiens
ttctaaaagtaacat

SEQ ID NO: 89187 - DNA, 15 bp, Homo sapiens
tttctaaaagtaaca

SEQ ID NO: 89188 - DNA, 15 bp, Homo sapiens
ttttctaaaagtaac

SEQ ID NO: 89189 - DNA, 15 bp, Homo sapiens
tttttctaaaagtaa

SEQ ID NO: 89190 - DNA, 15 bp, Homo sapiens
ttttttctaaaagta

SEQ ID NO: 89191 - DNA, 15 bp, Homo sapiens
tttttttctaaaagt

SEQ ID NO: 89192 - DNA, 15 bp, Homo sapiens
atttttttctaaaag

SEQ ID NO: 89193 - DNA, 15 bp, Homo sapiens
catttttttctaaaa

SEQ ID NO: 89194 - DNA, 15 bp, Homo sapiens
tcatttttttctaaa

SEQ ID NO: 89195 - DNA, 15 bp, Homo sapiens
ttcatttttttctaa

SEQ ID NO: 89196 - DNA, 15 bp, Homo sapiens
attcatttttttcta

SEQ ID NO: 89197 - DNA, 15 bp, Homo sapiens
cattcatttttttct

SEQ ID NO: 89198 - DNA, 15 bp, Homo sapiens
gcattcatttttttc

SEQ ID NO: 89199 - DNA, 15 bp, Homo sapiens
agcattcattttttt

SEQ ID NO: 89200 - DNA, 15 bp, Homo sapiens
cagcattcatttttt

SEQ ID NO: 89201 - DNA, 15 bp, Homo sapiens
gcagcattcattttt

SEQ ID NO: 89202 - DNA, 15 bp, Homo sapiens
agcagcattcatttt

SEQ ID NO: 89203 - DNA, 15 bp, Homo sapiens
aagcagcattcattt

SEQ ID NO: 89204 - DNA, 15 bp, Homo sapiens
taagcagcattcatt

SEQ ID NO: 89205 - DNA, 15 bp, Homo sapiens
gtaagcagcattcat

SEQ ID NO: 89206 - DNA, 15 bp, Homo sapiens
agtaagcagcattca

SEQ ID NO: 89207 - DNA, 15 bp, Homo sapiens
aagtaagcagcattc

SEQ ID NO: 89208 - DNA, 15 bp, Homo sapiens
aaagtaagcagcatt

SEQ ID NO: 89209 - DNA, 15 bp, Homo sapiens
gaaagtaagcagcat

SEQ ID NO: 89210 - DNA, 15 bp, Homo sapiens
tgaaagtaagcagca

SEQ ID NO: 89211 - DNA, 15 bp, Homo sapiens
ttgaaagtaagcagc

SEQ ID NO: 89212 - DNA, 15 bp, Homo sapiens
tttgaaagtaagcag

SEQ ID NO: 89213 - DNA, 15 bp, Homo sapiens
ctttgaaagtaagca

SEQ ID NO: 89214 - DNA, 15 bp, Homo sapiens
actttgaaagtaagc

SEQ ID NO: 89215 - DNA, 15 bp, Homo sapiens
aactttgaaagtaag

SEQ ID NO: 89216 - DNA, 15 bp, Homo sapiens
caactttgaaagtaa

SEQ ID NO: 89217 - DNA, 15 bp, Homo sapiens
tcaactttgaaagta

SEQ ID NO: 89218 - DNA, 15 bp, Homo sapiens
ttcaactttgaaagt

SEQ ID NO: 89219 - DNA, 15 bp, Homo sapiens
tttcaactttgaaag

SEQ ID NO: 89220 - DNA, 15 bp, Homo sapiens
ctttcaactttgaaa

SEQ ID NO: 89221 - DNA, 15 bp, Homo sapiens
actttcaactttgaa

SEQ ID NO: 89222 - DNA, 15 bp, Homo sapiens
aactttcaactttga

SEQ ID NO: 89223 - DNA, 15 bp, Homo sapiens
caactttcaactttg

SEQ ID NO: 89224 - DNA, 15 bp, Homo sapiens
ccaactttcaacttt

SEQ ID NO: 89225 - DNA, 15 bp, Homo sapiens
cccaactttcaactt

SEQ ID NO: 89226 - DNA, 15 bp, Homo sapiens
tcccaactttcaact

SEQ ID NO: 89227 - DNA, 15 bp, Homo sapiens
ctcccaactttcaac

SEQ ID NO: 89228 - DNA, 15 bp, Homo sapiens
actcccaactttcaa

SEQ ID NO: 89229 - DNA, 15 bp, Homo sapiens
aactcccaactttca

SEQ ID NO: 89230 - DNA, 15 bp, Homo sapiens
aaactcccaactttc

SEQ ID NO: 89231 - DNA, 15 bp, Homo sapiens
aaaactcccaacttt

SEQ ID NO: 89232 - DNA, 15 bp, Homo sapiens
gaaaactcccaactt

SEQ ID NO: 89233 - DNA, 15 bp, Homo sapiens
agaaaactcccaact

SEQ ID NO: 89234 - DNA, 15 bp, Homo sapiens
gagaaaactcccaac

SEQ ID NO: 89235 - DNA, 15 bp, Homo sapiens
agagaaaactcccaa

SEQ ID NO: 89236 - DNA, 15 bp, Homo sapiens
cagagaaaactccca

SEQ ID NO: 89237 - DNA, 15 bp, Homo sapiens
tcagagaaaactccc

SEQ ID NO: 89238 - DNA, 15 bp, Homo sapiens
atcagagaaaactcc

SEQ ID NO: 89239 - DNA, 15 bp, Homo sapiens
catcagagaaaactc

SEQ ID NO: 89240 - DNA, 15 bp, Homo sapiens
tcatcagagaaaact

SEQ ID NO: 89241 - DNA, 15 bp, Homo sapiens
ttcatcagagaaaac

SEQ ID NO: 89242 - DNA, 15 bp, Homo sapiens
tttcatcagagaaaa

SEQ ID NO: 89243 - DNA, 15 bp, Homo sapiens
ttttcatcagagaaa

SEQ ID NO: 89244 - DNA, 15 bp, Homo sapiens
attttcatcagagaa

SEQ ID NO: 89245 - DNA, 15 bp, Homo sapiens
tattttcatcagaga

SEQ ID NO: 89246 - DNA, 15 bp, Homo sapiens
ttattttcatcagag

SEQ ID NO: 89247 - DNA, 15 bp, Homo sapiens
attattttcatcaga

SEQ ID NO: 89248 - DNA, 15 bp, Homo sapiens
cattattttcatcag

SEQ ID NO: 89249 - DNA, 15 bp, Homo sapiens
tcattattttcatca

SEQ ID NO: 89250 - DNA, 15 bp, Homo sapiens
ttcattattttcatc

SEQ ID NO: 89251 - DNA, 15 bp, Homo sapiens
tttcattattttcat

SEQ ID NO: 89252 - DNA, 15 bp, Homo sapiens
atttcattattttca

SEQ ID NO: 89253 - DNA, 15 bp, Homo sapiens
catttcattattttc

SEQ ID NO: 89254 - DNA, 15 bp, Homo sapiens
tcatttcattatttt

SEQ ID NO: 89255 - DNA, 15 bp, Homo sapiens
ttcatttcattattt

SEQ ID NO: 89256 - DNA, 15 bp, Homo sapiens
cttcatttcattatt

SEQ ID NO: 89257 - DNA, 15 bp, Homo sapiens
tcttcatttcattat

SEQ ID NO: 89258 - DNA, 15 bp, Homo sapiens
ctcttcatttcatta

SEQ ID NO: 89259 - DNA, 15 bp, Homo sapiens
actcttcatttcatt

SEQ ID NO: 89260 - DNA, 15 bp, Homo sapiens
aactcttcatttcat

SEQ ID NO: 89261 - DNA, 15 bp, Homo sapiens
gaactcttcatttca

SEQ ID NO: 89262 - DNA, 15 bp, Homo sapiens
tgaactcttcatttc

SEQ ID NO: 89263 - DNA, 15 bp, Homo sapiens
ttgaactcttcattt

SEQ ID NO: 89264 - DNA, 15 bp, Homo sapiens
cttgaactcttcatt

SEQ ID NO: 89265 - DNA, 15 bp, Homo sapiens
ccttgaactcttcat

SEQ ID NO: 89266 - DNA, 15 bp, Homo sapiens
tccttgaactcttca

SEQ ID NO: 89267 - DNA, 15 bp, Homo sapiens
atccttgaactcttc

SEQ ID NO: 89268 - DNA, 15 bp, Homo sapiens
aatccttgaactctt

SEQ ID NO: 89269 - DNA, 15 bp, Homo sapiens
gaatccttgaactct

SEQ ID NO: 89270 - DNA, 15 bp, Homo sapiens
ggaatccttgaactc

SEQ ID NO: 89271 - DNA, 15 bp, Homo sapiens
tggaatccttgaact

SEQ ID NO: 89272 - DNA, 15 bp, Homo sapiens
ctggaatccttgaac

SEQ ID NO: 89273 - DNA, 15 bp, Homo sapiens
gctggaatccttgaa

SEQ ID NO: 89274 - DNA, 15 bp, Homo sapiens
tgctggaatccttga

SEQ ID NO: 89275 - DNA, 15 bp, Homo sapiens
atgctggaatccttg

SEQ ID NO: 89276 - DNA, 15 bp, Homo sapiens
catgctggaatcctt

SEQ ID NO: 89277 - DNA, 15 bp, Homo sapiens
acatgctggaatcct

SEQ ID NO: 89278 - DNA, 15 bp, Homo sapiens
gacatgctggaatcc

SEQ ID NO: 89279 - DNA, 15 bp, Homo sapiens
agacatgctggaatc

SEQ ID NO: 89280 - DNA, 15 bp, Homo sapiens
tagacatgctggaat

SEQ ID NO: 89281 - DNA, 15 bp, Homo sapiens
gtagacatgctggaa

SEQ ID NO: 89282 - DNA, 15 bp, Homo sapiens
ggtagacatgctgga

SEQ ID NO: 89283 - DNA, 15 bp, Homo sapiens
aggtagacatgctgg

SEQ ID NO: 89284 - DNA, 15 bp, Homo sapiens
aaggtagacatgctg

SEQ ID NO: 89285 - DNA, 15 bp, Homo sapiens
aaaggtagacatgct

SEQ ID NO: 89286 - DNA, 15 bp, Homo sapiens
taaaggtagacatgc

SEQ ID NO: 89287 - DNA, 15 bp, Homo sapiens
ttaaaggtagacatg

SEQ ID NO: 89288 - DNA, 15 bp, Homo sapiens
tttaaaggtagacat

SEQ ID NO: 89289 - DNA, 15 bp, Homo sapiens
ctttaaaggtagaca

SEQ ID NO: 89290 - DNA, 15 bp, Homo sapiens
cctttaaaggtagac

SEQ ID NO: 89291 - DNA, 15 bp, Homo sapiens
acctttaaaggtaga

SEQ ID NO: 89292 - DNA, 15 bp, Homo sapiens
aacctttaaaggtag

SEQ ID NO: 89293 - DNA, 15 bp, Homo sapiens
aaacctttaaaggta

SEQ ID NO: 89294 - DNA, 15 bp, Homo sapiens
aaaacctttaaaggt

SEQ ID NO: 89295 - DNA, 15 bp, Homo sapiens
aaaaacctttaaagg

SEQ ID NO: 89296 - DNA, 15 bp, Homo sapiens
aaaaaacctttaaag

SEQ ID NO: 89297 - DNA, 15 bp, Homo sapiens
aaaaaaacctttaaa

SEQ ID NO: 89298 - DNA, 15 bp, Homo sapiens
gaaaaaaacctttaa

SEQ ID NO: 89299 - DNA, 15 bp, Homo sapiens
ggaaaaaaaccttta

SEQ ID NO: 89300 - DNA, 15 bp, Homo sapiens
aggaaaaaaaccttt

SEQ ID NO: 89301 - DNA, 15 bp, Homo sapiens
taggaaaaaaacctt

SEQ ID NO: 89302 - DNA, 15 bp, Homo sapiens
ttaggaaaaaaacct

SEQ ID NO: 89303 - DNA, 15 bp, Homo sapiens
cttaggaaaaaaacc

SEQ ID NO: 89304 - DNA, 15 bp, Homo sapiens
tcttaggaaaaaaac

SEQ ID NO: 89305 - DNA, 15 bp, Homo sapiens
ttcttaggaaaaaaa

SEQ ID NO: 89306 - DNA, 15 bp, Homo sapiens
tttcttaggaaaaaa

SEQ ID NO: 89307 - DNA, 15 bp, Homo sapiens
atttcttaggaaaaa

SEQ ID NO: 89308 - DNA, 15 bp, Homo sapiens
aatttcttaggaaaa

SEQ ID NO: 89309 - DNA, 15 bp, Homo sapiens
aaatttcttaggaaa

SEQ ID NO: 89310 - DNA, 15 bp, Homo sapiens
aaaatttcttaggaa

SEQ ID NO: 89311 - DNA, 15 bp, Homo sapiens
taaaatttcttagga

SEQ ID NO: 89312 - DNA, 15 bp, Homo sapiens
ctaaaatttcttagg

SEQ ID NO: 89313 - DNA, 15 bp, Homo sapiens
gctaaaatttcttag

SEQ ID NO: 89314 - DNA, 15 bp, Homo sapiens
tgctaaaatttctta

SEQ ID NO: 89315 - DNA, 15 bp, Homo sapiens
ctgctaaaatttctt

SEQ ID NO: 89316 - DNA, 15 bp, Homo sapiens
gctgctaaaatttct

SEQ ID NO: 89317 - DNA, 15 bp, Homo sapiens
ggctgctaaaatttc

SEQ ID NO: 89318 - DNA, 15 bp, Homo sapiens
cggctgctaaaattt

SEQ ID NO: 89319 - DNA, 15 bp, Homo sapiens
ccggctgctaaaatt

SEQ ID NO: 89320 - DNA, 15 bp, Homo sapiens
accggctgctaaaat

SEQ ID NO: 89321 - DNA, 15 bp, Homo sapiens
gaccggctgctaaaa

SEQ ID NO: 89322 - DNA, 15 bp, Homo sapiens
tgaccggctgctaaa

SEQ ID NO: 89323 - DNA, 15 bp, Homo sapiens
atgaccggctgctaa

SEQ ID NO: 89324 - DNA, 15 bp, Homo sapiens
catgaccggctgcta

SEQ ID NO: 89325 - DNA, 15 bp, Homo sapiens
gcatgaccggctgct

SEQ ID NO: 89326 - DNA, 15 bp, Homo sapiens
agcatgaccggctgc

SEQ ID NO: 89327 - DNA, 15 bp, Homo sapiens
cagcatgaccggctg

SEQ ID NO: 89328 - DNA, 15 bp, Homo sapiens
ccagcatgaccggct

SEQ ID NO: 89329 - DNA, 15 bp, Homo sapiens
gccagcatgaccggc

SEQ ID NO: 89330 - DNA, 15 bp, Homo sapiens
agccagcatgaccgg

SEQ ID NO: 89331 - DNA, 15 bp, Homo sapiens
gagccagcatgaccg

SEQ ID NO: 89332 - DNA, 15 bp, Homo sapiens
tgagccagcatgacc

SEQ ID NO: 89333 - DNA, 15 bp, Homo sapiens
gtgagccagcatgac

SEQ ID NO: 89334 - DNA, 15 bp, Homo sapiens
tgtgagccagcatga

SEQ ID NO: 89335 - DNA, 15 bp, Homo sapiens
gtgtgagccagcatg

SEQ ID NO: 89336 - DNA, 15 bp, Homo sapiens
ggtgtgagccagcat

SEQ ID NO: 89337 - DNA, 15 bp, Homo sapiens
aggtgtgagccagca

SEQ ID NO: 89338 - DNA, 15 bp, Homo sapiens
caggtgtgagccagc

SEQ ID NO: 89339 - DNA, 15 bp, Homo sapiens
acaggtgtgagccag

SEQ ID NO: 89340 - DNA, 15 bp, Homo sapiens
cgctgggattacagg

SEQ ID NO: 89341 - DNA, 15 bp, Homo sapiens
gcgctgggattacag

SEQ ID NO: 89342 - DNA, 15 bp, Homo sapiens
agcgctgggattaca

SEQ ID NO: 89343 - DNA, 15 bp, Homo sapiens
aagcgctgggattac

SEQ ID NO: 89344 - DNA, 15 bp, Homo sapiens
aaagcgctgggatta

SEQ ID NO: 89345 - DNA, 15 bp, Homo sapiens
caaagcgctgggatt

SEQ ID NO: 89346 - DNA, 15 bp, Homo sapiens
ccaaagcgctgggat

SEQ ID NO: 89347 - DNA, 15 bp, Homo sapiens
cccaaagcgctggga

SEQ ID NO: 89348 - DNA, 15 bp, Homo sapiens
ccccaaagcgctggg

SEQ ID NO: 89349 - DNA, 15 bp, Homo sapiens
cccccaaagcgctgg

SEQ ID NO: 89350 - DNA, 15 bp, Homo sapiens
ccccccaaagcgctg

SEQ ID NO: 89351 - DNA, 15 bp, Homo sapiens
gccccccaaagcgct

SEQ ID NO: 89352 - DNA, 15 bp, Homo sapiens
ggccccccaaagcgc

SEQ ID NO: 89353 - DNA, 15 bp, Homo sapiens
cggccccccaaagcg

SEQ ID NO: 89354 - DNA, 15 bp, Homo sapiens
tcggccccccaaagc

SEQ ID NO: 89355 - DNA, 15 bp, Homo sapiens
ttcggccccccaaag

SEQ ID NO: 89356 - DNA, 15 bp, Homo sapiens
cttcggccccccaaa

SEQ ID NO: 89357 - DNA, 15 bp, Homo sapiens
acttcggccccccaa

SEQ ID NO: 89358 - DNA, 15 bp, Homo sapiens
cacttcggcccccca

SEQ ID NO: 89359 - DNA, 15 bp, Homo sapiens
ccacttcggcccccc

SEQ ID NO: 89360 - DNA, 15 bp, Homo sapiens
cccacttcggccccc

SEQ ID NO: 89361 - DNA, 15 bp, Homo sapiens
acccacttcggcccc

SEQ ID NO: 89362 - DNA, 15 bp, Homo sapiens
cacccacttcggccc

SEQ ID NO: 89363 - DNA, 15 bp, Homo sapiens
ccacccacttcggcc

SEQ ID NO: 89364 - DNA, 15 bp, Homo sapiens
tccacccacttcggc

SEQ ID NO: 89365 - DNA, 15 bp, Homo sapiens
atccacccacttcgg

SEQ ID NO: 89366 - DNA, 15 bp, Homo sapiens
gatccacccacttcg

SEQ ID NO: 89367 - DNA, 15 bp, Homo sapiens
tgatccacccacttc

SEQ ID NO: 89368 - DNA, 15 bp, Homo sapiens
gtgatccacccactt

SEQ ID NO: 89369 - DNA, 15 bp, Homo sapiens
agtgatccacccact

SEQ ID NO: 89370 - DNA, 15 bp, Homo sapiens
aagtgatccacccac

SEQ ID NO: 89371 - DNA, 15 bp, Homo sapiens
ccaagtgatccaccc

SEQ ID NO: 89372 - DNA, 15 bp, Homo sapiens
cccaagtgatccacc

SEQ ID NO: 89373 - DNA, 15 bp, Homo sapiens
ccccaagtgatccac

SEQ ID NO: 89374 - DNA, 15 bp, Homo sapiens
accccaagtgatcca

SEQ ID NO: 89375 - DNA, 15 bp, Homo sapiens
gaccccaagtgatcc

SEQ ID NO: 89376 - DNA, 15 bp, Homo sapiens
tgaccccaagtgatc

SEQ ID NO: 89377 - DNA, 15 bp, Homo sapiens
ctgaccccaagtgat

SEQ ID NO: 89378 - DNA, 15 bp, Homo sapiens
cctgaccccaagtga

SEQ ID NO: 89379 - DNA, 15 bp, Homo sapiens
tcctgaccccaagtg

SEQ ID NO: 89380 - DNA, 15 bp, Homo sapiens
ctcctgaccccaagt

SEQ ID NO: 89381 - DNA, 15 bp, Homo sapiens
actcctgaccccaag

SEQ ID NO: 89382 - DNA, 15 bp, Homo sapiens
aactcctgaccccaa

SEQ ID NO: 89383 - DNA, 15 bp, Homo sapiens
gaactcctgacccca

SEQ ID NO: 89384 - DNA, 15 bp, Homo sapiens
cgaactcctgacccc

SEQ ID NO: 89385 - DNA, 15 bp, Homo sapiens
tcgaactcctgaccc

SEQ ID NO: 89386 - DNA, 15 bp, Homo sapiens
ttcgaactcctgacc

SEQ ID NO: 89387 - DNA, 15 bp, Homo sapiens
cttcgaactcctgac

SEQ ID NO: 89388 - DNA, 15 bp, Homo sapiens
gcttcgaactcctga

SEQ ID NO: 89389 - DNA, 15 bp, Homo sapiens
ggcttcgaactcctg

SEQ ID NO: 89390 - DNA, 15 bp, Homo sapiens
gggcttcgaactcct

SEQ ID NO: 89391 - DNA, 15 bp, Homo sapiens
tgggcttcgaactcc

SEQ ID NO: 89392 - DNA, 15 bp, Homo sapiens
ctgggcttcgaactc

SEQ ID NO: 89393 - DNA, 15 bp, Homo sapiens
gctgggcttcgaact

SEQ ID NO: 89394 - DNA, 15 bp, Homo sapiens
ggctgggcttcgaac

SEQ ID NO: 89395 - DNA, 15 bp, Homo sapiens
aggctgggcttcgaa

SEQ ID NO: 89396 - DNA, 15 bp, Homo sapiens
caggctgggcttcga

SEQ ID NO: 89397 - DNA, 15 bp, Homo sapiens
ccaggctgggcttcg

SEQ ID NO: 89398 - DNA, 15 bp, Homo sapiens
gccaggctgggcttc

SEQ ID NO: 89399 - DNA, 15 bp, Homo sapiens
ggccaggctgggctt

SEQ ID NO: 89400 - DNA, 15 bp, Homo sapiens
tggccaggctgggct

SEQ ID NO: 89401 - DNA, 15 bp, Homo sapiens
ctggccaggctgggc

SEQ ID NO: 89402 - DNA, 15 bp, Homo sapiens
gctggccaggctggg

SEQ ID NO: 89403 - DNA, 15 bp, Homo sapiens
tgctggccaggctgg

SEQ ID NO: 89404 - DNA, 15 bp, Homo sapiens
atgctggccaggctg

SEQ ID NO: 89405 - DNA, 15 bp, Homo sapiens
catgctggccaggct

SEQ ID NO: 89406 - DNA, 15 bp, Homo sapiens
ccatgctggccaggc

SEQ ID NO: 89407 - DNA, 15 bp, Homo sapiens
gccatgctggccagg

SEQ ID NO: 89408 - DNA, 15 bp, Homo sapiens
tgccatgctggccag

SEQ ID NO: 89409 - DNA, 15 bp, Homo sapiens
ttgccatgctggcca

SEQ ID NO: 89410 - DNA, 15 bp, Homo sapiens
tttgccatgctggcc

SEQ ID NO: 89411 - DNA, 15 bp, Homo sapiens
ttttgccatgctggc

SEQ ID NO: 89412 - DNA, 15 bp, Homo sapiens
gttttgccatgctgg

SEQ ID NO: 89413 - DNA, 15 bp, Homo sapiens
ggttttgccatgctg

SEQ ID NO: 89414 - DNA, 15 bp, Homo sapiens
tggttttgccatgct

SEQ ID NO: 89415 - DNA, 15 bp, Homo sapiens
gtggttttgccatgc

SEQ ID NO: 89416 - DNA, 15 bp, Homo sapiens
ggtggttttgccatg

SEQ ID NO: 89417 - DNA, 15 bp, Homo sapiens
tggtggttttgccat

SEQ ID NO: 89418 - DNA, 15 bp, Homo sapiens
atggtggttttgcca

SEQ ID NO: 89419 - DNA, 15 bp, Homo sapiens
gatggtggttttgcc

SEQ ID NO: 89420 - DNA, 15 bp, Homo sapiens
agatggtggttttgc

SEQ ID NO: 89421 - DNA, 15 bp, Homo sapiens
gagatggtggttttg

SEQ ID NO: 89422 - DNA, 15 bp, Homo sapiens
tgagatggtggtttt

SEQ ID NO: 89423 - DNA, 15 bp, Homo sapiens
ctgagatggtggttt

SEQ ID NO: 89424 - DNA, 15 bp, Homo sapiens
gctgagatggtggtt

SEQ ID NO: 89425 - DNA, 15 bp, Homo sapiens
agctgagatggtggt

SEQ ID NO: 89426 - DNA, 15 bp, Homo sapiens
tagctgagatggtgg

SEQ ID NO: 89427 - DNA, 15 bp, Homo sapiens
ttagctgagatggtg

SEQ ID NO: 89428 - DNA, 15 bp, Homo sapiens
tttagctgagatggt

SEQ ID NO: 89429 - DNA, 15 bp, Homo sapiens
ttttagctgagatgg

SEQ ID NO: 89430 - DNA, 15 bp, Homo sapiens
tttttagctgagatg

SEQ ID NO: 89431 - DNA, 15 bp, Homo sapiens
ttttttagctgagat

SEQ ID NO: 89432 - DNA, 15 bp, Homo sapiens
attttttagctgaga

SEQ ID NO: 89433 - DNA, 15 bp, Homo sapiens
tattttttagctgag

SEQ ID NO: 89434 - DNA, 15 bp, Homo sapiens
gtattttttagctga

SEQ ID NO: 89435 - DNA, 15 bp, Homo sapiens
tgtattttttagctg

SEQ ID NO: 89436 - DNA, 15 bp, Homo sapiens
ttgtattttttagct

SEQ ID NO: 89437 - DNA, 15 bp, Homo sapiens
tttgtattttttagc

SEQ ID NO: 89438 - DNA, 15 bp, Homo sapiens
ttttgtattttttag

SEQ ID NO: 89439 - DNA, 15 bp, Homo sapiens
tttttgtatttttta

SEQ ID NO: 89440 - DNA, 15 bp, Homo sapiens
caccacacctggcta

SEQ ID NO: 89441 - DNA, 15 bp, Homo sapiens
tgccaccacacctgg

SEQ ID NO: 89442 - DNA, 15 bp, Homo sapiens
ctgccaccacacctg

SEQ ID NO: 89443 - DNA, 15 bp, Homo sapiens
cctgccaccacacct

SEQ ID NO: 89444 - DNA, 15 bp, Homo sapiens
acctgccaccacacc

SEQ ID NO: 89445 - DNA, 15 bp, Homo sapiens
tacctgccaccacac

SEQ ID NO: 89446 - DNA, 15 bp, Homo sapiens
gtacctgccaccaca

SEQ ID NO: 89447 - DNA, 15 bp, Homo sapiens
ggtacctgccaccac

SEQ ID NO: 89448 - DNA, 15 bp, Homo sapiens
aggtacctgccacca

SEQ ID NO: 89449 - DNA, 15 bp, Homo sapiens
caggtacctgccacc

SEQ ID NO: 89450 - DNA, 15 bp, Homo sapiens
acaggtacctgccac

SEQ ID NO: 89451 - DNA, 15 bp, Homo sapiens
tacaggtacctgcca

SEQ ID NO: 89452 - DNA, 15 bp, Homo sapiens
ttacaggtacctgcc

SEQ ID NO: 89453 - DNA, 15 bp, Homo sapiens
attacaggtacctgc

SEQ ID NO: 89454 - DNA, 15 bp, Homo sapiens
aattacaggtacctg

SEQ ID NO: 89455 - DNA, 15 bp, Homo sapiens
gaattacaggtacct

SEQ ID NO: 89456 - DNA, 15 bp, Homo sapiens
ggaattacaggtacc

SEQ ID NO: 89457 - DNA, 15 bp, Homo sapiens
tggaattacaggtac

SEQ ID NO: 89458 - DNA, 15 bp, Homo sapiens
ctggaattacaggta

SEQ ID NO: 89459 - DNA, 15 bp, Homo sapiens
gctggaattacaggt

SEQ ID NO: 89460 - DNA, 15 bp, Homo sapiens
agctggaattacagg

SEQ ID NO: 89461 - DNA, 15 bp, Homo sapiens
tagctggaattacag

SEQ ID NO: 89462 - DNA, 15 bp, Homo sapiens
gtagctggaattaca

SEQ ID NO: 89463 - DNA, 15 bp, Homo sapiens
agtagctggaattac

SEQ ID NO: 89464 - DNA, 15 bp, Homo sapiens
gagtagctggaatta

SEQ ID NO: 89465 - DNA, 15 bp, Homo sapiens
tgagtagctggaatt

SEQ ID NO: 89466 - DNA, 15 bp, Homo sapiens
ctgagtagctggaat

SEQ ID NO: 89467 - DNA, 15 bp, Homo sapiens
cctgagtagctggaa

SEQ ID NO: 89468 - DNA, 15 bp, Homo sapiens
tcctgagtagctgga

SEQ ID NO: 89469 - DNA, 15 bp, Homo sapiens
tctcagcctcctgag

SEQ ID NO: 89470 - DNA, 15 bp, Homo sapiens
gtctcagcctcctga

SEQ ID NO: 89471 - DNA, 15 bp, Homo sapiens
tgtctcagcctcctg

SEQ ID NO: 89472 - DNA, 15 bp, Homo sapiens
atgtctcagcctcct

SEQ ID NO: 89473 - DNA, 15 bp, Homo sapiens
catgtctcagcctcc

SEQ ID NO: 89474 - DNA, 15 bp, Homo sapiens
tcatgtctcagcctc

SEQ ID NO: 89475 - DNA, 15 bp, Homo sapiens
ctcatgtctcagcct

SEQ ID NO: 89476 - DNA, 15 bp, Homo sapiens
tctcatgtctcagcc

SEQ ID NO: 89477 - DNA, 15 bp, Homo sapiens
ttctcatgtctcagc

SEQ ID NO: 89478 - DNA, 15 bp, Homo sapiens
attctcatgtctcag

SEQ ID NO: 89479 - DNA, 15 bp, Homo sapiens
gattctcatgtctca

SEQ ID NO: 89480 - DNA, 15 bp, Homo sapiens
cgattctcatgtctc

SEQ ID NO: 89481 - DNA, 15 bp, Homo sapiens
gcgattctcatgtct

SEQ ID NO: 89482 - DNA, 15 bp, Homo sapiens
agcgattctcatgtc

SEQ ID NO: 89483 - DNA, 15 bp, Homo sapiens
aagcgattctcatgt

SEQ ID NO: 89484 - DNA, 15 bp, Homo sapiens
caagcgattctcatg

SEQ ID NO: 89485 - DNA, 15 bp, Homo sapiens
ccaagcgattctcat

SEQ ID NO: 89486 - DNA, 15 bp, Homo sapiens
tccaagcgattctca

SEQ ID NO: 89487 - DNA, 15 bp, Homo sapiens
gtccaagcgattctc

SEQ ID NO: 89488 - DNA, 15 bp, Homo sapiens
ggtccaagcgattct

SEQ ID NO: 89489 - DNA, 15 bp, Homo sapiens
gggtccaagcgattc

SEQ ID NO: 89490 - DNA, 15 bp, Homo sapiens
tgggtccaagcgatt

SEQ ID NO: 89491 - DNA, 15 bp, Homo sapiens
ctgggtccaagcgat

SEQ ID NO: 89492 - DNA, 15 bp, Homo sapiens
cctgggtccaagcga

SEQ ID NO: 89493 - DNA, 15 bp, Homo sapiens
tcctgggtccaagcg

SEQ ID NO: 89494 - DNA, 15 bp, Homo sapiens
ctcctgggtccaagc

SEQ ID NO: 89495 - DNA, 15 bp, Homo sapiens
cctcctgggtccaag

SEQ ID NO: 89496 - DNA, 15 bp, Homo sapiens
gcctcctgggtccaa

SEQ ID NO: 89497 - DNA, 15 bp, Homo sapiens
tgcctcctgggtcca

SEQ ID NO: 89498 - DNA, 15 bp, Homo sapiens
ctgcctcctgggtcc

SEQ ID NO: 89499 - DNA, 15 bp, Homo sapiens
tctgcctcctgggtc

SEQ ID NO: 89500 - DNA, 15 bp, Homo sapiens
ctctgcctcctgggt

SEQ ID NO: 89501 - DNA, 15 bp, Homo sapiens
cctctgcctcctggg

SEQ ID NO: 89502 - DNA, 15 bp, Homo sapiens
gcctctgcctcctgg

SEQ ID NO: 89503 - DNA, 15 bp, Homo sapiens
agcctctgcctcctg

SEQ ID NO: 89504 - DNA, 15 bp, Homo sapiens
cagcctctgcctcct

SEQ ID NO: 89505 - DNA, 15 bp, Homo sapiens
gcagcctctgcctcc

SEQ ID NO: 89506 - DNA, 15 bp, Homo sapiens
tgcagcctctgcctc

SEQ ID NO: 89507 - DNA, 15 bp, Homo sapiens
ttgcagcctctgcct

SEQ ID NO: 89508 - DNA, 15 bp, Homo sapiens
attgcagcctctgcc

SEQ ID NO: 89509 - DNA, 15 bp, Homo sapiens
cattgcagcctctgc

SEQ ID NO: 89510 - DNA, 15 bp, Homo sapiens
tcattgcagcctctg

SEQ ID NO: 89511 - DNA, 15 bp, Homo sapiens
ctcattgcagcctct

SEQ ID NO: 89512 - DNA, 15 bp, Homo sapiens
gctcattgcagcctc

SEQ ID NO: 89513 - DNA, 15 bp, Homo sapiens
ggctcattgcagcct

SEQ ID NO: 89514 - DNA, 15 bp, Homo sapiens
cggctcattgcagcc

SEQ ID NO: 89515 - DNA, 15 bp, Homo sapiens
tcggctcattgcagc

SEQ ID NO: 89516 - DNA, 15 bp, Homo sapiens
ctcggctcattgcag

SEQ ID NO: 89517 - DNA, 15 bp, Homo sapiens
actcggctcattgca

SEQ ID NO: 89518 - DNA, 15 bp, Homo sapiens
aactcggctcattgc

SEQ ID NO: 89519 - DNA, 15 bp, Homo sapiens
gaactcggctcattg

SEQ ID NO: 89520 - DNA, 15 bp, Homo sapiens
cgaactcggctcatt

SEQ ID NO: 89521 - DNA, 15 bp, Homo sapiens
gcgaactcggctcat

SEQ ID NO: 89522 - DNA, 15 bp, Homo sapiens
cgcgaactcggctca

SEQ ID NO: 89523 - DNA, 15 bp, Homo sapiens
gcgcgaactcggctc

SEQ ID NO: 89524 - DNA, 15 bp, Homo sapiens
ggcgcgaactcggct

SEQ ID NO: 89525 - DNA, 15 bp, Homo sapiens
tggcgcgaactcggc

SEQ ID NO: 89526 - DNA, 15 bp, Homo sapiens
gtggcgcgaactcgg

SEQ ID NO: 89527 - DNA, 15 bp, Homo sapiens
agtggcgcgaactcg

SEQ ID NO: 89528 - DNA, 15 bp, Homo sapiens
cagtggcgcgaactc

SEQ ID NO: 89529 - DNA, 15 bp, Homo sapiens
gcagtggcgcgaact

SEQ ID NO: 89530 - DNA, 15 bp, Homo sapiens
tgcagtggcgcgaac

SEQ ID NO: 89531 - DNA, 15 bp, Homo sapiens
gtgcagtggcgcgaa

SEQ ID NO: 89532 - DNA, 15 bp, Homo sapiens
agtgcagtggcgcga

SEQ ID NO: 89533 - DNA, 15 bp, Homo sapiens
gagtgcagtggcgcg

SEQ ID NO: 89534 - DNA, 15 bp, Homo sapiens
ggagtgcagtggcgc

SEQ ID NO: 89535 - DNA, 15 bp, Homo sapiens
tggagtgcagtggcg

SEQ ID NO: 89536 - DNA, 15 bp, Homo sapiens
ctggagtgcagtggc

SEQ ID NO: 89537 - DNA, 15 bp, Homo sapiens
ctgtcgcccaggctg

SEQ ID NO: 89538 - DNA, 15 bp, Homo sapiens
tctgtcgcccaggct

SEQ ID NO: 89539 - DNA, 15 bp, Homo sapiens
ctctgtcgcccaggc

SEQ ID NO: 89540 - DNA, 15 bp, Homo sapiens
gctctgtcgcccagg

SEQ ID NO: 89541 - DNA, 15 bp, Homo sapiens
tgctctgtcgcccag

SEQ ID NO: 89542 - DNA, 15 bp, Homo sapiens
ttgctctgtcgccca

SEQ ID NO: 89543 - DNA, 15 bp, Homo sapiens
cttgctctgtcgccc

SEQ ID NO: 89544 - DNA, 15 bp, Homo sapiens
tcttgctctgtcgcc

SEQ ID NO: 89545 - DNA, 15 bp, Homo sapiens
gtcttgctctgtcgc

SEQ ID NO: 89546 - DNA, 15 bp, Homo sapiens
agtcttgctctgtcg

SEQ ID NO: 89547 - DNA, 15 bp, Homo sapiens
gagtcttgctctgtc

SEQ ID NO: 89548 - DNA, 15 bp, Homo sapiens
agagtcttgctctgt

SEQ ID NO: 89549 - DNA, 15 bp, Homo sapiens
cagagtcttgctctg

SEQ ID NO: 89550 - DNA, 15 bp, Homo sapiens
acagagtcttgctct

SEQ ID NO: 89551 - DNA, 15 bp, Homo sapiens
gacagagtcttgctc

SEQ ID NO: 89552 - DNA, 15 bp, Homo sapiens
agacagagtcttgct

SEQ ID NO: 89553 - DNA, 15 bp, Homo sapiens
gagacagagtcttgc

SEQ ID NO: 89554 - DNA, 15 bp, Homo sapiens
tgagacagagtcttg

SEQ ID NO: 89555 - DNA, 15 bp, Homo sapiens
ttgagacagagtctt

SEQ ID NO: 89556 - DNA, 15 bp, Homo sapiens
attttttttgagaca

SEQ ID NO: 89557 - DNA, 15 bp, Homo sapiens
aattttttttgagac

SEQ ID NO: 89558 - DNA, 15 bp, Homo sapiens
aaattttttttgaga

SEQ ID NO: 89559 - DNA, 15 bp, Homo sapiens
aaaattttttttgag

SEQ ID NO: 89560 - DNA, 15 bp, Homo sapiens
taaaattttttttga

SEQ ID NO: 89561 - DNA, 15 bp, Homo sapiens
ctaaaattttttttg

SEQ ID NO: 89562 - DNA, 15 bp, Homo sapiens
gctaaaatttttttt

SEQ ID NO: 89563 - DNA, 15 bp, Homo sapiens
cgctaaaattttttt

SEQ ID NO: 89564 - DNA, 15 bp, Homo sapiens
tcgctaaaatttttt

SEQ ID NO: 89565 - DNA, 15 bp, Homo sapiens
atcgctaaaattttt

SEQ ID NO: 89566 - DNA, 15 bp, Homo sapiens
catcgctaaaatttt

SEQ ID NO: 89567 - DNA, 15 bp, Homo sapiens
acatcgctaaaattt

SEQ ID NO: 89568 - DNA, 15 bp, Homo sapiens
gacatcgctaaaatt

SEQ ID NO: 89569 - DNA, 15 bp, Homo sapiens
tgacatcgctaaaat

SEQ ID NO: 89570 - DNA, 15 bp, Homo sapiens
ttgacatcgctaaaa

SEQ ID NO: 89571 - DNA, 15 bp, Homo sapiens
attgacatcgctaaa

SEQ ID NO: 89572 - DNA, 15 bp, Homo sapiens
aattgacatcgctaa

SEQ ID NO: 89573 - DNA, 15 bp, Homo sapiens
gaattgacatcgcta

SEQ ID NO: 89574 - DNA, 15 bp, Homo sapiens
tgaattgacatcgct

SEQ ID NO: 89575 - DNA, 15 bp, Homo sapiens
atgaattgacatcgc

SEQ ID NO: 89576 - DNA, 15 bp, Homo sapiens
aatgaattgacatcg

SEQ ID NO: 89577 - DNA, 15 bp, Homo sapiens
aaatgaattgacatc

SEQ ID NO: 89578 - DNA, 15 bp, Homo sapiens
aaaatgaattgacat

SEQ ID NO: 89579 - DNA, 15 bp, Homo sapiens
aaaaatgaattgaca

SEQ ID NO: 89580 - DNA, 15 bp, Homo sapiens
taaaaatgaattgac

SEQ ID NO: 89581 - DNA, 15 bp, Homo sapiens
ttaaaaatgaattga

SEQ ID NO: 89582 - DNA, 15 bp, Homo sapiens
tttaaaaatgaattg

SEQ ID NO: 89583 - DNA, 15 bp, Homo sapiens
ctttaaaaatgaatt

SEQ ID NO: 89584 - DNA, 15 bp, Homo sapiens
actttaaaaatgaat

SEQ ID NO: 89585 - DNA, 15 bp, Homo sapiens
cactttaaaaatgaa

SEQ ID NO: 89586 - DNA, 15 bp, Homo sapiens
ccactttaaaaatga

SEQ ID NO: 89587 - DNA, 15 bp, Homo sapiens
accactttaaaaatg

SEQ ID NO: 89588 - DNA, 15 bp, Homo sapiens
caccactttaaaaat

SEQ ID NO: 89589 - DNA, 15 bp, Homo sapiens
ccaccactttaaaaa

SEQ ID NO: 89590 - DNA, 15 bp, Homo sapiens
gccaccactttaaaa

SEQ ID NO: 89591 - DNA, 15 bp, Homo sapiens
agccaccactttaaa

SEQ ID NO: 89592 - DNA, 15 bp, Homo sapiens
aagccaccactttaa

SEQ ID NO: 89593 - DNA, 15 bp, Homo sapiens
taagccaccacttta

SEQ ID NO: 89594 - DNA, 15 bp, Homo sapiens
ttaagccaccacttt

SEQ ID NO: 89595 - DNA, 15 bp, Homo sapiens
cttaagccaccactt

SEQ ID NO: 89596 - DNA, 15 bp, Homo sapiens
ccttaagccaccact

SEQ ID NO: 89597 - DNA, 15 bp, Homo sapiens
cccttaagccaccac

SEQ ID NO: 89598 - DNA, 15 bp, Homo sapiens
acccttaagccacca

SEQ ID NO: 89599 - DNA, 15 bp, Homo sapiens
aacccttaagccacc

SEQ ID NO: 89600 - DNA, 15 bp, Homo sapiens
aaacccttaagccac

SEQ ID NO: 89601 - DNA, 15 bp, Homo sapiens
caaacccttaagcca

SEQ ID NO: 89602 - DNA, 15 bp, Homo sapiens
ccaaacccttaagcc

SEQ ID NO: 89603 - DNA, 15 bp, Homo sapiens
accaaacccttaagc

SEQ ID NO: 89604 - DNA, 15 bp, Homo sapiens
gaccaaacccttaag

SEQ ID NO: 89605 - DNA, 15 bp, Homo sapiens
agaccaaacccttaa

SEQ ID NO: 89606 - DNA, 15 bp, Homo sapiens
cagaccaaaccctta

SEQ ID NO: 89607 - DNA, 15 bp, Homo sapiens
ccagaccaaaccctt

SEQ ID NO: 89608 - DNA, 15 bp, Homo sapiens
accagaccaaaccct

SEQ ID NO: 89609 - DNA, 15 bp, Homo sapiens
aaccagaccaaaccc

SEQ ID NO: 89610 - DNA, 15 bp, Homo sapiens
aaaccagaccaaacc

SEQ ID NO: 89611 - DNA, 15 bp, Homo sapiens
caaaccagaccaaac

SEQ ID NO: 89612 - DNA, 15 bp, Homo sapiens
ccaaaccagaccaaa

SEQ ID NO: 89613 - DNA, 15 bp, Homo sapiens
accaaaccagaccaa

SEQ ID NO: 89614 - DNA, 15 bp, Homo sapiens
aaccaaaccagacca

SEQ ID NO: 89615 - DNA, 15 bp, Homo sapiens
aaaccaaaccagacc

SEQ ID NO: 89616 - DNA, 15 bp, Homo sapiens
caaaccaaaccagac

SEQ ID NO: 89617 - DNA, 15 bp, Homo sapiens
ccaaaccaaaccaga

SEQ ID NO: 89618 - DNA, 15 bp, Homo sapiens
accaaaccaaaccag

SEQ ID NO: 89619 - DNA, 15 bp, Homo sapiens
aaccaaaccaaacca

SEQ ID NO: 89620 - DNA, 15 bp, Homo sapiens
aaaccaaaccaaacc

SEQ ID NO: 89621 - DNA, 15 bp, Homo sapiens
aaaaccaaaccaaac

SEQ ID NO: 89622 - DNA, 15 bp, Homo sapiens
caaaaccaaaccaaa

SEQ ID NO: 89623 - DNA, 15 bp, Homo sapiens
gcaaaaccaaaccaa

SEQ ID NO: 89624 - DNA, 15 bp, Homo sapiens
agcaaaaccaaacca

SEQ ID NO: 89625 - DNA, 15 bp, Homo sapiens
cagcaaaaccaaacc

SEQ ID NO: 89626 - DNA, 15 bp, Homo sapiens
tcagcaaaaccaaac

SEQ ID NO: 89627 - DNA, 15 bp, Homo sapiens
ctcagcaaaaccaaa

SEQ ID NO: 89628 - DNA, 15 bp, Homo sapiens
tctcagcaaaaccaa

SEQ ID NO: 89629 - DNA, 15 bp, Homo sapiens
ttctcagcaaaacca

SEQ ID NO: 89630 - DNA, 15 bp, Homo sapiens
tttctcagcaaaacc

SEQ ID NO: 89631 - DNA, 15 bp, Homo sapiens
ctttctcagcaaaac

SEQ ID NO: 89632 - DNA, 15 bp, Homo sapiens
tctttctcagcaaaa

SEQ ID NO: 89633 - DNA, 15 bp, Homo sapiens
ttctttctcagcaaa

SEQ ID NO: 89634 - DNA, 15 bp, Homo sapiens
tttctttctcagcaa

SEQ ID NO: 89635 - DNA, 15 bp, Homo sapiens
ttttctttctcagca

SEQ ID NO: 89636 - DNA, 15 bp, Homo sapiens
gttttctttctcagc

SEQ ID NO: 89637 - DNA, 15 bp, Homo sapiens
agttttctttctcag

SEQ ID NO: 89638 - DNA, 15 bp, Homo sapiens
aagttttctttctca

SEQ ID NO: 89639 - DNA, 15 bp, Homo sapiens
gaagttttctttctc

SEQ ID NO: 89640 - DNA, 15 bp, Homo sapiens
ggaagttttctttct

SEQ ID NO: 89641 - DNA, 15 bp, Homo sapiens
aggaagttttctttc

SEQ ID NO: 89642 - DNA, 15 bp, Homo sapiens
gaggaagttttcttt

SEQ ID NO: 89643 - DNA, 15 bp, Homo sapiens
cgaggaagttttctt

SEQ ID NO: 89644 - DNA, 15 bp, Homo sapiens
ccgaggaagttttct

SEQ ID NO: 89645 - DNA, 15 bp, Homo sapiens
gccgaggaagttttc

SEQ ID NO: 89646 - DNA, 15 bp, Homo sapiens
tgccgaggaagtttt

SEQ ID NO: 89647 - DNA, 15 bp, Homo sapiens
ttgccgaggaagttt

SEQ ID NO: 89648 - DNA, 15 bp, Homo sapiens
tttgccgaggaagtt

SEQ ID NO: 89649 - DNA, 15 bp, Homo sapiens
atttgccgaggaagt

SEQ ID NO: 89650 - DNA, 15 bp, Homo sapiens
catttgccgaggaag

SEQ ID NO: 89651 - DNA, 15 bp, Homo sapiens
tcatttgccgaggaa

SEQ ID NO: 89652 - DNA, 15 bp, Homo sapiens
atcatttgccgagga

SEQ ID NO: 89653 - DNA, 15 bp, Homo sapiens
aatcatttgccgagg

SEQ ID NO: 89654 - DNA, 15 bp, Homo sapiens
aaatcatttgccgag

SEQ ID NO: 89655 - DNA, 15 bp, Homo sapiens
aaaatcatttgccga

SEQ ID NO: 89656 - DNA, 15 bp, Homo sapiens
aaaaatcatttgccg

SEQ ID NO: 89657 - DNA, 15 bp, Homo sapiens
caaaaatcatttgcc

SEQ ID NO: 89658 - DNA, 15 bp, Homo sapiens
gcaaaaatcatttgc

SEQ ID NO: 89659 - DNA, 15 bp, Homo sapiens
ggcaaaaatcatttg

SEQ ID NO: 89660 - DNA, 15 bp, Homo sapiens
tggcaaaaatcattt

SEQ ID NO: 89661 - DNA, 15 bp, Homo sapiens
ctggcaaaaatcatt

SEQ ID NO: 89662 - DNA, 15 bp, Homo sapiens
actggcaaaaatcat

SEQ ID NO: 89663 - DNA, 15 bp, Homo sapiens
cactggcaaaaatca

SEQ ID NO: 89664 - DNA, 15 bp, Homo sapiens
tcactggcaaaaatc

SEQ ID NO: 89665 - DNA, 15 bp, Homo sapiens
ttcactggcaaaaat

SEQ ID NO: 89666 - DNA, 15 bp, Homo sapiens
cttcactggcaaaaa

SEQ ID NO: 89667 - DNA, 15 bp, Homo sapiens
tcttcactggcaaaa

SEQ ID NO: 89668 - DNA, 15 bp, Homo sapiens
atcttcactggcaaa

SEQ ID NO: 89669 - DNA, 15 bp, Homo sapiens
aatcttcactggcaa

SEQ ID NO: 89670 - DNA, 15 bp, Homo sapiens
aaatcttcactggca

SEQ ID NO: 89671 - DNA, 15 bp, Homo sapiens
aaaatcttcactggc

SEQ ID NO: 89672 - DNA, 15 bp, Homo sapiens
taaaatcttcactgg

SEQ ID NO: 89673 - DNA, 15 bp, Homo sapiens
ctaaaatcttcactg

SEQ ID NO: 89674 - DNA, 15 bp, Homo sapiens
actaaaatcttcact

SEQ ID NO: 89675 - DNA, 15 bp, Homo sapiens
tactaaaatcttcac

SEQ ID NO: 89676 - DNA, 15 bp, Homo sapiens
gtactaaaatcttca

SEQ ID NO: 89677 - DNA, 15 bp, Homo sapiens
tgtactaaaatcttc

SEQ ID NO: 89678 - DNA, 15 bp, Homo sapiens
gtgtactaaaatctt

SEQ ID NO: 89679 - DNA, 15 bp, Homo sapiens
cgtgtactaaaatct

SEQ ID NO: 89680 - DNA, 15 bp, Homo sapiens
acgtgtactaaaatc

SEQ ID NO: 89681 - DNA, 15 bp, Homo sapiens
gacgtgtactaaaat

SEQ ID NO: 89682 - DNA, 15 bp, Homo sapiens
tgacgtgtactaaaa

SEQ ID NO: 89683 - DNA, 15 bp, Homo sapiens
gtgacgtgtactaaa

SEQ ID NO: 89684 - DNA, 15 bp, Homo sapiens
tgtgacgtgtactaa

SEQ ID NO: 89685 - DNA, 15 bp, Homo sapiens
ttgtgacgtgtacta

SEQ ID NO: 89686 - DNA, 15 bp, Homo sapiens
attgtgacgtgtact

SEQ ID NO: 89687 - DNA, 15 bp, Homo sapiens
tattgtgacgtgtac

SEQ ID NO: 89688 - DNA, 15 bp, Homo sapiens
ctattgtgacgtgta

SEQ ID NO: 89689 - DNA, 15 bp, Homo sapiens
tctattgtgacgtgt

SEQ ID NO: 89690 - DNA, 15 bp, Homo sapiens
ttctattgtgacgtg

SEQ ID NO: 89691 - DNA, 15 bp, Homo sapiens
attctattgtgacgt

SEQ ID NO: 89692 - DNA, 15 bp, Homo sapiens
aattctattgtgacg

SEQ ID NO: 89693 - DNA, 15 bp, Homo sapiens
gaattctattgtgac

SEQ ID NO: 89694 - DNA, 15 bp, Homo sapiens
ggaattctattgtga

SEQ ID NO: 89695 - DNA, 15 bp, Homo sapiens
aggaattctattgtg

SEQ ID NO: 89696 - DNA, 15 bp, Homo sapiens
gaggaattctattgt

SEQ ID NO: 89697 - DNA, 15 bp, Homo sapiens
tgaggaattctattg

SEQ ID NO: 89698 - DNA, 15 bp, Homo sapiens
ctgaggaattctatt

SEQ ID NO: 89699 - DNA, 15 bp, Homo sapiens
gctgaggaattctat

SEQ ID NO: 89700 - DNA, 15 bp, Homo sapiens
cgctgaggaattcta

SEQ ID NO: 89701 - DNA, 15 bp, Homo sapiens
acgctgaggaattct

SEQ ID NO: 89702 - DNA, 15 bp, Homo sapiens
gacgctgaggaattc

SEQ ID NO: 89703 - DNA, 15 bp, Homo sapiens
agacgctgaggaatt

SEQ ID NO: 89704 - DNA, 15 bp, Homo sapiens
aagacgctgaggaat

SEQ ID NO: 89705 - DNA, 15 bp, Homo sapiens
aaagacgctgaggaa

SEQ ID NO: 89706 - DNA, 15 bp, Homo sapiens
taaagacgctgagga

SEQ ID NO: 89707 - DNA, 15 bp, Homo sapiens
ataaagacgctgagg

SEQ ID NO: 89708 - DNA, 15 bp, Homo sapiens
cataaagacgctgag

SEQ ID NO: 89709 - DNA, 15 bp, Homo sapiens
tcataaagacgctga

SEQ ID NO: 89710 - DNA, 15 bp, Homo sapiens
ttcataaagacgctg

SEQ ID NO: 89711 - DNA, 15 bp, Homo sapiens
tttcataaagacgct

SEQ ID NO: 89712 - DNA, 15 bp, Homo sapiens
gtttcataaagacgc

SEQ ID NO: 89713 - DNA, 15 bp, Homo sapiens
tgtttcataaagacg

SEQ ID NO: 89714 - DNA, 15 bp, Homo sapiens
atgtttcataaagac

SEQ ID NO: 89715 - DNA, 15 bp, Homo sapiens
gatgtttcataaaga

SEQ ID NO: 89716 - DNA, 15 bp, Homo sapiens
cgatgtttcataaag

SEQ ID NO: 89717 - DNA, 15 bp, Homo sapiens
acgatgtttcataaa

SEQ ID NO: 89718 - DNA, 15 bp, Homo sapiens
cacgatgtttcataa

SEQ ID NO: 89719 - DNA, 15 bp, Homo sapiens
tcacgatgtttcata

SEQ ID NO: 89720 - DNA, 15 bp, Homo sapiens
ctcacgatgtttcat

SEQ ID NO: 89721 - DNA, 15 bp, Homo sapiens
cctcacgatgtttca

SEQ ID NO: 89722 - DNA, 15 bp, Homo sapiens
tcctcacgatgtttc

SEQ ID NO: 89723 - DNA, 15 bp, Homo sapiens
ctcctcacgatgttt

SEQ ID NO: 89724 - DNA, 15 bp, Homo sapiens
actcctcacgatgtt

SEQ ID NO: 89725 - DNA, 15 bp, Homo sapiens
cactcctcacgatgt

SEQ ID NO: 89726 - DNA, 15 bp, Homo sapiens
ccactcctcacgatg

SEQ ID NO: 89727 - DNA, 15 bp, Homo sapiens
accactcctcacgat

SEQ ID NO: 89728 - DNA, 15 bp, Homo sapiens
aaccactcctcacga

SEQ ID NO: 89729 - DNA, 15 bp, Homo sapiens
gaaccactcctcacg

SEQ ID NO: 89730 - DNA, 15 bp, Homo sapiens
tgaaccactcctcac

SEQ ID NO: 89731 - DNA, 15 bp, Homo sapiens
ctgaaccactcctca

SEQ ID NO: 89732 - DNA, 15 bp, Homo sapiens
tctgaaccactcctc

SEQ ID NO: 89733 - DNA, 15 bp, Homo sapiens
atctgaaccactcct

SEQ ID NO: 89734 - DNA, 15 bp, Homo sapiens
tatctgaaccactcc

SEQ ID NO: 89735 - DNA, 15 bp, Homo sapiens
gtatctgaaccactc

SEQ ID NO: 89736 - DNA, 15 bp, Homo sapiens
agtatctgaaccact

SEQ ID NO: 89737 - DNA, 15 bp, Homo sapiens
cagtatctgaaccac

SEQ ID NO: 89738 - DNA, 15 bp, Homo sapiens
acagtatctgaacca

SEQ ID NO: 89739 - DNA, 15 bp, Homo sapiens
aacagtatctgaacc

SEQ ID NO: 89740 - DNA, 15 bp, Homo sapiens
taacagtatctgaac

SEQ ID NO: 89741 - DNA, 15 bp, Homo sapiens
ctaacagtatctgaa

SEQ ID NO: 89742 - DNA, 15 bp, Homo sapiens
tctaacagtatctga

SEQ ID NO: 89743 - DNA, 15 bp, Homo sapiens
atctaacagtatctg

SEQ ID NO: 89744 - DNA, 15 bp, Homo sapiens
aatctaacagtatct

SEQ ID NO: 89745 - DNA, 15 bp, Homo sapiens
aaatctaacagtatc

SEQ ID NO: 89746 - DNA, 15 bp, Homo sapiens
gaaatctaacagtat

SEQ ID NO: 89747 - DNA, 15 bp, Homo sapiens
tgaaatctaacagta

SEQ ID NO: 89748 - DNA, 15 bp, Homo sapiens
ctgaaatctaacagt

SEQ ID NO: 89749 - DNA, 15 bp, Homo sapiens
cctgaaatctaacag

SEQ ID NO: 89750 - DNA, 15 bp, Homo sapiens
gcctgaaatctaaca

SEQ ID NO: 89751 - DNA, 15 bp, Homo sapiens
tgcctgaaatctaac

SEQ ID NO: 89752 - DNA, 15 bp, Homo sapiens
atgcctgaaatctaa

SEQ ID NO: 89753 - DNA, 15 bp, Homo sapiens
aatgcctgaaatcta

SEQ ID NO: 89754 - DNA, 15 bp, Homo sapiens
caatgcctgaaatct

SEQ ID NO: 89755 - DNA, 15 bp, Homo sapiens
tcaatgcctgaaatc

SEQ ID NO: 89756 - DNA, 15 bp, Homo sapiens
ttcaatgcctgaaat

SEQ ID NO: 89757 - DNA, 15 bp, Homo sapiens
tttcaatgcctgaaa

SEQ ID NO: 89758 - DNA, 15 bp, Homo sapiens
gtttcaatgcctgaa

SEQ ID NO: 89759 - DNA, 15 bp, Homo sapiens
tgtttcaatgcctga

SEQ ID NO: 89760 - DNA, 15 bp, Homo sapiens
ttgtttcaatgcctg

SEQ ID NO: 89761 - DNA, 15 bp, Homo sapiens
cttgtttcaatgcct

SEQ ID NO: 89762 - DNA, 15 bp, Homo sapiens
acttgtttcaatgcc

SEQ ID NO: 89763 - DNA, 15 bp, Homo sapiens
cacttgtttcaatgc

SEQ ID NO: 89764 - DNA, 15 bp, Homo sapiens
tcacttgtttcaatg

SEQ ID NO: 89765 - DNA, 15 bp, Homo sapiens
ttcacttgtttcaat

SEQ ID NO: 89766 - DNA, 15 bp, Homo sapiens
attcacttgtttcaa

SEQ ID NO: 89767 - DNA, 15 bp, Homo sapiens
tattcacttgtttca

SEQ ID NO: 89768 - DNA, 15 bp, Homo sapiens
ttattcacttgtttc

SEQ ID NO: 89769 - DNA, 15 bp, Homo sapiens
attattcacttgttt

SEQ ID NO: 89770 - DNA, 15 bp, Homo sapiens
aattattcacttgtt

SEQ ID NO: 89771 - DNA, 15 bp, Homo sapiens
gaattattcacttgt

SEQ ID NO: 89772 - DNA, 15 bp, Homo sapiens
tgaattattcacttg

SEQ ID NO: 89773 - DNA, 15 bp, Homo sapiens
atgaattattcactt

SEQ ID NO: 89774 - DNA, 15 bp, Homo sapiens
tatgaattattcact

SEQ ID NO: 89775 - DNA, 15 bp, Homo sapiens
ctatgaattattcac

SEQ ID NO: 89776 - DNA, 15 bp, Homo sapiens
actatgaattattca

SEQ ID NO: 89777 - DNA, 15 bp, Homo sapiens
tactatgaattattc

SEQ ID NO: 89778 - DNA, 15 bp, Homo sapiens
gtactatgaattatt

SEQ ID NO: 89779 - DNA, 15 bp, Homo sapiens
ggtactatgaattat

SEQ ID NO: 89780 - DNA, 15 bp, Homo sapiens
aggtactatgaatta

SEQ ID NO: 89781 - DNA, 15 bp, Homo sapiens
caggtactatgaatt

SEQ ID NO: 89782 - DNA, 15 bp, Homo sapiens
ccaggtactatgaat

SEQ ID NO: 89783 - DNA, 15 bp, Homo sapiens
accaggtactatgaa

SEQ ID NO: 89784 - DNA, 15 bp, Homo sapiens
aaccaggtactatga

SEQ ID NO: 89785 - DNA, 15 bp, Homo sapiens
aaaccaggtactatg

SEQ ID NO: 89786 - DNA, 15 bp, Homo sapiens
taaaccaggtactat

SEQ ID NO: 89787 - DNA, 15 bp, Homo sapiens
ttaaaccaggtacta

SEQ ID NO: 89788 - DNA, 15 bp, Homo sapiens
tttaaaccaggtact

SEQ ID NO: 89789 - DNA, 15 bp, Homo sapiens
ctttaaaccaggtac

SEQ ID NO: 89790 - DNA, 15 bp, Homo sapiens
cctttaaaccaggta

SEQ ID NO: 89791 - DNA, 15 bp, Homo sapiens
tcctttaaaccaggt

SEQ ID NO: 89792 - DNA, 15 bp, Homo sapiens
ctcctttaaaccagg

SEQ ID NO: 89793 - DNA, 15 bp, Homo sapiens
cctcctttaaaccag

SEQ ID NO: 89794 - DNA, 15 bp, Homo sapiens
tcctcctttaaacca

SEQ ID NO: 89795 - DNA, 15 bp, Homo sapiens
ttcctcctttaaacc

SEQ ID NO: 89796 - DNA, 15 bp, Homo sapiens
tttcctcctttaaac

SEQ ID NO: 89797 - DNA, 15 bp, Homo sapiens
ttttcctcctttaaa

SEQ ID NO: 89798 - DNA, 15 bp, Homo sapiens
cttttcctcctttaa

SEQ ID NO: 89799 - DNA, 15 bp, Homo sapiens
tcttttcctccttta

SEQ ID NO: 89800 - DNA, 15 bp, Homo sapiens
atcttttcctccttt

SEQ ID NO: 89801 - DNA, 15 bp, Homo sapiens
catcttttcctcctt

SEQ ID NO: 89802 - DNA, 15 bp, Homo sapiens
acatcttttcctcct

SEQ ID NO: 89803 - DNA, 15 bp, Homo sapiens
cacatcttttcctcc

SEQ ID NO: 89804 - DNA, 15 bp, Homo sapiens
tcacatcttttcctc

SEQ ID NO: 89805 - DNA, 15 bp, Homo sapiens
ttcacatcttttcct

SEQ ID NO: 89806 - DNA, 15 bp, Homo sapiens
gttcacatcttttcc

SEQ ID NO: 89807 - DNA, 15 bp, Homo sapiens
tgttcacatcttttc

SEQ ID NO: 89808 - DNA, 15 bp, Homo sapiens
ttgttcacatctttt

SEQ ID NO: 89809 - DNA, 15 bp, Homo sapiens
tttgttcacatcttt

SEQ ID NO: 89810 - DNA, 15 bp, Homo sapiens
atttgttcacatctt

SEQ ID NO: 89811 - DNA, 15 bp, Homo sapiens
tatttgttcacatct

SEQ ID NO: 89812 - DNA, 15 bp, Homo sapiens
ttatttgttcacatc

SEQ ID NO: 89813 - DNA, 15 bp, Homo sapiens
attatttgttcacat

SEQ ID NO: 89814 - DNA, 15 bp, Homo sapiens
aattatttgttcaca

SEQ ID NO: 89815 - DNA, 15 bp, Homo sapiens
taattatttgttcac

SEQ ID NO: 89816 - DNA, 15 bp, Homo sapiens
ataattatttgttca

SEQ ID NO: 89817 - DNA, 15 bp, Homo sapiens
aataattatttgttc

SEQ ID NO: 89818 - DNA, 15 bp, Homo sapiens
taataattatttgtt

SEQ ID NO: 89819 - DNA, 15 bp, Homo sapiens
ctaataattatttgt

SEQ ID NO: 89820 - DNA, 15 bp, Homo sapiens
cctaataattatttg

SEQ ID NO: 89821 - DNA, 15 bp, Homo sapiens
tcctaataattattt

SEQ ID NO: 89822 - DNA, 15 bp, Homo sapiens
ttcctaataattatt

SEQ ID NO: 89823 - DNA, 15 bp, Homo sapiens
gttcctaataattat

SEQ ID NO: 89824 - DNA, 15 bp, Homo sapiens
ggttcctaataatta

SEQ ID NO: 89825 - DNA, 15 bp, Homo sapiens
tggttcctaataatt

SEQ ID NO: 89826 - DNA, 15 bp, Homo sapiens
ctggttcctaataat

SEQ ID NO: 89827 - DNA, 15 bp, Homo sapiens
tctggttcctaataa

SEQ ID NO: 89828 - DNA, 15 bp, Homo sapiens
ctctggttcctaata

SEQ ID NO: 89829 - DNA, 15 bp, Homo sapiens
tctctggttcctaat

SEQ ID NO: 89830 - DNA, 15 bp, Homo sapiens
ctctctggttcctaa

SEQ ID NO: 89831 - DNA, 15 bp, Homo sapiens
tctctctggttccta

SEQ ID NO: 89832 - DNA, 15 bp, Homo sapiens
ctctctctggttcct

SEQ ID NO: 89833 - DNA, 15 bp, Homo sapiens
tctctctctggttcc

SEQ ID NO: 89834 - DNA, 15 bp, Homo sapiens
gtctctctctggttc

SEQ ID NO: 89835 - DNA, 15 bp, Homo sapiens
agtctctctctggtt

SEQ ID NO: 89836 - DNA, 15 bp, Homo sapiens
cagtctctctctggt

SEQ ID NO: 89837 - DNA, 15 bp, Homo sapiens
ccagtctctctctgg

SEQ ID NO: 89838 - DNA, 15 bp, Homo sapiens
tccagtctctctctg

SEQ ID NO: 89839 - DNA, 15 bp, Homo sapiens
ttccagtctctctct

SEQ ID NO: 89840 - DNA, 15 bp, Homo sapiens
tttccagtctctctc

SEQ ID NO: 89841 - DNA, 15 bp, Homo sapiens
ttttccagtctctct

SEQ ID NO: 89842 - DNA, 15 bp, Homo sapiens
tttttccagtctctc

SEQ ID NO: 89843 - DNA, 15 bp, Homo sapiens
ttttttccagtctct

SEQ ID NO: 89844 - DNA, 15 bp, Homo sapiens
attttttccagtctc

SEQ ID NO: 89845 - DNA, 15 bp, Homo sapiens
tattttttccagtct

SEQ ID NO: 89846 - DNA, 15 bp, Homo sapiens
atattttttccagtc

SEQ ID NO: 89847 - DNA, 15 bp, Homo sapiens
aatattttttccagt

SEQ ID NO: 89848 - DNA, 15 bp, Homo sapiens
aaatattttttccag

SEQ ID NO: 89849 - DNA, 15 bp, Homo sapiens
caaatattttttcca

SEQ ID NO: 89850 - DNA, 15 bp, Homo sapiens
gcaaatattttttcc

SEQ ID NO: 89851 - DNA, 15 bp, Homo sapiens
cgcaaatattttttc

SEQ ID NO: 89852 - DNA, 15 bp, Homo sapiens
gcgcaaatatttttt

SEQ ID NO: 89853 - DNA, 15 bp, Homo sapiens
cgcgcaaatattttt

SEQ ID NO: 89854 - DNA, 15 bp, Homo sapiens
ccgcgcaaatatttt

SEQ ID NO: 89855 - DNA, 15 bp, Homo sapiens
gccgcgcaaatattt

SEQ ID NO: 89856 - DNA, 15 bp, Homo sapiens
tgccgcgcaaatatt

SEQ ID NO: 89857 - DNA, 15 bp, Homo sapiens
atgccgcgcaaatat

SEQ ID NO: 89858 - DNA, 15 bp, Homo sapiens
tatgccgcgcaaata

SEQ ID NO: 89859 - DNA, 15 bp, Homo sapiens
ctatgccgcgcaaat

SEQ ID NO: 89860 - DNA, 15 bp, Homo sapiens
gctatgccgcgcaaa

SEQ ID NO: 89861 - DNA, 15 bp, Homo sapiens
tgctatgccgcgcaa

SEQ ID NO: 89862 - DNA, 15 bp, Homo sapiens
ttgctatgccgcgca

SEQ ID NO: 89863 - DNA, 15 bp, Homo sapiens
tttgctatgccgcgc

SEQ ID NO: 89864 - DNA, 15 bp, Homo sapiens
ttttgctatgccgcg

SEQ ID NO: 89865 - DNA, 15 bp, Homo sapiens
tttttgctatgccgc

SEQ ID NO: 89866 - DNA, 15 bp, Homo sapiens
atttttgctatgccg

SEQ ID NO: 89867 - DNA, 15 bp, Homo sapiens
aatttttgctatgcc

SEQ ID NO: 89868 - DNA, 15 bp, Homo sapiens
gaatttttgctatgc

SEQ ID NO: 89869 - DNA, 15 bp, Homo sapiens
ggaatttttgctatg

SEQ ID NO: 89870 - DNA, 15 bp, Homo sapiens
tggaatttttgctat

SEQ ID NO: 89871 - DNA, 15 bp, Homo sapiens
gtggaatttttgcta

SEQ ID NO: 89872 - DNA, 15 bp, Homo sapiens
tgtggaatttttgct

SEQ ID NO: 89873 - DNA, 15 bp, Homo sapiens
ctgtggaatttttgc

SEQ ID NO: 89874 - DNA, 15 bp, Homo sapiens
tctgtggaatttttg

SEQ ID NO: 89875 - DNA, 15 bp, Homo sapiens
ctctgtggaattttt

SEQ ID NO: 89876 - DNA, 15 bp, Homo sapiens
cctctgtggaatttt

SEQ ID NO: 89877 - DNA, 15 bp, Homo sapiens
tcctctgtggaattt

SEQ ID NO: 89878 - DNA, 15 bp, Homo sapiens
ctcctctgtggaatt

SEQ ID NO: 89879 - DNA, 15 bp, Homo sapiens
cctcctctgtggaat

SEQ ID NO: 89880 - DNA, 15 bp, Homo sapiens
ccctcctctgtggaa

SEQ ID NO: 89881 - DNA, 15 bp, Homo sapiens
cccctcctctgtgga

SEQ ID NO: 89882 - DNA, 15 bp, Homo sapiens
tcccctcctctgtgg

SEQ ID NO: 89883 - DNA, 15 bp, Homo sapiens
gtcccctcctctgtg

SEQ ID NO: 89884 - DNA, 15 bp, Homo sapiens
agtcccctcctctgt

SEQ ID NO: 89885 - DNA, 15 bp, Homo sapiens
aagtcccctcctctg

SEQ ID NO: 89886 - DNA, 15 bp, Homo sapiens
aaagtcccctcctct

SEQ ID NO: 89887 - DNA, 15 bp, Homo sapiens
aaaagtcccctcctc

SEQ ID NO: 89888 - DNA, 15 bp, Homo sapiens
caaaagtcccctcct

SEQ ID NO: 89889 - DNA, 15 bp, Homo sapiens
tcaaaagtcccctcc

SEQ ID NO: 89890 - DNA, 15 bp, Homo sapiens
ttcaaaagtcccctc

SEQ ID NO: 89891 - DNA, 15 bp, Homo sapiens
attcaaaagtcccct

SEQ ID NO: 89892 - DNA, 15 bp, Homo sapiens
tattcaaaagtcccc

SEQ ID NO: 89893 - DNA, 15 bp, Homo sapiens
ctattcaaaagtccc

SEQ ID NO: 89894 - DNA, 15 bp, Homo sapiens
cctattcaaaagtcc

SEQ ID NO: 89895 - DNA, 15 bp, Homo sapiens
tcctattcaaaagtc

SEQ ID NO: 89896 - DNA, 15 bp, Homo sapiens
ctcctattcaaaagt

SEQ ID NO: 89897 - DNA, 15 bp, Homo sapiens
gctcctattcaaaag

SEQ ID NO: 89898 - DNA, 15 bp, Homo sapiens
agctcctattcaaaa

SEQ ID NO: 89899 - DNA, 15 bp, Homo sapiens
aagctcctattcaaa

SEQ ID NO: 89900 - DNA, 15 bp, Homo sapiens
caagctcctattcaa

SEQ ID NO: 89901 - DNA, 15 bp, Homo sapiens
tcaagctcctattca

SEQ ID NO: 89902 - DNA, 15 bp, Homo sapiens
ttcaagctcctattc

SEQ ID NO: 89903 - DNA, 15 bp, Homo sapiens
cttcaagctcctatt

SEQ ID NO: 89904 - DNA, 15 bp, Homo sapiens
tcttcaagctcctat

SEQ ID NO: 89905 - DNA, 15 bp, Homo sapiens
ttcttcaagctccta

SEQ ID NO: 89906 - DNA, 15 bp, Homo sapiens
attcttcaagctcct

SEQ ID NO: 89907 - DNA, 15 bp, Homo sapiens
tattcttcaagctcc

SEQ ID NO: 89908 - DNA, 15 bp, Homo sapiens
ttattcttcaagctc

SEQ ID NO: 89909 - DNA, 15 bp, Homo sapiens
attattcttcaagct

SEQ ID NO: 89910 - DNA, 15 bp, Homo sapiens
tattattcttcaagc

SEQ ID NO: 89911 - DNA, 15 bp, Homo sapiens
ttattattcttcaag

SEQ ID NO: 89912 - DNA, 15 bp, Homo sapiens
cttattattcttcaa

SEQ ID NO: 89913 - DNA, 15 bp, Homo sapiens
tcttattattcttca

SEQ ID NO: 89914 - DNA, 15 bp, Homo sapiens
ctcttattattcttc

SEQ ID NO: 89915 - DNA, 15 bp, Homo sapiens
actcttattattctt

SEQ ID NO: 89916 - DNA, 15 bp, Homo sapiens
cactcttattattct

SEQ ID NO: 89917 - DNA, 15 bp, Homo sapiens
acactcttattattc

SEQ ID NO: 89918 - DNA, 15 bp, Homo sapiens
cacactcttattatt

SEQ ID NO: 89919 - DNA, 15 bp, Homo sapiens
ccacactcttattat

SEQ ID NO: 89920 - DNA, 15 bp, Homo sapiens
gccacactcttatta

SEQ ID NO: 89921 - DNA, 15 bp, Homo sapiens
tgccacactcttatt

SEQ ID NO: 89922 - DNA, 15 bp, Homo sapiens
ctgccacactcttat

SEQ ID NO: 89923 - DNA, 15 bp, Homo sapiens
cctgccacactctta

SEQ ID NO: 89924 - DNA, 15 bp, Homo sapiens
gcctgccacactctt

SEQ ID NO: 89925 - DNA, 15 bp, Homo sapiens
tgcctgccacactct

SEQ ID NO: 89926 - DNA, 15 bp, Homo sapiens
gtgcctgccacactc

SEQ ID NO: 89927 - DNA, 15 bp, Homo sapiens
agtgcctgccacact

SEQ ID NO: 89928 - DNA, 15 bp, Homo sapiens
gagtgcctgccacac

SEQ ID NO: 89929 - DNA, 15 bp, Homo sapiens
agagtgcctgccaca

SEQ ID NO: 89930 - DNA, 15 bp, Homo sapiens
cagagtgcctgccac

SEQ ID NO: 89931 - DNA, 15 bp, Homo sapiens
acagagtgcctgcca

SEQ ID NO: 89932 - DNA, 15 bp, Homo sapiens
gacagagtgcctgcc

SEQ ID NO: 89933 - DNA, 15 bp, Homo sapiens
ggacagagtgcctgc

SEQ ID NO: 89934 - DNA, 15 bp, Homo sapiens
aggacagagtgcctg

SEQ ID NO: 89935 - DNA, 15 bp, Homo sapiens
gaggacagagtgcct

SEQ ID NO: 89936 - DNA, 15 bp, Homo sapiens
ggaggacagagtgcc

SEQ ID NO: 89937 - DNA, 15 bp, Homo sapiens
aggaggacagagtgc

SEQ ID NO: 89938 - DNA, 15 bp, Homo sapiens
aaggaggacagagtg

SEQ ID NO: 89939 - DNA, 15 bp, Homo sapiens
caaggaggacagagt

SEQ ID NO: 89940 - DNA, 15 bp, Homo sapiens
ccaaggaggacagag

SEQ ID NO: 89941 - DNA, 15 bp, Homo sapiens
gccaaggaggacaga

SEQ ID NO: 89942 - DNA, 15 bp, Homo sapiens
agccaaggaggacag

SEQ ID NO: 89943 - DNA, 15 bp, Homo sapiens
gagccaaggaggaca

SEQ ID NO: 89944 - DNA, 15 bp, Homo sapiens
cgagccaaggaggac

SEQ ID NO: 89945 - DNA, 15 bp, Homo sapiens
gcgagccaaggagga

SEQ ID NO: 89946 - DNA, 15 bp, Homo sapiens
agcgagccaaggagg

SEQ ID NO: 89947 - DNA, 15 bp, Homo sapiens
cagcgagccaaggag

SEQ ID NO: 89948 - DNA, 15 bp, Homo sapiens
acagcgagccaagga

SEQ ID NO: 89949 - DNA, 15 bp, Homo sapiens
gacagcgagccaagg

SEQ ID NO: 89950 - DNA, 15 bp, Homo sapiens
agacagcgagccaag

SEQ ID NO: 89951 - DNA, 15 bp, Homo sapiens
cagacagcgagccaa

SEQ ID NO: 89952 - DNA, 15 bp, Homo sapiens
acagacagcgagcca

SEQ ID NO: 89953 - DNA, 15 bp, Homo sapiens
gacagacagcgagcc

SEQ ID NO: 89954 - DNA, 15 bp, Homo sapiens
ggacagacagcgagc

SEQ ID NO: 89955 - DNA, 15 bp, Homo sapiens
gggacagacagcgag

SEQ ID NO: 89956 - DNA, 15 bp, Homo sapiens
ggggacagacagcga

SEQ ID NO: 89957 - DNA, 15 bp, Homo sapiens
tggggacagacagcg

SEQ ID NO: 89958 - DNA, 15 bp, Homo sapiens
ctggggacagacagc

SEQ ID NO: 89959 - DNA, 15 bp, Homo sapiens
actggggacagacag

SEQ ID NO: 89960 - DNA, 15 bp, Homo sapiens
aactggggacagaca

SEQ ID NO: 89961 - DNA, 15 bp, Homo sapiens
aaactggggacagac

SEQ ID NO: 89962 - DNA, 15 bp, Homo sapiens
aaaactggggacaga

SEQ ID NO: 89963 - DNA, 15 bp, Homo sapiens
aaaaactggggacag

SEQ ID NO: 89964 - DNA, 15 bp, Homo sapiens
gaaaaactggggaca

SEQ ID NO: 89965 - DNA, 15 bp, Homo sapiens
agaaaaactggggac

SEQ ID NO: 89966 - DNA, 15 bp, Homo sapiens
aagaaaaactgggga

SEQ ID NO: 89967 - DNA, 15 bp, Homo sapiens
aaagaaaaactgggg

SEQ ID NO: 89968 - DNA, 15 bp, Homo sapiens
taaagaaaaactggg

SEQ ID NO: 89969 - DNA, 15 bp, Homo sapiens
ttaaagaaaaactgg

SEQ ID NO: 89970 - DNA, 15 bp, Homo sapiens
gttaaagaaaaactg

SEQ ID NO: 89971 - DNA, 15 bp, Homo sapiens
agttaaagaaaaact

SEQ ID NO: 89972 - DNA, 15 bp, Homo sapiens
gagttaaagaaaaac

SEQ ID NO: 89973 - DNA, 15 bp, Homo sapiens
tgagttaaagaaaaa

SEQ ID NO: 89974 - DNA, 15 bp, Homo sapiens
gtgagttaaagaaaa

SEQ ID NO: 89975 - DNA, 15 bp, Homo sapiens
ggtgagttaaagaaa

SEQ ID NO: 89976 - DNA, 15 bp, Homo sapiens
gggtgagttaaagaa

SEQ ID NO: 89977 - DNA, 15 bp, Homo sapiens
agggtgagttaaaga

SEQ ID NO: 89978 - DNA, 15 bp, Homo sapiens
gagggtgagttaaag

SEQ ID NO: 89979 - DNA, 15 bp, Homo sapiens
ggagggtgagttaaa

SEQ ID NO: 89980 - DNA, 15 bp, Homo sapiens
gggagggtgagttaa

SEQ ID NO: 89981 - DNA, 15 bp, Homo sapiens
ggggagggtgagtta

SEQ ID NO: 89982 - DNA, 15 bp, Homo sapiens
tggggagggtgagtt

SEQ ID NO: 89983 - DNA, 15 bp, Homo sapiens
ttggggagggtgagt

SEQ ID NO: 89984 - DNA, 15 bp, Homo sapiens
tttggggagggtgag

SEQ ID NO: 89985 - DNA, 15 bp, Homo sapiens
ttttggggagggtga

SEQ ID NO: 89986 - DNA, 15 bp, Homo sapiens
attttggggagggtg

SEQ ID NO: 89987 - DNA, 15 bp, Homo sapiens
tattttggggagggt

SEQ ID NO: 89988 - DNA, 15 bp, Homo sapiens
atattttggggaggg

SEQ ID NO: 89989 - DNA, 15 bp, Homo sapiens
tatattttggggagg

SEQ ID NO: 89990 - DNA, 15 bp, Homo sapiens
atatattttggggag

SEQ ID NO: 89991 - DNA, 15 bp, Homo sapiens
tatatattttgggga

SEQ ID NO: 89992 - DNA, 15 bp, Homo sapiens
ttatatattttgggg

SEQ ID NO: 89993 - DNA, 15 bp, Homo sapiens
cttatatattttggg

SEQ ID NO: 89994 - DNA, 15 bp, Homo sapiens
tcttatatattttgg

SEQ ID NO: 89995 - DNA, 15 bp, Homo sapiens
ttcttatatattttg

SEQ ID NO: 89996 - DNA, 15 bp, Homo sapiens
tttcttatatatttt

SEQ ID NO: 89997 - DNA, 15 bp, Homo sapiens
ctttcttatatattt

SEQ ID NO: 89998 - DNA, 15 bp, Homo sapiens
cctttcttatatatt

SEQ ID NO: 89999 - DNA, 15 bp, Homo sapiens
gcctttcttatatat

SEQ ID NO: 90000 - DNA, 15 bp, Homo sapiens
tgcctttcttatata

SEQ ID NO: 90001 - DNA, 15 bp, Homo sapiens
ctgcctttcttatat

SEQ ID NO: 90002 - DNA, 15 bp, Homo sapiens
tctgcctttcttata

SEQ ID NO: 90003 - DNA, 15 bp, Homo sapiens
ttctgcctttcttat

SEQ ID NO: 90004 - DNA, 15 bp, Homo sapiens
cttctgcctttctta

SEQ ID NO: 90005 - DNA, 15 bp, Homo sapiens
acttctgcctttctt

SEQ ID NO: 90006 - DNA, 15 bp, Homo sapiens
aacttctgcctttct

SEQ ID NO: 90007 - DNA, 15 bp, Homo sapiens
gaacttctgcctttc

SEQ ID NO: 90008 - DNA, 15 bp, Homo sapiens
agaacttctgccttt

SEQ ID NO: 90009 - DNA, 15 bp, Homo sapiens
gagaacttctgcctt

SEQ ID NO: 90010 - DNA, 15 bp, Homo sapiens
tgagaacttctgcct

SEQ ID NO: 90011 - DNA, 15 bp, Homo sapiens
ctgagaacttctgcc

SEQ ID NO: 90012 - DNA, 15 bp, Homo sapiens
cctgagaacttctgc

SEQ ID NO: 90013 - DNA, 15 bp, Homo sapiens
tcctgagaacttctg

SEQ ID NO: 90014 - DNA, 15 bp, Homo sapiens
atcctgagaacttct

SEQ ID NO: 90015 - DNA, 15 bp, Homo sapiens
gatcctgagaacttc

SEQ ID NO: 90016 - DNA, 15 bp, Homo sapiens
tgatcctgagaactt

SEQ ID NO: 90017 - DNA, 15 bp, Homo sapiens
ctgatcctgagaact

SEQ ID NO: 90018 - DNA, 15 bp, Homo sapiens
actgatcctgagaac

SEQ ID NO: 90019 - DNA, 15 bp, Homo sapiens
aactgatcctgagaa

SEQ ID NO: 90020 - DNA, 15 bp, Homo sapiens
taactgatcctgaga

SEQ ID NO: 90021 - DNA, 15 bp, Homo sapiens
gtaactgatcctgag

SEQ ID NO: 90022 - DNA, 15 bp, Homo sapiens
tgtaactgatcctga

SEQ ID NO: 90023 - DNA, 15 bp, Homo sapiens
atgtaactgatcctg

SEQ ID NO: 90024 - DNA, 15 bp, Homo sapiens
tatgtaactgatcct

SEQ ID NO: 90025 - DNA, 15 bp, Homo sapiens
atatgtaactgatcc

SEQ ID NO: 90026 - DNA, 15 bp, Homo sapiens
tatatgtaactgatc

SEQ ID NO: 90027 - DNA, 15 bp, Homo sapiens
ctatatgtaactgat

SEQ ID NO: 90028 - DNA, 15 bp, Homo sapiens
gctatatgtaactga

SEQ ID NO: 90029 - DNA, 15 bp, Homo sapiens
tgctatatgtaactg

SEQ ID NO: 90030 - DNA, 15 bp, Homo sapiens
gtgctatatgtaact

SEQ ID NO: 90031 - DNA, 15 bp, Homo sapiens
tgtgctatatgtaac

SEQ ID NO: 90032 - DNA, 15 bp, Homo sapiens
ctgtgctatatgtaa

SEQ ID NO: 90033 - DNA, 15 bp, Homo sapiens
gctgtgctatatgta

SEQ ID NO: 90034 - DNA, 15 bp, Homo sapiens
tgctgtgctatatgt

SEQ ID NO: 90035 - DNA, 15 bp, Homo sapiens
gtgctgtgctatatg

SEQ ID NO: 90036 - DNA, 15 bp, Homo sapiens
agtgctgtgctatat

SEQ ID NO: 90037 - DNA, 15 bp, Homo sapiens
cagtgctgtgctata

SEQ ID NO: 90038 - DNA, 15 bp, Homo sapiens
gcagtgctgtgctat

SEQ ID NO: 90039 - DNA, 15 bp, Homo sapiens
tgcagtgctgtgcta

SEQ ID NO: 90040 - DNA, 15 bp, Homo sapiens
ttgcagtgctgtgct

SEQ ID NO: 90041 - DNA, 15 bp, Homo sapiens
tttgcagtgctgtgc

SEQ ID NO: 90042 - DNA, 15 bp, Homo sapiens
ttttgcagtgctgtg

SEQ ID NO: 90043 - DNA, 15 bp, Homo sapiens
gttttgcagtgctgt

SEQ ID NO: 90044 - DNA, 15 bp, Homo sapiens
ggttttgcagtgctg

SEQ ID NO: 90045 - DNA, 15 bp, Homo sapiens
aggttttgcagtgct

SEQ ID NO: 90046 - DNA, 15 bp, Homo sapiens
aaggttttgcagtgc

SEQ ID NO: 90047 - DNA, 15 bp, Homo sapiens
aaaggttttgcagtg

SEQ ID NO: 90048 - DNA, 15 bp, Homo sapiens
gaaaggttttgcagt

SEQ ID NO: 90049 - DNA, 15 bp, Homo sapiens
tgaaaggttttgcag

SEQ ID NO: 90050 - DNA, 15 bp, Homo sapiens
ctgaaaggttttgca

SEQ ID NO: 90051 - DNA, 15 bp, Homo sapiens
tctgaaaggttttgc

SEQ ID NO: 90052 - DNA, 15 bp, Homo sapiens
ctctgaaaggttttg

SEQ ID NO: 90053 - DNA, 15 bp, Homo sapiens
tctctgaaaggtttt

SEQ ID NO: 90054 - DNA, 15 bp, Homo sapiens
ttctctgaaaggttt

SEQ ID NO: 90055 - DNA, 15 bp, Homo sapiens
tttctctgaaaggtt

SEQ ID NO: 90056 - DNA, 15 bp, Homo sapiens
gtttctctgaaaggt

SEQ ID NO: 90057 - DNA, 15 bp, Homo sapiens
tgtttctctgaaagg

SEQ ID NO: 90058 - DNA, 15 bp, Homo sapiens
ttgtttctctgaaag

SEQ ID NO: 90059 - DNA, 15 bp, Homo sapiens
tttgtttctctgaaa

SEQ ID NO: 90060 - DNA, 15 bp, Homo sapiens
ctttgtttctctgaa

SEQ ID NO: 90061 - DNA, 15 bp, Homo sapiens
cctttgtttctctga

SEQ ID NO: 90062 - DNA, 15 bp, Homo sapiens
gcctttgtttctctg

SEQ ID NO: 90063 - DNA, 15 bp, Homo sapiens
agcctttgtttctct

SEQ ID NO: 90064 - DNA, 15 bp, Homo sapiens
gagcctttgtttctc

SEQ ID NO: 90065 - DNA, 15 bp, Homo sapiens
agagcctttgtttct

SEQ ID NO: 90066 - DNA, 15 bp, Homo sapiens
aagagcctttgtttc

SEQ ID NO: 90067 - DNA, 15 bp, Homo sapiens
gaagagcctttgttt

SEQ ID NO: 90068 - DNA, 15 bp, Homo sapiens
agaagagcctttgtt

SEQ ID NO: 90069 - DNA, 15 bp, Homo sapiens
tagaagagcctttgt

SEQ ID NO: 90070 - DNA, 15 bp, Homo sapiens
ttagaagagcctttg

SEQ ID NO: 90071 - DNA, 15 bp, Homo sapiens
cttagaagagccttt

SEQ ID NO: 90072 - DNA, 15 bp, Homo sapiens
ccttagaagagcctt

SEQ ID NO: 90073 - DNA, 15 bp, Homo sapiens
cccttagaagagcct

SEQ ID NO: 90074 - DNA, 15 bp, Homo sapiens
tcccttagaagagcc

SEQ ID NO: 90075 - DNA, 15 bp, Homo sapiens
ttcccttagaagagc

SEQ ID NO: 90076 - DNA, 15 bp, Homo sapiens
cttcccttagaagag

SEQ ID NO: 90077 - DNA, 15 bp, Homo sapiens
ccttcccttagaaga

SEQ ID NO: 90078 - DNA, 15 bp, Homo sapiens
tccttcccttagaag

SEQ ID NO: 90079 - DNA, 15 bp, Homo sapiens
gtccttcccttagaa

SEQ ID NO: 90080 - DNA, 15 bp, Homo sapiens
ggtccttcccttaga

SEQ ID NO: 90081 - DNA, 15 bp, Homo sapiens
tggtccttcccttag

SEQ ID NO: 90082 - DNA, 15 bp, Homo sapiens
atggtccttccctta

SEQ ID NO: 90083 - DNA, 15 bp, Homo sapiens
aatggtccttccctt

SEQ ID NO: 90084 - DNA, 15 bp, Homo sapiens
aaatggtccttccct

SEQ ID NO: 90085 - DNA, 15 bp, Homo sapiens
caaatggtccttccc

SEQ ID NO: 90086 - DNA, 15 bp, Homo sapiens
ccaaatggtccttcc

SEQ ID NO: 90087 - DNA, 15 bp, Homo sapiens
gccaaatggtccttc

SEQ ID NO: 90088 - DNA, 15 bp, Homo sapiens
agccaaatggtcctt

SEQ ID NO: 90089 - DNA, 15 bp, Homo sapiens
aagccaaatggtcct

SEQ ID NO: 90090 - DNA, 15 bp, Homo sapiens
taagccaaatggtcc

SEQ ID NO: 90091 - DNA, 15 bp, Homo sapiens
ttaagccaaatggtc

SEQ ID NO: 90092 - DNA, 15 bp, Homo sapiens
tttaagccaaatggt

SEQ ID NO: 90093 - DNA, 15 bp, Homo sapiens
ttttaagccaaatgg

SEQ ID NO: 90094 - DNA, 15 bp, Homo sapiens
attttaagccaaatg

SEQ ID NO: 90095 - DNA, 15 bp, Homo sapiens
gattttaagccaaat

SEQ ID NO: 90096 - DNA, 15 bp, Homo sapiens
ggattttaagccaaa

SEQ ID NO: 90097 - DNA, 15 bp, Homo sapiens
cggattttaagccaa

SEQ ID NO: 90098 - DNA, 15 bp, Homo sapiens
gcggattttaagcca

SEQ ID NO: 90099 - DNA, 15 bp, Homo sapiens
tgcggattttaagcc

SEQ ID NO: 90100 - DNA, 15 bp, Homo sapiens
atgcggattttaagc

SEQ ID NO: 90101 - DNA, 15 bp, Homo sapiens
catgcggattttaag

SEQ ID NO: 90102 - DNA, 15 bp, Homo sapiens
ccatgcggattttaa

SEQ ID NO: 90103 - DNA, 15 bp, Homo sapiens
cccatgcggatttta

SEQ ID NO: 90104 - DNA, 15 bp, Homo sapiens
ccccatgcggatttt

SEQ ID NO: 90105 - DNA, 15 bp, Homo sapiens
accccatgcggattt

SEQ ID NO: 90106 - DNA, 15 bp, Homo sapiens
caccccatgcggatt

SEQ ID NO: 90107 - DNA, 15 bp, Homo sapiens
acaccccatgcggat

SEQ ID NO: 90108 - DNA, 15 bp, Homo sapiens
cacaccccatgcgga

SEQ ID NO: 90109 - DNA, 15 bp, Homo sapiens
tcacaccccatgcgg

SEQ ID NO: 90110 - DNA, 15 bp, Homo sapiens
ttcacaccccatgcg

SEQ ID NO: 90111 - DNA, 15 bp, Homo sapiens
cttcacaccccatgc

SEQ ID NO: 90112 - DNA, 15 bp, Homo sapiens
ccttcacaccccatg

SEQ ID NO: 90113 - DNA, 15 bp, Homo sapiens
tccttcacaccccat

SEQ ID NO: 90114 - DNA, 15 bp, Homo sapiens
ttccttcacacccca

SEQ ID NO: 90115 - DNA, 15 bp, Homo sapiens
tttccttcacacccc

SEQ ID NO: 90116 - DNA, 15 bp, Homo sapiens
gtttccttcacaccc

SEQ ID NO: 90117 - DNA, 15 bp, Homo sapiens
tgtttccttcacacc

SEQ ID NO: 90118 - DNA, 15 bp, Homo sapiens
ctgtttccttcacac

SEQ ID NO: 90119 - DNA, 15 bp, Homo sapiens
tctgtttccttcaca

SEQ ID NO: 90120 - DNA, 15 bp, Homo sapiens
ctctgtttccttcac

SEQ ID NO: 90121 - DNA, 15 bp, Homo sapiens
tctctgtttccttca

SEQ ID NO: 90122 - DNA, 15 bp, Homo sapiens
ctctctgtttccttc

SEQ ID NO: 90123 - DNA, 15 bp, Homo sapiens
gctctctgtttcctt

SEQ ID NO: 90124 - DNA, 15 bp, Homo sapiens
ggctctctgtttcct

SEQ ID NO: 90125 - DNA, 15 bp, Homo sapiens
tggctctctgtttcc

SEQ ID NO: 90126 - DNA, 15 bp, Homo sapiens
ttggctctctgtttc

SEQ ID NO: 90127 - DNA, 15 bp, Homo sapiens
tttggctctctgttt

SEQ ID NO: 90128 - DNA, 15 bp, Homo sapiens
ctttggctctctgtt

SEQ ID NO: 90129 - DNA, 15 bp, Homo sapiens
cctttggctctctgt

SEQ ID NO: 90130 - DNA, 15 bp, Homo sapiens
gcctttggctctctg

SEQ ID NO: 90131 - DNA, 15 bp, Homo sapiens
tgcctttggctctct

SEQ ID NO: 90132 - DNA, 15 bp, Homo sapiens
gtgcctttggctctc

SEQ ID NO: 90133 - DNA, 15 bp, Homo sapiens
agtgcctttggctct

SEQ ID NO: 90134 - DNA, 15 bp, Homo sapiens
tagtgcctttggctc

SEQ ID NO: 90135 - DNA, 15 bp, Homo sapiens
ctagtgcctttggct

SEQ ID NO: 90136 - DNA, 15 bp, Homo sapiens
gctagtgcctttggc

SEQ ID NO: 90137 - DNA, 15 bp, Homo sapiens
agctagtgcctttgg

SEQ ID NO: 90138 - DNA, 15 bp, Homo sapiens
cagctagtgcctttg

SEQ ID NO: 90139 - DNA, 15 bp, Homo sapiens
ccagctagtgccttt

SEQ ID NO: 90140 - DNA, 15 bp, Homo sapiens
gccagctagtgcctt

SEQ ID NO: 90141 - DNA, 15 bp, Homo sapiens
agccagctagtgcct

SEQ ID NO: 90142 - DNA, 15 bp, Homo sapiens
cagccagctagtgcc

SEQ ID NO: 90143 - DNA, 15 bp, Homo sapiens
acagccagctagtgc

SEQ ID NO: 90144 - DNA, 15 bp, Homo sapiens
gacagccagctagtg

SEQ ID NO: 90145 - DNA, 15 bp, Homo sapiens
agacagccagctagt

SEQ ID NO: 90146 - DNA, 15 bp, Homo sapiens
aagacagccagctag

SEQ ID NO: 90147 - DNA, 15 bp, Homo sapiens
caagacagccagcta

SEQ ID NO: 90148 - DNA, 15 bp, Homo sapiens
gcaagacagccagct

SEQ ID NO: 90149 - DNA, 15 bp, Homo sapiens
ggcaagacagccagc

SEQ ID NO: 90150 - DNA, 15 bp, Homo sapiens
gggcaagacagccag

SEQ ID NO: 90151 - DNA, 15 bp, Homo sapiens
tgggcaagacagcca

SEQ ID NO: 90152 - DNA, 15 bp, Homo sapiens
ttgggcaagacagcc

SEQ ID NO: 90153 - DNA, 15 bp, Homo sapiens
cttgggcaagacagc

SEQ ID NO: 90154 - DNA, 15 bp, Homo sapiens
ccttgggcaagacag

SEQ ID NO: 90155 - DNA, 15 bp, Homo sapiens
accttgggcaagaca

SEQ ID NO: 90156 - DNA, 15 bp, Homo sapiens
aaccttgggcaagac

SEQ ID NO: 90157 - DNA, 15 bp, Homo sapiens
taaccttgggcaaga

SEQ ID NO: 90158 - DNA, 15 bp, Homo sapiens
gtaaccttgggcaag

SEQ ID NO: 90159 - DNA, 15 bp, Homo sapiens
tgtaaccttgggcaa

SEQ ID NO: 90160 - DNA, 15 bp, Homo sapiens
ttgtaaccttgggca

SEQ ID NO: 90161 - DNA, 15 bp, Homo sapiens
gttgtaaccttgggc

SEQ ID NO: 90162 - DNA, 15 bp, Homo sapiens
agttgtaaccttggg

SEQ ID NO: 90163 - DNA, 15 bp, Homo sapiens
aagttgtaaccttgg

SEQ ID NO: 90164 - DNA, 15 bp, Homo sapiens
aaagttgtaaccttg

SEQ ID NO: 90165 - DNA, 15 bp, Homo sapiens
caaagttgtaacctt

SEQ ID NO: 90166 - DNA, 15 bp, Homo sapiens
tcaaagttgtaacct

SEQ ID NO: 90167 - DNA, 15 bp, Homo sapiens
atcaaagttgtaacc

SEQ ID NO: 90168 - DNA, 15 bp, Homo sapiens
gatcaaagttgtaac

SEQ ID NO: 90169 - DNA, 15 bp, Homo sapiens
tgatcaaagttgtaa

SEQ ID NO: 90170 - DNA, 15 bp, Homo sapiens
gtgatcaaagttgta

SEQ ID NO: 90171 - DNA, 15 bp, Homo sapiens
tgtgatcaaagttgt

SEQ ID NO: 90172 - DNA, 15 bp, Homo sapiens
gtgtgatcaaagttg

SEQ ID NO: 90173 - DNA, 15 bp, Homo sapiens
tgtgtgatcaaagtt

SEQ ID NO: 90174 - DNA, 15 bp, Homo sapiens
ctgtgtgatcaaagt

SEQ ID NO: 90175 - DNA, 15 bp, Homo sapiens
gctgtgtgatcaaag

SEQ ID NO: 90176 - DNA, 15 bp, Homo sapiens
tgctgtgtgatcaaa

SEQ ID NO: 90177 - DNA, 15 bp, Homo sapiens
gtgctgtgtgatcaa

SEQ ID NO: 90178 - DNA, 15 bp, Homo sapiens
agtgctgtgtgatca

SEQ ID NO: 90179 - DNA, 15 bp, Homo sapiens
aagtgctgtgtgatc

SEQ ID NO: 90180 - DNA, 15 bp, Homo sapiens
aaagtgctgtgtgat

SEQ ID NO: 90181 - DNA, 15 bp, Homo sapiens
caaagtgctgtgtga

SEQ ID NO: 90182 - DNA, 15 bp, Homo sapiens
acaaagtgctgtgtg

SEQ ID NO: 90183 - DNA, 15 bp, Homo sapiens
cacaaagtgctgtgt

SEQ ID NO: 90184 - DNA, 15 bp, Homo sapiens
acacaaagtgctgtg

SEQ ID NO: 90185 - DNA, 15 bp, Homo sapiens
aacacaaagtgctgt

SEQ ID NO: 90186 - DNA, 15 bp, Homo sapiens
aaacacaaagtgctg

SEQ ID NO: 90187 - DNA, 15 bp, Homo sapiens
gaaacacaaagtgct

SEQ ID NO: 90188 - DNA, 15 bp, Homo sapiens
ggaaacacaaagtgc

SEQ ID NO: 90189 - DNA, 15 bp, Homo sapiens
aggaaacacaaagtg

SEQ ID NO: 90190 - DNA, 15 bp, Homo sapiens
caggaaacacaaagt

SEQ ID NO: 90191 - DNA, 15 bp, Homo sapiens
acaggaaacacaaag

SEQ ID NO: 90192 - DNA, 15 bp, Homo sapiens
aacaggaaacacaaa

SEQ ID NO: 90193 - DNA, 15 bp, Homo sapiens
taacaggaaacacaa

SEQ ID NO: 90194 - DNA, 15 bp, Homo sapiens
ttaacaggaaacaca

SEQ ID NO: 90195 - DNA, 15 bp, Homo sapiens
gttaacaggaaacac

SEQ ID NO: 90196 - DNA, 15 bp, Homo sapiens
tgttaacaggaaaca

SEQ ID NO: 90197 - DNA, 15 bp, Homo sapiens
ttgttaacaggaaac

SEQ ID NO: 90198 - DNA, 15 bp, Homo sapiens
attgttaacaggaaa

SEQ ID NO: 90199 - DNA, 15 bp, Homo sapiens
aattgttaacaggaa

SEQ ID NO: 90200 - DNA, 15 bp, Homo sapiens
aaattgttaacagga

SEQ ID NO: 90201 - DNA, 15 bp, Homo sapiens
taaattgttaacagg

SEQ ID NO: 90202 - DNA, 15 bp, Homo sapiens
ataaattgttaacag

SEQ ID NO: 90203 - DNA, 15 bp, Homo sapiens
tataaattgttaaca

SEQ ID NO: 90204 - DNA, 15 bp, Homo sapiens
ttataaattgttaac

SEQ ID NO: 90205 - DNA, 15 bp, Homo sapiens
attataaattgttaa

SEQ ID NO: 90206 - DNA, 15 bp, Homo sapiens
aattataaattgtta

SEQ ID NO: 90207 - DNA, 15 bp, Homo sapiens
aaattataaattgtt

SEQ ID NO: 90208 - DNA, 15 bp, Homo sapiens
taaattataaattgt

SEQ ID NO: 90209 - DNA, 15 bp, Homo sapiens
ttaaattataaattg

SEQ ID NO: 90210 - DNA, 15 bp, Homo sapiens
attaaattataaatt

SEQ ID NO: 90211 - DNA, 15 bp, Homo sapiens
tattaaattataaat

SEQ ID NO: 90212 - DNA, 15 bp, Homo sapiens
ttattaaattataaa

SEQ ID NO: 90213 - DNA, 15 bp, Homo sapiens
attattaaattataa

SEQ ID NO: 90214 - DNA, 15 bp, Homo sapiens
cattattaaattata

SEQ ID NO: 90215 - DNA, 15 bp, Homo sapiens
tcattattaaattat

SEQ ID NO: 90216 - DNA, 15 bp, Homo sapiens
gtcattattaaatta

SEQ ID NO: 90217 - DNA, 15 bp, Homo sapiens
ggtcattattaaatt

SEQ ID NO: 90218 - DNA, 15 bp, Homo sapiens
tggtcattattaaat

SEQ ID NO: 90219 - DNA, 15 bp, Homo sapiens
ctggtcattattaaa

SEQ ID NO: 90220 - DNA, 15 bp, Homo sapiens
tctggtcattattaa

SEQ ID NO: 90221 - DNA, 15 bp, Homo sapiens
ttctggtcattatta

SEQ ID NO: 90222 - DNA, 15 bp, Homo sapiens
gttctggtcattatt

SEQ ID NO: 90223 - DNA, 15 bp, Homo sapiens
tgttctggtcattat

SEQ ID NO: 90224 - DNA, 15 bp, Homo sapiens
atgttctggtcatta

SEQ ID NO: 90225 - DNA, 15 bp, Homo sapiens
aatgttctggtcatt

SEQ ID NO: 90226 - DNA, 15 bp, Homo sapiens
aaatgttctggtcat

SEQ ID NO: 90227 - DNA, 15 bp, Homo sapiens
taaatgttctggtca

SEQ ID NO: 90228 - DNA, 15 bp, Homo sapiens
ctaaatgttctggtc

SEQ ID NO: 90229 - DNA, 15 bp, Homo sapiens
actaaatgttctggt

SEQ ID NO: 90230 - DNA, 15 bp, Homo sapiens
cactaaatgttctgg

SEQ ID NO: 90231 - DNA, 15 bp, Homo sapiens
ccactaaatgttctg

SEQ ID NO: 90232 - DNA, 15 bp, Homo sapiens
tccactaaatgttct

SEQ ID NO: 90233 - DNA, 15 bp, Homo sapiens
ttccactaaatgttc

SEQ ID NO: 90234 - DNA, 15 bp, Homo sapiens
cttccactaaatgtt

SEQ ID NO: 90235 - DNA, 15 bp, Homo sapiens
tcttccactaaatgt

SEQ ID NO: 90236 - DNA, 15 bp, Homo sapiens
ttcttccactaaatg

SEQ ID NO: 90237 - DNA, 15 bp, Homo sapiens
attcttccactaaat

SEQ ID NO: 90238 - DNA, 15 bp, Homo sapiens
aattcttccactaaa

SEQ ID NO: 90239 - DNA, 15 bp, Homo sapiens
taattcttccactaa

SEQ ID NO: 90240 - DNA, 15 bp, Homo sapiens
ataattcttccacta

SEQ ID NO: 90241 - DNA, 15 bp, Homo sapiens
tataattcttccact

SEQ ID NO: 90242 - DNA, 15 bp, Homo sapiens
gtataattcttccac

SEQ ID NO: 90243 - DNA, 15 bp, Homo sapiens
tgtataattcttcca

SEQ ID NO: 90244 - DNA, 15 bp, Homo sapiens
ttgtataattcttcc

SEQ ID NO: 90245 - DNA, 15 bp, Homo sapiens
gttgtataattcttc

SEQ ID NO: 90246 - DNA, 15 bp, Homo sapiens
tgttgtataattctt

SEQ ID NO: 90247 - DNA, 15 bp, Homo sapiens
atgttgtataattct

SEQ ID NO: 90248 - DNA, 15 bp, Homo sapiens
tatgttgtataattc

SEQ ID NO: 90249 - DNA, 15 bp, Homo sapiens
ttatgttgtataatt

SEQ ID NO: 90250 - DNA, 15 bp, Homo sapiens
attatgttgtataat

SEQ ID NO: 90251 - DNA, 15 bp, Homo sapiens
cattatgttgtataa

SEQ ID NO: 90252 - DNA, 15 bp, Homo sapiens
tcattatgttgtata

SEQ ID NO: 90253 - DNA, 15 bp, Homo sapiens
ttcattatgttgtat

SEQ ID NO: 90254 - DNA, 15 bp, Homo sapiens
attcattatgttgta

SEQ ID NO: 90255 - DNA, 15 bp, Homo sapiens
gattcattatgttgt

SEQ ID NO: 90256 - DNA, 15 bp, Homo sapiens
ggattcattatgttg

SEQ ID NO: 90257 - DNA, 15 bp, Homo sapiens
cggattcattatgtt

SEQ ID NO: 90258 - DNA, 15 bp, Homo sapiens
gcggattcattatgt

SEQ ID NO: 90259 - DNA, 15 bp, Homo sapiens
agcggattcattatg

SEQ ID NO: 90260 - DNA, 15 bp, Homo sapiens
aagcggattcattat

SEQ ID NO: 90261 - DNA, 15 bp, Homo sapiens
aaagcggattcatta

SEQ ID NO: 90262 - DNA, 15 bp, Homo sapiens
aaaagcggattcatt

SEQ ID NO: 90263 - DNA, 15 bp, Homo sapiens
taaaagcggattcat

SEQ ID NO: 90264 - DNA, 15 bp, Homo sapiens
ttaaaagcggattca

SEQ ID NO: 90265 - DNA, 15 bp, Homo sapiens
tttaaaagcggattc

SEQ ID NO: 90266 - DNA, 15 bp, Homo sapiens
gtttaaaagcggatt

SEQ ID NO: 90267 - DNA, 15 bp, Homo sapiens
tgtttaaaagcggat

SEQ ID NO: 90268 - DNA, 15 bp, Homo sapiens
atgtttaaaagcgga

SEQ ID NO: 90269 - DNA, 15 bp, Homo sapiens
aatgtttaaaagcgg

SEQ ID NO: 90270 - DNA, 15 bp, Homo sapiens
aaatgtttaaaagcg

SEQ ID NO: 90271 - DNA, 15 bp, Homo sapiens
caaatgtttaaaagc

SEQ ID NO: 90272 - DNA, 15 bp, Homo sapiens
acaaatgtttaaaag

SEQ ID NO: 90273 - DNA, 15 bp, Homo sapiens
cacaaatgtttaaaa

SEQ ID NO: 90274 - DNA, 15 bp, Homo sapiens
acacaaatgtttaaa

SEQ ID NO: 90275 - DNA, 15 bp, Homo sapiens
aacacaaatgtttaa

SEQ ID NO: 90276 - DNA, 15 bp, Homo sapiens
aaacacaaatgttta

SEQ ID NO: 90277 - DNA, 15 bp, Homo sapiens
aaaacacaaatgttt

SEQ ID NO: 90278 - DNA, 15 bp, Homo sapiens
aaaaacacaaatgtt

SEQ ID NO: 90279 - DNA, 15 bp, Homo sapiens
gaaaaacacaaatgt

SEQ ID NO: 90280 - DNA, 15 bp, Homo sapiens
tgaaaaacacaaatg

SEQ ID NO: 90281 - DNA, 15 bp, Homo sapiens
atgaaaaacacaaat

SEQ ID NO: 90282 - DNA, 15 bp, Homo sapiens
aatgaaaaacacaaa

SEQ ID NO: 90283 - DNA, 15 bp, Homo sapiens
aaatgaaaaacacaa

SEQ ID NO: 90284 - DNA, 15 bp, Homo sapiens
caaatgaaaaacaca

SEQ ID NO: 90285 - DNA, 15 bp, Homo sapiens
acaaatgaaaaacac

SEQ ID NO: 90286 - DNA, 15 bp, Homo sapiens
aacaaatgaaaaaca

SEQ ID NO: 90287 - DNA, 15 bp, Homo sapiens
aaacaaatgaaaaac

SEQ ID NO: 90288 - DNA, 15 bp, Homo sapiens
gaaacaaatgaaaaa

SEQ ID NO: 90289 - DNA, 15 bp, Homo sapiens
ggaaacaaatgaaaa

SEQ ID NO: 90290 - DNA, 15 bp, Homo sapiens
aggaaacaaatgaaa

SEQ ID NO: 90291 - DNA, 15 bp, Homo sapiens
aaggaaacaaatgaa

SEQ ID NO: 90292 - DNA, 15 bp, Homo sapiens
gaaggaaacaaatga

SEQ ID NO: 90293 - DNA, 15 bp, Homo sapiens
agaaggaaacaaatg

SEQ ID NO: 90294 - DNA, 15 bp, Homo sapiens
gagaaggaaacaaat

SEQ ID NO: 90295 - DNA, 15 bp, Homo sapiens
agagaaggaaacaaa

SEQ ID NO: 90296 - DNA, 15 bp, Homo sapiens
gagagaaggaaacaa

SEQ ID NO: 90297 - DNA, 15 bp, Homo sapiens
ggagagaaggaaaca

SEQ ID NO: 90298 - DNA, 15 bp, Homo sapiens
aggagagaaggaaac

SEQ ID NO: 90299 - DNA, 15 bp, Homo sapiens
taggagagaaggaaa

SEQ ID NO: 90300 - DNA, 15 bp, Homo sapiens
ataggagagaaggaa

SEQ ID NO: 90301 - DNA, 15 bp, Homo sapiens
gataggagagaagga

SEQ ID NO: 90302 - DNA, 15 bp, Homo sapiens
ggataggagagaagg

SEQ ID NO: 90303 - DNA, 15 bp, Homo sapiens
gggataggagagaag

SEQ ID NO: 90304 - DNA, 15 bp, Homo sapiens
tgggataggagagaa

SEQ ID NO: 90305 - DNA, 15 bp, Homo sapiens
gtgggataggagaga

SEQ ID NO: 90306 - DNA, 15 bp, Homo sapiens
ggtgggataggagag

SEQ ID NO: 90307 - DNA, 15 bp, Homo sapiens
gggtgggataggaga

SEQ ID NO: 90308 - DNA, 15 bp, Homo sapiens
agggtgggataggag

SEQ ID NO: 90309 - DNA, 15 bp, Homo sapiens
cagggtgggatagga

SEQ ID NO: 90310 - DNA, 15 bp, Homo sapiens
tcagggtgggatagg

SEQ ID NO: 90311 - DNA, 15 bp, Homo sapiens
ctcagggtgggatag

SEQ ID NO: 90312 - DNA, 15 bp, Homo sapiens
gctcagggtgggata

SEQ ID NO: 90313 - DNA, 15 bp, Homo sapiens
ggctcagggtgggat

SEQ ID NO: 90314 - DNA, 15 bp, Homo sapiens
tggctcagggtggga

SEQ ID NO: 90315 - DNA, 15 bp, Homo sapiens
ctggctcagggtggg

SEQ ID NO: 90316 - DNA, 15 bp, Homo sapiens
actggctcagggtgg

SEQ ID NO: 90317 - DNA, 15 bp, Homo sapiens
gactggctcagggtg

SEQ ID NO: 90318 - DNA, 15 bp, Homo sapiens
ggactggctcagggt

SEQ ID NO: 90319 - DNA, 15 bp, Homo sapiens
aggactggctcaggg

SEQ ID NO: 90320 - DNA, 15 bp, Homo sapiens
caggactggctcagg

SEQ ID NO: 90321 - DNA, 15 bp, Homo sapiens
acaggactggctcag

SEQ ID NO: 90322 - DNA, 15 bp, Homo sapiens
aacaggactggctca

SEQ ID NO: 90323 - DNA, 15 bp, Homo sapiens
aaacaggactggctc

SEQ ID NO: 90324 - DNA, 15 bp, Homo sapiens
gaaacaggactggct

SEQ ID NO: 90325 - DNA, 15 bp, Homo sapiens
agaaacaggactggc

SEQ ID NO: 90326 - DNA, 15 bp, Homo sapiens
cagaaacaggactgg

SEQ ID NO: 90327 - DNA, 15 bp, Homo sapiens
gcagaaacaggactg

SEQ ID NO: 90328 - DNA, 15 bp, Homo sapiens
ggcagaaacaggact

SEQ ID NO: 90329 - DNA, 15 bp, Homo sapiens
tggcagaaacaggac

SEQ ID NO: 90330 - DNA, 15 bp, Homo sapiens
gtggcagaaacagga

SEQ ID NO: 90331 - DNA, 15 bp, Homo sapiens
agtggcagaaacagg

SEQ ID NO: 90332 - DNA, 15 bp, Homo sapiens
cagtggcagaaacag

SEQ ID NO: 90333 - DNA, 15 bp, Homo sapiens
acagtggcagaaaca

SEQ ID NO: 90334 - DNA, 15 bp, Homo sapiens
aacagtggcagaaac

SEQ ID NO: 90335 - DNA, 15 bp, Homo sapiens
aaacagtggcagaaa

SEQ ID NO: 90336 - DNA, 15 bp, Homo sapiens
aaaacagtggcagaa

SEQ ID NO: 90337 - DNA, 15 bp, Homo sapiens
aaaaacagtggcaga

SEQ ID NO: 90338 - DNA, 15 bp, Homo sapiens
gaaaaacagtggcag

SEQ ID NO: 90339 - DNA, 15 bp, Homo sapiens
ggaaaaacagtggca

SEQ ID NO: 90340 - DNA, 15 bp, Homo sapiens
aggaaaaacagtggc

SEQ ID NO: 90341 - DNA, 15 bp, Homo sapiens
aaggaaaaacagtgg

SEQ ID NO: 90342 - DNA, 15 bp, Homo sapiens
aaaggaaaaacagtg

SEQ ID NO: 90343 - DNA, 15 bp, Homo sapiens
gaaaggaaaaacagt

SEQ ID NO: 90344 - DNA, 15 bp, Homo sapiens
ggaaaggaaaaacag

SEQ ID NO: 90345 - DNA, 15 bp, Homo sapiens
tggaaaggaaaaaca

SEQ ID NO: 90346 - DNA, 15 bp, Homo sapiens
ttggaaaggaaaaac

SEQ ID NO: 90347 - DNA, 15 bp, Homo sapiens
tttggaaaggaaaaa

SEQ ID NO: 90348 - DNA, 15 bp, Homo sapiens
atttggaaaggaaaa

SEQ ID NO: 90349 - DNA, 15 bp, Homo sapiens
gatttggaaaggaaa

SEQ ID NO: 90350 - DNA, 15 bp, Homo sapiens
tgatttggaaaggaa

SEQ ID NO: 90351 - DNA, 15 bp, Homo sapiens
ctgatttggaaagga

SEQ ID NO: 90352 - DNA, 15 bp, Homo sapiens
tctgatttggaaagg

SEQ ID NO: 90353 - DNA, 15 bp, Homo sapiens
atctgatttggaaag

SEQ ID NO: 90354 - DNA, 15 bp, Homo sapiens
aatctgatttggaaa

SEQ ID NO: 90355 - DNA, 15 bp, Homo sapiens
aaatctgatttggaa

SEQ ID NO: 90356 - DNA, 15 bp, Homo sapiens
gaaatctgatttgga

SEQ ID NO: 90357 - DNA, 15 bp, Homo sapiens
agaaatctgatttgg

SEQ ID NO: 90358 - DNA, 15 bp, Homo sapiens
aagaaatctgatttg

SEQ ID NO: 90359 - DNA, 15 bp, Homo sapiens
caagaaatctgattt

SEQ ID NO: 90360 - DNA, 15 bp, Homo sapiens
tcaagaaatctgatt

SEQ ID NO: 90361 - DNA, 15 bp, Homo sapiens
ctcaagaaatctgat

SEQ ID NO: 90362 - DNA, 15 bp, Homo sapiens
actcaagaaatctga

SEQ ID NO: 90363 - DNA, 15 bp, Homo sapiens
aactcaagaaatctg

SEQ ID NO: 90364 - DNA, 15 bp, Homo sapiens
aaactcaagaaatct

SEQ ID NO: 90365 - DNA, 15 bp, Homo sapiens
aaaactcaagaaatc

SEQ ID NO: 90366 - DNA, 15 bp, Homo sapiens
caaaactcaagaaat

SEQ ID NO: 90367 - DNA, 15 bp, Homo sapiens
acaaaactcaagaaa

SEQ ID NO: 90368 - DNA, 15 bp, Homo sapiens
gacaaaactcaagaa

SEQ ID NO: 90369 - DNA, 15 bp, Homo sapiens
tgacaaaactcaaga

SEQ ID NO: 90370 - DNA, 15 bp, Homo sapiens
atgacaaaactcaag

SEQ ID NO: 90371 - DNA, 15 bp, Homo sapiens
catgacaaaactcaa

SEQ ID NO: 90372 - DNA, 15 bp, Homo sapiens
tcatgacaaaactca

SEQ ID NO: 90373 - DNA, 15 bp, Homo sapiens
ttcatgacaaaactc

SEQ ID NO: 90374 - DNA, 15 bp, Homo sapiens
gttcatgacaaaact

SEQ ID NO: 90375 - DNA, 15 bp, Homo sapiens
cgttcatgacaaaac

SEQ ID NO: 90376 - DNA, 15 bp, Homo sapiens
gcgttcatgacaaaa

SEQ ID NO: 90377 - DNA, 15 bp, Homo sapiens
agcgttcatgacaaa

SEQ ID NO: 90378 - DNA, 15 bp, Homo sapiens
cagcgttcatgacaa

SEQ ID NO: 90379 - DNA, 15 bp, Homo sapiens
tcagcgttcatgaca

SEQ ID NO: 90380 - DNA, 15 bp, Homo sapiens
ttcagcgttcatgac

SEQ ID NO: 90381 - DNA, 15 bp, Homo sapiens
attcagcgttcatga

SEQ ID NO: 90382 - DNA, 15 bp, Homo sapiens
aattcagcgttcatg

SEQ ID NO: 90383 - DNA, 15 bp, Homo sapiens
aaattcagcgttcat

SEQ ID NO: 90384 - DNA, 15 bp, Homo sapiens
gaaattcagcgttca

SEQ ID NO: 90385 - DNA, 15 bp, Homo sapiens
agaaattcagcgttc

SEQ ID NO: 90386 - DNA, 15 bp, Homo sapiens
tagaaattcagcgtt

SEQ ID NO: 90387 - DNA, 15 bp, Homo sapiens
atagaaattcagcgt

SEQ ID NO: 90388 - DNA, 15 bp, Homo sapiens
catagaaattcagcg

SEQ ID NO: 90389 - DNA, 15 bp, Homo sapiens
ccatagaaattcagc

SEQ ID NO: 90390 - DNA, 15 bp, Homo sapiens
tccatagaaattcag

SEQ ID NO: 90391 - DNA, 15 bp, Homo sapiens
atccatagaaattca

SEQ ID NO: 90392 - DNA, 15 bp, Homo sapiens
aatccatagaaattc

SEQ ID NO: 90393 - DNA, 15 bp, Homo sapiens
gaatccatagaaatt

SEQ ID NO: 90394 - DNA, 15 bp, Homo sapiens
tgaatccatagaaat

SEQ ID NO: 90395 - DNA, 15 bp, Homo sapiens
atgaatccatagaaa

SEQ ID NO: 90396 - DNA, 15 bp, Homo sapiens
aatgaatccatagaa

SEQ ID NO: 90397 - DNA, 15 bp, Homo sapiens
gaatgaatccataga

SEQ ID NO: 90398 - DNA, 15 bp, Homo sapiens
agaatgaatccatag

SEQ ID NO: 90399 - DNA, 15 bp, Homo sapiens
tagaatgaatccata

SEQ ID NO: 90400 - DNA, 15 bp, Homo sapiens
gtagaatgaatccat

SEQ ID NO: 90401 - DNA, 15 bp, Homo sapiens
tgtagaatgaatcca

SEQ ID NO: 90402 - DNA, 15 bp, Homo sapiens
atgtagaatgaatcc

SEQ ID NO: 90403 - DNA, 15 bp, Homo sapiens
aatgtagaatgaatc

SEQ ID NO: 90404 - DNA, 15 bp, Homo sapiens
caatgtagaatgaat

SEQ ID NO: 90405 - DNA, 15 bp, Homo sapiens
acaatgtagaatgaa

SEQ ID NO: 90406 - DNA, 15 bp, Homo sapiens
cacaatgtagaatga

SEQ ID NO: 90407 - DNA, 15 bp, Homo sapiens
tcacaatgtagaatg

SEQ ID NO: 90408 - DNA, 15 bp, Homo sapiens
ctcacaatgtagaat

SEQ ID NO: 90409 - DNA, 15 bp, Homo sapiens
actcacaatgtagaa

SEQ ID NO: 90410 - DNA, 15 bp, Homo sapiens
gactcacaatgtaga

SEQ ID NO: 90411 - DNA, 15 bp, Homo sapiens
tgactcacaatgtag

SEQ ID NO: 90412 - DNA, 15 bp, Homo sapiens
ctgactcacaatgta

SEQ ID NO: 90413 - DNA, 15 bp, Homo sapiens
tctgactcacaatgt

SEQ ID NO: 90414 - DNA, 15 bp, Homo sapiens
atctgactcacaatg

SEQ ID NO: 90415 - DNA, 15 bp, Homo sapiens
aatctgactcacaat

SEQ ID NO: 90416 - DNA, 15 bp, Homo sapiens
aaatctgactcacaa

SEQ ID NO: 90417 - DNA, 15 bp, Homo sapiens
gaaatctgactcaca

SEQ ID NO: 90418 - DNA, 15 bp, Homo sapiens
tgaaatctgactcac

SEQ ID NO: 90419 - DNA, 15 bp, Homo sapiens
gtgaaatctgactca

SEQ ID NO: 90420 - DNA, 15 bp, Homo sapiens
agtgaaatctgactc

SEQ ID NO: 90421 - DNA, 15 bp, Homo sapiens
aagtgaaatctgact

SEQ ID NO: 90422 - DNA, 15 bp, Homo sapiens
aaagtgaaatctgac

SEQ ID NO: 90423 - DNA, 15 bp, Homo sapiens
aaaagtgaaatctga

SEQ ID NO: 90424 - DNA, 15 bp, Homo sapiens
aaaaagtgaaatctg

SEQ ID NO: 90425 - DNA, 15 bp, Homo sapiens
caaaaagtgaaatct

SEQ ID NO: 90426 - DNA, 15 bp, Homo sapiens
tcaaaaagtgaaatc

SEQ ID NO: 90427 - DNA, 15 bp, Homo sapiens
gtcaaaaagtgaaat

SEQ ID NO: 90428 - DNA, 15 bp, Homo sapiens
ggtcaaaaagtgaaa

SEQ ID NO: 90429 - DNA, 15 bp, Homo sapiens
aggtcaaaaagtgaa

SEQ ID NO: 90430 - DNA, 15 bp, Homo sapiens
taggtcaaaaagtga

SEQ ID NO: 90431 - DNA, 15 bp, Homo sapiens
ataggtcaaaaagtg

SEQ ID NO: 90432 - DNA, 15 bp, Homo sapiens
aataggtcaaaaagt

SEQ ID NO: 90433 - DNA, 15 bp, Homo sapiens
aaataggtcaaaaag

SEQ ID NO: 90434 - DNA, 15 bp, Homo sapiens
aaaataggtcaaaaa

SEQ ID NO: 90435 - DNA, 15 bp, Homo sapiens
taaaataggtcaaaa

SEQ ID NO: 90436 - DNA, 15 bp, Homo sapiens
ttaaaataggtcaaa

SEQ ID NO: 90437 - DNA, 15 bp, Homo sapiens
attaaaataggtcaa

SEQ ID NO: 90438 - DNA, 15 bp, Homo sapiens
tattaaaataggtca

SEQ ID NO: 90439 - DNA, 15 bp, Homo sapiens
atattaaaataggtc

SEQ ID NO: 90440 - DNA, 15 bp, Homo sapiens
catattaaaataggt

SEQ ID NO: 90441 - DNA, 15 bp, Homo sapiens
gcatattaaaatagg

SEQ ID NO: 90442 - DNA, 15 bp, Homo sapiens
agcatattaaaatag

SEQ ID NO: 90443 - DNA, 15 bp, Homo sapiens
cagcatattaaaata

SEQ ID NO: 90444 - DNA, 15 bp, Homo sapiens
acagcatattaaaat

SEQ ID NO: 90445 - DNA, 15 bp, Homo sapiens
aacagcatattaaaa

SEQ ID NO: 90446 - DNA, 15 bp, Homo sapiens
caacagcatattaaa

SEQ ID NO: 90447 - DNA, 15 bp, Homo sapiens
gcaacagcatattaa

SEQ ID NO: 90448 - DNA, 15 bp, Homo sapiens
tgcaacagcatatta

SEQ ID NO: 90449 - DNA, 15 bp, Homo sapiens
ttgcaacagcatatt

SEQ ID NO: 90450 - DNA, 15 bp, Homo sapiens
tttgcaacagcatat

SEQ ID NO: 90451 - DNA, 15 bp, Homo sapiens
atttgcaacagcata

SEQ ID NO: 90452 - DNA, 15 bp, Homo sapiens
catttgcaacagcat

SEQ ID NO: 90453 - DNA, 15 bp, Homo sapiens
acatttgcaacagca

SEQ ID NO: 90454 - DNA, 15 bp, Homo sapiens
gacatttgcaacagc

SEQ ID NO: 90455 - DNA, 15 bp, Homo sapiens
agacatttgcaacag

SEQ ID NO: 90456 - DNA, 15 bp, Homo sapiens
cagacatttgcaaca

SEQ ID NO: 90457 - DNA, 15 bp, Homo sapiens
acagacatttgcaac

SEQ ID NO: 90458 - DNA, 15 bp, Homo sapiens
tacagacatttgcaa

SEQ ID NO: 90459 - DNA, 15 bp, Homo sapiens
ttacagacatttgca

SEQ ID NO: 90460 - DNA, 15 bp, Homo sapiens
cttacagacatttgc

SEQ ID NO: 90461 - DNA, 15 bp, Homo sapiens
tcttacagacatttg

SEQ ID NO: 90462 - DNA, 15 bp, Homo sapiens
ctcttacagacattt

SEQ ID NO: 90463 - DNA, 15 bp, Homo sapiens
tctcttacagacatt

SEQ ID NO: 90464 - DNA, 15 bp, Homo sapiens
ctctcttacagacat

SEQ ID NO: 90465 - DNA, 15 bp, Homo sapiens
tctctcttacagaca

SEQ ID NO: 90466 - DNA, 15 bp, Homo sapiens
ttctctcttacagac

SEQ ID NO: 90467 - DNA, 15 bp, Homo sapiens
tttctctcttacaga

SEQ ID NO: 90468 - DNA, 15 bp, Homo sapiens
ttttctctcttacag

SEQ ID NO: 90469 - DNA, 15 bp, Homo sapiens
attttctctcttaca

SEQ ID NO: 90470 - DNA, 15 bp, Homo sapiens
tattttctctcttac

SEQ ID NO: 90471 - DNA, 15 bp, Homo sapiens
gtattttctctctta

SEQ ID NO: 90472 - DNA, 15 bp, Homo sapiens
tgtattttctctctt

SEQ ID NO: 90473 - DNA, 15 bp, Homo sapiens
atgtattttctctct

SEQ ID NO: 90474 - DNA, 15 bp, Homo sapiens
aatgtattttctctc

SEQ ID NO: 90475 - DNA, 15 bp, Homo sapiens
aaatgtattttctct

SEQ ID NO: 90476 - DNA, 15 bp, Homo sapiens
aaaatgtattttctc

SEQ ID NO: 90477 - DNA, 15 bp, Homo sapiens
taaaatgtattttct

SEQ ID NO: 90478 - DNA, 15 bp, Homo sapiens
ctaaaatgtattttc

SEQ ID NO: 90479 - DNA, 15 bp, Homo sapiens
actaaaatgtatttt

SEQ ID NO: 90480 - DNA, 15 bp, Homo sapiens
cactaaaatgtattt

SEQ ID NO: 90481 - DNA, 15 bp, Homo sapiens
ccactaaaatgtatt

SEQ ID NO: 90482 - DNA, 15 bp, Homo sapiens
gccactaaaatgtat

SEQ ID NO: 90483 - DNA, 15 bp, Homo sapiens
tgccactaaaatgta

SEQ ID NO: 90484 - DNA, 15 bp, Homo sapiens
ttgccactaaaatgt

SEQ ID NO: 90485 - DNA, 15 bp, Homo sapiens
tttgccactaaaatg

SEQ ID NO: 90486 - DNA, 15 bp, Homo sapiens
gtttgccactaaaat

SEQ ID NO: 90487 - DNA, 15 bp, Homo sapiens
cgtttgccactaaaa

SEQ ID NO: 90488 - DNA, 15 bp, Homo sapiens
gcgtttgccactaaa

SEQ ID NO: 90489 - DNA, 15 bp, Homo sapiens
tgcgtttgccactaa

SEQ ID NO: 90490 - DNA, 15 bp, Homo sapiens
atgcgtttgccacta

SEQ ID NO: 90491 - DNA, 15 bp, Homo sapiens
aatgcgtttgccact

SEQ ID NO: 90492 - DNA, 15 bp, Homo sapiens
taatgcgtttgccac

SEQ ID NO: 90493 - DNA, 15 bp, Homo sapiens
ctaatgcgtttgcca

SEQ ID NO: 90494 - DNA, 15 bp, Homo sapiens
tctaatgcgtttgcc

SEQ ID NO: 90495 - DNA, 15 bp, Homo sapiens
atctaatgcgtttgc

SEQ ID NO: 90496 - DNA, 15 bp, Homo sapiens
aatctaatgcgtttg

SEQ ID NO: 90497 - DNA, 15 bp, Homo sapiens
caatctaatgcgttt

SEQ ID NO: 90498 - DNA, 15 bp, Homo sapiens
tcaatctaatgcgtt

SEQ ID NO: 90499 - DNA, 15 bp, Homo sapiens
ttcaatctaatgcgt

SEQ ID NO: 90500 - DNA, 15 bp, Homo sapiens
cttcaatctaatgcg

SEQ ID NO: 90501 - DNA, 15 bp, Homo sapiens
ccttcaatctaatgc

SEQ ID NO: 90502 - DNA, 15 bp, Homo sapiens
accttcaatctaatg

SEQ ID NO: 90503 - DNA, 15 bp, Homo sapiens
gaccttcaatctaat

SEQ ID NO: 90504 - DNA, 15 bp, Homo sapiens
tgaccttcaatctaa

SEQ ID NO: 90505 - DNA, 15 bp, Homo sapiens
ctgaccttcaatcta

SEQ ID NO: 90506 - DNA, 15 bp, Homo sapiens
cctgaccttcaatct

SEQ ID NO: 90507 - DNA, 15 bp, Homo sapiens
ccctgaccttcaatc

SEQ ID NO: 90508 - DNA, 15 bp, Homo sapiens
gccctgaccttcaat

SEQ ID NO: 90509 - DNA, 15 bp, Homo sapiens
tgccctgaccttcaa

SEQ ID NO: 90510 - DNA, 15 bp, Homo sapiens
gtgccctgaccttca

SEQ ID NO: 90511 - DNA, 15 bp, Homo sapiens
ggtgccctgaccttc

SEQ ID NO: 90512 - DNA, 15 bp, Homo sapiens
aggtgccctgacctt

SEQ ID NO: 90513 - DNA, 15 bp, Homo sapiens
aaggtgccctgacct

SEQ ID NO: 90514 - DNA, 15 bp, Homo sapiens
aaaggtgccctgacc

SEQ ID NO: 90515 - DNA, 15 bp, Homo sapiens
caaaggtgccctgac

SEQ ID NO: 90516 - DNA, 15 bp, Homo sapiens
ccaaaggtgccctga

SEQ ID NO: 90517 - DNA, 15 bp, Homo sapiens
gccaaaggtgccctg

SEQ ID NO: 90518 - DNA, 15 bp, Homo sapiens
agccaaaggtgccct

SEQ ID NO: 90519 - DNA, 15 bp, Homo sapiens
aagccaaaggtgccc

SEQ ID NO: 90520 - DNA, 15 bp, Homo sapiens
gaagccaaaggtgcc

SEQ ID NO: 90521 - DNA, 15 bp, Homo sapiens
ggaagccaaaggtgc

SEQ ID NO: 90522 - DNA, 15 bp, Homo sapiens
aggaagccaaaggtg

SEQ ID NO: 90523 - DNA, 15 bp, Homo sapiens
caggaagccaaaggt

SEQ ID NO: 90524 - DNA, 15 bp, Homo sapiens
acaggaagccaaagg

SEQ ID NO: 90525 - DNA, 15 bp, Homo sapiens
cacaggaagccaaag

SEQ ID NO: 90526 - DNA, 15 bp, Homo sapiens
tcacaggaagccaaa

SEQ ID NO: 90527 - DNA, 15 bp, Homo sapiens
ctcacaggaagccaa

SEQ ID NO: 90528 - DNA, 15 bp, Homo sapiens
tctcacaggaagcca

SEQ ID NO: 90529 - DNA, 15 bp, Homo sapiens
ttctcacaggaagcc

SEQ ID NO: 90530 - DNA, 15 bp, Homo sapiens
tttctcacaggaagc

SEQ ID NO: 90531 - DNA, 15 bp, Homo sapiens
ttttctcacaggaag

SEQ ID NO: 90532 - DNA, 15 bp, Homo sapiens
gttttctcacaggaa

SEQ ID NO: 90533 - DNA, 15 bp, Homo sapiens
ggttttctcacagga

SEQ ID NO: 90534 - DNA, 15 bp, Homo sapiens
tggttttctcacagg

SEQ ID NO: 90535 - DNA, 15 bp, Homo sapiens
gtggttttctcacag

SEQ ID NO: 90536 - DNA, 15 bp, Homo sapiens
agtggttttctcaca

SEQ ID NO: 90537 - DNA, 15 bp, Homo sapiens
aagtggttttctcac

SEQ ID NO: 90538 - DNA, 15 bp, Homo sapiens
gaagtggttttctca

SEQ ID NO: 90539 - DNA, 15 bp, Homo sapiens
tgaagtggttttctc

SEQ ID NO: 90540 - DNA, 15 bp, Homo sapiens
ctgaagtggttttct

SEQ ID NO: 90541 - DNA, 15 bp, Homo sapiens
cctgaagtggttttc

SEQ ID NO: 90542 - DNA, 15 bp, Homo sapiens
gcctgaagtggtttt

SEQ ID NO: 90543 - DNA, 15 bp, Homo sapiens
ggcctgaagtggttt

SEQ ID NO: 90544 - DNA, 15 bp, Homo sapiens
gggcctgaagtggtt

SEQ ID NO: 90545 - DNA, 15 bp, Homo sapiens
agggcctgaagtggt

SEQ ID NO: 90546 - DNA, 15 bp, Homo sapiens
cagggcctgaagtgg

SEQ ID NO: 90547 - DNA, 15 bp, Homo sapiens
tcagggcctgaagtg

SEQ ID NO: 90548 - DNA, 15 bp, Homo sapiens
ttcagggcctgaagt

SEQ ID NO: 90549 - DNA, 15 bp, Homo sapiens
gttcagggcctgaag

SEQ ID NO: 90550 - DNA, 15 bp, Homo sapiens
ggttcagggcctgaa

SEQ ID NO: 90551 - DNA, 15 bp, Homo sapiens
aggttcagggcctga

SEQ ID NO: 90552 - DNA, 15 bp, Homo sapiens
gaggttcagggcctg

SEQ ID NO: 90553 - DNA, 15 bp, Homo sapiens
tgaggttcagggcct

SEQ ID NO: 90554 - DNA, 15 bp, Homo sapiens
ctgaggttcagggcc

SEQ ID NO: 90555 - DNA, 15 bp, Homo sapiens
actgaggttcagggc

SEQ ID NO: 90556 - DNA, 15 bp, Homo sapiens
aactgaggttcaggg

SEQ ID NO: 90557 - DNA, 15 bp, Homo sapiens
aaactgaggttcagg

SEQ ID NO: 90558 - DNA, 15 bp, Homo sapiens
gaaactgaggttcag

SEQ ID NO: 90559 - DNA, 15 bp, Homo sapiens
ggaaactgaggttca

SEQ ID NO: 90560 - DNA, 15 bp, Homo sapiens
aggaaactgaggttc

SEQ ID NO: 90561 - DNA, 15 bp, Homo sapiens
caggaaactgaggtt

SEQ ID NO: 90562 - DNA, 15 bp, Homo sapiens
gcaggaaactgaggt

SEQ ID NO: 90563 - DNA, 15 bp, Homo sapiens
tgcaggaaactgagg

SEQ ID NO: 90564 - DNA, 15 bp, Homo sapiens
ctgcaggaaactgag

SEQ ID NO: 90565 - DNA, 15 bp, Homo sapiens
tctgcaggaaactga

SEQ ID NO: 90566 - DNA, 15 bp, Homo sapiens
ttctgcaggaaactg

SEQ ID NO: 90567 - DNA, 15 bp, Homo sapiens
gttctgcaggaaact

SEQ ID NO: 90568 - DNA, 15 bp, Homo sapiens
cgttctgcaggaaac

SEQ ID NO: 90569 - DNA, 15 bp, Homo sapiens
tcgttctgcaggaaa

SEQ ID NO: 90570 - DNA, 15 bp, Homo sapiens
ttcgttctgcaggaa

SEQ ID NO: 90571 - DNA, 15 bp, Homo sapiens
tttcgttctgcagga

SEQ ID NO: 90572 - DNA, 15 bp, Homo sapiens
ctttcgttctgcagg

SEQ ID NO: 90573 - DNA, 15 bp, Homo sapiens
tctttcgttctgcag

SEQ ID NO: 90574 - DNA, 15 bp, Homo sapiens
ctctttcgttctgca

SEQ ID NO: 90575 - DNA, 15 bp, Homo sapiens
tctctttcgttctgc

SEQ ID NO: 90576 - DNA, 15 bp, Homo sapiens
ttctctttcgttctg

SEQ ID NO: 90577 - DNA, 15 bp, Homo sapiens
cttctctttcgttct

SEQ ID NO: 90578 - DNA, 15 bp, Homo sapiens
tcttctctttcgttc

SEQ ID NO: 90579 - DNA, 15 bp, Homo sapiens
ttcttctctttcgtt

SEQ ID NO: 90580 - DNA, 15 bp, Homo sapiens
gttcttctctttcgt

SEQ ID NO: 90581 - DNA, 15 bp, Homo sapiens
agttcttctctttcg

SEQ ID NO: 90582 - DNA, 15 bp, Homo sapiens
gagttcttctctttc

SEQ ID NO: 90583 - DNA, 15 bp, Homo sapiens
agagttcttctcttt

SEQ ID NO: 90584 - DNA, 15 bp, Homo sapiens
cagagttcttctctt

SEQ ID NO: 90585 - DNA, 15 bp, Homo sapiens
acagagttcttctct

SEQ ID NO: 90586 - DNA, 15 bp, Homo sapiens
gacagagttcttctc

SEQ ID NO: 90587 - DNA, 15 bp, Homo sapiens
tgacagagttcttct

SEQ ID NO: 90588 - DNA, 15 bp, Homo sapiens
ctgacagagttcttc

SEQ ID NO: 90589 - DNA, 15 bp, Homo sapiens
gctgacagagttctt

SEQ ID NO: 90590 - DNA, 15 bp, Homo sapiens
tgctgacagagttct

SEQ ID NO: 90591 - DNA, 15 bp, Homo sapiens
ttgctgacagagttc

SEQ ID NO: 90592 - DNA, 15 bp, Homo sapiens
cttgctgacagagtt

SEQ ID NO: 90593 - DNA, 15 bp, Homo sapiens
tcttgctgacagagt

SEQ ID NO: 90594 - DNA, 15 bp, Homo sapiens
ctcttgctgacagag

SEQ ID NO: 90595 - DNA, 15 bp, Homo sapiens
cctcttgctgacaga

SEQ ID NO: 90596 - DNA, 15 bp, Homo sapiens
gcctcttgctgacag

SEQ ID NO: 90597 - DNA, 15 bp, Homo sapiens
ggcctcttgctgaca

SEQ ID NO: 90598 - DNA, 15 bp, Homo sapiens
tggcctcttgctgac

SEQ ID NO: 90599 - DNA, 15 bp, Homo sapiens
ctggcctcttgctga

SEQ ID NO: 90600 - DNA, 15 bp, Homo sapiens
gctggcctcttgctg

SEQ ID NO: 90601 - DNA, 15 bp, Homo sapiens
ggctggcctcttgct

SEQ ID NO: 90602 - DNA, 15 bp, Homo sapiens
gggctggcctcttgc

SEQ ID NO: 90603 - DNA, 15 bp, Homo sapiens
agggctggcctcttg

SEQ ID NO: 90604 - DNA, 15 bp, Homo sapiens
cagggctggcctctt

SEQ ID NO: 90605 - DNA, 15 bp, Homo sapiens
tcagggctggcctct

SEQ ID NO: 90606 - DNA, 15 bp, Homo sapiens
gtcagggctggcctc

SEQ ID NO: 90607 - DNA, 15 bp, Homo sapiens
agtcagggctggcct

SEQ ID NO: 90608 - DNA, 15 bp, Homo sapiens
gagtcagggctggcc

SEQ ID NO: 90609 - DNA, 15 bp, Homo sapiens
agagtcagggctggc

SEQ ID NO: 90610 - DNA, 15 bp, Homo sapiens
cagagtcagggctgg

SEQ ID NO: 90611 - DNA, 15 bp, Homo sapiens
ccagagtcagggctg

SEQ ID NO: 90612 - DNA, 15 bp, Homo sapiens
tccagagtcagggct

SEQ ID NO: 90613 - DNA, 15 bp, Homo sapiens
ctccagagtcagggc

SEQ ID NO: 90614 - DNA, 15 bp, Homo sapiens
tctccagagtcaggg

SEQ ID NO: 90615 - DNA, 15 bp, Homo sapiens
atctccagagtcagg

SEQ ID NO: 90616 - DNA, 15 bp, Homo sapiens
gatctccagagtcag

SEQ ID NO: 90617 - DNA, 15 bp, Homo sapiens
agatctccagagtca

SEQ ID NO: 90618 - DNA, 15 bp, Homo sapiens
aagatctccagagtc

SEQ ID NO: 90619 - DNA, 15 bp, Homo sapiens
caagatctccagagt

SEQ ID NO: 90620 - DNA, 15 bp, Homo sapiens
ccaagatctccagag

SEQ ID NO: 90621 - DNA, 15 bp, Homo sapiens
gccaagatctccaga

SEQ ID NO: 90622 - DNA, 15 bp, Homo sapiens
ggccaagatctccag

SEQ ID NO: 90623 - DNA, 15 bp, Homo sapiens
aggccaagatctcca

SEQ ID NO: 90624 - DNA, 15 bp, Homo sapiens
gaggccaagatctcc

SEQ ID NO: 90625 - DNA, 15 bp, Homo sapiens
agaggccaagatctc

SEQ ID NO: 90626 - DNA, 15 bp, Homo sapiens
tagaggccaagatct

SEQ ID NO: 90627 - DNA, 15 bp, Homo sapiens
ttagaggccaagatc

SEQ ID NO: 90628 - DNA, 15 bp, Homo sapiens
cttagaggccaagat

SEQ ID NO: 90629 - DNA, 15 bp, Homo sapiens
ccttagaggccaaga

SEQ ID NO: 90630 - DNA, 15 bp, Homo sapiens
tccttagaggccaag

SEQ ID NO: 90631 - DNA, 15 bp, Homo sapiens
ctccttagaggccaa

SEQ ID NO: 90632 - DNA, 15 bp, Homo sapiens
tctccttagaggcca

SEQ ID NO: 90633 - DNA, 15 bp, Homo sapiens
atctccttagaggcc

SEQ ID NO: 90634 - DNA, 15 bp, Homo sapiens
catctccttagaggc

SEQ ID NO: 90635 - DNA, 15 bp, Homo sapiens
tcatctccttagagg

SEQ ID NO: 90636 - DNA, 15 bp, Homo sapiens
gtcatctccttagag

SEQ ID NO: 90637 - DNA, 15 bp, Homo sapiens
tgtcatctccttaga

SEQ ID NO: 90638 - DNA, 15 bp, Homo sapiens
ctgtcatctccttag

SEQ ID NO: 90639 - DNA, 15 bp, Homo sapiens
cctgtcatctcctta

SEQ ID NO: 90640 - DNA, 15 bp, Homo sapiens
tcctgtcatctcctt

SEQ ID NO: 90641 - DNA, 15 bp, Homo sapiens
ctcctgtcatctcct

SEQ ID NO: 90642 - DNA, 15 bp, Homo sapiens
gctcctgtcatctcc

SEQ ID NO: 90643 - DNA, 15 bp, Homo sapiens
tgctcctgtcatctc

SEQ ID NO: 90644 - DNA, 15 bp, Homo sapiens
gtgctcctgtcatct

SEQ ID NO: 90645 - DNA, 15 bp, Homo sapiens
agtgctcctgtcatc

SEQ ID NO: 90646 - DNA, 15 bp, Homo sapiens
gagtgctcctgtcat

SEQ ID NO: 90647 - DNA, 15 bp, Homo sapiens
tgagtgctcctgtca

SEQ ID NO: 90648 - DNA, 15 bp, Homo sapiens
gtgagtgctcctgtc

SEQ ID NO: 90649 - DNA, 15 bp, Homo sapiens
tgtgagtgctcctgt

SEQ ID NO: 90650 - DNA, 15 bp, Homo sapiens
atgtgagtgctcctg

SEQ ID NO: 90651 - DNA, 15 bp, Homo sapiens
aatgtgagtgctcct

SEQ ID NO: 90652 - DNA, 15 bp, Homo sapiens
caatgtgagtgctcc

SEQ ID NO: 90653 - DNA, 15 bp, Homo sapiens
gcaatgtgagtgctc

SEQ ID NO: 90654 - DNA, 15 bp, Homo sapiens
cgcaatgtgagtgct

SEQ ID NO: 90655 - DNA, 15 bp, Homo sapiens
tcgcaatgtgagtgc

SEQ ID NO: 90656 - DNA, 15 bp, Homo sapiens
ctcgcaatgtgagtg

SEQ ID NO: 90657 - DNA, 15 bp, Homo sapiens
cctcgcaatgtgagt

SEQ ID NO: 90658 - DNA, 15 bp, Homo sapiens
ccctcgcaatgtgag

SEQ ID NO: 90659 - DNA, 15 bp, Homo sapiens
gccctcgcaatgtga

SEQ ID NO: 90660 - DNA, 15 bp, Homo sapiens
agccctcgcaatgtg

SEQ ID NO: 90661 - DNA, 15 bp, Homo sapiens
gagccctcgcaatgt

SEQ ID NO: 90662 - DNA, 15 bp, Homo sapiens
tgagccctcgcaatg

SEQ ID NO: 90663 - DNA, 15 bp, Homo sapiens
ttgagccctcgcaat

SEQ ID NO: 90664 - DNA, 15 bp, Homo sapiens
cttgagccctcgcaa

SEQ ID NO: 90665 - DNA, 15 bp, Homo sapiens
tcttgagccctcgca

SEQ ID NO: 90666 - DNA, 15 bp, Homo sapiens
ctcttgagccctcgc

SEQ ID NO: 90667 - DNA, 15 bp, Homo sapiens
gctcttgagccctcg

SEQ ID NO: 90668 - DNA, 15 bp, Homo sapiens
ggctcttgagccctc

SEQ ID NO: 90669 - DNA, 15 bp, Homo sapiens
tggctcttgagccct

SEQ ID NO: 90670 - DNA, 15 bp, Homo sapiens
gtggctcttgagccc

SEQ ID NO: 90671 - DNA, 15 bp, Homo sapiens
agtggctcttgagcc

SEQ ID NO: 90672 - DNA, 15 bp, Homo sapiens
cagtggctcttgagc

SEQ ID NO: 90673 - DNA, 15 bp, Homo sapiens
acagtggctcttgag

SEQ ID NO: 90674 - DNA, 15 bp, Homo sapiens
gacagtggctcttga

SEQ ID NO: 90675 - DNA, 15 bp, Homo sapiens
ggacagtggctcttg

SEQ ID NO: 90676 - DNA, 15 bp, Homo sapiens
aggacagtggctctt

SEQ ID NO: 90677 - DNA, 15 bp, Homo sapiens
aaggacagtggctct

SEQ ID NO: 90678 - DNA, 15 bp, Homo sapiens
aaaggacagtggctc

SEQ ID NO: 90679 - DNA, 15 bp, Homo sapiens
caaaggacagtggct

SEQ ID NO: 90680 - DNA, 15 bp, Homo sapiens
tcaaaggacagtggc

SEQ ID NO: 90681 - DNA, 15 bp, Homo sapiens
atcaaaggacagtgg

SEQ ID NO: 90682 - DNA, 15 bp, Homo sapiens
tatcaaaggacagtg

SEQ ID NO: 90683 - DNA, 15 bp, Homo sapiens
atatcaaaggacagt

SEQ ID NO: 90684 - DNA, 15 bp, Homo sapiens
catatcaaaggacag

SEQ ID NO: 90685 - DNA, 15 bp, Homo sapiens
acatatcaaaggaca

SEQ ID NO: 90686 - DNA, 15 bp, Homo sapiens
aacatatcaaaggac

SEQ ID NO: 90687 - DNA, 15 bp, Homo sapiens
gaacatatcaaagga

SEQ ID NO: 90688 - DNA, 15 bp, Homo sapiens
agaacatatcaaagg

SEQ ID NO: 90689 - DNA, 15 bp, Homo sapiens
tagaacatatcaaag

SEQ ID NO: 90690 - DNA, 15 bp, Homo sapiens
gtagaacatatcaaa

SEQ ID NO: 90691 - DNA, 15 bp, Homo sapiens
tgtagaacatatcaa

SEQ ID NO: 90692 - DNA, 15 bp, Homo sapiens
atgtagaacatatca

SEQ ID NO: 90693 - DNA, 15 bp, Homo sapiens
tatgtagaacatatc

SEQ ID NO: 90694 - DNA, 15 bp, Homo sapiens
gtatgtagaacatat

SEQ ID NO: 90695 - DNA, 15 bp, Homo sapiens
agtatgtagaacata

SEQ ID NO: 90696 - DNA, 15 bp, Homo sapiens
cagtatgtagaacat

SEQ ID NO: 90697 - DNA, 15 bp, Homo sapiens
tcagtatgtagaaca

SEQ ID NO: 90698 - DNA, 15 bp, Homo sapiens
ctcagtatgtagaac

SEQ ID NO: 90699 - DNA, 15 bp, Homo sapiens
actcagtatgtagaa

SEQ ID NO: 90700 - DNA, 15 bp, Homo sapiens
aactcagtatgtaga

SEQ ID NO: 90701 - DNA, 15 bp, Homo sapiens
aaactcagtatgtag

SEQ ID NO: 90702 - DNA, 15 bp, Homo sapiens
aaaactcagtatgta

SEQ ID NO: 90703 - DNA, 15 bp, Homo sapiens
taaaactcagtatgt

SEQ ID NO: 90704 - DNA, 15 bp, Homo sapiens
ataaaactcagtatg

SEQ ID NO: 90705 - DNA, 15 bp, Homo sapiens
aataaaactcagtat

SEQ ID NO: 90706 - DNA, 15 bp, Homo sapiens
aaataaaactcagta

SEQ ID NO: 90707 - DNA, 15 bp, Homo sapiens
gaaataaaactcagt

SEQ ID NO: 90708 - DNA, 15 bp, Homo sapiens
tgaaataaaactcag

SEQ ID NO: 90709 - DNA, 15 bp, Homo sapiens
atgaaataaaactca

SEQ ID NO: 90710 - DNA, 15 bp, Homo sapiens
aatgaaataaaactc

SEQ ID NO: 90711 - DNA, 15 bp, Homo sapiens
aaatgaaataaaact

SEQ ID NO: 90712 - DNA, 15 bp, Homo sapiens
caaatgaaataaaac

SEQ ID NO: 90713 - DNA, 15 bp, Homo sapiens
acaaatgaaataaaa

SEQ ID NO: 90714 - DNA, 15 bp, Homo sapiens
cacaaatgaaataaa

SEQ ID NO: 90715 - DNA, 15 bp, Homo sapiens
ccacaaatgaaataa

SEQ ID NO: 90716 - DNA, 15 bp, Homo sapiens
tccacaaatgaaata

SEQ ID NO: 90717 - DNA, 15 bp, Homo sapiens
atccacaaatgaaat

SEQ ID NO: 90718 - DNA, 15 bp, Homo sapiens
tatccacaaatgaaa

SEQ ID NO: 90719 - DNA, 15 bp, Homo sapiens
ctatccacaaatgaa

SEQ ID NO: 90720 - DNA, 15 bp, Homo sapiens
cctatccacaaatga

SEQ ID NO: 90721 - DNA, 15 bp, Homo sapiens
ccctatccacaaatg

SEQ ID NO: 90722 - DNA, 15 bp, Homo sapiens
tccctatccacaaat

SEQ ID NO: 90723 - DNA, 15 bp, Homo sapiens
atccctatccacaaa

SEQ ID NO: 90724 - DNA, 15 bp, Homo sapiens
gatccctatccacaa

SEQ ID NO: 90725 - DNA, 15 bp, Homo sapiens
ggatccctatccaca

SEQ ID NO: 90726 - DNA, 15 bp, Homo sapiens
tggatccctatccac

SEQ ID NO: 90727 - DNA, 15 bp, Homo sapiens
gtggatccctatcca

SEQ ID NO: 90728 - DNA, 15 bp, Homo sapiens
agtggatccctatcc

SEQ ID NO: 90729 - DNA, 15 bp, Homo sapiens
aagtggatccctatc

SEQ ID NO: 90730 - DNA, 15 bp, Homo sapiens
aaagtggatccctat

SEQ ID NO: 90731 - DNA, 15 bp, Homo sapiens
aaaagtggatcccta

SEQ ID NO: 90732 - DNA, 15 bp, Homo sapiens
aaaaagtggatccct

SEQ ID NO: 90733 - DNA, 15 bp, Homo sapiens
caaaaagtggatccc

SEQ ID NO: 90734 - DNA, 15 bp, Homo sapiens
ccaaaaagtggatcc

SEQ ID NO: 90735 - DNA, 15 bp, Homo sapiens
tccaaaaagtggatc

SEQ ID NO: 90736 - DNA, 15 bp, Homo sapiens
ttccaaaaagtggat

SEQ ID NO: 90737 - DNA, 15 bp, Homo sapiens
cttccaaaaagtgga

SEQ ID NO: 90738 - DNA, 15 bp, Homo sapiens
ccttccaaaaagtgg

SEQ ID NO: 90739 - DNA, 15 bp, Homo sapiens
tccttccaaaaagtg

SEQ ID NO: 90740 - DNA, 15 bp, Homo sapiens
ttccttccaaaaagt

SEQ ID NO: 90741 - DNA, 15 bp, Homo sapiens
cttccttccaaaaag

SEQ ID NO: 90742 - DNA, 15 bp, Homo sapiens
ccttccttccaaaaa

SEQ ID NO: 90743 - DNA, 15 bp, Homo sapiens
tccttccttccaaaa

SEQ ID NO: 90744 - DNA, 15 bp, Homo sapiens
ttccttccttccaaa

SEQ ID NO: 90745 - DNA, 15 bp, Homo sapiens
tttccttccttccaa

SEQ ID NO: 90746 - DNA, 15 bp, Homo sapiens
ttttccttccttcca

SEQ ID NO: 90747 - DNA, 15 bp, Homo sapiens
tttttccttccttcc

SEQ ID NO: 90748 - DNA, 15 bp, Homo sapiens
ttttttccttccttc

SEQ ID NO: 90749 - DNA, 15 bp, Homo sapiens
cttttttccttcctt

SEQ ID NO: 90750 - DNA, 15 bp, Homo sapiens
tcttttttccttcct

SEQ ID NO: 90751 - DNA, 15 bp, Homo sapiens
ttcttttttccttcc

SEQ ID NO: 90752 - DNA, 15 bp, Homo sapiens
cttcttttttccttc

SEQ ID NO: 90753 - DNA, 15 bp, Homo sapiens
ccttcttttttcctt

SEQ ID NO: 90754 - DNA, 15 bp, Homo sapiens
cccttcttttttcct

SEQ ID NO: 90755 - DNA, 15 bp, Homo sapiens
ccccttcttttttcc

SEQ ID NO: 90756 - DNA, 15 bp, Homo sapiens
tccccttcttttttc

SEQ ID NO: 90757 - DNA, 15 bp, Homo sapiens
ttccccttctttttt

SEQ ID NO: 90758 - DNA, 15 bp, Homo sapiens
tttccccttcttttt

SEQ ID NO: 90759 - DNA, 15 bp, Homo sapiens
ttttccccttctttt

SEQ ID NO: 90760 - DNA, 15 bp, Homo sapiens
tttttccccttcttt

SEQ ID NO: 90761 - DNA, 15 bp, Homo sapiens
atttttccccttctt

SEQ ID NO: 90762 - DNA, 15 bp, Homo sapiens
catttttccccttct

SEQ ID NO: 90763 - DNA, 15 bp, Homo sapiens
tcatttttccccttc

SEQ ID NO: 90764 - DNA, 15 bp, Homo sapiens
gtcatttttcccctt

SEQ ID NO: 90765 - DNA, 15 bp, Homo sapiens
agtcatttttcccct

SEQ ID NO: 90766 - DNA, 15 bp, Homo sapiens
tagtcatttttcccc

SEQ ID NO: 90767 - DNA, 15 bp, Homo sapiens
ctagtcatttttccc

SEQ ID NO: 90768 - DNA, 15 bp, Homo sapiens
tctagtcatttttcc

SEQ ID NO: 90769 - DNA, 15 bp, Homo sapiens
ctctagtcatttttc

SEQ ID NO: 90770 - DNA, 15 bp, Homo sapiens
cctctagtcattttt

SEQ ID NO: 90771 - DNA, 15 bp, Homo sapiens
ccctctagtcatttt

SEQ ID NO: 90772 - DNA, 15 bp, Homo sapiens
tccctctagtcattt

SEQ ID NO: 90773 - DNA, 15 bp, Homo sapiens
ctccctctagtcatt

SEQ ID NO: 90774 - DNA, 15 bp, Homo sapiens
tctccctctagtcat

SEQ ID NO: 90775 - DNA, 15 bp, Homo sapiens
ctctccctctagtca

SEQ ID NO: 90776 - DNA, 15 bp, Homo sapiens
tctctccctctagtc

SEQ ID NO: 90777 - DNA, 15 bp, Homo sapiens
ctctctccctctagt

SEQ ID NO: 90778 - DNA, 15 bp, Homo sapiens
tctctctccctctag

SEQ ID NO: 90779 - DNA, 15 bp, Homo sapiens
ctctctctccctcta

SEQ ID NO: 90780 - DNA, 15 bp, Homo sapiens
tctctctctccctct

SEQ ID NO: 90781 - DNA, 15 bp, Homo sapiens
ctctctctctccctc

SEQ ID NO: 90782 - DNA, 15 bp, Homo sapiens
tctctctctctccct

SEQ ID NO: 90783 - DNA, 15 bp, Homo sapiens
ctctctctctctccc

SEQ ID NO: 90784 - DNA, 15 bp, Homo sapiens
cctctctctctctcc

SEQ ID NO: 90785 - DNA, 15 bp, Homo sapiens
ccctctctctctctc

SEQ ID NO: 90786 - DNA, 15 bp, Homo sapiens
tccctctctctctct

SEQ ID NO: 90787 - DNA, 15 bp, Homo sapiens
ttccctctctctctc

SEQ ID NO: 90788 - DNA, 15 bp, Homo sapiens
cttccctctctctct

SEQ ID NO: 90789 - DNA, 15 bp, Homo sapiens
ccttccctctctctc

SEQ ID NO: 90790 - DNA, 15 bp, Homo sapiens
tccttccctctctct

SEQ ID NO: 90791 - DNA, 15 bp, Homo sapiens
ttccttccctctctc

SEQ ID NO: 90792 - DNA, 15 bp, Homo sapiens
cttccttccctctct

SEQ ID NO: 90793 - DNA, 15 bp, Homo sapiens
ccttccttccctctc

SEQ ID NO: 90794 - DNA, 15 bp, Homo sapiens
cccttccttccctct

SEQ ID NO: 90795 - DNA, 15 bp, Homo sapiens
tcccttccttccctc

SEQ ID NO: 90796 - DNA, 15 bp, Homo sapiens
ttcccttccttccct

SEQ ID NO: 90797 - DNA, 15 bp, Homo sapiens
cttcccttccttccc

SEQ ID NO: 90798 - DNA, 15 bp, Homo sapiens
ccttcccttccttcc

SEQ ID NO: 90799 - DNA, 15 bp, Homo sapiens
cccttcccttccttc

SEQ ID NO: 90800 - DNA, 15 bp, Homo sapiens
tcccttcccttcctt

SEQ ID NO: 90801 - DNA, 15 bp, Homo sapiens
ttcccttcccttcct

SEQ ID NO: 90802 - DNA, 15 bp, Homo sapiens
cttcccttcccttcc

SEQ ID NO: 90803 - DNA, 15 bp, Homo sapiens
ccttcccttcccttc

SEQ ID NO: 90804 - DNA, 15 bp, Homo sapiens
tccttcccttccctt

SEQ ID NO: 90805 - DNA, 15 bp, Homo sapiens
ttccttcccttccct

SEQ ID NO: 90806 - DNA, 15 bp, Homo sapiens
cttccttcccttccc

SEQ ID NO: 90807 - DNA, 15 bp, Homo sapiens
tcttccttcccttcc

SEQ ID NO: 90808 - DNA, 15 bp, Homo sapiens
atcttccttcccttc

SEQ ID NO: 90809 - DNA, 15 bp, Homo sapiens
tatcttccttccctt

SEQ ID NO: 90810 - DNA, 15 bp, Homo sapiens
ctatcttccttccct

SEQ ID NO: 90811 - DNA, 15 bp, Homo sapiens
cctatcttccttccc

SEQ ID NO: 90812 - DNA, 15 bp, Homo sapiens
ccctatcttccttcc

SEQ ID NO: 90813 - DNA, 15 bp, Homo sapiens
tccctatcttccttc

SEQ ID NO: 90814 - DNA, 15 bp, Homo sapiens
ctccctatcttcctt

SEQ ID NO: 90815 - DNA, 15 bp, Homo sapiens
cctccctatcttcct

SEQ ID NO: 90816 - DNA, 15 bp, Homo sapiens
ccctccctatcttcc

SEQ ID NO: 90817 - DNA, 15 bp, Homo sapiens
tccctccctatcttc

SEQ ID NO: 90818 - DNA, 15 bp, Homo sapiens
ctccctccctatctt

SEQ ID NO: 90819 - DNA, 15 bp, Homo sapiens
tctccctccctatct

SEQ ID NO: 90820 - DNA, 15 bp, Homo sapiens
ttctccctccctatc

SEQ ID NO: 90821 - DNA, 15 bp, Homo sapiens
tttctccctccctat

SEQ ID NO: 90822 - DNA, 15 bp, Homo sapiens
ttttctccctcccta

SEQ ID NO: 90823 - DNA, 15 bp, Homo sapiens
cttttctccctccct

SEQ ID NO: 90824 - DNA, 15 bp, Homo sapiens
gcttttctccctccc

SEQ ID NO: 90825 - DNA, 15 bp, Homo sapiens
tgcttttctccctcc

SEQ ID NO: 90826 - DNA, 15 bp, Homo sapiens
ttgcttttctccctc

SEQ ID NO: 90827 - DNA, 15 bp, Homo sapiens
cttgcttttctccct

SEQ ID NO: 90828 - DNA, 15 bp, Homo sapiens
ccttgcttttctccc

SEQ ID NO: 90829 - DNA, 15 bp, Homo sapiens
gccttgcttttctcc

SEQ ID NO: 90830 - DNA, 15 bp, Homo sapiens
agccttgcttttctc

SEQ ID NO: 90831 - DNA, 15 bp, Homo sapiens
tagccttgcttttct

SEQ ID NO: 90832 - DNA, 15 bp, Homo sapiens
atagccttgcttttc

SEQ ID NO: 90833 - DNA, 15 bp, Homo sapiens
tatagccttgctttt

SEQ ID NO: 90834 - DNA, 15 bp, Homo sapiens
ttatagccttgcttt

SEQ ID NO: 90835 - DNA, 15 bp, Homo sapiens
cttatagccttgctt

SEQ ID NO: 90836 - DNA, 15 bp, Homo sapiens
ccttatagccttgct

SEQ ID NO: 90837 - DNA, 15 bp, Homo sapiens
tccttatagccttgc

SEQ ID NO: 90838 - DNA, 15 bp, Homo sapiens
ttccttatagccttg

SEQ ID NO: 90839 - DNA, 15 bp, Homo sapiens
cttccttatagcctt

SEQ ID NO: 90840 - DNA, 15 bp, Homo sapiens
ccttccttatagcct

SEQ ID NO: 90841 - DNA, 15 bp, Homo sapiens
tccttccttatagcc

SEQ ID NO: 90842 - DNA, 15 bp, Homo sapiens
ttccttccttatagc

SEQ ID NO: 90843 - DNA, 15 bp, Homo sapiens
cttccttccttatag

SEQ ID NO: 90844 - DNA, 15 bp, Homo sapiens
ccttccttccttata

SEQ ID NO: 90845 - DNA, 15 bp, Homo sapiens
cccttccttccttat

SEQ ID NO: 90846 - DNA, 15 bp, Homo sapiens
tcccttccttcctta

SEQ ID NO: 90847 - DNA, 15 bp, Homo sapiens
ctcccttccttcctt

SEQ ID NO: 90848 - DNA, 15 bp, Homo sapiens
cctcccttccttcct

SEQ ID NO: 90849 - DNA, 15 bp, Homo sapiens
ccctcccttccttcc

SEQ ID NO: 90850 - DNA, 15 bp, Homo sapiens
tccctcccttccttc

SEQ ID NO: 90851 - DNA, 15 bp, Homo sapiens
ttccctcccttcctt

SEQ ID NO: 90852 - DNA, 15 bp, Homo sapiens
cttccctcccttcct

SEQ ID NO: 90853 - DNA, 15 bp, Homo sapiens
ccttccctcccttcc

SEQ ID NO: 90854 - DNA, 15 bp, Homo sapiens
tccttccctcccttc

SEQ ID NO: 90855 - DNA, 15 bp, Homo sapiens
ctccttccctccctt

SEQ ID NO: 90856 - DNA, 15 bp, Homo sapiens
cctccttccctccct

SEQ ID NO: 90857 - DNA, 15 bp, Homo sapiens
tcctccttccctccc

SEQ ID NO: 90858 - DNA, 15 bp, Homo sapiens
ttcctccttccctcc

SEQ ID NO: 90859 - DNA, 15 bp, Homo sapiens
cttcctccttccctc

SEQ ID NO: 90860 - DNA, 15 bp, Homo sapiens
ccttcctccttccct

SEQ ID NO: 90861 - DNA, 15 bp, Homo sapiens
cccttcctccttccc

SEQ ID NO: 90862 - DNA, 15 bp, Homo sapiens
tcccttcctccttcc

SEQ ID NO: 90863 - DNA, 15 bp, Homo sapiens
ctcccttcctccttc

SEQ ID NO: 90864 - DNA, 15 bp, Homo sapiens
cctcccttcctcctt

SEQ ID NO: 90865 - DNA, 15 bp, Homo sapiens
ccctcccttcctcct

SEQ ID NO: 90866 - DNA, 15 bp, Homo sapiens
tccctcccttcctcc

SEQ ID NO: 90867 - DNA, 15 bp, Homo sapiens
atccctcccttcctc

SEQ ID NO: 90868 - DNA, 15 bp, Homo sapiens
catccctcccttcct

SEQ ID NO: 90869 - DNA, 15 bp, Homo sapiens
ccatccctcccttcc

SEQ ID NO: 90870 - DNA, 15 bp, Homo sapiens
cccatccctcccttc

SEQ ID NO: 90871 - DNA, 15 bp, Homo sapiens
tcccatccctccctt

SEQ ID NO: 90872 - DNA, 15 bp, Homo sapiens
ctcccatccctccct

SEQ ID NO: 90873 - DNA, 15 bp, Homo sapiens
cctcccatccctccc

SEQ ID NO: 90874 - DNA, 15 bp, Homo sapiens
tcctcccatccctcc

SEQ ID NO: 90875 - DNA, 15 bp, Homo sapiens
ttcctcccatccctc

SEQ ID NO: 90876 - DNA, 15 bp, Homo sapiens
gttcctcccatccct

SEQ ID NO: 90877 - DNA, 15 bp, Homo sapiens
ggttcctcccatccc

SEQ ID NO: 90878 - DNA, 15 bp, Homo sapiens
gggttcctcccatcc

SEQ ID NO: 90879 - DNA, 15 bp, Homo sapiens
agggttcctcccatc

SEQ ID NO: 90880 - DNA, 15 bp, Homo sapiens
tagggttcctcccat

SEQ ID NO: 90881 - DNA, 15 bp, Homo sapiens
ttagggttcctccca

SEQ ID NO: 90882 - DNA, 15 bp, Homo sapiens
gttagggttcctccc

SEQ ID NO: 90883 - DNA, 15 bp, Homo sapiens
ggttagggttcctcc

SEQ ID NO: 90884 - DNA, 15 bp, Homo sapiens
aggttagggttcctc

SEQ ID NO: 90885 - DNA, 15 bp, Homo sapiens
gaggttagggttcct

SEQ ID NO: 90886 - DNA, 15 bp, Homo sapiens
agaggttagggttcc

SEQ ID NO: 90887 - DNA, 15 bp, Homo sapiens
cagaggttagggttc

SEQ ID NO: 90888 - DNA, 15 bp, Homo sapiens
tcagaggttagggtt

SEQ ID NO: 90889 - DNA, 15 bp, Homo sapiens
ttcagaggttagggt

SEQ ID NO: 90890 - DNA, 15 bp, Homo sapiens
gttcagaggttaggg

SEQ ID NO: 90891 - DNA, 15 bp, Homo sapiens
agttcagaggttagg

SEQ ID NO: 90892 - DNA, 15 bp, Homo sapiens
cagttcagaggttag

SEQ ID NO: 90893 - DNA, 15 bp, Homo sapiens
gcagttcagaggtta

SEQ ID NO: 90894 - DNA, 15 bp, Homo sapiens
agcagttcagaggtt

SEQ ID NO: 90895 - DNA, 15 bp, Homo sapiens
cagcagttcagaggt

SEQ ID NO: 90896 - DNA, 15 bp, Homo sapiens
tcagcagttcagagg

SEQ ID NO: 90897 - DNA, 15 bp, Homo sapiens
ctcagcagttcagag

SEQ ID NO: 90898 - DNA, 15 bp, Homo sapiens
actcagcagttcaga

SEQ ID NO: 90899 - DNA, 15 bp, Homo sapiens
aactcagcagttcag

SEQ ID NO: 90900 - DNA, 15 bp, Homo sapiens
gaactcagcagttca

SEQ ID NO: 90901 - DNA, 15 bp, Homo sapiens
cgaactcagcagttc

SEQ ID NO: 90902 - DNA, 15 bp, Homo sapiens
ccgaactcagcagtt

SEQ ID NO: 90903 - DNA, 15 bp, Homo sapiens
tccgaactcagcagt

SEQ ID NO: 90904 - DNA, 15 bp, Homo sapiens
atccgaactcagcag

SEQ ID NO: 90905 - DNA, 15 bp, Homo sapiens
aatccgaactcagca

SEQ ID NO: 90906 - DNA, 15 bp, Homo sapiens
aaatccgaactcagc

SEQ ID NO: 90907 - DNA, 15 bp, Homo sapiens
aaaatccgaactcag

SEQ ID NO: 90908 - DNA, 15 bp, Homo sapiens
aaaaatccgaactca

SEQ ID NO: 90909 - DNA, 15 bp, Homo sapiens
caaaaatccgaactc

SEQ ID NO: 90910 - DNA, 15 bp, Homo sapiens
acaaaaatccgaact

SEQ ID NO: 90911 - DNA, 15 bp, Homo sapiens
tacaaaaatccgaac

SEQ ID NO: 90912 - DNA, 15 bp, Homo sapiens
ttacaaaaatccgaa

SEQ ID NO: 90913 - DNA, 15 bp, Homo sapiens
cttacaaaaatccga

SEQ ID NO: 90914 - DNA, 15 bp, Homo sapiens
acttacaaaaatccg

SEQ ID NO: 90915 - DNA, 15 bp, Homo sapiens
aacttacaaaaatcc

SEQ ID NO: 90916 - DNA, 15 bp, Homo sapiens
aaacttacaaaaatc

SEQ ID NO: 90917 - DNA, 15 bp, Homo sapiens
gaaacttacaaaaat

SEQ ID NO: 90918 - DNA, 15 bp, Homo sapiens
agaaacttacaaaaa

SEQ ID NO: 90919 - DNA, 15 bp, Homo sapiens
gagaaacttacaaaa

SEQ ID NO: 90920 - DNA, 15 bp, Homo sapiens
ggagaaacttacaaa

SEQ ID NO: 90921 - DNA, 15 bp, Homo sapiens
tggagaaacttacaa

SEQ ID NO: 90922 - DNA, 15 bp, Homo sapiens
ttggagaaacttaca

SEQ ID NO: 90923 - DNA, 15 bp, Homo sapiens
gttggagaaacttac

SEQ ID NO: 90924 - DNA, 15 bp, Homo sapiens
tgttggagaaactta

SEQ ID NO: 90925 - DNA, 15 bp, Homo sapiens
gtgttggagaaactt

SEQ ID NO: 90926 - DNA, 15 bp, Homo sapiens
agtgttggagaaact

SEQ ID NO: 90927 - DNA, 15 bp, Homo sapiens
aagtgttggagaaac

SEQ ID NO: 90928 - DNA, 15 bp, Homo sapiens
gaagtgttggagaaa

SEQ ID NO: 90929 - DNA, 15 bp, Homo sapiens
tgaagtgttggagaa

SEQ ID NO: 90930 - DNA, 15 bp, Homo sapiens
ctgaagtgttggaga

SEQ ID NO: 90931 - DNA, 15 bp, Homo sapiens
cctgaagtgttggag

SEQ ID NO: 90932 - DNA, 15 bp, Homo sapiens
gcctgaagtgttgga

SEQ ID NO: 90933 - DNA, 15 bp, Homo sapiens
agcctgaagtgttgg

SEQ ID NO: 90934 - DNA, 15 bp, Homo sapiens
tagcctgaagtgttg

SEQ ID NO: 90935 - DNA, 15 bp, Homo sapiens
gtagcctgaagtgtt

SEQ ID NO: 90936 - DNA, 15 bp, Homo sapiens
tgtagcctgaagtgt

SEQ ID NO: 90937 - DNA, 15 bp, Homo sapiens
ttgtagcctgaagtg

SEQ ID NO: 90938 - DNA, 15 bp, Homo sapiens
gttgtagcctgaagt

SEQ ID NO: 90939 - DNA, 15 bp, Homo sapiens
ggttgtagcctgaag

SEQ ID NO: 90940 - DNA, 15 bp, Homo sapiens
aggttgtagcctgaa

SEQ ID NO: 90941 - DNA, 15 bp, Homo sapiens
caggttgtagcctga

SEQ ID NO: 90942 - DNA, 15 bp, Homo sapiens
gcaggttgtagcctg

SEQ ID NO: 90943 - DNA, 15 bp, Homo sapiens
agcaggttgtagcct

SEQ ID NO: 90944 - DNA, 15 bp, Homo sapiens
tagcaggttgtagcc

SEQ ID NO: 90945 - DNA, 15 bp, Homo sapiens
gtagcaggttgtagc

SEQ ID NO: 90946 - DNA, 15 bp, Homo sapiens
ggtagcaggttgtag

SEQ ID NO: 90947 - DNA, 15 bp, Homo sapiens
tggtagcaggttgta

SEQ ID NO: 90948 - DNA, 15 bp, Homo sapiens
ttggtagcaggttgt

SEQ ID NO: 90949 - DNA, 15 bp, Homo sapiens
gttggtagcaggttg

SEQ ID NO: 90950 - DNA, 15 bp, Homo sapiens
tgttggtagcaggtt

SEQ ID NO: 90951 - DNA, 15 bp, Homo sapiens
atgttggtagcaggt

SEQ ID NO: 90952 - DNA, 15 bp, Homo sapiens
gatgttggtagcagg

SEQ ID NO: 90953 - DNA, 15 bp, Homo sapiens
tgatgttggtagcag

SEQ ID NO: 90954 - DNA, 15 bp, Homo sapiens
ctgatgttggtagca

SEQ ID NO: 90955 - DNA, 15 bp, Homo sapiens
tctgatgttggtagc

SEQ ID NO: 90956 - DNA, 15 bp, Homo sapiens
ttctgatgttggtag

SEQ ID NO: 90957 - DNA, 15 bp, Homo sapiens
attctgatgttggta

SEQ ID NO: 90958 - DNA, 15 bp, Homo sapiens
aattctgatgttggt

SEQ ID NO: 90959 - DNA, 15 bp, Homo sapiens
taattctgatgttgg

SEQ ID NO: 90960 - DNA, 15 bp, Homo sapiens
ctaattctgatgttg

SEQ ID NO: 90961 - DNA, 15 bp, Homo sapiens
gctaattctgatgtt

SEQ ID NO: 90962 - DNA, 15 bp, Homo sapiens
ggctaattctgatgt

SEQ ID NO: 90963 - DNA, 15 bp, Homo sapiens
tggctaattctgatg

SEQ ID NO: 90964 - DNA, 15 bp, Homo sapiens
ctggctaattctgat

SEQ ID NO: 90965 - DNA, 15 bp, Homo sapiens
actggctaattctga

SEQ ID NO: 90966 - DNA, 15 bp, Homo sapiens
cactggctaattctg

SEQ ID NO: 90967 - DNA, 15 bp, Homo sapiens
tcactggctaattct

SEQ ID NO: 90968 - DNA, 15 bp, Homo sapiens
ctcactggctaattc

SEQ ID NO: 90969 - DNA, 15 bp, Homo sapiens
cctcactggctaatt

SEQ ID NO: 90970 - DNA, 15 bp, Homo sapiens
gcctcactggctaat

SEQ ID NO: 90971 - DNA, 15 bp, Homo sapiens
agcctcactggctaa

SEQ ID NO: 90972 - DNA, 15 bp, Homo sapiens
gagcctcactggcta

SEQ ID NO: 90973 - DNA, 15 bp, Homo sapiens
agagcctcactggct

SEQ ID NO: 90974 - DNA, 15 bp, Homo sapiens
cagagcctcactggc

SEQ ID NO: 90975 - DNA, 15 bp, Homo sapiens
tcagagcctcactgg

SEQ ID NO: 90976 - DNA, 15 bp, Homo sapiens
ttcagagcctcactg

SEQ ID NO: 90977 - DNA, 15 bp, Homo sapiens
cttcagagcctcact

SEQ ID NO: 90978 - DNA, 15 bp, Homo sapiens
gcttcagagcctcac

SEQ ID NO: 90979 - DNA, 15 bp, Homo sapiens
tgcttcagagcctca

SEQ ID NO: 90980 - DNA, 15 bp, Homo sapiens
ctgcttcagagcctc

SEQ ID NO: 90981 - DNA, 15 bp, Homo sapiens
tctgcttcagagcct

SEQ ID NO: 90982 - DNA, 15 bp, Homo sapiens
ctctgcttcagagcc

SEQ ID NO: 90983 - DNA, 15 bp, Homo sapiens
gctctgcttcagagc

SEQ ID NO: 90984 - DNA, 15 bp, Homo sapiens
agctctgcttcagag

SEQ ID NO: 90985 - DNA, 15 bp, Homo sapiens
tagctctgcttcaga

SEQ ID NO: 90986 - DNA, 15 bp, Homo sapiens
ttagctctgcttcag

SEQ ID NO: 90987 - DNA, 15 bp, Homo sapiens
attagctctgcttca

SEQ ID NO: 90988 - DNA, 15 bp, Homo sapiens
cattagctctgcttc

SEQ ID NO: 90989 - DNA, 15 bp, Homo sapiens
tcattagctctgctt

SEQ ID NO: 90990 - DNA, 15 bp, Homo sapiens
ttcattagctctgct

SEQ ID NO: 90991 - DNA, 15 bp, Homo sapiens
tttcattagctctgc

SEQ ID NO: 90992 - DNA, 15 bp, Homo sapiens
atttcattagctctg

SEQ ID NO: 90993 - DNA, 15 bp, Homo sapiens
tatttcattagctct

SEQ ID NO: 90994 - DNA, 15 bp, Homo sapiens
atatttcattagctc

SEQ ID NO: 90995 - DNA, 15 bp, Homo sapiens
aatatttcattagct

SEQ ID NO: 90996 - DNA, 15 bp, Homo sapiens
aaatatttcattagc

SEQ ID NO: 90997 - DNA, 15 bp, Homo sapiens
aaaatatttcattag

SEQ ID NO: 90998 - DNA, 15 bp, Homo sapiens
gaaaatatttcatta

SEQ ID NO: 90999 - DNA, 15 bp, Homo sapiens
agaaaatatttcatt

SEQ ID NO: 91000 - DNA, 15 bp, Homo sapiens
cagaaaatatttcat

SEQ ID NO: 91001 - DNA, 15 bp, Homo sapiens
tcagaaaatatttca

SEQ ID NO: 91002 - DNA, 15 bp, Homo sapiens
atcagaaaatatttc

SEQ ID NO: 91003 - DNA, 15 bp, Homo sapiens
tatcagaaaatattt

SEQ ID NO: 91004 - DNA, 15 bp, Homo sapiens
atatcagaaaatatt

SEQ ID NO: 91005 - DNA, 15 bp, Homo sapiens
aatatcagaaaatat

SEQ ID NO: 91006 - DNA, 15 bp, Homo sapiens
caatatcagaaaata

SEQ ID NO: 91007 - DNA, 15 bp, Homo sapiens
ccaatatcagaaaat

SEQ ID NO: 91008 - DNA, 15 bp, Homo sapiens
cccaatatcagaaaa

SEQ ID NO: 91009 - DNA, 15 bp, Homo sapiens
gcccaatatcagaaa

SEQ ID NO: 91010 - DNA, 15 bp, Homo sapiens
agcccaatatcagaa

SEQ ID NO: 91011 - DNA, 15 bp, Homo sapiens
aagcccaatatcaga

SEQ ID NO: 91012 - DNA, 15 bp, Homo sapiens
gaagcccaatatcag

SEQ ID NO: 91013 - DNA, 15 bp, Homo sapiens
tgaagcccaatatca

SEQ ID NO: 91014 - DNA, 15 bp, Homo sapiens
ctgaagcccaatatc

SEQ ID NO: 91015 - DNA, 15 bp, Homo sapiens
tctgaagcccaatat

SEQ ID NO: 91016 - DNA, 15 bp, Homo sapiens
atctgaagcccaata

SEQ ID NO: 91017 - DNA, 15 bp, Homo sapiens
tatctgaagcccaat

SEQ ID NO: 91018 - DNA, 15 bp, Homo sapiens
atatctgaagcccaa

SEQ ID NO: 91019 - DNA, 15 bp, Homo sapiens
tatatctgaagccca

SEQ ID NO: 91020 - DNA, 15 bp, Homo sapiens
ctatatctgaagccc

SEQ ID NO: 91021 - DNA, 15 bp, Homo sapiens
cctatatctgaagcc

SEQ ID NO: 91022 - DNA, 15 bp, Homo sapiens
ccctatatctgaagc

SEQ ID NO: 91023 - DNA, 15 bp, Homo sapiens
accctatatctgaag

SEQ ID NO: 91024 - DNA, 15 bp, Homo sapiens
aaccctatatctgaa

SEQ ID NO: 91025 - DNA, 15 bp, Homo sapiens
aaaccctatatctga

SEQ ID NO: 91026 - DNA, 15 bp, Homo sapiens
taaaccctatatctg

SEQ ID NO: 91027 - DNA, 15 bp, Homo sapiens
ctaaaccctatatct

SEQ ID NO: 91028 - DNA, 15 bp, Homo sapiens
actaaaccctatatc

SEQ ID NO: 91029 - DNA, 15 bp, Homo sapiens
aactaaaccctatat

SEQ ID NO: 91030 - DNA, 15 bp, Homo sapiens
aaactaaaccctata

SEQ ID NO: 91031 - DNA, 15 bp, Homo sapiens
taaactaaaccctat

SEQ ID NO: 91032 - DNA, 15 bp, Homo sapiens
ctaaactaaacccta

SEQ ID NO: 91033 - DNA, 15 bp, Homo sapiens
tctaaactaaaccct

SEQ ID NO: 91034 - DNA, 15 bp, Homo sapiens
ttctaaactaaaccc

SEQ ID NO: 91035 - DNA, 15 bp, Homo sapiens
tttctaaactaaacc

SEQ ID NO: 91036 - DNA, 15 bp, Homo sapiens
gtttctaaactaaac

SEQ ID NO: 91037 - DNA, 15 bp, Homo sapiens
agtttctaaactaaa

SEQ ID NO: 91038 - DNA, 15 bp, Homo sapiens
cagtttctaaactaa

SEQ ID NO: 91039 - DNA, 15 bp, Homo sapiens
ccagtttctaaacta

SEQ ID NO: 91040 - DNA, 15 bp, Homo sapiens
accagtttctaaact

SEQ ID NO: 91041 - DNA, 15 bp, Homo sapiens
aaccagtttctaaac

SEQ ID NO: 91042 - DNA, 15 bp, Homo sapiens
aaaccagtttctaaa

SEQ ID NO: 91043 - DNA, 15 bp, Homo sapiens
taaaccagtttctaa

SEQ ID NO: 91044 - DNA, 15 bp, Homo sapiens
ctaaaccagtttcta

SEQ ID NO: 91045 - DNA, 15 bp, Homo sapiens
gctaaaccagtttct

SEQ ID NO: 91046 - DNA, 15 bp, Homo sapiens
ggctaaaccagtttc

SEQ ID NO: 91047 - DNA, 15 bp, Homo sapiens
tggctaaaccagttt

SEQ ID NO: 91048 - DNA, 15 bp, Homo sapiens
ttggctaaaccagtt

SEQ ID NO: 91049 - DNA, 15 bp, Homo sapiens
cttggctaaaccagt

SEQ ID NO: 91050 - DNA, 15 bp, Homo sapiens
acttggctaaaccag

SEQ ID NO: 91051 - DNA, 15 bp, Homo sapiens
aacttggctaaacca

SEQ ID NO: 91052 - DNA, 15 bp, Homo sapiens
caacttggctaaacc

SEQ ID NO: 91053 - DNA, 15 bp, Homo sapiens
tcaacttggctaaac

SEQ ID NO: 91054 - DNA, 15 bp, Homo sapiens
ttcaacttggctaaa

SEQ ID NO: 91055 - DNA, 15 bp, Homo sapiens
tttcaacttggctaa

SEQ ID NO: 91056 - DNA, 15 bp, Homo sapiens
atttcaacttggcta

SEQ ID NO: 91057 - DNA, 15 bp, Homo sapiens
catttcaacttggct

SEQ ID NO: 91058 - DNA, 15 bp, Homo sapiens
acatttcaacttggc

SEQ ID NO: 91059 - DNA, 15 bp, Homo sapiens
cacatttcaacttgg

SEQ ID NO: 91060 - DNA, 15 bp, Homo sapiens
acacatttcaacttg

SEQ ID NO: 91061 - DNA, 15 bp, Homo sapiens
aacacatttcaactt

SEQ ID NO: 91062 - DNA, 15 bp, Homo sapiens
caacacatttcaact

SEQ ID NO: 91063 - DNA, 15 bp, Homo sapiens
gcaacacatttcaac

SEQ ID NO: 91064 - DNA, 15 bp, Homo sapiens
agcaacacatttcaa

SEQ ID NO: 91065 - DNA, 15 bp, Homo sapiens
tagcaacacatttca

SEQ ID NO: 91066 - DNA, 15 bp, Homo sapiens
ttagcaacacatttc

SEQ ID NO: 91067 - DNA, 15 bp, Homo sapiens
gttagcaacacattt

SEQ ID NO: 91068 - DNA, 15 bp, Homo sapiens
ggttagcaacacatt

SEQ ID NO: 91069 - DNA, 15 bp, Homo sapiens
tggttagcaacacat

SEQ ID NO: 91070 - DNA, 15 bp, Homo sapiens
atggttagcaacaca

SEQ ID NO: 91071 - DNA, 15 bp, Homo sapiens
gatggttagcaacac

SEQ ID NO: 91072 - DNA, 15 bp, Homo sapiens
agatggttagcaaca

SEQ ID NO: 91073 - DNA, 15 bp, Homo sapiens
gagatggttagcaac

SEQ ID NO: 91074 - DNA, 15 bp, Homo sapiens
ggagatggttagcaa

SEQ ID NO: 91075 - DNA, 15 bp, Homo sapiens
aggagatggttagca

SEQ ID NO: 91076 - DNA, 15 bp, Homo sapiens
gaggagatggttagc

SEQ ID NO: 91077 - DNA, 15 bp, Homo sapiens
ggaggagatggttag

SEQ ID NO: 91078 - DNA, 15 bp, Homo sapiens
aggaggagatggtta

SEQ ID NO: 91079 - DNA, 15 bp, Homo sapiens
gaggaggagatggtt

SEQ ID NO: 91080 - DNA, 15 bp, Homo sapiens
ggaggaggagatggt

SEQ ID NO: 91081 - DNA, 15 bp, Homo sapiens
aggaggaggagatgg

SEQ ID NO: 91082 - DNA, 15 bp, Homo sapiens
gaggaggaggagatg

SEQ ID NO: 91083 - DNA, 15 bp, Homo sapiens
ggaggaggaggagat

SEQ ID NO: 91084 - DNA, 15 bp, Homo sapiens
aggaggaggaggaga

SEQ ID NO: 91085 - DNA, 15 bp, Homo sapiens
gaggaggaggaggag

SEQ ID NO: 91086 - DNA, 15 bp, Homo sapiens
ggaggaggaggagga

SEQ ID NO: 91087 - DNA, 15 bp, Homo sapiens
aggaggaggaggagg

SEQ ID NO: 91088 - DNA, 15 bp, Homo sapiens
caggaggaggaggag

SEQ ID NO: 91089 - DNA, 15 bp, Homo sapiens
gcaggaggaggagga

SEQ ID NO: 91090 - DNA, 15 bp, Homo sapiens
agcaggaggaggagg

SEQ ID NO: 91091 - DNA, 15 bp, Homo sapiens
cagcaggaggaggag

SEQ ID NO: 91092 - DNA, 15 bp, Homo sapiens
acagcaggaggagga

SEQ ID NO: 91093 - DNA, 15 bp, Homo sapiens
gacagcaggaggagg

SEQ ID NO: 91094 - DNA, 15 bp, Homo sapiens
agacagcaggaggag

SEQ ID NO: 91095 - DNA, 15 bp, Homo sapiens
aagacagcaggagga

SEQ ID NO: 91096 - DNA, 15 bp, Homo sapiens
taagacagcaggagg

SEQ ID NO: 91097 - DNA, 15 bp, Homo sapiens
ataagacagcaggag

SEQ ID NO: 91098 - DNA, 15 bp, Homo sapiens
aataagacagcagga

SEQ ID NO: 91099 - DNA, 15 bp, Homo sapiens
caataagacagcagg

SEQ ID NO: 91100 - DNA, 15 bp, Homo sapiens
acaataagacagcag

SEQ ID NO: 91101 - DNA, 15 bp, Homo sapiens
aacaataagacagca

SEQ ID NO: 91102 - DNA, 15 bp, Homo sapiens
gaacaataagacagc

SEQ ID NO: 91103 - DNA, 15 bp, Homo sapiens
tgaacaataagacag

SEQ ID NO: 91104 - DNA, 15 bp, Homo sapiens
ctgaacaataagaca

SEQ ID NO: 91105 - DNA, 15 bp, Homo sapiens
gctgaacaataagac

SEQ ID NO: 91106 - DNA, 15 bp, Homo sapiens
ggctgaacaataaga

SEQ ID NO: 91107 - DNA, 15 bp, Homo sapiens
cggctgaacaataag

SEQ ID NO: 91108 - DNA, 15 bp, Homo sapiens
acggctgaacaataa

SEQ ID NO: 91109 - DNA, 15 bp, Homo sapiens
cacggctgaacaata

SEQ ID NO: 91110 - DNA, 15 bp, Homo sapiens
acacggctgaacaat

SEQ ID NO: 91111 - DNA, 15 bp, Homo sapiens
gacacggctgaacaa

SEQ ID NO: 91112 - DNA, 15 bp, Homo sapiens
ggacacggctgaaca

SEQ ID NO: 91113 - DNA, 15 bp, Homo sapiens
aggacacggctgaac

SEQ ID NO: 91114 - DNA, 15 bp, Homo sapiens
gaggacacggctgaa

SEQ ID NO: 91115 - DNA, 15 bp, Homo sapiens
agaggacacggctga

SEQ ID NO: 91116 - DNA, 15 bp, Homo sapiens
tagaggacacggctg

SEQ ID NO: 91117 - DNA, 15 bp, Homo sapiens
gtagaggacacggct

SEQ ID NO: 91118 - DNA, 15 bp, Homo sapiens
ggtagaggacacggc

SEQ ID NO: 91119 - DNA, 15 bp, Homo sapiens
aggtagaggacacgg

SEQ ID NO: 91120 - DNA, 15 bp, Homo sapiens
caggtagaggacacg

SEQ ID NO: 91121 - DNA, 15 bp, Homo sapiens
gcaggtagaggacac

SEQ ID NO: 91122 - DNA, 15 bp, Homo sapiens
ggcaggtagaggaca

SEQ ID NO: 91123 - DNA, 15 bp, Homo sapiens
tggcaggtagaggac

SEQ ID NO: 91124 - DNA, 15 bp, Homo sapiens
atggcaggtagagga

SEQ ID NO: 91125 - DNA, 15 bp, Homo sapiens
tatggcaggtagagg

SEQ ID NO: 91126 - DNA, 15 bp, Homo sapiens
gtatggcaggtagag

SEQ ID NO: 91127 - DNA, 15 bp, Homo sapiens
tgtatggcaggtaga

SEQ ID NO: 91128 - DNA, 15 bp, Homo sapiens
gtgtatggcaggtag

SEQ ID NO: 91129 - DNA, 15 bp, Homo sapiens
tgtgtatggcaggta

SEQ ID NO: 91130 - DNA, 15 bp, Homo sapiens
atgtgtatggcaggt

SEQ ID NO: 91131 - DNA, 15 bp, Homo sapiens
aatgtgtatggcagg

SEQ ID NO: 91132 - DNA, 15 bp, Homo sapiens
aaatgtgtatggcag

SEQ ID NO: 91133 - DNA, 15 bp, Homo sapiens
gaaatgtgtatggca

SEQ ID NO: 91134 - DNA, 15 bp, Homo sapiens
ggaaatgtgtatggc

SEQ ID NO: 91135 - DNA, 15 bp, Homo sapiens
aggaaatgtgtatgg

SEQ ID NO: 91136 - DNA, 15 bp, Homo sapiens
aaggaaatgtgtatg

SEQ ID NO: 91137 - DNA, 15 bp, Homo sapiens
gaaggaaatgtgtat

SEQ ID NO: 91138 - DNA, 15 bp, Homo sapiens
ggaaggaaatgtgta

SEQ ID NO: 91139 - DNA, 15 bp, Homo sapiens
gggaaggaaatgtgt

SEQ ID NO: 91140 - DNA, 15 bp, Homo sapiens
agggaaggaaatgtg

SEQ ID NO: 91141 - DNA, 15 bp, Homo sapiens
aagggaaggaaatgt

SEQ ID NO: 91142 - DNA, 15 bp, Homo sapiens
caagggaaggaaatg

SEQ ID NO: 91143 - DNA, 15 bp, Homo sapiens
ccaagggaaggaaat

SEQ ID NO: 91144 - DNA, 15 bp, Homo sapiens
gccaagggaaggaaa

SEQ ID NO: 91145 - DNA, 15 bp, Homo sapiens
ggccaagggaaggaa

SEQ ID NO: 91146 - DNA, 15 bp, Homo sapiens
gggccaagggaagga

SEQ ID NO: 91147 - DNA, 15 bp, Homo sapiens
agggccaagggaagg

SEQ ID NO: 91148 - DNA, 15 bp, Homo sapiens
aagggccaagggaag

SEQ ID NO: 91149 - DNA, 15 bp, Homo sapiens
aaagggccaagggaa

SEQ ID NO: 91150 - DNA, 15 bp, Homo sapiens
aaaagggccaaggga

SEQ ID NO: 91151 - DNA, 15 bp, Homo sapiens
caaaagggccaaggg

SEQ ID NO: 91152 - DNA, 15 bp, Homo sapiens
acaaaagggccaagg

SEQ ID NO: 91153 - DNA, 15 bp, Homo sapiens
cacaaaagggccaag

SEQ ID NO: 91154 - DNA, 15 bp, Homo sapiens
acacaaaagggccaa

SEQ ID NO: 91155 - DNA, 15 bp, Homo sapiens
aacacaaaagggcca

SEQ ID NO: 91156 - DNA, 15 bp, Homo sapiens
aaacacaaaagggcc

SEQ ID NO: 91157 - DNA, 15 bp, Homo sapiens
taaacacaaaagggc

SEQ ID NO: 91158 - DNA, 15 bp, Homo sapiens
ctaaacacaaaaggg

SEQ ID NO: 91159 - DNA, 15 bp, Homo sapiens
cctaaacacaaaagg

SEQ ID NO: 91160 - DNA, 15 bp, Homo sapiens
ccctaaacacaaaag

SEQ ID NO: 91161 - DNA, 15 bp, Homo sapiens
tccctaaacacaaaa

SEQ ID NO: 91162 - DNA, 15 bp, Homo sapiens
ctccctaaacacaaa

SEQ ID NO: 91163 - DNA, 15 bp, Homo sapiens
cctccctaaacacaa

SEQ ID NO: 91164 - DNA, 15 bp, Homo sapiens
tcctccctaaacaca

SEQ ID NO: 91165 - DNA, 15 bp, Homo sapiens
gtcctccctaaacac

SEQ ID NO: 91166 - DNA, 15 bp, Homo sapiens
tgtcctccctaaaca

SEQ ID NO: 91167 - DNA, 15 bp, Homo sapiens
atgtcctccctaaac

SEQ ID NO: 91168 - DNA, 15 bp, Homo sapiens
aatgtcctccctaaa

SEQ ID NO: 91169 - DNA, 15 bp, Homo sapiens
aaatgtcctccctaa

SEQ ID NO: 91170 - DNA, 15 bp, Homo sapiens
caaatgtcctcccta

SEQ ID NO: 91171 - DNA, 15 bp, Homo sapiens
acaaatgtcctccct

SEQ ID NO: 91172 - DNA, 15 bp, Homo sapiens
tacaaatgtcctccc

SEQ ID NO: 91173 - DNA, 15 bp, Homo sapiens
ttacaaatgtcctcc

SEQ ID NO: 91174 - DNA, 15 bp, Homo sapiens
gttacaaatgtcctc

SEQ ID NO: 91175 - DNA, 15 bp, Homo sapiens
tgttacaaatgtcct

SEQ ID NO: 91176 - DNA, 15 bp, Homo sapiens
gtgttacaaatgtcc

SEQ ID NO: 91177 - DNA, 15 bp, Homo sapiens
agtgttacaaatgtc

SEQ ID NO: 91178 - DNA, 15 bp, Homo sapiens
cagtgttacaaatgt

SEQ ID NO: 91179 - DNA, 15 bp, Homo sapiens
gcagtgttacaaatg

SEQ ID NO: 91180 - DNA, 15 bp, Homo sapiens
agcagtgttacaaat

SEQ ID NO: 91181 - DNA, 15 bp, Homo sapiens
cagcagtgttacaaa

SEQ ID NO: 91182 - DNA, 15 bp, Homo sapiens
ccagcagtgttacaa

SEQ ID NO: 91183 - DNA, 15 bp, Homo sapiens
gccagcagtgttaca

SEQ ID NO: 91184 - DNA, 15 bp, Homo sapiens
agccagcagtgttac

SEQ ID NO: 91185 - DNA, 15 bp, Homo sapiens
gagccagcagtgtta

SEQ ID NO: 91186 - DNA, 15 bp, Homo sapiens
tgagccagcagtgtt

SEQ ID NO: 91187 - DNA, 15 bp, Homo sapiens
atgagccagcagtgt

SEQ ID NO: 91188 - DNA, 15 bp, Homo sapiens
aatgagccagcagtg

SEQ ID NO: 91189 - DNA, 15 bp, Homo sapiens
gaatgagccagcagt

SEQ ID NO: 91190 - DNA, 15 bp, Homo sapiens
tgaatgagccagcag

SEQ ID NO: 91191 - DNA, 15 bp, Homo sapiens
ctgaatgagccagca

SEQ ID NO: 91192 - DNA, 15 bp, Homo sapiens
cctgaatgagccagc

SEQ ID NO: 91193 - DNA, 15 bp, Homo sapiens
gcctgaatgagccag

SEQ ID NO: 91194 - DNA, 15 bp, Homo sapiens
agcctgaatgagcca

SEQ ID NO: 91195 - DNA, 15 bp, Homo sapiens
aagcctgaatgagcc

SEQ ID NO: 91196 - DNA, 15 bp, Homo sapiens
taagcctgaatgagc

SEQ ID NO: 91197 - DNA, 15 bp, Homo sapiens
ataagcctgaatgag

SEQ ID NO: 91198 - DNA, 15 bp, Homo sapiens
aataagcctgaatga

SEQ ID NO: 91199 - DNA, 15 bp, Homo sapiens
caataagcctgaatg

SEQ ID NO: 91200 - DNA, 15 bp, Homo sapiens
gcaataagcctgaat

SEQ ID NO: 91201 - DNA, 15 bp, Homo sapiens
tgcaataagcctgaa

SEQ ID NO: 91202 - DNA, 15 bp, Homo sapiens
ctgcaataagcctga

SEQ ID NO: 91203 - DNA, 15 bp, Homo sapiens
cctgcaataagcctg

SEQ ID NO: 91204 - DNA, 15 bp, Homo sapiens
tcctgcaataagcct

SEQ ID NO: 91205 - DNA, 15 bp, Homo sapiens
ctcctgcaataagcc

SEQ ID NO: 91206 - DNA, 15 bp, Homo sapiens
gctcctgcaataagc

SEQ ID NO: 91207 - DNA, 15 bp, Homo sapiens
tgctcctgcaataag

SEQ ID NO: 91208 - DNA, 15 bp, Homo sapiens
ctgctcctgcaataa

SEQ ID NO: 91209 - DNA, 15 bp, Homo sapiens
gctgctcctgcaata

SEQ ID NO: 91210 - DNA, 15 bp, Homo sapiens
agctgctcctgcaat

SEQ ID NO: 91211 - DNA, 15 bp, Homo sapiens
gagctgctcctgcaa

SEQ ID NO: 91212 - DNA, 15 bp, Homo sapiens
ggagctgctcctgca

SEQ ID NO: 91213 - DNA, 15 bp, Homo sapiens
gggagctgctcctgc

SEQ ID NO: 91214 - DNA, 15 bp, Homo sapiens
agggagctgctcctg

SEQ ID NO: 91215 - DNA, 15 bp, Homo sapiens
gagggagctgctcct

SEQ ID NO: 91216 - DNA, 15 bp, Homo sapiens
agagggagctgctcc

SEQ ID NO: 91217 - DNA, 15 bp, Homo sapiens
aagagggagctgctc

SEQ ID NO: 91218 - DNA, 15 bp, Homo sapiens
caagagggagctgct

SEQ ID NO: 91219 - DNA, 15 bp, Homo sapiens
gcaagagggagctgc

SEQ ID NO: 91220 - DNA, 15 bp, Homo sapiens
agcaagagggagctg

SEQ ID NO: 91221 - DNA, 15 bp, Homo sapiens
cagcaagagggagct

SEQ ID NO: 91222 - DNA, 15 bp, Homo sapiens
ccagcaagagggagc

SEQ ID NO: 91223 - DNA, 15 bp, Homo sapiens
cccagcaagagggag

SEQ ID NO: 91224 - DNA, 15 bp, Homo sapiens
acccagcaagaggga

SEQ ID NO: 91225 - DNA, 15 bp, Homo sapiens
tacccagcaagaggg

SEQ ID NO: 91226 - DNA, 15 bp, Homo sapiens
ctacccagcaagagg

SEQ ID NO: 91227 - DNA, 15 bp, Homo sapiens
gctacccagcaagag

SEQ ID NO: 91228 - DNA, 15 bp, Homo sapiens
tgctacccagcaaga

SEQ ID NO: 91229 - DNA, 15 bp, Homo sapiens
ttgctacccagcaag

SEQ ID NO: 91230 - DNA, 15 bp, Homo sapiens
gttgctacccagcaa

SEQ ID NO: 91231 - DNA, 15 bp, Homo sapiens
ggttgctacccagca

SEQ ID NO: 91232 - DNA, 15 bp, Homo sapiens
gggttgctacccagc

SEQ ID NO: 91233 - DNA, 15 bp, Homo sapiens
ggggttgctacccag

SEQ ID NO: 91234 - DNA, 15 bp, Homo sapiens
aggggttgctaccca

SEQ ID NO: 91235 - DNA, 15 bp, Homo sapiens
gaggggttgctaccc

SEQ ID NO: 91236 - DNA, 15 bp, Homo sapiens
agaggggttgctacc

SEQ ID NO: 91237 - DNA, 15 bp, Homo sapiens
aagaggggttgctac

SEQ ID NO: 91238 - DNA, 15 bp, Homo sapiens
gaagaggggttgcta

SEQ ID NO: 91239 - DNA, 15 bp, Homo sapiens
agaagaggggttgct

SEQ ID NO: 91240 - DNA, 15 bp, Homo sapiens
cagaagaggggttgc

SEQ ID NO: 91241 - DNA, 15 bp, Homo sapiens
tcagaagaggggttg

SEQ ID NO: 91242 - DNA, 15 bp, Homo sapiens
ttcagaagaggggtt

SEQ ID NO: 91243 - DNA, 15 bp, Homo sapiens
tttcagaagaggggt

SEQ ID NO: 91244 - DNA, 15 bp, Homo sapiens
atttcagaagagggg

SEQ ID NO: 91245 - DNA, 15 bp, Homo sapiens
catttcagaagaggg

SEQ ID NO: 91246 - DNA, 15 bp, Homo sapiens
tcatttcagaagagg

SEQ ID NO: 91247 - DNA, 15 bp, Homo sapiens
ttcatttcagaagag

SEQ ID NO: 91248 - DNA, 15 bp, Homo sapiens
attcatttcagaaga

SEQ ID NO: 91249 - DNA, 15 bp, Homo sapiens
aattcatttcagaag

SEQ ID NO: 91250 - DNA, 15 bp, Homo sapiens
taattcatttcagaa

SEQ ID NO: 91251 - DNA, 15 bp, Homo sapiens
ttaattcatttcaga

SEQ ID NO: 91252 - DNA, 15 bp, Homo sapiens
gttaattcatttcag

SEQ ID NO: 91253 - DNA, 15 bp, Homo sapiens
agttaattcatttca

SEQ ID NO: 91254 - DNA, 15 bp, Homo sapiens
cagttaattcatttc

SEQ ID NO: 91255 - DNA, 15 bp, Homo sapiens
acagttaattcattt

SEQ ID NO: 91256 - DNA, 15 bp, Homo sapiens
tacagttaattcatt

SEQ ID NO: 91257 - DNA, 15 bp, Homo sapiens
ctacagttaattcat

SEQ ID NO: 91258 - DNA, 15 bp, Homo sapiens
actacagttaattca

SEQ ID NO: 91259 - DNA, 15 bp, Homo sapiens
tactacagttaattc

SEQ ID NO: 91260 - DNA, 15 bp, Homo sapiens
atactacagttaatt

SEQ ID NO: 91261 - DNA, 15 bp, Homo sapiens
gatactacagttaat

SEQ ID NO: 91262 - DNA, 15 bp, Homo sapiens
ggatactacagttaa

SEQ ID NO: 91263 - DNA, 15 bp, Homo sapiens
tggatactacagtta

SEQ ID NO: 91264 - DNA, 15 bp, Homo sapiens
ctggatactacagtt

SEQ ID NO: 91265 - DNA, 15 bp, Homo sapiens
cctggatactacagt

SEQ ID NO: 91266 - DNA, 15 bp, Homo sapiens
gcctggatactacag

SEQ ID NO: 91267 - DNA, 15 bp, Homo sapiens
tgcctggatactaca

SEQ ID NO: 91268 - DNA, 15 bp, Homo sapiens
ttgcctggatactac

SEQ ID NO: 91269 - DNA, 15 bp, Homo sapiens
tttgcctggatacta

SEQ ID NO: 91270 - DNA, 15 bp, Homo sapiens
gtttgcctggatact

SEQ ID NO: 91271 - DNA, 15 bp, Homo sapiens
tgtttgcctggatac

SEQ ID NO: 91272 - DNA, 15 bp, Homo sapiens
gtgtttgcctggata

SEQ ID NO: 91273 - DNA, 15 bp, Homo sapiens
tgtgtttgcctggat

SEQ ID NO: 91274 - DNA, 15 bp, Homo sapiens
gtgtgtttgcctgga

SEQ ID NO: 91275 - DNA, 15 bp, Homo sapiens
cgtgtgtttgcctgg

SEQ ID NO: 91276 - DNA, 15 bp, Homo sapiens
gcgtgtgtttgcctg

SEQ ID NO: 91277 - DNA, 15 bp, Homo sapiens
agcgtgtgtttgcct

SEQ ID NO: 91278 - DNA, 15 bp, Homo sapiens
cagcgtgtgtttgcc

SEQ ID NO: 91279 - DNA, 15 bp, Homo sapiens
gcagcgtgtgtttgc

SEQ ID NO: 91280 - DNA, 15 bp, Homo sapiens
ggcagcgtgtgtttg

SEQ ID NO: 91281 - DNA, 15 bp, Homo sapiens
tggcagcgtgtgttt

SEQ ID NO: 91282 - DNA, 15 bp, Homo sapiens
ctggcagcgtgtgtt

SEQ ID NO: 91283 - DNA, 15 bp, Homo sapiens
cctggcagcgtgtgt

SEQ ID NO: 91284 - DNA, 15 bp, Homo sapiens
tcctggcagcgtgtg

SEQ ID NO: 91285 - DNA, 15 bp, Homo sapiens
gtcctggcagcgtgt

SEQ ID NO: 91286 - DNA, 15 bp, Homo sapiens
ggtcctggcagcgtg

SEQ ID NO: 91287 - DNA, 15 bp, Homo sapiens
aggtcctggcagcgt

SEQ ID NO: 91288 - DNA, 15 bp, Homo sapiens
gaggtcctggcagcg

SEQ ID NO: 91289 - DNA, 15 bp, Homo sapiens
tgaggtcctggcagc

SEQ ID NO: 91290 - DNA, 15 bp, Homo sapiens
atgaggtcctggcag

SEQ ID NO: 91291 - DNA, 15 bp, Homo sapiens
aatgaggtcctggca

SEQ ID NO: 91292 - DNA, 15 bp, Homo sapiens
gaatgaggtcctggc

SEQ ID NO: 91293 - DNA, 15 bp, Homo sapiens
tgaatgaggtcctgg

SEQ ID NO: 91294 - DNA, 15 bp, Homo sapiens
ctgaatgaggtcctg

SEQ ID NO: 91295 - DNA, 15 bp, Homo sapiens
cctgaatgaggtcct

SEQ ID NO: 91296 - DNA, 15 bp, Homo sapiens
acctgaatgaggtcc

SEQ ID NO: 91297 - DNA, 15 bp, Homo sapiens
cacctgaatgaggtc

SEQ ID NO: 91298 - DNA, 15 bp, Homo sapiens
ccacctgaatgaggt

SEQ ID NO: 91299 - DNA, 15 bp, Homo sapiens
accacctgaatgagg

SEQ ID NO: 91300 - DNA, 15 bp, Homo sapiens
caccacctgaatgag

SEQ ID NO: 91301 - DNA, 15 bp, Homo sapiens
gcaccacctgaatga

SEQ ID NO: 91302 - DNA, 15 bp, Homo sapiens
ggcaccacctgaatg

SEQ ID NO: 91303 - DNA, 15 bp, Homo sapiens
cggcaccacctgaat

SEQ ID NO: 91304 - DNA, 15 bp, Homo sapiens
ccggcaccacctgaa

SEQ ID NO: 91305 - DNA, 15 bp, Homo sapiens
gccggcaccacctga

SEQ ID NO: 91306 - DNA, 15 bp, Homo sapiens
tgccggcaccacctg

SEQ ID NO: 91307 - DNA, 15 bp, Homo sapiens
atgccggcaccacct

SEQ ID NO: 91308 - DNA, 15 bp, Homo sapiens
aatgccggcaccacc

SEQ ID NO: 91309 - DNA, 15 bp, Homo sapiens
aaatgccggcaccac

SEQ ID NO: 91310 - DNA, 15 bp, Homo sapiens
taaatgccggcacca

SEQ ID NO: 91311 - DNA, 15 bp, Homo sapiens
ataaatgccggcacc

SEQ ID NO: 91312 - DNA, 15 bp, Homo sapiens
gataaatgccggcac

SEQ ID NO: 91313 - DNA, 15 bp, Homo sapiens
agataaatgccggca

SEQ ID NO: 91314 - DNA, 15 bp, Homo sapiens
gagataaatgccggc

SEQ ID NO: 91315 - DNA, 15 bp, Homo sapiens
ggagataaatgccgg

SEQ ID NO: 91316 - DNA, 15 bp, Homo sapiens
gggagataaatgccg

SEQ ID NO: 91317 - DNA, 15 bp, Homo sapiens
tgggagataaatgcc

SEQ ID NO: 91318 - DNA, 15 bp, Homo sapiens
ttgggagataaatgc

SEQ ID NO: 91319 - DNA, 15 bp, Homo sapiens
gttgggagataaatg

SEQ ID NO: 91320 - DNA, 15 bp, Homo sapiens
tgttgggagataaat

SEQ ID NO: 91321 - DNA, 15 bp, Homo sapiens
atgttgggagataaa

SEQ ID NO: 91322 - DNA, 15 bp, Homo sapiens
gatgttgggagataa

SEQ ID NO: 91323 - DNA, 15 bp, Homo sapiens
cgatgttgggagata

SEQ ID NO: 91324 - DNA, 15 bp, Homo sapiens
ccgatgttgggagat

SEQ ID NO: 91325 - DNA, 15 bp, Homo sapiens
cccgatgttgggaga

SEQ ID NO: 91326 - DNA, 15 bp, Homo sapiens
gcccgatgttgggag

SEQ ID NO: 91327 - DNA, 15 bp, Homo sapiens
ggcccgatgttggga

SEQ ID NO: 91328 - DNA, 15 bp, Homo sapiens
aggcccgatgttggg

SEQ ID NO: 91329 - DNA, 15 bp, Homo sapiens
caggcccgatgttgg

SEQ ID NO: 91330 - DNA, 15 bp, Homo sapiens
ccaggcccgatgttg

SEQ ID NO: 91331 - DNA, 15 bp, Homo sapiens
gccaggcccgatgtt

SEQ ID NO: 91332 - DNA, 15 bp, Homo sapiens
ggccaggcccgatgt

SEQ ID NO: 91333 - DNA, 15 bp, Homo sapiens
aggccaggcccgatg

SEQ ID NO: 91334 - DNA, 15 bp, Homo sapiens
gaggccaggcccgat

SEQ ID NO: 91335 - DNA, 15 bp, Homo sapiens
agaggccaggcccga

SEQ ID NO: 91336 - DNA, 15 bp, Homo sapiens
tagaggccaggcccg

SEQ ID NO: 91337 - DNA, 15 bp, Homo sapiens
ctagaggccaggccc

SEQ ID NO: 91338 - DNA, 15 bp, Homo sapiens
tctagaggccaggcc

SEQ ID NO: 91339 - DNA, 15 bp, Homo sapiens
ctctagaggccaggc

SEQ ID NO: 91340 - DNA, 15 bp, Homo sapiens
tctctagaggccagg

SEQ ID NO: 91341 - DNA, 15 bp, Homo sapiens
gtctctagaggccag

SEQ ID NO: 91342 - DNA, 15 bp, Homo sapiens
cgtctctagaggcca

SEQ ID NO: 91343 - DNA, 15 bp, Homo sapiens
tcgtctctagaggcc

SEQ ID NO: 91344 - DNA, 15 bp, Homo sapiens
atcgtctctagaggc

SEQ ID NO: 91345 - DNA, 15 bp, Homo sapiens
aatcgtctctagagg

SEQ ID NO: 91346 - DNA, 15 bp, Homo sapiens
taatcgtctctagag

SEQ ID NO: 91347 - DNA, 15 bp, Homo sapiens
ttaatcgtctctaga

SEQ ID NO: 91348 - DNA, 15 bp, Homo sapiens
cttaatcgtctctag

SEQ ID NO: 91349 - DNA, 15 bp, Homo sapiens
gcttaatcgtctcta

SEQ ID NO: 91350 - DNA, 15 bp, Homo sapiens
ggcttaatcgtctct

SEQ ID NO: 91351 - DNA, 15 bp, Homo sapiens
aggcttaatcgtctc

SEQ ID NO: 91352 - DNA, 15 bp, Homo sapiens
caggcttaatcgtct

SEQ ID NO: 91353 - DNA, 15 bp, Homo sapiens
acaggcttaatcgtc

SEQ ID NO: 91354 - DNA, 15 bp, Homo sapiens
cacaggcttaatcgt

SEQ ID NO: 91355 - DNA, 15 bp, Homo sapiens
gcacaggcttaatcg

SEQ ID NO: 91356 - DNA, 15 bp, Homo sapiens
agcacaggcttaatc

SEQ ID NO: 91357 - DNA, 15 bp, Homo sapiens
aagcacaggcttaat

SEQ ID NO: 91358 - DNA, 15 bp, Homo sapiens
aaagcacaggcttaa

SEQ ID NO: 91359 - DNA, 15 bp, Homo sapiens
caaagcacaggctta

SEQ ID NO: 91360 - DNA, 15 bp, Homo sapiens
gcaaagcacaggctt

SEQ ID NO: 91361 - DNA, 15 bp, Homo sapiens
tgcaaagcacaggct

SEQ ID NO: 91362 - DNA, 15 bp, Homo sapiens
ctgcaaagcacaggc

SEQ ID NO: 91363 - DNA, 15 bp, Homo sapiens
cctgcaaagcacagg

SEQ ID NO: 91364 - DNA, 15 bp, Homo sapiens
acctgcaaagcacag

SEQ ID NO: 91365 - DNA, 15 bp, Homo sapiens
cacctgcaaagcaca

SEQ ID NO: 91366 - DNA, 15 bp, Homo sapiens
gcacctgcaaagcac

SEQ ID NO: 91367 - DNA, 15 bp, Homo sapiens
tgcacctgcaaagca

SEQ ID NO: 91368 - DNA, 15 bp, Homo sapiens
atgcacctgcaaagc

SEQ ID NO: 91369 - DNA, 15 bp, Homo sapiens
gatgcacctgcaaag

SEQ ID NO: 91370 - DNA, 15 bp, Homo sapiens
agatgcacctgcaaa

SEQ ID NO: 91371 - DNA, 15 bp, Homo sapiens
aagatgcacctgcaa

SEQ ID NO: 91372 - DNA, 15 bp, Homo sapiens
aaagatgcacctgca

SEQ ID NO: 91373 - DNA, 15 bp, Homo sapiens
aaaagatgcacctgc

SEQ ID NO: 91374 - DNA, 15 bp, Homo sapiens
caaaagatgcacctg

SEQ ID NO: 91375 - DNA, 15 bp, Homo sapiens
acaaaagatgcacct

SEQ ID NO: 91376 - DNA, 15 bp, Homo sapiens
gacaaaagatgcacc

SEQ ID NO: 91377 - DNA, 15 bp, Homo sapiens
ggacaaaagatgcac

SEQ ID NO: 91378 - DNA, 15 bp, Homo sapiens
gggacaaaagatgca

SEQ ID NO: 91379 - DNA, 15 bp, Homo sapiens
ggggacaaaagatgc

SEQ ID NO: 91380 - DNA, 15 bp, Homo sapiens
tggggacaaaagatg

SEQ ID NO: 91381 - DNA, 15 bp, Homo sapiens
ctggggacaaaagat

SEQ ID NO: 91382 - DNA, 15 bp, Homo sapiens
actggggacaaaaga

SEQ ID NO: 91383 - DNA, 15 bp, Homo sapiens
tactggggacaaaag

SEQ ID NO: 91384 - DNA, 15 bp, Homo sapiens
ttactggggacaaaa

SEQ ID NO: 91385 - DNA, 15 bp, Homo sapiens
tttactggggacaaa

SEQ ID NO: 91386 - DNA, 15 bp, Homo sapiens
ctttactggggacaa

SEQ ID NO: 91387 - DNA, 15 bp, Homo sapiens
gctttactggggaca

SEQ ID NO: 91388 - DNA, 15 bp, Homo sapiens
agctttactggggac

SEQ ID NO: 91389 - DNA, 15 bp, Homo sapiens
gagctttactgggga

SEQ ID NO: 91390 - DNA, 15 bp, Homo sapiens
agagctttactgggg

SEQ ID NO: 91391 - DNA, 15 bp, Homo sapiens
gagagctttactggg

SEQ ID NO: 91392 - DNA, 15 bp, Homo sapiens
ggagagctttactgg

SEQ ID NO: 91393 - DNA, 15 bp, Homo sapiens
tggagagctttactg

SEQ ID NO: 91394 - DNA, 15 bp, Homo sapiens
gtggagagctttact

SEQ ID NO: 91395 - DNA, 15 bp, Homo sapiens
agtggagagctttac

SEQ ID NO: 91396 - DNA, 15 bp, Homo sapiens
aagtggagagcttta

SEQ ID NO: 91397 - DNA, 15 bp, Homo sapiens
caagtggagagcttt

SEQ ID NO: 91398 - DNA, 15 bp, Homo sapiens
tcaagtggagagctt

SEQ ID NO: 91399 - DNA, 15 bp, Homo sapiens
ctcaagtggagagct

SEQ ID NO: 91400 - DNA, 15 bp, Homo sapiens
gctcaagtggagagc

SEQ ID NO: 91401 - DNA, 15 bp, Homo sapiens
agctcaagtggagag

SEQ ID NO: 91402 - DNA, 15 bp, Homo sapiens
cagctcaagtggaga

SEQ ID NO: 91403 - DNA, 15 bp, Homo sapiens
acagctcaagtggag

SEQ ID NO: 91404 - DNA, 15 bp, Homo sapiens
gacagctcaagtgga

SEQ ID NO: 91405 - DNA, 15 bp, Homo sapiens
agacagctcaagtgg

SEQ ID NO: 91406 - DNA, 15 bp, Homo sapiens
aagacagctcaagtg

SEQ ID NO: 91407 - DNA, 15 bp, Homo sapiens
caagacagctcaagt

SEQ ID NO: 91408 - DNA, 15 bp, Homo sapiens
gcaagacagctcaag

SEQ ID NO: 91409 - DNA, 15 bp, Homo sapiens
agcaagacagctcaa

SEQ ID NO: 91410 - DNA, 15 bp, Homo sapiens
gagcaagacagctca

SEQ ID NO: 91411 - DNA, 15 bp, Homo sapiens
ggagcaagacagctc

SEQ ID NO: 91412 - DNA, 15 bp, Homo sapiens
aggagcaagacagct

SEQ ID NO: 91413 - DNA, 15 bp, Homo sapiens
gaggagcaagacagc

SEQ ID NO: 91414 - DNA, 15 bp, Homo sapiens
agaggagcaagacag

SEQ ID NO: 91415 - DNA, 15 bp, Homo sapiens
tagaggagcaagaca

SEQ ID NO: 91416 - DNA, 15 bp, Homo sapiens
atagaggagcaagac

SEQ ID NO: 91417 - DNA, 15 bp, Homo sapiens
catagaggagcaaga

SEQ ID NO: 91418 - DNA, 15 bp, Homo sapiens
gcatagaggagcaag

SEQ ID NO: 91419 - DNA, 15 bp, Homo sapiens
ggcatagaggagcaa

SEQ ID NO: 91420 - DNA, 15 bp, Homo sapiens
aggcatagaggagca

SEQ ID NO: 91421 - DNA, 15 bp, Homo sapiens
aaggcatagaggagc

SEQ ID NO: 91422 - DNA, 15 bp, Homo sapiens
gaaggcatagaggag

SEQ ID NO: 91423 - DNA, 15 bp, Homo sapiens
ggaaggcatagagga

SEQ ID NO: 91424 - DNA, 15 bp, Homo sapiens
gggaaggcatagagg

SEQ ID NO: 91425 - DNA, 15 bp, Homo sapiens
ggggaaggcatagag

SEQ ID NO: 91426 - DNA, 15 bp, Homo sapiens
aggggaaggcataga

SEQ ID NO: 91427 - DNA, 15 bp, Homo sapiens
aaggggaaggcatag

SEQ ID NO: 91428 - DNA, 15 bp, Homo sapiens
caaggggaaggcata

SEQ ID NO: 91429 - DNA, 15 bp, Homo sapiens
acaaggggaaggcat

SEQ ID NO: 91430 - DNA, 15 bp, Homo sapiens
cacaaggggaaggca

SEQ ID NO: 91431 - DNA, 15 bp, Homo sapiens
tcacaaggggaaggc

SEQ ID NO: 91432 - DNA, 15 bp, Homo sapiens
ctcacaaggggaagg

SEQ ID NO: 91433 - DNA, 15 bp, Homo sapiens
cctcacaaggggaag

SEQ ID NO: 91434 - DNA, 15 bp, Homo sapiens
acctcacaaggggaa

SEQ ID NO: 91435 - DNA, 15 bp, Homo sapiens
cacctcacaagggga

SEQ ID NO: 91436 - DNA, 15 bp, Homo sapiens
ccacctcacaagggg

SEQ ID NO: 91437 - DNA, 15 bp, Homo sapiens
accacctcacaaggg

SEQ ID NO: 91438 - DNA, 15 bp, Homo sapiens
gaccacctcacaagg

SEQ ID NO: 91439 - DNA, 15 bp, Homo sapiens
agaccacctcacaag

SEQ ID NO: 91440 - DNA, 15 bp, Homo sapiens
cagaccacctcacaa

SEQ ID NO: 91441 - DNA, 15 bp, Homo sapiens
tcagaccacctcaca

SEQ ID NO: 91442 - DNA, 15 bp, Homo sapiens
ttcagaccacctcac

SEQ ID NO: 91443 - DNA, 15 bp, Homo sapiens
attcagaccacctca

SEQ ID NO: 91444 - DNA, 15 bp, Homo sapiens
gattcagaccacctc

SEQ ID NO: 91445 - DNA, 15 bp, Homo sapiens
agattcagaccacct

SEQ ID NO: 91446 - DNA, 15 bp, Homo sapiens
cagattcagaccacc

SEQ ID NO: 91447 - DNA, 15 bp, Homo sapiens
acagattcagaccac

SEQ ID NO: 91448 - DNA, 15 bp, Homo sapiens
gacagattcagacca

SEQ ID NO: 91449 - DNA, 15 bp, Homo sapiens
agacagattcagacc

SEQ ID NO: 91450 - DNA, 15 bp, Homo sapiens
cagacagattcagac

SEQ ID NO: 91451 - DNA, 15 bp, Homo sapiens
tcagacagattcaga

SEQ ID NO: 91452 - DNA, 15 bp, Homo sapiens
ttcagacagattcag

SEQ ID NO: 91453 - DNA, 15 bp, Homo sapiens
gttcagacagattca

SEQ ID NO: 91454 - DNA, 15 bp, Homo sapiens
cgttcagacagattc

SEQ ID NO: 91455 - DNA, 15 bp, Homo sapiens
tcgttcagacagatt

SEQ ID NO: 91456 - DNA, 15 bp, Homo sapiens
gtcgttcagacagat

SEQ ID NO: 91457 - DNA, 15 bp, Homo sapiens
ggtcgttcagacaga

SEQ ID NO: 91458 - DNA, 15 bp, Homo sapiens
gggtcgttcagacag

SEQ ID NO: 91459 - DNA, 15 bp, Homo sapiens
tgggtcgttcagaca

SEQ ID NO: 91460 - DNA, 15 bp, Homo sapiens
atgggtcgttcagac

SEQ ID NO: 91461 - DNA, 15 bp, Homo sapiens
gatgggtcgttcaga

SEQ ID NO: 91462 - DNA, 15 bp, Homo sapiens
tgatgggtcgttcag

SEQ ID NO: 91463 - DNA, 15 bp, Homo sapiens
ttgatgggtcgttca

SEQ ID NO: 91464 - DNA, 15 bp, Homo sapiens
cttgatgggtcgttc

SEQ ID NO: 91465 - DNA, 15 bp, Homo sapiens
gcttgatgggtcgtt

SEQ ID NO: 91466 - DNA, 15 bp, Homo sapiens
ggcttgatgggtcgt

SEQ ID NO: 91467 - DNA, 15 bp, Homo sapiens
tggcttgatgggtcg

SEQ ID NO: 91468 - DNA, 15 bp, Homo sapiens
gtggcttgatgggtc

SEQ ID NO: 91469 - DNA, 15 bp, Homo sapiens
tgtggcttgatgggt

SEQ ID NO: 91470 - DNA, 15 bp, Homo sapiens
ttgtggcttgatggg

SEQ ID NO: 91471 - DNA, 15 bp, Homo sapiens
tttgtggcttgatgg

SEQ ID NO: 91472 - DNA, 15 bp, Homo sapiens
ttttgtggcttgatg

SEQ ID NO: 91473 - DNA, 15 bp, Homo sapiens
gttttgtggcttgat

SEQ ID NO: 91474 - DNA, 15 bp, Homo sapiens
tgttttgtggcttga

SEQ ID NO: 91475 - DNA, 15 bp, Homo sapiens
ttgttttgtggcttg

SEQ ID NO: 91476 - DNA, 15 bp, Homo sapiens
tttgttttgtggctt

SEQ ID NO: 91477 - DNA, 15 bp, Homo sapiens
ctttgttttgtggct

SEQ ID NO: 91478 - DNA, 15 bp, Homo sapiens
actttgttttgtggc

SEQ ID NO: 91479 - DNA, 15 bp, Homo sapiens
tactttgttttgtgg

SEQ ID NO: 91480 - DNA, 15 bp, Homo sapiens
gtactttgttttgtg

SEQ ID NO: 91481 - DNA, 15 bp, Homo sapiens
tgtactttgttttgt

SEQ ID NO: 91482 - DNA, 15 bp, Homo sapiens
atgtactttgttttg

SEQ ID NO: 91483 - DNA, 15 bp, Homo sapiens
aatgtactttgtttt

SEQ ID NO: 91484 - DNA, 15 bp, Homo sapiens
taatgtactttgttt

SEQ ID NO: 91485 - DNA, 15 bp, Homo sapiens
ctaatgtactttgtt

SEQ ID NO: 91486 - DNA, 15 bp, Homo sapiens
gctaatgtactttgt

SEQ ID NO: 91487 - DNA, 15 bp, Homo sapiens
tgctaatgtactttg

SEQ ID NO: 91488 - DNA, 15 bp, Homo sapiens
ttgctaatgtacttt

SEQ ID NO: 91489 - DNA, 15 bp, Homo sapiens
cttgctaatgtactt

SEQ ID NO: 91490 - DNA, 15 bp, Homo sapiens
tcttgctaatgtact

SEQ ID NO: 91491 - DNA, 15 bp, Homo sapiens
gtcttgctaatgtac

SEQ ID NO: 91492 - DNA, 15 bp, Homo sapiens
tgtcttgctaatgta

SEQ ID NO: 91493 - DNA, 15 bp, Homo sapiens
ttgtcttgctaatgt

SEQ ID NO: 91494 - DNA, 15 bp, Homo sapiens
tttgtcttgctaatg

SEQ ID NO: 91495 - DNA, 15 bp, Homo sapiens
ctttgtcttgctaat

SEQ ID NO: 91496 - DNA, 15 bp, Homo sapiens
gctttgtcttgctaa

SEQ ID NO: 91497 - DNA, 15 bp, Homo sapiens
agctttgtcttgcta

SEQ ID NO: 91498 - DNA, 15 bp, Homo sapiens
tagctttgtcttgct

SEQ ID NO: 91499 - DNA, 15 bp, Homo sapiens
ttagctttgtcttgc

SEQ ID NO: 91500 - DNA, 15 bp, Homo sapiens
cttagctttgtcttg

SEQ ID NO: 91501 - DNA, 15 bp, Homo sapiens
gcttagctttgtctt

SEQ ID NO: 91502 - DNA, 15 bp, Homo sapiens
tgcttagctttgtct

SEQ ID NO: 91503 - DNA, 15 bp, Homo sapiens
ttgcttagctttgtc

SEQ ID NO: 91504 - DNA, 15 bp, Homo sapiens
cttgcttagctttgt

SEQ ID NO: 91505 - DNA, 15 bp, Homo sapiens
gcttgcttagctttg

SEQ ID NO: 91506 - DNA, 15 bp, Homo sapiens
ggcttgcttagcttt

SEQ ID NO: 91507 - DNA, 15 bp, Homo sapiens
gggcttgcttagctt

SEQ ID NO: 91508 - DNA, 15 bp, Homo sapiens
agggcttgcttagct

SEQ ID NO: 91509 - DNA, 15 bp, Homo sapiens
gagggcttgcttagc

SEQ ID NO: 91510 - DNA, 15 bp, Homo sapiens
ggagggcttgcttag

SEQ ID NO: 91511 - DNA, 15 bp, Homo sapiens
gggagggcttgctta

SEQ ID NO: 91512 - DNA, 15 bp, Homo sapiens
agggagggcttgctt

SEQ ID NO: 91513 - DNA, 15 bp, Homo sapiens
gagggagggcttgct

SEQ ID NO: 91514 - DNA, 15 bp, Homo sapiens
agagggagggcttgc

SEQ ID NO: 91515 - DNA, 15 bp, Homo sapiens
tagagggagggcttg

SEQ ID NO: 91516 - DNA, 15 bp, Homo sapiens
atagagggagggctt

SEQ ID NO: 91517 - DNA, 15 bp, Homo sapiens
gatagagggagggct

SEQ ID NO: 91518 - DNA, 15 bp, Homo sapiens
ggatagagggagggc

SEQ ID NO: 91519 - DNA, 15 bp, Homo sapiens
aggatagagggaggg

SEQ ID NO: 91520 - DNA, 15 bp, Homo sapiens
gaggatagagggagg

SEQ ID NO: 91521 - DNA, 15 bp, Homo sapiens
ggaggatagagggag

SEQ ID NO: 91522 - DNA, 15 bp, Homo sapiens
gggaggatagaggga

SEQ ID NO: 91523 - DNA, 15 bp, Homo sapiens
agggaggatagaggg

SEQ ID NO: 91524 - DNA, 15 bp, Homo sapiens
cagggaggatagagg

SEQ ID NO: 91525 - DNA, 15 bp, Homo sapiens
gcagggaggatagag

SEQ ID NO: 91526 - DNA, 15 bp, Homo sapiens
ggcagggaggataga

SEQ ID NO: 91527 - DNA, 15 bp, Homo sapiens
aggcagggaggatag

SEQ ID NO: 91528 - DNA, 15 bp, Homo sapiens
gaggcagggaggata

SEQ ID NO: 91529 - DNA, 15 bp, Homo sapiens
ggaggcagggaggat

SEQ ID NO: 91530 - DNA, 15 bp, Homo sapiens
aggaggcagggagga

SEQ ID NO: 91531 - DNA, 15 bp, Homo sapiens
gaggaggcagggagg

SEQ ID NO: 91532 - DNA, 15 bp, Homo sapiens
ggaggaggcagggag

SEQ ID NO: 91533 - DNA, 15 bp, Homo sapiens
gggaggaggcaggga

SEQ ID NO: 91534 - DNA, 15 bp, Homo sapiens
ggggaggaggcaggg

SEQ ID NO: 91535 - DNA, 15 bp, Homo sapiens
tggggaggaggcagg

SEQ ID NO: 91536 - DNA, 15 bp, Homo sapiens
gtggggaggaggcag

SEQ ID NO: 91537 - DNA, 15 bp, Homo sapiens
ggtggggaggaggca

SEQ ID NO: 91538 - DNA, 15 bp, Homo sapiens
aggtggggaggaggc

SEQ ID NO: 91539 - DNA, 15 bp, Homo sapiens
gaggtggggaggagg

SEQ ID NO: 91540 - DNA, 15 bp, Homo sapiens
agaggtggggaggag

SEQ ID NO: 91541 - DNA, 15 bp, Homo sapiens
gagaggtggggagga

SEQ ID NO: 91542 - DNA, 15 bp, Homo sapiens
tgagaggtggggagg

SEQ ID NO: 91543 - DNA, 15 bp, Homo sapiens
gtgagaggtggggag

SEQ ID NO: 91544 - DNA, 15 bp, Homo sapiens
agtgagaggtgggga

SEQ ID NO: 91545 - DNA, 15 bp, Homo sapiens
cagtgagaggtgggg

SEQ ID NO: 91546 - DNA, 15 bp, Homo sapiens
ccagtgagaggtggg

SEQ ID NO: 91547 - DNA, 15 bp, Homo sapiens
gccagtgagaggtgg

SEQ ID NO: 91548 - DNA, 15 bp, Homo sapiens
agccagtgagaggtg

SEQ ID NO: 91549 - DNA, 15 bp, Homo sapiens
gagccagtgagaggt

SEQ ID NO: 91550 - DNA, 15 bp, Homo sapiens
agagccagtgagagg

SEQ ID NO: 91551 - DNA, 15 bp, Homo sapiens
gagagccagtgagag

SEQ ID NO: 91552 - DNA, 15 bp, Homo sapiens
ggagagccagtgaga

SEQ ID NO: 91553 - DNA, 15 bp, Homo sapiens
aggagagccagtgag

SEQ ID NO: 91554 - DNA, 15 bp, Homo sapiens
caggagagccagtga

SEQ ID NO: 91555 - DNA, 15 bp, Homo sapiens
gcaggagagccagtg

SEQ ID NO: 91556 - DNA, 15 bp, Homo sapiens
agcaggagagccagt

SEQ ID NO: 91557 - DNA, 15 bp, Homo sapiens
gagcaggagagccag

SEQ ID NO: 91558 - DNA, 15 bp, Homo sapiens
agagcaggagagcca

SEQ ID NO: 91559 - DNA, 15 bp, Homo sapiens
cagagcaggagagcc

SEQ ID NO: 91560 - DNA, 15 bp, Homo sapiens
gcagagcaggagagc

SEQ ID NO: 91561 - DNA, 15 bp, Homo sapiens
agcagagcaggagag

SEQ ID NO: 91562 - DNA, 15 bp, Homo sapiens
gagcagagcaggaga

SEQ ID NO: 91563 - DNA, 15 bp, Homo sapiens
agagcagagcaggag

SEQ ID NO: 91564 - DNA, 15 bp, Homo sapiens
tagagcagagcagga

SEQ ID NO: 91565 - DNA, 15 bp, Homo sapiens
ttagagcagagcagg

SEQ ID NO: 91566 - DNA, 15 bp, Homo sapiens
attagagcagagcag

SEQ ID NO: 91567 - DNA, 15 bp, Homo sapiens
gattagagcagagca

SEQ ID NO: 91568 - DNA, 15 bp, Homo sapiens
tgattagagcagagc

SEQ ID NO: 91569 - DNA, 15 bp, Homo sapiens
gtgattagagcagag

SEQ ID NO: 91570 - DNA, 15 bp, Homo sapiens
agtgattagagcaga

SEQ ID NO: 91571 - DNA, 15 bp, Homo sapiens
tagtgattagagcag

SEQ ID NO: 91572 - DNA, 15 bp, Homo sapiens
atagtgattagagca

SEQ ID NO: 91573 - DNA, 15 bp, Homo sapiens
gatagtgattagagc

SEQ ID NO: 91574 - DNA, 15 bp, Homo sapiens
agatagtgattagag

SEQ ID NO: 91575 - DNA, 15 bp, Homo sapiens
tagatagtgattaga

SEQ ID NO: 91576 - DNA, 15 bp, Homo sapiens
atagatagtgattag

SEQ ID NO: 91577 - DNA, 15 bp, Homo sapiens
aatagatagtgatta

SEQ ID NO: 91578 - DNA, 15 bp, Homo sapiens
taatagatagtgatt

SEQ ID NO: 91579 - DNA, 15 bp, Homo sapiens
ctaatagatagtgat

SEQ ID NO: 91580 - DNA, 15 bp, Homo sapiens
gctaatagatagtga

SEQ ID NO: 91581 - DNA, 15 bp, Homo sapiens
agctaatagatagtg

SEQ ID NO: 91582 - DNA, 15 bp, Homo sapiens
tagctaatagatagt

SEQ ID NO: 91583 - DNA, 15 bp, Homo sapiens
atagctaatagatag

SEQ ID NO: 91584 - DNA, 15 bp, Homo sapiens
aatagctaatagata

SEQ ID NO: 91585 - DNA, 15 bp, Homo sapiens
taatagctaatagat

SEQ ID NO: 91586 - DNA, 15 bp, Homo sapiens
ctaatagctaataga

SEQ ID NO: 91587 - DNA, 15 bp, Homo sapiens
tctaatagctaatag

SEQ ID NO: 91588 - DNA, 15 bp, Homo sapiens
ttctaatagctaata

SEQ ID NO: 91589 - DNA, 15 bp, Homo sapiens
cttctaatagctaat

SEQ ID NO: 91590 - DNA, 15 bp, Homo sapiens
tcttctaatagctaa

SEQ ID NO: 91591 - DNA, 15 bp, Homo sapiens
gtcttctaatagcta

SEQ ID NO: 91592 - DNA, 15 bp, Homo sapiens
tgtcttctaatagct

SEQ ID NO: 91593 - DNA, 15 bp, Homo sapiens
atgtcttctaatagc

SEQ ID NO: 91594 - DNA, 15 bp, Homo sapiens
gatgtcttctaatag

SEQ ID NO: 91595 - DNA, 15 bp, Homo sapiens
tgatgtcttctaata

SEQ ID NO: 91596 - DNA, 15 bp, Homo sapiens
ctgatgtcttctaat

SEQ ID NO: 91597 - DNA, 15 bp, Homo sapiens
cctgatgtcttctaa

SEQ ID NO: 91598 - DNA, 15 bp, Homo sapiens
gcctgatgtcttcta

SEQ ID NO: 91599 - DNA, 15 bp, Homo sapiens
tgcctgatgtcttct

SEQ ID NO: 91600 - DNA, 15 bp, Homo sapiens
ttgcctgatgtcttc

SEQ ID NO: 91601 - DNA, 15 bp, Homo sapiens
gttgcctgatgtctt

SEQ ID NO: 91602 - DNA, 15 bp, Homo sapiens
ggttgcctgatgtct

SEQ ID NO: 91603 - DNA, 15 bp, Homo sapiens
aggttgcctgatgtc

SEQ ID NO: 91604 - DNA, 15 bp, Homo sapiens
aaggttgcctgatgt

SEQ ID NO: 91605 - DNA, 15 bp, Homo sapiens
caaggttgcctgatg

SEQ ID NO: 91606 - DNA, 15 bp, Homo sapiens
ccaaggttgcctgat

SEQ ID NO: 91607 - DNA, 15 bp, Homo sapiens
gccaaggttgcctga

SEQ ID NO: 91608 - DNA, 15 bp, Homo sapiens
agccaaggttgcctg

SEQ ID NO: 91609 - DNA, 15 bp, Homo sapiens
gagccaaggttgcct

SEQ ID NO: 91610 - DNA, 15 bp, Homo sapiens
ggagccaaggttgcc

SEQ ID NO: 91611 - DNA, 15 bp, Homo sapiens
tggagccaaggttgc

SEQ ID NO: 91612 - DNA, 15 bp, Homo sapiens
atggagccaaggttg

SEQ ID NO: 91613 - DNA, 15 bp, Homo sapiens
gatggagccaaggtt

SEQ ID NO: 91614 - DNA, 15 bp, Homo sapiens
agatggagccaaggt

SEQ ID NO: 91615 - DNA, 15 bp, Homo sapiens
aagatggagccaagg

SEQ ID NO: 91616 - DNA, 15 bp, Homo sapiens
gaagatggagccaag

SEQ ID NO: 91617 - DNA, 15 bp, Homo sapiens
agaagatggagccaa

SEQ ID NO: 91618 - DNA, 15 bp, Homo sapiens
aagaagatggagcca

SEQ ID NO: 91619 - DNA, 15 bp, Homo sapiens
aaagaagatggagcc

SEQ ID NO: 91620 - DNA, 15 bp, Homo sapiens
caaagaagatggagc

SEQ ID NO: 91621 - DNA, 15 bp, Homo sapiens
tcaaagaagatggag

SEQ ID NO: 91622 - DNA, 15 bp, Homo sapiens
ttcaaagaagatgga

SEQ ID NO: 91623 - DNA, 15 bp, Homo sapiens
attcaaagaagatgg

SEQ ID NO: 91624 - DNA, 15 bp, Homo sapiens
tattcaaagaagatg

SEQ ID NO: 91625 - DNA, 15 bp, Homo sapiens
ttattcaaagaagat

SEQ ID NO: 91626 - DNA, 15 bp, Homo sapiens
cttattcaaagaaga

SEQ ID NO: 91627 - DNA, 15 bp, Homo sapiens
tcttattcaaagaag

SEQ ID NO: 91628 - DNA, 15 bp, Homo sapiens
gtcttattcaaagaa

SEQ ID NO: 91629 - DNA, 15 bp, Homo sapiens
tgtcttattcaaaga

SEQ ID NO: 91630 - DNA, 15 bp, Homo sapiens
gtgtcttattcaaag

SEQ ID NO: 91631 - DNA, 15 bp, Homo sapiens
tgtgtcttattcaaa

SEQ ID NO: 91632 - DNA, 15 bp, Homo sapiens
gtgtgtcttattcaa

SEQ ID NO: 91633 - DNA, 15 bp, Homo sapiens
tgtgtgtcttattca

SEQ ID NO: 91634 - DNA, 15 bp, Homo sapiens
gtgtgtgtcttattc

SEQ ID NO: 91635 - DNA, 15 bp, Homo sapiens
tgtgtgtgtcttatt

SEQ ID NO: 91636 - DNA, 15 bp, Homo sapiens
ctgtgtgtgtcttat

SEQ ID NO: 91637 - DNA, 15 bp, Homo sapiens
gctgtgtgtgtctta

SEQ ID NO: 91638 - DNA, 15 bp, Homo sapiens
ggctgtgtgtgtctt

SEQ ID NO: 91639 - DNA, 15 bp, Homo sapiens
gggctgtgtgtgtct

SEQ ID NO: 91640 - DNA, 15 bp, Homo sapiens
ggggctgtgtgtgtc

SEQ ID NO: 91641 - DNA, 15 bp, Homo sapiens
tggggctgtgtgtgt

SEQ ID NO: 91642 - DNA, 15 bp, Homo sapiens
ttggggctgtgtgtg

SEQ ID NO: 91643 - DNA, 15 bp, Homo sapiens
tttggggctgtgtgt

SEQ ID NO: 91644 - DNA, 15 bp, Homo sapiens
gtttggggctgtgtg

SEQ ID NO: 91645 - DNA, 15 bp, Homo sapiens
tgtttggggctgtgt

SEQ ID NO: 91646 - DNA, 15 bp, Homo sapiens
ttgtttggggctgtg

SEQ ID NO: 91647 - DNA, 15 bp, Homo sapiens
tttgtttggggctgt

SEQ ID NO: 91648 - DNA, 15 bp, Homo sapiens
gtttgtttggggctg

SEQ ID NO: 91649 - DNA, 15 bp, Homo sapiens
ggtttgtttggggct

SEQ ID NO: 91650 - DNA, 15 bp, Homo sapiens
gggtttgtttggggc

SEQ ID NO: 91651 - DNA, 15 bp, Homo sapiens
tgggtttgtttgggg

SEQ ID NO: 91652 - DNA, 15 bp, Homo sapiens
ctgggtttgtttggg

SEQ ID NO: 91653 - DNA, 15 bp, Homo sapiens
tctgggtttgtttgg

SEQ ID NO: 91654 - DNA, 15 bp, Homo sapiens
ctctgggtttgtttg

SEQ ID NO: 91655 - DNA, 15 bp, Homo sapiens
actctgggtttgttt

SEQ ID NO: 91656 - DNA, 15 bp, Homo sapiens
aactctgggtttgtt

SEQ ID NO: 91657 - DNA, 15 bp, Homo sapiens
gaactctgggtttgt

SEQ ID NO: 91658 - DNA, 15 bp, Homo sapiens
tgaactctgggtttg

SEQ ID NO: 91659 - DNA, 15 bp, Homo sapiens
atgaactctgggttt

SEQ ID NO: 91660 - DNA, 15 bp, Homo sapiens
gatgaactctgggtt

SEQ ID NO: 91661 - DNA, 15 bp, Homo sapiens
tgatgaactctgggt

SEQ ID NO: 91662 - DNA, 15 bp, Homo sapiens
ttgatgaactctggg

SEQ ID NO: 91663 - DNA, 15 bp, Homo sapiens
cttgatgaactctgg

SEQ ID NO: 91664 - DNA, 15 bp, Homo sapiens
tcttgatgaactctg

SEQ ID NO: 91665 - DNA, 15 bp, Homo sapiens
ctcttgatgaactct

SEQ ID NO: 91666 - DNA, 15 bp, Homo sapiens
gctcttgatgaactc

SEQ ID NO: 91667 - DNA, 15 bp, Homo sapiens
tgctcttgatgaact

SEQ ID NO: 91668 - DNA, 15 bp, Homo sapiens
gtgctcttgatgaac

SEQ ID NO: 91669 - DNA, 15 bp, Homo sapiens
ggtgctcttgatgaa

SEQ ID NO: 91670 - DNA, 15 bp, Homo sapiens
tggtgctcttgatga

SEQ ID NO: 91671 - DNA, 15 bp, Homo sapiens
ctggtgctcttgatg

SEQ ID NO: 91672 - DNA, 15 bp, Homo sapiens
tctggtgctcttgat

SEQ ID NO: 91673 - DNA, 15 bp, Homo sapiens
ctctggtgctcttga

SEQ ID NO: 91674 - DNA, 15 bp, Homo sapiens
gctctggtgctcttg

SEQ ID NO: 91675 - DNA, 15 bp, Homo sapiens
agctctggtgctctt

SEQ ID NO: 91676 - DNA, 15 bp, Homo sapiens
cagctctggtgctct

SEQ ID NO: 91677 - DNA, 15 bp, Homo sapiens
acagctctggtgctc

SEQ ID NO: 91678 - DNA, 15 bp, Homo sapiens
cacagctctggtgct

SEQ ID NO: 91679 - DNA, 15 bp, Homo sapiens
acacagctctggtgc

SEQ ID NO: 91680 - DNA, 15 bp, Homo sapiens
cacacagctctggtg

SEQ ID NO: 91681 - DNA, 15 bp, Homo sapiens
acacacagctctggt

SEQ ID NO: 91682 - DNA, 15 bp, Homo sapiens
cacacacagctctgg

SEQ ID NO: 91683 - DNA, 15 bp, Homo sapiens
acacacacagctctg

SEQ ID NO: 91684 - DNA, 15 bp, Homo sapiens
cacacacacagctct

SEQ ID NO: 91685 - DNA, 15 bp, Homo sapiens
acacacacacagctc

SEQ ID NO: 91686 - DNA, 15 bp, Homo sapiens
cacacacacacagct

SEQ ID NO: 91687 - DNA, 15 bp, Homo sapiens
acacacacacacagc

SEQ ID NO: 91688 - DNA, 15 bp, Homo sapiens
cacacacacacacag

SEQ ID NO: 91689 - DNA, 15 bp, Homo sapiens
acagacacacacaca

SEQ ID NO: 91690 - DNA, 15 bp, Homo sapiens
cacagacacacacac

SEQ ID NO: 91691 - DNA, 15 bp, Homo sapiens
acacagacacacaca

SEQ ID NO: 91692 - DNA, 15 bp, Homo sapiens
cacacagacacacac

SEQ ID NO: 91693 - DNA, 15 bp, Homo sapiens
acacacagacacaca

SEQ ID NO: 91694 - DNA, 15 bp, Homo sapiens
cacacacagacacac

SEQ ID NO: 91695 - DNA, 15 bp, Homo sapiens
tcacacacagacaca

SEQ ID NO: 91696 - DNA, 15 bp, Homo sapiens
ctcacacacagacac

SEQ ID NO: 91697 - DNA, 15 bp, Homo sapiens
actcacacacagaca

SEQ ID NO: 91698 - DNA, 15 bp, Homo sapiens
cactcacacacagac

SEQ ID NO: 91699 - DNA, 15 bp, Homo sapiens
gcactcacacacaga

SEQ ID NO: 91700 - DNA, 15 bp, Homo sapiens
tgcactcacacacag

SEQ ID NO: 91701 - DNA, 15 bp, Homo sapiens
gtgcactcacacaca

SEQ ID NO: 91702 - DNA, 15 bp, Homo sapiens
tgtgcactcacacac

SEQ ID NO: 91703 - DNA, 15 bp, Homo sapiens
gtgtgcactcacaca

SEQ ID NO: 91704 - DNA, 15 bp, Homo sapiens
agtgtgcactcacac

SEQ ID NO: 91705 - DNA, 15 bp, Homo sapiens
cagtgtgcactcaca

SEQ ID NO: 91706 - DNA, 15 bp, Homo sapiens
ccagtgtgcactcac

SEQ ID NO: 91707 - DNA, 15 bp, Homo sapiens
accagtgtgcactca

SEQ ID NO: 91708 - DNA, 15 bp, Homo sapiens
caccagtgtgcactc

SEQ ID NO: 91709 - DNA, 15 bp, Homo sapiens
gcaccagtgtgcact

SEQ ID NO: 91710 - DNA, 15 bp, Homo sapiens
tgcaccagtgtgcac

SEQ ID NO: 91711 - DNA, 15 bp, Homo sapiens
ctgcaccagtgtgca

SEQ ID NO: 91712 - DNA, 15 bp, Homo sapiens
actgcaccagtgtgc

SEQ ID NO: 91713 - DNA, 15 bp, Homo sapiens
gactgcaccagtgtg

SEQ ID NO: 91714 - DNA, 15 bp, Homo sapiens
ggactgcaccagtgt

SEQ ID NO: 91715 - DNA, 15 bp, Homo sapiens
tggactgcaccagtg

SEQ ID NO: 91716 - DNA, 15 bp, Homo sapiens
gtggactgcaccagt

SEQ ID NO: 91717 - DNA, 15 bp, Homo sapiens
tgtggactgcaccag

SEQ ID NO: 91718 - DNA, 15 bp, Homo sapiens
ttgtggactgcacca

SEQ ID NO: 91719 - DNA, 15 bp, Homo sapiens
tttgtggactgcacc

SEQ ID NO: 91720 - DNA, 15 bp, Homo sapiens
ctttgtggactgcac

SEQ ID NO: 91721 - DNA, 15 bp, Homo sapiens
cctttgtggactgca

SEQ ID NO: 91722 - DNA, 15 bp, Homo sapiens
ccctttgtggactgc

SEQ ID NO: 91723 - DNA, 15 bp, Homo sapiens
gccctttgtggactg

SEQ ID NO: 91724 - DNA, 15 bp, Homo sapiens
tgccctttgtggact

SEQ ID NO: 91725 - DNA, 15 bp, Homo sapiens
ctgccctttgtggac

SEQ ID NO: 91726 - DNA, 15 bp, Homo sapiens
cctgccctttgtgga

SEQ ID NO: 91727 - DNA, 15 bp, Homo sapiens
acctgccctttgtgg

SEQ ID NO: 91728 - DNA, 15 bp, Homo sapiens
cacctgccctttgtg

SEQ ID NO: 91729 - DNA, 15 bp, Homo sapiens
gcacctgccctttgt

SEQ ID NO: 91730 - DNA, 15 bp, Homo sapiens
agcacctgccctttg

SEQ ID NO: 91731 - DNA, 15 bp, Homo sapiens
cagcacctgcccttt

SEQ ID NO: 91732 - DNA, 15 bp, Homo sapiens
ccagcacctgccctt

SEQ ID NO: 91733 - DNA, 15 bp, Homo sapiens
gccagcacctgccct

SEQ ID NO: 91734 - DNA, 15 bp, Homo sapiens
tgccagcacctgccc

SEQ ID NO: 91735 - DNA, 15 bp, Homo sapiens
atgccagcacctgcc

SEQ ID NO: 91736 - DNA, 15 bp, Homo sapiens
gatgccagcacctgc

SEQ ID NO: 91737 - DNA, 15 bp, Homo sapiens
tgatgccagcacctg

SEQ ID NO: 91738 - DNA, 15 bp, Homo sapiens
ttgatgccagcacct

SEQ ID NO: 91739 - DNA, 15 bp, Homo sapiens
cttgatgccagcacc

SEQ ID NO: 91740 - DNA, 15 bp, Homo sapiens
gcttgatgccagcac

SEQ ID NO: 91741 - DNA, 15 bp, Homo sapiens
tgcttgatgccagca

SEQ ID NO: 91742 - DNA, 15 bp, Homo sapiens
gtgcttgatgccagc

SEQ ID NO: 91743 - DNA, 15 bp, Homo sapiens
tgtgcttgatgccag

SEQ ID NO: 91744 - DNA, 15 bp, Homo sapiens
ttgtgcttgatgcca

SEQ ID NO: 91745 - DNA, 15 bp, Homo sapiens
tttgtgcttgatgcc

SEQ ID NO: 91746 - DNA, 15 bp, Homo sapiens
ctttgtgcttgatgc

SEQ ID NO: 91747 - DNA, 15 bp, Homo sapiens
gctttgtgcttgatg

SEQ ID NO: 91748 - DNA, 15 bp, Homo sapiens
tgctttgtgcttgat

SEQ ID NO: 91749 - DNA, 15 bp, Homo sapiens
ttgctttgtgcttga

SEQ ID NO: 91750 - DNA, 15 bp, Homo sapiens
cttgctttgtgcttg

SEQ ID NO: 91751 - DNA, 15 bp, Homo sapiens
ccttgctttgtgctt

SEQ ID NO: 91752 - DNA, 15 bp, Homo sapiens
tccttgctttgtgct

SEQ ID NO: 91753 - DNA, 15 bp, Homo sapiens
ttccttgctttgtgc

SEQ ID NO: 91754 - DNA, 15 bp, Homo sapiens
cttccttgctttgtg

SEQ ID NO: 91755 - DNA, 15 bp, Homo sapiens
acttccttgctttgt

SEQ ID NO: 91756 - DNA, 15 bp, Homo sapiens
aacttccttgctttg

SEQ ID NO: 91757 - DNA, 15 bp, Homo sapiens
caacttccttgcttt

SEQ ID NO: 91758 - DNA, 15 bp, Homo sapiens
tcaacttccttgctt

SEQ ID NO: 91759 - DNA, 15 bp, Homo sapiens
ctcaacttccttgct

SEQ ID NO: 91760 - DNA, 15 bp, Homo sapiens
cctcaacttccttgc

SEQ ID NO: 91761 - DNA, 15 bp, Homo sapiens
tcctcaacttccttg

SEQ ID NO: 91762 - DNA, 15 bp, Homo sapiens
ctcctcaacttcctt

SEQ ID NO: 91763 - DNA, 15 bp, Homo sapiens
tctcctcaacttcct

SEQ ID NO: 91764 - DNA, 15 bp, Homo sapiens
atctcctcaacttcc

SEQ ID NO: 91765 - DNA, 15 bp, Homo sapiens
catctcctcaacttc

SEQ ID NO: 91766 - DNA, 15 bp, Homo sapiens
gcatctcctcaactt

SEQ ID NO: 91767 - DNA, 15 bp, Homo sapiens
agcatctcctcaact

SEQ ID NO: 91768 - DNA, 15 bp, Homo sapiens
cagcatctcctcaac

SEQ ID NO: 91769 - DNA, 15 bp, Homo sapiens
acagcatctcctcaa

SEQ ID NO: 91770 - DNA, 15 bp, Homo sapiens
gacagcatctcctca

SEQ ID NO: 91771 - DNA, 15 bp, Homo sapiens
agacagcatctcctc

SEQ ID NO: 91772 - DNA, 15 bp, Homo sapiens
tagacagcatctcct

SEQ ID NO: 91773 - DNA, 15 bp, Homo sapiens
atagacagcatctcc

SEQ ID NO: 91774 - DNA, 15 bp, Homo sapiens
aatagacagcatctc

SEQ ID NO: 91775 - DNA, 15 bp, Homo sapiens
taatagacagcatct

SEQ ID NO: 91776 - DNA, 15 bp, Homo sapiens
ttaatagacagcatc

SEQ ID NO: 91777 - DNA, 15 bp, Homo sapiens
attaatagacagcat

SEQ ID NO: 91778 - DNA, 15 bp, Homo sapiens
cattaatagacagca

SEQ ID NO: 91779 - DNA, 15 bp, Homo sapiens
acattaatagacagc

SEQ ID NO: 91780 - DNA, 15 bp, Homo sapiens
gacattaatagacag

SEQ ID NO: 91781 - DNA, 15 bp, Homo sapiens
agacattaatagaca

SEQ ID NO: 91782 - DNA, 15 bp, Homo sapiens
aagacattaatagac

SEQ ID NO: 91783 - DNA, 15 bp, Homo sapiens
gaagacattaataga

SEQ ID NO: 91784 - DNA, 15 bp, Homo sapiens
tgaagacattaatag

SEQ ID NO: 91785 - DNA, 15 bp, Homo sapiens
ttgaagacattaata

SEQ ID NO: 91786 - DNA, 15 bp, Homo sapiens
tttgaagacattaat

SEQ ID NO: 91787 - DNA, 15 bp, Homo sapiens
ctttgaagacattaa

SEQ ID NO: 91788 - DNA, 15 bp, Homo sapiens
gctttgaagacatta

SEQ ID NO: 91789 - DNA, 15 bp, Homo sapiens
tgctttgaagacatt

SEQ ID NO: 91790 - DNA, 15 bp, Homo sapiens
gtgctttgaagacat

SEQ ID NO: 91791 - DNA, 15 bp, Homo sapiens
agtgctttgaagaca

SEQ ID NO: 91792 - DNA, 15 bp, Homo sapiens
aagtgctttgaagac

SEQ ID NO: 91793 - DNA, 15 bp, Homo sapiens
taagtgctttgaaga

SEQ ID NO: 91794 - DNA, 15 bp, Homo sapiens
ataagtgctttgaag

SEQ ID NO: 91795 - DNA, 15 bp, Homo sapiens
gataagtgctttgaa

SEQ ID NO: 91796 - DNA, 15 bp, Homo sapiens
tgataagtgctttga

SEQ ID NO: 91797 - DNA, 15 bp, Homo sapiens
ttgataagtgctttg

SEQ ID NO: 91798 - DNA, 15 bp, Homo sapiens
tttgataagtgcttt

SEQ ID NO: 91799 - DNA, 15 bp, Homo sapiens
atttgataagtgctt

SEQ ID NO: 91800 - DNA, 15 bp, Homo sapiens
aatttgataagtgct

SEQ ID NO: 91801 - DNA, 15 bp, Homo sapiens
taatttgataagtgc

SEQ ID NO: 91802 - DNA, 15 bp, Homo sapiens
ctaatttgataagtg

SEQ ID NO: 91803 - DNA, 15 bp, Homo sapiens
tctaatttgataagt

SEQ ID NO: 91804 - DNA, 15 bp, Homo sapiens
ttctaatttgataag

SEQ ID NO: 91805 - DNA, 15 bp, Homo sapiens
attctaatttgataa

SEQ ID NO: 91806 - DNA, 15 bp, Homo sapiens
cattctaatttgata

SEQ ID NO: 91807 - DNA, 15 bp, Homo sapiens
ccattctaatttgat

SEQ ID NO: 91808 - DNA, 15 bp, Homo sapiens
gccattctaatttga

SEQ ID NO: 91809 - DNA, 15 bp, Homo sapiens
agccattctaatttg

SEQ ID NO: 91810 - DNA, 15 bp, Homo sapiens
aagccattctaattt

SEQ ID NO: 91811 - DNA, 15 bp, Homo sapiens
aaagccattctaatt

SEQ ID NO: 91812 - DNA, 15 bp, Homo sapiens
aaaagccattctaat

SEQ ID NO: 91813 - DNA, 15 bp, Homo sapiens
aaaaagccattctaa

SEQ ID NO: 91814 - DNA, 15 bp, Homo sapiens
caaaaagccattcta

SEQ ID NO: 91815 - DNA, 15 bp, Homo sapiens
gcaaaaagccattct

SEQ ID NO: 91816 - DNA, 15 bp, Homo sapiens
agcaaaaagccattc

SEQ ID NO: 91817 - DNA, 15 bp, Homo sapiens
aagcaaaaagccatt

SEQ ID NO: 91818 - DNA, 15 bp, Homo sapiens
aaagcaaaaagccat

SEQ ID NO: 91819 - DNA, 15 bp, Homo sapiens
taaagcaaaaagcca

SEQ ID NO: 91820 - DNA, 15 bp, Homo sapiens
ttaaagcaaaaagcc

SEQ ID NO: 91821 - DNA, 15 bp, Homo sapiens
tttaaagcaaaaagc

SEQ ID NO: 91822 - DNA, 15 bp, Homo sapiens
ttttaaagcaaaaag

SEQ ID NO: 91823 - DNA, 15 bp, Homo sapiens
attttaaagcaaaaa

SEQ ID NO: 91824 - DNA, 15 bp, Homo sapiens
aattttaaagcaaaa

SEQ ID NO: 91825 - DNA, 15 bp, Homo sapiens
caattttaaagcaaa

SEQ ID NO: 91826 - DNA, 15 bp, Homo sapiens
acaattttaaagcaa

SEQ ID NO: 91827 - DNA, 15 bp, Homo sapiens
tacaattttaaagca

SEQ ID NO: 91828 - DNA, 15 bp, Homo sapiens
atacaattttaaagc

SEQ ID NO: 91829 - DNA, 15 bp, Homo sapiens
tatacaattttaaag

SEQ ID NO: 91830 - DNA, 15 bp, Homo sapiens
ttatacaattttaaa

SEQ ID NO: 91831 - DNA, 15 bp, Homo sapiens
attatacaattttaa

SEQ ID NO: 91832 - DNA, 15 bp, Homo sapiens
gattatacaatttta

SEQ ID NO: 91833 - DNA, 15 bp, Homo sapiens
tgattatacaatttt

SEQ ID NO: 91834 - DNA, 15 bp, Homo sapiens
gtgattatacaattt

SEQ ID NO: 91835 - DNA, 15 bp, Homo sapiens
ggtgattatacaatt

SEQ ID NO: 91836 - DNA, 15 bp, Homo sapiens
gggtgattatacaat

SEQ ID NO: 91837 - DNA, 15 bp, Homo sapiens
agggtgattatacaa

SEQ ID NO: 91838 - DNA, 15 bp, Homo sapiens
aagggtgattataca

SEQ ID NO: 91839 - DNA, 15 bp, Homo sapiens
gaagggtgattatac

SEQ ID NO: 91840 - DNA, 15 bp, Homo sapiens
ggaagggtgattata

SEQ ID NO: 91841 - DNA, 15 bp, Homo sapiens
tggaagggtgattat

SEQ ID NO: 91842 - DNA, 15 bp, Homo sapiens
ctggaagggtgatta

SEQ ID NO: 91843 - DNA, 15 bp, Homo sapiens
gctggaagggtgatt

SEQ ID NO: 91844 - DNA, 15 bp, Homo sapiens
agctggaagggtgat

SEQ ID NO: 91845 - DNA, 15 bp, Homo sapiens
aagctggaagggtga

SEQ ID NO: 91846 - DNA, 15 bp, Homo sapiens
caagctggaagggtg

SEQ ID NO: 91847 - DNA, 15 bp, Homo sapiens
acaagctggaagggt

SEQ ID NO: 91848 - DNA, 15 bp, Homo sapiens
gacaagctggaaggg

SEQ ID NO: 91849 - DNA, 15 bp, Homo sapiens
agacaagctggaagg

SEQ ID NO: 91850 - DNA, 15 bp, Homo sapiens
gagacaagctggaag

SEQ ID NO: 91851 - DNA, 15 bp, Homo sapiens
agagacaagctggaa

SEQ ID NO: 91852 - DNA, 15 bp, Homo sapiens
aagagacaagctgga

SEQ ID NO: 91853 - DNA, 15 bp, Homo sapiens
caagagacaagctgg

SEQ ID NO: 91854 - DNA, 15 bp, Homo sapiens
tcaagagacaagctg

SEQ ID NO: 91855 - DNA, 15 bp, Homo sapiens
ttcaagagacaagct

SEQ ID NO: 91856 - DNA, 15 bp, Homo sapiens
tttcaagagacaagc

SEQ ID NO: 91857 - DNA, 15 bp, Homo sapiens
ttttcaagagacaag

SEQ ID NO: 91858 - DNA, 15 bp, Homo sapiens
attttcaagagacaa

SEQ ID NO: 91859 - DNA, 15 bp, Homo sapiens
cattttcaagagaca

SEQ ID NO: 91860 - DNA, 15 bp, Homo sapiens
ccattttcaagagac

SEQ ID NO: 91861 - DNA, 15 bp, Homo sapiens
gccattttcaagaga

SEQ ID NO: 91862 - DNA, 15 bp, Homo sapiens
agccattttcaagag

SEQ ID NO: 91863 - DNA, 15 bp, Homo sapiens
cagccattttcaaga

SEQ ID NO: 91864 - DNA, 15 bp, Homo sapiens
gcagccattttcaag

SEQ ID NO: 91865 - DNA, 15 bp, Homo sapiens
tgcagccattttcaa

SEQ ID NO: 91866 - DNA, 15 bp, Homo sapiens
ttgcagccattttca

SEQ ID NO: 91867 - DNA, 15 bp, Homo sapiens
attgcagccattttc

SEQ ID NO: 91868 - DNA, 15 bp, Homo sapiens
gattgcagccatttt

SEQ ID NO: 91869 - DNA, 15 bp, Homo sapiens
agattgcagccattt

SEQ ID NO: 91870 - DNA, 15 bp, Homo sapiens
gagattgcagccatt

SEQ ID NO: 91871 - DNA, 15 bp, Homo sapiens
agagattgcagccat

SEQ ID NO: 91872 - DNA, 15 bp, Homo sapiens
tagagattgcagcca

SEQ ID NO: 91873 - DNA, 15 bp, Homo sapiens
ctagagattgcagcc

SEQ ID NO: 91874 - DNA, 15 bp, Homo sapiens
cctagagattgcagc

SEQ ID NO: 91875 - DNA, 15 bp, Homo sapiens
ccctagagattgcag

SEQ ID NO: 91876 - DNA, 15 bp, Homo sapiens
cccctagagattgca

SEQ ID NO: 91877 - DNA, 15 bp, Homo sapiens
acccctagagattgc

SEQ ID NO: 91878 - DNA, 15 bp, Homo sapiens
aacccctagagattg

SEQ ID NO: 91879 - DNA, 15 bp, Homo sapiens
taacccctagagatt

SEQ ID NO: 91880 - DNA, 15 bp, Homo sapiens
ataacccctagagat

SEQ ID NO: 91881 - DNA, 15 bp, Homo sapiens
aataacccctagaga

SEQ ID NO: 91882 - DNA, 15 bp, Homo sapiens
aaataacccctagag

SEQ ID NO: 91883 - DNA, 15 bp, Homo sapiens
caaataacccctaga

SEQ ID NO: 91884 - DNA, 15 bp, Homo sapiens
acaaataacccctag

SEQ ID NO: 91885 - DNA, 15 bp, Homo sapiens
cacaaataaccccta

SEQ ID NO: 91886 - DNA, 15 bp, Homo sapiens
gcacaaataacccct

SEQ ID NO: 91887 - DNA, 15 bp, Homo sapiens
ggcacaaataacccc

SEQ ID NO: 91888 - DNA, 15 bp, Homo sapiens
gggcacaaataaccc

SEQ ID NO: 91889 - DNA, 15 bp, Homo sapiens
tgggcacaaataacc

SEQ ID NO: 91890 - DNA, 15 bp, Homo sapiens
ctgggcacaaataac

SEQ ID NO: 91891 - DNA, 15 bp, Homo sapiens
cctgggcacaaataa

SEQ ID NO: 91892 - DNA, 15 bp, Homo sapiens
tcctgggcacaaata

SEQ ID NO: 91893 - DNA, 15 bp, Homo sapiens
ttcctgggcacaaat

SEQ ID NO: 91894 - DNA, 15 bp, Homo sapiens
cttcctgggcacaaa

SEQ ID NO: 91895 - DNA, 15 bp, Homo sapiens
acttcctgggcacaa

SEQ ID NO: 91896 - DNA, 15 bp, Homo sapiens
tacttcctgggcaca

SEQ ID NO: 91897 - DNA, 15 bp, Homo sapiens
ttacttcctgggcac

SEQ ID NO: 91898 - DNA, 15 bp, Homo sapiens
cttacttcctgggca

SEQ ID NO: 91899 - DNA, 15 bp, Homo sapiens
tcttacttcctgggc

SEQ ID NO: 91900 - DNA, 15 bp, Homo sapiens
ctcttacttcctggg

SEQ ID NO: 91901 - DNA, 15 bp, Homo sapiens
actcttacttcctgg

SEQ ID NO: 91902 - DNA, 15 bp, Homo sapiens
tactcttacttcctg

SEQ ID NO: 91903 - DNA, 15 bp, Homo sapiens
ctactcttacttcct

SEQ ID NO: 91904 - DNA, 15 bp, Homo sapiens
tctactcttacttcc

SEQ ID NO: 91905 - DNA, 15 bp, Homo sapiens
atctactcttacttc

SEQ ID NO: 91906 - DNA, 15 bp, Homo sapiens
aatctactcttactt

SEQ ID NO: 91907 - DNA, 15 bp, Homo sapiens
aaatctactcttact

SEQ ID NO: 91908 - DNA, 15 bp, Homo sapiens
aaaatctactcttac

SEQ ID NO: 91909 - DNA, 15 bp, Homo sapiens
taaaatctactctta

SEQ ID NO: 91910 - DNA, 15 bp, Homo sapiens
ttaaaatctactctt

SEQ ID NO: 91911 - DNA, 15 bp, Homo sapiens
tttaaaatctactct

SEQ ID NO: 91912 - DNA, 15 bp, Homo sapiens
ttttaaaatctactc

SEQ ID NO: 91913 - DNA, 15 bp, Homo sapiens
tttttaaaatctact

SEQ ID NO: 91914 - DNA, 15 bp, Homo sapiens
atttttaaaatctac

SEQ ID NO: 91915 - DNA, 15 bp, Homo sapiens
aatttttaaaatcta

SEQ ID NO: 91916 - DNA, 15 bp, Homo sapiens
taatttttaaaatct

SEQ ID NO: 91917 - DNA, 15 bp, Homo sapiens
ttaatttttaaaatc

SEQ ID NO: 91918 - DNA, 15 bp, Homo sapiens
attaatttttaaaat

SEQ ID NO: 91919 - DNA, 15 bp, Homo sapiens
aattaatttttaaaa

SEQ ID NO: 91920 - DNA, 15 bp, Homo sapiens
aaattaatttttaaa

SEQ ID NO: 91921 - DNA, 15 bp, Homo sapiens
taaattaatttttaa

SEQ ID NO: 91922 - DNA, 15 bp, Homo sapiens
ctaaattaattttta

SEQ ID NO: 91923 - DNA, 15 bp, Homo sapiens
tctaaattaattttt

SEQ ID NO: 91924 - DNA, 15 bp, Homo sapiens
ttctaaattaatttt

SEQ ID NO: 91925 - DNA, 15 bp, Homo sapiens
gttctaaattaattt

SEQ ID NO: 91926 - DNA, 15 bp, Homo sapiens
tgttctaaattaatt

SEQ ID NO: 91927 - DNA, 15 bp, Homo sapiens
ttgttctaaattaat

SEQ ID NO: 91928 - DNA, 15 bp, Homo sapiens
attgttctaaattaa

SEQ ID NO: 91929 - DNA, 15 bp, Homo sapiens
gattgttctaaatta

SEQ ID NO: 91930 - DNA, 15 bp, Homo sapiens
agattgttctaaatt

SEQ ID NO: 91931 - DNA, 15 bp, Homo sapiens
aagattgttctaaat

SEQ ID NO: 91932 - DNA, 15 bp, Homo sapiens
aaagattgttctaaa

SEQ ID NO: 91933 - DNA, 15 bp, Homo sapiens
taaagattgttctaa

SEQ ID NO: 91934 - DNA, 15 bp, Homo sapiens
ttaaagattgttcta

SEQ ID NO: 91935 - DNA, 15 bp, Homo sapiens
cttaaagattgttct

SEQ ID NO: 91936 - DNA, 15 bp, Homo sapiens
gcttaaagattgttc

SEQ ID NO: 91937 - DNA, 15 bp, Homo sapiens
ggcttaaagattgtt

SEQ ID NO: 91938 - DNA, 15 bp, Homo sapiens
gggcttaaagattgt

SEQ ID NO: 91939 - DNA, 15 bp, Homo sapiens
ggggcttaaagattg

SEQ ID NO: 91940 - DNA, 15 bp, Homo sapiens
aggggcttaaagatt

SEQ ID NO: 91941 - DNA, 15 bp, Homo sapiens
aaggggcttaaagat

SEQ ID NO: 91942 - DNA, 15 bp, Homo sapiens
aaaggggcttaaaga

SEQ ID NO: 91943 - DNA, 15 bp, Homo sapiens
taaaggggcttaaag

SEQ ID NO: 91944 - DNA, 15 bp, Homo sapiens
ttaaaggggcttaaa

SEQ ID NO: 91945 - DNA, 15 bp, Homo sapiens
tttaaaggggcttaa

SEQ ID NO: 91946 - DNA, 15 bp, Homo sapiens
atttaaaggggctta

SEQ ID NO: 91947 - DNA, 15 bp, Homo sapiens
aatttaaaggggctt

SEQ ID NO: 91948 - DNA, 15 bp, Homo sapiens
taatttaaaggggct

SEQ ID NO: 91949 - DNA, 15 bp, Homo sapiens
ttaatttaaaggggc

SEQ ID NO: 91950 - DNA, 15 bp, Homo sapiens
tttaatttaaagggg

SEQ ID NO: 91951 - DNA, 15 bp, Homo sapiens
atttaatttaaaggg

SEQ ID NO: 91952 - DNA, 15 bp, Homo sapiens
tatttaatttaaagg

SEQ ID NO: 91953 - DNA, 15 bp, Homo sapiens
atatttaatttaaag

SEQ ID NO: 91954 - DNA, 15 bp, Homo sapiens
aatatttaatttaaa

SEQ ID NO: 91955 - DNA, 15 bp, Homo sapiens
gaatatttaatttaa

SEQ ID NO: 91956 - DNA, 15 bp, Homo sapiens
agaatatttaattta

SEQ ID NO: 91957 - DNA, 15 bp, Homo sapiens
tagaatatttaattt

SEQ ID NO: 91958 - DNA, 15 bp, Homo sapiens
atagaatatttaatt

SEQ ID NO: 91959 - DNA, 15 bp, Homo sapiens
catagaatatttaat

SEQ ID NO: 91960 - DNA, 15 bp, Homo sapiens
ccatagaatatttaa

SEQ ID NO: 91961 - DNA, 15 bp, Homo sapiens
tccatagaatattta

SEQ ID NO: 91962 - DNA, 15 bp, Homo sapiens
gtccatagaatattt

SEQ ID NO: 91963 - DNA, 15 bp, Homo sapiens
tgtccatagaatatt

SEQ ID NO: 91964 - DNA, 15 bp, Homo sapiens
atgtccatagaatat

SEQ ID NO: 91965 - DNA, 15 bp, Homo sapiens
catgtccatagaata

SEQ ID NO: 91966 - DNA, 15 bp, Homo sapiens
ccatgtccatagaat

SEQ ID NO: 91967 - DNA, 15 bp, Homo sapiens
tccatgtccatagaa

SEQ ID NO: 91968 - DNA, 15 bp, Homo sapiens
atccatgtccataga

SEQ ID NO: 91969 - DNA, 15 bp, Homo sapiens
aatccatgtccatag

SEQ ID NO: 91970 - DNA, 15 bp, Homo sapiens
caatccatgtccata

SEQ ID NO: 91971 - DNA, 15 bp, Homo sapiens
ccaatccatgtccat

SEQ ID NO: 91972 - DNA, 15 bp, Homo sapiens
tccaatccatgtcca

SEQ ID NO: 91973 - DNA, 15 bp, Homo sapiens
atccaatccatgtcc

SEQ ID NO: 91974 - DNA, 15 bp, Homo sapiens
gatccaatccatgtc

SEQ ID NO: 91975 - DNA, 15 bp, Homo sapiens
ggatccaatccatgt

SEQ ID NO: 91976 - DNA, 15 bp, Homo sapiens
tggatccaatccatg

SEQ ID NO: 91977 - DNA, 15 bp, Homo sapiens
ctggatccaatccat

SEQ ID NO: 91978 - DNA, 15 bp, Homo sapiens
gctggatccaatcca

SEQ ID NO: 91979 - DNA, 15 bp, Homo sapiens
agctggatccaatcc

SEQ ID NO: 91980 - DNA, 15 bp, Homo sapiens
tagctggatccaatc

SEQ ID NO: 91981 - DNA, 15 bp, Homo sapiens
ctagctggatccaat

SEQ ID NO: 91982 - DNA, 15 bp, Homo sapiens
tctagctggatccaa

SEQ ID NO: 91983 - DNA, 15 bp, Homo sapiens
ctctagctggatcca

SEQ ID NO: 91984 - DNA, 15 bp, Homo sapiens
gctctagctggatcc

SEQ ID NO: 91985 - DNA, 15 bp, Homo sapiens
tgctctagctggatc

SEQ ID NO: 91986 - DNA, 15 bp, Homo sapiens
ctgctctagctggat

SEQ ID NO: 91987 - DNA, 15 bp, Homo sapiens
actgctctagctgga

SEQ ID NO: 91988 - DNA, 15 bp, Homo sapiens
aactgctctagctgg

SEQ ID NO: 91989 - DNA, 15 bp, Homo sapiens
taactgctctagctg

SEQ ID NO: 91990 - DNA, 15 bp, Homo sapiens
ataactgctctagct

SEQ ID NO: 91991 - DNA, 15 bp, Homo sapiens
cataactgctctagc

SEQ ID NO: 91992 - DNA, 15 bp, Homo sapiens
gcataactgctctag

SEQ ID NO: 91993 - DNA, 15 bp, Homo sapiens
agcataactgctcta

SEQ ID NO: 91994 - DNA, 15 bp, Homo sapiens
gagcataactgctct

SEQ ID NO: 91995 - DNA, 15 bp, Homo sapiens
agagcataactgctc

SEQ ID NO: 91996 - DNA, 15 bp, Homo sapiens
tagagcataactgct

SEQ ID NO: 91997 - DNA, 15 bp, Homo sapiens
gtagagcataactgc

SEQ ID NO: 91998 - DNA, 15 bp, Homo sapiens
ggtagagcataactg

SEQ ID NO: 91999 - DNA, 15 bp, Homo sapiens
aggtagagcataact

SEQ ID NO: 92000 - DNA, 15 bp, Homo sapiens
aaggtagagcataac

SEQ ID NO: 92001 - DNA, 15 bp, Homo sapiens
aaaggtagagcataa

SEQ ID NO: 92002 - DNA, 15 bp, Homo sapiens
taaaggtagagcata

SEQ ID NO: 92003 - DNA, 15 bp, Homo sapiens
ctaaaggtagagcat

SEQ ID NO: 92004 - DNA, 15 bp, Homo sapiens
actaaaggtagagca

SEQ ID NO: 92005 - DNA, 15 bp, Homo sapiens
aactaaaggtagagc

SEQ ID NO: 92006 - DNA, 15 bp, Homo sapiens
aaactaaaggtagag

SEQ ID NO: 92007 - DNA, 15 bp, Homo sapiens
taaactaaaggtaga

SEQ ID NO: 92008 - DNA, 15 bp, Homo sapiens
ataaactaaaggtag

SEQ ID NO: 92009 - DNA, 15 bp, Homo sapiens
gataaactaaaggta

SEQ ID NO: 92010 - DNA, 15 bp, Homo sapiens
tgataaactaaaggt

SEQ ID NO: 92011 - DNA, 15 bp, Homo sapiens
ttgataaactaaagg

SEQ ID NO: 92012 - DNA, 15 bp, Homo sapiens
cttgataaactaaag

SEQ ID NO: 92013 - DNA, 15 bp, Homo sapiens
ccttgataaactaaa

SEQ ID NO: 92014 - DNA, 15 bp, Homo sapiens
gccttgataaactaa

SEQ ID NO: 92015 - DNA, 15 bp, Homo sapiens
agccttgataaacta

SEQ ID NO: 92016 - DNA, 15 bp, Homo sapiens
tagccttgataaact

SEQ ID NO: 92017 - DNA, 15 bp, Homo sapiens
ttagccttgataaac

SEQ ID NO: 92018 - DNA, 15 bp, Homo sapiens
cttagccttgataaa

SEQ ID NO: 92019 - DNA, 15 bp, Homo sapiens
ccttagccttgataa

SEQ ID NO: 92020 - DNA, 15 bp, Homo sapiens
gccttagccttgata

SEQ ID NO: 92021 - DNA, 15 bp, Homo sapiens
tgccttagccttgat

SEQ ID NO: 92022 - DNA, 15 bp, Homo sapiens
gtgccttagccttga

SEQ ID NO: 92023 - DNA, 15 bp, Homo sapiens
agtgccttagccttg

SEQ ID NO: 92024 - DNA, 15 bp, Homo sapiens
aagtgccttagcctt

SEQ ID NO: 92025 - DNA, 15 bp, Homo sapiens
taagtgccttagcct

SEQ ID NO: 92026 - DNA, 15 bp, Homo sapiens
ttaagtgccttagcc

SEQ ID NO: 92027 - DNA, 15 bp, Homo sapiens
tttaagtgccttagc

SEQ ID NO: 92028 - DNA, 15 bp, Homo sapiens
ttttaagtgccttag

SEQ ID NO: 92029 - DNA, 15 bp, Homo sapiens
tttttaagtgcctta

SEQ ID NO: 92030 - DNA, 15 bp, Homo sapiens
ttttttaagtgcctt

SEQ ID NO: 92031 - DNA, 15 bp, Homo sapiens
tttttttaagtgcct

SEQ ID NO: 92032 - DNA, 15 bp, Homo sapiens
atttttttaagtgcc

SEQ ID NO: 92033 - DNA, 15 bp, Homo sapiens
tatttttttaagtgc

SEQ ID NO: 92034 - DNA, 15 bp, Homo sapiens
ttatttttttaagtg

SEQ ID NO: 92035 - DNA, 15 bp, Homo sapiens
tttatttttttaagt

SEQ ID NO: 92036 - DNA, 15 bp, Homo sapiens
gtttatttttttaag

SEQ ID NO: 92037 - DNA, 15 bp, Homo sapiens
agtttatttttttaa

SEQ ID NO: 92038 - DNA, 15 bp, Homo sapiens
tagtttattttttta

SEQ ID NO: 92039 - DNA, 15 bp, Homo sapiens
ctagtttattttttt

SEQ ID NO: 92040 - DNA, 15 bp, Homo sapiens
cctagtttatttttt

SEQ ID NO: 92041 - DNA, 15 bp, Homo sapiens
tcctagtttattttt

SEQ ID NO: 92042 - DNA, 15 bp, Homo sapiens
atcctagtttatttt

SEQ ID NO: 92043 - DNA, 15 bp, Homo sapiens
tatcctagtttattt

SEQ ID NO: 92044 - DNA, 15 bp, Homo sapiens
ttatcctagtttatt

SEQ ID NO: 92045 - DNA, 15 bp, Homo sapiens
tttatcctagtttat

SEQ ID NO: 92046 - DNA, 15 bp, Homo sapiens
ttttatcctagttta

SEQ ID NO: 92047 - DNA, 15 bp, Homo sapiens
cttttatcctagttt

SEQ ID NO: 92048 - DNA, 15 bp, Homo sapiens
gcttttatcctagtt

SEQ ID NO: 92049 - DNA, 15 bp, Homo sapiens
agcttttatcctagt

SEQ ID NO: 92050 - DNA, 15 bp, Homo sapiens
tagcttttatcctag

SEQ ID NO: 92051 - DNA, 15 bp, Homo sapiens
atagcttttatccta

SEQ ID NO: 92052 - DNA, 15 bp, Homo sapiens
aatagcttttatcct

SEQ ID NO: 92053 - DNA, 15 bp, Homo sapiens
caatagcttttatcc

SEQ ID NO: 92054 - DNA, 15 bp, Homo sapiens
acaatagcttttatc

SEQ ID NO: 92055 - DNA, 15 bp, Homo sapiens
aacaatagcttttat

SEQ ID NO: 92056 - DNA, 15 bp, Homo sapiens
taacaatagctttta

SEQ ID NO: 92057 - DNA, 15 bp, Homo sapiens
ataacaatagctttt

SEQ ID NO: 92058 - DNA, 15 bp, Homo sapiens
gataacaatagcttt

SEQ ID NO: 92059 - DNA, 15 bp, Homo sapiens
ggataacaatagctt

SEQ ID NO: 92060 - DNA, 15 bp, Homo sapiens
tggataacaatagct

SEQ ID NO: 92061 - DNA, 15 bp, Homo sapiens
atggataacaatagc

SEQ ID NO: 92062 - DNA, 15 bp, Homo sapiens
aatggataacaatag

SEQ ID NO: 92063 - DNA, 15 bp, Homo sapiens
aaatggataacaata

SEQ ID NO: 92064 - DNA, 15 bp, Homo sapiens
taaatggataacaat

SEQ ID NO: 92065 - DNA, 15 bp, Homo sapiens
gtaaatggataacaa

SEQ ID NO: 92066 - DNA, 15 bp, Homo sapiens
tgtaaatggataaca

SEQ ID NO: 92067 - DNA, 15 bp, Homo sapiens
ttgtaaatggataac

SEQ ID NO: 92068 - DNA, 15 bp, Homo sapiens
attgtaaatggataa

SEQ ID NO: 92069 - DNA, 15 bp, Homo sapiens
tattgtaaatggata

SEQ ID NO: 92070 - DNA, 15 bp, Homo sapiens
ctattgtaaatggat

SEQ ID NO: 92071 - DNA, 15 bp, Homo sapiens
gctattgtaaatgga

SEQ ID NO: 92072 - DNA, 15 bp, Homo sapiens
tgctattgtaaatgg

SEQ ID NO: 92073 - DNA, 15 bp, Homo sapiens
ctgctattgtaaatg

SEQ ID NO: 92074 - DNA, 15 bp, Homo sapiens
gctgctattgtaaat

SEQ ID NO: 92075 - DNA, 15 bp, Homo sapiens
ggctgctattgtaaa

SEQ ID NO: 92076 - DNA, 15 bp, Homo sapiens
tggctgctattgtaa

SEQ ID NO: 92077 - DNA, 15 bp, Homo sapiens
gtggctgctattgta

SEQ ID NO: 92078 - DNA, 15 bp, Homo sapiens
tgtggctgctattgt

SEQ ID NO: 92079 - DNA, 15 bp, Homo sapiens
ttgtggctgctattg

SEQ ID NO: 92080 - DNA, 15 bp, Homo sapiens
gttgtggctgctatt

SEQ ID NO: 92081 - DNA, 15 bp, Homo sapiens
agttgtggctgctat

SEQ ID NO: 92082 - DNA, 15 bp, Homo sapiens
cagttgtggctgcta

SEQ ID NO: 92083 - DNA, 15 bp, Homo sapiens
acagttgtggctgct

SEQ ID NO: 92084 - DNA, 15 bp, Homo sapiens
gacagttgtggctgc

SEQ ID NO: 92085 - DNA, 15 bp, Homo sapiens
tgacagttgtggctg

SEQ ID NO: 92086 - DNA, 15 bp, Homo sapiens
atgacagttgtggct

SEQ ID NO: 92087 - DNA, 15 bp, Homo sapiens
gatgacagttgtggc

SEQ ID NO: 92088 - DNA, 15 bp, Homo sapiens
agatgacagttgtgg

SEQ ID NO: 92089 - DNA, 15 bp, Homo sapiens
cagatgacagttgtg

SEQ ID NO: 92090 - DNA, 15 bp, Homo sapiens
acagatgacagttgt

SEQ ID NO: 92091 - DNA, 15 bp, Homo sapiens
tacagatgacagttg

SEQ ID NO: 92092 - DNA, 15 bp, Homo sapiens
ttacagatgacagtt

SEQ ID NO: 92093 - DNA, 15 bp, Homo sapiens
tttacagatgacagt

SEQ ID NO: 92094 - DNA, 15 bp, Homo sapiens
ctttacagatgacag

SEQ ID NO: 92095 - DNA, 15 bp, Homo sapiens
cctttacagatgaca

SEQ ID NO: 92096 - DNA, 15 bp, Homo sapiens
ccctttacagatgac

SEQ ID NO: 92097 - DNA, 15 bp, Homo sapiens
accctttacagatga

SEQ ID NO: 92098 - DNA, 15 bp, Homo sapiens
aaccctttacagatg

SEQ ID NO: 92099 - DNA, 15 bp, Homo sapiens
aaaccctttacagat

SEQ ID NO: 92100 - DNA, 15 bp, Homo sapiens
aaaaccctttacaga

SEQ ID NO: 92101 - DNA, 15 bp, Homo sapiens
caaaaccctttacag

SEQ ID NO: 92102 - DNA, 15 bp, Homo sapiens
ccaaaaccctttaca

SEQ ID NO: 92103 - DNA, 15 bp, Homo sapiens
tccaaaaccctttac

SEQ ID NO: 92104 - DNA, 15 bp, Homo sapiens
ttccaaaacccttta

SEQ ID NO: 92105 - DNA, 15 bp, Homo sapiens
attccaaaacccttt

SEQ ID NO: 92106 - DNA, 15 bp, Homo sapiens
tattccaaaaccctt

SEQ ID NO: 92107 - DNA, 15 bp, Homo sapiens
atattccaaaaccct

SEQ ID NO: 92108 - DNA, 15 bp, Homo sapiens
tatattccaaaaccc

SEQ ID NO: 92109 - DNA, 15 bp, Homo sapiens
atatattccaaaacc

SEQ ID NO: 92110 - DNA, 15 bp, Homo sapiens
gatatattccaaaac

SEQ ID NO: 92111 - DNA, 15 bp, Homo sapiens
tgatatattccaaaa

SEQ ID NO: 92112 - DNA, 15 bp, Homo sapiens
ctgatatattccaaa

SEQ ID NO: 92113 - DNA, 15 bp, Homo sapiens
tctgatatattccaa

SEQ ID NO: 92114 - DNA, 15 bp, Homo sapiens
gtctgatatattcca

SEQ ID NO: 92115 - DNA, 15 bp, Homo sapiens
tgtctgatatattcc

SEQ ID NO: 92116 - DNA, 15 bp, Homo sapiens
gtgtctgatatattc

SEQ ID NO: 92117 - DNA, 15 bp, Homo sapiens
ggtgtctgatatatt

SEQ ID NO: 92118 - DNA, 15 bp, Homo sapiens
aggtgtctgatatat

SEQ ID NO: 92119 - DNA, 15 bp, Homo sapiens
gaggtgtctgatata

SEQ ID NO: 92120 - DNA, 15 bp, Homo sapiens
ggaggtgtctgatat

SEQ ID NO: 92121 - DNA, 15 bp, Homo sapiens
tggaggtgtctgata

SEQ ID NO: 92122 - DNA, 15 bp, Homo sapiens
gtggaggtgtctgat

SEQ ID NO: 92123 - DNA, 15 bp, Homo sapiens
tgtggaggtgtctga

SEQ ID NO: 92124 - DNA, 15 bp, Homo sapiens
atgtggaggtgtctg

SEQ ID NO: 92125 - DNA, 15 bp, Homo sapiens
catgtggaggtgtct

SEQ ID NO: 92126 - DNA, 15 bp, Homo sapiens
gcatgtggaggtgtc

SEQ ID NO: 92127 - DNA, 15 bp, Homo sapiens
agcatgtggaggtgt

SEQ ID NO: 92128 - DNA, 15 bp, Homo sapiens
aagcatgtggaggtg

SEQ ID NO: 92129 - DNA, 15 bp, Homo sapiens
aaagcatgtggaggt

SEQ ID NO: 92130 - DNA, 15 bp, Homo sapiens
caaagcatgtggagg

SEQ ID NO: 92131 - DNA, 15 bp, Homo sapiens
gcaaagcatgtggag

SEQ ID NO: 92132 - DNA, 15 bp, Homo sapiens
agcaaagcatgtgga

SEQ ID NO: 92133 - DNA, 15 bp, Homo sapiens
aagcaaagcatgtgg

SEQ ID NO: 92134 - DNA, 15 bp, Homo sapiens
aaagcaaagcatgtg

SEQ ID NO: 92135 - DNA, 15 bp, Homo sapiens
caaagcaaagcatgt

SEQ ID NO: 92136 - DNA, 15 bp, Homo sapiens
ccaaagcaaagcatg

SEQ ID NO: 92137 - DNA, 15 bp, Homo sapiens
tccaaagcaaagcat

SEQ ID NO: 92138 - DNA, 15 bp, Homo sapiens
ctccaaagcaaagca

SEQ ID NO: 92139 - DNA, 15 bp, Homo sapiens
gctccaaagcaaagc

SEQ ID NO: 92140 - DNA, 15 bp, Homo sapiens
ggctccaaagcaaag

SEQ ID NO: 92141 - DNA, 15 bp, Homo sapiens
aggctccaaagcaaa

SEQ ID NO: 92142 - DNA, 15 bp, Homo sapiens
taggctccaaagcaa

SEQ ID NO: 92143 - DNA, 15 bp, Homo sapiens
ctaggctccaaagca

SEQ ID NO: 92144 - DNA, 15 bp, Homo sapiens
gctaggctccaaagc

SEQ ID NO: 92145 - DNA, 15 bp, Homo sapiens
tgctaggctccaaag

SEQ ID NO: 92146 - DNA, 15 bp, Homo sapiens
gtgctaggctccaaa

SEQ ID NO: 92147 - DNA, 15 bp, Homo sapiens
agtgctaggctccaa

SEQ ID NO: 92148 - DNA, 15 bp, Homo sapiens
cagtgctaggctcca

SEQ ID NO: 92149 - DNA, 15 bp, Homo sapiens
ccagtgctaggctcc

SEQ ID NO: 92150 - DNA, 15 bp, Homo sapiens
cccagtgctaggctc

SEQ ID NO: 92151 - DNA, 15 bp, Homo sapiens
acccagtgctaggct

SEQ ID NO: 92152 - DNA, 15 bp, Homo sapiens
gacccagtgctaggc

SEQ ID NO: 92153 - DNA, 15 bp, Homo sapiens
agacccagtgctagg

SEQ ID NO: 92154 - DNA, 15 bp, Homo sapiens
aagacccagtgctag

SEQ ID NO: 92155 - DNA, 15 bp, Homo sapiens
aaagacccagtgcta

SEQ ID NO: 92156 - DNA, 15 bp, Homo sapiens
caaagacccagtgct

SEQ ID NO: 92157 - DNA, 15 bp, Homo sapiens
tcaaagacccagtgc

SEQ ID NO: 92158 - DNA, 15 bp, Homo sapiens
ttcaaagacccagtg

SEQ ID NO: 92159 - DNA, 15 bp, Homo sapiens
cttcaaagacccagt

SEQ ID NO: 92160 - DNA, 15 bp, Homo sapiens
acttcaaagacccag

SEQ ID NO: 92161 - DNA, 15 bp, Homo sapiens
tacttcaaagaccca

SEQ ID NO: 92162 - DNA, 15 bp, Homo sapiens
ctacttcaaagaccc

SEQ ID NO: 92163 - DNA, 15 bp, Homo sapiens
tctacttcaaagacc

SEQ ID NO: 92164 - DNA, 15 bp, Homo sapiens
atctacttcaaagac

SEQ ID NO: 92165 - DNA, 15 bp, Homo sapiens
tatctacttcaaaga

SEQ ID NO: 92166 - DNA, 15 bp, Homo sapiens
atatctacttcaaag

SEQ ID NO: 92167 - DNA, 15 bp, Homo sapiens
aatatctacttcaaa

SEQ ID NO: 92168 - DNA, 15 bp, Homo sapiens
taatatctacttcaa

SEQ ID NO: 92169 - DNA, 15 bp, Homo sapiens
ataatatctacttca

SEQ ID NO: 92170 - DNA, 15 bp, Homo sapiens
aataatatctacttc

SEQ ID NO: 92171 - DNA, 15 bp, Homo sapiens
taataatatctactt

SEQ ID NO: 92172 - DNA, 15 bp, Homo sapiens
ataataatatctact

SEQ ID NO: 92173 - DNA, 15 bp, Homo sapiens
gataataatatctac

SEQ ID NO: 92174 - DNA, 15 bp, Homo sapiens
agataataatatcta

SEQ ID NO: 92175 - DNA, 15 bp, Homo sapiens
gagataataatatct

SEQ ID NO: 92176 - DNA, 15 bp, Homo sapiens
agagataataatatc

SEQ ID NO: 92177 - DNA, 15 bp, Homo sapiens
tagagataataatat

SEQ ID NO: 92178 - DNA, 15 bp, Homo sapiens
atagagataataata

SEQ ID NO: 92179 - DNA, 15 bp, Homo sapiens
aatagagataataat

SEQ ID NO: 92180 - DNA, 15 bp, Homo sapiens
aaatagagataataa

SEQ ID NO: 92181 - DNA, 15 bp, Homo sapiens
aaaatagagataata

SEQ ID NO: 92182 - DNA, 15 bp, Homo sapiens
caaaatagagataat

SEQ ID NO: 92183 - DNA, 15 bp, Homo sapiens
gcaaaatagagataa

SEQ ID NO: 92184 - DNA, 15 bp, Homo sapiens
tgcaaaatagagata

SEQ ID NO: 92185 - DNA, 15 bp, Homo sapiens
ctgcaaaatagagat

SEQ ID NO: 92186 - DNA, 15 bp, Homo sapiens
tctgcaaaatagaga

SEQ ID NO: 92187 - DNA, 15 bp, Homo sapiens
gtctgcaaaatagag

SEQ ID NO: 92188 - DNA, 15 bp, Homo sapiens
tgtctgcaaaataga

SEQ ID NO: 92189 - DNA, 15 bp, Homo sapiens
ttgtctgcaaaatag

SEQ ID NO: 92190 - DNA, 15 bp, Homo sapiens
tttgtctgcaaaata

SEQ ID NO: 92191 - DNA, 15 bp, Homo sapiens
ctttgtctgcaaaat

SEQ ID NO: 92192 - DNA, 15 bp, Homo sapiens
tctttgtctgcaaaa

SEQ ID NO: 92193 - DNA, 15 bp, Homo sapiens
ttctttgtctgcaaa

SEQ ID NO: 92194 - DNA, 15 bp, Homo sapiens
tttctttgtctgcaa

SEQ ID NO: 92195 - DNA, 15 bp, Homo sapiens
ctttctttgtctgca

SEQ ID NO: 92196 - DNA, 15 bp, Homo sapiens
actttctttgtctgc

SEQ ID NO: 92197 - DNA, 15 bp, Homo sapiens
cactttctttgtctg

SEQ ID NO: 92198 - DNA, 15 bp, Homo sapiens
ccactttctttgtct

SEQ ID NO: 92199 - DNA, 15 bp, Homo sapiens
cccactttctttgtc

SEQ ID NO: 92200 - DNA, 15 bp, Homo sapiens
ccccactttctttgt

SEQ ID NO: 92201 - DNA, 15 bp, Homo sapiens
accccactttctttg

SEQ ID NO: 92202 - DNA, 15 bp, Homo sapiens
aaccccactttcttt

SEQ ID NO: 92203 - DNA, 15 bp, Homo sapiens
gaaccccactttctt

SEQ ID NO: 92204 - DNA, 15 bp, Homo sapiens
tgaaccccactttct

SEQ ID NO: 92205 - DNA, 15 bp, Homo sapiens
ctgaaccccactttc

SEQ ID NO: 92206 - DNA, 15 bp, Homo sapiens
gctgaaccccacttt

SEQ ID NO: 92207 - DNA, 15 bp, Homo sapiens
tgctgaaccccactt

SEQ ID NO: 92208 - DNA, 15 bp, Homo sapiens
gtgctgaaccccact

SEQ ID NO: 92209 - DNA, 15 bp, Homo sapiens
agtgctgaaccccac

SEQ ID NO: 92210 - DNA, 15 bp, Homo sapiens
tagtgctgaacccca

SEQ ID NO: 92211 - DNA, 15 bp, Homo sapiens
atagtgctgaacccc

SEQ ID NO: 92212 - DNA, 15 bp, Homo sapiens
aatagtgctgaaccc

SEQ ID NO: 92213 - DNA, 15 bp, Homo sapiens
taatagtgctgaacc

SEQ ID NO: 92214 - DNA, 15 bp, Homo sapiens
ttaatagtgctgaac

SEQ ID NO: 92215 - DNA, 15 bp, Homo sapiens
cttaatagtgctgaa

SEQ ID NO: 92216 - DNA, 15 bp, Homo sapiens
acttaatagtgctga

SEQ ID NO: 92217 - DNA, 15 bp, Homo sapiens
cacttaatagtgctg

SEQ ID NO: 92218 - DNA, 15 bp, Homo sapiens
tcacttaatagtgct

SEQ ID NO: 92219 - DNA, 15 bp, Homo sapiens
gtcacttaatagtgc

SEQ ID NO: 92220 - DNA, 15 bp, Homo sapiens
agtcacttaatagtg

SEQ ID NO: 92221 - DNA, 15 bp, Homo sapiens
gagtcacttaatagt

SEQ ID NO: 92222 - DNA, 15 bp, Homo sapiens
tgagtcacttaatag

SEQ ID NO: 92223 - DNA, 15 bp, Homo sapiens
gtgagtcacttaata

SEQ ID NO: 92224 - DNA, 15 bp, Homo sapiens
agtgagtcacttaat

SEQ ID NO: 92225 - DNA, 15 bp, Homo sapiens
cagtgagtcacttaa

SEQ ID NO: 92226 - DNA, 15 bp, Homo sapiens
tcagtgagtcactta

SEQ ID NO: 92227 - DNA, 15 bp, Homo sapiens
ttcagtgagtcactt

SEQ ID NO: 92228 - DNA, 15 bp, Homo sapiens
cttcagtgagtcact

SEQ ID NO: 92229 - DNA, 15 bp, Homo sapiens
ccttcagtgagtcac

SEQ ID NO: 92230 - DNA, 15 bp, Homo sapiens
cccttcagtgagtca

SEQ ID NO: 92231 - DNA, 15 bp, Homo sapiens
acccttcagtgagtc

SEQ ID NO: 92232 - DNA, 15 bp, Homo sapiens
tacccttcagtgagt

SEQ ID NO: 92233 - DNA, 15 bp, Homo sapiens
gtacccttcagtgag

SEQ ID NO: 92234 - DNA, 15 bp, Homo sapiens
tgtacccttcagtga

SEQ ID NO: 92235 - DNA, 15 bp, Homo sapiens
gtgtacccttcagtg

SEQ ID NO: 92236 - DNA, 15 bp, Homo sapiens
tgtgtacccttcagt

SEQ ID NO: 92237 - DNA, 15 bp, Homo sapiens
ctgtgtacccttcag

SEQ ID NO: 92238 - DNA, 15 bp, Homo sapiens
gctgtgtacccttca

SEQ ID NO: 92239 - DNA, 15 bp, Homo sapiens
agctgtgtacccttc

SEQ ID NO: 92240 - DNA, 15 bp, Homo sapiens
tagctgtgtaccctt

SEQ ID NO: 92241 - DNA, 15 bp, Homo sapiens
gtagctgtgtaccct

SEQ ID NO: 92242 - DNA, 15 bp, Homo sapiens
agtagctgtgtaccc

SEQ ID NO: 92243 - DNA, 15 bp, Homo sapiens
tagtagctgtgtacc

SEQ ID NO: 92244 - DNA, 15 bp, Homo sapiens
ctagtagctgtgtac

SEQ ID NO: 92245 - DNA, 15 bp, Homo sapiens
tctagtagctgtgta

SEQ ID NO: 92246 - DNA, 15 bp, Homo sapiens
atctagtagctgtgt

SEQ ID NO: 92247 - DNA, 15 bp, Homo sapiens
catctagtagctgtg

SEQ ID NO: 92248 - DNA, 15 bp, Homo sapiens
ccatctagtagctgt

SEQ ID NO: 92249 - DNA, 15 bp, Homo sapiens
gccatctagtagctg

SEQ ID NO: 92250 - DNA, 15 bp, Homo sapiens
tgccatctagtagct

SEQ ID NO: 92251 - DNA, 15 bp, Homo sapiens
ctgccatctagtagc

SEQ ID NO: 92252 - DNA, 15 bp, Homo sapiens
tctgccatctagtag

SEQ ID NO: 92253 - DNA, 15 bp, Homo sapiens
ctctgccatctagta

SEQ ID NO: 92254 - DNA, 15 bp, Homo sapiens
gctctgccatctagt

SEQ ID NO: 92255 - DNA, 15 bp, Homo sapiens
tgctctgccatctag

SEQ ID NO: 92256 - DNA, 15 bp, Homo sapiens
ttgctctgccatcta

SEQ ID NO: 92257 - DNA, 15 bp, Homo sapiens
cttgctctgccatct

SEQ ID NO: 92258 - DNA, 15 bp, Homo sapiens
ccttgctctgccatc

SEQ ID NO: 92259 - DNA, 15 bp, Homo sapiens
tccttgctctgccat

SEQ ID NO: 92260 - DNA, 15 bp, Homo sapiens
gtccttgctctgcca

SEQ ID NO: 92261 - DNA, 15 bp, Homo sapiens
agtccttgctctgcc

SEQ ID NO: 92262 - DNA, 15 bp, Homo sapiens
gagtccttgctctgc

SEQ ID NO: 92263 - DNA, 15 bp, Homo sapiens
tgagtccttgctctg

SEQ ID NO: 92264 - DNA, 15 bp, Homo sapiens
ttgagtccttgctct

SEQ ID NO: 92265 - DNA, 15 bp, Homo sapiens
tttgagtccttgctc

SEQ ID NO: 92266 - DNA, 15 bp, Homo sapiens
gtttgagtccttgct

SEQ ID NO: 92267 - DNA, 15 bp, Homo sapiens
ggtttgagtccttgc

SEQ ID NO: 92268 - DNA, 15 bp, Homo sapiens
tggtttgagtccttg

SEQ ID NO: 92269 - DNA, 15 bp, Homo sapiens
ctggtttgagtcctt

SEQ ID NO: 92270 - DNA, 15 bp, Homo sapiens
cctggtttgagtcct

SEQ ID NO: 92271 - DNA, 15 bp, Homo sapiens
acctggtttgagtcc

SEQ ID NO: 92272 - DNA, 15 bp, Homo sapiens
aacctggtttgagtc

SEQ ID NO: 92273 - DNA, 15 bp, Homo sapiens
taacctggtttgagt

SEQ ID NO: 92274 - DNA, 15 bp, Homo sapiens
ctaacctggtttgag

SEQ ID NO: 92275 - DNA, 15 bp, Homo sapiens
tctaacctggtttga

SEQ ID NO: 92276 - DNA, 15 bp, Homo sapiens
ctctaacctggtttg

SEQ ID NO: 92277 - DNA, 15 bp, Homo sapiens
cctctaacctggttt

SEQ ID NO: 92278 - DNA, 15 bp, Homo sapiens
tcctctaacctggtt

SEQ ID NO: 92279 - DNA, 15 bp, Homo sapiens
atcctctaacctggt

SEQ ID NO: 92280 - DNA, 15 bp, Homo sapiens
aatcctctaacctgg

SEQ ID NO: 92281 - DNA, 15 bp, Homo sapiens
taatcctctaacctg

SEQ ID NO: 92282 - DNA, 15 bp, Homo sapiens
ctaatcctctaacct

SEQ ID NO: 92283 - DNA, 15 bp, Homo sapiens
tctaatcctctaacc

SEQ ID NO: 92284 - DNA, 15 bp, Homo sapiens
gtctaatcctctaac

SEQ ID NO: 92285 - DNA, 15 bp, Homo sapiens
agtctaatcctctaa

SEQ ID NO: 92286 - DNA, 15 bp, Homo sapiens
tagtctaatcctcta

SEQ ID NO: 92287 - DNA, 15 bp, Homo sapiens
ctagtctaatcctct

SEQ ID NO: 92288 - DNA, 15 bp, Homo sapiens
tctagtctaatcctc

SEQ ID NO: 92289 - DNA, 15 bp, Homo sapiens
ttctagtctaatcct

SEQ ID NO: 92290 - DNA, 15 bp, Homo sapiens
gttctagtctaatcc

SEQ ID NO: 92291 - DNA, 15 bp, Homo sapiens
ggttctagtctaatc

SEQ ID NO: 92292 - DNA, 15 bp, Homo sapiens
gggttctagtctaat

SEQ ID NO: 92293 - DNA, 15 bp, Homo sapiens
ggggttctagtctaa

SEQ ID NO: 92294 - DNA, 15 bp, Homo sapiens
gggggttctagtcta

SEQ ID NO: 92295 - DNA, 15 bp, Homo sapiens
agggggttctagtct

SEQ ID NO: 92296 - DNA, 15 bp, Homo sapiens
gagggggttctagtc

SEQ ID NO: 92297 - DNA, 15 bp, Homo sapiens
tgagggggttctagt

SEQ ID NO: 92298 - DNA, 15 bp, Homo sapiens
gtgagggggttctag

SEQ ID NO: 92299 - DNA, 15 bp, Homo sapiens
agtgagggggttcta

SEQ ID NO: 92300 - DNA, 15 bp, Homo sapiens
aagtgagggggttct

SEQ ID NO: 92301 - DNA, 15 bp, Homo sapiens
aaagtgagggggttc

SEQ ID NO: 92302 - DNA, 15 bp, Homo sapiens
gaaagtgagggggtt

SEQ ID NO: 92303 - DNA, 15 bp, Homo sapiens
agaaagtgagggggt

SEQ ID NO: 92304 - DNA, 15 bp, Homo sapiens
cagaaagtgaggggg

SEQ ID NO: 92305 - DNA, 15 bp, Homo sapiens
tcagaaagtgagggg

SEQ ID NO: 92306 - DNA, 15 bp, Homo sapiens
gtcagaaagtgaggg

SEQ ID NO: 92307 - DNA, 15 bp, Homo sapiens
tgtcagaaagtgagg

SEQ ID NO: 92308 - DNA, 15 bp, Homo sapiens
ttgtcagaaagtgag

SEQ ID NO: 92309 - DNA, 15 bp, Homo sapiens
tttgtcagaaagtga

SEQ ID NO: 92310 - DNA, 15 bp, Homo sapiens
atttgtcagaaagtg

SEQ ID NO: 92311 - DNA, 15 bp, Homo sapiens
tatttgtcagaaagt

SEQ ID NO: 92312 - DNA, 15 bp, Homo sapiens
gtatttgtcagaaag

SEQ ID NO: 92313 - DNA, 15 bp, Homo sapiens
tgtatttgtcagaaa

SEQ ID NO: 92314 - DNA, 15 bp, Homo sapiens
ctgtatttgtcagaa

SEQ ID NO: 92315 - DNA, 15 bp, Homo sapiens
gctgtatttgtcaga

SEQ ID NO: 92316 - DNA, 15 bp, Homo sapiens
ggctgtatttgtcag

SEQ ID NO: 92317 - DNA, 15 bp, Homo sapiens
aggctgtatttgtca

SEQ ID NO: 92318 - DNA, 15 bp, Homo sapiens
aaggctgtatttgtc

SEQ ID NO: 92319 - DNA, 15 bp, Homo sapiens
aaaggctgtatttgt

SEQ ID NO: 92320 - DNA, 15 bp, Homo sapiens
gaaaggctgtatttg

SEQ ID NO: 92321 - DNA, 15 bp, Homo sapiens
agaaaggctgtattt

SEQ ID NO: 92322 - DNA, 15 bp, Homo sapiens
gagaaaggctgtatt

SEQ ID NO: 92323 - DNA, 15 bp, Homo sapiens
agagaaaggctgtat

SEQ ID NO: 92324 - DNA, 15 bp, Homo sapiens
aagagaaaggctgta

SEQ ID NO: 92325 - DNA, 15 bp, Homo sapiens
gaagagaaaggctgt

SEQ ID NO: 92326 - DNA, 15 bp, Homo sapiens
ggaagagaaaggctg

SEQ ID NO: 92327 - DNA, 15 bp, Homo sapiens
tggaagagaaaggct

SEQ ID NO: 92328 - DNA, 15 bp, Homo sapiens
ctggaagagaaaggc

SEQ ID NO: 92329 - DNA, 15 bp, Homo sapiens
gctggaagagaaagg

SEQ ID NO: 92330 - DNA, 15 bp, Homo sapiens
agctggaagagaaag

SEQ ID NO: 92331 - DNA, 15 bp, Homo sapiens
cagctggaagagaaa

SEQ ID NO: 92332 - DNA, 15 bp, Homo sapiens
gcagctggaagagaa

SEQ ID NO: 92333 - DNA, 15 bp, Homo sapiens
ggcagctggaagaga

SEQ ID NO: 92334 - DNA, 15 bp, Homo sapiens
tggcagctggaagag

SEQ ID NO: 92335 - DNA, 15 bp, Homo sapiens
atggcagctggaaga

SEQ ID NO: 92336 - DNA, 15 bp, Homo sapiens
aatggcagctggaag

SEQ ID NO: 92337 - DNA, 15 bp, Homo sapiens
gaatggcagctggaa

SEQ ID NO: 92338 - DNA, 15 bp, Homo sapiens
agaatggcagctgga

SEQ ID NO: 92339 - DNA, 15 bp, Homo sapiens
cagaatggcagctgg

SEQ ID NO: 92340 - DNA, 15 bp, Homo sapiens
gcagaatggcagctg

SEQ ID NO: 92341 - DNA, 15 bp, Homo sapiens
tgcagaatggcagct

SEQ ID NO: 92342 - DNA, 15 bp, Homo sapiens
ttgcagaatggcagc

SEQ ID NO: 92343 - DNA, 15 bp, Homo sapiens
tttgcagaatggcag

SEQ ID NO: 92344 - DNA, 15 bp, Homo sapiens
ttttgcagaatggca

SEQ ID NO: 92345 - DNA, 15 bp, Homo sapiens
cttttgcagaatggc

SEQ ID NO: 92346 - DNA, 15 bp, Homo sapiens
gcttttgcagaatgg

SEQ ID NO: 92347 - DNA, 15 bp, Homo sapiens
tgcttttgcagaatg

SEQ ID NO: 92348 - DNA, 15 bp, Homo sapiens
ttgcttttgcagaat

SEQ ID NO: 92349 - DNA, 15 bp, Homo sapiens
attgcttttgcagaa

SEQ ID NO: 92350 - DNA, 15 bp, Homo sapiens
tattgcttttgcaga

SEQ ID NO: 92351 - DNA, 15 bp, Homo sapiens
gtattgcttttgcag

SEQ ID NO: 92352 - DNA, 15 bp, Homo sapiens
ggtattgcttttgca

SEQ ID NO: 92353 - DNA, 15 bp, Homo sapiens
aggtattgcttttgc

SEQ ID NO: 92354 - DNA, 15 bp, Homo sapiens
taggtattgcttttg

SEQ ID NO: 92355 - DNA, 15 bp, Homo sapiens
ctaggtattgctttt

SEQ ID NO: 92356 - DNA, 15 bp, Homo sapiens
gctaggtattgcttt

SEQ ID NO: 92357 - DNA, 15 bp, Homo sapiens
ggctaggtattgctt

SEQ ID NO: 92358 - DNA, 15 bp, Homo sapiens
aggctaggtattgct

SEQ ID NO: 92359 - DNA, 15 bp, Homo sapiens
taggctaggtattgc

SEQ ID NO: 92360 - DNA, 15 bp, Homo sapiens
ttaggctaggtattg

SEQ ID NO: 92361 - DNA, 15 bp, Homo sapiens
tttaggctaggtatt

SEQ ID NO: 92362 - DNA, 15 bp, Homo sapiens
atttaggctaggtat

SEQ ID NO: 92363 - DNA, 15 bp, Homo sapiens
catttaggctaggta

SEQ ID NO: 92364 - DNA, 15 bp, Homo sapiens
acatttaggctaggt

SEQ ID NO: 92365 - DNA, 15 bp, Homo sapiens
tacatttaggctagg

SEQ ID NO: 92366 - DNA, 15 bp, Homo sapiens
ttacatttaggctag

SEQ ID NO: 92367 - DNA, 15 bp, Homo sapiens
gttacatttaggcta

SEQ ID NO: 92368 - DNA, 15 bp, Homo sapiens
agttacatttaggct

SEQ ID NO: 92369 - DNA, 15 bp, Homo sapiens
aagttacatttaggc

SEQ ID NO: 92370 - DNA, 15 bp, Homo sapiens
caagttacatttagg

SEQ ID NO: 92371 - DNA, 15 bp, Homo sapiens
ccaagttacatttag

SEQ ID NO: 92372 - DNA, 15 bp, Homo sapiens
cccaagttacattta

SEQ ID NO: 92373 - DNA, 15 bp, Homo sapiens
gcccaagttacattt

SEQ ID NO: 92374 - DNA, 15 bp, Homo sapiens
tgcccaagttacatt

SEQ ID NO: 92375 - DNA, 15 bp, Homo sapiens
ttgcccaagttacat

SEQ ID NO: 92376 - DNA, 15 bp, Homo sapiens
tttgcccaagttaca

SEQ ID NO: 92377 - DNA, 15 bp, Homo sapiens
ctttgcccaagttac

SEQ ID NO: 92378 - DNA, 15 bp, Homo sapiens
tctttgcccaagtta

SEQ ID NO: 92379 - DNA, 15 bp, Homo sapiens
atctttgcccaagtt

SEQ ID NO: 92380 - DNA, 15 bp, Homo sapiens
catctttgcccaagt

SEQ ID NO: 92381 - DNA, 15 bp, Homo sapiens
acatctttgcccaag

SEQ ID NO: 92382 - DNA, 15 bp, Homo sapiens
cacatctttgcccaa

SEQ ID NO: 92383 - DNA, 15 bp, Homo sapiens
tcacatctttgccca

SEQ ID NO: 92384 - DNA, 15 bp, Homo sapiens
ttcacatctttgccc

SEQ ID NO: 92385 - DNA, 15 bp, Homo sapiens
attcacatctttgcc

SEQ ID NO: 92386 - DNA, 15 bp, Homo sapiens
cattcacatctttgc

SEQ ID NO: 92387 - DNA, 15 bp, Homo sapiens
acattcacatctttg

SEQ ID NO: 92388 - DNA, 15 bp, Homo sapiens
aacattcacatcttt

SEQ ID NO: 92389 - DNA, 15 bp, Homo sapiens
aaacattcacatctt

SEQ ID NO: 92390 - DNA, 15 bp, Homo sapiens
aaaacattcacatct

SEQ ID NO: 92391 - DNA, 15 bp, Homo sapiens
caaaacattcacatc

SEQ ID NO: 92392 - DNA, 15 bp, Homo sapiens
gcaaaacattcacat

SEQ ID NO: 92393 - DNA, 15 bp, Homo sapiens
tgcaaaacattcaca

SEQ ID NO: 92394 - DNA, 15 bp, Homo sapiens
atgcaaaacattcac

SEQ ID NO: 92395 - DNA, 15 bp, Homo sapiens
aatgcaaaacattca

SEQ ID NO: 92396 - DNA, 15 bp, Homo sapiens
taatgcaaaacattc

SEQ ID NO: 92397 - DNA, 15 bp, Homo sapiens
gtaatgcaaaacatt

SEQ ID NO: 92398 - DNA, 15 bp, Homo sapiens
agtaatgcaaaacat

SEQ ID NO: 92399 - DNA, 15 bp, Homo sapiens
aagtaatgcaaaaca

SEQ ID NO: 92400 - DNA, 15 bp, Homo sapiens
caagtaatgcaaaac

SEQ ID NO: 92401 - DNA, 15 bp, Homo sapiens
tcaagtaatgcaaaa

SEQ ID NO: 92402 - DNA, 15 bp, Homo sapiens
atcaagtaatgcaaa

SEQ ID NO: 92403 - DNA, 15 bp, Homo sapiens
aatcaagtaatgcaa

SEQ ID NO: 92404 - DNA, 15 bp, Homo sapiens
aaatcaagtaatgca

SEQ ID NO: 92405 - DNA, 15 bp, Homo sapiens
gaaatcaagtaatgc

SEQ ID NO: 92406 - DNA, 15 bp, Homo sapiens
agaaatcaagtaatg

SEQ ID NO: 92407 - DNA, 15 bp, Homo sapiens
cagaaatcaagtaat

SEQ ID NO: 92408 - DNA, 15 bp, Homo sapiens
acagaaatcaagtaa

SEQ ID NO: 92409 - DNA, 15 bp, Homo sapiens
gacagaaatcaagta

SEQ ID NO: 92410 - DNA, 15 bp, Homo sapiens
ggacagaaatcaagt

SEQ ID NO: 92411 - DNA, 15 bp, Homo sapiens
tggacagaaatcaag

SEQ ID NO: 92412 - DNA, 15 bp, Homo sapiens
atggacagaaatcaa

SEQ ID NO: 92413 - DNA, 15 bp, Homo sapiens
catggacagaaatca

SEQ ID NO: 92414 - DNA, 15 bp, Homo sapiens
gcatggacagaaatc

SEQ ID NO: 92415 - DNA, 15 bp, Homo sapiens
tgcatggacagaaat

SEQ ID NO: 92416 - DNA, 15 bp, Homo sapiens
ctgcatggacagaaa

SEQ ID NO: 92417 - DNA, 15 bp, Homo sapiens
actgcatggacagaa

SEQ ID NO: 92418 - DNA, 15 bp, Homo sapiens
aactgcatggacaga

SEQ ID NO: 92419 - DNA, 15 bp, Homo sapiens
aaactgcatggacag

SEQ ID NO: 92420 - DNA, 15 bp, Homo sapiens
aaaactgcatggaca

SEQ ID NO: 92421 - DNA, 15 bp, Homo sapiens
gaaaactgcatggac

SEQ ID NO: 92422 - DNA, 15 bp, Homo sapiens
ggaaaactgcatgga

SEQ ID NO: 92423 - DNA, 15 bp, Homo sapiens
gggaaaactgcatgg

SEQ ID NO: 92424 - DNA, 15 bp, Homo sapiens
tgggaaaactgcatg

SEQ ID NO: 92425 - DNA, 15 bp, Homo sapiens
gtgggaaaactgcat

SEQ ID NO: 92426 - DNA, 15 bp, Homo sapiens
agtgggaaaactgca

SEQ ID NO: 92427 - DNA, 15 bp, Homo sapiens
cagtgggaaaactgc

SEQ ID NO: 92428 - DNA, 15 bp, Homo sapiens
acagtgggaaaactg

SEQ ID NO: 92429 - DNA, 15 bp, Homo sapiens
gacagtgggaaaact

SEQ ID NO: 92430 - DNA, 15 bp, Homo sapiens
tgacagtgggaaaac

SEQ ID NO: 92431 - DNA, 15 bp, Homo sapiens
ctgacagtgggaaaa

SEQ ID NO: 92432 - DNA, 15 bp, Homo sapiens
gctgacagtgggaaa

SEQ ID NO: 92433 - DNA, 15 bp, Homo sapiens
agctgacagtgggaa

SEQ ID NO: 92434 - DNA, 15 bp, Homo sapiens
gagctgacagtggga

SEQ ID NO: 92435 - DNA, 15 bp, Homo sapiens
ggagctgacagtggg

SEQ ID NO: 92436 - DNA, 15 bp, Homo sapiens
tggagctgacagtgg

SEQ ID NO: 92437 - DNA, 15 bp, Homo sapiens
atggagctgacagtg

SEQ ID NO: 92438 - DNA, 15 bp, Homo sapiens
gatggagctgacagt

SEQ ID NO: 92439 - DNA, 15 bp, Homo sapiens
agatggagctgacag

SEQ ID NO: 92440 - DNA, 15 bp, Homo sapiens
gagatggagctgaca

SEQ ID NO: 92441 - DNA, 15 bp, Homo sapiens
ggagatggagctgac

SEQ ID NO: 92442 - DNA, 15 bp, Homo sapiens
tggagatggagctga

SEQ ID NO: 92443 - DNA, 15 bp, Homo sapiens
atggagatggagctg

SEQ ID NO: 92444 - DNA, 15 bp, Homo sapiens
gatggagatggagct

SEQ ID NO: 92445 - DNA, 15 bp, Homo sapiens
ggatggagatggagc

SEQ ID NO: 92446 - DNA, 15 bp, Homo sapiens
gggatggagatggag

SEQ ID NO: 92447 - DNA, 15 bp, Homo sapiens
agggatggagatgga

SEQ ID NO: 92448 - DNA, 15 bp, Homo sapiens
tagggatggagatgg

SEQ ID NO: 92449 - DNA, 15 bp, Homo sapiens
ttagggatggagatg

SEQ ID NO: 92450 - DNA, 15 bp, Homo sapiens
tttagggatggagat

SEQ ID NO: 92451 - DNA, 15 bp, Homo sapiens
gtttagggatggaga

SEQ ID NO: 92452 - DNA, 15 bp, Homo sapiens
agtttagggatggag

SEQ ID NO: 92453 - DNA, 15 bp, Homo sapiens
aagtttagggatgga

SEQ ID NO: 92454 - DNA, 15 bp, Homo sapiens
aaagtttagggatgg

SEQ ID NO: 92455 - DNA, 15 bp, Homo sapiens
aaaagtttagggatg

SEQ ID NO: 92456 - DNA, 15 bp, Homo sapiens
gaaaagtttagggat

SEQ ID NO: 92457 - DNA, 15 bp, Homo sapiens
agaaaagtttaggga

SEQ ID NO: 92458 - DNA, 15 bp, Homo sapiens
gagaaaagtttaggg

SEQ ID NO: 92459 - DNA, 15 bp, Homo sapiens
agagaaaagtttagg

SEQ ID NO: 92460 - DNA, 15 bp, Homo sapiens
gagagaaaagtttag

SEQ ID NO: 92461 - DNA, 15 bp, Homo sapiens
agagagaaaagttta

SEQ ID NO: 92462 - DNA, 15 bp, Homo sapiens
aagagagaaaagttt

SEQ ID NO: 92463 - DNA, 15 bp, Homo sapiens
aaagagagaaaagtt

SEQ ID NO: 92464 - DNA, 15 bp, Homo sapiens
gaaagagagaaaagt

SEQ ID NO: 92465 - DNA, 15 bp, Homo sapiens
ggaaagagagaaaag

SEQ ID NO: 92466 - DNA, 15 bp, Homo sapiens
tggaaagagagaaaa

SEQ ID NO: 92467 - DNA, 15 bp, Homo sapiens
ttggaaagagagaaa

SEQ ID NO: 92468 - DNA, 15 bp, Homo sapiens
tttggaaagagagaa

SEQ ID NO: 92469 - DNA, 15 bp, Homo sapiens
ctttggaaagagaga

SEQ ID NO: 92470 - DNA, 15 bp, Homo sapiens
tctttggaaagagag

SEQ ID NO: 92471 - DNA, 15 bp, Homo sapiens
atctttggaaagaga

SEQ ID NO: 92472 - DNA, 15 bp, Homo sapiens
catctttggaaagag

SEQ ID NO: 92473 - DNA, 15 bp, Homo sapiens
tcatctttggaaaga

SEQ ID NO: 92474 - DNA, 15 bp, Homo sapiens
ttcatctttggaaag

SEQ ID NO: 92475 - DNA, 15 bp, Homo sapiens
gttcatctttggaaa

SEQ ID NO: 92476 - DNA, 15 bp, Homo sapiens
ggttcatctttggaa

SEQ ID NO: 92477 - DNA, 15 bp, Homo sapiens
tggttcatctttgga

SEQ ID NO: 92478 - DNA, 15 bp, Homo sapiens
ttggttcatctttgg

SEQ ID NO: 92479 - DNA, 15 bp, Homo sapiens
attggttcatctttg

SEQ ID NO: 92480 - DNA, 15 bp, Homo sapiens
tattggttcatcttt

SEQ ID NO: 92481 - DNA, 15 bp, Homo sapiens
ttattggttcatctt

SEQ ID NO: 92482 - DNA, 15 bp, Homo sapiens
tttattggttcatct

SEQ ID NO: 92483 - DNA, 15 bp, Homo sapiens
gtttattggttcatc

SEQ ID NO: 92484 - DNA, 15 bp, Homo sapiens
tgtttattggttcat

SEQ ID NO: 92485 - DNA, 15 bp, Homo sapiens
ttgtttattggttca

SEQ ID NO: 92486 - DNA, 15 bp, Homo sapiens
gttgtttattggttc

SEQ ID NO: 92487 - DNA, 15 bp, Homo sapiens
agttgtttattggtt

SEQ ID NO: 92488 - DNA, 15 bp, Homo sapiens
aagttgtttattggt

SEQ ID NO: 92489 - DNA, 15 bp, Homo sapiens
taagttgtttattgg

SEQ ID NO: 92490 - DNA, 15 bp, Homo sapiens
ataagttgtttattg

SEQ ID NO: 92491 - DNA, 15 bp, Homo sapiens
cataagttgtttatt

SEQ ID NO: 92492 - DNA, 15 bp, Homo sapiens
gcataagttgtttat

SEQ ID NO: 92493 - DNA, 15 bp, Homo sapiens
agcataagttgttta

SEQ ID NO: 92494 - DNA, 15 bp, Homo sapiens
aagcataagttgttt

SEQ ID NO: 92495 - DNA, 15 bp, Homo sapiens
caagcataagttgtt

SEQ ID NO: 92496 - DNA, 15 bp, Homo sapiens
ccaagcataagttgt

SEQ ID NO: 92497 - DNA, 15 bp, Homo sapiens
gccaagcataagttg

SEQ ID NO: 92498 - DNA, 15 bp, Homo sapiens
tgccaagcataagtt

SEQ ID NO: 92499 - DNA, 15 bp, Homo sapiens
gtgccaagcataagt

SEQ ID NO: 92500 - DNA, 15 bp, Homo sapiens
ggtgccaagcataag

SEQ ID NO: 92501 - DNA, 15 bp, Homo sapiens
tggtgccaagcataa

SEQ ID NO: 92502 - DNA, 15 bp, Homo sapiens
ctggtgccaagcata

SEQ ID NO: 92503 - DNA, 15 bp, Homo sapiens
gctggtgccaagcat

SEQ ID NO: 92504 - DNA, 15 bp, Homo sapiens
ggctggtgccaagca

SEQ ID NO: 92505 - DNA, 15 bp, Homo sapiens
gggctggtgccaagc

SEQ ID NO: 92506 - DNA, 15 bp, Homo sapiens
agggctggtgccaag

SEQ ID NO: 92507 - DNA, 15 bp, Homo sapiens
aagggctggtgccaa

SEQ ID NO: 92508 - DNA, 15 bp, Homo sapiens
taagggctggtgcca

SEQ ID NO: 92509 - DNA, 15 bp, Homo sapiens
ctaagggctggtgcc

SEQ ID NO: 92510 - DNA, 15 bp, Homo sapiens
actaagggctggtgc

SEQ ID NO: 92511 - DNA, 15 bp, Homo sapiens
aactaagggctggtg

SEQ ID NO: 92512 - DNA, 15 bp, Homo sapiens
gaactaagggctggt

SEQ ID NO: 92513 - DNA, 15 bp, Homo sapiens
agaactaagggctgg

SEQ ID NO: 92514 - DNA, 15 bp, Homo sapiens
cagaactaagggctg

SEQ ID NO: 92515 - DNA, 15 bp, Homo sapiens
tcagaactaagggct

SEQ ID NO: 92516 - DNA, 15 bp, Homo sapiens
gtcagaactaagggc

SEQ ID NO: 92517 - DNA, 15 bp, Homo sapiens
tgtcagaactaaggg

SEQ ID NO: 92518 - DNA, 15 bp, Homo sapiens
ctgtcagaactaagg

SEQ ID NO: 92519 - DNA, 15 bp, Homo sapiens
gctgtcagaactaag

SEQ ID NO: 92520 - DNA, 15 bp, Homo sapiens
tgctgtcagaactaa

SEQ ID NO: 92521 - DNA, 15 bp, Homo sapiens
gtgctgtcagaacta

SEQ ID NO: 92522 - DNA, 15 bp, Homo sapiens
tgtgctgtcagaact

SEQ ID NO: 92523 - DNA, 15 bp, Homo sapiens
ctgtgctgtcagaac

SEQ ID NO: 92524 - DNA, 15 bp, Homo sapiens
tctgtgctgtcagaa

SEQ ID NO: 92525 - DNA, 15 bp, Homo sapiens
ctctgtgctgtcaga

SEQ ID NO: 92526 - DNA, 15 bp, Homo sapiens
tctctgtgctgtcag

SEQ ID NO: 92527 - DNA, 15 bp, Homo sapiens
ttctctgtgctgtca

SEQ ID NO: 92528 - DNA, 15 bp, Homo sapiens
attctctgtgctgtc

SEQ ID NO: 92529 - DNA, 15 bp, Homo sapiens
gattctctgtgctgt

SEQ ID NO: 92530 - DNA, 15 bp, Homo sapiens
tgattctctgtgctg

SEQ ID NO: 92531 - DNA, 15 bp, Homo sapiens
gtgattctctgtgct

SEQ ID NO: 92532 - DNA, 15 bp, Homo sapiens
ggtgattctctgtgc

SEQ ID NO: 92533 - DNA, 15 bp, Homo sapiens
tggtgattctctgtg

SEQ ID NO: 92534 - DNA, 15 bp, Homo sapiens
ctggtgattctctgt

SEQ ID NO: 92535 - DNA, 15 bp, Homo sapiens
cctggtgattctctg

SEQ ID NO: 92536 - DNA, 15 bp, Homo sapiens
tcctggtgattctct

SEQ ID NO: 92537 - DNA, 15 bp, Homo sapiens
ctcctggtgattctc

SEQ ID NO: 92538 - DNA, 15 bp, Homo sapiens
tctcctggtgattct

SEQ ID NO: 92539 - DNA, 15 bp, Homo sapiens
atctcctggtgattc

SEQ ID NO: 92540 - DNA, 15 bp, Homo sapiens
gatctcctggtgatt

SEQ ID NO: 92541 - DNA, 15 bp, Homo sapiens
agatctcctggtgat

SEQ ID NO: 92542 - DNA, 15 bp, Homo sapiens
aagatctcctggtga

SEQ ID NO: 92543 - DNA, 15 bp, Homo sapiens
aaagatctcctggtg

SEQ ID NO: 92544 - DNA, 15 bp, Homo sapiens
gaaagatctcctggt

SEQ ID NO: 92545 - DNA, 15 bp, Homo sapiens
tgaaagatctcctgg

SEQ ID NO: 92546 - DNA, 15 bp, Homo sapiens
ttgaaagatctcctg

SEQ ID NO: 92547 - DNA, 15 bp, Homo sapiens
tttgaaagatctcct

SEQ ID NO: 92548 - DNA, 15 bp, Homo sapiens
ttttgaaagatctcc

SEQ ID NO: 92549 - DNA, 15 bp, Homo sapiens
attttgaaagatctc

SEQ ID NO: 92550 - DNA, 15 bp, Homo sapiens
tattttgaaagatct

SEQ ID NO: 92551 - DNA, 15 bp, Homo sapiens
gtattttgaaagatc

SEQ ID NO: 92552 - DNA, 15 bp, Homo sapiens
agtattttgaaagat

SEQ ID NO: 92553 - DNA, 15 bp, Homo sapiens
cagtattttgaaaga

SEQ ID NO: 92554 - DNA, 15 bp, Homo sapiens
tcagtattttgaaag

SEQ ID NO: 92555 - DNA, 15 bp, Homo sapiens
gtcagtattttgaaa

SEQ ID NO: 92556 - DNA, 15 bp, Homo sapiens
agtcagtattttgaa

SEQ ID NO: 92557 - DNA, 15 bp, Homo sapiens
gagtcagtattttga

SEQ ID NO: 92558 - DNA, 15 bp, Homo sapiens
agagtcagtattttg

SEQ ID NO: 92559 - DNA, 15 bp, Homo sapiens
tagagtcagtatttt

SEQ ID NO: 92560 - DNA, 15 bp, Homo sapiens
ctagagtcagtattt

SEQ ID NO: 92561 - DNA, 15 bp, Homo sapiens
cctagagtcagtatt

SEQ ID NO: 92562 - DNA, 15 bp, Homo sapiens
tcctagagtcagtat

SEQ ID NO: 92563 - DNA, 15 bp, Homo sapiens
gtcctagagtcagta

SEQ ID NO: 92564 - DNA, 15 bp, Homo sapiens
tgtcctagagtcagt

SEQ ID NO: 92565 - DNA, 15 bp, Homo sapiens
ttgtcctagagtcag

SEQ ID NO: 92566 - DNA, 15 bp, Homo sapiens
tttgtcctagagtca

SEQ ID NO: 92567 - DNA, 15 bp, Homo sapiens
gtttgtcctagagtc

SEQ ID NO: 92568 - DNA, 15 bp, Homo sapiens
tgtttgtcctagagt

SEQ ID NO: 92569 - DNA, 15 bp, Homo sapiens
atgtttgtcctagag

SEQ ID NO: 92570 - DNA, 15 bp, Homo sapiens
aatgtttgtcctaga

SEQ ID NO: 92571 - DNA, 15 bp, Homo sapiens
caatgtttgtcctag

SEQ ID NO: 92572 - DNA, 15 bp, Homo sapiens
gcaatgtttgtccta

SEQ ID NO: 92573 - DNA, 15 bp, Homo sapiens
tgcaatgtttgtcct

SEQ ID NO: 92574 - DNA, 15 bp, Homo sapiens
atgcaatgtttgtcc

SEQ ID NO: 92575 - DNA, 15 bp, Homo sapiens
catgcaatgtttgtc

SEQ ID NO: 92576 - DNA, 15 bp, Homo sapiens
tcatgcaatgtttgt

SEQ ID NO: 92577 - DNA, 15 bp, Homo sapiens
atcatgcaatgtttg

SEQ ID NO: 92578 - DNA, 15 bp, Homo sapiens
aatcatgcaatgttt

SEQ ID NO: 92579 - DNA, 15 bp, Homo sapiens
caatcatgcaatgtt

SEQ ID NO: 92580 - DNA, 15 bp, Homo sapiens
gcaatcatgcaatgt

SEQ ID NO: 92581 - DNA, 15 bp, Homo sapiens
tgcaatcatgcaatg

SEQ ID NO: 92582 - DNA, 15 bp, Homo sapiens
gtgcaatcatgcaat

SEQ ID NO: 92583 - DNA, 15 bp, Homo sapiens
agtgcaatcatgcaa

SEQ ID NO: 92584 - DNA, 15 bp, Homo sapiens
gagtgcaatcatgca

SEQ ID NO: 92585 - DNA, 15 bp, Homo sapiens
tgagtgcaatcatgc

SEQ ID NO: 92586 - DNA, 15 bp, Homo sapiens
atgagtgcaatcatg

SEQ ID NO: 92587 - DNA, 15 bp, Homo sapiens
tatgagtgcaatcat

SEQ ID NO: 92588 - DNA, 15 bp, Homo sapiens
ctatgagtgcaatca

SEQ ID NO: 92589 - DNA, 15 bp, Homo sapiens
cctatgagtgcaatc

SEQ ID NO: 92590 - DNA, 15 bp, Homo sapiens
tcctatgagtgcaat

SEQ ID NO: 92591 - DNA, 15 bp, Homo sapiens
ctcctatgagtgcaa

SEQ ID NO: 92592 - DNA, 15 bp, Homo sapiens
cctcctatgagtgca

SEQ ID NO: 92593 - DNA, 15 bp, Homo sapiens
acctcctatgagtgc

SEQ ID NO: 92594 - DNA, 15 bp, Homo sapiens
tacctcctatgagtg

SEQ ID NO: 92595 - DNA, 15 bp, Homo sapiens
ttacctcctatgagt

SEQ ID NO: 92596 - DNA, 15 bp, Homo sapiens
gttacctcctatgag

SEQ ID NO: 92597 - DNA, 15 bp, Homo sapiens
agttacctcctatga

SEQ ID NO: 92598 - DNA, 15 bp, Homo sapiens
cagttacctcctatg

SEQ ID NO: 92599 - DNA, 15 bp, Homo sapiens
acagttacctcctat

SEQ ID NO: 92600 - DNA, 15 bp, Homo sapiens
gacagttacctccta

SEQ ID NO: 92601 - DNA, 15 bp, Homo sapiens
tgacagttacctcct

SEQ ID NO: 92602 - DNA, 15 bp, Homo sapiens
ttgacagttacctcc

SEQ ID NO: 92603 - DNA, 15 bp, Homo sapiens
gttgacagttacctc

SEQ ID NO: 92604 - DNA, 15 bp, Homo sapiens
agttgacagttacct

SEQ ID NO: 92605 - DNA, 15 bp, Homo sapiens
aagttgacagttacc

SEQ ID NO: 92606 - DNA, 15 bp, Homo sapiens
aaagttgacagttac

SEQ ID NO: 92607 - DNA, 15 bp, Homo sapiens
caaagttgacagtta

SEQ ID NO: 92608 - DNA, 15 bp, Homo sapiens
acaaagttgacagtt

SEQ ID NO: 92609 - DNA, 15 bp, Homo sapiens
tacaaagttgacagt

SEQ ID NO: 92610 - DNA, 15 bp, Homo sapiens
ctacaaagttgacag

SEQ ID NO: 92611 - DNA, 15 bp, Homo sapiens
tctacaaagttgaca

SEQ ID NO: 92612 - DNA, 15 bp, Homo sapiens
ctctacaaagttgac

SEQ ID NO: 92613 - DNA, 15 bp, Homo sapiens
gctctacaaagttga

SEQ ID NO: 92614 - DNA, 15 bp, Homo sapiens
ggctctacaaagttg

SEQ ID NO: 92615 - DNA, 15 bp, Homo sapiens
tggctctacaaagtt

SEQ ID NO: 92616 - DNA, 15 bp, Homo sapiens
ctggctctacaaagt

SEQ ID NO: 92617 - DNA, 15 bp, Homo sapiens
tctggctctacaaag

SEQ ID NO: 92618 - DNA, 15 bp, Homo sapiens
ttctggctctacaaa

SEQ ID NO: 92619 - DNA, 15 bp, Homo sapiens
cttctggctctacaa

SEQ ID NO: 92620 - DNA, 15 bp, Homo sapiens
ccttctggctctaca

SEQ ID NO: 92621 - DNA, 15 bp, Homo sapiens
accttctggctctac

SEQ ID NO: 92622 - DNA, 15 bp, Homo sapiens
taccttctggctcta

SEQ ID NO: 92623 - DNA, 15 bp, Homo sapiens
gtaccttctggctct

SEQ ID NO: 92624 - DNA, 15 bp, Homo sapiens
tgtaccttctggctc

SEQ ID NO: 92625 - DNA, 15 bp, Homo sapiens
atgtaccttctggct

SEQ ID NO: 92626 - DNA, 15 bp, Homo sapiens
catgtaccttctggc

SEQ ID NO: 92627 - DNA, 15 bp, Homo sapiens
ccatgtaccttctgg

SEQ ID NO: 92628 - DNA, 15 bp, Homo sapiens
accatgtaccttctg

SEQ ID NO: 92629 - DNA, 15 bp, Homo sapiens
caccatgtaccttct

SEQ ID NO: 92630 - DNA, 15 bp, Homo sapiens
ccaccatgtaccttc

SEQ ID NO: 92631 - DNA, 15 bp, Homo sapiens
accaccatgtacctt

SEQ ID NO: 92632 - DNA, 15 bp, Homo sapiens
aaccaccatgtacct

SEQ ID NO: 92633 - DNA, 15 bp, Homo sapiens
taaccaccatgtacc

SEQ ID NO: 92634 - DNA, 15 bp, Homo sapiens
gtaaccaccatgtac

SEQ ID NO: 92635 - DNA, 15 bp, Homo sapiens
ggtaaccaccatgta

SEQ ID NO: 92636 - DNA, 15 bp, Homo sapiens
tggtaaccaccatgt

SEQ ID NO: 92637 - DNA, 15 bp, Homo sapiens
ctggtaaccaccatg

SEQ ID NO: 92638 - DNA, 15 bp, Homo sapiens
cctggtaaccaccat

SEQ ID NO: 92639 - DNA, 15 bp, Homo sapiens
tcctggtaaccacca

SEQ ID NO: 92640 - DNA, 15 bp, Homo sapiens
ctcctggtaaccacc

SEQ ID NO: 92641 - DNA, 15 bp, Homo sapiens
gctcctggtaaccac

SEQ ID NO: 92642 - DNA, 15 bp, Homo sapiens
cgctcctggtaacca

SEQ ID NO: 92643 - DNA, 15 bp, Homo sapiens
ccgctcctggtaacc

SEQ ID NO: 92644 - DNA, 15 bp, Homo sapiens
gccgctcctggtaac

SEQ ID NO: 92645 - DNA, 15 bp, Homo sapiens
tgccgctcctggtaa

SEQ ID NO: 92646 - DNA, 15 bp, Homo sapiens
ttgccgctcctggta

SEQ ID NO: 92647 - DNA, 15 bp, Homo sapiens
cttgccgctcctggt

SEQ ID NO: 92648 - DNA, 15 bp, Homo sapiens
ccttgccgctcctgg

SEQ ID NO: 92649 - DNA, 15 bp, Homo sapiens
tccttgccgctcctg

SEQ ID NO: 92650 - DNA, 15 bp, Homo sapiens
ctccttgccgctcct

SEQ ID NO: 92651 - DNA, 15 bp, Homo sapiens
actccttgccgctcc

SEQ ID NO: 92652 - DNA, 15 bp, Homo sapiens
cactccttgccgctc

SEQ ID NO: 92653 - DNA, 15 bp, Homo sapiens
ccactccttgccgct

SEQ ID NO: 92654 - DNA, 15 bp, Homo sapiens
tccactccttgccgc

SEQ ID NO: 92655 - DNA, 15 bp, Homo sapiens
ttccactccttgccg

SEQ ID NO: 92656 - DNA, 15 bp, Homo sapiens
tttccactccttgcc

SEQ ID NO: 92657 - DNA, 15 bp, Homo sapiens
atttccactccttgc

SEQ ID NO: 92658 - DNA, 15 bp, Homo sapiens
tatttccactccttg

SEQ ID NO: 92659 - DNA, 15 bp, Homo sapiens
ctatttccactcctt

SEQ ID NO: 92660 - DNA, 15 bp, Homo sapiens
cctatttccactcct

SEQ ID NO: 92661 - DNA, 15 bp, Homo sapiens
ccctatttccactcc

SEQ ID NO: 92662 - DNA, 15 bp, Homo sapiens
accctatttccactc

SEQ ID NO: 92663 - DNA, 15 bp, Homo sapiens
caccctatttccact

SEQ ID NO: 92664 - DNA, 15 bp, Homo sapiens
acaccctatttccac

SEQ ID NO: 92665 - DNA, 15 bp, Homo sapiens
aacaccctatttcca

SEQ ID NO: 92666 - DNA, 15 bp, Homo sapiens
taacaccctatttcc

SEQ ID NO: 92667 - DNA, 15 bp, Homo sapiens
ctaacaccctatttc

SEQ ID NO: 92668 - DNA, 15 bp, Homo sapiens
actaacaccctattt

SEQ ID NO: 92669 - DNA, 15 bp, Homo sapiens
cactaacaccctatt

SEQ ID NO: 92670 - DNA, 15 bp, Homo sapiens
acactaacaccctat

SEQ ID NO: 92671 - DNA, 15 bp, Homo sapiens
aacactaacacccta

SEQ ID NO: 92672 - DNA, 15 bp, Homo sapiens
aaacactaacaccct

SEQ ID NO: 92673 - DNA, 15 bp, Homo sapiens
taaacactaacaccc

SEQ ID NO: 92674 - DNA, 15 bp, Homo sapiens
ttaaacactaacacc

SEQ ID NO: 92675 - DNA, 15 bp, Homo sapiens
attaaacactaacac

SEQ ID NO: 92676 - DNA, 15 bp, Homo sapiens
cattaaacactaaca

SEQ ID NO: 92677 - DNA, 15 bp, Homo sapiens
ccattaaacactaac

SEQ ID NO: 92678 - DNA, 15 bp, Homo sapiens
cccattaaacactaa

SEQ ID NO: 92679 - DNA, 15 bp, Homo sapiens
acccattaaacacta

SEQ ID NO: 92680 - DNA, 15 bp, Homo sapiens
tacccattaaacact

SEQ ID NO: 92681 - DNA, 15 bp, Homo sapiens
ttacccattaaacac

SEQ ID NO: 92682 - DNA, 15 bp, Homo sapiens
cttacccattaaaca

SEQ ID NO: 92683 - DNA, 15 bp, Homo sapiens
tcttacccattaaac

SEQ ID NO: 92684 - DNA, 15 bp, Homo sapiens
ctcttacccattaaa

SEQ ID NO: 92685 - DNA, 15 bp, Homo sapiens
actcttacccattaa

SEQ ID NO: 92686 - DNA, 15 bp, Homo sapiens
aactcttacccatta

SEQ ID NO: 92687 - DNA, 15 bp, Homo sapiens
aaactcttacccatt

SEQ ID NO: 92688 - DNA, 15 bp, Homo sapiens
gaaactcttacccat

SEQ ID NO: 92689 - DNA, 15 bp, Homo sapiens
tgaaactcttaccca

SEQ ID NO: 92690 - DNA, 15 bp, Homo sapiens
ttgaaactcttaccc

SEQ ID NO: 92691 - DNA, 15 bp, Homo sapiens
attgaaactcttacc

SEQ ID NO: 92692 - DNA, 15 bp, Homo sapiens
aattgaaactcttac

SEQ ID NO: 92693 - DNA, 15 bp, Homo sapiens
aaattgaaactctta

SEQ ID NO: 92694 - DNA, 15 bp, Homo sapiens
caaattgaaactctt

SEQ ID NO: 92695 - DNA, 15 bp, Homo sapiens
ccaaattgaaactct

SEQ ID NO: 92696 - DNA, 15 bp, Homo sapiens
cccaaattgaaactc

SEQ ID NO: 92697 - DNA, 15 bp, Homo sapiens
tcccaaattgaaact

SEQ ID NO: 92698 - DNA, 15 bp, Homo sapiens
ttcccaaattgaaac

SEQ ID NO: 92699 - DNA, 15 bp, Homo sapiens
cttcccaaattgaaa

SEQ ID NO: 92700 - DNA, 15 bp, Homo sapiens
tcttcccaaattgaa

SEQ ID NO: 92701 - DNA, 15 bp, Homo sapiens
atcttcccaaattga

SEQ ID NO: 92702 - DNA, 15 bp, Homo sapiens
catcttcccaaattg

SEQ ID NO: 92703 - DNA, 15 bp, Homo sapiens
tcatcttcccaaatt

SEQ ID NO: 92704 - DNA, 15 bp, Homo sapiens
ttcatcttcccaaat

SEQ ID NO: 92705 - DNA, 15 bp, Homo sapiens
tttcatcttcccaaa

SEQ ID NO: 92706 - DNA, 15 bp, Homo sapiens
ttttcatcttcccaa

SEQ ID NO: 92707 - DNA, 15 bp, Homo sapiens
cttttcatcttccca

SEQ ID NO: 92708 - DNA, 15 bp, Homo sapiens
ccttttcatcttccc

SEQ ID NO: 92709 - DNA, 15 bp, Homo sapiens
accttttcatcttcc

SEQ ID NO: 92710 - DNA, 15 bp, Homo sapiens
aaccttttcatcttc

SEQ ID NO: 92711 - DNA, 15 bp, Homo sapiens
gaaccttttcatctt

SEQ ID NO: 92712 - DNA, 15 bp, Homo sapiens
agaaccttttcatct

SEQ ID NO: 92713 - DNA, 15 bp, Homo sapiens
cagaaccttttcatc

SEQ ID NO: 92714 - DNA, 15 bp, Homo sapiens
ccagaaccttttcat

SEQ ID NO: 92715 - DNA, 15 bp, Homo sapiens
tccagaaccttttca

SEQ ID NO: 92716 - DNA, 15 bp, Homo sapiens
ctccagaaccttttc

SEQ ID NO: 92717 - DNA, 15 bp, Homo sapiens
gctccagaacctttt

SEQ ID NO: 92718 - DNA, 15 bp, Homo sapiens
agctccagaaccttt

SEQ ID NO: 92719 - DNA, 15 bp, Homo sapiens
cagctccagaacctt

SEQ ID NO: 92720 - DNA, 15 bp, Homo sapiens
ccagctccagaacct

SEQ ID NO: 92721 - DNA, 15 bp, Homo sapiens
tccagctccagaacc

SEQ ID NO: 92722 - DNA, 15 bp, Homo sapiens
atccagctccagaac

SEQ ID NO: 92723 - DNA, 15 bp, Homo sapiens
catccagctccagaa

SEQ ID NO: 92724 - DNA, 15 bp, Homo sapiens
ccatccagctccaga

SEQ ID NO: 92725 - DNA, 15 bp, Homo sapiens
accatccagctccag

SEQ ID NO: 92726 - DNA, 15 bp, Homo sapiens
caccatccagctcca

SEQ ID NO: 92727 - DNA, 15 bp, Homo sapiens
ccaccatccagctcc

SEQ ID NO: 92728 - DNA, 15 bp, Homo sapiens
accaccatccagctc

SEQ ID NO: 92729 - DNA, 15 bp, Homo sapiens
taccaccatccagct

SEQ ID NO: 92730 - DNA, 15 bp, Homo sapiens
ttaccaccatccagc

SEQ ID NO: 92731 - DNA, 15 bp, Homo sapiens
attaccaccatccag

SEQ ID NO: 92732 - DNA, 15 bp, Homo sapiens
gattaccaccatcca

SEQ ID NO: 92733 - DNA, 15 bp, Homo sapiens
cgattaccaccatcc

SEQ ID NO: 92734 - DNA, 15 bp, Homo sapiens
acgattaccaccatc

SEQ ID NO: 92735 - DNA, 15 bp, Homo sapiens
aacgattaccaccat

SEQ ID NO: 92736 - DNA, 15 bp, Homo sapiens
caacgattaccacca

SEQ ID NO: 92737 - DNA, 15 bp, Homo sapiens
gcaacgattaccacc

SEQ ID NO: 92738 - DNA, 15 bp, Homo sapiens
tgcaacgattaccac

SEQ ID NO: 92739 - DNA, 15 bp, Homo sapiens
atgcaacgattacca

SEQ ID NO: 92740 - DNA, 15 bp, Homo sapiens
tatgcaacgattacc

SEQ ID NO: 92741 - DNA, 15 bp, Homo sapiens
ctatgcaacgattac

SEQ ID NO: 92742 - DNA, 15 bp, Homo sapiens
gctatgcaacgatta

SEQ ID NO: 92743 - DNA, 15 bp, Homo sapiens
tgctatgcaacgatt

SEQ ID NO: 92744 - DNA, 15 bp, Homo sapiens
atgctatgcaacgat

SEQ ID NO: 92745 - DNA, 15 bp, Homo sapiens
aatgctatgcaacga

SEQ ID NO: 92746 - DNA, 15 bp, Homo sapiens
caatgctatgcaacg

SEQ ID NO: 92747 - DNA, 15 bp, Homo sapiens
acaatgctatgcaac

SEQ ID NO: 92748 - DNA, 15 bp, Homo sapiens
cacaatgctatgcaa

SEQ ID NO: 92749 - DNA, 15 bp, Homo sapiens
tcacaatgctatgca

SEQ ID NO: 92750 - DNA, 15 bp, Homo sapiens
ttcacaatgctatgc

SEQ ID NO: 92751 - DNA, 15 bp, Homo sapiens
attcacaatgctatg

SEQ ID NO: 92752 - DNA, 15 bp, Homo sapiens
cattcacaatgctat

SEQ ID NO: 92753 - DNA, 15 bp, Homo sapiens
acattcacaatgcta

SEQ ID NO: 92754 - DNA, 15 bp, Homo sapiens
tacattcacaatgct

SEQ ID NO: 92755 - DNA, 15 bp, Homo sapiens
gtacattcacaatgc

SEQ ID NO: 92756 - DNA, 15 bp, Homo sapiens
agtacattcacaatg

SEQ ID NO: 92757 - DNA, 15 bp, Homo sapiens
aagtacattcacaat

SEQ ID NO: 92758 - DNA, 15 bp, Homo sapiens
taagtacattcacaa

SEQ ID NO: 92759 - DNA, 15 bp, Homo sapiens
ttaagtacattcaca

SEQ ID NO: 92760 - DNA, 15 bp, Homo sapiens
attaagtacattcac

SEQ ID NO: 92761 - DNA, 15 bp, Homo sapiens
cattaagtacattca

SEQ ID NO: 92762 - DNA, 15 bp, Homo sapiens
gcattaagtacattc

SEQ ID NO: 92763 - DNA, 15 bp, Homo sapiens
ggcattaagtacatt

SEQ ID NO: 92764 - DNA, 15 bp, Homo sapiens
tggcattaagtacat

SEQ ID NO: 92765 - DNA, 15 bp, Homo sapiens
gtggcattaagtaca

SEQ ID NO: 92766 - DNA, 15 bp, Homo sapiens
agtggcattaagtac

SEQ ID NO: 92767 - DNA, 15 bp, Homo sapiens
tagtggcattaagta

SEQ ID NO: 92768 - DNA, 15 bp, Homo sapiens
ttagtggcattaagt

SEQ ID NO: 92769 - DNA, 15 bp, Homo sapiens
tttagtggcattaag

SEQ ID NO: 92770 - DNA, 15 bp, Homo sapiens
atttagtggcattaa

SEQ ID NO: 92771 - DNA, 15 bp, Homo sapiens
aatttagtggcatta

SEQ ID NO: 92772 - DNA, 15 bp, Homo sapiens
caatttagtggcatt

SEQ ID NO: 92773 - DNA, 15 bp, Homo sapiens
acaatttagtggcat

SEQ ID NO: 92774 - DNA, 15 bp, Homo sapiens
tacaatttagtggca

SEQ ID NO: 92775 - DNA, 15 bp, Homo sapiens
gtacaatttagtggc

SEQ ID NO: 92776 - DNA, 15 bp, Homo sapiens
tgtacaatttagtgg

SEQ ID NO: 92777 - DNA, 15 bp, Homo sapiens
gtgtacaatttagtg

SEQ ID NO: 92778 - DNA, 15 bp, Homo sapiens
agtgtacaatttagt

SEQ ID NO: 92779 - DNA, 15 bp, Homo sapiens
aagtgtacaatttag

SEQ ID NO: 92780 - DNA, 15 bp, Homo sapiens
taagtgtacaattta

SEQ ID NO: 92781 - DNA, 15 bp, Homo sapiens
ttaagtgtacaattt

SEQ ID NO: 92782 - DNA, 15 bp, Homo sapiens
tttaagtgtacaatt

SEQ ID NO: 92783 - DNA, 15 bp, Homo sapiens
ttttaagtgtacaat

SEQ ID NO: 92784 - DNA, 15 bp, Homo sapiens
attttaagtgtacaa

SEQ ID NO: 92785 - DNA, 15 bp, Homo sapiens
cattttaagtgtaca

SEQ ID NO: 92786 - DNA, 15 bp, Homo sapiens
ccattttaagtgtac

SEQ ID NO: 92787 - DNA, 15 bp, Homo sapiens
accattttaagtgta

SEQ ID NO: 92788 - DNA, 15 bp, Homo sapiens
aaccattttaagtgt

SEQ ID NO: 92789 - DNA, 15 bp, Homo sapiens
taaccattttaagtg

SEQ ID NO: 92790 - DNA, 15 bp, Homo sapiens
ttaaccattttaagt

SEQ ID NO: 92791 - DNA, 15 bp, Homo sapiens
tttaaccattttaag

SEQ ID NO: 92792 - DNA, 15 bp, Homo sapiens
ttttaaccattttaa

SEQ ID NO: 92793 - DNA, 15 bp, Homo sapiens
attttaaccatttta

SEQ ID NO: 92794 - DNA, 15 bp, Homo sapiens
cattttaaccatttt

SEQ ID NO: 92795 - DNA, 15 bp, Homo sapiens
ccattttaaccattt

SEQ ID NO: 92796 - DNA, 15 bp, Homo sapiens
accattttaaccatt

SEQ ID NO: 92797 - DNA, 15 bp, Homo sapiens
taccattttaaccat

SEQ ID NO: 92798 - DNA, 15 bp, Homo sapiens
ttaccattttaacca

SEQ ID NO: 92799 - DNA, 15 bp, Homo sapiens
cttaccattttaacc

SEQ ID NO: 92800 - DNA, 15 bp, Homo sapiens
acttaccattttaac

SEQ ID NO: 92801 - DNA, 15 bp, Homo sapiens
aacttaccattttaa

SEQ ID NO: 92802 - DNA, 15 bp, Homo sapiens
aaacttaccatttta

SEQ ID NO: 92803 - DNA, 15 bp, Homo sapiens
aaaacttaccatttt

SEQ ID NO: 92804 - DNA, 15 bp, Homo sapiens
taaaacttaccattt

SEQ ID NO: 92805 - DNA, 15 bp, Homo sapiens
ataaaacttaccatt

SEQ ID NO: 92806 - DNA, 15 bp, Homo sapiens
cataaaacttaccat

SEQ ID NO: 92807 - DNA, 15 bp, Homo sapiens
acataaaacttacca

SEQ ID NO: 92808 - DNA, 15 bp, Homo sapiens
aacataaaacttacc

SEQ ID NO: 92809 - DNA, 15 bp, Homo sapiens
taacataaaacttac

SEQ ID NO: 92810 - DNA, 15 bp, Homo sapiens
gtaacataaaactta

SEQ ID NO: 92811 - DNA, 15 bp, Homo sapiens
tgtaacataaaactt

SEQ ID NO: 92812 - DNA, 15 bp, Homo sapiens
atgtaacataaaact

SEQ ID NO: 92813 - DNA, 15 bp, Homo sapiens
tatgtaacataaaac

SEQ ID NO: 92814 - DNA, 15 bp, Homo sapiens
atatgtaacataaaa

SEQ ID NO: 92815 - DNA, 15 bp, Homo sapiens
aatatgtaacataaa

SEQ ID NO: 92816 - DNA, 15 bp, Homo sapiens
aaatatgtaacataa

SEQ ID NO: 92817 - DNA, 15 bp, Homo sapiens
aaaatatgtaacata

SEQ ID NO: 92818 - DNA, 15 bp, Homo sapiens
gagaccttggaagga

SEQ ID NO: 92819 - DNA, 15 bp, Homo sapiens
tgagaccttggaagg

SEQ ID NO: 92820 - DNA, 15 bp, Homo sapiens
ctgagaccttggaag

SEQ ID NO: 92821 - DNA, 15 bp, Homo sapiens
actgagaccttggaa

SEQ ID NO: 92822 - DNA, 15 bp, Homo sapiens
cactgagaccttgga

SEQ ID NO: 92823 - DNA, 15 bp, Homo sapiens
ccactgagaccttgg

SEQ ID NO: 92824 - DNA, 15 bp, Homo sapiens
tccactgagaccttg

SEQ ID NO: 92825 - DNA, 15 bp, Homo sapiens
atccactgagacctt

SEQ ID NO: 92826 - DNA, 15 bp, Homo sapiens
catccactgagacct

SEQ ID NO: 92827 - DNA, 15 bp, Homo sapiens
gcatccactgagacc

SEQ ID NO: 92828 - DNA, 15 bp, Homo sapiens
ggcatccactgagac

SEQ ID NO: 92829 - DNA, 15 bp, Homo sapiens
tggcatccactgaga

SEQ ID NO: 92830 - DNA, 15 bp, Homo sapiens
ttggcatccactgag

SEQ ID NO: 92831 - DNA, 15 bp, Homo sapiens
cttggcatccactga

SEQ ID NO: 92832 - DNA, 15 bp, Homo sapiens
gcttggcatccactg

SEQ ID NO: 92833 - DNA, 15 bp, Homo sapiens
agcttggcatccact

SEQ ID NO: 92834 - DNA, 15 bp, Homo sapiens
gagcttggcatccac

SEQ ID NO: 92835 - DNA, 15 bp, Homo sapiens
ggagcttggcatcca

SEQ ID NO: 92836 - DNA, 15 bp, Homo sapiens
aggagcttggcatcc

SEQ ID NO: 92837 - DNA, 15 bp, Homo sapiens
gaggagcttggcatc

SEQ ID NO: 92838 - DNA, 15 bp, Homo sapiens
agaggagcttggcat

SEQ ID NO: 92839 - DNA, 15 bp, Homo sapiens
cagaggagcttggca

SEQ ID NO: 92840 - DNA, 15 bp, Homo sapiens
acagaggagcttggc

SEQ ID NO: 92841 - DNA, 15 bp, Homo sapiens
aacagaggagcttgg

SEQ ID NO: 92842 - DNA, 15 bp, Homo sapiens
caacagaggagcttg

SEQ ID NO: 92843 - DNA, 15 bp, Homo sapiens
gcaacagaggagctt

SEQ ID NO: 92844 - DNA, 15 bp, Homo sapiens
agcaacagaggagct

SEQ ID NO: 92845 - DNA, 15 bp, Homo sapiens
gagcaacagaggagc

SEQ ID NO: 92846 - DNA, 15 bp, Homo sapiens
agagcaacagaggag

SEQ ID NO: 92847 - DNA, 15 bp, Homo sapiens
aagagcaacagagga

SEQ ID NO: 92848 - DNA, 15 bp, Homo sapiens
aaagagcaacagagg

SEQ ID NO: 92849 - DNA, 15 bp, Homo sapiens
caaagagcaacagag

SEQ ID NO: 92850 - DNA, 15 bp, Homo sapiens
ccaaagagcaacaga

SEQ ID NO: 92851 - DNA, 15 bp, Homo sapiens
cccaaagagcaacag

SEQ ID NO: 92852 - DNA, 15 bp, Homo sapiens
tcccaaagagcaaca

SEQ ID NO: 92853 - DNA, 15 bp, Homo sapiens
atcccaaagagcaac

SEQ ID NO: 92854 - DNA, 15 bp, Homo sapiens
catcccaaagagcaa

SEQ ID NO: 92855 - DNA, 15 bp, Homo sapiens
acatcccaaagagca

SEQ ID NO: 92856 - DNA, 15 bp, Homo sapiens
tacatcccaaagagc

SEQ ID NO: 92857 - DNA, 15 bp, Homo sapiens
ttacatcccaaagag

SEQ ID NO: 92858 - DNA, 15 bp, Homo sapiens
cttacatcccaaaga

SEQ ID NO: 92859 - DNA, 15 bp, Homo sapiens
tcttacatcccaaag

SEQ ID NO: 92860 - DNA, 15 bp, Homo sapiens
gtcttacatcccaaa

SEQ ID NO: 92861 - DNA, 15 bp, Homo sapiens
cgtcttacatcccaa

SEQ ID NO: 92862 - DNA, 15 bp, Homo sapiens
gcgtcttacatccca

SEQ ID NO: 92863 - DNA, 15 bp, Homo sapiens
ggcgtcttacatccc

SEQ ID NO: 92864 - DNA, 15 bp, Homo sapiens
cggcgtcttacatcc

SEQ ID NO: 92865 - DNA, 15 bp, Homo sapiens
gcggcgtcttacatc

SEQ ID NO: 92866 - DNA, 15 bp, Homo sapiens
agcggcgtcttacat

SEQ ID NO: 92867 - DNA, 15 bp, Homo sapiens
cagcggcgtcttaca

SEQ ID NO: 92868 - DNA, 15 bp, Homo sapiens
tcagcggcgtcttac

SEQ ID NO: 92869 - DNA, 15 bp, Homo sapiens
ttcagcggcgtctta

SEQ ID NO: 92870 - DNA, 15 bp, Homo sapiens
cttcagcggcgtctt

SEQ ID NO: 92871 - DNA, 15 bp, Homo sapiens
acttcagcggcgtct

SEQ ID NO: 92872 - DNA, 15 bp, Homo sapiens
cacttcagcggcgtc

SEQ ID NO: 92873 - DNA, 15 bp, Homo sapiens
tcacttcagcggcgt

SEQ ID NO: 92874 - DNA, 15 bp, Homo sapiens
ttcacttcagcggcg

SEQ ID NO: 92875 - DNA, 15 bp, Homo sapiens
cttcacttcagcggc

SEQ ID NO: 92876 - DNA, 15 bp, Homo sapiens
ccttcacttcagcgg

SEQ ID NO: 92877 - DNA, 15 bp, Homo sapiens
accttcacttcagcg

SEQ ID NO: 92878 - DNA, 15 bp, Homo sapiens
aaccttcacttcagc

SEQ ID NO: 92879 - DNA, 15 bp, Homo sapiens
aaaccttcacttcag

SEQ ID NO: 92880 - DNA, 15 bp, Homo sapiens
taaaccttcacttca

SEQ ID NO: 92881 - DNA, 15 bp, Homo sapiens
ttaaaccttcacttc

SEQ ID NO: 92882 - DNA, 15 bp, Homo sapiens
attaaaccttcactt

SEQ ID NO: 92883 - DNA, 15 bp, Homo sapiens
tattaaaccttcact

SEQ ID NO: 92884 - DNA, 15 bp, Homo sapiens
ctattaaaccttcac

SEQ ID NO: 92885 - DNA, 15 bp, Homo sapiens
gctattaaaccttca

SEQ ID NO: 92886 - DNA, 15 bp, Homo sapiens
ggctattaaaccttc

SEQ ID NO: 92887 - DNA, 15 bp, Homo sapiens
gggctattaaacctt

SEQ ID NO: 92888 - DNA, 15 bp, Homo sapiens
ggggctattaaacct

SEQ ID NO: 92889 - DNA, 15 bp, Homo sapiens
aggggctattaaacc

SEQ ID NO: 92890 - DNA, 15 bp, Homo sapiens
gaggggctattaaac

SEQ ID NO: 92891 - DNA, 15 bp, Homo sapiens
agaggggctattaaa

SEQ ID NO: 92892 - DNA, 15 bp, Homo sapiens
tagaggggctattaa

SEQ ID NO: 92893 - DNA, 15 bp, Homo sapiens
ctagaggggctatta

SEQ ID NO: 92894 - DNA, 15 bp, Homo sapiens
tctagaggggctatt

SEQ ID NO: 92895 - DNA, 15 bp, Homo sapiens
ttctagaggggctat

SEQ ID NO: 92896 - DNA, 15 bp, Homo sapiens
attctagaggggcta

SEQ ID NO: 92897 - DNA, 15 bp, Homo sapiens
cattctagaggggct

SEQ ID NO: 92898 - DNA, 15 bp, Homo sapiens
ccattctagaggggc

SEQ ID NO: 92899 - DNA, 15 bp, Homo sapiens
accattctagagggg

SEQ ID NO: 92900 - DNA, 15 bp, Homo sapiens
caccattctagaggg

SEQ ID NO: 92901 - DNA, 15 bp, Homo sapiens
ccaccattctagagg

SEQ ID NO: 92902 - DNA, 15 bp, Homo sapiens
cccaccattctagag

SEQ ID NO: 92903 - DNA, 15 bp, Homo sapiens
tcccaccattctaga

SEQ ID NO: 92904 - DNA, 15 bp, Homo sapiens
atcccaccattctag

SEQ ID NO: 92905 - DNA, 15 bp, Homo sapiens
catcccaccattcta

SEQ ID NO: 92906 - DNA, 15 bp, Homo sapiens
acatcccaccattct

SEQ ID NO: 92907 - DNA, 15 bp, Homo sapiens
tacatcccaccattc

SEQ ID NO: 92908 - DNA, 15 bp, Homo sapiens
ctacatcccaccatt

SEQ ID NO: 92909 - DNA, 15 bp, Homo sapiens
actacatcccaccat

SEQ ID NO: 92910 - DNA, 15 bp, Homo sapiens
cactacatcccacca

SEQ ID NO: 92911 - DNA, 15 bp, Homo sapiens
tcactacatcccacc

SEQ ID NO: 92912 - DNA, 15 bp, Homo sapiens
ctcactacatcccac

SEQ ID NO: 92913 - DNA, 15 bp, Homo sapiens
cctcactacatccca

SEQ ID NO: 92914 - DNA, 15 bp, Homo sapiens
tcctcactacatccc

SEQ ID NO: 92915 - DNA, 15 bp, Homo sapiens
gtcctcactacatcc

SEQ ID NO: 92916 - DNA, 15 bp, Homo sapiens
agtcctcactacatc

SEQ ID NO: 92917 - DNA, 15 bp, Homo sapiens
aagtcctcactacat

SEQ ID NO: 92918 - DNA, 15 bp, Homo sapiens
caagtcctcactaca

SEQ ID NO: 92919 - DNA, 15 bp, Homo sapiens
ccaagtcctcactac

SEQ ID NO: 92920 - DNA, 15 bp, Homo sapiens
accaagtcctcacta

SEQ ID NO: 92921 - DNA, 15 bp, Homo sapiens
gaccaagtcctcact

SEQ ID NO: 92922 - DNA, 15 bp, Homo sapiens
ggaccaagtcctcac

SEQ ID NO: 92923 - DNA, 15 bp, Homo sapiens
aggaccaagtcctca

SEQ ID NO: 92924 - DNA, 15 bp, Homo sapiens
caggaccaagtcctc

SEQ ID NO: 92925 - DNA, 15 bp, Homo sapiens
tcaggaccaagtcct

SEQ ID NO: 92926 - DNA, 15 bp, Homo sapiens
ctcaggaccaagtcc

SEQ ID NO: 92927 - DNA, 15 bp, Homo sapiens
gctcaggaccaagtc

SEQ ID NO: 92928 - DNA, 15 bp, Homo sapiens
agctcaggaccaagt

SEQ ID NO: 92929 - DNA, 15 bp, Homo sapiens
aagctcaggaccaag

SEQ ID NO: 92930 - DNA, 15 bp, Homo sapiens
gaagctcaggaccaa

SEQ ID NO: 92931 - DNA, 15 bp, Homo sapiens
tgaagctcaggacca

SEQ ID NO: 92932 - DNA, 15 bp, Homo sapiens
ttgaagctcaggacc

SEQ ID NO: 92933 - DNA, 15 bp, Homo sapiens
cttgaagctcaggac

SEQ ID NO: 92934 - DNA, 15 bp, Homo sapiens
ccttgaagctcagga

SEQ ID NO: 92935 - DNA, 15 bp, Homo sapiens
gccttgaagctcagg

SEQ ID NO: 92936 - DNA, 15 bp, Homo sapiens
ggccttgaagctcag

SEQ ID NO: 92937 - DNA, 15 bp, Homo sapiens
tggccttgaagctca

SEQ ID NO: 92938 - DNA, 15 bp, Homo sapiens
ctggccttgaagctc

SEQ ID NO: 92939 - DNA, 15 bp, Homo sapiens
cctggccttgaagct

SEQ ID NO: 92940 - DNA, 15 bp, Homo sapiens
acctggccttgaagc

SEQ ID NO: 92941 - DNA, 15 bp, Homo sapiens
cacctggccttgaag

SEQ ID NO: 92942 - DNA, 15 bp, Homo sapiens
ccacctggccttgaa

SEQ ID NO: 92943 - DNA, 15 bp, Homo sapiens
gccacctggccttga

SEQ ID NO: 92944 - DNA, 15 bp, Homo sapiens
ggccacctggccttg

SEQ ID NO: 92945 - DNA, 15 bp, Homo sapiens
tggccacctggcctt

SEQ ID NO: 92946 - DNA, 15 bp, Homo sapiens
ctggccacctggcct

SEQ ID NO: 92947 - DNA, 15 bp, Homo sapiens
actggccacctggcc

SEQ ID NO: 92948 - DNA, 15 bp, Homo sapiens
cactggccacctggc

SEQ ID NO: 92949 - DNA, 15 bp, Homo sapiens
tcactggccacctgg

SEQ ID NO: 92950 - DNA, 15 bp, Homo sapiens
gtcactggccacctg

SEQ ID NO: 92951 - DNA, 15 bp, Homo sapiens
agtcactggccacct

SEQ ID NO: 92952 - DNA, 15 bp, Homo sapiens
gagtcactggccacc

SEQ ID NO: 92953 - DNA, 15 bp, Homo sapiens
agagtcactggccac

SEQ ID NO: 92954 - DNA, 15 bp, Homo sapiens
cagagtcactggcca

SEQ ID NO: 92955 - DNA, 15 bp, Homo sapiens
ccagagtcactggcc

SEQ ID NO: 92956 - DNA, 15 bp, Homo sapiens
gccagagtcactggc

SEQ ID NO: 92957 - DNA, 15 bp, Homo sapiens
tgccagagtcactgg

SEQ ID NO: 92958 - DNA, 15 bp, Homo sapiens
gtgccagagtcactg

SEQ ID NO: 92959 - DNA, 15 bp, Homo sapiens
ggtgccagagtcact

SEQ ID NO: 92960 - DNA, 15 bp, Homo sapiens
aggtgccagagtcac

SEQ ID NO: 92961 - DNA, 15 bp, Homo sapiens
caggtgccagagtca

SEQ ID NO: 92962 - DNA, 15 bp, Homo sapiens
tcaggtgccagagtc

SEQ ID NO: 92963 - DNA, 15 bp, Homo sapiens
gtcaggtgccagagt

SEQ ID NO: 92964 - DNA, 15 bp, Homo sapiens
tgtcaggtgccagag

SEQ ID NO: 92965 - DNA, 15 bp, Homo sapiens
ctgtcaggtgccaga

SEQ ID NO: 92966 - DNA, 15 bp, Homo sapiens
actgtcaggtgccag

SEQ ID NO: 92967 - DNA, 15 bp, Homo sapiens
cactgtcaggtgcca

SEQ ID NO: 92968 - DNA, 15 bp, Homo sapiens
ccactgtcaggtgcc

SEQ ID NO: 92969 - DNA, 15 bp, Homo sapiens
cccactgtcaggtgc

SEQ ID NO: 92970 - DNA, 15 bp, Homo sapiens
ccccactgtcaggtg

SEQ ID NO: 92971 - DNA, 15 bp, Homo sapiens
cccccactgtcaggt

SEQ ID NO: 92972 - DNA, 15 bp, Homo sapiens
tcccccactgtcagg

SEQ ID NO: 92973 - DNA, 15 bp, Homo sapiens
ctcccccactgtcag

SEQ ID NO: 92974 - DNA, 15 bp, Homo sapiens
cctcccccactgtca

SEQ ID NO: 92975 - DNA, 15 bp, Homo sapiens
tcctcccccactgtc

SEQ ID NO: 92976 - DNA, 15 bp, Homo sapiens
ttcctcccccactgt

SEQ ID NO: 92977 - DNA, 15 bp, Homo sapiens
cttcctcccccactg

SEQ ID NO: 92978 - DNA, 15 bp, Homo sapiens
ccttcctcccccact

SEQ ID NO: 92979 - DNA, 15 bp, Homo sapiens
tccttcctcccccac

SEQ ID NO: 92980 - DNA, 15 bp, Homo sapiens
ctccttcctccccca

SEQ ID NO: 92981 - DNA, 15 bp, Homo sapiens
cctccttcctccccc

SEQ ID NO: 92982 - DNA, 15 bp, Homo sapiens
tcctccttcctcccc

SEQ ID NO: 92983 - DNA, 15 bp, Homo sapiens
atcctccttcctccc

SEQ ID NO: 92984 - DNA, 15 bp, Homo sapiens
catcctccttcctcc

SEQ ID NO: 92985 - DNA, 15 bp, Homo sapiens
gcatcctccttcctc

SEQ ID NO: 92986 - DNA, 15 bp, Homo sapiens
agcatcctccttcct

SEQ ID NO: 92987 - DNA, 15 bp, Homo sapiens
cagcatcctccttcc

SEQ ID NO: 92988 - DNA, 15 bp, Homo sapiens
ccagcatcctccttc

SEQ ID NO: 92989 - DNA, 15 bp, Homo sapiens
cccagcatcctcctt

SEQ ID NO: 92990 - DNA, 15 bp, Homo sapiens
acccagcatcctcct

SEQ ID NO: 92991 - DNA, 15 bp, Homo sapiens
tacccagcatcctcc

SEQ ID NO: 92992 - DNA, 15 bp, Homo sapiens
ttacccagcatcctc

SEQ ID NO: 92993 - DNA, 15 bp, Homo sapiens
attacccagcatcct

SEQ ID NO: 92994 - DNA, 15 bp, Homo sapiens
cattacccagcatcc

SEQ ID NO: 92995 - DNA, 15 bp, Homo sapiens
gcattacccagcatc

SEQ ID NO: 92996 - DNA, 15 bp, Homo sapiens
ggcattacccagcat

SEQ ID NO: 92997 - DNA, 15 bp, Homo sapiens
aggcattacccagca

SEQ ID NO: 92998 - DNA, 15 bp, Homo sapiens
caggcattacccagc

SEQ ID NO: 92999 - DNA, 15 bp, Homo sapiens
ccaggcattacccag

SEQ ID NO: 93000 - DNA, 15 bp, Homo sapiens
cccaggcattaccca

SEQ ID NO: 93001 - DNA, 15 bp, Homo sapiens
gcccaggcattaccc

SEQ ID NO: 93002 - DNA, 15 bp, Homo sapiens
ggcccaggcattacc

SEQ ID NO: 93003 - DNA, 15 bp, Homo sapiens
aggcccaggcattac

SEQ ID NO: 93004 - DNA, 15 bp, Homo sapiens
taggcccaggcatta

SEQ ID NO: 93005 - DNA, 15 bp, Homo sapiens
ttaggcccaggcatt

SEQ ID NO: 93006 - DNA, 15 bp, Homo sapiens
gttaggcccaggcat

SEQ ID NO: 93007 - DNA, 15 bp, Homo sapiens
tgttaggcccaggca

SEQ ID NO: 93008 - DNA, 15 bp, Homo sapiens
ctgttaggcccaggc

SEQ ID NO: 93009 - DNA, 15 bp, Homo sapiens
gctgttaggcccagg

SEQ ID NO: 93010 - DNA, 15 bp, Homo sapiens
ggctgttaggcccag

SEQ ID NO: 93011 - DNA, 15 bp, Homo sapiens
tggctgttaggccca

SEQ ID NO: 93012 - DNA, 15 bp, Homo sapiens
ctggctgttaggccc

SEQ ID NO: 93013 - DNA, 15 bp, Homo sapiens
cctggctgttaggcc

SEQ ID NO: 93014 - DNA, 15 bp, Homo sapiens
gcctggctgttaggc

SEQ ID NO: 93015 - DNA, 15 bp, Homo sapiens
tgcctggctgttagg

SEQ ID NO: 93016 - DNA, 15 bp, Homo sapiens
ctgcctggctgttag

SEQ ID NO: 93017 - DNA, 15 bp, Homo sapiens
tctgcctggctgtta

SEQ ID NO: 93018 - DNA, 15 bp, Homo sapiens
gtctgcctggctgtt

SEQ ID NO: 93019 - DNA, 15 bp, Homo sapiens
ggtctgcctggctgt

SEQ ID NO: 93020 - DNA, 15 bp, Homo sapiens
tggtctgcctggctg

SEQ ID NO: 93021 - DNA, 15 bp, Homo sapiens
gtggtctgcctggct

SEQ ID NO: 93022 - DNA, 15 bp, Homo sapiens
ggtggtctgcctggc

SEQ ID NO: 93023 - DNA, 15 bp, Homo sapiens
aggtggtctgcctgg

SEQ ID NO: 93024 - DNA, 15 bp, Homo sapiens
caggtggtctgcctg

SEQ ID NO: 93025 - DNA, 15 bp, Homo sapiens
acaggtggtctgcct

SEQ ID NO: 93026 - DNA, 15 bp, Homo sapiens
tacaggtggtctgcc

SEQ ID NO: 93027 - DNA, 15 bp, Homo sapiens
ctacaggtggtctgc

SEQ ID NO: 93028 - DNA, 15 bp, Homo sapiens
gctacaggtggtctg

SEQ ID NO: 93029 - DNA, 15 bp, Homo sapiens
ggctacaggtggtct

SEQ ID NO: 93030 - DNA, 15 bp, Homo sapiens
tggctacaggtggtc

SEQ ID NO: 93031 - DNA, 15 bp, Homo sapiens
atggctacaggtggt

SEQ ID NO: 93032 - DNA, 15 bp, Homo sapiens
gatggctacaggtgg

SEQ ID NO: 93033 - DNA, 15 bp, Homo sapiens
tgatggctacaggtg

SEQ ID NO: 93034 - DNA, 15 bp, Homo sapiens
ctgatggctacaggt

SEQ ID NO: 93035 - DNA, 15 bp, Homo sapiens
gctgatggctacagg

SEQ ID NO: 93036 - DNA, 15 bp, Homo sapiens
ggctgatggctacag

SEQ ID NO: 93037 - DNA, 15 bp, Homo sapiens
gggctgatggctaca

SEQ ID NO: 93038 - DNA, 15 bp, Homo sapiens
agggctgatggctac

SEQ ID NO: 93039 - DNA, 15 bp, Homo sapiens
gagggctgatggcta

SEQ ID NO: 93040 - DNA, 15 bp, Homo sapiens
agagggctgatggct

SEQ ID NO: 93041 - DNA, 15 bp, Homo sapiens
gagagggctgatggc

SEQ ID NO: 93042 - DNA, 15 bp, Homo sapiens
agagagggctgatgg

SEQ ID NO: 93043 - DNA, 15 bp, Homo sapiens
cagagagggctgatg

SEQ ID NO: 93044 - DNA, 15 bp, Homo sapiens
acagagagggctgat

SEQ ID NO: 93045 - DNA, 15 bp, Homo sapiens
gacagagagggctga

SEQ ID NO: 93046 - DNA, 15 bp, Homo sapiens
agacagagagggctg

SEQ ID NO: 93047 - DNA, 15 bp, Homo sapiens
aagacagagagggct

SEQ ID NO: 93048 - DNA, 15 bp, Homo sapiens
gaagacagagagggc

SEQ ID NO: 93049 - DNA, 15 bp, Homo sapiens
agaagacagagaggg

SEQ ID NO: 93050 - DNA, 15 bp, Homo sapiens
cagaagacagagagg

SEQ ID NO: 93051 - DNA, 15 bp, Homo sapiens
ccagaagacagagag

SEQ ID NO: 93052 - DNA, 15 bp, Homo sapiens
cccagaagacagaga

SEQ ID NO: 93053 - DNA, 15 bp, Homo sapiens
ccccagaagacagag

SEQ ID NO: 93054 - DNA, 15 bp, Homo sapiens
accccagaagacaga

SEQ ID NO: 93055 - DNA, 15 bp, Homo sapiens
caccccagaagacag

SEQ ID NO: 93056 - DNA, 15 bp, Homo sapiens
ccaccccagaagaca

SEQ ID NO: 93057 - DNA, 15 bp, Homo sapiens
cccaccccagaagac

SEQ ID NO: 93058 - DNA, 15 bp, Homo sapiens
ccccaccccagaaga

SEQ ID NO: 93059 - DNA, 15 bp, Homo sapiens
accccaccccagaag

SEQ ID NO: 93060 - DNA, 15 bp, Homo sapiens
aaccccaccccagaa

SEQ ID NO: 93061 - DNA, 15 bp, Homo sapiens
aaaccccaccccaga

SEQ ID NO: 93062 - DNA, 15 bp, Homo sapiens
gaaaccccaccccag

SEQ ID NO: 93063 - DNA, 15 bp, Homo sapiens
agaaaccccacccca

SEQ ID NO: 93064 - DNA, 15 bp, Homo sapiens
gagaaaccccacccc

SEQ ID NO: 93065 - DNA, 15 bp, Homo sapiens
tgagaaaccccaccc

SEQ ID NO: 93066 - DNA, 15 bp, Homo sapiens
ttgagaaaccccacc

SEQ ID NO: 93067 - DNA, 15 bp, Homo sapiens
tttgagaaaccccac

SEQ ID NO: 93068 - DNA, 15 bp, Homo sapiens
gtttgagaaacccca

SEQ ID NO: 93069 - DNA, 15 bp, Homo sapiens
ggtttgagaaacccc

SEQ ID NO: 93070 - DNA, 15 bp, Homo sapiens
tggtttgagaaaccc

SEQ ID NO: 93071 - DNA, 15 bp, Homo sapiens
ctggtttgagaaacc

SEQ ID NO: 93072 - DNA, 15 bp, Homo sapiens
cctggtttgagaaac

SEQ ID NO: 93073 - DNA, 15 bp, Homo sapiens
ccctggtttgagaaa

SEQ ID NO: 93074 - DNA, 15 bp, Homo sapiens
accctggtttgagaa

SEQ ID NO: 93075 - DNA, 15 bp, Homo sapiens
gaccctggtttgaga

SEQ ID NO: 93076 - DNA, 15 bp, Homo sapiens
ggaccctggtttgag

SEQ ID NO: 93077 - DNA, 15 bp, Homo sapiens
tggaccctggtttga

SEQ ID NO: 93078 - DNA, 15 bp, Homo sapiens
ctggaccctggtttg

SEQ ID NO: 93079 - DNA, 15 bp, Homo sapiens
cctggaccctggttt

SEQ ID NO: 93080 - DNA, 15 bp, Homo sapiens
tcctggaccctggtt

SEQ ID NO: 93081 - DNA, 15 bp, Homo sapiens
atcctggaccctggt

SEQ ID NO: 93082 - DNA, 15 bp, Homo sapiens
tatcctggaccctgg

SEQ ID NO: 93083 - DNA, 15 bp, Homo sapiens
ttatcctggaccctg

SEQ ID NO: 93084 - DNA, 15 bp, Homo sapiens
attatcctggaccct

SEQ ID NO: 93085 - DNA, 15 bp, Homo sapiens
tattatcctggaccc

SEQ ID NO: 93086 - DNA, 15 bp, Homo sapiens
ttattatcctggacc

SEQ ID NO: 93087 - DNA, 15 bp, Homo sapiens
attattatcctggac

SEQ ID NO: 93088 - DNA, 15 bp, Homo sapiens
gattattatcctgga

SEQ ID NO: 93089 - DNA, 15 bp, Homo sapiens
ggattattatcctgg

SEQ ID NO: 93090 - DNA, 15 bp, Homo sapiens
tggattattatcctg

SEQ ID NO: 93091 - DNA, 15 bp, Homo sapiens
gtggattattatcct

SEQ ID NO: 93092 - DNA, 15 bp, Homo sapiens
ggtggattattatcc

SEQ ID NO: 93093 - DNA, 15 bp, Homo sapiens
aggtggattattatc

SEQ ID NO: 93094 - DNA, 15 bp, Homo sapiens
gaggtggattattat

SEQ ID NO: 93095 - DNA, 15 bp, Homo sapiens
agaggtggattatta

SEQ ID NO: 93096 - DNA, 15 bp, Homo sapiens
aagaggtggattatt

SEQ ID NO: 93097 - DNA, 15 bp, Homo sapiens
gaagaggtggattat

SEQ ID NO: 93098 - DNA, 15 bp, Homo sapiens
agaagaggtggatta

SEQ ID NO: 93099 - DNA, 15 bp, Homo sapiens
aagaagaggtggatt

SEQ ID NO: 93100 - DNA, 15 bp, Homo sapiens
aaagaagaggtggat

SEQ ID NO: 93101 - DNA, 15 bp, Homo sapiens
aaaagaagaggtgga

SEQ ID NO: 93102 - DNA, 15 bp, Homo sapiens
taaaagaagaggtgg

SEQ ID NO: 93103 - DNA, 15 bp, Homo sapiens
ttaaaagaagaggtg

SEQ ID NO: 93104 - DNA, 15 bp, Homo sapiens
tttaaaagaagaggt

SEQ ID NO: 93105 - DNA, 15 bp, Homo sapiens
ttttaaaagaagagg

SEQ ID NO: 93106 - DNA, 15 bp, Homo sapiens
cttttaaaagaagag

SEQ ID NO: 93107 - DNA, 15 bp, Homo sapiens
tcttttaaaagaaga

SEQ ID NO: 93108 - DNA, 15 bp, Homo sapiens
ttcttttaaaagaag

SEQ ID NO: 93109 - DNA, 15 bp, Homo sapiens
tttcttttaaaagaa

SEQ ID NO: 93110 - DNA, 15 bp, Homo sapiens
ctttcttttaaaaga

SEQ ID NO: 93111 - DNA, 15 bp, Homo sapiens
gctttcttttaaaag

SEQ ID NO: 93112 - DNA, 15 bp, Homo sapiens
ggctttcttttaaaa

SEQ ID NO: 93113 - DNA, 15 bp, Homo sapiens
tggctttcttttaaa

SEQ ID NO: 93114 - DNA, 15 bp, Homo sapiens
gtggctttcttttaa

SEQ ID NO: 93115 - DNA, 15 bp, Homo sapiens
cgtggctttctttta

SEQ ID NO: 93116 - DNA, 15 bp, Homo sapiens
tcgtggctttctttt

SEQ ID NO: 93117 - DNA, 15 bp, Homo sapiens
atcgtggctttcttt

SEQ ID NO: 93118 - DNA, 15 bp, Homo sapiens
aatcgtggctttctt

SEQ ID NO: 93119 - DNA, 15 bp, Homo sapiens
aaatcgtggctttct

SEQ ID NO: 93120 - DNA, 15 bp, Homo sapiens
taaatcgtggctttc

SEQ ID NO: 93121 - DNA, 15 bp, Homo sapiens
ataaatcgtggcttt

SEQ ID NO: 93122 - DNA, 15 bp, Homo sapiens
aataaatcgtggctt

SEQ ID NO: 93123 - DNA, 15 bp, Homo sapiens
aaataaatcgtggct

SEQ ID NO: 93124 - DNA, 15 bp, Homo sapiens
aaaataaatcgtggc

SEQ ID NO: 93125 - DNA, 15 bp, Homo sapiens
taaaataaatcgtgg

SEQ ID NO: 93126 - DNA, 15 bp, Homo sapiens
ataaaataaatcgtg

SEQ ID NO: 93127 - DNA, 15 bp, Homo sapiens
aataaaataaatcgt

SEQ ID NO: 93128 - DNA, 15 bp, Homo sapiens
taataaaataaatcg

SEQ ID NO: 93129 - DNA, 15 bp, Homo sapiens
ataataaaataaatc

SEQ ID NO: 93130 - DNA, 15 bp, Homo sapiens
tataataaaataaat

SEQ ID NO: 93131 - DNA, 15 bp, Homo sapiens
atataataaaataaa

SEQ ID NO: 93132 - DNA, 15 bp, Homo sapiens
aatataataaaataa

SEQ ID NO: 93133 - DNA, 15 bp, Homo sapiens
taatataataaaata

SEQ ID NO: 93134 - DNA, 15 bp, Homo sapiens
ataatataataaaat

SEQ ID NO: 93135 - DNA, 15 bp, Homo sapiens
aataatataataaaa

SEQ ID NO: 93136 - DNA, 15 bp, Homo sapiens
taataatataataaa

SEQ ID NO: 93137 - DNA, 15 bp, Homo sapiens
ataataatataataa

SEQ ID NO: 93138 - DNA, 15 bp, Homo sapiens
aataataatataata

SEQ ID NO: 93139 - DNA, 15 bp, Homo sapiens
taataataatataat

SEQ ID NO: 93140 - DNA, 15 bp, Homo sapiens
ataataataatataa

SEQ ID NO: 93141 - DNA, 15 bp, Homo sapiens
aataataataatata

SEQ ID NO: 93142 - DNA, 15 bp, Homo sapiens
taataataataatat

SEQ ID NO: 93143 - DNA, 15 bp, Homo sapiens
ataataataataata

SEQ ID NO: 93144 - DNA, 15 bp, Homo sapiens
aataataataataat

SEQ ID NO: 93145 - DNA, 15 bp, Homo sapiens
taataataataataa

SEQ ID NO: 93146 - DNA, 15 bp, Homo sapiens
aaataataataataa

SEQ ID NO: 93147 - DNA, 15 bp, Homo sapiens
aaaataataataata

SEQ ID NO: 93148 - DNA, 15 bp, Homo sapiens
caaaataataataat

SEQ ID NO: 93149 - DNA, 15 bp, Homo sapiens
gcaaaataataataa

SEQ ID NO: 93150 - DNA, 15 bp, Homo sapiens
agcaaaataataata

SEQ ID NO: 93151 - DNA, 15 bp, Homo sapiens
aagcaaaataataat

SEQ ID NO: 93152 - DNA, 15 bp, Homo sapiens
aaagcaaaataataa

SEQ ID NO: 93153 - DNA, 15 bp, Homo sapiens
caaagcaaaataata

SEQ ID NO: 93154 - DNA, 15 bp, Homo sapiens
ccaaagcaaaataat

SEQ ID NO: 93155 - DNA, 15 bp, Homo sapiens
tccaaagcaaaataa

SEQ ID NO: 93156 - DNA, 15 bp, Homo sapiens
ctccaaagcaaaata

SEQ ID NO: 93157 - DNA, 15 bp, Homo sapiens
tctccaaagcaaaat

SEQ ID NO: 93158 - DNA, 15 bp, Homo sapiens
gtctccaaagcaaaa

SEQ ID NO: 93159 - DNA, 15 bp, Homo sapiens
tgtctccaaagcaaa

SEQ ID NO: 93160 - DNA, 15 bp, Homo sapiens
ctgtctccaaagcaa

SEQ ID NO: 93161 - DNA, 15 bp, Homo sapiens
cctgtctccaaagca

SEQ ID NO: 93162 - DNA, 15 bp, Homo sapiens
tcctgtctccaaagc

SEQ ID NO: 93163 - DNA, 15 bp, Homo sapiens
atcctgtctccaaag

SEQ ID NO: 93164 - DNA, 15 bp, Homo sapiens
gatcctgtctccaaa

SEQ ID NO: 93165 - DNA, 15 bp, Homo sapiens
agatcctgtctccaa

SEQ ID NO: 93166 - DNA, 15 bp, Homo sapiens
gagatcctgtctcca

SEQ ID NO: 93167 - DNA, 15 bp, Homo sapiens
tgagatcctgtctcc

SEQ ID NO: 93168 - DNA, 15 bp, Homo sapiens
gtgagatcctgtctc

SEQ ID NO: 93169 - DNA, 15 bp, Homo sapiens
agtgagatcctgtct

SEQ ID NO: 93170 - DNA, 15 bp, Homo sapiens
aagtgagatcctgtc

SEQ ID NO: 93171 - DNA, 15 bp, Homo sapiens
aaagtgagatcctgt

SEQ ID NO: 93172 - DNA, 15 bp, Homo sapiens
caaagtgagatcctg

SEQ ID NO: 93173 - DNA, 15 bp, Homo sapiens
acaaagtgagatcct

SEQ ID NO: 93174 - DNA, 15 bp, Homo sapiens
gacaaagtgagatcc

SEQ ID NO: 93175 - DNA, 15 bp, Homo sapiens
tgacaaagtgagatc

SEQ ID NO: 93176 - DNA, 15 bp, Homo sapiens
gtgacaaagtgagat

SEQ ID NO: 93177 - DNA, 15 bp, Homo sapiens
ggtgacaaagtgaga

SEQ ID NO: 93178 - DNA, 15 bp, Homo sapiens
gggtgacaaagtgag

SEQ ID NO: 93179 - DNA, 15 bp, Homo sapiens
tgggtgacaaagtga

SEQ ID NO: 93180 - DNA, 15 bp, Homo sapiens
ctgggtgacaaagtg

SEQ ID NO: 93181 - DNA, 15 bp, Homo sapiens
cctgggtgacaaagt

SEQ ID NO: 93182 - DNA, 15 bp, Homo sapiens
gcctgggtgacaaag

SEQ ID NO: 93183 - DNA, 15 bp, Homo sapiens
agcctgggtgacaaa

SEQ ID NO: 93184 - DNA, 15 bp, Homo sapiens
cagcctgggtgacaa

SEQ ID NO: 93185 - DNA, 15 bp, Homo sapiens
ccagcctgggtgaca

SEQ ID NO: 93186 - DNA, 15 bp, Homo sapiens
tccagcctgggtgac

SEQ ID NO: 93187 - DNA, 15 bp, Homo sapiens
ctccagcctgggtga

SEQ ID NO: 93188 - DNA, 15 bp, Homo sapiens
actccagcctgggtg

SEQ ID NO: 93189 - DNA, 15 bp, Homo sapiens
tactccagcctgggt

SEQ ID NO: 93190 - DNA, 15 bp, Homo sapiens
gtactccagcctggg

SEQ ID NO: 93191 - DNA, 15 bp, Homo sapiens
tgtactccagcctgg

SEQ ID NO: 93192 - DNA, 15 bp, Homo sapiens
ttgtactccagcctg

SEQ ID NO: 93193 - DNA, 15 bp, Homo sapiens
attgtactccagcct

SEQ ID NO: 93194 - DNA, 15 bp, Homo sapiens
tattgtactccagcc

SEQ ID NO: 93195 - DNA, 15 bp, Homo sapiens
ctattgtactccagc

SEQ ID NO: 93196 - DNA, 15 bp, Homo sapiens
actattgtactccag

SEQ ID NO: 93197 - DNA, 15 bp, Homo sapiens
cactattgtactcca

SEQ ID NO: 93198 - DNA, 15 bp, Homo sapiens
acactattgtactcc

SEQ ID NO: 93199 - DNA, 15 bp, Homo sapiens
tacactattgtactc

SEQ ID NO: 93200 - DNA, 15 bp, Homo sapiens
ttacactattgtact

SEQ ID NO: 93201 - DNA, 15 bp, Homo sapiens
attacactattgtac

SEQ ID NO: 93202 - DNA, 15 bp, Homo sapiens
gattacactattgta

SEQ ID NO: 93203 - DNA, 15 bp, Homo sapiens
tgattacactattgt

SEQ ID NO: 93204 - DNA, 15 bp, Homo sapiens
atgattacactattg

SEQ ID NO: 93205 - DNA, 15 bp, Homo sapiens
tatgattacactatt

SEQ ID NO: 93206 - DNA, 15 bp, Homo sapiens
ctatgattacactat

SEQ ID NO: 93207 - DNA, 15 bp, Homo sapiens
gctatgattacacta

SEQ ID NO: 93208 - DNA, 15 bp, Homo sapiens
agctatgattacact

SEQ ID NO: 93209 - DNA, 15 bp, Homo sapiens
gagctatgattacac

SEQ ID NO: 93210 - DNA, 15 bp, Homo sapiens
tgagctatgattaca

SEQ ID NO: 93211 - DNA, 15 bp, Homo sapiens
gtgagctatgattac

SEQ ID NO: 93212 - DNA, 15 bp, Homo sapiens
agtgagctatgatta

SEQ ID NO: 93213 - DNA, 15 bp, Homo sapiens
cagtgagctatgatt

SEQ ID NO: 93214 - DNA, 15 bp, Homo sapiens
gcagtgagctatgat

SEQ ID NO: 93215 - DNA, 15 bp, Homo sapiens
tgcagtgagctatga

SEQ ID NO: 93216 - DNA, 15 bp, Homo sapiens
ctgcagtgagctatg

SEQ ID NO: 93217 - DNA, 15 bp, Homo sapiens
gctgcagtgagctat

SEQ ID NO: 93218 - DNA, 15 bp, Homo sapiens
ggctgcagtgagcta

SEQ ID NO: 93219 - DNA, 15 bp, Homo sapiens
aggctgcagtgagct

SEQ ID NO: 93220 - DNA, 15 bp, Homo sapiens
aaggctgcagtgagc

SEQ ID NO: 93221 - DNA, 15 bp, Homo sapiens
taaggctgcagtgag

SEQ ID NO: 93222 - DNA, 15 bp, Homo sapiens
ttaaggctgcagtga

SEQ ID NO: 93223 - DNA, 15 bp, Homo sapiens
tttaaggctgcagtg

SEQ ID NO: 93224 - DNA, 15 bp, Homo sapiens
gtttaaggctgcagt

SEQ ID NO: 93225 - DNA, 15 bp, Homo sapiens
agtttaaggctgcag

SEQ ID NO: 93226 - DNA, 15 bp, Homo sapiens
gagtttaaggctgca

SEQ ID NO: 93227 - DNA, 15 bp, Homo sapiens
ggagtttaaggctgc

SEQ ID NO: 93228 - DNA, 15 bp, Homo sapiens
aggagtttaaggctg

SEQ ID NO: 93229 - DNA, 15 bp, Homo sapiens
caggagtttaaggct

SEQ ID NO: 93230 - DNA, 15 bp, Homo sapiens
ccaggagtttaaggc

SEQ ID NO: 93231 - DNA, 15 bp, Homo sapiens
gccaggagtttaagg

SEQ ID NO: 93232 - DNA, 15 bp, Homo sapiens
ggccaggagtttaag

SEQ ID NO: 93233 - DNA, 15 bp, Homo sapiens
aggccaggagtttaa

SEQ ID NO: 93234 - DNA, 15 bp, Homo sapiens
gaggccaggagttta

SEQ ID NO: 93235 - DNA, 15 bp, Homo sapiens
tgaggccaggagttt

SEQ ID NO: 93236 - DNA, 15 bp, Homo sapiens
ttgaggccaggagtt

SEQ ID NO: 93237 - DNA, 15 bp, Homo sapiens
cttgaggccaggagt

SEQ ID NO: 93238 - DNA, 15 bp, Homo sapiens
acttgaggccaggag

SEQ ID NO: 93239 - DNA, 15 bp, Homo sapiens
cacttgaggccagga

SEQ ID NO: 93240 - DNA, 15 bp, Homo sapiens
acacttgaggccagg

SEQ ID NO: 93241 - DNA, 15 bp, Homo sapiens
aacacttgaggccag

SEQ ID NO: 93242 - DNA, 15 bp, Homo sapiens
gaacacttgaggcca

SEQ ID NO: 93243 - DNA, 15 bp, Homo sapiens
ggaacacttgaggcc

SEQ ID NO: 93244 - DNA, 15 bp, Homo sapiens
aggaacacttgaggc

SEQ ID NO: 93245 - DNA, 15 bp, Homo sapiens
gaggaacacttgagg

SEQ ID NO: 93246 - DNA, 15 bp, Homo sapiens
ggaggaacacttgag

SEQ ID NO: 93247 - DNA, 15 bp, Homo sapiens
gggaggaacacttga

SEQ ID NO: 93248 - DNA, 15 bp, Homo sapiens
tgggaggaacacttg

SEQ ID NO: 93249 - DNA, 15 bp, Homo sapiens
gtgggaggaacactt

SEQ ID NO: 93250 - DNA, 15 bp, Homo sapiens
ggtgggaggaacact

SEQ ID NO: 93251 - DNA, 15 bp, Homo sapiens
aggtgggaggaacac

SEQ ID NO: 93252 - DNA, 15 bp, Homo sapiens
aaggtgggaggaaca

SEQ ID NO: 93253 - DNA, 15 bp, Homo sapiens
caaggtgggaggaac

SEQ ID NO: 93254 - DNA, 15 bp, Homo sapiens
ccaaggtgggaggaa

SEQ ID NO: 93255 - DNA, 15 bp, Homo sapiens
gccaaggtgggagga

SEQ ID NO: 93256 - DNA, 15 bp, Homo sapiens
ggccaaggtgggagg

SEQ ID NO: 93257 - DNA, 15 bp, Homo sapiens
aggccaaggtgggag

SEQ ID NO: 93258 - DNA, 15 bp, Homo sapiens
gaggccaaggtggga

SEQ ID NO: 93259 - DNA, 15 bp, Homo sapiens
ggaggccaaggtggg

SEQ ID NO: 93260 - DNA, 15 bp, Homo sapiens
gggaggccaaggtgg

SEQ ID NO: 93261 - DNA, 15 bp, Homo sapiens
tgggaggccaaggtg

SEQ ID NO: 93262 - DNA, 15 bp, Homo sapiens
ttgggaggccaaggt

SEQ ID NO: 93263 - DNA, 15 bp, Homo sapiens
gctgtaatcccagca

SEQ ID NO: 93264 - DNA, 15 bp, Homo sapiens
ggctgtaatcccagc

SEQ ID NO: 93265 - DNA, 15 bp, Homo sapiens
gggctgtaatcccag

SEQ ID NO: 93266 - DNA, 15 bp, Homo sapiens
agggctgtaatccca

SEQ ID NO: 93267 - DNA, 15 bp, Homo sapiens
cagggctgtaatccc

SEQ ID NO: 93268 - DNA, 15 bp, Homo sapiens
tcagggctgtaatcc

SEQ ID NO: 93269 - DNA, 15 bp, Homo sapiens
ctcagggctgtaatc

SEQ ID NO: 93270 - DNA, 15 bp, Homo sapiens
gctcagggctgtaat

SEQ ID NO: 93271 - DNA, 15 bp, Homo sapiens
ggctcagggctgtaa

SEQ ID NO: 93272 - DNA, 15 bp, Homo sapiens
tggctcagggctgta

SEQ ID NO: 93273 - DNA, 15 bp, Homo sapiens
gtggctcagggctgt

SEQ ID NO: 93274 - DNA, 15 bp, Homo sapiens
ggtggctcagggctg

SEQ ID NO: 93275 - DNA, 15 bp, Homo sapiens
tggtggctcagggct

SEQ ID NO: 93276 - DNA, 15 bp, Homo sapiens
gtggtggctcagggc

SEQ ID NO: 93277 - DNA, 15 bp, Homo sapiens
tgtggtggctcaggg

SEQ ID NO: 93278 - DNA, 15 bp, Homo sapiens
gtgtggtggctcagg

SEQ ID NO: 93279 - DNA, 15 bp, Homo sapiens
ggtgtggtggctcag

SEQ ID NO: 93280 - DNA, 15 bp, Homo sapiens
gggtgtggtggctca

SEQ ID NO: 93281 - DNA, 15 bp, Homo sapiens
tgggtgtggtggctc

SEQ ID NO: 93282 - DNA, 15 bp, Homo sapiens
ctgggtgtggtggct

SEQ ID NO: 93283 - DNA, 15 bp, Homo sapiens
gctgggtgtggtggc

SEQ ID NO: 93284 - DNA, 15 bp, Homo sapiens
ggctgggtgtggtgg

SEQ ID NO: 93285 - DNA, 15 bp, Homo sapiens
aggctgggtgtggtg

SEQ ID NO: 93286 - DNA, 15 bp, Homo sapiens
caggctgggtgtggt

SEQ ID NO: 93287 - DNA, 15 bp, Homo sapiens
tcaggctgggtgtgg

SEQ ID NO: 93288 - DNA, 15 bp, Homo sapiens
ctcaggctgggtgtg

SEQ ID NO: 93289 - DNA, 15 bp, Homo sapiens
tctcaggctgggtgt

SEQ ID NO: 93290 - DNA, 15 bp, Homo sapiens
ctctcaggctgggtg

SEQ ID NO: 93291 - DNA, 15 bp, Homo sapiens
gctctcaggctgggt

SEQ ID NO: 93292 - DNA, 15 bp, Homo sapiens
ggctctcaggctggg

SEQ ID NO: 93293 - DNA, 15 bp, Homo sapiens
tggctctcaggctgg

SEQ ID NO: 93294 - DNA, 15 bp, Homo sapiens
ttggctctcaggctg

SEQ ID NO: 93295 - DNA, 15 bp, Homo sapiens
cttggctctcaggct

SEQ ID NO: 93296 - DNA, 15 bp, Homo sapiens
gcttggctctcaggc

SEQ ID NO: 93297 - DNA, 15 bp, Homo sapiens
agcttggctctcagg

SEQ ID NO: 93298 - DNA, 15 bp, Homo sapiens
aagcttggctctcag

SEQ ID NO: 93299 - DNA, 15 bp, Homo sapiens
aaagcttggctctca

SEQ ID NO: 93300 - DNA, 15 bp, Homo sapiens
taaagcttggctctc

SEQ ID NO: 93301 - DNA, 15 bp, Homo sapiens
ataaagcttggctct

SEQ ID NO: 93302 - DNA, 15 bp, Homo sapiens
aataaagcttggctc

SEQ ID NO: 93303 - DNA, 15 bp, Homo sapiens
aaataaagcttggct

SEQ ID NO: 93304 - DNA, 15 bp, Homo sapiens
taaataaagcttggc

SEQ ID NO: 93305 - DNA, 15 bp, Homo sapiens
ttaaataaagcttgg

SEQ ID NO: 93306 - DNA, 15 bp, Homo sapiens
tttaaataaagcttg

SEQ ID NO: 93307 - DNA, 15 bp, Homo sapiens
atttaaataaagctt

SEQ ID NO: 93308 - DNA, 15 bp, Homo sapiens
aatttaaataaagct

SEQ ID NO: 93309 - DNA, 15 bp, Homo sapiens
aaatttaaataaagc

SEQ ID NO: 93310 - DNA, 15 bp, Homo sapiens
caaatttaaataaag

SEQ ID NO: 93311 - DNA, 15 bp, Homo sapiens
ccaaatttaaataaa

SEQ ID NO: 93312 - DNA, 15 bp, Homo sapiens
cccaaatttaaataa

SEQ ID NO: 93313 - DNA, 15 bp, Homo sapiens
tcccaaatttaaata

SEQ ID NO: 93314 - DNA, 15 bp, Homo sapiens
ttcccaaatttaaat

SEQ ID NO: 93315 - DNA, 15 bp, Homo sapiens
attcccaaatttaaa

SEQ ID NO: 93316 - DNA, 15 bp, Homo sapiens
gattcccaaatttaa

SEQ ID NO: 93317 - DNA, 15 bp, Homo sapiens
tgattcccaaattta

SEQ ID NO: 93318 - DNA, 15 bp, Homo sapiens
gtgattcccaaattt

SEQ ID NO: 93319 - DNA, 15 bp, Homo sapiens
agtgattcccaaatt

SEQ ID NO: 93320 - DNA, 15 bp, Homo sapiens
cagtgattcccaaat

SEQ ID NO: 93321 - DNA, 15 bp, Homo sapiens
acagtgattcccaaa

SEQ ID NO: 93322 - DNA, 15 bp, Homo sapiens
aacagtgattcccaa

SEQ ID NO: 93323 - DNA, 15 bp, Homo sapiens
gaacagtgattccca

SEQ ID NO: 93324 - DNA, 15 bp, Homo sapiens
ggaacagtgattccc

SEQ ID NO: 93325 - DNA, 15 bp, Homo sapiens
tggaacagtgattcc

SEQ ID NO: 93326 - DNA, 15 bp, Homo sapiens
ctggaacagtgattc

SEQ ID NO: 93327 - DNA, 15 bp, Homo sapiens
cctggaacagtgatt

SEQ ID NO: 93328 - DNA, 15 bp, Homo sapiens
tcctggaacagtgat

SEQ ID NO: 93329 - DNA, 15 bp, Homo sapiens
ctcctggaacagtga

SEQ ID NO: 93330 - DNA, 15 bp, Homo sapiens
gctcctggaacagtg

SEQ ID NO: 93331 - DNA, 15 bp, Homo sapiens
tgctcctggaacagt

SEQ ID NO: 93332 - DNA, 15 bp, Homo sapiens
gtgctcctggaacag

SEQ ID NO: 93333 - DNA, 15 bp, Homo sapiens
tgtgctcctggaaca

SEQ ID NO: 93334 - DNA, 15 bp, Homo sapiens
ctgtgctcctggaac

SEQ ID NO: 93335 - DNA, 15 bp, Homo sapiens
cctgtgctcctggaa

SEQ ID NO: 93336 - DNA, 15 bp, Homo sapiens
tcctgtgctcctgga

SEQ ID NO: 93337 - DNA, 15 bp, Homo sapiens
ttcctgtgctcctgg

SEQ ID NO: 93338 - DNA, 15 bp, Homo sapiens
attcctgtgctcctg

SEQ ID NO: 93339 - DNA, 15 bp, Homo sapiens
tattcctgtgctcct

SEQ ID NO: 93340 - DNA, 15 bp, Homo sapiens
ttattcctgtgctcc

SEQ ID NO: 93341 - DNA, 15 bp, Homo sapiens
tttattcctgtgctc

SEQ ID NO: 93342 - DNA, 15 bp, Homo sapiens
ttttattcctgtgct

SEQ ID NO: 93343 - DNA, 15 bp, Homo sapiens
gttttattcctgtgc

SEQ ID NO: 93344 - DNA, 15 bp, Homo sapiens
agttttattcctgtg

SEQ ID NO: 93345 - DNA, 15 bp, Homo sapiens
cagttttattcctgt

SEQ ID NO: 93346 - DNA, 15 bp, Homo sapiens
acagttttattcctg

SEQ ID NO: 93347 - DNA, 15 bp, Homo sapiens
gacagttttattcct

SEQ ID NO: 93348 - DNA, 15 bp, Homo sapiens
ggacagttttattcc

SEQ ID NO: 93349 - DNA, 15 bp, Homo sapiens
aggacagttttattc

SEQ ID NO: 93350 - DNA, 15 bp, Homo sapiens
aaggacagttttatt

SEQ ID NO: 93351 - DNA, 15 bp, Homo sapiens
gaaggacagttttat

SEQ ID NO: 93352 - DNA, 15 bp, Homo sapiens
tgaaggacagtttta

SEQ ID NO: 93353 - DNA, 15 bp, Homo sapiens
atgaaggacagtttt

SEQ ID NO: 93354 - DNA, 15 bp, Homo sapiens
gatgaaggacagttt

SEQ ID NO: 93355 - DNA, 15 bp, Homo sapiens
ggatgaaggacagtt

SEQ ID NO: 93356 - DNA, 15 bp, Homo sapiens
aggatgaaggacagt

SEQ ID NO: 93357 - DNA, 15 bp, Homo sapiens
aaggatgaaggacag

SEQ ID NO: 93358 - DNA, 15 bp, Homo sapiens
aaaggatgaaggaca

SEQ ID NO: 93359 - DNA, 15 bp, Homo sapiens
taaaggatgaaggac

SEQ ID NO: 93360 - DNA, 15 bp, Homo sapiens
ataaaggatgaagga

SEQ ID NO: 93361 - DNA, 15 bp, Homo sapiens
tataaaggatgaagg

SEQ ID NO: 93362 - DNA, 15 bp, Homo sapiens
ctataaaggatgaag

SEQ ID NO: 93363 - DNA, 15 bp, Homo sapiens
gctataaaggatgaa

SEQ ID NO: 93364 - DNA, 15 bp, Homo sapiens
ggctataaaggatga

SEQ ID NO: 93365 - DNA, 15 bp, Homo sapiens
gggctataaaggatg

SEQ ID NO: 93366 - DNA, 15 bp, Homo sapiens
agggctataaaggat

SEQ ID NO: 93367 - DNA, 15 bp, Homo sapiens
gagggctataaagga

SEQ ID NO: 93368 - DNA, 15 bp, Homo sapiens
tgagggctataaagg

SEQ ID NO: 93369 - DNA, 15 bp, Homo sapiens
ctgagggctataaag

SEQ ID NO: 93370 - DNA, 15 bp, Homo sapiens
cctgagggctataaa

SEQ ID NO: 93371 - DNA, 15 bp, Homo sapiens
gcctgagggctataa

SEQ ID NO: 93372 - DNA, 15 bp, Homo sapiens
agcctgagggctata

SEQ ID NO: 93373 - DNA, 15 bp, Homo sapiens
aagcctgagggctat

SEQ ID NO: 93374 - DNA, 15 bp, Homo sapiens
gaagcctgagggcta

SEQ ID NO: 93375 - DNA, 15 bp, Homo sapiens
agaagcctgagggct

SEQ ID NO: 93376 - DNA, 15 bp, Homo sapiens
gagaagcctgagggc

SEQ ID NO: 93377 - DNA, 15 bp, Homo sapiens
agagaagcctgaggg

SEQ ID NO: 93378 - DNA, 15 bp, Homo sapiens
aagagaagcctgagg

SEQ ID NO: 93379 - DNA, 15 bp, Homo sapiens
gaagagaagcctgag

SEQ ID NO: 93380 - DNA, 15 bp, Homo sapiens
ggaagagaagcctga

SEQ ID NO: 93381 - DNA, 15 bp, Homo sapiens
aggaagagaagcctg

SEQ ID NO: 93382 - DNA, 15 bp, Homo sapiens
aaggaagagaagcct

SEQ ID NO: 93383 - DNA, 15 bp, Homo sapiens
aaaggaagagaagcc

SEQ ID NO: 93384 - DNA, 15 bp, Homo sapiens
aaaaggaagagaagc

SEQ ID NO: 93385 - DNA, 15 bp, Homo sapiens
gaaaaggaagagaag

SEQ ID NO: 93386 - DNA, 15 bp, Homo sapiens
tgaaaaggaagagaa

SEQ ID NO: 93387 - DNA, 15 bp, Homo sapiens
ttgaaaaggaagaga

SEQ ID NO: 93388 - DNA, 15 bp, Homo sapiens
cttgaaaaggaagag

SEQ ID NO: 93389 - DNA, 15 bp, Homo sapiens
ccttgaaaaggaaga

SEQ ID NO: 93390 - DNA, 15 bp, Homo sapiens
gccttgaaaaggaag

SEQ ID NO: 93391 - DNA, 15 bp, Homo sapiens
ggccttgaaaaggaa

SEQ ID NO: 93392 - DNA, 15 bp, Homo sapiens
aggccttgaaaagga

SEQ ID NO: 93393 - DNA, 15 bp, Homo sapiens
aaggccttgaaaagg

SEQ ID NO: 93394 - DNA, 15 bp, Homo sapiens
gaaggccttgaaaag

SEQ ID NO: 93395 - DNA, 15 bp, Homo sapiens
ggaaggccttgaaaa

SEQ ID NO: 93396 - DNA, 15 bp, Homo sapiens
aggaaggccttgaaa

SEQ ID NO: 93397 - DNA, 15 bp, Homo sapiens
gaggaaggccttgaa

SEQ ID NO: 93398 - DNA, 15 bp, Homo sapiens
tgaggaaggccttga

SEQ ID NO: 93399 - DNA, 15 bp, Homo sapiens
ttgaggaaggccttg

SEQ ID NO: 93400 - DNA, 15 bp, Homo sapiens
attgaggaaggcctt

SEQ ID NO: 93401 - DNA, 15 bp, Homo sapiens
cattgaggaaggcct

SEQ ID NO: 93402 - DNA, 15 bp, Homo sapiens
ccattgaggaaggcc

SEQ ID NO: 93403 - DNA, 15 bp, Homo sapiens
cccattgaggaaggc

SEQ ID NO: 93404 - DNA, 15 bp, Homo sapiens
gcccattgaggaagg

SEQ ID NO: 93405 - DNA, 15 bp, Homo sapiens
agcccattgaggaag

SEQ ID NO: 93406 - DNA, 15 bp, Homo sapiens
aagcccattgaggaa

SEQ ID NO: 93407 - DNA, 15 bp, Homo sapiens
caagcccattgagga

SEQ ID NO: 93408 - DNA, 15 bp, Homo sapiens
ccaagcccattgagg

SEQ ID NO: 93409 - DNA, 15 bp, Homo sapiens
accaagcccattgag

SEQ ID NO: 93410 - DNA, 15 bp, Homo sapiens
taccaagcccattga

SEQ ID NO: 93411 - DNA, 15 bp, Homo sapiens
ttaccaagcccattg

SEQ ID NO: 93412 - DNA, 15 bp, Homo sapiens
attaccaagcccatt

SEQ ID NO: 93413 - DNA, 15 bp, Homo sapiens
gattaccaagcccat

SEQ ID NO: 93414 - DNA, 15 bp, Homo sapiens
agattaccaagccca

SEQ ID NO: 93415 - DNA, 15 bp, Homo sapiens
gagattaccaagccc

SEQ ID NO: 93416 - DNA, 15 bp, Homo sapiens
tgagattaccaagcc

SEQ ID NO: 93417 - DNA, 15 bp, Homo sapiens
atgagattaccaagc

SEQ ID NO: 93418 - DNA, 15 bp, Homo sapiens
gatgagattaccaag

SEQ ID NO: 93419 - DNA, 15 bp, Homo sapiens
agatgagattaccaa

SEQ ID NO: 93420 - DNA, 15 bp, Homo sapiens
gagatgagattacca

SEQ ID NO: 93421 - DNA, 15 bp, Homo sapiens
tgagatgagattacc

SEQ ID NO: 93422 - DNA, 15 bp, Homo sapiens
gtgagatgagattac

SEQ ID NO: 93423 - DNA, 15 bp, Homo sapiens
ggtgagatgagatta

SEQ ID NO: 93424 - DNA, 15 bp, Homo sapiens
tggtgagatgagatt

SEQ ID NO: 93425 - DNA, 15 bp, Homo sapiens
ttggtgagatgagat

SEQ ID NO: 93426 - DNA, 15 bp, Homo sapiens
cttggtgagatgaga

SEQ ID NO: 93427 - DNA, 15 bp, Homo sapiens
tcttggtgagatgag

SEQ ID NO: 93428 - DNA, 15 bp, Homo sapiens
atcttggtgagatga

SEQ ID NO: 93429 - DNA, 15 bp, Homo sapiens
tatcttggtgagatg

SEQ ID NO: 93430 - DNA, 15 bp, Homo sapiens
ttatcttggtgagat

SEQ ID NO: 93431 - DNA, 15 bp, Homo sapiens
cttatcttggtgaga

SEQ ID NO: 93432 - DNA, 15 bp, Homo sapiens
gcttatcttggtgag

SEQ ID NO: 93433 - DNA, 15 bp, Homo sapiens
tgcttatcttggtga

SEQ ID NO: 93434 - DNA, 15 bp, Homo sapiens
atgcttatcttggtg

SEQ ID NO: 93435 - DNA, 15 bp, Homo sapiens
catgcttatcttggt

SEQ ID NO: 93436 - DNA, 15 bp, Homo sapiens
ccatgcttatcttgg

SEQ ID NO: 93437 - DNA, 15 bp, Homo sapiens
accatgcttatcttg

SEQ ID NO: 93438 - DNA, 15 bp, Homo sapiens
taccatgcttatctt

SEQ ID NO: 93439 - DNA, 15 bp, Homo sapiens
ctaccatgcttatct

SEQ ID NO: 93440 - DNA, 15 bp, Homo sapiens
tctaccatgcttatc

SEQ ID NO: 93441 - DNA, 15 bp, Homo sapiens
ctctaccatgcttat

SEQ ID NO: 93442 - DNA, 15 bp, Homo sapiens
cctctaccatgctta

SEQ ID NO: 93443 - DNA, 15 bp, Homo sapiens
ccctctaccatgctt

SEQ ID NO: 93444 - DNA, 15 bp, Homo sapiens
cccctctaccatgct

SEQ ID NO: 93445 - DNA, 15 bp, Homo sapiens
gcccctctaccatgc

SEQ ID NO: 93446 - DNA, 15 bp, Homo sapiens
tgcccctctaccatg

SEQ ID NO: 93447 - DNA, 15 bp, Homo sapiens
ttgcccctctaccat

SEQ ID NO: 93448 - DNA, 15 bp, Homo sapiens
cttgcccctctacca

SEQ ID NO: 93449 - DNA, 15 bp, Homo sapiens
gcttgcccctctacc

SEQ ID NO: 93450 - DNA, 15 bp, Homo sapiens
tgcttgcccctctac

SEQ ID NO: 93451 - DNA, 15 bp, Homo sapiens
ctgcttgcccctcta

SEQ ID NO: 93452 - DNA, 15 bp, Homo sapiens
cctgcttgcccctct

SEQ ID NO: 93453 - DNA, 15 bp, Homo sapiens
tcctgcttgcccctc

SEQ ID NO: 93454 - DNA, 15 bp, Homo sapiens
atcctgcttgcccct

SEQ ID NO: 93455 - DNA, 15 bp, Homo sapiens
catcctgcttgcccc

SEQ ID NO: 93456 - DNA, 15 bp, Homo sapiens
ccatcctgcttgccc

SEQ ID NO: 93457 - DNA, 15 bp, Homo sapiens
tccatcctgcttgcc

SEQ ID NO: 93458 - DNA, 15 bp, Homo sapiens
ttccatcctgcttgc

SEQ ID NO: 93459 - DNA, 15 bp, Homo sapiens
attccatcctgcttg

SEQ ID NO: 93460 - DNA, 15 bp, Homo sapiens
tattccatcctgctt

SEQ ID NO: 93461 - DNA, 15 bp, Homo sapiens
ctattccatcctgct

SEQ ID NO: 93462 - DNA, 15 bp, Homo sapiens
tctattccatcctgc

SEQ ID NO: 93463 - DNA, 15 bp, Homo sapiens
gtctattccatcctg

SEQ ID NO: 93464 - DNA, 15 bp, Homo sapiens
agtctattccatcct

SEQ ID NO: 93465 - DNA, 15 bp, Homo sapiens
gagtctattccatcc

SEQ ID NO: 93466 - DNA, 15 bp, Homo sapiens
ggagtctattccatc

SEQ ID NO: 93467 - DNA, 15 bp, Homo sapiens
tggagtctattccat

SEQ ID NO: 93468 - DNA, 15 bp, Homo sapiens
atggagtctattcca

SEQ ID NO: 93469 - DNA, 15 bp, Homo sapiens
catggagtctattcc

SEQ ID NO: 93470 - DNA, 15 bp, Homo sapiens
acatggagtctattc

SEQ ID NO: 93471 - DNA, 15 bp, Homo sapiens
tacatggagtctatt

SEQ ID NO: 93472 - DNA, 15 bp, Homo sapiens
atacatggagtctat

SEQ ID NO: 93473 - DNA, 15 bp, Homo sapiens
tatacatggagtcta

SEQ ID NO: 93474 - DNA, 15 bp, Homo sapiens
atatacatggagtct

SEQ ID NO: 93475 - DNA, 15 bp, Homo sapiens
catatacatggagtc

SEQ ID NO: 93476 - DNA, 15 bp, Homo sapiens
ccatatacatggagt

SEQ ID NO: 93477 - DNA, 15 bp, Homo sapiens
accatatacatggag

SEQ ID NO: 93478 - DNA, 15 bp, Homo sapiens
caccatatacatgga

SEQ ID NO: 93479 - DNA, 15 bp, Homo sapiens
acaccatatacatgg

SEQ ID NO: 93480 - DNA, 15 bp, Homo sapiens
cacaccatatacatg

SEQ ID NO: 93481 - DNA, 15 bp, Homo sapiens
acacaccatatacat

SEQ ID NO: 93482 - DNA, 15 bp, Homo sapiens
tacacaccatataca

SEQ ID NO: 93483 - DNA, 15 bp, Homo sapiens
atacacaccatatac

SEQ ID NO: 93484 - DNA, 15 bp, Homo sapiens
aatacacaccatata

SEQ ID NO: 93485 - DNA, 15 bp, Homo sapiens
aaatacacaccatat

SEQ ID NO: 93486 - DNA, 15 bp, Homo sapiens
aaaatacacaccata

SEQ ID NO: 93487 - DNA, 15 bp, Homo sapiens
aaaaatacacaccat

SEQ ID NO: 93488 - DNA, 15 bp, Homo sapiens
taaaaatacacacca

SEQ ID NO: 93489 - DNA, 15 bp, Homo sapiens
ttaaaaatacacacc

SEQ ID NO: 93490 - DNA, 15 bp, Homo sapiens
tttaaaaatacacac

SEQ ID NO: 93491 - DNA, 15 bp, Homo sapiens
ttttaaaaatacaca

SEQ ID NO: 93492 - DNA, 15 bp, Homo sapiens
attttaaaaatacac

SEQ ID NO: 93493 - DNA, 15 bp, Homo sapiens
gattttaaaaataca

SEQ ID NO: 93494 - DNA, 15 bp, Homo sapiens
tgattttaaaaatac

SEQ ID NO: 93495 - DNA, 15 bp, Homo sapiens
gtgattttaaaaata

SEQ ID NO: 93496 - DNA, 15 bp, Homo sapiens
ggtgattttaaaaat

SEQ ID NO: 93497 - DNA, 15 bp, Homo sapiens
tggtgattttaaaaa

SEQ ID NO: 93498 - DNA, 15 bp, Homo sapiens
atggtgattttaaaa

SEQ ID NO: 93499 - DNA, 15 bp, Homo sapiens
aatggtgattttaaa

SEQ ID NO: 93500 - DNA, 15 bp, Homo sapiens
aaatggtgattttaa

SEQ ID NO: 93501 - DNA, 15 bp, Homo sapiens
taaatggtgatttta

SEQ ID NO: 93502 - DNA, 15 bp, Homo sapiens
ataaatggtgatttt

SEQ ID NO: 93503 - DNA, 15 bp, Homo sapiens
gataaatggtgattt

SEQ ID NO: 93504 - DNA, 15 bp, Homo sapiens
tgataaatggtgatt

SEQ ID NO: 93505 - DNA, 15 bp, Homo sapiens
gtgataaatggtgat

SEQ ID NO: 93506 - DNA, 15 bp, Homo sapiens
tgtgataaatggtga

SEQ ID NO: 93507 - DNA, 15 bp, Homo sapiens
atgtgataaatggtg

SEQ ID NO: 93508 - DNA, 15 bp, Homo sapiens
catgtgataaatggt

SEQ ID NO: 93509 - DNA, 15 bp, Homo sapiens
gcatgtgataaatgg

SEQ ID NO: 93510 - DNA, 15 bp, Homo sapiens
agcatgtgataaatg

SEQ ID NO: 93511 - DNA, 15 bp, Homo sapiens
aagcatgtgataaat

SEQ ID NO: 93512 - DNA, 15 bp, Homo sapiens
taagcatgtgataaa

SEQ ID NO: 93513 - DNA, 15 bp, Homo sapiens
ataagcatgtgataa

SEQ ID NO: 93514 - DNA, 15 bp, Homo sapiens
aataagcatgtgata

SEQ ID NO: 93515 - DNA, 15 bp, Homo sapiens
aaataagcatgtgat

SEQ ID NO: 93516 - DNA, 15 bp, Homo sapiens
taaataagcatgtga

SEQ ID NO: 93517 - DNA, 15 bp, Homo sapiens
ttaaataagcatgtg

SEQ ID NO: 93518 - DNA, 15 bp, Homo sapiens
attaaataagcatgt

SEQ ID NO: 93519 - DNA, 15 bp, Homo sapiens
gattaaataagcatg

SEQ ID NO: 93520 - DNA, 15 bp, Homo sapiens
ggattaaataagcat

SEQ ID NO: 93521 - DNA, 15 bp, Homo sapiens
aggattaaataagca

SEQ ID NO: 93522 - DNA, 15 bp, Homo sapiens
gaggattaaataagc

SEQ ID NO: 93523 - DNA, 15 bp, Homo sapiens
tgaggattaaataag

SEQ ID NO: 93524 - DNA, 15 bp, Homo sapiens
atgaggattaaataa

SEQ ID NO: 93525 - DNA, 15 bp, Homo sapiens
tatgaggattaaata

SEQ ID NO: 93526 - DNA, 15 bp, Homo sapiens
ctatgaggattaaat

SEQ ID NO: 93527 - DNA, 15 bp, Homo sapiens
gctatgaggattaaa

SEQ ID NO: 93528 - DNA, 15 bp, Homo sapiens
tgctatgaggattaa

SEQ ID NO: 93529 - DNA, 15 bp, Homo sapiens
ttgctatgaggatta

SEQ ID NO: 93530 - DNA, 15 bp, Homo sapiens
gttgctatgaggatt

SEQ ID NO: 93531 - DNA, 15 bp, Homo sapiens
ggttgctatgaggat

SEQ ID NO: 93532 - DNA, 15 bp, Homo sapiens
cggttgctatgagga

SEQ ID NO: 93533 - DNA, 15 bp, Homo sapiens
acggttgctatgagg

SEQ ID NO: 93534 - DNA, 15 bp, Homo sapiens
tacggttgctatgag

SEQ ID NO: 93535 - DNA, 15 bp, Homo sapiens
ctacggttgctatga

SEQ ID NO: 93536 - DNA, 15 bp, Homo sapiens
tctacggttgctatg

SEQ ID NO: 93537 - DNA, 15 bp, Homo sapiens
ttctacggttgctat

SEQ ID NO: 93538 - DNA, 15 bp, Homo sapiens
tttctacggttgcta

SEQ ID NO: 93539 - DNA, 15 bp, Homo sapiens
ctttctacggttgct

SEQ ID NO: 93540 - DNA, 15 bp, Homo sapiens
gctttctacggttgc

SEQ ID NO: 93541 - DNA, 15 bp, Homo sapiens
tgctttctacggttg

SEQ ID NO: 93542 - DNA, 15 bp, Homo sapiens
gtgctttctacggtt

SEQ ID NO: 93543 - DNA, 15 bp, Homo sapiens
ggtgctttctacggt

SEQ ID NO: 93544 - DNA, 15 bp, Homo sapiens
aggtgctttctacgg

SEQ ID NO: 93545 - DNA, 15 bp, Homo sapiens
caggtgctttctacg

SEQ ID NO: 93546 - DNA, 15 bp, Homo sapiens
acaggtgctttctac

SEQ ID NO: 93547 - DNA, 15 bp, Homo sapiens
aacaggtgctttcta

SEQ ID NO: 93548 - DNA, 15 bp, Homo sapiens
taacaggtgctttct

SEQ ID NO: 93549 - DNA, 15 bp, Homo sapiens
ataacaggtgctttc

SEQ ID NO: 93550 - DNA, 15 bp, Homo sapiens
aataacaggtgcttt

SEQ ID NO: 93551 - DNA, 15 bp, Homo sapiens
taataacaggtgctt

SEQ ID NO: 93552 - DNA, 15 bp, Homo sapiens
ttaataacaggtgct

SEQ ID NO: 93553 - DNA, 15 bp, Homo sapiens
attaataacaggtgc

SEQ ID NO: 93554 - DNA, 15 bp, Homo sapiens
cattaataacaggtg

SEQ ID NO: 93555 - DNA, 15 bp, Homo sapiens
gcattaataacaggt

SEQ ID NO: 93556 - DNA, 15 bp, Homo sapiens
agcattaataacagg

SEQ ID NO: 93557 - DNA, 15 bp, Homo sapiens
aagcattaataacag

SEQ ID NO: 93558 - DNA, 15 bp, Homo sapiens
aaagcattaataaca

SEQ ID NO: 93559 - DNA, 15 bp, Homo sapiens
aaaagcattaataac

SEQ ID NO: 93560 - DNA, 15 bp, Homo sapiens
gaaaagcattaataa

SEQ ID NO: 93561 - DNA, 15 bp, Homo sapiens
tgaaaagcattaata

SEQ ID NO: 93562 - DNA, 15 bp, Homo sapiens
ctgaaaagcattaat

SEQ ID NO: 93563 - DNA, 15 bp, Homo sapiens
tctgaaaagcattaa

SEQ ID NO: 93564 - DNA, 15 bp, Homo sapiens
ctctgaaaagcatta

SEQ ID NO: 93565 - DNA, 15 bp, Homo sapiens
tctctgaaaagcatt

SEQ ID NO: 93566 - DNA, 15 bp, Homo sapiens
ttctctgaaaagcat

SEQ ID NO: 93567 - DNA, 15 bp, Homo sapiens
cttctctgaaaagca

SEQ ID NO: 93568 - DNA, 15 bp, Homo sapiens
gcttctctgaaaagc

SEQ ID NO: 93569 - DNA, 15 bp, Homo sapiens
tgcttctctgaaaag

SEQ ID NO: 93570 - DNA, 15 bp, Homo sapiens
ctgcttctctgaaaa

SEQ ID NO: 93571 - DNA, 15 bp, Homo sapiens
tctgcttctctgaaa

SEQ ID NO: 93572 - DNA, 15 bp, Homo sapiens
ttctgcttctctgaa

SEQ ID NO: 93573 - DNA, 15 bp, Homo sapiens
gttctgcttctctga

SEQ ID NO: 93574 - DNA, 15 bp, Homo sapiens
agttctgcttctctg

SEQ ID NO: 93575 - DNA, 15 bp, Homo sapiens
cagttctgcttctct

SEQ ID NO: 93576 - DNA, 15 bp, Homo sapiens
ccagttctgcttctc

SEQ ID NO: 93577 - DNA, 15 bp, Homo sapiens
tccagttctgcttct

SEQ ID NO: 93578 - DNA, 15 bp, Homo sapiens
ctccagttctgcttc

SEQ ID NO: 93579 - DNA, 15 bp, Homo sapiens
cctccagttctgctt

SEQ ID NO: 93580 - DNA, 15 bp, Homo sapiens
acctccagttctgct

SEQ ID NO: 93581 - DNA, 15 bp, Homo sapiens
aacctccagttctgc

SEQ ID NO: 93582 - DNA, 15 bp, Homo sapiens
gaacctccagttctg

SEQ ID NO: 93583 - DNA, 15 bp, Homo sapiens
tgaacctccagttct

SEQ ID NO: 93584 - DNA, 15 bp, Homo sapiens
ttgaacctccagttc

SEQ ID NO: 93585 - DNA, 15 bp, Homo sapiens
tttgaacctccagtt

SEQ ID NO: 93586 - DNA, 15 bp, Homo sapiens
ctttgaacctccagt

SEQ ID NO: 93587 - DNA, 15 bp, Homo sapiens
gctttgaacctccag

SEQ ID NO: 93588 - DNA, 15 bp, Homo sapiens
tgctttgaacctcca

SEQ ID NO: 93589 - DNA, 15 bp, Homo sapiens
ctgctttgaacctcc

SEQ ID NO: 93590 - DNA, 15 bp, Homo sapiens
gctgctttgaacctc

SEQ ID NO: 93591 - DNA, 15 bp, Homo sapiens
agctgctttgaacct

SEQ ID NO: 93592 - DNA, 15 bp, Homo sapiens
cagctgctttgaacc

SEQ ID NO: 93593 - DNA, 15 bp, Homo sapiens
tcagctgctttgaac

SEQ ID NO: 93594 - DNA, 15 bp, Homo sapiens
ctcagctgctttgaa

SEQ ID NO: 93595 - DNA, 15 bp, Homo sapiens
gctcagctgctttga

SEQ ID NO: 93596 - DNA, 15 bp, Homo sapiens
tgctcagctgctttg

SEQ ID NO: 93597 - DNA, 15 bp, Homo sapiens
ttgctcagctgcttt

SEQ ID NO: 93598 - DNA, 15 bp, Homo sapiens
gttgctcagctgctt

SEQ ID NO: 93599 - DNA, 15 bp, Homo sapiens
tgttgctcagctgct

SEQ ID NO: 93600 - DNA, 15 bp, Homo sapiens
atgttgctcagctgc

SEQ ID NO: 93601 - DNA, 15 bp, Homo sapiens
catgttgctcagctg

SEQ ID NO: 93602 - DNA, 15 bp, Homo sapiens
tcatgttgctcagct

SEQ ID NO: 93603 - DNA, 15 bp, Homo sapiens
gtcatgttgctcagc

SEQ ID NO: 93604 - DNA, 15 bp, Homo sapiens
ggtcatgttgctcag

SEQ ID NO: 93605 - DNA, 15 bp, Homo sapiens
tggtcatgttgctca

SEQ ID NO: 93606 - DNA, 15 bp, Homo sapiens
ttggtcatgttgctc

SEQ ID NO: 93607 - DNA, 15 bp, Homo sapiens
cttggtcatgttgct

SEQ ID NO: 93608 - DNA, 15 bp, Homo sapiens
ccttggtcatgttgc

SEQ ID NO: 93609 - DNA, 15 bp, Homo sapiens
accttggtcatgttg

SEQ ID NO: 93610 - DNA, 15 bp, Homo sapiens
gaccttggtcatgtt

SEQ ID NO: 93611 - DNA, 15 bp, Homo sapiens
tgaccttggtcatgt

SEQ ID NO: 93612 - DNA, 15 bp, Homo sapiens
gtgaccttggtcatg

SEQ ID NO: 93613 - DNA, 15 bp, Homo sapiens
agtgaccttggtcat

SEQ ID NO: 93614 - DNA, 15 bp, Homo sapiens
gagtgaccttggtca

SEQ ID NO: 93615 - DNA, 15 bp, Homo sapiens
ggagtgaccttggtc

SEQ ID NO: 93616 - DNA, 15 bp, Homo sapiens
tggagtgaccttggt

SEQ ID NO: 93617 - DNA, 15 bp, Homo sapiens
gtggagtgaccttgg

SEQ ID NO: 93618 - DNA, 15 bp, Homo sapiens
tgtggagtgaccttg

SEQ ID NO: 93619 - DNA, 15 bp, Homo sapiens
ttgtggagtgacctt

SEQ ID NO: 93620 - DNA, 15 bp, Homo sapiens
cttgtggagtgacct

SEQ ID NO: 93621 - DNA, 15 bp, Homo sapiens
ccttgtggagtgacc

SEQ ID NO: 93622 - DNA, 15 bp, Homo sapiens
gccttgtggagtgac

SEQ ID NO: 93623 - DNA, 15 bp, Homo sapiens
ggccttgtggagtga

SEQ ID NO: 93624 - DNA, 15 bp, Homo sapiens
tggccttgtggagtg

SEQ ID NO: 93625 - DNA, 15 bp, Homo sapiens
ttggccttgtggagt

SEQ ID NO: 93626 - DNA, 15 bp, Homo sapiens
attggccttgtggag

SEQ ID NO: 93627 - DNA, 15 bp, Homo sapiens
cattggccttgtgga

SEQ ID NO: 93628 - DNA, 15 bp, Homo sapiens
ccattggccttgtgg

SEQ ID NO: 93629 - DNA, 15 bp, Homo sapiens
gccattggccttgtg

SEQ ID NO: 93630 - DNA, 15 bp, Homo sapiens
cgccattggccttgt

SEQ ID NO: 93631 - DNA, 15 bp, Homo sapiens
ccgccattggccttg

SEQ ID NO: 93632 - DNA, 15 bp, Homo sapiens
tccgccattggcctt

SEQ ID NO: 93633 - DNA, 15 bp, Homo sapiens
ctccgccattggcct

SEQ ID NO: 93634 - DNA, 15 bp, Homo sapiens
gctccgccattggcc

SEQ ID NO: 93635 - DNA, 15 bp, Homo sapiens
agctccgccattggc

SEQ ID NO: 93636 - DNA, 15 bp, Homo sapiens
cagctccgccattgg

SEQ ID NO: 93637 - DNA, 15 bp, Homo sapiens
ccagctccgccattg

SEQ ID NO: 93638 - DNA, 15 bp, Homo sapiens
cccagctccgccatt

SEQ ID NO: 93639 - DNA, 15 bp, Homo sapiens
tcccagctccgccat

SEQ ID NO: 93640 - DNA, 15 bp, Homo sapiens
atcccagctccgcca

SEQ ID NO: 93641 - DNA, 15 bp, Homo sapiens
aatcccagctccgcc

SEQ ID NO: 93642 - DNA, 15 bp, Homo sapiens
aaatcccagctccgc

SEQ ID NO: 93643 - DNA, 15 bp, Homo sapiens
caaatcccagctccg

SEQ ID NO: 93644 - DNA, 15 bp, Homo sapiens
tcaaatcccagctcc

SEQ ID NO: 93645 - DNA, 15 bp, Homo sapiens
ttcaaatcccagctc

SEQ ID NO: 93646 - DNA, 15 bp, Homo sapiens
attcaaatcccagct

SEQ ID NO: 93647 - DNA, 15 bp, Homo sapiens
gattcaaatcccagc

SEQ ID NO: 93648 - DNA, 15 bp, Homo sapiens
ggattcaaatcccag

SEQ ID NO: 93649 - DNA, 15 bp, Homo sapiens
gggattcaaatccca

SEQ ID NO: 93650 - DNA, 15 bp, Homo sapiens
cgggattcaaatccc

SEQ ID NO: 93651 - DNA, 15 bp, Homo sapiens
ccgggattcaaatcc

SEQ ID NO: 93652 - DNA, 15 bp, Homo sapiens
cccgggattcaaatc

SEQ ID NO: 93653 - DNA, 15 bp, Homo sapiens
acccgggattcaaat

SEQ ID NO: 93654 - DNA, 15 bp, Homo sapiens
aacccgggattcaaa

SEQ ID NO: 93655 - DNA, 15 bp, Homo sapiens
taacccgggattcaa

SEQ ID NO: 93656 - DNA, 15 bp, Homo sapiens
ttaacccgggattca

SEQ ID NO: 93657 - DNA, 15 bp, Homo sapiens
gttaacccgggattc

SEQ ID NO: 93658 - DNA, 15 bp, Homo sapiens
agttaacccgggatt

SEQ ID NO: 93659 - DNA, 15 bp, Homo sapiens
cagttaacccgggat

SEQ ID NO: 93660 - DNA, 15 bp, Homo sapiens
tcagttaacccggga

SEQ ID NO: 93661 - DNA, 15 bp, Homo sapiens
atcagttaacccggg

SEQ ID NO: 93662 - DNA, 15 bp, Homo sapiens
aatcagttaacccgg

SEQ ID NO: 93663 - DNA, 15 bp, Homo sapiens
gaatcagttaacccg

SEQ ID NO: 93664 - DNA, 15 bp, Homo sapiens
cgaatcagttaaccc

SEQ ID NO: 93665 - DNA, 15 bp, Homo sapiens
tcgaatcagttaacc

SEQ ID NO: 93666 - DNA, 15 bp, Homo sapiens
ttcgaatcagttaac

SEQ ID NO: 93667 - DNA, 15 bp, Homo sapiens
cttcgaatcagttaa

SEQ ID NO: 93668 - DNA, 15 bp, Homo sapiens
acttcgaatcagtta

SEQ ID NO: 93669 - DNA, 15 bp, Homo sapiens
gacttcgaatcagtt

SEQ ID NO: 93670 - DNA, 15 bp, Homo sapiens
ggacttcgaatcagt

SEQ ID NO: 93671 - DNA, 15 bp, Homo sapiens
aggacttcgaatcag

SEQ ID NO: 93672 - DNA, 15 bp, Homo sapiens
taggacttcgaatca

SEQ ID NO: 93673 - DNA, 15 bp, Homo sapiens
ataggacttcgaatc

SEQ ID NO: 93674 - DNA, 15 bp, Homo sapiens
gataggacttcgaat

SEQ ID NO: 93675 - DNA, 15 bp, Homo sapiens
agataggacttcgaa

SEQ ID NO: 93676 - DNA, 15 bp, Homo sapiens
gagataggacttcga

SEQ ID NO: 93677 - DNA, 15 bp, Homo sapiens
ggagataggacttcg

SEQ ID NO: 93678 - DNA, 15 bp, Homo sapiens
aggagataggacttc

SEQ ID NO: 93679 - DNA, 15 bp, Homo sapiens
taggagataggactt

SEQ ID NO: 93680 - DNA, 15 bp, Homo sapiens
ttaggagataggact

SEQ ID NO: 93681 - DNA, 15 bp, Homo sapiens
gttaggagataggac

SEQ ID NO: 93682 - DNA, 15 bp, Homo sapiens
agttaggagatagga

SEQ ID NO: 93683 - DNA, 15 bp, Homo sapiens
cagttaggagatagg

SEQ ID NO: 93684 - DNA, 15 bp, Homo sapiens
gcagttaggagatag

SEQ ID NO: 93685 - DNA, 15 bp, Homo sapiens
ggcagttaggagata

SEQ ID NO: 93686 - DNA, 15 bp, Homo sapiens
tggcagttaggagat

SEQ ID NO: 93687 - DNA, 15 bp, Homo sapiens
ttggcagttaggaga

SEQ ID NO: 93688 - DNA, 15 bp, Homo sapiens
tttggcagttaggag

SEQ ID NO: 93689 - DNA, 15 bp, Homo sapiens
ttttggcagttagga

SEQ ID NO: 93690 - DNA, 15 bp, Homo sapiens
attttggcagttagg

SEQ ID NO: 93691 - DNA, 15 bp, Homo sapiens
tattttggcagttag

SEQ ID NO: 93692 - DNA, 15 bp, Homo sapiens
ttattttggcagtta

SEQ ID NO: 93693 - DNA, 15 bp, Homo sapiens
attattttggcagtt

SEQ ID NO: 93694 - DNA, 15 bp, Homo sapiens
gattattttggcagt

SEQ ID NO: 93695 - DNA, 15 bp, Homo sapiens
ggattattttggcag

SEQ ID NO: 93696 - DNA, 15 bp, Homo sapiens
gggattattttggca

SEQ ID NO: 93697 - DNA, 15 bp, Homo sapiens
ggggattattttggc

SEQ ID NO: 93698 - DNA, 15 bp, Homo sapiens
tggggattattttgg

SEQ ID NO: 93699 - DNA, 15 bp, Homo sapiens
ctggggattattttg

SEQ ID NO: 93700 - DNA, 15 bp, Homo sapiens
cctggggattatttt

SEQ ID NO: 93701 - DNA, 15 bp, Homo sapiens
gcctggggattattt

SEQ ID NO: 93702 - DNA, 15 bp, Homo sapiens
ggcctggggattatt

SEQ ID NO: 93703 - DNA, 15 bp, Homo sapiens
gggcctggggattat

SEQ ID NO: 93704 - DNA, 15 bp, Homo sapiens
tgggcctggggatta

SEQ ID NO: 93705 - DNA, 15 bp, Homo sapiens
gtgggcctggggatt

SEQ ID NO: 93706 - DNA, 15 bp, Homo sapiens
ggtgggcctggggat

SEQ ID NO: 93707 - DNA, 15 bp, Homo sapiens
tggtgggcctgggga

SEQ ID NO: 93708 - DNA, 15 bp, Homo sapiens
ctggtgggcctgggg

SEQ ID NO: 93709 - DNA, 15 bp, Homo sapiens
tctggtgggcctggg

SEQ ID NO: 93710 - DNA, 15 bp, Homo sapiens
ctctggtgggcctgg

SEQ ID NO: 93711 - DNA, 15 bp, Homo sapiens
tctctggtgggcctg

SEQ ID NO: 93712 - DNA, 15 bp, Homo sapiens
ctctctggtgggcct

SEQ ID NO: 93713 - DNA, 15 bp, Homo sapiens
tctctctggtgggcc

SEQ ID NO: 93714 - DNA, 15 bp, Homo sapiens
ttctctctggtgggc

SEQ ID NO: 93715 - DNA, 15 bp, Homo sapiens
tttctctctggtggg

SEQ ID NO: 93716 - DNA, 15 bp, Homo sapiens
ctttctctctggtgg

SEQ ID NO: 93717 - DNA, 15 bp, Homo sapiens
cctttctctctggtg

SEQ ID NO: 93718 - DNA, 15 bp, Homo sapiens
tcctttctctctggt

SEQ ID NO: 93719 - DNA, 15 bp, Homo sapiens
atcctttctctctgg

SEQ ID NO: 93720 - DNA, 15 bp, Homo sapiens
tatcctttctctctg

SEQ ID NO: 93721 - DNA, 15 bp, Homo sapiens
gtatcctttctctct

SEQ ID NO: 93722 - DNA, 15 bp, Homo sapiens
ggtatcctttctctc

SEQ ID NO: 93723 - DNA, 15 bp, Homo sapiens
aggtatcctttctct

SEQ ID NO: 93724 - DNA, 15 bp, Homo sapiens
aaggtatcctttctc

SEQ ID NO: 93725 - DNA, 15 bp, Homo sapiens
gaaggtatcctttct

SEQ ID NO: 93726 - DNA, 15 bp, Homo sapiens
cgaaggtatcctttc

SEQ ID NO: 93727 - DNA, 15 bp, Homo sapiens
acgaaggtatccttt

SEQ ID NO: 93728 - DNA, 15 bp, Homo sapiens
cacgaaggtatcctt

SEQ ID NO: 93729 - DNA, 15 bp, Homo sapiens
tcacgaaggtatcct

SEQ ID NO: 93730 - DNA, 15 bp, Homo sapiens
atcacgaaggtatcc

SEQ ID NO: 93731 - DNA, 15 bp, Homo sapiens
catcacgaaggtatc

SEQ ID NO: 93732 - DNA, 15 bp, Homo sapiens
tcatcacgaaggtat

SEQ ID NO: 93733 - DNA, 15 bp, Homo sapiens
gtcatcacgaaggta

SEQ ID NO: 93734 - DNA, 15 bp, Homo sapiens
tgtcatcacgaaggt

SEQ ID NO: 93735 - DNA, 15 bp, Homo sapiens
atgtcatcacgaagg

SEQ ID NO: 93736 - DNA, 15 bp, Homo sapiens
gatgtcatcacgaag

SEQ ID NO: 93737 - DNA, 15 bp, Homo sapiens
ggatgtcatcacgaa

SEQ ID NO: 93738 - DNA, 15 bp, Homo sapiens
aggatgtcatcacga

SEQ ID NO: 93739 - DNA, 15 bp, Homo sapiens
taggatgtcatcacg

SEQ ID NO: 93740 - DNA, 15 bp, Homo sapiens
ttaggatgtcatcac

SEQ ID NO: 93741 - DNA, 15 bp, Homo sapiens
cttaggatgtcatca

SEQ ID NO: 93742 - DNA, 15 bp, Homo sapiens
gcttaggatgtcatc

SEQ ID NO: 93743 - DNA, 15 bp, Homo sapiens
ggcttaggatgtcat

SEQ ID NO: 93744 - DNA, 15 bp, Homo sapiens
gggcttaggatgtca

SEQ ID NO: 93745 - DNA, 15 bp, Homo sapiens
agggcttaggatgtc

SEQ ID NO: 93746 - DNA, 15 bp, Homo sapiens
cagggcttaggatgt

SEQ ID NO: 93747 - DNA, 15 bp, Homo sapiens
gcagggcttaggatg

SEQ ID NO: 93748 - DNA, 15 bp, Homo sapiens
tgcagggcttaggat

SEQ ID NO: 93749 - DNA, 15 bp, Homo sapiens
atgcagggcttagga

SEQ ID NO: 93750 - DNA, 15 bp, Homo sapiens
gatgcagggcttagg

SEQ ID NO: 93751 - DNA, 15 bp, Homo sapiens
agatgcagggcttag

SEQ ID NO: 93752 - DNA, 15 bp, Homo sapiens
tagatgcagggctta

SEQ ID NO: 93753 - DNA, 15 bp, Homo sapiens
gtagatgcagggctt

SEQ ID NO: 93754 - DNA, 15 bp, Homo sapiens
agtagatgcagggct

SEQ ID NO: 93755 - DNA, 15 bp, Homo sapiens
aagtagatgcagggc

SEQ ID NO: 93756 - DNA, 15 bp, Homo sapiens
aaagtagatgcaggg

SEQ ID NO: 93757 - DNA, 15 bp, Homo sapiens
caaagtagatgcagg

SEQ ID NO: 93758 - DNA, 15 bp, Homo sapiens
gcaaagtagatgcag

SEQ ID NO: 93759 - DNA, 15 bp, Homo sapiens
ggcaaagtagatgca

SEQ ID NO: 93760 - DNA, 15 bp, Homo sapiens
aggcaaagtagatgc

SEQ ID NO: 93761 - DNA, 15 bp, Homo sapiens
gaggcaaagtagatg

SEQ ID NO: 93762 - DNA, 15 bp, Homo sapiens
tgaggcaaagtagat

SEQ ID NO: 93763 - DNA, 15 bp, Homo sapiens
ctgaggcaaagtaga

SEQ ID NO: 93764 - DNA, 15 bp, Homo sapiens
cctgaggcaaagtag

SEQ ID NO: 93765 - DNA, 15 bp, Homo sapiens
ccctgaggcaaagta

SEQ ID NO: 93766 - DNA, 15 bp, Homo sapiens
accctgaggcaaagt

SEQ ID NO: 93767 - DNA, 15 bp, Homo sapiens
caccctgaggcaaag

SEQ ID NO: 93768 - DNA, 15 bp, Homo sapiens
ccaccctgaggcaaa

SEQ ID NO: 93769 - DNA, 15 bp, Homo sapiens
cccaccctgaggcaa

SEQ ID NO: 93770 - DNA, 15 bp, Homo sapiens
ccccaccctgaggca

SEQ ID NO: 93771 - DNA, 15 bp, Homo sapiens
gccccaccctgaggc

SEQ ID NO: 93772 - DNA, 15 bp, Homo sapiens
agccccaccctgagg

SEQ ID NO: 93773 - DNA, 15 bp, Homo sapiens
cagccccaccctgag

SEQ ID NO: 93774 - DNA, 15 bp, Homo sapiens
tcagccccaccctga

SEQ ID NO: 93775 - DNA, 15 bp, Homo sapiens
ctcagccccaccctg

SEQ ID NO: 93776 - DNA, 15 bp, Homo sapiens
cctcagccccaccct

SEQ ID NO: 93777 - DNA, 15 bp, Homo sapiens
ccctcagccccaccc

SEQ ID NO: 93778 - DNA, 15 bp, Homo sapiens
gccctcagccccacc

SEQ ID NO: 93779 - DNA, 15 bp, Homo sapiens
cgccctcagccccac

SEQ ID NO: 93780 - DNA, 15 bp, Homo sapiens
gcgccctcagcccca

SEQ ID NO: 93781 - DNA, 15 bp, Homo sapiens
cgcgccctcagcccc

SEQ ID NO: 93782 - DNA, 15 bp, Homo sapiens
ccgcgccctcagccc

SEQ ID NO: 93783 - DNA, 15 bp, Homo sapiens
tccgcgccctcagcc

SEQ ID NO: 93784 - DNA, 15 bp, Homo sapiens
gtccgcgccctcagc

SEQ ID NO: 93785 - DNA, 15 bp, Homo sapiens
agtccgcgccctcag

SEQ ID NO: 93786 - DNA, 15 bp, Homo sapiens
gagtccgcgccctca

SEQ ID NO: 93787 - DNA, 15 bp, Homo sapiens
cgagtccgcgccctc

SEQ ID NO: 93788 - DNA, 15 bp, Homo sapiens
tcgagtccgcgccct

SEQ ID NO: 93789 - DNA, 15 bp, Homo sapiens
ctcgagtccgcgccc

SEQ ID NO: 93790 - DNA, 15 bp, Homo sapiens
gctcgagtccgcgcc

SEQ ID NO: 93791 - DNA, 15 bp, Homo sapiens
tgctcgagtccgcgc

SEQ ID NO: 93792 - DNA, 15 bp, Homo sapiens
ttgctcgagtccgcg

SEQ ID NO: 93793 - DNA, 15 bp, Homo sapiens
tttgctcgagtccgc

SEQ ID NO: 93794 - DNA, 15 bp, Homo sapiens
ctttgctcgagtccg

SEQ ID NO: 93795 - DNA, 15 bp, Homo sapiens
tctttgctcgagtcc

SEQ ID NO: 93796 - DNA, 15 bp, Homo sapiens
gtctttgctcgagtc

SEQ ID NO: 93797 - DNA, 15 bp, Homo sapiens
agtctttgctcgagt

SEQ ID NO: 93798 - DNA, 15 bp, Homo sapiens
cagtctttgctcgag

SEQ ID NO: 93799 - DNA, 15 bp, Homo sapiens
gcagtctttgctcga

SEQ ID NO: 93800 - DNA, 15 bp, Homo sapiens
tgcagtctttgctcg

SEQ ID NO: 93801 - DNA, 15 bp, Homo sapiens
ctgcagtctttgctc

SEQ ID NO: 93802 - DNA, 15 bp, Homo sapiens
gctgcagtctttgct

SEQ ID NO: 93803 - DNA, 15 bp, Homo sapiens
tgctgcagtctttgc

SEQ ID NO: 93804 - DNA, 15 bp, Homo sapiens
ctgctgcagtctttg

SEQ ID NO: 93805 - DNA, 15 bp, Homo sapiens
tctgctgcagtcttt

SEQ ID NO: 93806 - DNA, 15 bp, Homo sapiens
atctgctgcagtctt

SEQ ID NO: 93807 - DNA, 15 bp, Homo sapiens
catctgctgcagtct

SEQ ID NO: 93808 - DNA, 15 bp, Homo sapiens
tcatctgctgcagtc

SEQ ID NO: 93809 - DNA, 15 bp, Homo sapiens
ctcatctgctgcagt

SEQ ID NO: 93810 - DNA, 15 bp, Homo sapiens
tctcatctgctgcag

SEQ ID NO: 93811 - DNA, 15 bp, Homo sapiens
ttctcatctgctgca

SEQ ID NO: 93812 - DNA, 15 bp, Homo sapiens
cttctcatctgctgc

SEQ ID NO: 93813 - DNA, 15 bp, Homo sapiens
gcttctcatctgctg

SEQ ID NO: 93814 - DNA, 15 bp, Homo sapiens
agcttctcatctgct

SEQ ID NO: 93815 - DNA, 15 bp, Homo sapiens
cagcttctcatctgc

SEQ ID NO: 93816 - DNA, 15 bp, Homo sapiens
ccagcttctcatctg

SEQ ID NO: 93817 - DNA, 15 bp, Homo sapiens
accagcttctcatct

SEQ ID NO: 93818 - DNA, 15 bp, Homo sapiens
gaccagcttctcatc

SEQ ID NO: 93819 - DNA, 15 bp, Homo sapiens
ggaccagcttctcat

SEQ ID NO: 93820 - DNA, 15 bp, Homo sapiens
aggaccagcttctca

SEQ ID NO: 93821 - DNA, 15 bp, Homo sapiens
caggaccagcttctc

SEQ ID NO: 93822 - DNA, 15 bp, Homo sapiens
tcaggaccagcttct

SEQ ID NO: 93823 - DNA, 15 bp, Homo sapiens
ctcaggaccagcttc

SEQ ID NO: 93824 - DNA, 15 bp, Homo sapiens
gctcaggaccagctt

SEQ ID NO: 93825 - DNA, 15 bp, Homo sapiens
agctcaggaccagct

SEQ ID NO: 93826 - DNA, 15 bp, Homo sapiens
cagctcaggaccagc

SEQ ID NO: 93827 - DNA, 15 bp, Homo sapiens
acagctcaggaccag

SEQ ID NO: 93828 - DNA, 15 bp, Homo sapiens
cacagctcaggacca

SEQ ID NO: 93829 - DNA, 15 bp, Homo sapiens
ccacagctcaggacc

SEQ ID NO: 93830 - DNA, 15 bp, Homo sapiens
cccacagctcaggac

SEQ ID NO: 93831 - DNA, 15 bp, Homo sapiens
acccacagctcagga

SEQ ID NO: 93832 - DNA, 15 bp, Homo sapiens
aacccacagctcagg

SEQ ID NO: 93833 - DNA, 15 bp, Homo sapiens
caacccacagctcag

SEQ ID NO: 93834 - DNA, 15 bp, Homo sapiens
ccaacccacagctca

SEQ ID NO: 93835 - DNA, 15 bp, Homo sapiens
cccaacccacagctc

SEQ ID NO: 93836 - DNA, 15 bp, Homo sapiens
tcccaacccacagct

SEQ ID NO: 93837 - DNA, 15 bp, Homo sapiens
ttcccaacccacagc

SEQ ID NO: 93838 - DNA, 15 bp, Homo sapiens
cttcccaacccacag

SEQ ID NO: 93839 - DNA, 15 bp, Homo sapiens
ccttcccaacccaca

SEQ ID NO: 93840 - DNA, 15 bp, Homo sapiens
accttcccaacccac

SEQ ID NO: 93841 - DNA, 15 bp, Homo sapiens
aaccttcccaaccca

SEQ ID NO: 93842 - DNA, 15 bp, Homo sapiens
gaaccttcccaaccc

SEQ ID NO: 93843 - DNA, 15 bp, Homo sapiens
cgaaccttcccaacc

SEQ ID NO: 93844 - DNA, 15 bp, Homo sapiens
ccgaaccttcccaac

SEQ ID NO: 93845 - DNA, 15 bp, Homo sapiens
cccgaaccttcccaa

SEQ ID NO: 93846 - DNA, 15 bp, Homo sapiens
gcccgaaccttccca

SEQ ID NO: 93847 - DNA, 15 bp, Homo sapiens
tgcccgaaccttccc

SEQ ID NO: 93848 - DNA, 15 bp, Homo sapiens
ctgcccgaaccttcc

SEQ ID NO: 93849 - DNA, 15 bp, Homo sapiens
actgcccgaaccttc

SEQ ID NO: 93850 - DNA, 15 bp, Homo sapiens
cactgcccgaacctt

SEQ ID NO: 93851 - DNA, 15 bp, Homo sapiens
gcactgcccgaacct

SEQ ID NO: 93852 - DNA, 15 bp, Homo sapiens
tgcactgcccgaacc

SEQ ID NO: 93853 - DNA, 15 bp, Homo sapiens
ctgcactgcccgaac

SEQ ID NO: 93854 - DNA, 15 bp, Homo sapiens
gctgcactgcccgaa

SEQ ID NO: 93855 - DNA, 15 bp, Homo sapiens
tgctgcactgcccga

SEQ ID NO: 93856 - DNA, 15 bp, Homo sapiens
ctgctgcactgcccg

SEQ ID NO: 93857 - DNA, 15 bp, Homo sapiens
actgctgcactgccc

SEQ ID NO: 93858 - DNA, 15 bp, Homo sapiens
aactgctgcactgcc

SEQ ID NO: 93859 - DNA, 15 bp, Homo sapiens
gaactgctgcactgc

SEQ ID NO: 93860 - DNA, 15 bp, Homo sapiens
agaactgctgcactg

SEQ ID NO: 93861 - DNA, 15 bp, Homo sapiens
gagaactgctgcact

SEQ ID NO: 93862 - DNA, 15 bp, Homo sapiens
tgagaactgctgcac

SEQ ID NO: 93863 - DNA, 15 bp, Homo sapiens
gtgagaactgctgca

SEQ ID NO: 93864 - DNA, 15 bp, Homo sapiens
tgtgagaactgctgc

SEQ ID NO: 93865 - DNA, 15 bp, Homo sapiens
ctgtgagaactgctg

SEQ ID NO: 93866 - DNA, 15 bp, Homo sapiens
cctgtgagaactgct

SEQ ID NO: 93867 - DNA, 15 bp, Homo sapiens
acctgtgagaactgc

SEQ ID NO: 93868 - DNA, 15 bp, Homo sapiens
cacctgtgagaactg

SEQ ID NO: 93869 - DNA, 15 bp, Homo sapiens
ccacctgtgagaact

SEQ ID NO: 93870 - DNA, 15 bp, Homo sapiens
tccacctgtgagaac

SEQ ID NO: 93871 - DNA, 15 bp, Homo sapiens
ctccacctgtgagaa

SEQ ID NO: 93872 - DNA, 15 bp, Homo sapiens
tctccacctgtgaga

SEQ ID NO: 93873 - DNA, 15 bp, Homo sapiens
ctctccacctgtgag

SEQ ID NO: 93874 - DNA, 15 bp, Homo sapiens
gctctccacctgtga

SEQ ID NO: 93875 - DNA, 15 bp, Homo sapiens
tgctctccacctgtg

SEQ ID NO: 93876 - DNA, 15 bp, Homo sapiens
ctgctctccacctgt

SEQ ID NO: 93877 - DNA, 15 bp, Homo sapiens
cctgctctccacctg

SEQ ID NO: 93878 - DNA, 15 bp, Homo sapiens
tcctgctctccacct

SEQ ID NO: 93879 - DNA, 15 bp, Homo sapiens
atcctgctctccacc

SEQ ID NO: 93880 - DNA, 15 bp, Homo sapiens
catcctgctctccac

SEQ ID NO: 93881 - DNA, 15 bp, Homo sapiens
tcatcctgctctcca

SEQ ID NO: 93882 - DNA, 15 bp, Homo sapiens
ttcatcctgctctcc

SEQ ID NO: 93883 - DNA, 15 bp, Homo sapiens
cttcatcctgctctc

SEQ ID NO: 93884 - DNA, 15 bp, Homo sapiens
ccttcatcctgctct

SEQ ID NO: 93885 - DNA, 15 bp, Homo sapiens
tccttcatcctgctc

SEQ ID NO: 93886 - DNA, 15 bp, Homo sapiens
ttccttcatcctgct

SEQ ID NO: 93887 - DNA, 15 bp, Homo sapiens
gttccttcatcctgc

SEQ ID NO: 93888 - DNA, 15 bp, Homo sapiens
cgttccttcatcctg

SEQ ID NO: 93889 - DNA, 15 bp, Homo sapiens
gcgttccttcatcct

SEQ ID NO: 93890 - DNA, 15 bp, Homo sapiens
agcgttccttcatcc

SEQ ID NO: 93891 - DNA, 15 bp, Homo sapiens
aagcgttccttcatc

SEQ ID NO: 93892 - DNA, 15 bp, Homo sapiens
taagcgttccttcat

SEQ ID NO: 93893 - DNA, 15 bp, Homo sapiens
ctaagcgttccttca

SEQ ID NO: 93894 - DNA, 15 bp, Homo sapiens
tctaagcgttccttc

SEQ ID NO: 93895 - DNA, 15 bp, Homo sapiens
ctctaagcgttcctt

SEQ ID NO: 93896 - DNA, 15 bp, Homo sapiens
cctctaagcgttcct

SEQ ID NO: 93897 - DNA, 15 bp, Homo sapiens
tcctctaagcgttcc

SEQ ID NO: 93898 - DNA, 15 bp, Homo sapiens
ctcctctaagcgttc

SEQ ID NO: 93899 - DNA, 15 bp, Homo sapiens
tctcctctaagcgtt

SEQ ID NO: 93900 - DNA, 15 bp, Homo sapiens
ctctcctctaagcgt

SEQ ID NO: 93901 - DNA, 15 bp, Homo sapiens
gctctcctctaagcg

SEQ ID NO: 93902 - DNA, 15 bp, Homo sapiens
tgctctcctctaagc

SEQ ID NO: 93903 - DNA, 15 bp, Homo sapiens
ctgctctcctctaag

SEQ ID NO: 93904 - DNA, 15 bp, Homo sapiens
gctgctctcctctaa

SEQ ID NO: 93905 - DNA, 15 bp, Homo sapiens
agctgctctcctcta

SEQ ID NO: 93906 - DNA, 15 bp, Homo sapiens
aagctgctctcctct

SEQ ID NO: 93907 - DNA, 15 bp, Homo sapiens
gaagctgctctcctc

SEQ ID NO: 93908 - DNA, 15 bp, Homo sapiens
agaagctgctctcct

SEQ ID NO: 93909 - DNA, 15 bp, Homo sapiens
cagaagctgctctcc

SEQ ID NO: 93910 - DNA, 15 bp, Homo sapiens
gcagaagctgctctc

SEQ ID NO: 93911 - DNA, 15 bp, Homo sapiens
tgcagaagctgctct

SEQ ID NO: 93912 - DNA, 15 bp, Homo sapiens
ctgcagaagctgctc

SEQ ID NO: 93913 - DNA, 15 bp, Homo sapiens
cctgcagaagctgct

SEQ ID NO: 93914 - DNA, 15 bp, Homo sapiens
acctgcagaagctgc

SEQ ID NO: 93915 - DNA, 15 bp, Homo sapiens
aacctgcagaagctg

SEQ ID NO: 93916 - DNA, 15 bp, Homo sapiens
caacctgcagaagct

SEQ ID NO: 93917 - DNA, 15 bp, Homo sapiens
ccaacctgcagaagc

SEQ ID NO: 93918 - DNA, 15 bp, Homo sapiens
accaacctgcagaag

SEQ ID NO: 93919 - DNA, 15 bp, Homo sapiens
caccaacctgcagaa

SEQ ID NO: 93920 - DNA, 15 bp, Homo sapiens
ccaccaacctgcaga

SEQ ID NO: 93921 - DNA, 15 bp, Homo sapiens
gccaccaacctgcag

SEQ ID NO: 93922 - DNA, 15 bp, Homo sapiens
agccaccaacctgca

SEQ ID NO: 93923 - DNA, 15 bp, Homo sapiens
cagccaccaacctgc

SEQ ID NO: 93924 - DNA, 15 bp, Homo sapiens
ccagccaccaacctg

SEQ ID NO: 93925 - DNA, 15 bp, Homo sapiens
cccagccaccaacct

SEQ ID NO: 93926 - DNA, 15 bp, Homo sapiens
tcccagccaccaacc

SEQ ID NO: 93927 - DNA, 15 bp, Homo sapiens
ctcccagccaccaac

SEQ ID NO: 93928 - DNA, 15 bp, Homo sapiens
tctcccagccaccaa

SEQ ID NO: 93929 - DNA, 15 bp, Homo sapiens
ctctcccagccacca

SEQ ID NO: 93930 - DNA, 15 bp, Homo sapiens
cctctcccagccacc

SEQ ID NO: 93931 - DNA, 15 bp, Homo sapiens
gcctctcccagccac

SEQ ID NO: 93932 - DNA, 15 bp, Homo sapiens
agcctctcccagcca

SEQ ID NO: 93933 - DNA, 15 bp, Homo sapiens
cagcctctcccagcc

SEQ ID NO: 93934 - DNA, 15 bp, Homo sapiens
gcagcctctcccagc

SEQ ID NO: 93935 - DNA, 15 bp, Homo sapiens
agcagcctctcccag

SEQ ID NO: 93936 - DNA, 15 bp, Homo sapiens
gagcagcctctccca

SEQ ID NO: 93937 - DNA, 15 bp, Homo sapiens
ggagcagcctctccc

SEQ ID NO: 93938 - DNA, 15 bp, Homo sapiens
aggagcagcctctcc

SEQ ID NO: 93939 - DNA, 15 bp, Homo sapiens
gaggagcagcctctc

SEQ ID NO: 93940 - DNA, 15 bp, Homo sapiens
ggaggagcagcctct

SEQ ID NO: 93941 - DNA, 15 bp, Homo sapiens
gggaggagcagcctc

SEQ ID NO: 93942 - DNA, 15 bp, Homo sapiens
ggggaggagcagcct

SEQ ID NO: 93943 - DNA, 15 bp, Homo sapiens
tggggaggagcagcc

SEQ ID NO: 93944 - DNA, 15 bp, Homo sapiens
ttggggaggagcagc

SEQ ID NO: 93945 - DNA, 15 bp, Homo sapiens
tttggggaggagcag

SEQ ID NO: 93946 - DNA, 15 bp, Homo sapiens
ctttggggaggagca

SEQ ID NO: 93947 - DNA, 15 bp, Homo sapiens
tctttggggaggagc

SEQ ID NO: 93948 - DNA, 15 bp, Homo sapiens
gtctttggggaggag

SEQ ID NO: 93949 - DNA, 15 bp, Homo sapiens
agtctttggggagga

SEQ ID NO: 93950 - DNA, 15 bp, Homo sapiens
cagtctttggggagg

SEQ ID NO: 93951 - DNA, 15 bp, Homo sapiens
ccagtctttggggag

SEQ ID NO: 93952 - DNA, 15 bp, Homo sapiens
tccagtctttgggga

SEQ ID NO: 93953 - DNA, 15 bp, Homo sapiens
gtccagtctttgggg

SEQ ID NO: 93954 - DNA, 15 bp, Homo sapiens
ggtccagtctttggg

SEQ ID NO: 93955 - DNA, 15 bp, Homo sapiens
aggtccagtctttgg

SEQ ID NO: 93956 - DNA, 15 bp, Homo sapiens
taggtccagtctttg

SEQ ID NO: 93957 - DNA, 15 bp, Homo sapiens
ataggtccagtcttt

SEQ ID NO: 93958 - DNA, 15 bp, Homo sapiens
aataggtccagtctt

SEQ ID NO: 93959 - DNA, 15 bp, Homo sapiens
taataggtccagtct

SEQ ID NO: 93960 - DNA, 15 bp, Homo sapiens
ctaataggtccagtc

SEQ ID NO: 93961 - DNA, 15 bp, Homo sapiens
tctaataggtccagt

SEQ ID NO: 93962 - DNA, 15 bp, Homo sapiens
ttctaataggtccag

SEQ ID NO: 93963 - DNA, 15 bp, Homo sapiens
cttctaataggtcca

SEQ ID NO: 93964 - DNA, 15 bp, Homo sapiens
gcttctaataggtcc

SEQ ID NO: 93965 - DNA, 15 bp, Homo sapiens
tgcttctaataggtc

SEQ ID NO: 93966 - DNA, 15 bp, Homo sapiens
gtgcttctaataggt

SEQ ID NO: 93967 - DNA, 15 bp, Homo sapiens
tgtgcttctaatagg

SEQ ID NO: 93968 - DNA, 15 bp, Homo sapiens
ctgtgcttctaatag

SEQ ID NO: 93969 - DNA, 15 bp, Homo sapiens
cctgtgcttctaata

SEQ ID NO: 93970 - DNA, 15 bp, Homo sapiens
tcctgtgcttctaat

SEQ ID NO: 93971 - DNA, 15 bp, Homo sapiens
gtcctgtgcttctaa

SEQ ID NO: 93972 - DNA, 15 bp, Homo sapiens
ggtcctgtgcttcta

SEQ ID NO: 93973 - DNA, 15 bp, Homo sapiens
aggtcctgtgcttct

SEQ ID NO: 93974 - DNA, 15 bp, Homo sapiens
gaggtcctgtgcttc

SEQ ID NO: 93975 - DNA, 15 bp, Homo sapiens
agaggtcctgtgctt

SEQ ID NO: 93976 - DNA, 15 bp, Homo sapiens
cagaggtcctgtgct

SEQ ID NO: 93977 - DNA, 15 bp, Homo sapiens
tcagaggtcctgtgc

SEQ ID NO: 93978 - DNA, 15 bp, Homo sapiens
atcagaggtcctgtg

SEQ ID NO: 93979 - DNA, 15 bp, Homo sapiens
catcagaggtcctgt

SEQ ID NO: 93980 - DNA, 15 bp, Homo sapiens
ccatcagaggtcctg

SEQ ID NO: 93981 - DNA, 15 bp, Homo sapiens
tccatcagaggtcct

SEQ ID NO: 93982 - DNA, 15 bp, Homo sapiens
ctccatcagaggtcc

SEQ ID NO: 93983 - DNA, 15 bp, Homo sapiens
tctccatcagaggtc

SEQ ID NO: 93984 - DNA, 15 bp, Homo sapiens
atctccatcagaggt

SEQ ID NO: 93985 - DNA, 15 bp, Homo sapiens
catctccatcagagg

SEQ ID NO: 93986 - DNA, 15 bp, Homo sapiens
ccatctccatcagag

SEQ ID NO: 93987 - DNA, 15 bp, Homo sapiens
cccatctccatcaga

SEQ ID NO: 93988 - DNA, 15 bp, Homo sapiens
ccccatctccatcag

SEQ ID NO: 93989 - DNA, 15 bp, Homo sapiens
accccatctccatca

SEQ ID NO: 93990 - DNA, 15 bp, Homo sapiens
aaccccatctccatc

SEQ ID NO: 93991 - DNA, 15 bp, Homo sapiens
aaaccccatctccat

SEQ ID NO: 93992 - DNA, 15 bp, Homo sapiens
aaaaccccatctcca

SEQ ID NO: 93993 - DNA, 15 bp, Homo sapiens
taaaaccccatctcc

SEQ ID NO: 93994 - DNA, 15 bp, Homo sapiens
ctaaaaccccatctc

SEQ ID NO: 93995 - DNA, 15 bp, Homo sapiens
tctaaaaccccatct

SEQ ID NO: 93996 - DNA, 15 bp, Homo sapiens
ctctaaaaccccatc

SEQ ID NO: 93997 - DNA, 15 bp, Homo sapiens
cctctaaaaccccat

SEQ ID NO: 93998 - DNA, 15 bp, Homo sapiens
tcctctaaaacccca

SEQ ID NO: 93999 - DNA, 15 bp, Homo sapiens
atcctctaaaacccc

SEQ ID NO: 94000 - DNA, 15 bp, Homo sapiens
gatcctctaaaaccc

SEQ ID NO: 94001 - DNA, 15 bp, Homo sapiens
agatcctctaaaacc

SEQ ID NO: 94002 - DNA, 15 bp, Homo sapiens
gagatcctctaaaac

SEQ ID NO: 94003 - DNA, 15 bp, Homo sapiens
ggagatcctctaaaa

SEQ ID NO: 94004 - DNA, 15 bp, Homo sapiens
aggagatcctctaaa

SEQ ID NO: 94005 - DNA, 15 bp, Homo sapiens
taggagatcctctaa

SEQ ID NO: 94006 - DNA, 15 bp, Homo sapiens
ctaggagatcctcta

SEQ ID NO: 94007 - DNA, 15 bp, Homo sapiens
actaggagatcctct

SEQ ID NO: 94008 - DNA, 15 bp, Homo sapiens
gactaggagatcctc

SEQ ID NO: 94009 - DNA, 15 bp, Homo sapiens
ggactaggagatcct

SEQ ID NO: 94010 - DNA, 15 bp, Homo sapiens
tggactaggagatcc

SEQ ID NO: 94011 - DNA, 15 bp, Homo sapiens
ctggactaggagatc

SEQ ID NO: 94012 - DNA, 15 bp, Homo sapiens
gctggactaggagat

SEQ ID NO: 94013 - DNA, 15 bp, Homo sapiens
ggctggactaggaga

SEQ ID NO: 94014 - DNA, 15 bp, Homo sapiens
gggctggactaggag

SEQ ID NO: 94015 - DNA, 15 bp, Homo sapiens
agggctggactagga

SEQ ID NO: 94016 - DNA, 15 bp, Homo sapiens
gagggctggactagg

SEQ ID NO: 94017 - DNA, 15 bp, Homo sapiens
agagggctggactag

SEQ ID NO: 94018 - DNA, 15 bp, Homo sapiens
tagagggctggacta

SEQ ID NO: 94019 - DNA, 15 bp, Homo sapiens
gtagagggctggact

SEQ ID NO: 94020 - DNA, 15 bp, Homo sapiens
ggtagagggctggac

SEQ ID NO: 94021 - DNA, 15 bp, Homo sapiens
tggtagagggctgga

SEQ ID NO: 94022 - DNA, 15 bp, Homo sapiens
ctggtagagggctgg

SEQ ID NO: 94023 - DNA, 15 bp, Homo sapiens
actggtagagggctg

SEQ ID NO: 94024 - DNA, 15 bp, Homo sapiens
tactggtagagggct

SEQ ID NO: 94025 - DNA, 15 bp, Homo sapiens
gtactggtagagggc

SEQ ID NO: 94026 - DNA, 15 bp, Homo sapiens
tgtactggtagaggg

SEQ ID NO: 94027 - DNA, 15 bp, Homo sapiens
gtgtactggtagagg

SEQ ID NO: 94028 - DNA, 15 bp, Homo sapiens
cgtgtactggtagag

SEQ ID NO: 94029 - DNA, 15 bp, Homo sapiens
acgtgtactggtaga

SEQ ID NO: 94030 - DNA, 15 bp, Homo sapiens
gacgtgtactggtag

SEQ ID NO: 94031 - DNA, 15 bp, Homo sapiens
tgacgtgtactggta

SEQ ID NO: 94032 - DNA, 15 bp, Homo sapiens
atgacgtgtactggt

SEQ ID NO: 94033 - DNA, 15 bp, Homo sapiens
tatgacgtgtactgg

SEQ ID NO: 94034 - DNA, 15 bp, Homo sapiens
ttatgacgtgtactg

SEQ ID NO: 94035 - DNA, 15 bp, Homo sapiens
gttatgacgtgtact

SEQ ID NO: 94036 - DNA, 15 bp, Homo sapiens
ggttatgacgtgtac

SEQ ID NO: 94037 - DNA, 15 bp, Homo sapiens
aggttatgacgtgta

SEQ ID NO: 94038 - DNA, 15 bp, Homo sapiens
caggttatgacgtgt

SEQ ID NO: 94039 - DNA, 15 bp, Homo sapiens
acaggttatgacgtg

SEQ ID NO: 94040 - DNA, 15 bp, Homo sapiens
gacaggttatgacgt

SEQ ID NO: 94041 - DNA, 15 bp, Homo sapiens
cgacaggttatgacg

SEQ ID NO: 94042 - DNA, 15 bp, Homo sapiens
ccgacaggttatgac

SEQ ID NO: 94043 - DNA, 15 bp, Homo sapiens
tccgacaggttatga

SEQ ID NO: 94044 - DNA, 15 bp, Homo sapiens
gtccgacaggttatg

SEQ ID NO: 94045 - DNA, 15 bp, Homo sapiens
tgtccgacaggttat

SEQ ID NO: 94046 - DNA, 15 bp, Homo sapiens
ctgtccgacaggtta

SEQ ID NO: 94047 - DNA, 15 bp, Homo sapiens
gctgtccgacaggtt

SEQ ID NO: 94048 - DNA, 15 bp, Homo sapiens
ggctgtccgacaggt

SEQ ID NO: 94049 - DNA, 15 bp, Homo sapiens
gggctgtccgacagg

SEQ ID NO: 94050 - DNA, 15 bp, Homo sapiens
tgggctgtccgacag

SEQ ID NO: 94051 - DNA, 15 bp, Homo sapiens
ttgggctgtccgaca

SEQ ID NO: 94052 - DNA, 15 bp, Homo sapiens
gttgggctgtccgac

SEQ ID NO: 94053 - DNA, 15 bp, Homo sapiens
tgttgggctgtccga

SEQ ID NO: 94054 - DNA, 15 bp, Homo sapiens
ttgttgggctgtccg

SEQ ID NO: 94055 - DNA, 15 bp, Homo sapiens
gttgttgggctgtcc

SEQ ID NO: 94056 - DNA, 15 bp, Homo sapiens
tgttgttgggctgtc

SEQ ID NO: 94057 - DNA, 15 bp, Homo sapiens
ttgttgttgggctgt

SEQ ID NO: 94058 - DNA, 15 bp, Homo sapiens
tttgttgttgggctg

SEQ ID NO: 94059 - DNA, 15 bp, Homo sapiens
ctttgttgttgggct

SEQ ID NO: 94060 - DNA, 15 bp, Homo sapiens
tctttgttgttgggc

SEQ ID NO: 94061 - DNA, 15 bp, Homo sapiens
gtctttgttgttggg

SEQ ID NO: 94062 - DNA, 15 bp, Homo sapiens
ggtctttgttgttgg

SEQ ID NO: 94063 - DNA, 15 bp, Homo sapiens
cggtctttgttgttg

SEQ ID NO: 94064 - DNA, 15 bp, Homo sapiens
gcggtctttgttgtt

SEQ ID NO: 94065 - DNA, 15 bp, Homo sapiens
ggcggtctttgttgt

SEQ ID NO: 94066 - DNA, 15 bp, Homo sapiens
cggcggtctttgttg

SEQ ID NO: 94067 - DNA, 15 bp, Homo sapiens
gcggcggtctttgtt

SEQ ID NO: 94068 - DNA, 15 bp, Homo sapiens
agcggcggtctttgt

SEQ ID NO: 94069 - DNA, 15 bp, Homo sapiens
gagcggcggtctttg

SEQ ID NO: 94070 - DNA, 15 bp, Homo sapiens
tgagcggcggtcttt

SEQ ID NO: 94071 - DNA, 15 bp, Homo sapiens
gtgagcggcggtctt

SEQ ID NO: 94072 - DNA, 15 bp, Homo sapiens
ggtgagcggcggtct

SEQ ID NO: 94073 - DNA, 15 bp, Homo sapiens
aggtgagcggcggtc

SEQ ID NO: 94074 - DNA, 15 bp, Homo sapiens
caggtgagcggcggt

SEQ ID NO: 94075 - DNA, 15 bp, Homo sapiens
gcaggtgagcggcgg

SEQ ID NO: 94076 - DNA, 15 bp, Homo sapiens
tgcaggtgagcggcg

SEQ ID NO: 94077 - DNA, 15 bp, Homo sapiens
ctgcaggtgagcggc

SEQ ID NO: 94078 - DNA, 15 bp, Homo sapiens
actgcaggtgagcgg

SEQ ID NO: 94079 - DNA, 15 bp, Homo sapiens
aactgcaggtgagcg

SEQ ID NO: 94080 - DNA, 15 bp, Homo sapiens
aaactgcaggtgagc

SEQ ID NO: 94081 - DNA, 15 bp, Homo sapiens
gaaactgcaggtgag

SEQ ID NO: 94082 - DNA, 15 bp, Homo sapiens
agaaactgcaggtga

SEQ ID NO: 94083 - DNA, 15 bp, Homo sapiens
aagaaactgcaggtg

SEQ ID NO: 94084 - DNA, 15 bp, Homo sapiens
gaagaaactgcaggt

SEQ ID NO: 94085 - DNA, 15 bp, Homo sapiens
ggaagaaactgcagg

SEQ ID NO: 94086 - DNA, 15 bp, Homo sapiens
gggaagaaactgcag

SEQ ID NO: 94087 - DNA, 15 bp, Homo sapiens
agggaagaaactgca

SEQ ID NO: 94088 - DNA, 15 bp, Homo sapiens
cagggaagaaactgc

SEQ ID NO: 94089 - DNA, 15 bp, Homo sapiens
acagggaagaaactg

SEQ ID NO: 94090 - DNA, 15 bp, Homo sapiens
gacagggaagaaact

SEQ ID NO: 94091 - DNA, 15 bp, Homo sapiens
cgacagggaagaaac

SEQ ID NO: 94092 - DNA, 15 bp, Homo sapiens
ccgacagggaagaaa

SEQ ID NO: 94093 - DNA, 15 bp, Homo sapiens
tccgacagggaagaa

SEQ ID NO: 94094 - DNA, 15 bp, Homo sapiens
ctccgacagggaaga

SEQ ID NO: 94095 - DNA, 15 bp, Homo sapiens
actccgacagggaag

SEQ ID NO: 94096 - DNA, 15 bp, Homo sapiens
gactccgacagggaa

SEQ ID NO: 94097 - DNA, 15 bp, Homo sapiens
agactccgacaggga

SEQ ID NO: 94098 - DNA, 15 bp, Homo sapiens
cagactccgacaggg

SEQ ID NO: 94099 - DNA, 15 bp, Homo sapiens
ccagactccgacagg

SEQ ID NO: 94100 - DNA, 15 bp, Homo sapiens
cccagactccgacag

SEQ ID NO: 94101 - DNA, 15 bp, Homo sapiens
tcccagactccgaca

SEQ ID NO: 94102 - DNA, 15 bp, Homo sapiens
ctcccagactccgac

SEQ ID NO: 94103 - DNA, 15 bp, Homo sapiens
actcccagactccga

SEQ ID NO: 94104 - DNA, 15 bp, Homo sapiens
cactcccagactccg

SEQ ID NO: 94105 - DNA, 15 bp, Homo sapiens
tcactcccagactcc

SEQ ID NO: 94106 - DNA, 15 bp, Homo sapiens
ttcactcccagactc

SEQ ID NO: 94107 - DNA, 15 bp, Homo sapiens
attcactcccagact

SEQ ID NO: 94108 - DNA, 15 bp, Homo sapiens
gattcactcccagac

SEQ ID NO: 94109 - DNA, 15 bp, Homo sapiens
agattcactcccaga

SEQ ID NO: 94110 - DNA, 15 bp, Homo sapiens
aagattcactcccag

SEQ ID NO: 94111 - DNA, 15 bp, Homo sapiens
gaagattcactccca

SEQ ID NO: 94112 - DNA, 15 bp, Homo sapiens
ggaagattcactccc

SEQ ID NO: 94113 - DNA, 15 bp, Homo sapiens
aggaagattcactcc

SEQ ID NO: 94114 - DNA, 15 bp, Homo sapiens
gaggaagattcactc

SEQ ID NO: 94115 - DNA, 15 bp, Homo sapiens
ggaggaagattcact

SEQ ID NO: 94116 - DNA, 15 bp, Homo sapiens
aggaggaagattcac

SEQ ID NO: 94117 - DNA, 15 bp, Homo sapiens
gaggaggaagattca

SEQ ID NO: 94118 - DNA, 15 bp, Homo sapiens
cgaggaggaagattc

SEQ ID NO: 94119 - DNA, 15 bp, Homo sapiens
acgaggaggaagatt

SEQ ID NO: 94120 - DNA, 15 bp, Homo sapiens
cacgaggaggaagat

SEQ ID NO: 94121 - DNA, 15 bp, Homo sapiens
ccacgaggaggaaga

SEQ ID NO: 94122 - DNA, 15 bp, Homo sapiens
cccacgaggaggaag

SEQ ID NO: 94123 - DNA, 15 bp, Homo sapiens
gcccacgaggaggaa

SEQ ID NO: 94124 - DNA, 15 bp, Homo sapiens
agcccacgaggagga

SEQ ID NO: 94125 - DNA, 15 bp, Homo sapiens
aagcccacgaggagg

SEQ ID NO: 94126 - DNA, 15 bp, Homo sapiens
caagcccacgaggag

SEQ ID NO: 94127 - DNA, 15 bp, Homo sapiens
ccaagcccacgagga

SEQ ID NO: 94128 - DNA, 15 bp, Homo sapiens
gccaagcccacgagg

SEQ ID NO: 94129 - DNA, 15 bp, Homo sapiens
agccaagcccacgag

SEQ ID NO: 94130 - DNA, 15 bp, Homo sapiens
gagccaagcccacga

SEQ ID NO: 94131 - DNA, 15 bp, Homo sapiens
agagccaagcccacg

SEQ ID NO: 94132 - DNA, 15 bp, Homo sapiens
gagagccaagcccac

SEQ ID NO: 94133 - DNA, 15 bp, Homo sapiens
agagagccaagccca

SEQ ID NO: 94134 - DNA, 15 bp, Homo sapiens
aagagagccaagccc

SEQ ID NO: 94135 - DNA, 15 bp, Homo sapiens
caagagagccaagcc

SEQ ID NO: 94136 - DNA, 15 bp, Homo sapiens
ccaagagagccaagc

SEQ ID NO: 94137 - DNA, 15 bp, Homo sapiens
cccaagagagccaag

SEQ ID NO: 94138 - DNA, 15 bp, Homo sapiens
tcccaagagagccaa

SEQ ID NO: 94139 - DNA, 15 bp, Homo sapiens
ttcccaagagagcca

SEQ ID NO: 94140 - DNA, 15 bp, Homo sapiens
cttcccaagagagcc

SEQ ID NO: 94141 - DNA, 15 bp, Homo sapiens
acttcccaagagagc

SEQ ID NO: 94142 - DNA, 15 bp, Homo sapiens
aacttcccaagagag

SEQ ID NO: 94143 - DNA, 15 bp, Homo sapiens
caacttcccaagaga

SEQ ID NO: 94144 - DNA, 15 bp, Homo sapiens
tcaacttcccaagag

SEQ ID NO: 94145 - DNA, 15 bp, Homo sapiens
ctcaacttcccaaga

SEQ ID NO: 94146 - DNA, 15 bp, Homo sapiens
cctcaacttcccaag

SEQ ID NO: 94147 - DNA, 15 bp, Homo sapiens
ccctcaacttcccaa

SEQ ID NO: 94148 - DNA, 15 bp, Homo sapiens
gccctcaacttccca

SEQ ID NO: 94149 - DNA, 15 bp, Homo sapiens
agccctcaacttccc

SEQ ID NO: 94150 - DNA, 15 bp, Homo sapiens
aagccctcaacttcc

SEQ ID NO: 94151 - DNA, 15 bp, Homo sapiens
aaagccctcaacttc

SEQ ID NO: 94152 - DNA, 15 bp, Homo sapiens
caaagccctcaactt

SEQ ID NO: 94153 - DNA, 15 bp, Homo sapiens
ccaaagccctcaact

SEQ ID NO: 94154 - DNA, 15 bp, Homo sapiens
cccaaagccctcaac

SEQ ID NO: 94155 - DNA, 15 bp, Homo sapiens
acccaaagccctcaa

SEQ ID NO: 94156 - DNA, 15 bp, Homo sapiens
gacccaaagccctca

SEQ ID NO: 94157 - DNA, 15 bp, Homo sapiens
agacccaaagccctc

SEQ ID NO: 94158 - DNA, 15 bp, Homo sapiens
gagacccaaagccct

SEQ ID NO: 94159 - DNA, 15 bp, Homo sapiens
tgagacccaaagccc

SEQ ID NO: 94160 - DNA, 15 bp, Homo sapiens
ctgagacccaaagcc

SEQ ID NO: 94161 - DNA, 15 bp, Homo sapiens
cctgagacccaaagc

SEQ ID NO: 94162 - DNA, 15 bp, Homo sapiens
acctgagacccaaag

SEQ ID NO: 94163 - DNA, 15 bp, Homo sapiens
gacctgagacccaaa

SEQ ID NO: 94164 - DNA, 15 bp, Homo sapiens
agacctgagacccaa

SEQ ID NO: 94165 - DNA, 15 bp, Homo sapiens
cagacctgagaccca

SEQ ID NO: 94166 - DNA, 15 bp, Homo sapiens
gcagacctgagaccc

SEQ ID NO: 94167 - DNA, 15 bp, Homo sapiens
ggcagacctgagacc

SEQ ID NO: 94168 - DNA, 15 bp, Homo sapiens
tggcagacctgagac

SEQ ID NO: 94169 - DNA, 15 bp, Homo sapiens
atggcagacctgaga

SEQ ID NO: 94170 - DNA, 15 bp, Homo sapiens
aatggcagacctgag

SEQ ID NO: 94171 - DNA, 15 bp, Homo sapiens
caatggcagacctga

SEQ ID NO: 94172 - DNA, 15 bp, Homo sapiens
tcaatggcagacctg

SEQ ID NO: 94173 - DNA, 15 bp, Homo sapiens
atcaatggcagacct

SEQ ID NO: 94174 - DNA, 15 bp, Homo sapiens
aatcaatggcagacc

SEQ ID NO: 94175 - DNA, 15 bp, Homo sapiens
aaatcaatggcagac

SEQ ID NO: 94176 - DNA, 15 bp, Homo sapiens
caaatcaatggcaga

SEQ ID NO: 94177 - DNA, 15 bp, Homo sapiens
tcaaatcaatggcag

SEQ ID NO: 94178 - DNA, 15 bp, Homo sapiens
ctcaaatcaatggca

SEQ ID NO: 94179 - DNA, 15 bp, Homo sapiens
gctcaaatcaatggc

SEQ ID NO: 94180 - DNA, 15 bp, Homo sapiens
tgctcaaatcaatgg

SEQ ID NO: 94181 - DNA, 15 bp, Homo sapiens
atgctcaaatcaatg

SEQ ID NO: 94182 - DNA, 15 bp, Homo sapiens
aatgctcaaatcaat

SEQ ID NO: 94183 - DNA, 15 bp, Homo sapiens
aaatgctcaaatcaa

SEQ ID NO: 94184 - DNA, 15 bp, Homo sapiens
gaaatgctcaaatca

SEQ ID NO: 94185 - DNA, 15 bp, Homo sapiens
agaaatgctcaaatc

SEQ ID NO: 94186 - DNA, 15 bp, Homo sapiens
gagaaatgctcaaat

SEQ ID NO: 94187 - DNA, 15 bp, Homo sapiens
ggagaaatgctcaaa

SEQ ID NO: 94188 - DNA, 15 bp, Homo sapiens
aggagaaatgctcaa

SEQ ID NO: 94189 - DNA, 15 bp, Homo sapiens
caggagaaatgctca

SEQ ID NO: 94190 - DNA, 15 bp, Homo sapiens
acaggagaaatgctc

SEQ ID NO: 94191 - DNA, 15 bp, Homo sapiens
cacaggagaaatgct

SEQ ID NO: 94192 - DNA, 15 bp, Homo sapiens
gcacaggagaaatgc

SEQ ID NO: 94193 - DNA, 15 bp, Homo sapiens
tgcacaggagaaatg

SEQ ID NO: 94194 - DNA, 15 bp, Homo sapiens
atgcacaggagaaat

SEQ ID NO: 94195 - DNA, 15 bp, Homo sapiens
gatgcacaggagaaa

SEQ ID NO: 94196 - DNA, 15 bp, Homo sapiens
ggatgcacaggagaa

SEQ ID NO: 94197 - DNA, 15 bp, Homo sapiens
aggatgcacaggaga

SEQ ID NO: 94198 - DNA, 15 bp, Homo sapiens
gaggatgcacaggag

SEQ ID NO: 94199 - DNA, 15 bp, Homo sapiens
tgaggatgcacagga

SEQ ID NO: 94200 - DNA, 15 bp, Homo sapiens
gtgaggatgcacagg

SEQ ID NO: 94201 - DNA, 15 bp, Homo sapiens
agtgaggatgcacag

SEQ ID NO: 94202 - DNA, 15 bp, Homo sapiens
gagtgaggatgcaca

SEQ ID NO: 94203 - DNA, 15 bp, Homo sapiens
agagtgaggatgcac

SEQ ID NO: 94204 - DNA, 15 bp, Homo sapiens
aagagtgaggatgca

SEQ ID NO: 94205 - DNA, 15 bp, Homo sapiens
aaagagtgaggatgc

SEQ ID NO: 94206 - DNA, 15 bp, Homo sapiens
gaaagagtgaggatg

SEQ ID NO: 94207 - DNA, 15 bp, Homo sapiens
tgaaagagtgaggat

SEQ ID NO: 94208 - DNA, 15 bp, Homo sapiens
ttgaaagagtgagga

SEQ ID NO: 94209 - DNA, 15 bp, Homo sapiens
cttgaaagagtgagg

SEQ ID NO: 94210 - DNA, 15 bp, Homo sapiens
tcttgaaagagtgag

SEQ ID NO: 94211 - DNA, 15 bp, Homo sapiens
ttcttgaaagagtga

SEQ ID NO: 94212 - DNA, 15 bp, Homo sapiens
tttcttgaaagagtg

SEQ ID NO: 94213 - DNA, 15 bp, Homo sapiens
ctttcttgaaagagt

SEQ ID NO: 94214 - DNA, 15 bp, Homo sapiens
cctttcttgaaagag

SEQ ID NO: 94215 - DNA, 15 bp, Homo sapiens
tcctttcttgaaaga

SEQ ID NO: 94216 - DNA, 15 bp, Homo sapiens
ctcctttcttgaaag

SEQ ID NO: 94217 - DNA, 15 bp, Homo sapiens
cctcctttcttgaaa

SEQ ID NO: 94218 - DNA, 15 bp, Homo sapiens
acctcctttcttgaa

SEQ ID NO: 94219 - DNA, 15 bp, Homo sapiens
gacctcctttcttga

SEQ ID NO: 94220 - DNA, 15 bp, Homo sapiens
agacctcctttcttg

SEQ ID NO: 94221 - DNA, 15 bp, Homo sapiens
cagacctcctttctt

SEQ ID NO: 94222 - DNA, 15 bp, Homo sapiens
ccagacctcctttct

SEQ ID NO: 94223 - DNA, 15 bp, Homo sapiens
tccagacctcctttc

SEQ ID NO: 94224 - DNA, 15 bp, Homo sapiens
atccagacctccttt

SEQ ID NO: 94225 - DNA, 15 bp, Homo sapiens
gatccagacctcctt

SEQ ID NO: 94226 - DNA, 15 bp, Homo sapiens
agatccagacctcct

SEQ ID NO: 94227 - DNA, 15 bp, Homo sapiens
cagatccagacctcc

SEQ ID NO: 94228 - DNA, 15 bp, Homo sapiens
ccagatccagacctc

SEQ ID NO: 94229 - DNA, 15 bp, Homo sapiens
gccagatccagacct

SEQ ID NO: 94230 - DNA, 15 bp, Homo sapiens
agccagatccagacc

SEQ ID NO: 94231 - DNA, 15 bp, Homo sapiens
tagccagatccagac

SEQ ID NO: 94232 - DNA, 15 bp, Homo sapiens
gtagccagatccaga

SEQ ID NO: 94233 - DNA, 15 bp, Homo sapiens
ggtagccagatccag

SEQ ID NO: 94234 - DNA, 15 bp, Homo sapiens
tggtagccagatcca

SEQ ID NO: 94235 - DNA, 15 bp, Homo sapiens
ttggtagccagatcc

SEQ ID NO: 94236 - DNA, 15 bp, Homo sapiens
tttggtagccagatc

SEQ ID NO: 94237 - DNA, 15 bp, Homo sapiens
atttggtagccagat

SEQ ID NO: 94238 - DNA, 15 bp, Homo sapiens
gatttggtagccaga

SEQ ID NO: 94239 - DNA, 15 bp, Homo sapiens
ggatttggtagccag

SEQ ID NO: 94240 - DNA, 15 bp, Homo sapiens
gggatttggtagcca

SEQ ID NO: 94241 - DNA, 15 bp, Homo sapiens
ggggatttggtagcc

SEQ ID NO: 94242 - DNA, 15 bp, Homo sapiens
gggggatttggtagc

SEQ ID NO: 94243 - DNA, 15 bp, Homo sapiens
agggggatttggtag

SEQ ID NO: 94244 - DNA, 15 bp, Homo sapiens
cagggggatttggta

SEQ ID NO: 94245 - DNA, 15 bp, Homo sapiens
gcagggggatttggt

SEQ ID NO: 94246 - DNA, 15 bp, Homo sapiens
agcagggggatttgg

SEQ ID NO: 94247 - DNA, 15 bp, Homo sapiens
gagcagggggatttg

SEQ ID NO: 94248 - DNA, 15 bp, Homo sapiens
agagcagggggattt

SEQ ID NO: 94249 - DNA, 15 bp, Homo sapiens
cagagcagggggatt

SEQ ID NO: 94250 - DNA, 15 bp, Homo sapiens
gcagagcagggggat

SEQ ID NO: 94251 - DNA, 15 bp, Homo sapiens
agcagagcaggggga

SEQ ID NO: 94252 - DNA, 15 bp, Homo sapiens
cagcagagcaggggg

SEQ ID NO: 94253 - DNA, 15 bp, Homo sapiens
ccagcagagcagggg

SEQ ID NO: 94254 - DNA, 15 bp, Homo sapiens
cccagcagagcaggg

SEQ ID NO: 94255 - DNA, 15 bp, Homo sapiens
tcccagcagagcagg

SEQ ID NO: 94256 - DNA, 15 bp, Homo sapiens
ctcccagcagagcag

SEQ ID NO: 94257 - DNA, 15 bp, Homo sapiens
gctcccagcagagca

SEQ ID NO: 94258 - DNA, 15 bp, Homo sapiens
tgctcccagcagagc

SEQ ID NO: 94259 - DNA, 15 bp, Homo sapiens
atgctcccagcagag

SEQ ID NO: 94260 - DNA, 15 bp, Homo sapiens
catgctcccagcaga

SEQ ID NO: 94261 - DNA, 15 bp, Homo sapiens
tcatgctcccagcag

SEQ ID NO: 94262 - DNA, 15 bp, Homo sapiens
ctcatgctcccagca

SEQ ID NO: 94263 - DNA, 15 bp, Homo sapiens
gctcatgctcccagc

SEQ ID NO: 94264 - DNA, 15 bp, Homo sapiens
tgctcatgctcccag

SEQ ID NO: 94265 - DNA, 15 bp, Homo sapiens
ctgctcatgctccca

SEQ ID NO: 94266 - DNA, 15 bp, Homo sapiens
gctgctcatgctccc

SEQ ID NO: 94267 - DNA, 15 bp, Homo sapiens
ggctgctcatgctcc

SEQ ID NO: 94268 - DNA, 15 bp, Homo sapiens
aggctgctcatgctc

SEQ ID NO: 94269 - DNA, 15 bp, Homo sapiens
aaggctgctcatgct

SEQ ID NO: 94270 - DNA, 15 bp, Homo sapiens
caaggctgctcatgc

SEQ ID NO: 94271 - DNA, 15 bp, Homo sapiens
gcaaggctgctcatg

SEQ ID NO: 94272 - DNA, 15 bp, Homo sapiens
ggcaaggctgctcat

SEQ ID NO: 94273 - DNA, 15 bp, Homo sapiens
gggcaaggctgctca

SEQ ID NO: 94274 - DNA, 15 bp, Homo sapiens
tgggcaaggctgctc

SEQ ID NO: 94275 - DNA, 15 bp, Homo sapiens
atgggcaaggctgct

SEQ ID NO: 94276 - DNA, 15 bp, Homo sapiens
aatgggcaaggctgc

SEQ ID NO: 94277 - DNA, 15 bp, Homo sapiens
caatgggcaaggctg

SEQ ID NO: 94278 - DNA, 15 bp, Homo sapiens
gcaatgggcaaggct

SEQ ID NO: 94279 - DNA, 15 bp, Homo sapiens
agcaatgggcaaggc

SEQ ID NO: 94280 - DNA, 15 bp, Homo sapiens
gagcaatgggcaagg

SEQ ID NO: 94281 - DNA, 15 bp, Homo sapiens
cgagcaatgggcaag

SEQ ID NO: 94282 - DNA, 15 bp, Homo sapiens
ccgagcaatgggcaa

SEQ ID NO: 94283 - DNA, 15 bp, Homo sapiens
gccgagcaatgggca

SEQ ID NO: 94284 - DNA, 15 bp, Homo sapiens
agccgagcaatgggc

SEQ ID NO: 94285 - DNA, 15 bp, Homo sapiens
cagccgagcaatggg

SEQ ID NO: 94286 - DNA, 15 bp, Homo sapiens
tcagccgagcaatgg

SEQ ID NO: 94287 - DNA, 15 bp, Homo sapiens
ttcagccgagcaatg

SEQ ID NO: 94288 - DNA, 15 bp, Homo sapiens
tttcagccgagcaat

SEQ ID NO: 94289 - DNA, 15 bp, Homo sapiens
ctttcagccgagcaa

SEQ ID NO: 94290 - DNA, 15 bp, Homo sapiens
cctttcagccgagca

SEQ ID NO: 94291 - DNA, 15 bp, Homo sapiens
acctttcagccgagc

SEQ ID NO: 94292 - DNA, 15 bp, Homo sapiens
gacctttcagccgag

SEQ ID NO: 94293 - DNA, 15 bp, Homo sapiens
agacctttcagccga

SEQ ID NO: 94294 - DNA, 15 bp, Homo sapiens
cagacctttcagccg

SEQ ID NO: 94295 - DNA, 15 bp, Homo sapiens
gcagacctttcagcc

SEQ ID NO: 94296 - DNA, 15 bp, Homo sapiens
tgcagacctttcagc

SEQ ID NO: 94297 - DNA, 15 bp, Homo sapiens
atgcagacctttcag

SEQ ID NO: 94298 - DNA, 15 bp, Homo sapiens
aatgcagacctttca

SEQ ID NO: 94299 - DNA, 15 bp, Homo sapiens
gaatgcagacctttc

SEQ ID NO: 94300 - DNA, 15 bp, Homo sapiens
tgaatgcagaccttt

SEQ ID NO: 94301 - DNA, 15 bp, Homo sapiens
ctgaatgcagacctt

SEQ ID NO: 94302 - DNA, 15 bp, Homo sapiens
tctgaatgcagacct

SEQ ID NO: 94303 - DNA, 15 bp, Homo sapiens
ttctgaatgcagacc

SEQ ID NO: 94304 - DNA, 15 bp, Homo sapiens
cttctgaatgcagac

SEQ ID NO: 94305 - DNA, 15 bp, Homo sapiens
gcttctgaatgcaga

SEQ ID NO: 94306 - DNA, 15 bp, Homo sapiens
ggcttctgaatgcag

SEQ ID NO: 94307 - DNA, 15 bp, Homo sapiens
tggcttctgaatgca

SEQ ID NO: 94308 - DNA, 15 bp, Homo sapiens
ctggcttctgaatgc

SEQ ID NO: 94309 - DNA, 15 bp, Homo sapiens
cctggcttctgaatg

SEQ ID NO: 94310 - DNA, 15 bp, Homo sapiens
gcctggcttctgaat

SEQ ID NO: 94311 - DNA, 15 bp, Homo sapiens
agcctggcttctgaa

SEQ ID NO: 94312 - DNA, 15 bp, Homo sapiens
aagcctggcttctga

SEQ ID NO: 94313 - DNA, 15 bp, Homo sapiens
aaagcctggcttctg

SEQ ID NO: 94314 - DNA, 15 bp, Homo sapiens
gaaagcctggcttct

SEQ ID NO: 94315 - DNA, 15 bp, Homo sapiens
ggaaagcctggcttc

SEQ ID NO: 94316 - DNA, 15 bp, Homo sapiens
tggaaagcctggctt

SEQ ID NO: 94317 - DNA, 15 bp, Homo sapiens
ttggaaagcctggct

SEQ ID NO: 94318 - DNA, 15 bp, Homo sapiens
cttggaaagcctggc

SEQ ID NO: 94319 - DNA, 15 bp, Homo sapiens
ccttggaaagcctgg

SEQ ID NO: 94320 - DNA, 15 bp, Homo sapiens
tccttggaaagcctg

SEQ ID NO: 94321 - DNA, 15 bp, Homo sapiens
atccttggaaagcct

SEQ ID NO: 94322 - DNA, 15 bp, Homo sapiens
tatccttggaaagcc

SEQ ID NO: 94323 - DNA, 15 bp, Homo sapiens
ttatccttggaaagc

SEQ ID NO: 94324 - DNA, 15 bp, Homo sapiens
tttatccttggaaag

SEQ ID NO: 94325 - DNA, 15 bp, Homo sapiens
gtttatccttggaaa

SEQ ID NO: 94326 - DNA, 15 bp, Homo sapiens
tgtttatccttggaa

SEQ ID NO: 94327 - DNA, 15 bp, Homo sapiens
ctgtttatccttgga

SEQ ID NO: 94328 - DNA, 15 bp, Homo sapiens
cctgtttatccttgg

SEQ ID NO: 94329 - DNA, 15 bp, Homo sapiens
ccctgtttatccttg

SEQ ID NO: 94330 - DNA, 15 bp, Homo sapiens
accctgtttatcctt

SEQ ID NO: 94331 - DNA, 15 bp, Homo sapiens
aaccctgtttatcct

SEQ ID NO: 94332 - DNA, 15 bp, Homo sapiens
taaccctgtttatcc

SEQ ID NO: 94333 - DNA, 15 bp, Homo sapiens
ctaaccctgtttatc

SEQ ID NO: 94334 - DNA, 15 bp, Homo sapiens
cctaaccctgtttat

SEQ ID NO: 94335 - DNA, 15 bp, Homo sapiens
acctaaccctgttta

SEQ ID NO: 94336 - DNA, 15 bp, Homo sapiens
cacctaaccctgttt

SEQ ID NO: 94337 - DNA, 15 bp, Homo sapiens
gcacctaaccctgtt

SEQ ID NO: 94338 - DNA, 15 bp, Homo sapiens
agcacctaaccctgt

SEQ ID NO: 94339 - DNA, 15 bp, Homo sapiens
cagcacctaaccctg

SEQ ID NO: 94340 - DNA, 15 bp, Homo sapiens
gcagcacctaaccct

SEQ ID NO: 94341 - DNA, 15 bp, Homo sapiens
ggcagcacctaaccc

SEQ ID NO: 94342 - DNA, 15 bp, Homo sapiens
tggcagcacctaacc

SEQ ID NO: 94343 - DNA, 15 bp, Homo sapiens
ctggcagcacctaac

SEQ ID NO: 94344 - DNA, 15 bp, Homo sapiens
gctggcagcacctaa

SEQ ID NO: 94345 - DNA, 15 bp, Homo sapiens
ggctggcagcaccta

SEQ ID NO: 94346 - DNA, 15 bp, Homo sapiens
aggctggcagcacct

SEQ ID NO: 94347 - DNA, 15 bp, Homo sapiens
aaggctggcagcacc

SEQ ID NO: 94348 - DNA, 15 bp, Homo sapiens
gaaggctggcagcac

SEQ ID NO: 94349 - DNA, 15 bp, Homo sapiens
agaaggctggcagca

SEQ ID NO: 94350 - DNA, 15 bp, Homo sapiens
aagaaggctggcagc

SEQ ID NO: 94351 - DNA, 15 bp, Homo sapiens
taagaaggctggcag

SEQ ID NO: 94352 - DNA, 15 bp, Homo sapiens
ctaagaaggctggca

SEQ ID NO: 94353 - DNA, 15 bp, Homo sapiens
gctaagaaggctggc

SEQ ID NO: 94354 - DNA, 15 bp, Homo sapiens
tgctaagaaggctgg

SEQ ID NO: 94355 - DNA, 15 bp, Homo sapiens
ctgctaagaaggctg

SEQ ID NO: 94356 - DNA, 15 bp, Homo sapiens
gctgctaagaaggct

SEQ ID NO: 94357 - DNA, 15 bp, Homo sapiens
tgctgctaagaaggc

SEQ ID NO: 94358 - DNA, 15 bp, Homo sapiens
ttgctgctaagaagg

SEQ ID NO: 94359 - DNA, 15 bp, Homo sapiens
gttgctgctaagaag

SEQ ID NO: 94360 - DNA, 15 bp, Homo sapiens
ggttgctgctaagaa

SEQ ID NO: 94361 - DNA, 15 bp, Homo sapiens
tggttgctgctaaga

SEQ ID NO: 94362 - DNA, 15 bp, Homo sapiens
ctggttgctgctaag

SEQ ID NO: 94363 - DNA, 15 bp, Homo sapiens
tctggttgctgctaa

SEQ ID NO: 94364 - DNA, 15 bp, Homo sapiens
ttctggttgctgcta

SEQ ID NO: 94365 - DNA, 15 bp, Homo sapiens
tttctggttgctgct

SEQ ID NO: 94366 - DNA, 15 bp, Homo sapiens
atttctggttgctgc

SEQ ID NO: 94367 - DNA, 15 bp, Homo sapiens
aatttctggttgctg

SEQ ID NO: 94368 - DNA, 15 bp, Homo sapiens
gaatttctggttgct

SEQ ID NO: 94369 - DNA, 15 bp, Homo sapiens
tgaatttctggttgc

SEQ ID NO: 94370 - DNA, 15 bp, Homo sapiens
ttgaatttctggttg

SEQ ID NO: 94371 - DNA, 15 bp, Homo sapiens
attgaatttctggtt

SEQ ID NO: 94372 - DNA, 15 bp, Homo sapiens
cattgaatttctggt

SEQ ID NO: 94373 - DNA, 15 bp, Homo sapiens
tcattgaatttctgg

SEQ ID NO: 94374 - DNA, 15 bp, Homo sapiens
ctcattgaatttctg

SEQ ID NO: 94375 - DNA, 15 bp, Homo sapiens
tctcattgaatttct

SEQ ID NO: 94376 - DNA, 15 bp, Homo sapiens
ttctcattgaatttc

SEQ ID NO: 94377 - DNA, 15 bp, Homo sapiens
cttctcattgaattt

SEQ ID NO: 94378 - DNA, 15 bp, Homo sapiens
acttctcattgaatt

SEQ ID NO: 94379 - DNA, 15 bp, Homo sapiens
aacttctcattgaat

SEQ ID NO: 94380 - DNA, 15 bp, Homo sapiens
aaacttctcattgaa

SEQ ID NO: 94381 - DNA, 15 bp, Homo sapiens
gaaacttctcattga

SEQ ID NO: 94382 - DNA, 15 bp, Homo sapiens
tgaaacttctcattg

SEQ ID NO: 94383 - DNA, 15 bp, Homo sapiens
ctgaaacttctcatt

SEQ ID NO: 94384 - DNA, 15 bp, Homo sapiens
cctgaaacttctcat

SEQ ID NO: 94385 - DNA, 15 bp, Homo sapiens
ccctgaaacttctca

SEQ ID NO: 94386 - DNA, 15 bp, Homo sapiens
tccctgaaacttctc

SEQ ID NO: 94387 - DNA, 15 bp, Homo sapiens
ttccctgaaacttct

SEQ ID NO: 94388 - DNA, 15 bp, Homo sapiens
tttccctgaaacttc

SEQ ID NO: 94389 - DNA, 15 bp, Homo sapiens
ttttccctgaaactt

SEQ ID NO: 94390 - DNA, 15 bp, Homo sapiens
attttccctgaaact

SEQ ID NO: 94391 - DNA, 15 bp, Homo sapiens
aattttccctgaaac

SEQ ID NO: 94392 - DNA, 15 bp, Homo sapiens
gaattttccctgaaa

SEQ ID NO: 94393 - DNA, 15 bp, Homo sapiens
tgaattttccctgaa

SEQ ID NO: 94394 - DNA, 15 bp, Homo sapiens
atgaattttccctga

SEQ ID NO: 94395 - DNA, 15 bp, Homo sapiens
gatgaattttccctg

SEQ ID NO: 94396 - DNA, 15 bp, Homo sapiens
agatgaattttccct

SEQ ID NO: 94397 - DNA, 15 bp, Homo sapiens
aagatgaattttccc

SEQ ID NO: 94398 - DNA, 15 bp, Homo sapiens
aaagatgaattttcc

SEQ ID NO: 94399 - DNA, 15 bp, Homo sapiens
aaaagatgaattttc

SEQ ID NO: 94400 - DNA, 15 bp, Homo sapiens
aaaaagatgaatttt

SEQ ID NO: 94401 - DNA, 15 bp, Homo sapiens
gaaaaagatgaattt

SEQ ID NO: 94402 - DNA, 15 bp, Homo sapiens
ggaaaaagatgaatt

SEQ ID NO: 94403 - DNA, 15 bp, Homo sapiens
tggaaaaagatgaat

SEQ ID NO: 94404 - DNA, 15 bp, Homo sapiens
gtggaaaaagatgaa

SEQ ID NO: 94405 - DNA, 15 bp, Homo sapiens
ggtggaaaaagatga

SEQ ID NO: 94406 - DNA, 15 bp, Homo sapiens
gggtggaaaaagatg

SEQ ID NO: 94407 - DNA, 15 bp, Homo sapiens
tgggtggaaaaagat

SEQ ID NO: 94408 - DNA, 15 bp, Homo sapiens
ctgggtggaaaaaga

SEQ ID NO: 94409 - DNA, 15 bp, Homo sapiens
actgggtggaaaaag

SEQ ID NO: 94410 - DNA, 15 bp, Homo sapiens
gactgggtggaaaaa

SEQ ID NO: 94411 - DNA, 15 bp, Homo sapiens
tgactgggtggaaaa

SEQ ID NO: 94412 - DNA, 15 bp, Homo sapiens
atgactgggtggaaa

SEQ ID NO: 94413 - DNA, 15 bp, Homo sapiens
aatgactgggtggaa

SEQ ID NO: 94414 - DNA, 15 bp, Homo sapiens
caatgactgggtgga

SEQ ID NO: 94415 - DNA, 15 bp, Homo sapiens
tcaatgactgggtgg

SEQ ID NO: 94416 - DNA, 15 bp, Homo sapiens
ctcaatgactgggtg

SEQ ID NO: 94417 - DNA, 15 bp, Homo sapiens
tctcaatgactgggt

SEQ ID NO: 94418 - DNA, 15 bp, Homo sapiens
ctctcaatgactggg

SEQ ID NO: 94419 - DNA, 15 bp, Homo sapiens
gctctcaatgactgg

SEQ ID NO: 94420 - DNA, 15 bp, Homo sapiens
tgctctcaatgactg

SEQ ID NO: 94421 - DNA, 15 bp, Homo sapiens
ttgctctcaatgact

SEQ ID NO: 94422 - DNA, 15 bp, Homo sapiens
cttgctctcaatgac

SEQ ID NO: 94423 - DNA, 15 bp, Homo sapiens
ccttgctctcaatga

SEQ ID NO: 94424 - DNA, 15 bp, Homo sapiens
accttgctctcaatg

SEQ ID NO: 94425 - DNA, 15 bp, Homo sapiens
aaccttgctctcaat

SEQ ID NO: 94426 - DNA, 15 bp, Homo sapiens
aaaccttgctctcaa

SEQ ID NO: 94427 - DNA, 15 bp, Homo sapiens
aaaaccttgctctca

SEQ ID NO: 94428 - DNA, 15 bp, Homo sapiens
taaaaccttgctctc

SEQ ID NO: 94429 - DNA, 15 bp, Homo sapiens
ataaaaccttgctct

SEQ ID NO: 94430 - DNA, 15 bp, Homo sapiens
cataaaaccttgctc

SEQ ID NO: 94431 - DNA, 15 bp, Homo sapiens
tcataaaaccttgct

SEQ ID NO: 94432 - DNA, 15 bp, Homo sapiens
gtcataaaaccttgc

SEQ ID NO: 94433 - DNA, 15 bp, Homo sapiens
tgtcataaaaccttg

SEQ ID NO: 94434 - DNA, 15 bp, Homo sapiens
gtgtcataaaacctt

SEQ ID NO: 94435 - DNA, 15 bp, Homo sapiens
tgtgtcataaaacct

SEQ ID NO: 94436 - DNA, 15 bp, Homo sapiens
ctgtgtcataaaacc

SEQ ID NO: 94437 - DNA, 15 bp, Homo sapiens
tctgtgtcataaaac

SEQ ID NO: 94438 - DNA, 15 bp, Homo sapiens
ctctgtgtcataaaa

SEQ ID NO: 94439 - DNA, 15 bp, Homo sapiens
cctctgtgtcataaa

SEQ ID NO: 94440 - DNA, 15 bp, Homo sapiens
tcctctgtgtcataa

SEQ ID NO: 94441 - DNA, 15 bp, Homo sapiens
atcctctgtgtcata

SEQ ID NO: 94442 - DNA, 15 bp, Homo sapiens
catcctctgtgtcat

SEQ ID NO: 94443 - DNA, 15 bp, Homo sapiens
tcatcctctgtgtca

SEQ ID NO: 94444 - DNA, 15 bp, Homo sapiens
ttcatcctctgtgtc

SEQ ID NO: 94445 - DNA, 15 bp, Homo sapiens
cttcatcctctgtgt

SEQ ID NO: 94446 - DNA, 15 bp, Homo sapiens
tcttcatcctctgtg

SEQ ID NO: 94447 - DNA, 15 bp, Homo sapiens
ctcttcatcctctgt

SEQ ID NO: 94448 - DNA, 15 bp, Homo sapiens
tctcttcatcctctg

SEQ ID NO: 94449 - DNA, 15 bp, Homo sapiens
ctctcttcatcctct

SEQ ID NO: 94450 - DNA, 15 bp, Homo sapiens
tctctcttcatcctc

SEQ ID NO: 94451 - DNA, 15 bp, Homo sapiens
ctctctcttcatcct

SEQ ID NO: 94452 - DNA, 15 bp, Homo sapiens
cctctctcttcatcc

SEQ ID NO: 94453 - DNA, 15 bp, Homo sapiens
gcctctctcttcatc

SEQ ID NO: 94454 - DNA, 15 bp, Homo sapiens
agcctctctcttcat

SEQ ID NO: 94455 - DNA, 15 bp, Homo sapiens
aagcctctctcttca

SEQ ID NO: 94456 - DNA, 15 bp, Homo sapiens
aaagcctctctcttc

SEQ ID NO: 94457 - DNA, 15 bp, Homo sapiens
aaaagcctctctctt

SEQ ID NO: 94458 - DNA, 15 bp, Homo sapiens
caaaagcctctctct

SEQ ID NO: 94459 - DNA, 15 bp, Homo sapiens
acaaaagcctctctc

SEQ ID NO: 94460 - DNA, 15 bp, Homo sapiens
cacaaaagcctctct

SEQ ID NO: 94461 - DNA, 15 bp, Homo sapiens
ccacaaaagcctctc

SEQ ID NO: 94462 - DNA, 15 bp, Homo sapiens
cccacaaaagcctct

SEQ ID NO: 94463 - DNA, 15 bp, Homo sapiens
gcccacaaaagcctc

SEQ ID NO: 94464 - DNA, 15 bp, Homo sapiens
agcccacaaaagcct

SEQ ID NO: 94465 - DNA, 15 bp, Homo sapiens
cagcccacaaaagcc

SEQ ID NO: 94466 - DNA, 15 bp, Homo sapiens
tcagcccacaaaagc

SEQ ID NO: 94467 - DNA, 15 bp, Homo sapiens
atcagcccacaaaag

SEQ ID NO: 94468 - DNA, 15 bp, Homo sapiens
catcagcccacaaaa

SEQ ID NO: 94469 - DNA, 15 bp, Homo sapiens
acatcagcccacaaa

SEQ ID NO: 94470 - DNA, 15 bp, Homo sapiens
gacatcagcccacaa

SEQ ID NO: 94471 - DNA, 15 bp, Homo sapiens
cgacatcagcccaca

SEQ ID NO: 94472 - DNA, 15 bp, Homo sapiens
gcgacatcagcccac

SEQ ID NO: 94473 - DNA, 15 bp, Homo sapiens
agcgacatcagccca

SEQ ID NO: 94474 - DNA, 15 bp, Homo sapiens
cagcgacatcagccc

SEQ ID NO: 94475 - DNA, 15 bp, Homo sapiens
acagcgacatcagcc

SEQ ID NO: 94476 - DNA, 15 bp, Homo sapiens
cacagcgacatcagc

SEQ ID NO: 94477 - DNA, 15 bp, Homo sapiens
acacagcgacatcag

SEQ ID NO: 94478 - DNA, 15 bp, Homo sapiens
aacacagcgacatca

SEQ ID NO: 94479 - DNA, 15 bp, Homo sapiens
caacacagcgacatc

SEQ ID NO: 94480 - DNA, 15 bp, Homo sapiens
gcaacacagcgacat

SEQ ID NO: 94481 - DNA, 15 bp, Homo sapiens
agcaacacagcgaca

SEQ ID NO: 94482 - DNA, 15 bp, Homo sapiens
cagcaacacagcgac

SEQ ID NO: 94483 - DNA, 15 bp, Homo sapiens
ccagcaacacagcga

SEQ ID NO: 94484 - DNA, 15 bp, Homo sapiens
gccagcaacacagcg

SEQ ID NO: 94485 - DNA, 15 bp, Homo sapiens
ggccagcaacacagc

SEQ ID NO: 94486 - DNA, 15 bp, Homo sapiens
aggccagcaacacag

SEQ ID NO: 94487 - DNA, 15 bp, Homo sapiens
gaggccagcaacaca

SEQ ID NO: 94488 - DNA, 15 bp, Homo sapiens
agaggccagcaacac

SEQ ID NO: 94489 - DNA, 15 bp, Homo sapiens
cagaggccagcaaca

SEQ ID NO: 94490 - DNA, 15 bp, Homo sapiens
ccagaggccagcaac

SEQ ID NO: 94491 - DNA, 15 bp, Homo sapiens
accagaggccagcaa

SEQ ID NO: 94492 - DNA, 15 bp, Homo sapiens
gaccagaggccagca

SEQ ID NO: 94493 - DNA, 15 bp, Homo sapiens
tgaccagaggccagc

SEQ ID NO: 94494 - DNA, 15 bp, Homo sapiens
ctgaccagaggccag

SEQ ID NO: 94495 - DNA, 15 bp, Homo sapiens
cctgaccagaggcca

SEQ ID NO: 94496 - DNA, 15 bp, Homo sapiens
acctgaccagaggcc

SEQ ID NO: 94497 - DNA, 15 bp, Homo sapiens
gacctgaccagaggc

SEQ ID NO: 94498 - DNA, 15 bp, Homo sapiens
tgacctgaccagagg

SEQ ID NO: 94499 - DNA, 15 bp, Homo sapiens
gtgacctgaccagag

SEQ ID NO: 94500 - DNA, 15 bp, Homo sapiens
tgtgacctgaccaga

SEQ ID NO: 94501 - DNA, 15 bp, Homo sapiens
ttgtgacctgaccag

SEQ ID NO: 94502 - DNA, 15 bp, Homo sapiens
cttgtgacctgacca

SEQ ID NO: 94503 - DNA, 15 bp, Homo sapiens
ccttgtgacctgacc

SEQ ID NO: 94504 - DNA, 15 bp, Homo sapiens
accttgtgacctgac

SEQ ID NO: 94505 - DNA, 15 bp, Homo sapiens
caccttgtgacctga

SEQ ID NO: 94506 - DNA, 15 bp, Homo sapiens
ccaccttgtgacctg

SEQ ID NO: 94507 - DNA, 15 bp, Homo sapiens
tccaccttgtgacct

SEQ ID NO: 94508 - DNA, 15 bp, Homo sapiens
ctccaccttgtgacc

SEQ ID NO: 94509 - DNA, 15 bp, Homo sapiens
gctccaccttgtgac

SEQ ID NO: 94510 - DNA, 15 bp, Homo sapiens
cgctccaccttgtga

SEQ ID NO: 94511 - DNA, 15 bp, Homo sapiens
gcgctccaccttgtg

SEQ ID NO: 94512 - DNA, 15 bp, Homo sapiens
agcgctccaccttgt

SEQ ID NO: 94513 - DNA, 15 bp, Homo sapiens
cagcgctccaccttg

SEQ ID NO: 94514 - DNA, 15 bp, Homo sapiens
gcagcgctccacctt

SEQ ID NO: 94515 - DNA, 15 bp, Homo sapiens
tgcagcgctccacct

SEQ ID NO: 94516 - DNA, 15 bp, Homo sapiens
atgcagcgctccacc

SEQ ID NO: 94517 - DNA, 15 bp, Homo sapiens
catgcagcgctccac

SEQ ID NO: 94518 - DNA, 15 bp, Homo sapiens
gcatgcagcgctcca

SEQ ID NO: 94519 - DNA, 15 bp, Homo sapiens
ggcatgcagcgctcc

SEQ ID NO: 94520 - DNA, 15 bp, Homo sapiens
cggcatgcagcgctc

SEQ ID NO: 94521 - DNA, 15 bp, Homo sapiens
ccggcatgcagcgct

SEQ ID NO: 94522 - DNA, 15 bp, Homo sapiens
gccggcatgcagcgc

SEQ ID NO: 94523 - DNA, 15 bp, Homo sapiens
tgccggcatgcagcg

SEQ ID NO: 94524 - DNA, 15 bp, Homo sapiens
ctgccggcatgcagc

SEQ ID NO: 94525 - DNA, 15 bp, Homo sapiens
cctgccggcatgcag

SEQ ID NO: 94526 - DNA, 15 bp, Homo sapiens
ccctgccggcatgca

SEQ ID NO: 94527 - DNA, 15 bp, Homo sapiens
tccctgccggcatgc

SEQ ID NO: 94528 - DNA, 15 bp, Homo sapiens
gtccctgccggcatg

SEQ ID NO: 94529 - DNA, 15 bp, Homo sapiens
cgtccctgccggcat

SEQ ID NO: 94530 - DNA, 15 bp, Homo sapiens
acgtccctgccggca

SEQ ID NO: 94531 - DNA, 15 bp, Homo sapiens
aacgtccctgccggc

SEQ ID NO: 94532 - DNA, 15 bp, Homo sapiens
aaacgtccctgccgg

SEQ ID NO: 94533 - DNA, 15 bp, Homo sapiens
caaacgtccctgccg

SEQ ID NO: 94534 - DNA, 15 bp, Homo sapiens
ccaaacgtccctgcc

SEQ ID NO: 94535 - DNA, 15 bp, Homo sapiens
cccaaacgtccctgc

SEQ ID NO: 94536 - DNA, 15 bp, Homo sapiens
gcccaaacgtccctg

SEQ ID NO: 94537 - DNA, 15 bp, Homo sapiens
agcccaaacgtccct

SEQ ID NO: 94538 - DNA, 15 bp, Homo sapiens
aagcccaaacgtccc

SEQ ID NO: 94539 - DNA, 15 bp, Homo sapiens
aaagcccaaacgtcc

SEQ ID NO: 94540 - DNA, 15 bp, Homo sapiens
gaaagcccaaacgtc

SEQ ID NO: 94541 - DNA, 15 bp, Homo sapiens
tgaaagcccaaacgt

SEQ ID NO: 94542 - DNA, 15 bp, Homo sapiens
ctgaaagcccaaacg

SEQ ID NO: 94543 - DNA, 15 bp, Homo sapiens
tctgaaagcccaaac

SEQ ID NO: 94544 - DNA, 15 bp, Homo sapiens
gtctgaaagcccaaa

SEQ ID NO: 94545 - DNA, 15 bp, Homo sapiens
tgtctgaaagcccaa

SEQ ID NO: 94546 - DNA, 15 bp, Homo sapiens
ctgtctgaaagccca

SEQ ID NO: 94547 - DNA, 15 bp, Homo sapiens
gctgtctgaaagccc

SEQ ID NO: 94548 - DNA, 15 bp, Homo sapiens
tgctgtctgaaagcc

SEQ ID NO: 94549 - DNA, 15 bp, Homo sapiens
ctgctgtctgaaagc

SEQ ID NO: 94550 - DNA, 15 bp, Homo sapiens
tctgctgtctgaaag

SEQ ID NO: 94551 - DNA, 15 bp, Homo sapiens
ctctgctgtctgaaa

SEQ ID NO: 94552 - DNA, 15 bp, Homo sapiens
cctctgctgtctgaa

SEQ ID NO: 94553 - DNA, 15 bp, Homo sapiens
gcctctgctgtctga

SEQ ID NO: 94554 - DNA, 15 bp, Homo sapiens
tgcctctgctgtctg

SEQ ID NO: 94555 - DNA, 15 bp, Homo sapiens
atgcctctgctgtct

SEQ ID NO: 94556 - DNA, 15 bp, Homo sapiens
gatgcctctgctgtc

SEQ ID NO: 94557 - DNA, 15 bp, Homo sapiens
tgatgcctctgctgt

SEQ ID NO: 94558 - DNA, 15 bp, Homo sapiens
ctgatgcctctgctg

SEQ ID NO: 94559 - DNA, 15 bp, Homo sapiens
tctgatgcctctgct

SEQ ID NO: 94560 - DNA, 15 bp, Homo sapiens
ctctgatgcctctgc

SEQ ID NO: 94561 - DNA, 15 bp, Homo sapiens
gctctgatgcctctg

SEQ ID NO: 94562 - DNA, 15 bp, Homo sapiens
tgctctgatgcctct

SEQ ID NO: 94563 - DNA, 15 bp, Homo sapiens
ctgctctgatgcctc

SEQ ID NO: 94564 - DNA, 15 bp, Homo sapiens
tctgctctgatgcct

SEQ ID NO: 94565 - DNA, 15 bp, Homo sapiens
ttctgctctgatgcc

SEQ ID NO: 94566 - DNA, 15 bp, Homo sapiens
cttctgctctgatgc

SEQ ID NO: 94567 - DNA, 15 bp, Homo sapiens
gcttctgctctgatg

SEQ ID NO: 94568 - DNA, 15 bp, Homo sapiens
tgcttctgctctgat

SEQ ID NO: 94569 - DNA, 15 bp, Homo sapiens
ttgcttctgctctga

SEQ ID NO: 94570 - DNA, 15 bp, Homo sapiens
tttgcttctgctctg

SEQ ID NO: 94571 - DNA, 15 bp, Homo sapiens
atttgcttctgctct

SEQ ID NO: 94572 - DNA, 15 bp, Homo sapiens
tatttgcttctgctc

SEQ ID NO: 94573 - DNA, 15 bp, Homo sapiens
atatttgcttctgct

SEQ ID NO: 94574 - DNA, 15 bp, Homo sapiens
gatatttgcttctgc

SEQ ID NO: 94575 - DNA, 15 bp, Homo sapiens
agatatttgcttctg

SEQ ID NO: 94576 - DNA, 15 bp, Homo sapiens
aagatatttgcttct

SEQ ID NO: 94577 - DNA, 15 bp, Homo sapiens
gaagatatttgcttc

SEQ ID NO: 94578 - DNA, 15 bp, Homo sapiens
ggaagatatttgctt

SEQ ID NO: 94579 - DNA, 15 bp, Homo sapiens
gggaagatatttgct

SEQ ID NO: 94580 - DNA, 15 bp, Homo sapiens
tgggaagatatttgc

SEQ ID NO: 94581 - DNA, 15 bp, Homo sapiens
ttgggaagatatttg

SEQ ID NO: 94582 - DNA, 15 bp, Homo sapiens
tttgggaagatattt

SEQ ID NO: 94583 - DNA, 15 bp, Homo sapiens
ctttgggaagatatt

SEQ ID NO: 94584 - DNA, 15 bp, Homo sapiens
tctttgggaagatat

SEQ ID NO: 94585 - DNA, 15 bp, Homo sapiens
atctttgggaagata

SEQ ID NO: 94586 - DNA, 15 bp, Homo sapiens
catctttgggaagat

SEQ ID NO: 94587 - DNA, 15 bp, Homo sapiens
acatctttgggaaga

SEQ ID NO: 94588 - DNA, 15 bp, Homo sapiens
aacatctttgggaag

SEQ ID NO: 94589 - DNA, 15 bp, Homo sapiens
aaacatctttgggaa

SEQ ID NO: 94590 - DNA, 15 bp, Homo sapiens
caaacatctttggga

SEQ ID NO: 94591 - DNA, 15 bp, Homo sapiens
ccaaacatctttggg

SEQ ID NO: 94592 - DNA, 15 bp, Homo sapiens
gccaaacatctttgg

SEQ ID NO: 94593 - DNA, 15 bp, Homo sapiens
ggccaaacatctttg

SEQ ID NO: 94594 - DNA, 15 bp, Homo sapiens
tggccaaacatcttt

SEQ ID NO: 94595 - DNA, 15 bp, Homo sapiens
atggccaaacatctt

SEQ ID NO: 94596 - DNA, 15 bp, Homo sapiens
tatggccaaacatct

SEQ ID NO: 94597 - DNA, 15 bp, Homo sapiens
atatggccaaacatc

SEQ ID NO: 94598 - DNA, 15 bp, Homo sapiens
aatatggccaaacat

SEQ ID NO: 94599 - DNA, 15 bp, Homo sapiens
aaatatggccaaaca

SEQ ID NO: 94600 - DNA, 15 bp, Homo sapiens
gaaatatggccaaac

SEQ ID NO: 94601 - DNA, 15 bp, Homo sapiens
agaaatatggccaaa

SEQ ID NO: 94602 - DNA, 15 bp, Homo sapiens
tagaaatatggccaa

SEQ ID NO: 94603 - DNA, 15 bp, Homo sapiens
ctagaaatatggcca

SEQ ID NO: 94604 - DNA, 15 bp, Homo sapiens
cctagaaatatggcc

SEQ ID NO: 94605 - DNA, 15 bp, Homo sapiens
tcctagaaatatggc

SEQ ID NO: 94606 - DNA, 15 bp, Homo sapiens
gtcctagaaatatgg

SEQ ID NO: 94607 - DNA, 15 bp, Homo sapiens
ggtcctagaaatatg

SEQ ID NO: 94608 - DNA, 15 bp, Homo sapiens
tggtcctagaaatat

SEQ ID NO: 94609 - DNA, 15 bp, Homo sapiens
ctggtcctagaaata

SEQ ID NO: 94610 - DNA, 15 bp, Homo sapiens
cctggtcctagaaat

SEQ ID NO: 94611 - DNA, 15 bp, Homo sapiens
acctggtcctagaaa

SEQ ID NO: 94612 - DNA, 15 bp, Homo sapiens
aacctggtcctagaa

SEQ ID NO: 94613 - DNA, 15 bp, Homo sapiens
taacctggtcctaga

SEQ ID NO: 94614 - DNA, 15 bp, Homo sapiens
ttaacctggtcctag

SEQ ID NO: 94615 - DNA, 15 bp, Homo sapiens
tttaacctggtccta

SEQ ID NO: 94616 - DNA, 15 bp, Homo sapiens
ttttaacctggtcct

SEQ ID NO: 94617 - DNA, 15 bp, Homo sapiens
cttttaacctggtcc

SEQ ID NO: 94618 - DNA, 15 bp, Homo sapiens
gcttttaacctggtc

SEQ ID NO: 94619 - DNA, 15 bp, Homo sapiens
agcttttaacctggt

SEQ ID NO: 94620 - DNA, 15 bp, Homo sapiens
aagcttttaacctgg

SEQ ID NO: 94621 - DNA, 15 bp, Homo sapiens
gaagcttttaacctg

SEQ ID NO: 94622 - DNA, 15 bp, Homo sapiens
tgaagcttttaacct

SEQ ID NO: 94623 - DNA, 15 bp, Homo sapiens
gtgaagcttttaacc

SEQ ID NO: 94624 - DNA, 15 bp, Homo sapiens
tgtgaagcttttaac

SEQ ID NO: 94625 - DNA, 15 bp, Homo sapiens
gtgtgaagcttttaa

SEQ ID NO: 94626 - DNA, 15 bp, Homo sapiens
tgtgtgaagctttta

SEQ ID NO: 94627 - DNA, 15 bp, Homo sapiens
ctgtgtgaagctttt

SEQ ID NO: 94628 - DNA, 15 bp, Homo sapiens
tctgtgtgaagcttt

SEQ ID NO: 94629 - DNA, 15 bp, Homo sapiens
ttctgtgtgaagctt

SEQ ID NO: 94630 - DNA, 15 bp, Homo sapiens
cttctgtgtgaagct

SEQ ID NO: 94631 - DNA, 15 bp, Homo sapiens
gcttctgtgtgaagc

SEQ ID NO: 94632 - DNA, 15 bp, Homo sapiens
agcttctgtgtgaag

SEQ ID NO: 94633 - DNA, 15 bp, Homo sapiens
tagcttctgtgtgaa

SEQ ID NO: 94634 - DNA, 15 bp, Homo sapiens
ttagcttctgtgtga

SEQ ID NO: 94635 - DNA, 15 bp, Homo sapiens
cttagcttctgtgtg

SEQ ID NO: 94636 - DNA, 15 bp, Homo sapiens
acttagcttctgtgt

SEQ ID NO: 94637 - DNA, 15 bp, Homo sapiens
aacttagcttctgtg

SEQ ID NO: 94638 - DNA, 15 bp, Homo sapiens
taacttagcttctgt

SEQ ID NO: 94639 - DNA, 15 bp, Homo sapiens
ttaacttagcttctg

SEQ ID NO: 94640 - DNA, 15 bp, Homo sapiens
gttaacttagcttct

SEQ ID NO: 94641 - DNA, 15 bp, Homo sapiens
tgttaacttagcttc

SEQ ID NO: 94642 - DNA, 15 bp, Homo sapiens
atgttaacttagctt

SEQ ID NO: 94643 - DNA, 15 bp, Homo sapiens
aatgttaacttagct

SEQ ID NO: 94644 - DNA, 15 bp, Homo sapiens
caatgttaacttagc

SEQ ID NO: 94645 - DNA, 15 bp, Homo sapiens
ccaatgttaacttag

SEQ ID NO: 94646 - DNA, 15 bp, Homo sapiens
accaatgttaactta

SEQ ID NO: 94647 - DNA, 15 bp, Homo sapiens
taccaatgttaactt

SEQ ID NO: 94648 - DNA, 15 bp, Homo sapiens
ataccaatgttaact

SEQ ID NO: 94649 - DNA, 15 bp, Homo sapiens
cataccaatgttaac

SEQ ID NO: 94650 - DNA, 15 bp, Homo sapiens
acataccaatgttaa

SEQ ID NO: 94651 - DNA, 15 bp, Homo sapiens
gacataccaatgtta

SEQ ID NO: 94652 - DNA, 15 bp, Homo sapiens
agacataccaatgtt

SEQ ID NO: 94653 - DNA, 15 bp, Homo sapiens
tagacataccaatgt

SEQ ID NO: 94654 - DNA, 15 bp, Homo sapiens
atagacataccaatg

SEQ ID NO: 94655 - DNA, 15 bp, Homo sapiens
catagacataccaat

SEQ ID NO: 94656 - DNA, 15 bp, Homo sapiens
tcatagacataccaa

SEQ ID NO: 94657 - DNA, 15 bp, Homo sapiens
ctcatagacatacca

SEQ ID NO: 94658 - DNA, 15 bp, Homo sapiens
tctcatagacatacc

SEQ ID NO: 94659 - DNA, 15 bp, Homo sapiens
ctctcatagacatac

SEQ ID NO: 94660 - DNA, 15 bp, Homo sapiens
cctctcatagacata

SEQ ID NO: 94661 - DNA, 15 bp, Homo sapiens
ccctctcatagacat

SEQ ID NO: 94662 - DNA, 15 bp, Homo sapiens
accctctcatagaca

SEQ ID NO: 94663 - DNA, 15 bp, Homo sapiens
gaccctctcatagac

SEQ ID NO: 94664 - DNA, 15 bp, Homo sapiens
tgaccctctcataga

SEQ ID NO: 94665 - DNA, 15 bp, Homo sapiens
atgaccctctcatag

SEQ ID NO: 94666 - DNA, 15 bp, Homo sapiens
catgaccctctcata

SEQ ID NO: 94667 - DNA, 15 bp, Homo sapiens
acatgaccctctcat

SEQ ID NO: 94668 - DNA, 15 bp, Homo sapiens
gacatgaccctctca

SEQ ID NO: 94669 - DNA, 15 bp, Homo sapiens
ggacatgaccctctc

SEQ ID NO: 94670 - DNA, 15 bp, Homo sapiens
tggacatgaccctct

SEQ ID NO: 94671 - DNA, 15 bp, Homo sapiens
ctggacatgaccctc

SEQ ID NO: 94672 - DNA, 15 bp, Homo sapiens
tctggacatgaccct

SEQ ID NO: 94673 - DNA, 15 bp, Homo sapiens
ttctggacatgaccc

SEQ ID NO: 94674 - DNA, 15 bp, Homo sapiens
tttctggacatgacc

SEQ ID NO: 94675 - DNA, 15 bp, Homo sapiens
gtttctggacatgac

SEQ ID NO: 94676 - DNA, 15 bp, Homo sapiens
tgtttctggacatga

SEQ ID NO: 94677 - DNA, 15 bp, Homo sapiens
ctgtttctggacatg

SEQ ID NO: 94678 - DNA, 15 bp, Homo sapiens
gctgtttctggacat

SEQ ID NO: 94679 - DNA, 15 bp, Homo sapiens
agctgtttctggaca

SEQ ID NO: 94680 - DNA, 15 bp, Homo sapiens
aagctgtttctggac

SEQ ID NO: 94681 - DNA, 15 bp, Homo sapiens
aaagctgtttctgga

SEQ ID NO: 94682 - DNA, 15 bp, Homo sapiens
gaaagctgtttctgg

SEQ ID NO: 94683 - DNA, 15 bp, Homo sapiens
cgaaagctgtttctg

SEQ ID NO: 94684 - DNA, 15 bp, Homo sapiens
gcgaaagctgtttct

SEQ ID NO: 94685 - DNA, 15 bp, Homo sapiens
ggcgaaagctgtttc

SEQ ID NO: 94686 - DNA, 15 bp, Homo sapiens
aggcgaaagctgttt

SEQ ID NO: 94687 - DNA, 15 bp, Homo sapiens
aaggcgaaagctgtt

SEQ ID NO: 94688 - DNA, 15 bp, Homo sapiens
gaaggcgaaagctgt

SEQ ID NO: 94689 - DNA, 15 bp, Homo sapiens
ggaaggcgaaagctg

SEQ ID NO: 94690 - DNA, 15 bp, Homo sapiens
tggaaggcgaaagct

SEQ ID NO: 94691 - DNA, 15 bp, Homo sapiens
ttggaaggcgaaagc

SEQ ID NO: 94692 - DNA, 15 bp, Homo sapiens
gttggaaggcgaaag

SEQ ID NO: 94693 - DNA, 15 bp, Homo sapiens
tgttggaaggcgaaa

SEQ ID NO: 94694 - DNA, 15 bp, Homo sapiens
ctgttggaaggcgaa

SEQ ID NO: 94695 - DNA, 15 bp, Homo sapiens
tctgttggaaggcga

SEQ ID NO: 94696 - DNA, 15 bp, Homo sapiens
ctctgttggaaggcg

SEQ ID NO: 94697 - DNA, 15 bp, Homo sapiens
tctctgttggaaggc

SEQ ID NO: 94698 - DNA, 15 bp, Homo sapiens
gtctctgttggaagg

SEQ ID NO: 94699 - DNA, 15 bp, Homo sapiens
agtctctgttggaag

SEQ ID NO: 94700 - DNA, 15 bp, Homo sapiens
aagtctctgttggaa

SEQ ID NO: 94701 - DNA, 15 bp, Homo sapiens
aaagtctctgttgga

SEQ ID NO: 94702 - DNA, 15 bp, Homo sapiens
caaagtctctgttgg

SEQ ID NO: 94703 - DNA, 15 bp, Homo sapiens
gcaaagtctctgttg

SEQ ID NO: 94704 - DNA, 15 bp, Homo sapiens
cgcaaagtctctgtt

SEQ ID NO: 94705 - DNA, 15 bp, Homo sapiens
ccgcaaagtctctgt

SEQ ID NO: 94706 - DNA, 15 bp, Homo sapiens
tccgcaaagtctctg

SEQ ID NO: 94707 - DNA, 15 bp, Homo sapiens
ttccgcaaagtctct

SEQ ID NO: 94708 - DNA, 15 bp, Homo sapiens
tttccgcaaagtctc

SEQ ID NO: 94709 - DNA, 15 bp, Homo sapiens
ttttccgcaaagtct

SEQ ID NO: 94710 - DNA, 15 bp, Homo sapiens
tttttccgcaaagtc

SEQ ID NO: 94711 - DNA, 15 bp, Homo sapiens
ttttttccgcaaagt

SEQ ID NO: 94712 - DNA, 15 bp, Homo sapiens
tttttttccgcaaag

SEQ ID NO: 94713 - DNA, 15 bp, Homo sapiens
atttttttccgcaaa

SEQ ID NO: 94714 - DNA, 15 bp, Homo sapiens
gatttttttccgcaa

SEQ ID NO: 94715 - DNA, 15 bp, Homo sapiens
agatttttttccgca

SEQ ID NO: 94716 - DNA, 15 bp, Homo sapiens
gagatttttttccgc

SEQ ID NO: 94717 - DNA, 15 bp, Homo sapiens
ggagatttttttccg

SEQ ID NO: 94718 - DNA, 15 bp, Homo sapiens
tggagatttttttcc

SEQ ID NO: 94719 - DNA, 15 bp, Homo sapiens
atggagatttttttc

SEQ ID NO: 94720 - DNA, 15 bp, Homo sapiens
catggagattttttt

SEQ ID NO: 94721 - DNA, 15 bp, Homo sapiens
gcatggagatttttt

SEQ ID NO: 94722 - DNA, 15 bp, Homo sapiens
agcatggagattttt

SEQ ID NO: 94723 - DNA, 15 bp, Homo sapiens
gagcatggagatttt

SEQ ID NO: 94724 - DNA, 15 bp, Homo sapiens
tgagcatggagattt

SEQ ID NO: 94725 - DNA, 15 bp, Homo sapiens
atgagcatggagatt

SEQ ID NO: 94726 - DNA, 15 bp, Homo sapiens
tatgagcatggagat

SEQ ID NO: 94727 - DNA, 15 bp, Homo sapiens
atatgagcatggaga

SEQ ID NO: 94728 - DNA, 15 bp, Homo sapiens
aatatgagcatggag

SEQ ID NO: 94729 - DNA, 15 bp, Homo sapiens
aaatatgagcatgga

SEQ ID NO: 94730 - DNA, 15 bp, Homo sapiens
gaaatatgagcatgg

SEQ ID NO: 94731 - DNA, 15 bp, Homo sapiens
agaaatatgagcatg

SEQ ID NO: 94732 - DNA, 15 bp, Homo sapiens
gagaaatatgagcat

SEQ ID NO: 94733 - DNA, 15 bp, Homo sapiens
agagaaatatgagca

SEQ ID NO: 94734 - DNA, 15 bp, Homo sapiens
tagagaaatatgagc

SEQ ID NO: 94735 - DNA, 15 bp, Homo sapiens
gtagagaaatatgag

SEQ ID NO: 94736 - DNA, 15 bp, Homo sapiens
ggtagagaaatatga

SEQ ID NO: 94737 - DNA, 15 bp, Homo sapiens
aggtagagaaatatg

SEQ ID NO: 94738 - DNA, 15 bp, Homo sapiens
gaggtagagaaatat

SEQ ID NO: 94739 - DNA, 15 bp, Homo sapiens
tgaggtagagaaata

SEQ ID NO: 94740 - DNA, 15 bp, Homo sapiens
ctgaggtagagaaat

SEQ ID NO: 94741 - DNA, 15 bp, Homo sapiens
cctgaggtagagaaa

SEQ ID NO: 94742 - DNA, 15 bp, Homo sapiens
tcctgaggtagagaa

SEQ ID NO: 94743 - DNA, 15 bp, Homo sapiens
ctcctgaggtagaga

SEQ ID NO: 94744 - DNA, 15 bp, Homo sapiens
cctcctgaggtagag

SEQ ID NO: 94745 - DNA, 15 bp, Homo sapiens
gcctcctgaggtaga

SEQ ID NO: 94746 - DNA, 15 bp, Homo sapiens
agcctcctgaggtag

SEQ ID NO: 94747 - DNA, 15 bp, Homo sapiens
gagcctcctgaggta

SEQ ID NO: 94748 - DNA, 15 bp, Homo sapiens
agagcctcctgaggt

SEQ ID NO: 94749 - DNA, 15 bp, Homo sapiens
gagagcctcctgagg

SEQ ID NO: 94750 - DNA, 15 bp, Homo sapiens
ggagagcctcctgag

SEQ ID NO: 94751 - DNA, 15 bp, Homo sapiens
aggagagcctcctga

SEQ ID NO: 94752 - DNA, 15 bp, Homo sapiens
caggagagcctcctg

SEQ ID NO: 94753 - DNA, 15 bp, Homo sapiens
ccaggagagcctcct

SEQ ID NO: 94754 - DNA, 15 bp, Homo sapiens
tccaggagagcctcc

SEQ ID NO: 94755 - DNA, 15 bp, Homo sapiens
ttccaggagagcctc

SEQ ID NO: 94756 - DNA, 15 bp, Homo sapiens
attccaggagagcct

SEQ ID NO: 94757 - DNA, 15 bp, Homo sapiens
gattccaggagagcc

SEQ ID NO: 94758 - DNA, 15 bp, Homo sapiens
agattccaggagagc

SEQ ID NO: 94759 - DNA, 15 bp, Homo sapiens
tagattccaggagag

SEQ ID NO: 94760 - DNA, 15 bp, Homo sapiens
ttagattccaggaga

SEQ ID NO: 94761 - DNA, 15 bp, Homo sapiens
cttagattccaggag

SEQ ID NO: 94762 - DNA, 15 bp, Homo sapiens
tcttagattccagga

SEQ ID NO: 94763 - DNA, 15 bp, Homo sapiens
ctcttagattccagg

SEQ ID NO: 94764 - DNA, 15 bp, Homo sapiens
cctcttagattccag

SEQ ID NO: 94765 - DNA, 15 bp, Homo sapiens
gcctcttagattcca

SEQ ID NO: 94766 - DNA, 15 bp, Homo sapiens
ggcctcttagattcc

SEQ ID NO: 94767 - DNA, 15 bp, Homo sapiens
tggcctcttagattc

SEQ ID NO: 94768 - DNA, 15 bp, Homo sapiens
atggcctcttagatt

SEQ ID NO: 94769 - DNA, 15 bp, Homo sapiens
aatggcctcttagat

SEQ ID NO: 94770 - DNA, 15 bp, Homo sapiens
aaatggcctcttaga

SEQ ID NO: 94771 - DNA, 15 bp, Homo sapiens
taaatggcctcttag

SEQ ID NO: 94772 - DNA, 15 bp, Homo sapiens
ctaaatggcctctta

SEQ ID NO: 94773 - DNA, 15 bp, Homo sapiens
actaaatggcctctt

SEQ ID NO: 94774 - DNA, 15 bp, Homo sapiens
cactaaatggcctct

SEQ ID NO: 94775 - DNA, 15 bp, Homo sapiens
acactaaatggcctc

SEQ ID NO: 94776 - DNA, 15 bp, Homo sapiens
gacactaaatggcct

SEQ ID NO: 94777 - DNA, 15 bp, Homo sapiens
tgacactaaatggcc

SEQ ID NO: 94778 - DNA, 15 bp, Homo sapiens
ttgacactaaatggc

SEQ ID NO: 94779 - DNA, 15 bp, Homo sapiens
tttgacactaaatgg

SEQ ID NO: 94780 - DNA, 15 bp, Homo sapiens
atttgacactaaatg

SEQ ID NO: 94781 - DNA, 15 bp, Homo sapiens
aatttgacactaaat

SEQ ID NO: 94782 - DNA, 15 bp, Homo sapiens
gaatttgacactaaa

SEQ ID NO: 94783 - DNA, 15 bp, Homo sapiens
tgaatttgacactaa

SEQ ID NO: 94784 - DNA, 15 bp, Homo sapiens
ctgaatttgacacta

SEQ ID NO: 94785 - DNA, 15 bp, Homo sapiens
gctgaatttgacact

SEQ ID NO: 94786 - DNA, 15 bp, Homo sapiens
ggctgaatttgacac

SEQ ID NO: 94787 - DNA, 15 bp, Homo sapiens
gggctgaatttgaca

SEQ ID NO: 94788 - DNA, 15 bp, Homo sapiens
ggggctgaatttgac

SEQ ID NO: 94789 - DNA, 15 bp, Homo sapiens
tggggctgaatttga

SEQ ID NO: 94790 - DNA, 15 bp, Homo sapiens
gtggggctgaatttg

SEQ ID NO: 94791 - DNA, 15 bp, Homo sapiens
agtggggctgaattt

SEQ ID NO: 94792 - DNA, 15 bp, Homo sapiens
tagtggggctgaatt

SEQ ID NO: 94793 - DNA, 15 bp, Homo sapiens
ttagtggggctgaat

SEQ ID NO: 94794 - DNA, 15 bp, Homo sapiens
cttagtggggctgaa

SEQ ID NO: 94795 - DNA, 15 bp, Homo sapiens
gcttagtggggctga

SEQ ID NO: 94796 - DNA, 15 bp, Homo sapiens
tgcttagtggggctg

SEQ ID NO: 94797 - DNA, 15 bp, Homo sapiens
atgcttagtggggct

SEQ ID NO: 94798 - DNA, 15 bp, Homo sapiens
gatgcttagtggggc

SEQ ID NO: 94799 - DNA, 15 bp, Homo sapiens
tgatgcttagtgggg

SEQ ID NO: 94800 - DNA, 15 bp, Homo sapiens
gtgatgcttagtggg

SEQ ID NO: 94801 - DNA, 15 bp, Homo sapiens
tgtgatgcttagtgg

SEQ ID NO: 94802 - DNA, 15 bp, Homo sapiens
atgtgatgcttagtg

SEQ ID NO: 94803 - DNA, 15 bp, Homo sapiens
tatgtgatgcttagt

SEQ ID NO: 94804 - DNA, 15 bp, Homo sapiens
ttatgtgatgcttag

SEQ ID NO: 94805 - DNA, 15 bp, Homo sapiens
attatgtgatgctta

SEQ ID NO: 94806 - DNA, 15 bp, Homo sapiens
cattatgtgatgctt

SEQ ID NO: 94807 - DNA, 15 bp, Homo sapiens
ccattatgtgatgct

SEQ ID NO: 94808 - DNA, 15 bp, Homo sapiens
accattatgtgatgc

SEQ ID NO: 94809 - DNA, 15 bp, Homo sapiens
caccattatgtgatg

SEQ ID NO: 94810 - DNA, 15 bp, Homo sapiens
tcaccattatgtgat

SEQ ID NO: 94811 - DNA, 15 bp, Homo sapiens
atcaccattatgtga

SEQ ID NO: 94812 - DNA, 15 bp, Homo sapiens
tatcaccattatgtg

SEQ ID NO: 94813 - DNA, 15 bp, Homo sapiens
gtatcaccattatgt

SEQ ID NO: 94814 - DNA, 15 bp, Homo sapiens
agtatcaccattatg

SEQ ID NO: 94815 - DNA, 15 bp, Homo sapiens
cagtatcaccattat

SEQ ID NO: 94816 - DNA, 15 bp, Homo sapiens
acagtatcaccatta

SEQ ID NO: 94817 - DNA, 15 bp, Homo sapiens
aacagtatcaccatt

SEQ ID NO: 94818 - DNA, 15 bp, Homo sapiens
taacagtatcaccat

SEQ ID NO: 94819 - DNA, 15 bp, Homo sapiens
ttaacagtatcacca

SEQ ID NO: 94820 - DNA, 15 bp, Homo sapiens
cttaacagtatcacc

SEQ ID NO: 94821 - DNA, 15 bp, Homo sapiens
ccttaacagtatcac

SEQ ID NO: 94822 - DNA, 15 bp, Homo sapiens
tccttaacagtatca

SEQ ID NO: 94823 - DNA, 15 bp, Homo sapiens
gtccttaacagtatc

SEQ ID NO: 94824 - DNA, 15 bp, Homo sapiens
tgtccttaacagtat

SEQ ID NO: 94825 - DNA, 15 bp, Homo sapiens
atgtccttaacagta

SEQ ID NO: 94826 - DNA, 15 bp, Homo sapiens
gatgtccttaacagt

SEQ ID NO: 94827 - DNA, 15 bp, Homo sapiens
tgatgtccttaacag

SEQ ID NO: 94828 - DNA, 15 bp, Homo sapiens
atgatgtccttaaca

SEQ ID NO: 94829 - DNA, 15 bp, Homo sapiens
tatgatgtccttaac

SEQ ID NO: 94830 - DNA, 15 bp, Homo sapiens
atatgatgtccttaa

SEQ ID NO: 94831 - DNA, 15 bp, Homo sapiens
tatatgatgtcctta

SEQ ID NO: 94832 - DNA, 15 bp, Homo sapiens
atatatgatgtcctt

SEQ ID NO: 94833 - DNA, 15 bp, Homo sapiens
catatatgatgtcct

SEQ ID NO: 94834 - DNA, 15 bp, Homo sapiens
acatatatgatgtcc

SEQ ID NO: 94835 - DNA, 15 bp, Homo sapiens
cacatatatgatgtc

SEQ ID NO: 94836 - DNA, 15 bp, Homo sapiens
tcacatatatgatgt

SEQ ID NO: 94837 - DNA, 15 bp, Homo sapiens
ctcacatatatgatg

SEQ ID NO: 94838 - DNA, 15 bp, Homo sapiens
cctcacatatatgat

SEQ ID NO: 94839 - DNA, 15 bp, Homo sapiens
gcctcacatatatga

SEQ ID NO: 94840 - DNA, 15 bp, Homo sapiens
agcctcacatatatg

SEQ ID NO: 94841 - DNA, 15 bp, Homo sapiens
cagcctcacatatat

SEQ ID NO: 94842 - DNA, 15 bp, Homo sapiens
tcagcctcacatata

SEQ ID NO: 94843 - DNA, 15 bp, Homo sapiens
ttcagcctcacatat

SEQ ID NO: 94844 - DNA, 15 bp, Homo sapiens
attcagcctcacata

SEQ ID NO: 94845 - DNA, 15 bp, Homo sapiens
aattcagcctcacat

SEQ ID NO: 94846 - DNA, 15 bp, Homo sapiens
taattcagcctcaca

SEQ ID NO: 94847 - DNA, 15 bp, Homo sapiens
ataattcagcctcac

SEQ ID NO: 94848 - DNA, 15 bp, Homo sapiens
gataattcagcctca

SEQ ID NO: 94849 - DNA, 15 bp, Homo sapiens
ggataattcagcctc

SEQ ID NO: 94850 - DNA, 15 bp, Homo sapiens
tggataattcagcct

SEQ ID NO: 94851 - DNA, 15 bp, Homo sapiens
gtggataattcagcc

SEQ ID NO: 94852 - DNA, 15 bp, Homo sapiens
tgtggataattcagc

SEQ ID NO: 94853 - DNA, 15 bp, Homo sapiens
ttgtggataattcag

SEQ ID NO: 94854 - DNA, 15 bp, Homo sapiens
attgtggataattca

SEQ ID NO: 94855 - DNA, 15 bp, Homo sapiens
cattgtggataattc

SEQ ID NO: 94856 - DNA, 15 bp, Homo sapiens
ccattgtggataatt

SEQ ID NO: 94857 - DNA, 15 bp, Homo sapiens
gccattgtggataat

SEQ ID NO: 94858 - DNA, 15 bp, Homo sapiens
agccattgtggataa

SEQ ID NO: 94859 - DNA, 15 bp, Homo sapiens
cagccattgtggata

SEQ ID NO: 94860 - DNA, 15 bp, Homo sapiens
ccagccattgtggat

SEQ ID NO: 94861 - DNA, 15 bp, Homo sapiens
gccagccattgtgga

SEQ ID NO: 94862 - DNA, 15 bp, Homo sapiens
tgccagccattgtgg

SEQ ID NO: 94863 - DNA, 15 bp, Homo sapiens
ttgccagccattgtg

SEQ ID NO: 94864 - DNA, 15 bp, Homo sapiens
attgccagccattgt

SEQ ID NO: 94865 - DNA, 15 bp, Homo sapiens
cattgccagccattg

SEQ ID NO: 94866 - DNA, 15 bp, Homo sapiens
acattgccagccatt

SEQ ID NO: 94867 - DNA, 15 bp, Homo sapiens
gacattgccagccat

SEQ ID NO: 94868 - DNA, 15 bp, Homo sapiens
agacattgccagcca

SEQ ID NO: 94869 - DNA, 15 bp, Homo sapiens
aagacattgccagcc

SEQ ID NO: 94870 - DNA, 15 bp, Homo sapiens
gaagacattgccagc

SEQ ID NO: 94871 - DNA, 15 bp, Homo sapiens
tgaagacattgccag

SEQ ID NO: 94872 - DNA, 15 bp, Homo sapiens
atgaagacattgcca

SEQ ID NO: 94873 - DNA, 15 bp, Homo sapiens
aatgaagacattgcc

SEQ ID NO: 94874 - DNA, 15 bp, Homo sapiens
gaatgaagacattgc

SEQ ID NO: 94875 - DNA, 15 bp, Homo sapiens
agaatgaagacattg

SEQ ID NO: 94876 - DNA, 15 bp, Homo sapiens
gagaatgaagacatt

SEQ ID NO: 94877 - DNA, 15 bp, Homo sapiens
ggagaatgaagacat

SEQ ID NO: 94878 - DNA, 15 bp, Homo sapiens
tggagaatgaagaca

SEQ ID NO: 94879 - DNA, 15 bp, Homo sapiens
ctggagaatgaagac

SEQ ID NO: 94880 - DNA, 15 bp, Homo sapiens
tctggagaatgaaga

SEQ ID NO: 94881 - DNA, 15 bp, Homo sapiens
gtctggagaatgaag

SEQ ID NO: 94882 - DNA, 15 bp, Homo sapiens
agtctggagaatgaa

SEQ ID NO: 94883 - DNA, 15 bp, Homo sapiens
cagtctggagaatga

SEQ ID NO: 94884 - DNA, 15 bp, Homo sapiens
tcagtctggagaatg

SEQ ID NO: 94885 - DNA, 15 bp, Homo sapiens
ctcagtctggagaat

SEQ ID NO: 94886 - DNA, 15 bp, Homo sapiens
cctcagtctggagaa

SEQ ID NO: 94887 - DNA, 15 bp, Homo sapiens
gcctcagtctggaga

SEQ ID NO: 94888 - DNA, 15 bp, Homo sapiens
agcctcagtctggag

SEQ ID NO: 94889 - DNA, 15 bp, Homo sapiens
gagcctcagtctgga

SEQ ID NO: 94890 - DNA, 15 bp, Homo sapiens
ggagcctcagtctgg

SEQ ID NO: 94891 - DNA, 15 bp, Homo sapiens
cggagcctcagtctg

SEQ ID NO: 94892 - DNA, 15 bp, Homo sapiens
ccggagcctcagtct

SEQ ID NO: 94893 - DNA, 15 bp, Homo sapiens
gccggagcctcagtc

SEQ ID NO: 94894 - DNA, 15 bp, Homo sapiens
ggccggagcctcagt

SEQ ID NO: 94895 - DNA, 15 bp, Homo sapiens
aggccggagcctcag

SEQ ID NO: 94896 - DNA, 15 bp, Homo sapiens
gaggccggagcctca

SEQ ID NO: 94897 - DNA, 15 bp, Homo sapiens
agaggccggagcctc

SEQ ID NO: 94898 - DNA, 15 bp, Homo sapiens
aagaggccggagcct

SEQ ID NO: 94899 - DNA, 15 bp, Homo sapiens
aaagaggccggagcc

SEQ ID NO: 94900 - DNA, 15 bp, Homo sapiens
caaagaggccggagc

SEQ ID NO: 94901 - DNA, 15 bp, Homo sapiens
gcaaagaggccggag

SEQ ID NO: 94902 - DNA, 15 bp, Homo sapiens
agcaaagaggccgga

SEQ ID NO: 94903 - DNA, 15 bp, Homo sapiens
aagcaaagaggccgg

SEQ ID NO: 94904 - DNA, 15 bp, Homo sapiens
aaagcaaagaggccg

SEQ ID NO: 94905 - DNA, 15 bp, Homo sapiens
caaagcaaagaggcc

SEQ ID NO: 94906 - DNA, 15 bp, Homo sapiens
ccaaagcaaagaggc

SEQ ID NO: 94907 - DNA, 15 bp, Homo sapiens
gccaaagcaaagagg

SEQ ID NO: 94908 - DNA, 15 bp, Homo sapiens
tgccaaagcaaagag

SEQ ID NO: 94909 - DNA, 15 bp, Homo sapiens
ttgccaaagcaaaga

SEQ ID NO: 94910 - DNA, 15 bp, Homo sapiens
cttgccaaagcaaag

SEQ ID NO: 94911 - DNA, 15 bp, Homo sapiens
tcttgccaaagcaaa

SEQ ID NO: 94912 - DNA, 15 bp, Homo sapiens
ctcttgccaaagcaa

SEQ ID NO: 94913 - DNA, 15 bp, Homo sapiens
actcttgccaaagca

SEQ ID NO: 94914 - DNA, 15 bp, Homo sapiens
aactcttgccaaagc

SEQ ID NO: 94915 - DNA, 15 bp, Homo sapiens
caactcttgccaaag

SEQ ID NO: 94916 - DNA, 15 bp, Homo sapiens
tcaactcttgccaaa

SEQ ID NO: 94917 - DNA, 15 bp, Homo sapiens
atcaactcttgccaa

SEQ ID NO: 94918 - DNA, 15 bp, Homo sapiens
gatcaactcttgcca

SEQ ID NO: 94919 - DNA, 15 bp, Homo sapiens
agatcaactcttgcc

SEQ ID NO: 94920 - DNA, 15 bp, Homo sapiens
gagatcaactcttgc

SEQ ID NO: 94921 - DNA, 15 bp, Homo sapiens
tgagatcaactcttg

SEQ ID NO: 94922 - DNA, 15 bp, Homo sapiens
ctgagatcaactctt

SEQ ID NO: 94923 - DNA, 15 bp, Homo sapiens
cctgagatcaactct

SEQ ID NO: 94924 - DNA, 15 bp, Homo sapiens
tcctgagatcaactc

SEQ ID NO: 94925 - DNA, 15 bp, Homo sapiens
gtcctgagatcaact

SEQ ID NO: 94926 - DNA, 15 bp, Homo sapiens
agtcctgagatcaac

SEQ ID NO: 94927 - DNA, 15 bp, Homo sapiens
cagtcctgagatcaa

SEQ ID NO: 94928 - DNA, 15 bp, Homo sapiens
gcagtcctgagatca

SEQ ID NO: 94929 - DNA, 15 bp, Homo sapiens
ggcagtcctgagatc

SEQ ID NO: 94930 - DNA, 15 bp, Homo sapiens
aggcagtcctgagat

SEQ ID NO: 94931 - DNA, 15 bp, Homo sapiens
caggcagtcctgaga

SEQ ID NO: 94932 - DNA, 15 bp, Homo sapiens
tcaggcagtcctgag

SEQ ID NO: 94933 - DNA, 15 bp, Homo sapiens
ttcaggcagtcctga

SEQ ID NO: 94934 - DNA, 15 bp, Homo sapiens
tttcaggcagtcctg

SEQ ID NO: 94935 - DNA, 15 bp, Homo sapiens
gtttcaggcagtcct

SEQ ID NO: 94936 - DNA, 15 bp, Homo sapiens
ggtttcaggcagtcc

SEQ ID NO: 94937 - DNA, 15 bp, Homo sapiens
tggtttcaggcagtc

SEQ ID NO: 94938 - DNA, 15 bp, Homo sapiens
ctggtttcaggcagt

SEQ ID NO: 94939 - DNA, 15 bp, Homo sapiens
tctggtttcaggcag

SEQ ID NO: 94940 - DNA, 15 bp, Homo sapiens
ttctggtttcaggca

SEQ ID NO: 94941 - DNA, 15 bp, Homo sapiens
tttctggtttcaggc

SEQ ID NO: 94942 - DNA, 15 bp, Homo sapiens
gtttctggtttcagg

SEQ ID NO: 94943 - DNA, 15 bp, Homo sapiens
agtttctggtttcag

SEQ ID NO: 94944 - DNA, 15 bp, Homo sapiens
gagtttctggtttca

SEQ ID NO: 94945 - DNA, 15 bp, Homo sapiens
ggagtttctggtttc

SEQ ID NO: 94946 - DNA, 15 bp, Homo sapiens
tggagtttctggttt

SEQ ID NO: 94947 - DNA, 15 bp, Homo sapiens
ctggagtttctggtt

SEQ ID NO: 94948 - DNA, 15 bp, Homo sapiens
cctggagtttctggt

SEQ ID NO: 94949 - DNA, 15 bp, Homo sapiens
gcctggagtttctgg

SEQ ID NO: 94950 - DNA, 15 bp, Homo sapiens
tgcctggagtttctg

SEQ ID NO: 94951 - DNA, 15 bp, Homo sapiens
ttgcctggagtttct

SEQ ID NO: 94952 - DNA, 15 bp, Homo sapiens
tttgcctggagtttc

SEQ ID NO: 94953 - DNA, 15 bp, Homo sapiens
ctttgcctggagttt

SEQ ID NO: 94954 - DNA, 15 bp, Homo sapiens
gctttgcctggagtt

SEQ ID NO: 94955 - DNA, 15 bp, Homo sapiens
agctttgcctggagt

SEQ ID NO: 94956 - DNA, 15 bp, Homo sapiens
gagctttgcctggag

SEQ ID NO: 94957 - DNA, 15 bp, Homo sapiens
agagctttgcctgga

SEQ ID NO: 94958 - DNA, 15 bp, Homo sapiens
aagagctttgcctgg

SEQ ID NO: 94959 - DNA, 15 bp, Homo sapiens
aaagagctttgcctg

SEQ ID NO: 94960 - DNA, 15 bp, Homo sapiens
caaagagctttgcct

SEQ ID NO: 94961 - DNA, 15 bp, Homo sapiens
ccaaagagctttgcc

SEQ ID NO: 94962 - DNA, 15 bp, Homo sapiens
cccaaagagctttgc

SEQ ID NO: 94963 - DNA, 15 bp, Homo sapiens
acccaaagagctttg

SEQ ID NO: 94964 - DNA, 15 bp, Homo sapiens
gacccaaagagcttt

SEQ ID NO: 94965 - DNA, 15 bp, Homo sapiens
tgacccaaagagctt

SEQ ID NO: 94966 - DNA, 15 bp, Homo sapiens
gtgacccaaagagct

SEQ ID NO: 94967 - DNA, 15 bp, Homo sapiens
agtgacccaaagagc

SEQ ID NO: 94968 - DNA, 15 bp, Homo sapiens
gagtgacccaaagag

SEQ ID NO: 94969 - DNA, 15 bp, Homo sapiens
agagtgacccaaaga

SEQ ID NO: 94970 - DNA, 15 bp, Homo sapiens
aagagtgacccaaag

SEQ ID NO: 94971 - DNA, 15 bp, Homo sapiens
gaagagtgacccaaa

SEQ ID NO: 94972 - DNA, 15 bp, Homo sapiens
agaagagtgacccaa

SEQ ID NO: 94973 - DNA, 15 bp, Homo sapiens
cagaagagtgaccca

SEQ ID NO: 94974 - DNA, 15 bp, Homo sapiens
tcagaagagtgaccc

SEQ ID NO: 94975 - DNA, 15 bp, Homo sapiens
ttcagaagagtgacc

SEQ ID NO: 94976 - DNA, 15 bp, Homo sapiens
tttcagaagagtgac

SEQ ID NO: 94977 - DNA, 15 bp, Homo sapiens
ttttcagaagagtga

SEQ ID NO: 94978 - DNA, 15 bp, Homo sapiens
cttttcagaagagtg

SEQ ID NO: 94979 - DNA, 15 bp, Homo sapiens
ccttttcagaagagt

SEQ ID NO: 94980 - DNA, 15 bp, Homo sapiens
tccttttcagaagag

SEQ ID NO: 94981 - DNA, 15 bp, Homo sapiens
ttccttttcagaaga

SEQ ID NO: 94982 - DNA, 15 bp, Homo sapiens
attccttttcagaag

SEQ ID NO: 94983 - DNA, 15 bp, Homo sapiens
gattccttttcagaa

SEQ ID NO: 94984 - DNA, 15 bp, Homo sapiens
tgattccttttcaga

SEQ ID NO: 94985 - DNA, 15 bp, Homo sapiens
gtgattccttttcag

SEQ ID NO: 94986 - DNA, 15 bp, Homo sapiens
tgtgattccttttca

SEQ ID NO: 94987 - DNA, 15 bp, Homo sapiens
ttgtgattccttttc

SEQ ID NO: 94988 - DNA, 15 bp, Homo sapiens
attgtgattcctttt

SEQ ID NO: 94989 - DNA, 15 bp, Homo sapiens
tattgtgattccttt

SEQ ID NO: 94990 - DNA, 15 bp, Homo sapiens
ttattgtgattcctt

SEQ ID NO: 94991 - DNA, 15 bp, Homo sapiens
attattgtgattcct

SEQ ID NO: 94992 - DNA, 15 bp, Homo sapiens
tattattgtgattcc

SEQ ID NO: 94993 - DNA, 15 bp, Homo sapiens
ttattattgtgattc

SEQ ID NO: 94994 - DNA, 15 bp, Homo sapiens
cttattattgtgatt

SEQ ID NO: 94995 - DNA, 15 bp, Homo sapiens
tcttattattgtgat

SEQ ID NO: 94996 - DNA, 15 bp, Homo sapiens
atcttattattgtga

SEQ ID NO: 94997 - DNA, 15 bp, Homo sapiens
gatcttattattgtg

SEQ ID NO: 94998 - DNA, 15 bp, Homo sapiens
agatcttattattgt

SEQ ID NO: 94999 - DNA, 15 bp, Homo sapiens
cagatcttattattg

SEQ ID NO: 95000 - DNA, 15 bp, Homo sapiens
acagatcttattatt

SEQ ID NO: 95001 - DNA, 15 bp, Homo sapiens
aacagatcttattat

SEQ ID NO: 95002 - DNA, 15 bp, Homo sapiens
taacagatcttatta

SEQ ID NO: 95003 - DNA, 15 bp, Homo sapiens
ataacagatcttatt

SEQ ID NO: 95004 - DNA, 15 bp, Homo sapiens
gataacagatcttat

SEQ ID NO: 95005 - DNA, 15 bp, Homo sapiens
agataacagatctta

SEQ ID NO: 95006 - DNA, 15 bp, Homo sapiens
aagataacagatctt

SEQ ID NO: 95007 - DNA, 15 bp, Homo sapiens
caagataacagatct

SEQ ID NO: 95008 - DNA, 15 bp, Homo sapiens
ccaagataacagatc

SEQ ID NO: 95009 - DNA, 15 bp, Homo sapiens
accaagataacagat

SEQ ID NO: 95010 - DNA, 15 bp, Homo sapiens
taccaagataacaga

SEQ ID NO: 95011 - DNA, 15 bp, Homo sapiens
gtaccaagataacag

SEQ ID NO: 95012 - DNA, 15 bp, Homo sapiens
agtaccaagataaca

SEQ ID NO: 95013 - DNA, 15 bp, Homo sapiens
gagtaccaagataac

SEQ ID NO: 95014 - DNA, 15 bp, Homo sapiens
agagtaccaagataa

SEQ ID NO: 95015 - DNA, 15 bp, Homo sapiens
cagagtaccaagata

SEQ ID NO: 95016 - DNA, 15 bp, Homo sapiens
acagagtaccaagat

SEQ ID NO: 95017 - DNA, 15 bp, Homo sapiens
tacagagtaccaaga

SEQ ID NO: 95018 - DNA, 15 bp, Homo sapiens
ttacagagtaccaag

SEQ ID NO: 95019 - DNA, 15 bp, Homo sapiens
tttacagagtaccaa

SEQ ID NO: 95020 - DNA, 15 bp, Homo sapiens
ctttacagagtacca

SEQ ID NO: 95021 - DNA, 15 bp, Homo sapiens
gctttacagagtacc

SEQ ID NO: 95022 - DNA, 15 bp, Homo sapiens
ggctttacagagtac

SEQ ID NO: 95023 - DNA, 15 bp, Homo sapiens
tggctttacagagta

SEQ ID NO: 95024 - DNA, 15 bp, Homo sapiens
ttggctttacagagt

SEQ ID NO: 95025 - DNA, 15 bp, Homo sapiens
cttggctttacagag

SEQ ID NO: 95026 - DNA, 15 bp, Homo sapiens
ccttggctttacaga

SEQ ID NO: 95027 - DNA, 15 bp, Homo sapiens
accttggctttacag

SEQ ID NO: 95028 - DNA, 15 bp, Homo sapiens
caccttggctttaca

SEQ ID NO: 95029 - DNA, 15 bp, Homo sapiens
acaccttggctttac

SEQ ID NO: 95030 - DNA, 15 bp, Homo sapiens
gacaccttggcttta

SEQ ID NO: 95031 - DNA, 15 bp, Homo sapiens
tgacaccttggcttt

SEQ ID NO: 95032 - DNA, 15 bp, Homo sapiens
ctgacaccttggctt

SEQ ID NO: 95033 - DNA, 15 bp, Homo sapiens
gctgacaccttggct

SEQ ID NO: 95034 - DNA, 15 bp, Homo sapiens
ggctgacaccttggc

SEQ ID NO: 95035 - DNA, 15 bp, Homo sapiens
aggctgacaccttgg

SEQ ID NO: 95036 - DNA, 15 bp, Homo sapiens
aaggctgacaccttg

SEQ ID NO: 95037 - DNA, 15 bp, Homo sapiens
gaaggctgacacctt

SEQ ID NO: 95038 - DNA, 15 bp, Homo sapiens
tgaaggctgacacct

SEQ ID NO: 95039 - DNA, 15 bp, Homo sapiens
gtgaaggctgacacc

SEQ ID NO: 95040 - DNA, 15 bp, Homo sapiens
cgtgaaggctgacac

SEQ ID NO: 95041 - DNA, 15 bp, Homo sapiens
tcgtgaaggctgaca

SEQ ID NO: 95042 - DNA, 15 bp, Homo sapiens
gtcgtgaaggctgac

SEQ ID NO: 95043 - DNA, 15 bp, Homo sapiens
tgtcgtgaaggctga

SEQ ID NO: 95044 - DNA, 15 bp, Homo sapiens
ctgtcgtgaaggctg

SEQ ID NO: 95045 - DNA, 15 bp, Homo sapiens
actgtcgtgaaggct

SEQ ID NO: 95046 - DNA, 15 bp, Homo sapiens
cactgtcgtgaaggc

SEQ ID NO: 95047 - DNA, 15 bp, Homo sapiens
tcactgtcgtgaagg

SEQ ID NO: 95048 - DNA, 15 bp, Homo sapiens
ttcactgtcgtgaag

SEQ ID NO: 95049 - DNA, 15 bp, Homo sapiens
tttcactgtcgtgaa

SEQ ID NO: 95050 - DNA, 15 bp, Homo sapiens
ttttcactgtcgtga

SEQ ID NO: 95051 - DNA, 15 bp, Homo sapiens
cttttcactgtcgtg

SEQ ID NO: 95052 - DNA, 15 bp, Homo sapiens
acttttcactgtcgt

SEQ ID NO: 95053 - DNA, 15 bp, Homo sapiens
aacttttcactgtcg

SEQ ID NO: 95054 - DNA, 15 bp, Homo sapiens
taacttttcactgtc

SEQ ID NO: 95055 - DNA, 15 bp, Homo sapiens
ctaacttttcactgt

SEQ ID NO: 95056 - DNA, 15 bp, Homo sapiens
actaacttttcactg

SEQ ID NO: 95057 - DNA, 15 bp, Homo sapiens
aactaacttttcact

SEQ ID NO: 95058 - DNA, 15 bp, Homo sapiens
aaactaacttttcac

SEQ ID NO: 95059 - DNA, 15 bp, Homo sapiens
caaactaacttttca

SEQ ID NO: 95060 - DNA, 15 bp, Homo sapiens
acaaactaacttttc

SEQ ID NO: 95061 - DNA, 15 bp, Homo sapiens
gacaaactaactttt

SEQ ID NO: 95062 - DNA, 15 bp, Homo sapiens
tgacaaactaacttt

SEQ ID NO: 95063 - DNA, 15 bp, Homo sapiens
ctgacaaactaactt

SEQ ID NO: 95064 - DNA, 15 bp, Homo sapiens
tctgacaaactaact

SEQ ID NO: 95065 - DNA, 15 bp, Homo sapiens
ttctgacaaactaac

SEQ ID NO: 95066 - DNA, 15 bp, Homo sapiens
gttctgacaaactaa

SEQ ID NO: 95067 - DNA, 15 bp, Homo sapiens
ggttctgacaaacta

SEQ ID NO: 95068 - DNA, 15 bp, Homo sapiens
tggttctgacaaact

SEQ ID NO: 95069 - DNA, 15 bp, Homo sapiens
ctggttctgacaaac

SEQ ID NO: 95070 - DNA, 15 bp, Homo sapiens
cctggttctgacaaa

SEQ ID NO: 95071 - DNA, 15 bp, Homo sapiens
ccctggttctgacaa

SEQ ID NO: 95072 - DNA, 15 bp, Homo sapiens
accctggttctgaca

SEQ ID NO: 95073 - DNA, 15 bp, Homo sapiens
caccctggttctgac

SEQ ID NO: 95074 - DNA, 15 bp, Homo sapiens
acaccctggttctga

SEQ ID NO: 95075 - DNA, 15 bp, Homo sapiens
cacaccctggttctg

SEQ ID NO: 95076 - DNA, 15 bp, Homo sapiens
tcacaccctggttct

SEQ ID NO: 95077 - DNA, 15 bp, Homo sapiens
atcacaccctggttc

SEQ ID NO: 95078 - DNA, 15 bp, Homo sapiens
aatcacaccctggtt

SEQ ID NO: 95079 - DNA, 15 bp, Homo sapiens
caatcacaccctggt

SEQ ID NO: 95080 - DNA, 15 bp, Homo sapiens
acaatcacaccctgg

SEQ ID NO: 95081 - DNA, 15 bp, Homo sapiens
gacaatcacaccctg

SEQ ID NO: 95082 - DNA, 15 bp, Homo sapiens
agacaatcacaccct

SEQ ID NO: 95083 - DNA, 15 bp, Homo sapiens
cagacaatcacaccc

SEQ ID NO: 95084 - DNA, 15 bp, Homo sapiens
gcagacaatcacacc

SEQ ID NO: 95085 - DNA, 15 bp, Homo sapiens
agcagacaatcacac

SEQ ID NO: 95086 - DNA, 15 bp, Homo sapiens
cagcagacaatcaca

SEQ ID NO: 95087 - DNA, 15 bp, Homo sapiens
tcagcagacaatcac

SEQ ID NO: 95088 - DNA, 15 bp, Homo sapiens
atcagcagacaatca

SEQ ID NO: 95089 - DNA, 15 bp, Homo sapiens
aatcagcagacaatc

SEQ ID NO: 95090 - DNA, 15 bp, Homo sapiens
taatcagcagacaat

SEQ ID NO: 95091 - DNA, 15 bp, Homo sapiens
ttaatcagcagacaa

SEQ ID NO: 95092 - DNA, 15 bp, Homo sapiens
cttaatcagcagaca

SEQ ID NO: 95093 - DNA, 15 bp, Homo sapiens
gcttaatcagcagac

SEQ ID NO: 95094 - DNA, 15 bp, Homo sapiens
ggcttaatcagcaga

SEQ ID NO: 95095 - DNA, 15 bp, Homo sapiens
tggcttaatcagcag

SEQ ID NO: 95096 - DNA, 15 bp, Homo sapiens
atggcttaatcagca

SEQ ID NO: 95097 - DNA, 15 bp, Homo sapiens
gatggcttaatcagc

SEQ ID NO: 95098 - DNA, 15 bp, Homo sapiens
agatggcttaatcag

SEQ ID NO: 95099 - DNA, 15 bp, Homo sapiens
cagatggcttaatca

SEQ ID NO: 95100 - DNA, 15 bp, Homo sapiens
gcagatggcttaatc

SEQ ID NO: 95101 - DNA, 15 bp, Homo sapiens
ggcagatggcttaat

SEQ ID NO: 95102 - DNA, 15 bp, Homo sapiens
tggcagatggcttaa

SEQ ID NO: 95103 - DNA, 15 bp, Homo sapiens
gtggcagatggctta

SEQ ID NO: 95104 - DNA, 15 bp, Homo sapiens
ggtggcagatggctt

SEQ ID NO: 95105 - DNA, 15 bp, Homo sapiens
tggtggcagatggct

SEQ ID NO: 95106 - DNA, 15 bp, Homo sapiens
gtggtggcagatggc

SEQ ID NO: 95107 - DNA, 15 bp, Homo sapiens
tgtggtggcagatgg

SEQ ID NO: 95108 - DNA, 15 bp, Homo sapiens
ctgtggtggcagatg

SEQ ID NO: 95109 - DNA, 15 bp, Homo sapiens
tctgtggtggcagat

SEQ ID NO: 95110 - DNA, 15 bp, Homo sapiens
ttctgtggtggcaga

SEQ ID NO: 95111 - DNA, 15 bp, Homo sapiens
tttctgtggtggcag

SEQ ID NO: 95112 - DNA, 15 bp, Homo sapiens
gtttctgtggtggca

SEQ ID NO: 95113 - DNA, 15 bp, Homo sapiens
tgtttctgtggtggc

SEQ ID NO: 95114 - DNA, 15 bp, Homo sapiens
ctgtttctgtggtgg

SEQ ID NO: 95115 - DNA, 15 bp, Homo sapiens
tctgtttctgtggtg

SEQ ID NO: 95116 - DNA, 15 bp, Homo sapiens
gtctgtttctgtggt

SEQ ID NO: 95117 - DNA, 15 bp, Homo sapiens
ggtctgtttctgtgg

SEQ ID NO: 95118 - DNA, 15 bp, Homo sapiens
tggtctgtttctgtg

SEQ ID NO: 95119 - DNA, 15 bp, Homo sapiens
ttggtctgtttctgt

SEQ ID NO: 95120 - DNA, 15 bp, Homo sapiens
cttggtctgtttctg

SEQ ID NO: 95121 - DNA, 15 bp, Homo sapiens
tcttggtctgtttct

SEQ ID NO: 95122 - DNA, 15 bp, Homo sapiens
atcttggtctgtttc

SEQ ID NO: 95123 - DNA, 15 bp, Homo sapiens
gatcttggtctgttt

SEQ ID NO: 95124 - DNA, 15 bp, Homo sapiens
tgatcttggtctgtt

SEQ ID NO: 95125 - DNA, 15 bp, Homo sapiens
atgatcttggtctgt

SEQ ID NO: 95126 - DNA, 15 bp, Homo sapiens
gatgatcttggtctg

SEQ ID NO: 95127 - DNA, 15 bp, Homo sapiens
tgatgatcttggtct

SEQ ID NO: 95128 - DNA, 15 bp, Homo sapiens
ttgatgatcttggtc

SEQ ID NO: 95129 - DNA, 15 bp, Homo sapiens
gttgatgatcttggt

SEQ ID NO: 95130 - DNA, 15 bp, Homo sapiens
agttgatgatcttgg

SEQ ID NO: 95131 - DNA, 15 bp, Homo sapiens
cagttgatgatcttg

SEQ ID NO: 95132 - DNA, 15 bp, Homo sapiens
ccagttgatgatctt

SEQ ID NO: 95133 - DNA, 15 bp, Homo sapiens
accagttgatgatct

SEQ ID NO: 95134 - DNA, 15 bp, Homo sapiens
taccagttgatgatc

SEQ ID NO: 95135 - DNA, 15 bp, Homo sapiens
gtaccagttgatgat

SEQ ID NO: 95136 - DNA, 15 bp, Homo sapiens
tgtaccagttgatga

SEQ ID NO: 95137 - DNA, 15 bp, Homo sapiens
gtgtaccagttgatg

SEQ ID NO: 95138 - DNA, 15 bp, Homo sapiens
agtgtaccagttgat

SEQ ID NO: 95139 - DNA, 15 bp, Homo sapiens
cagtgtaccagttga

SEQ ID NO: 95140 - DNA, 15 bp, Homo sapiens
ccagtgtaccagttg

SEQ ID NO: 95141 - DNA, 15 bp, Homo sapiens
accagtgtaccagtt

SEQ ID NO: 95142 - DNA, 15 bp, Homo sapiens
caccagtgtaccagt

SEQ ID NO: 95143 - DNA, 15 bp, Homo sapiens
gcaccagtgtaccag

SEQ ID NO: 95144 - DNA, 15 bp, Homo sapiens
ggcaccagtgtacca

SEQ ID NO: 95145 - DNA, 15 bp, Homo sapiens
cggcaccagtgtacc

SEQ ID NO: 95146 - DNA, 15 bp, Homo sapiens
tcggcaccagtgtac

SEQ ID NO: 95147 - DNA, 15 bp, Homo sapiens
gtcggcaccagtgta

SEQ ID NO: 95148 - DNA, 15 bp, Homo sapiens
cgtcggcaccagtgt

SEQ ID NO: 95149 - DNA, 15 bp, Homo sapiens
ccgtcggcaccagtg

SEQ ID NO: 95150 - DNA, 15 bp, Homo sapiens
gccgtcggcaccagt

SEQ ID NO: 95151 - DNA, 15 bp, Homo sapiens
ggccgtcggcaccag

SEQ ID NO: 95152 - DNA, 15 bp, Homo sapiens
tggccgtcggcacca

SEQ ID NO: 95153 - DNA, 15 bp, Homo sapiens
gtggccgtcggcacc

SEQ ID NO: 95154 - DNA, 15 bp, Homo sapiens
tgtggccgtcggcac

SEQ ID NO: 95155 - DNA, 15 bp, Homo sapiens
atgtggccgtcggca

SEQ ID NO: 95156 - DNA, 15 bp, Homo sapiens
aatgtggccgtcggc

SEQ ID NO: 95157 - DNA, 15 bp, Homo sapiens
aaatgtggccgtcgg

SEQ ID NO: 95158 - DNA, 15 bp, Homo sapiens
aaaatgtggccgtcg

SEQ ID NO: 95159 - DNA, 15 bp, Homo sapiens
aaaaatgtggccgtc

SEQ ID NO: 95160 - DNA, 15 bp, Homo sapiens
taaaaatgtggccgt

SEQ ID NO: 95161 - DNA, 15 bp, Homo sapiens
gtaaaaatgtggccg

SEQ ID NO: 95162 - DNA, 15 bp, Homo sapiens
tgtaaaaatgtggcc

SEQ ID NO: 95163 - DNA, 15 bp, Homo sapiens
gtgtaaaaatgtggc

SEQ ID NO: 95164 - DNA, 15 bp, Homo sapiens
tgtgtaaaaatgtgg

SEQ ID NO: 95165 - DNA, 15 bp, Homo sapiens
gtgtgtaaaaatgtg

SEQ ID NO: 95166 - DNA, 15 bp, Homo sapiens
agtgtgtaaaaatgt

SEQ ID NO: 95167 - DNA, 15 bp, Homo sapiens
cagtgtgtaaaaatg

SEQ ID NO: 95168 - DNA, 15 bp, Homo sapiens
ccagtgtgtaaaaat

SEQ ID NO: 95169 - DNA, 15 bp, Homo sapiens
cccagtgtgtaaaaa

SEQ ID NO: 95170 - DNA, 15 bp, Homo sapiens
gcccagtgtgtaaaa

SEQ ID NO: 95171 - DNA, 15 bp, Homo sapiens
ggcccagtgtgtaaa

SEQ ID NO: 95172 - DNA, 15 bp, Homo sapiens
aggcccagtgtgtaa

SEQ ID NO: 95173 - DNA, 15 bp, Homo sapiens
aaggcccagtgtgta

SEQ ID NO: 95174 - DNA, 15 bp, Homo sapiens
aaaggcccagtgtgt

SEQ ID NO: 95175 - DNA, 15 bp, Homo sapiens
caaaggcccagtgtg

SEQ ID NO: 95176 - DNA, 15 bp, Homo sapiens
ccaaaggcccagtgt

SEQ ID NO: 95177 - DNA, 15 bp, Homo sapiens
gccaaaggcccagtg

SEQ ID NO: 95178 - DNA, 15 bp, Homo sapiens
agccaaaggcccagt

SEQ ID NO: 95179 - DNA, 15 bp, Homo sapiens
cagccaaaggcccag

SEQ ID NO: 95180 - DNA, 15 bp, Homo sapiens
gcagccaaaggccca

SEQ ID NO: 95181 - DNA, 15 bp, Homo sapiens
ggcagccaaaggccc

SEQ ID NO: 95182 - DNA, 15 bp, Homo sapiens
tggcagccaaaggcc

SEQ ID NO: 95183 - DNA, 15 bp, Homo sapiens
gtggcagccaaaggc

SEQ ID NO: 95184 - DNA, 15 bp, Homo sapiens
ggtggcagccaaagg

SEQ ID NO: 95185 - DNA, 15 bp, Homo sapiens
aggtggcagccaaag

SEQ ID NO: 95186 - DNA, 15 bp, Homo sapiens
gaggtggcagccaaa

SEQ ID NO: 95187 - DNA, 15 bp, Homo sapiens
tgaggtggcagccaa

SEQ ID NO: 95188 - DNA, 15 bp, Homo sapiens
ttgaggtggcagcca

SEQ ID NO: 95189 - DNA, 15 bp, Homo sapiens
cttgaggtggcagcc

SEQ ID NO: 95190 - DNA, 15 bp, Homo sapiens
acttgaggtggcagc

SEQ ID NO: 95191 - DNA, 15 bp, Homo sapiens
aacttgaggtggcag

SEQ ID NO: 95192 - DNA, 15 bp, Homo sapiens
aaacttgaggtggca

SEQ ID NO: 95193 - DNA, 15 bp, Homo sapiens
caaacttgaggtggc

SEQ ID NO: 95194 - DNA, 15 bp, Homo sapiens
acaaacttgaggtgg

SEQ ID NO: 95195 - DNA, 15 bp, Homo sapiens
gacaaacttgaggtg

SEQ ID NO: 95196 - DNA, 15 bp, Homo sapiens
tgacaaacttgaggt

SEQ ID NO: 95197 - DNA, 15 bp, Homo sapiens
ctgacaaacttgagg

SEQ ID NO: 95198 - DNA, 15 bp, Homo sapiens
actgacaaacttgag

SEQ ID NO: 95199 - DNA, 15 bp, Homo sapiens
aactgacaaacttga

SEQ ID NO: 95200 - DNA, 15 bp, Homo sapiens
gaactgacaaacttg

SEQ ID NO: 95201 - DNA, 15 bp, Homo sapiens
agaactgacaaactt

SEQ ID NO: 95202 - DNA, 15 bp, Homo sapiens
gagaactgacaaact

SEQ ID NO: 95203 - DNA, 15 bp, Homo sapiens
tgagaactgacaaac

SEQ ID NO: 95204 - DNA, 15 bp, Homo sapiens
ctgagaactgacaaa

SEQ ID NO: 95205 - DNA, 15 bp, Homo sapiens
cctgagaactgacaa

SEQ ID NO: 95206 - DNA, 15 bp, Homo sapiens
tcctgagaactgaca

SEQ ID NO: 95207 - DNA, 15 bp, Homo sapiens
ctcctgagaactgac

SEQ ID NO: 95208 - DNA, 15 bp, Homo sapiens
cctcctgagaactga

SEQ ID NO: 95209 - DNA, 15 bp, Homo sapiens
gcctcctgagaactg

SEQ ID NO: 95210 - DNA, 15 bp, Homo sapiens
tgcctcctgagaact

SEQ ID NO: 95211 - DNA, 15 bp, Homo sapiens
ctgcctcctgagaac

SEQ ID NO: 95212 - DNA, 15 bp, Homo sapiens
tctgcctcctgagaa

SEQ ID NO: 95213 - DNA, 15 bp, Homo sapiens
gtctgcctcctgaga

SEQ ID NO: 95214 - DNA, 15 bp, Homo sapiens
agtctgcctcctgag

SEQ ID NO: 95215 - DNA, 15 bp, Homo sapiens
gagtctgcctcctga

SEQ ID NO: 95216 - DNA, 15 bp, Homo sapiens
ggagtctgcctcctg

SEQ ID NO: 95217 - DNA, 15 bp, Homo sapiens
tggagtctgcctcct

SEQ ID NO: 95218 - DNA, 15 bp, Homo sapiens
ctggagtctgcctcc

SEQ ID NO: 95219 - DNA, 15 bp, Homo sapiens
cctggagtctgcctc

SEQ ID NO: 95220 - DNA, 15 bp, Homo sapiens
gcctggagtctgcct

SEQ ID NO: 95221 - DNA, 15 bp, Homo sapiens
tgcctggagtctgcc

SEQ ID NO: 95222 - DNA, 15 bp, Homo sapiens
gtgcctggagtctgc

SEQ ID NO: 95223 - DNA, 15 bp, Homo sapiens
ggtgcctggagtctg

SEQ ID NO: 95224 - DNA, 15 bp, Homo sapiens
tggtgcctggagtct

SEQ ID NO: 95225 - DNA, 15 bp, Homo sapiens
gtggtgcctggagtc

SEQ ID NO: 95226 - DNA, 15 bp, Homo sapiens
tgtggtgcctggagt

SEQ ID NO: 95227 - DNA, 15 bp, Homo sapiens
atgtggtgcctggag

SEQ ID NO: 95228 - DNA, 15 bp, Homo sapiens
aatgtggtgcctgga

SEQ ID NO: 95229 - DNA, 15 bp, Homo sapiens
gaatgtggtgcctgg

SEQ ID NO: 95230 - DNA, 15 bp, Homo sapiens
cgaatgtggtgcctg

SEQ ID NO: 95231 - DNA, 15 bp, Homo sapiens
tcgaatgtggtgcct

SEQ ID NO: 95232 - DNA, 15 bp, Homo sapiens
ctcgaatgtggtgcc

SEQ ID NO: 95233 - DNA, 15 bp, Homo sapiens
tctcgaatgtggtgc

SEQ ID NO: 95234 - DNA, 15 bp, Homo sapiens
ctctcgaatgtggtg

SEQ ID NO: 95235 - DNA, 15 bp, Homo sapiens
cctctcgaatgtggt

SEQ ID NO: 95236 - DNA, 15 bp, Homo sapiens
ccctctcgaatgtgg

SEQ ID NO: 95237 - DNA, 15 bp, Homo sapiens
gccctctcgaatgtg

SEQ ID NO: 95238 - DNA, 15 bp, Homo sapiens
ggccctctcgaatgt

SEQ ID NO: 95239 - DNA, 15 bp, Homo sapiens
aggccctctcgaatg

SEQ ID NO: 95240 - DNA, 15 bp, Homo sapiens
gaggccctctcgaat

SEQ ID NO: 95241 - DNA, 15 bp, Homo sapiens
ggaggccctctcgaa

SEQ ID NO: 95242 - DNA, 15 bp, Homo sapiens
tggaggccctctcga

SEQ ID NO: 95243 - DNA, 15 bp, Homo sapiens
atggaggccctctcg

SEQ ID NO: 95244 - DNA, 15 bp, Homo sapiens
catggaggccctctc

SEQ ID NO: 95245 - DNA, 15 bp, Homo sapiens
gcatggaggccctct

SEQ ID NO: 95246 - DNA, 15 bp, Homo sapiens
tgcatggaggccctc

SEQ ID NO: 95247 - DNA, 15 bp, Homo sapiens
gtgcatggaggccct

SEQ ID NO: 95248 - DNA, 15 bp, Homo sapiens
cgtgcatggaggccc

SEQ ID NO: 95249 - DNA, 15 bp, Homo sapiens
gcgtgcatggaggcc

SEQ ID NO: 95250 - DNA, 15 bp, Homo sapiens
agcgtgcatggaggc

SEQ ID NO: 95251 - DNA, 15 bp, Homo sapiens
gagcgtgcatggagg

SEQ ID NO: 95252 - DNA, 15 bp, Homo sapiens
tgagcgtgcatggag

SEQ ID NO: 95253 - DNA, 15 bp, Homo sapiens
ctgagcgtgcatgga

SEQ ID NO: 95254 - DNA, 15 bp, Homo sapiens
cctgagcgtgcatgg

SEQ ID NO: 95255 - DNA, 15 bp, Homo sapiens
gcctgagcgtgcatg

SEQ ID NO: 95256 - DNA, 15 bp, Homo sapiens
agcctgagcgtgcat

SEQ ID NO: 95257 - DNA, 15 bp, Homo sapiens
aagcctgagcgtgca

SEQ ID NO: 95258 - DNA, 15 bp, Homo sapiens
gaagcctgagcgtgc

SEQ ID NO: 95259 - DNA, 15 bp, Homo sapiens
agaagcctgagcgtg

SEQ ID NO: 95260 - DNA, 15 bp, Homo sapiens
aagaagcctgagcgt

SEQ ID NO: 95261 - DNA, 15 bp, Homo sapiens
gaagaagcctgagcg

SEQ ID NO: 95262 - DNA, 15 bp, Homo sapiens
agaagaagcctgagc

SEQ ID NO: 95263 - DNA, 15 bp, Homo sapiens
gagaagaagcctgag

SEQ ID NO: 95264 - DNA, 15 bp, Homo sapiens
tgagaagaagcctga

SEQ ID NO: 95265 - DNA, 15 bp, Homo sapiens
atgagaagaagcctg

SEQ ID NO: 95266 - DNA, 15 bp, Homo sapiens
tatgagaagaagcct

SEQ ID NO: 95267 - DNA, 15 bp, Homo sapiens
ctatgagaagaagcc

SEQ ID NO: 95268 - DNA, 15 bp, Homo sapiens
gctatgagaagaagc

SEQ ID NO: 95269 - DNA, 15 bp, Homo sapiens
tgctatgagaagaag

SEQ ID NO: 95270 - DNA, 15 bp, Homo sapiens
ctgctatgagaagaa

SEQ ID NO: 95271 - DNA, 15 bp, Homo sapiens
cctgctatgagaaga

SEQ ID NO: 95272 - DNA, 15 bp, Homo sapiens
gcctgctatgagaag

SEQ ID NO: 95273 - DNA, 15 bp, Homo sapiens
tgcctgctatgagaa

SEQ ID NO: 95274 - DNA, 15 bp, Homo sapiens
gtgcctgctatgaga

SEQ ID NO: 95275 - DNA, 15 bp, Homo sapiens
tgtgcctgctatgag

SEQ ID NO: 95276 - DNA, 15 bp, Homo sapiens
gtgtgcctgctatga

SEQ ID NO: 95277 - DNA, 15 bp, Homo sapiens
ggtgtgcctgctatg

SEQ ID NO: 95278 - DNA, 15 bp, Homo sapiens
gggtgtgcctgctat

SEQ ID NO: 95279 - DNA, 15 bp, Homo sapiens
agggtgtgcctgcta

SEQ ID NO: 95280 - DNA, 15 bp, Homo sapiens
cagggtgtgcctgct

SEQ ID NO: 95281 - DNA, 15 bp, Homo sapiens
gcagggtgtgcctgc

SEQ ID NO: 95282 - DNA, 15 bp, Homo sapiens
ggcagggtgtgcctg

SEQ ID NO: 95283 - DNA, 15 bp, Homo sapiens
aggcagggtgtgcct

SEQ ID NO: 95284 - DNA, 15 bp, Homo sapiens
caggcagggtgtgcc

SEQ ID NO: 95285 - DNA, 15 bp, Homo sapiens
tcaggcagggtgtgc

SEQ ID NO: 95286 - DNA, 15 bp, Homo sapiens
ctcaggcagggtgtg

SEQ ID NO: 95287 - DNA, 15 bp, Homo sapiens
gctcaggcagggtgt

SEQ ID NO: 95288 - DNA, 15 bp, Homo sapiens
ggctcaggcagggtg

SEQ ID NO: 95289 - DNA, 15 bp, Homo sapiens
gggctcaggcagggt

SEQ ID NO: 95290 - DNA, 15 bp, Homo sapiens
ggggctcaggcaggg

SEQ ID NO: 95291 - DNA, 15 bp, Homo sapiens
tggggctcaggcagg

SEQ ID NO: 95292 - DNA, 15 bp, Homo sapiens
gtggggctcaggcag

SEQ ID NO: 95293 - DNA, 15 bp, Homo sapiens
agtggggctcaggca

SEQ ID NO: 95294 - DNA, 15 bp, Homo sapiens
gagtggggctcaggc

SEQ ID NO: 95295 - DNA, 15 bp, Homo sapiens
ggagtggggctcagg

SEQ ID NO: 95296 - DNA, 15 bp, Homo sapiens
tggagtggggctcag

SEQ ID NO: 95297 - DNA, 15 bp, Homo sapiens
atggagtggggctca

SEQ ID NO: 95298 - DNA, 15 bp, Homo sapiens
catggagtggggctc

SEQ ID NO: 95299 - DNA, 15 bp, Homo sapiens
gcatggagtggggct

SEQ ID NO: 95300 - DNA, 15 bp, Homo sapiens
cgcatggagtggggc

SEQ ID NO: 95301 - DNA, 15 bp, Homo sapiens
gcgcatggagtgggg

SEQ ID NO: 95302 - DNA, 15 bp, Homo sapiens
agcgcatggagtggg

SEQ ID NO: 95303 - DNA, 15 bp, Homo sapiens
cagcgcatggagtgg

SEQ ID NO: 95304 - DNA, 15 bp, Homo sapiens
tcagcgcatggagtg

SEQ ID NO: 95305 - DNA, 15 bp, Homo sapiens
gtcagcgcatggagt

SEQ ID NO: 95306 - DNA, 15 bp, Homo sapiens
cgtcagcgcatggag

SEQ ID NO: 95307 - DNA, 15 bp, Homo sapiens
ccgtcagcgcatgga

SEQ ID NO: 95308 - DNA, 15 bp, Homo sapiens
tccgtcagcgcatgg

SEQ ID NO: 95309 - DNA, 15 bp, Homo sapiens
ctccgtcagcgcatg

SEQ ID NO: 95310 - DNA, 15 bp, Homo sapiens
tctccgtcagcgcat

SEQ ID NO: 95311 - DNA, 15 bp, Homo sapiens
ctctccgtcagcgca

SEQ ID NO: 95312 - DNA, 15 bp, Homo sapiens
actctccgtcagcgc

SEQ ID NO: 95313 - DNA, 15 bp, Homo sapiens
gactctccgtcagcg

SEQ ID NO: 95314 - DNA, 15 bp, Homo sapiens
cgactctccgtcagc

SEQ ID NO: 95315 - DNA, 15 bp, Homo sapiens
ccgactctccgtcag

SEQ ID NO: 95316 - DNA, 15 bp, Homo sapiens
cccgactctccgtca

SEQ ID NO: 95317 - DNA, 15 bp, Homo sapiens
ccccgactctccgtc

SEQ ID NO: 95318 - DNA, 15 bp, Homo sapiens
gccccgactctccgt

SEQ ID NO: 95319 - DNA, 15 bp, Homo sapiens
tgccccgactctccg

SEQ ID NO: 95320 - DNA, 15 bp, Homo sapiens
ctgccccgactctcc

SEQ ID NO: 95321 - DNA, 15 bp, Homo sapiens
cctgccccgactctc

SEQ ID NO: 95322 - DNA, 15 bp, Homo sapiens
tcctgccccgactct

SEQ ID NO: 95323 - DNA, 15 bp, Homo sapiens
ctcctgccccgactc

SEQ ID NO: 95324 - DNA, 15 bp, Homo sapiens
gctcctgccccgact

SEQ ID NO: 95325 - DNA, 15 bp, Homo sapiens
agctcctgccccgac

SEQ ID NO: 95326 - DNA, 15 bp, Homo sapiens
gagctcctgccccga

SEQ ID NO: 95327 - DNA, 15 bp, Homo sapiens
agagctcctgccccg

SEQ ID NO: 95328 - DNA, 15 bp, Homo sapiens
gagagctcctgcccc

SEQ ID NO: 95329 - DNA, 15 bp, Homo sapiens
tgagagctcctgccc

SEQ ID NO: 95330 - DNA, 15 bp, Homo sapiens
atgagagctcctgcc

SEQ ID NO: 95331 - DNA, 15 bp, Homo sapiens
catgagagctcctgc

SEQ ID NO: 95332 - DNA, 15 bp, Homo sapiens
gcatgagagctcctg

SEQ ID NO: 95333 - DNA, 15 bp, Homo sapiens
tgcatgagagctcct

SEQ ID NO: 95334 - DNA, 15 bp, Homo sapiens
ctgcatgagagctcc

SEQ ID NO: 95335 - DNA, 15 bp, Homo sapiens
gctgcatgagagctc

SEQ ID NO: 95336 - DNA, 15 bp, Homo sapiens
ggctgcatgagagct

SEQ ID NO: 95337 - DNA, 15 bp, Homo sapiens
tggctgcatgagagc

SEQ ID NO: 95338 - DNA, 15 bp, Homo sapiens
ctggctgcatgagag

SEQ ID NO: 95339 - DNA, 15 bp, Homo sapiens
cctggctgcatgaga

SEQ ID NO: 95340 - DNA, 15 bp, Homo sapiens
acctggctgcatgag

SEQ ID NO: 95341 - DNA, 15 bp, Homo sapiens
cacctggctgcatga

SEQ ID NO: 95342 - DNA, 15 bp, Homo sapiens
acacctggctgcatg

SEQ ID NO: 95343 - DNA, 15 bp, Homo sapiens
aacacctggctgcat

SEQ ID NO: 95344 - DNA, 15 bp, Homo sapiens
caacacctggctgca

SEQ ID NO: 95345 - DNA, 15 bp, Homo sapiens
ccaacacctggctgc

SEQ ID NO: 95346 - DNA, 15 bp, Homo sapiens
cccaacacctggctg

SEQ ID NO: 95347 - DNA, 15 bp, Homo sapiens
gcccaacacctggct

SEQ ID NO: 95348 - DNA, 15 bp, Homo sapiens
agcccaacacctggc

SEQ ID NO: 95349 - DNA, 15 bp, Homo sapiens
gagcccaacacctgg

SEQ ID NO: 95350 - DNA, 15 bp, Homo sapiens
agagcccaacacctg

SEQ ID NO: 95351 - DNA, 15 bp, Homo sapiens
cagagcccaacacct

SEQ ID NO: 95352 - DNA, 15 bp, Homo sapiens
gcagagcccaacacc

SEQ ID NO: 95353 - DNA, 15 bp, Homo sapiens
tgcagagcccaacac

SEQ ID NO: 95354 - DNA, 15 bp, Homo sapiens
ttgcagagcccaaca

SEQ ID NO: 95355 - DNA, 15 bp, Homo sapiens
cttgcagagcccaac

SEQ ID NO: 95356 - DNA, 15 bp, Homo sapiens
ccttgcagagcccaa

SEQ ID NO: 95357 - DNA, 15 bp, Homo sapiens
cccttgcagagccca

SEQ ID NO: 95358 - DNA, 15 bp, Homo sapiens
ccccttgcagagccc

SEQ ID NO: 95359 - DNA, 15 bp, Homo sapiens
cccccttgcagagcc

SEQ ID NO: 95360 - DNA, 15 bp, Homo sapiens
acccccttgcagagc

SEQ ID NO: 95361 - DNA, 15 bp, Homo sapiens
aacccccttgcagag

SEQ ID NO: 95362 - DNA, 15 bp, Homo sapiens
aaacccccttgcaga

SEQ ID NO: 95363 - DNA, 15 bp, Homo sapiens
caaacccccttgcag

SEQ ID NO: 95364 - DNA, 15 bp, Homo sapiens
acaaacccccttgca

SEQ ID NO: 95365 - DNA, 15 bp, Homo sapiens
cacaaacccccttgc

SEQ ID NO: 95366 - DNA, 15 bp, Homo sapiens
acacaaacccccttg

SEQ ID NO: 95367 - DNA, 15 bp, Homo sapiens
cacacaaaccccctt

SEQ ID NO: 95368 - DNA, 15 bp, Homo sapiens
ccacacaaaccccct

SEQ ID NO: 95369 - DNA, 15 bp, Homo sapiens
cccacacaaaccccc

SEQ ID NO: 95370 - DNA, 15 bp, Homo sapiens
ccccacacaaacccc

SEQ ID NO: 95371 - DNA, 15 bp, Homo sapiens
tccccacacaaaccc

SEQ ID NO: 95372 - DNA, 15 bp, Homo sapiens
atccccacacaaacc

SEQ ID NO: 95373 - DNA, 15 bp, Homo sapiens
catccccacacaaac

SEQ ID NO: 95374 - DNA, 15 bp, Homo sapiens
acatccccacacaaa

SEQ ID NO: 95375 - DNA, 15 bp, Homo sapiens
cacatccccacacaa

SEQ ID NO: 95376 - DNA, 15 bp, Homo sapiens
tcacatccccacaca

SEQ ID NO: 95377 - DNA, 15 bp, Homo sapiens
ctcacatccccacac

SEQ ID NO: 95378 - DNA, 15 bp, Homo sapiens
gctcacatccccaca

SEQ ID NO: 95379 - DNA, 15 bp, Homo sapiens
ggctcacatccccac

SEQ ID NO: 95380 - DNA, 15 bp, Homo sapiens
tggctcacatcccca

SEQ ID NO: 95381 - DNA, 15 bp, Homo sapiens
gtggctcacatcccc

SEQ ID NO: 95382 - DNA, 15 bp, Homo sapiens
agtggctcacatccc

SEQ ID NO: 95383 - DNA, 15 bp, Homo sapiens
cagtggctcacatcc

SEQ ID NO: 95384 - DNA, 15 bp, Homo sapiens
ccagtggctcacatc

SEQ ID NO: 95385 - DNA, 15 bp, Homo sapiens
cccagtggctcacat

SEQ ID NO: 95386 - DNA, 15 bp, Homo sapiens
acccagtggctcaca

SEQ ID NO: 95387 - DNA, 15 bp, Homo sapiens
gacccagtggctcac

SEQ ID NO: 95388 - DNA, 15 bp, Homo sapiens
tgacccagtggctca

SEQ ID NO: 95389 - DNA, 15 bp, Homo sapiens
ctgacccagtggctc

SEQ ID NO: 95390 - DNA, 15 bp, Homo sapiens
gctgacccagtggct

SEQ ID NO: 95391 - DNA, 15 bp, Homo sapiens
agctgacccagtggc

SEQ ID NO: 95392 - DNA, 15 bp, Homo sapiens
gagctgacccagtgg

SEQ ID NO: 95393 - DNA, 15 bp, Homo sapiens
ggagctgacccagtg

SEQ ID NO: 95394 - DNA, 15 bp, Homo sapiens
gggagctgacccagt

SEQ ID NO: 95395 - DNA, 15 bp, Homo sapiens
agggagctgacccag

SEQ ID NO: 95396 - DNA, 15 bp, Homo sapiens
cagggagctgaccca

SEQ ID NO: 95397 - DNA, 15 bp, Homo sapiens
ccagggagctgaccc

SEQ ID NO: 95398 - DNA, 15 bp, Homo sapiens
accagggagctgacc

SEQ ID NO: 95399 - DNA, 15 bp, Homo sapiens
aaccagggagctgac

SEQ ID NO: 95400 - DNA, 15 bp, Homo sapiens
gaaccagggagctga

SEQ ID NO: 95401 - DNA, 15 bp, Homo sapiens
tgaaccagggagctg

SEQ ID NO: 95402 - DNA, 15 bp, Homo sapiens
ctgaaccagggagct

SEQ ID NO: 95403 - DNA, 15 bp, Homo sapiens
cctgaaccagggagc

SEQ ID NO: 95404 - DNA, 15 bp, Homo sapiens
gcctgaaccagggag

SEQ ID NO: 95405 - DNA, 15 bp, Homo sapiens
agcctgaaccaggga

SEQ ID NO: 95406 - DNA, 15 bp, Homo sapiens
aagcctgaaccaggg

SEQ ID NO: 95407 - DNA, 15 bp, Homo sapiens
gaagcctgaaccagg

SEQ ID NO: 95408 - DNA, 15 bp, Homo sapiens
agaagcctgaaccag

SEQ ID NO: 95409 - DNA, 15 bp, Homo sapiens
cagaagcctgaacca

SEQ ID NO: 95410 - DNA, 15 bp, Homo sapiens
gcagaagcctgaacc

SEQ ID NO: 95411 - DNA, 15 bp, Homo sapiens
tgcagaagcctgaac

SEQ ID NO: 95412 - DNA, 15 bp, Homo sapiens
atgcagaagcctgaa

SEQ ID NO: 95413 - DNA, 15 bp, Homo sapiens
aatgcagaagcctga

SEQ ID NO: 95414 - DNA, 15 bp, Homo sapiens
gaatgcagaagcctg

SEQ ID NO: 95415 - DNA, 15 bp, Homo sapiens
tgaatgcagaagcct

SEQ ID NO: 95416 - DNA, 15 bp, Homo sapiens
ctgaatgcagaagcc

SEQ ID NO: 95417 - DNA, 15 bp, Homo sapiens
cctgaatgcagaagc

SEQ ID NO: 95418 - DNA, 15 bp, Homo sapiens
acctgaatgcagaag

SEQ ID NO: 95419 - DNA, 15 bp, Homo sapiens
aacctgaatgcagaa

SEQ ID NO: 95420 - DNA, 15 bp, Homo sapiens
taacctgaatgcaga

SEQ ID NO: 95421 - DNA, 15 bp, Homo sapiens
ataacctgaatgcag

SEQ ID NO: 95422 - DNA, 15 bp, Homo sapiens
tataacctgaatgca

SEQ ID NO: 95423 - DNA, 15 bp, Homo sapiens
ctataacctgaatgc

SEQ ID NO: 95424 - DNA, 15 bp, Homo sapiens
tctataacctgaatg

SEQ ID NO: 95425 - DNA, 15 bp, Homo sapiens
gtctataacctgaat

SEQ ID NO: 95426 - DNA, 15 bp, Homo sapiens
tgtctataacctgaa

SEQ ID NO: 95427 - DNA, 15 bp, Homo sapiens
atgtctataacctga

SEQ ID NO: 95428 - DNA, 15 bp, Homo sapiens
tatgtctataacctg

SEQ ID NO: 95429 - DNA, 15 bp, Homo sapiens
atatgtctataacct

SEQ ID NO: 95430 - DNA, 15 bp, Homo sapiens
gatatgtctataacc

SEQ ID NO: 95431 - DNA, 15 bp, Homo sapiens
agatatgtctataac

SEQ ID NO: 95432 - DNA, 15 bp, Homo sapiens
gagatatgtctataa

SEQ ID NO: 95433 - DNA, 15 bp, Homo sapiens
agagatatgtctata

SEQ ID NO: 95434 - DNA, 15 bp, Homo sapiens
cagagatatgtctat

SEQ ID NO: 95435 - DNA, 15 bp, Homo sapiens
acagagatatgtcta

SEQ ID NO: 95436 - DNA, 15 bp, Homo sapiens
cacagagatatgtct

SEQ ID NO: 95437 - DNA, 15 bp, Homo sapiens
acacagagatatgtc

SEQ ID NO: 95438 - DNA, 15 bp, Homo sapiens
cacacagagatatgt

SEQ ID NO: 95439 - DNA, 15 bp, Homo sapiens
acacacagagatatg

SEQ ID NO: 95440 - DNA, 15 bp, Homo sapiens
tacacacagagatat

SEQ ID NO: 95441 - DNA, 15 bp, Homo sapiens
atacacacagagata

SEQ ID NO: 95442 - DNA, 15 bp, Homo sapiens
catacacacagagat

SEQ ID NO: 95443 - DNA, 15 bp, Homo sapiens
acatacacacagaga

SEQ ID NO: 95444 - DNA, 15 bp, Homo sapiens
aacatacacacagag

SEQ ID NO: 95445 - DNA, 15 bp, Homo sapiens
caacatacacacaga

SEQ ID NO: 95446 - DNA, 15 bp, Homo sapiens
ccaacatacacacag

SEQ ID NO: 95447 - DNA, 15 bp, Homo sapiens
cccaacatacacaca

SEQ ID NO: 95448 - DNA, 15 bp, Homo sapiens
ccccaacatacacac

SEQ ID NO: 95449 - DNA, 15 bp, Homo sapiens
tccccaacatacaca

SEQ ID NO: 95450 - DNA, 15 bp, Homo sapiens
gtccccaacatacac

SEQ ID NO: 95451 - DNA, 15 bp, Homo sapiens
agtccccaacataca

SEQ ID NO: 95452 - DNA, 15 bp, Homo sapiens
tagtccccaacatac

SEQ ID NO: 95453 - DNA, 15 bp, Homo sapiens
ctagtccccaacata

SEQ ID NO: 95454 - DNA, 15 bp, Homo sapiens
tctagtccccaacat

SEQ ID NO: 95455 - DNA, 15 bp, Homo sapiens
ctctagtccccaaca

SEQ ID NO: 95456 - DNA, 15 bp, Homo sapiens
tctctagtccccaac

SEQ ID NO: 95457 - DNA, 15 bp, Homo sapiens
atctctagtccccaa

SEQ ID NO: 95458 - DNA, 15 bp, Homo sapiens
catctctagtcccca

SEQ ID NO: 95459 - DNA, 15 bp, Homo sapiens
tcatctctagtcccc

SEQ ID NO: 95460 - DNA, 15 bp, Homo sapiens
gtcatctctagtccc

SEQ ID NO: 95461 - DNA, 15 bp, Homo sapiens
ggtcatctctagtcc

SEQ ID NO: 95462 - DNA, 15 bp, Homo sapiens
tggtcatctctagtc

SEQ ID NO: 95463 - DNA, 15 bp, Homo sapiens
gtggtcatctctagt

SEQ ID NO: 95464 - DNA, 15 bp, Homo sapiens
tgtggtcatctctag

SEQ ID NO: 95465 - DNA, 15 bp, Homo sapiens
gtgtggtcatctcta

SEQ ID NO: 95466 - DNA, 15 bp, Homo sapiens
agtgtggtcatctct

SEQ ID NO: 95467 - DNA, 15 bp, Homo sapiens
cagtgtggtcatctc

SEQ ID NO: 95468 - DNA, 15 bp, Homo sapiens
gcagtgtggtcatct

SEQ ID NO: 95469 - DNA, 15 bp, Homo sapiens
agcagtgtggtcatc

SEQ ID NO: 95470 - DNA, 15 bp, Homo sapiens
tagcagtgtggtcat

SEQ ID NO: 95471 - DNA, 15 bp, Homo sapiens
ttagcagtgtggtca

SEQ ID NO: 95472 - DNA, 15 bp, Homo sapiens
tttagcagtgtggtc

SEQ ID NO: 95473 - DNA, 15 bp, Homo sapiens
atttagcagtgtggt

SEQ ID NO: 95474 - DNA, 15 bp, Homo sapiens
aatttagcagtgtgg

SEQ ID NO: 95475 - DNA, 15 bp, Homo sapiens
gaatttagcagtgtg

SEQ ID NO: 95476 - DNA, 15 bp, Homo sapiens
agaatttagcagtgt

SEQ ID NO: 95477 - DNA, 15 bp, Homo sapiens
aagaatttagcagtg

SEQ ID NO: 95478 - DNA, 15 bp, Homo sapiens
gaagaatttagcagt

SEQ ID NO: 95479 - DNA, 15 bp, Homo sapiens
agaagaatttagcag

SEQ ID NO: 95480 - DNA, 15 bp, Homo sapiens
aagaagaatttagca

SEQ ID NO: 95481 - DNA, 15 bp, Homo sapiens
caagaagaatttagc

SEQ ID NO: 95482 - DNA, 15 bp, Homo sapiens
tcaagaagaatttag

SEQ ID NO: 95483 - DNA, 15 bp, Homo sapiens
ctcaagaagaattta

SEQ ID NO: 95484 - DNA, 15 bp, Homo sapiens
actcaagaagaattt

SEQ ID NO: 95485 - DNA, 15 bp, Homo sapiens
cactcaagaagaatt

SEQ ID NO: 95486 - DNA, 15 bp, Homo sapiens
tcactcaagaagaat

SEQ ID NO: 95487 - DNA, 15 bp, Homo sapiens
gtcactcaagaagaa

SEQ ID NO: 95488 - DNA, 15 bp, Homo sapiens
agtcactcaagaaga

SEQ ID NO: 95489 - DNA, 15 bp, Homo sapiens
aagtcactcaagaag

SEQ ID NO: 95490 - DNA, 15 bp, Homo sapiens
aaagtcactcaagaa

SEQ ID NO: 95491 - DNA, 15 bp, Homo sapiens
aaaagtcactcaaga

SEQ ID NO: 95492 - DNA, 15 bp, Homo sapiens
taaaagtcactcaag

SEQ ID NO: 95493 - DNA, 15 bp, Homo sapiens
ctaaaagtcactcaa

SEQ ID NO: 95494 - DNA, 15 bp, Homo sapiens
actaaaagtcactca

SEQ ID NO: 95495 - DNA, 15 bp, Homo sapiens
tactaaaagtcactc

SEQ ID NO: 95496 - DNA, 15 bp, Homo sapiens
ctactaaaagtcact

SEQ ID NO: 95497 - DNA, 15 bp, Homo sapiens
cctactaaaagtcac

SEQ ID NO: 95498 - DNA, 15 bp, Homo sapiens
tcctactaaaagtca

SEQ ID NO: 95499 - DNA, 15 bp, Homo sapiens
ttcctactaaaagtc

SEQ ID NO: 95500 - DNA, 15 bp, Homo sapiens
tttcctactaaaagt

SEQ ID NO: 95501 - DNA, 15 bp, Homo sapiens
ttttcctactaaaag

SEQ ID NO: 95502 - DNA, 15 bp, Homo sapiens
tttttcctactaaaa

SEQ ID NO: 95503 - DNA, 15 bp, Homo sapiens
ttttttcctactaaa

SEQ ID NO: 95504 - DNA, 15 bp, Homo sapiens
tttttttcctactaa

SEQ ID NO: 95505 - DNA, 15 bp, Homo sapiens
atttttttcctacta

SEQ ID NO: 95506 - DNA, 15 bp, Homo sapiens
tatttttttcctact

SEQ ID NO: 95507 - DNA, 15 bp, Homo sapiens
atatttttttcctac

SEQ ID NO: 95508 - DNA, 15 bp, Homo sapiens
catatttttttccta

SEQ ID NO: 95509 - DNA, 15 bp, Homo sapiens
tcatatttttttcct

SEQ ID NO: 95510 - DNA, 15 bp, Homo sapiens
ttcatatttttttcc

SEQ ID NO: 95511 - DNA, 15 bp, Homo sapiens
gttcatatttttttc

SEQ ID NO: 95512 - DNA, 15 bp, Homo sapiens
ggttcatattttttt

SEQ ID NO: 95513 - DNA, 15 bp, Homo sapiens
gggttcatatttttt

SEQ ID NO: 95514 - DNA, 15 bp, Homo sapiens
agggttcatattttt

SEQ ID NO: 95515 - DNA, 15 bp, Homo sapiens
gagggttcatatttt

SEQ ID NO: 95516 - DNA, 15 bp, Homo sapiens
tgagggttcatattt

SEQ ID NO: 95517 - DNA, 15 bp, Homo sapiens
gtgagggttcatatt

SEQ ID NO: 95518 - DNA, 15 bp, Homo sapiens
agtgagggttcatat

SEQ ID NO: 95519 - DNA, 15 bp, Homo sapiens
aagtgagggttcata

SEQ ID NO: 95520 - DNA, 15 bp, Homo sapiens
gaagtgagggttcat

SEQ ID NO: 95521 - DNA, 15 bp, Homo sapiens
tgaagtgagggttca

SEQ ID NO: 95522 - DNA, 15 bp, Homo sapiens
ttgaagtgagggttc

SEQ ID NO: 95523 - DNA, 15 bp, Homo sapiens
gttgaagtgagggtt

SEQ ID NO: 95524 - DNA, 15 bp, Homo sapiens
tgttgaagtgagggt

SEQ ID NO: 95525 - DNA, 15 bp, Homo sapiens
ttgttgaagtgaggg

SEQ ID NO: 95526 - DNA, 15 bp, Homo sapiens
attgttgaagtgagg

SEQ ID NO: 95527 - DNA, 15 bp, Homo sapiens
cattgttgaagtgag

SEQ ID NO: 95528 - DNA, 15 bp, Homo sapiens
tcattgttgaagtga

SEQ ID NO: 95529 - DNA, 15 bp, Homo sapiens
gtcattgttgaagtg

SEQ ID NO: 95530 - DNA, 15 bp, Homo sapiens
tgtcattgttgaagt

SEQ ID NO: 95531 - DNA, 15 bp, Homo sapiens
atgtcattgttgaag

SEQ ID NO: 95532 - DNA, 15 bp, Homo sapiens
aatgtcattgttgaa

SEQ ID NO: 95533 - DNA, 15 bp, Homo sapiens
caatgtcattgttga

SEQ ID NO: 95534 - DNA, 15 bp, Homo sapiens
acaatgtcattgttg

SEQ ID NO: 95535 - DNA, 15 bp, Homo sapiens
aacaatgtcattgtt

SEQ ID NO: 95536 - DNA, 15 bp, Homo sapiens
taacaatgtcattgt

SEQ ID NO: 95537 - DNA, 15 bp, Homo sapiens
ttaacaatgtcattg

SEQ ID NO: 95538 - DNA, 15 bp, Homo sapiens
tttaacaatgtcatt

SEQ ID NO: 95539 - DNA, 15 bp, Homo sapiens
ttttaacaatgtcat

SEQ ID NO: 95540 - DNA, 15 bp, Homo sapiens
tttttaacaatgtca

SEQ ID NO: 95541 - DNA, 15 bp, Homo sapiens
gtttttaacaatgtc

SEQ ID NO: 95542 - DNA, 15 bp, Homo sapiens
tgtttttaacaatgt

SEQ ID NO: 95543 - DNA, 15 bp, Homo sapiens
gtgtttttaacaatg

SEQ ID NO: 95544 - DNA, 15 bp, Homo sapiens
tgtgtttttaacaat

SEQ ID NO: 95545 - DNA, 15 bp, Homo sapiens
atgtgtttttaacaa

SEQ ID NO: 95546 - DNA, 15 bp, Homo sapiens
tatgtgtttttaaca

SEQ ID NO: 95547 - DNA, 15 bp, Homo sapiens
ttatgtgtttttaac

SEQ ID NO: 95548 - DNA, 15 bp, Homo sapiens
tttatgtgtttttaa

SEQ ID NO: 95549 - DNA, 15 bp, Homo sapiens
ttttatgtgttttta

SEQ ID NO: 95550 - DNA, 15 bp, Homo sapiens
attttatgtgttttt

SEQ ID NO: 95551 - DNA, 15 bp, Homo sapiens
cattttatgtgtttt

SEQ ID NO: 95552 - DNA, 15 bp, Homo sapiens
gcattttatgtgttt

SEQ ID NO: 95553 - DNA, 15 bp, Homo sapiens
tgcattttatgtgtt

SEQ ID NO: 95554 - DNA, 15 bp, Homo sapiens
gtgcattttatgtgt

SEQ ID NO: 95555 - DNA, 15 bp, Homo sapiens
tgtgcattttatgtg

SEQ ID NO: 95556 - DNA, 15 bp, Homo sapiens
gtgtgcattttatgt

SEQ ID NO: 95557 - DNA, 15 bp, Homo sapiens
ggtgtgcattttatg

SEQ ID NO: 95558 - DNA, 15 bp, Homo sapiens
tggtgtgcattttat

SEQ ID NO: 95559 - DNA, 15 bp, Homo sapiens
gtggtgtgcatttta

SEQ ID NO: 95560 - DNA, 15 bp, Homo sapiens
agtggtgtgcatttt

SEQ ID NO: 95561 - DNA, 15 bp, Homo sapiens
aagtggtgtgcattt

SEQ ID NO: 95562 - DNA, 15 bp, Homo sapiens
gaagtggtgtgcatt

SEQ ID NO: 95563 - DNA, 15 bp, Homo sapiens
tgaagtggtgtgcat

SEQ ID NO: 95564 - DNA, 15 bp, Homo sapiens
gtgaagtggtgtgca

SEQ ID NO: 95565 - DNA, 15 bp, Homo sapiens
ggtgaagtggtgtgc

SEQ ID NO: 95566 - DNA, 15 bp, Homo sapiens
cggtgaagtggtgtg

SEQ ID NO: 95567 - DNA, 15 bp, Homo sapiens
tcggtgaagtggtgt

SEQ ID NO: 95568 - DNA, 15 bp, Homo sapiens
ctcggtgaagtggtg

SEQ ID NO: 95569 - DNA, 15 bp, Homo sapiens
gctcggtgaagtggt

SEQ ID NO: 95570 - DNA, 15 bp, Homo sapiens
tgctcggtgaagtgg

SEQ ID NO: 95571 - DNA, 15 bp, Homo sapiens
ctgctcggtgaagtg

SEQ ID NO: 95572 - DNA, 15 bp, Homo sapiens
gctgctcggtgaagt

SEQ ID NO: 95573 - DNA, 15 bp, Homo sapiens
tgctgctcggtgaag

SEQ ID NO: 95574 - DNA, 15 bp, Homo sapiens
atgctgctcggtgaa

SEQ ID NO: 95575 - DNA, 15 bp, Homo sapiens
aatgctgctcggtga

SEQ ID NO: 95576 - DNA, 15 bp, Homo sapiens
gaatgctgctcggtg

SEQ ID NO: 95577 - DNA, 15 bp, Homo sapiens
tgaatgctgctcggt

SEQ ID NO: 95578 - DNA, 15 bp, Homo sapiens
ctgaatgctgctcgg

SEQ ID NO: 95579 - DNA, 15 bp, Homo sapiens
cctgaatgctgctcg

SEQ ID NO: 95580 - DNA, 15 bp, Homo sapiens
gcctgaatgctgctc

SEQ ID NO: 95581 - DNA, 15 bp, Homo sapiens
ggcctgaatgctgct

SEQ ID NO: 95582 - DNA, 15 bp, Homo sapiens
aggcctgaatgctgc

SEQ ID NO: 95583 - DNA, 15 bp, Homo sapiens
aaggcctgaatgctg

SEQ ID NO: 95584 - DNA, 15 bp, Homo sapiens
caaggcctgaatgct

SEQ ID NO: 95585 - DNA, 15 bp, Homo sapiens
tcaaggcctgaatgc

SEQ ID NO: 95586 - DNA, 15 bp, Homo sapiens
gtcaaggcctgaatg

SEQ ID NO: 95587 - DNA, 15 bp, Homo sapiens
agtcaaggcctgaat

SEQ ID NO: 95588 - DNA, 15 bp, Homo sapiens
aagtcaaggcctgaa

SEQ ID NO: 95589 - DNA, 15 bp, Homo sapiens
gaagtcaaggcctga

SEQ ID NO: 95590 - DNA, 15 bp, Homo sapiens
ggaagtcaaggcctg

SEQ ID NO: 95591 - DNA, 15 bp, Homo sapiens
gggaagtcaaggcct

SEQ ID NO: 95592 - DNA, 15 bp, Homo sapiens
agggaagtcaaggcc

SEQ ID NO: 95593 - DNA, 15 bp, Homo sapiens
cagggaagtcaaggc

SEQ ID NO: 95594 - DNA, 15 bp, Homo sapiens
acagggaagtcaagg

SEQ ID NO: 95595 - DNA, 15 bp, Homo sapiens
cacagggaagtcaag

SEQ ID NO: 95596 - DNA, 15 bp, Homo sapiens
ccacagggaagtcaa

SEQ ID NO: 95597 - DNA, 15 bp, Homo sapiens
cccacagggaagtca

SEQ ID NO: 95598 - DNA, 15 bp, Homo sapiens
tcccacagggaagtc

SEQ ID NO: 95599 - DNA, 15 bp, Homo sapiens
ttcccacagggaagt

SEQ ID NO: 95600 - DNA, 15 bp, Homo sapiens
gttcccacagggaag

SEQ ID NO: 95601 - DNA, 15 bp, Homo sapiens
tgttcccacagggaa

SEQ ID NO: 95602 - DNA, 15 bp, Homo sapiens
ttgttcccacaggga

SEQ ID NO: 95603 - DNA, 15 bp, Homo sapiens
cttgttcccacaggg

SEQ ID NO: 95604 - DNA, 15 bp, Homo sapiens
gcttgttcccacagg

SEQ ID NO: 95605 - DNA, 15 bp, Homo sapiens
agcttgttcccacag

SEQ ID NO: 95606 - DNA, 15 bp, Homo sapiens
aagcttgttcccaca

SEQ ID NO: 95607 - DNA, 15 bp, Homo sapiens
aaagcttgttcccac

SEQ ID NO: 95608 - DNA, 15 bp, Homo sapiens
aaaagcttgttccca

SEQ ID NO: 95609 - DNA, 15 bp, Homo sapiens
taaaagcttgttccc

SEQ ID NO: 95610 - DNA, 15 bp, Homo sapiens
ctaaaagcttgttcc

SEQ ID NO: 95611 - DNA, 15 bp, Homo sapiens
gctaaaagcttgttc

SEQ ID NO: 95612 - DNA, 15 bp, Homo sapiens
ggctaaaagcttgtt

SEQ ID NO: 95613 - DNA, 15 bp, Homo sapiens
aggctaaaagcttgt

SEQ ID NO: 95614 - DNA, 15 bp, Homo sapiens
taggctaaaagcttg

SEQ ID NO: 95615 - DNA, 15 bp, Homo sapiens
ataggctaaaagctt

SEQ ID NO: 95616 - DNA, 15 bp, Homo sapiens
cataggctaaaagct

SEQ ID NO: 95617 - DNA, 15 bp, Homo sapiens
gcataggctaaaagc

SEQ ID NO: 95618 - DNA, 15 bp, Homo sapiens
ggcataggctaaaag

SEQ ID NO: 95619 - DNA, 15 bp, Homo sapiens
aggcataggctaaaa

SEQ ID NO: 95620 - DNA, 15 bp, Homo sapiens
gaggcataggctaaa

SEQ ID NO: 95621 - DNA, 15 bp, Homo sapiens
tgaggcataggctaa

SEQ ID NO: 95622 - DNA, 15 bp, Homo sapiens
atgaggcataggcta

SEQ ID NO: 95623 - DNA, 15 bp, Homo sapiens
tatgaggcataggct

SEQ ID NO: 95624 - DNA, 15 bp, Homo sapiens
gtatgaggcataggc

SEQ ID NO: 95625 - DNA, 15 bp, Homo sapiens
tgtatgaggcatagg

SEQ ID NO: 95626 - DNA, 15 bp, Homo sapiens
atgtatgaggcatag

SEQ ID NO: 95627 - DNA, 15 bp, Homo sapiens
tatgtatgaggcata

SEQ ID NO: 95628 - DNA, 15 bp, Homo sapiens
ttatgtatgaggcat

SEQ ID NO: 95629 - DNA, 15 bp, Homo sapiens
tttatgtatgaggca

SEQ ID NO: 95630 - DNA, 15 bp, Homo sapiens
atttatgtatgaggc

SEQ ID NO: 95631 - DNA, 15 bp, Homo sapiens
tatttatgtatgagg

SEQ ID NO: 95632 - DNA, 15 bp, Homo sapiens
ctatttatgtatgag

SEQ ID NO: 95633 - DNA, 15 bp, Homo sapiens
cctatttatgtatga

SEQ ID NO: 95634 - DNA, 15 bp, Homo sapiens
acctatttatgtatg

SEQ ID NO: 95635 - DNA, 15 bp, Homo sapiens
cacctatttatgtat

SEQ ID NO: 95636 - DNA, 15 bp, Homo sapiens
ccacctatttatgta

SEQ ID NO: 95637 - DNA, 15 bp, Homo sapiens
tccacctatttatgt

SEQ ID NO: 95638 - DNA, 15 bp, Homo sapiens
atccacctatttatg

SEQ ID NO: 95639 - DNA, 15 bp, Homo sapiens
aatccacctatttat

SEQ ID NO: 95640 - DNA, 15 bp, Homo sapiens
caatccacctattta

SEQ ID NO: 95641 - DNA, 15 bp, Homo sapiens
acaatccacctattt

SEQ ID NO: 95642 - DNA, 15 bp, Homo sapiens
cacaatccacctatt

SEQ ID NO: 95643 - DNA, 15 bp, Homo sapiens
ccacaatccacctat

SEQ ID NO: 95644 - DNA, 15 bp, Homo sapiens
accacaatccaccta

SEQ ID NO: 95645 - DNA, 15 bp, Homo sapiens
gaccacaatccacct

SEQ ID NO: 95646 - DNA, 15 bp, Homo sapiens
ggaccacaatccacc

SEQ ID NO: 95647 - DNA, 15 bp, Homo sapiens
tggaccacaatccac

SEQ ID NO: 95648 - DNA, 15 bp, Homo sapiens
gtggaccacaatcca

SEQ ID NO: 95649 - DNA, 15 bp, Homo sapiens
agtggaccacaatcc

SEQ ID NO: 95650 - DNA, 15 bp, Homo sapiens
gagtggaccacaatc

SEQ ID NO: 95651 - DNA, 15 bp, Homo sapiens
tgagtggaccacaat

SEQ ID NO: 95652 - DNA, 15 bp, Homo sapiens
ctgagtggaccacaa

SEQ ID NO: 95653 - DNA, 15 bp, Homo sapiens
tctgagtggaccaca

SEQ ID NO: 95654 - DNA, 15 bp, Homo sapiens
ctctgagtggaccac

SEQ ID NO: 95655 - DNA, 15 bp, Homo sapiens
cctctgagtggacca

SEQ ID NO: 95656 - DNA, 15 bp, Homo sapiens
ccctctgagtggacc

SEQ ID NO: 95657 - DNA, 15 bp, Homo sapiens
cccctctgagtggac

SEQ ID NO: 95658 - DNA, 15 bp, Homo sapiens
tcccctctgagtgga

SEQ ID NO: 95659 - DNA, 15 bp, Homo sapiens
gtcccctctgagtgg

SEQ ID NO: 95660 - DNA, 15 bp, Homo sapiens
tgtcccctctgagtg

SEQ ID NO: 95661 - DNA, 15 bp, Homo sapiens
gtgtcccctctgagt

SEQ ID NO: 95662 - DNA, 15 bp, Homo sapiens
tgtgtcccctctgag

SEQ ID NO: 95663 - DNA, 15 bp, Homo sapiens
ctgtgtcccctctga

SEQ ID NO: 95664 - DNA, 15 bp, Homo sapiens
cctgtgtcccctctg

SEQ ID NO: 95665 - DNA, 15 bp, Homo sapiens
tcctgtgtcccctct

SEQ ID NO: 95666 - DNA, 15 bp, Homo sapiens
ctcctgtgtcccctc

SEQ ID NO: 95667 - DNA, 15 bp, Homo sapiens
actcctgtgtcccct

SEQ ID NO: 95668 - DNA, 15 bp, Homo sapiens
cactcctgtgtcccc

SEQ ID NO: 95669 - DNA, 15 bp, Homo sapiens
tcactcctgtgtccc

SEQ ID NO: 95670 - DNA, 15 bp, Homo sapiens
atcactcctgtgtcc

SEQ ID NO: 95671 - DNA, 15 bp, Homo sapiens
catcactcctgtgtc

SEQ ID NO: 95672 - DNA, 15 bp, Homo sapiens
acatcactcctgtgt

SEQ ID NO: 95673 - DNA, 15 bp, Homo sapiens
tacatcactcctgtg

SEQ ID NO: 95674 - DNA, 15 bp, Homo sapiens
ctacatcactcctgt

SEQ ID NO: 95675 - DNA, 15 bp, Homo sapiens
actacatcactcctg

SEQ ID NO: 95676 - DNA, 15 bp, Homo sapiens
gactacatcactcct

SEQ ID NO: 95677 - DNA, 15 bp, Homo sapiens
agactacatcactcc

SEQ ID NO: 95678 - DNA, 15 bp, Homo sapiens
cagactacatcactc

SEQ ID NO: 95679 - DNA, 15 bp, Homo sapiens
acagactacatcact

SEQ ID NO: 95680 - DNA, 15 bp, Homo sapiens
tacagactacatcac

SEQ ID NO: 95681 - DNA, 15 bp, Homo sapiens
gtacagactacatca

SEQ ID NO: 95682 - DNA, 15 bp, Homo sapiens
ggtacagactacatc

SEQ ID NO: 95683 - DNA, 15 bp, Homo sapiens
gggtacagactacat

SEQ ID NO: 95684 - DNA, 15 bp, Homo sapiens
ggggtacagactaca

SEQ ID NO: 95685 - DNA, 15 bp, Homo sapiens
aggggtacagactac

SEQ ID NO: 95686 - DNA, 15 bp, Homo sapiens
gaggggtacagacta

SEQ ID NO: 95687 - DNA, 15 bp, Homo sapiens
tgaggggtacagact

SEQ ID NO: 95688 - DNA, 15 bp, Homo sapiens
ttgaggggtacagac

SEQ ID NO: 95689 - DNA, 15 bp, Homo sapiens
gttgaggggtacaga

SEQ ID NO: 95690 - DNA, 15 bp, Homo sapiens
tgttgaggggtacag

SEQ ID NO: 95691 - DNA, 15 bp, Homo sapiens
gtgttgaggggtaca

SEQ ID NO: 95692 - DNA, 15 bp, Homo sapiens
ggtgttgaggggtac

SEQ ID NO: 95693 - DNA, 15 bp, Homo sapiens
gggtgttgaggggta

SEQ ID NO: 95694 - DNA, 15 bp, Homo sapiens
ggggtgttgaggggt

SEQ ID NO: 95695 - DNA, 15 bp, Homo sapiens
tggggtgttgagggg

SEQ ID NO: 95696 - DNA, 15 bp, Homo sapiens
ctggggtgttgaggg

SEQ ID NO: 95697 - DNA, 15 bp, Homo sapiens
tctggggtgttgagg

SEQ ID NO: 95698 - DNA, 15 bp, Homo sapiens
atctggggtgttgag

SEQ ID NO: 95699 - DNA, 15 bp, Homo sapiens
catctggggtgttga

SEQ ID NO: 95700 - DNA, 15 bp, Homo sapiens
ccatctggggtgttg

SEQ ID NO: 95701 - DNA, 15 bp, Homo sapiens
tccatctggggtgtt

SEQ ID NO: 95702 - DNA, 15 bp, Homo sapiens
ttccatctggggtgt

SEQ ID NO: 95703 - DNA, 15 bp, Homo sapiens
tttccatctggggtg

SEQ ID NO: 95704 - DNA, 15 bp, Homo sapiens
atttccatctggggt

SEQ ID NO: 95705 - DNA, 15 bp, Homo sapiens
gatttccatctgggg

SEQ ID NO: 95706 - DNA, 15 bp, Homo sapiens
agatttccatctggg

SEQ ID NO: 95707 - DNA, 15 bp, Homo sapiens
aagatttccatctgg

SEQ ID NO: 95708 - DNA, 15 bp, Homo sapiens
aaagatttccatctg

SEQ ID NO: 95709 - DNA, 15 bp, Homo sapiens
aaaagatttccatct

SEQ ID NO: 95710 - DNA, 15 bp, Homo sapiens
caaaagatttccatc

SEQ ID NO: 95711 - DNA, 15 bp, Homo sapiens
gcaaaagatttccat

SEQ ID NO: 95712 - DNA, 15 bp, Homo sapiens
ggcaaaagatttcca

SEQ ID NO: 95713 - DNA, 15 bp, Homo sapiens
aggcaaaagatttcc

SEQ ID NO: 95714 - DNA, 15 bp, Homo sapiens
caggcaaaagatttc

SEQ ID NO: 95715 - DNA, 15 bp, Homo sapiens
ccaggcaaaagattt

SEQ ID NO: 95716 - DNA, 15 bp, Homo sapiens
tccaggcaaaagatt

SEQ ID NO: 95717 - DNA, 15 bp, Homo sapiens
ctccaggcaaaagat

SEQ ID NO: 95718 - DNA, 15 bp, Homo sapiens
cctccaggcaaaaga

SEQ ID NO: 95719 - DNA, 15 bp, Homo sapiens
gcctccaggcaaaag

SEQ ID NO: 95720 - DNA, 15 bp, Homo sapiens
agcctccaggcaaaa

SEQ ID NO: 95721 - DNA, 15 bp, Homo sapiens
aagcctccaggcaaa

SEQ ID NO: 95722 - DNA, 15 bp, Homo sapiens
taagcctccaggcaa

SEQ ID NO: 95723 - DNA, 15 bp, Homo sapiens
ttaagcctccaggca

SEQ ID NO: 95724 - DNA, 15 bp, Homo sapiens
attaagcctccaggc

SEQ ID NO: 95725 - DNA, 15 bp, Homo sapiens
aattaagcctccagg

SEQ ID NO: 95726 - DNA, 15 bp, Homo sapiens
aaattaagcctccag

SEQ ID NO: 95727 - DNA, 15 bp, Homo sapiens
gaaattaagcctcca

SEQ ID NO: 95728 - DNA, 15 bp, Homo sapiens
cgaaattaagcctcc

SEQ ID NO: 95729 - DNA, 15 bp, Homo sapiens
acgaaattaagcctc

SEQ ID NO: 95730 - DNA, 15 bp, Homo sapiens
cacgaaattaagcct

SEQ ID NO: 95731 - DNA, 15 bp, Homo sapiens
tcacgaaattaagcc

SEQ ID NO: 95732 - DNA, 15 bp, Homo sapiens
ttcacgaaattaagc

SEQ ID NO: 95733 - DNA, 15 bp, Homo sapiens
cttcacgaaattaag

SEQ ID NO: 95734 - DNA, 15 bp, Homo sapiens
tcttcacgaaattaa

SEQ ID NO: 95735 - DNA, 15 bp, Homo sapiens
ttcttcacgaaatta

SEQ ID NO: 95736 - DNA, 15 bp, Homo sapiens
cttcttcacgaaatt

SEQ ID NO: 95737 - DNA, 15 bp, Homo sapiens
acttcttcacgaaat

SEQ ID NO: 95738 - DNA, 15 bp, Homo sapiens
gacttcttcacgaaa

SEQ ID NO: 95739 - DNA, 15 bp, Homo sapiens
tgacttcttcacgaa

SEQ ID NO: 95740 - DNA, 15 bp, Homo sapiens
ctgacttcttcacga

SEQ ID NO: 95741 - DNA, 15 bp, Homo sapiens
cctgacttcttcacg

SEQ ID NO: 95742 - DNA, 15 bp, Homo sapiens
ccctgacttcttcac

SEQ ID NO: 95743 - DNA, 15 bp, Homo sapiens
accctgacttcttca

SEQ ID NO: 95744 - DNA, 15 bp, Homo sapiens
taccctgacttcttc

SEQ ID NO: 95745 - DNA, 15 bp, Homo sapiens
ctaccctgacttctt

SEQ ID NO: 95746 - DNA, 15 bp, Homo sapiens
cctaccctgacttct

SEQ ID NO: 95747 - DNA, 15 bp, Homo sapiens
tcctaccctgacttc

SEQ ID NO: 95748 - DNA, 15 bp, Homo sapiens
ctcctaccctgactt

SEQ ID NO: 95749 - DNA, 15 bp, Homo sapiens
gctcctaccctgact

SEQ ID NO: 95750 - DNA, 15 bp, Homo sapiens
tgctcctaccctgac

SEQ ID NO: 95751 - DNA, 15 bp, Homo sapiens
gtgctcctaccctga

SEQ ID NO: 95752 - DNA, 15 bp, Homo sapiens
agtgctcctaccctg

SEQ ID NO: 95753 - DNA, 15 bp, Homo sapiens
cagtgctcctaccct

SEQ ID NO: 95754 - DNA, 15 bp, Homo sapiens
ccagtgctcctaccc

SEQ ID NO: 95755 - DNA, 15 bp, Homo sapiens
cccagtgctcctacc

SEQ ID NO: 95756 - DNA, 15 bp, Homo sapiens
acccagtgctcctac

SEQ ID NO: 95757 - DNA, 15 bp, Homo sapiens
aacccagtgctccta

SEQ ID NO: 95758 - DNA, 15 bp, Homo sapiens
gaacccagtgctcct

SEQ ID NO: 95759 - DNA, 15 bp, Homo sapiens
agaacccagtgctcc

SEQ ID NO: 95760 - DNA, 15 bp, Homo sapiens
gagaacccagtgctc

SEQ ID NO: 95761 - DNA, 15 bp, Homo sapiens
agagaacccagtgct

SEQ ID NO: 95762 - DNA, 15 bp, Homo sapiens
aagagaacccagtgc

SEQ ID NO: 95763 - DNA, 15 bp, Homo sapiens
gaagagaacccagtg

SEQ ID NO: 95764 - DNA, 15 bp, Homo sapiens
tgaagagaacccagt

SEQ ID NO: 95765 - DNA, 15 bp, Homo sapiens
ctgaagagaacccag

SEQ ID NO: 95766 - DNA, 15 bp, Homo sapiens
gctgaagagaaccca

SEQ ID NO: 95767 - DNA, 15 bp, Homo sapiens
agctgaagagaaccc

SEQ ID NO: 95768 - DNA, 15 bp, Homo sapiens
tagctgaagagaacc

SEQ ID NO: 95769 - DNA, 15 bp, Homo sapiens
ctagctgaagagaac

SEQ ID NO: 95770 - DNA, 15 bp, Homo sapiens
actagctgaagagaa

SEQ ID NO: 95771 - DNA, 15 bp, Homo sapiens
cactagctgaagaga

SEQ ID NO: 95772 - DNA, 15 bp, Homo sapiens
tcactagctgaagag

SEQ ID NO: 95773 - DNA, 15 bp, Homo sapiens
atcactagctgaaga

SEQ ID NO: 95774 - DNA, 15 bp, Homo sapiens
tatcactagctgaag

SEQ ID NO: 95775 - DNA, 15 bp, Homo sapiens
atatcactagctgaa

SEQ ID NO: 95776 - DNA, 15 bp, Homo sapiens
gatatcactagctga

SEQ ID NO: 95777 - DNA, 15 bp, Homo sapiens
tgatatcactagctg

SEQ ID NO: 95778 - DNA, 15 bp, Homo sapiens
atgatatcactagct

SEQ ID NO: 95779 - DNA, 15 bp, Homo sapiens
catgatatcactagc

SEQ ID NO: 95780 - DNA, 15 bp, Homo sapiens
tcatgatatcactag

SEQ ID NO: 95781 - DNA, 15 bp, Homo sapiens
ttcatgatatcacta

SEQ ID NO: 95782 - DNA, 15 bp, Homo sapiens
gttcatgatatcact

SEQ ID NO: 95783 - DNA, 15 bp, Homo sapiens
tgttcatgatatcac

SEQ ID NO: 95784 - DNA, 15 bp, Homo sapiens
ttgttcatgatatca

SEQ ID NO: 95785 - DNA, 15 bp, Homo sapiens
attgttcatgatatc

SEQ ID NO: 95786 - DNA, 15 bp, Homo sapiens
tattgttcatgatat

SEQ ID NO: 95787 - DNA, 15 bp, Homo sapiens
ttattgttcatgata

SEQ ID NO: 95788 - DNA, 15 bp, Homo sapiens
cttattgttcatgat

SEQ ID NO: 95789 - DNA, 15 bp, Homo sapiens
tcttattgttcatga

SEQ ID NO: 95790 - DNA, 15 bp, Homo sapiens
ttcttattgttcatg

SEQ ID NO: 95791 - DNA, 15 bp, Homo sapiens
cttcttattgttcat

SEQ ID NO: 95792 - DNA, 15 bp, Homo sapiens
tcttcttattgttca

SEQ ID NO: 95793 - DNA, 15 bp, Homo sapiens
ttcttcttattgttc

SEQ ID NO: 95794 - DNA, 15 bp, Homo sapiens
attcttcttattgtt

SEQ ID NO: 95795 - DNA, 15 bp, Homo sapiens
aattcttcttattgt

SEQ ID NO: 95796 - DNA, 15 bp, Homo sapiens
caattcttcttattg

SEQ ID NO: 95797 - DNA, 15 bp, Homo sapiens
acaattcttcttatt

SEQ ID NO: 95798 - DNA, 15 bp, Homo sapiens
cacaattcttcttat

SEQ ID NO: 95799 - DNA, 15 bp, Homo sapiens
acacaattcttctta

SEQ ID NO: 95800 - DNA, 15 bp, Homo sapiens
cacacaattcttctt

SEQ ID NO: 95801 - DNA, 15 bp, Homo sapiens
acacacaattcttct

SEQ ID NO: 95802 - DNA, 15 bp, Homo sapiens
tacacacaattcttc

SEQ ID NO: 95803 - DNA, 15 bp, Homo sapiens
atacacacaattctt

SEQ ID NO: 95804 - DNA, 15 bp, Homo sapiens
catacacacaattct

SEQ ID NO: 95805 - DNA, 15 bp, Homo sapiens
acatacacacaattc

SEQ ID NO: 95806 - DNA, 15 bp, Homo sapiens
tacatacacacaatt

SEQ ID NO: 95807 - DNA, 15 bp, Homo sapiens
ctacatacacacaat

SEQ ID NO: 95808 - DNA, 15 bp, Homo sapiens
gctacatacacacaa

SEQ ID NO: 95809 - DNA, 15 bp, Homo sapiens
tgctacatacacaca

SEQ ID NO: 95810 - DNA, 15 bp, Homo sapiens
ttgctacatacacac

SEQ ID NO: 95811 - DNA, 15 bp, Homo sapiens
cttgctacatacaca

SEQ ID NO: 95812 - DNA, 15 bp, Homo sapiens
acttgctacatacac

SEQ ID NO: 95813 - DNA, 15 bp, Homo sapiens
tacttgctacataca

SEQ ID NO: 95814 - DNA, 15 bp, Homo sapiens
ctacttgctacatac

SEQ ID NO: 95815 - DNA, 15 bp, Homo sapiens
cctacttgctacata

SEQ ID NO: 95816 - DNA, 15 bp, Homo sapiens
tcctacttgctacat

SEQ ID NO: 95817 - DNA, 15 bp, Homo sapiens
ctcctacttgctaca

SEQ ID NO: 95818 - DNA, 15 bp, Homo sapiens
tctcctacttgctac

SEQ ID NO: 95819 - DNA, 15 bp, Homo sapiens
ttctcctacttgcta

SEQ ID NO: 95820 - DNA, 15 bp, Homo sapiens
tttctcctacttgct

SEQ ID NO: 95821 - DNA, 15 bp, Homo sapiens
ttttctcctacttgc

SEQ ID NO: 95822 - DNA, 15 bp, Homo sapiens
attttctcctacttg

SEQ ID NO: 95823 - DNA, 15 bp, Homo sapiens
tattttctcctactt

SEQ ID NO: 95824 - DNA, 15 bp, Homo sapiens
atattttctcctact

SEQ ID NO: 95825 - DNA, 15 bp, Homo sapiens
aatattttctcctac

SEQ ID NO: 95826 - DNA, 15 bp, Homo sapiens
caatattttctccta

SEQ ID NO: 95827 - DNA, 15 bp, Homo sapiens
ccaatattttctcct

SEQ ID NO: 95828 - DNA, 15 bp, Homo sapiens
gccaatattttctcc

SEQ ID NO: 95829 - DNA, 15 bp, Homo sapiens
ggccaatattttctc

SEQ ID NO: 95830 - DNA, 15 bp, Homo sapiens
tggccaatattttct

SEQ ID NO: 95831 - DNA, 15 bp, Homo sapiens
ttggccaatattttc

SEQ ID NO: 95832 - DNA, 15 bp, Homo sapiens
cttggccaatatttt

SEQ ID NO: 95833 - DNA, 15 bp, Homo sapiens
acttggccaatattt

SEQ ID NO: 95834 - DNA, 15 bp, Homo sapiens
aacttggccaatatt

SEQ ID NO: 95835 - DNA, 15 bp, Homo sapiens
aaacttggccaatat

SEQ ID NO: 95836 - DNA, 15 bp, Homo sapiens
taaacttggccaata

SEQ ID NO: 95837 - DNA, 15 bp, Homo sapiens
ataaacttggccaat

SEQ ID NO: 95838 - DNA, 15 bp, Homo sapiens
aataaacttggccaa

SEQ ID NO: 95839 - DNA, 15 bp, Homo sapiens
gaataaacttggcca

SEQ ID NO: 95840 - DNA, 15 bp, Homo sapiens
tgaataaacttggcc

SEQ ID NO: 95841 - DNA, 15 bp, Homo sapiens
atgaataaacttggc

SEQ ID NO: 95842 - DNA, 15 bp, Homo sapiens
aatgaataaacttgg

SEQ ID NO: 95843 - DNA, 15 bp, Homo sapiens
gaatgaataaacttg

SEQ ID NO: 95844 - DNA, 15 bp, Homo sapiens
tgaatgaataaactt

SEQ ID NO: 95845 - DNA, 15 bp, Homo sapiens
ttgaatgaataaact

SEQ ID NO: 95846 - DNA, 15 bp, Homo sapiens
gttgaatgaataaac

SEQ ID NO: 95847 - DNA, 15 bp, Homo sapiens
tgttgaatgaataaa

SEQ ID NO: 95848 - DNA, 15 bp, Homo sapiens
ttgttgaatgaataa

SEQ ID NO: 95849 - DNA, 15 bp, Homo sapiens
tttgttgaatgaata

SEQ ID NO: 95850 - DNA, 15 bp, Homo sapiens
atttgttgaatgaat

SEQ ID NO: 95851 - DNA, 15 bp, Homo sapiens
tatttgttgaatgaa

SEQ ID NO: 95852 - DNA, 15 bp, Homo sapiens
gtatttgttgaatga

SEQ ID NO: 95853 - DNA, 15 bp, Homo sapiens
agtatttgttgaatg

SEQ ID NO: 95854 - DNA, 15 bp, Homo sapiens
aagtatttgttgaat

SEQ ID NO: 95855 - DNA, 15 bp, Homo sapiens
taagtatttgttgaa

SEQ ID NO: 95856 - DNA, 15 bp, Homo sapiens
ctaagtatttgttga

SEQ ID NO: 95857 - DNA, 15 bp, Homo sapiens
tctaagtatttgttg

SEQ ID NO: 95858 - DNA, 15 bp, Homo sapiens
ctctaagtatttgtt

SEQ ID NO: 95859 - DNA, 15 bp, Homo sapiens
actctaagtatttgt

SEQ ID NO: 95860 - DNA, 15 bp, Homo sapiens
gactctaagtatttg

SEQ ID NO: 95861 - DNA, 15 bp, Homo sapiens
agactctaagtattt

SEQ ID NO: 95862 - DNA, 15 bp, Homo sapiens
tagactctaagtatt

SEQ ID NO: 95863 - DNA, 15 bp, Homo sapiens
gtagactctaagtat

SEQ ID NO: 95864 - DNA, 15 bp, Homo sapiens
agtagactctaagta

SEQ ID NO: 95865 - DNA, 15 bp, Homo sapiens
tagtagactctaagt

SEQ ID NO: 95866 - DNA, 15 bp, Homo sapiens
ttagtagactctaag

SEQ ID NO: 95867 - DNA, 15 bp, Homo sapiens
gttagtagactctaa

SEQ ID NO: 95868 - DNA, 15 bp, Homo sapiens
agttagtagactcta

SEQ ID NO: 95869 - DNA, 15 bp, Homo sapiens
gagttagtagactct

SEQ ID NO: 95870 - DNA, 15 bp, Homo sapiens
agagttagtagactc

SEQ ID NO: 95871 - DNA, 15 bp, Homo sapiens
cagagttagtagact

SEQ ID NO: 95872 - DNA, 15 bp, Homo sapiens
acagagttagtagac

SEQ ID NO: 95873 - DNA, 15 bp, Homo sapiens
cacagagttagtaga

SEQ ID NO: 95874 - DNA, 15 bp, Homo sapiens
acacagagttagtag

SEQ ID NO: 95875 - DNA, 15 bp, Homo sapiens
cacacagagttagta

SEQ ID NO: 95876 - DNA, 15 bp, Homo sapiens
ccacacagagttagt

SEQ ID NO: 95877 - DNA, 15 bp, Homo sapiens
cccacacagagttag

SEQ ID NO: 95878 - DNA, 15 bp, Homo sapiens
ccccacacagagtta

SEQ ID NO: 95879 - DNA, 15 bp, Homo sapiens
gccccacacagagtt

SEQ ID NO: 95880 - DNA, 15 bp, Homo sapiens
ggccccacacagagt

SEQ ID NO: 95881 - DNA, 15 bp, Homo sapiens
gggccccacacagag

SEQ ID NO: 95882 - DNA, 15 bp, Homo sapiens
agggccccacacaga

SEQ ID NO: 95883 - DNA, 15 bp, Homo sapiens
cagggccccacacag

SEQ ID NO: 95884 - DNA, 15 bp, Homo sapiens
acagggccccacaca

SEQ ID NO: 95885 - DNA, 15 bp, Homo sapiens
aacagggccccacac

SEQ ID NO: 95886 - DNA, 15 bp, Homo sapiens
gaacagggccccaca

SEQ ID NO: 95887 - DNA, 15 bp, Homo sapiens
agaacagggccccac

SEQ ID NO: 95888 - DNA, 15 bp, Homo sapiens
tagaacagggcccca

SEQ ID NO: 95889 - DNA, 15 bp, Homo sapiens
ttagaacagggcccc

SEQ ID NO: 95890 - DNA, 15 bp, Homo sapiens
cttagaacagggccc

SEQ ID NO: 95891 - DNA, 15 bp, Homo sapiens
acttagaacagggcc

SEQ ID NO: 95892 - DNA, 15 bp, Homo sapiens
cacttagaacagggc

SEQ ID NO: 95893 - DNA, 15 bp, Homo sapiens
gcacttagaacaggg

SEQ ID NO: 95894 - DNA, 15 bp, Homo sapiens
agcacttagaacagg

SEQ ID NO: 95895 - DNA, 15 bp, Homo sapiens
aagcacttagaacag

SEQ ID NO: 95896 - DNA, 15 bp, Homo sapiens
caagcacttagaaca

SEQ ID NO: 95897 - DNA, 15 bp, Homo sapiens
ccaagcacttagaac

SEQ ID NO: 95898 - DNA, 15 bp, Homo sapiens
tccaagcacttagaa

SEQ ID NO: 95899 - DNA, 15 bp, Homo sapiens
atccaagcacttaga

SEQ ID NO: 95900 - DNA, 15 bp, Homo sapiens
catccaagcacttag

SEQ ID NO: 95901 - DNA, 15 bp, Homo sapiens
acatccaagcactta

SEQ ID NO: 95902 - DNA, 15 bp, Homo sapiens
tacatccaagcactt

SEQ ID NO: 95903 - DNA, 15 bp, Homo sapiens
atacatccaagcact

SEQ ID NO: 95904 - DNA, 15 bp, Homo sapiens
gatacatccaagcac

SEQ ID NO: 95905 - DNA, 15 bp, Homo sapiens
tgatacatccaagca

SEQ ID NO: 95906 - DNA, 15 bp, Homo sapiens
ctgatacatccaagc

SEQ ID NO: 95907 - DNA, 15 bp, Homo sapiens
tctgatacatccaag

SEQ ID NO: 95908 - DNA, 15 bp, Homo sapiens
ctctgatacatccaa

SEQ ID NO: 95909 - DNA, 15 bp, Homo sapiens
tctctgatacatcca

SEQ ID NO: 95910 - DNA, 15 bp, Homo sapiens
ttctctgatacatcc

SEQ ID NO: 95911 - DNA, 15 bp, Homo sapiens
gttctctgatacatc

SEQ ID NO: 95912 - DNA, 15 bp, Homo sapiens
tgttctctgatacat

SEQ ID NO: 95913 - DNA, 15 bp, Homo sapiens
gtgttctctgataca

SEQ ID NO: 95914 - DNA, 15 bp, Homo sapiens
tgtgttctctgatac

SEQ ID NO: 95915 - DNA, 15 bp, Homo sapiens
ttgtgttctctgata

SEQ ID NO: 95916 - DNA, 15 bp, Homo sapiens
gttgtgttctctgat

SEQ ID NO: 95917 - DNA, 15 bp, Homo sapiens
tgttgtgttctctga

SEQ ID NO: 95918 - DNA, 15 bp, Homo sapiens
ctgttgtgttctctg

SEQ ID NO: 95919 - DNA, 15 bp, Homo sapiens
tctgttgtgttctct

SEQ ID NO: 95920 - DNA, 15 bp, Homo sapiens
ctctgttgtgttctc

SEQ ID NO: 95921 - DNA, 15 bp, Homo sapiens
tctctgttgtgttct

SEQ ID NO: 95922 - DNA, 15 bp, Homo sapiens
atctctgttgtgttc

SEQ ID NO: 95923 - DNA, 15 bp, Homo sapiens
gatctctgttgtgtt

SEQ ID NO: 95924 - DNA, 15 bp, Homo sapiens
ggatctctgttgtgt

SEQ ID NO: 95925 - DNA, 15 bp, Homo sapiens
gggatctctgttgtg

SEQ ID NO: 95926 - DNA, 15 bp, Homo sapiens
agggatctctgttgt

SEQ ID NO: 95927 - DNA, 15 bp, Homo sapiens
tagggatctctgttg

SEQ ID NO: 95928 - DNA, 15 bp, Homo sapiens
gtagggatctctgtt

SEQ ID NO: 95929 - DNA, 15 bp, Homo sapiens
agtagggatctctgt

SEQ ID NO: 95930 - DNA, 15 bp, Homo sapiens
gagtagggatctctg

SEQ ID NO: 95931 - DNA, 15 bp, Homo sapiens
agagtagggatctct

SEQ ID NO: 95932 - DNA, 15 bp, Homo sapiens
aagagtagggatctc

SEQ ID NO: 95933 - DNA, 15 bp, Homo sapiens
taagagtagggatct

SEQ ID NO: 95934 - DNA, 15 bp, Homo sapiens
ataagagtagggatc

SEQ ID NO: 95935 - DNA, 15 bp, Homo sapiens
cataagagtagggat

SEQ ID NO: 95936 - DNA, 15 bp, Homo sapiens
ccataagagtaggga

SEQ ID NO: 95937 - DNA, 15 bp, Homo sapiens
tccataagagtaggg

SEQ ID NO: 95938 - DNA, 15 bp, Homo sapiens
gtccataagagtagg

SEQ ID NO: 95939 - DNA, 15 bp, Homo sapiens
ggtccataagagtag

SEQ ID NO: 95940 - DNA, 15 bp, Homo sapiens
aggtccataagagta

SEQ ID NO: 95941 - DNA, 15 bp, Homo sapiens
caggtccataagagt

SEQ ID NO: 95942 - DNA, 15 bp, Homo sapiens
tcaggtccataagag

SEQ ID NO: 95943 - DNA, 15 bp, Homo sapiens
atcaggtccataaga

SEQ ID NO: 95944 - DNA, 15 bp, Homo sapiens
catcaggtccataag

SEQ ID NO: 95945 - DNA, 15 bp, Homo sapiens
acatcaggtccataa

SEQ ID NO: 95946 - DNA, 15 bp, Homo sapiens
aacatcaggtccata

SEQ ID NO: 95947 - DNA, 15 bp, Homo sapiens
gaacatcaggtccat

SEQ ID NO: 95948 - DNA, 15 bp, Homo sapiens
tgaacatcaggtcca

SEQ ID NO: 95949 - DNA, 15 bp, Homo sapiens
ctgaacatcaggtcc

SEQ ID NO: 95950 - DNA, 15 bp, Homo sapiens
cctgaacatcaggtc

SEQ ID NO: 95951 - DNA, 15 bp, Homo sapiens
tcctgaacatcaggt

SEQ ID NO: 95952 - DNA, 15 bp, Homo sapiens
ctcctgaacatcagg

SEQ ID NO: 95953 - DNA, 15 bp, Homo sapiens
cctcctgaacatcag

SEQ ID NO: 95954 - DNA, 15 bp, Homo sapiens
ccctcctgaacatca

SEQ ID NO: 95955 - DNA, 15 bp, Homo sapiens
tccctcctgaacatc

SEQ ID NO: 95956 - DNA, 15 bp, Homo sapiens
ctccctcctgaacat

SEQ ID NO: 95957 - DNA, 15 bp, Homo sapiens
cctccctcctgaaca

SEQ ID NO: 95958 - DNA, 15 bp, Homo sapiens
ccctccctcctgaac

SEQ ID NO: 95959 - DNA, 15 bp, Homo sapiens
cccctccctcctgaa

SEQ ID NO: 95960 - DNA, 15 bp, Homo sapiens
ccccctccctcctga

SEQ ID NO: 95961 - DNA, 15 bp, Homo sapiens
tccccctccctcctg

SEQ ID NO: 95962 - DNA, 15 bp, Homo sapiens
atccccctccctcct

SEQ ID NO: 95963 - DNA, 15 bp, Homo sapiens
tatccccctccctcc

SEQ ID NO: 95964 - DNA, 15 bp, Homo sapiens
atatccccctccctc

SEQ ID NO: 95965 - DNA, 15 bp, Homo sapiens
catatccccctccct

SEQ ID NO: 95966 - DNA, 15 bp, Homo sapiens
tcatatccccctccc

SEQ ID NO: 95967 - DNA, 15 bp, Homo sapiens
ttcatatccccctcc

SEQ ID NO: 95968 - DNA, 15 bp, Homo sapiens
gttcatatccccctc

SEQ ID NO: 95969 - DNA, 15 bp, Homo sapiens
ggttcatatccccct

SEQ ID NO: 95970 - DNA, 15 bp, Homo sapiens
tggttcatatccccc

SEQ ID NO: 95971 - DNA, 15 bp, Homo sapiens
atggttcatatcccc

SEQ ID NO: 95972 - DNA, 15 bp, Homo sapiens
tatggttcatatccc

SEQ ID NO: 95973 - DNA, 15 bp, Homo sapiens
ttatggttcatatcc

SEQ ID NO: 95974 - DNA, 15 bp, Homo sapiens
tttatggttcatatc

SEQ ID NO: 95975 - DNA, 15 bp, Homo sapiens
gtttatggttcatat

SEQ ID NO: 95976 - DNA, 15 bp, Homo sapiens
cgtttatggttcata

SEQ ID NO: 95977 - DNA, 15 bp, Homo sapiens
tcgtttatggttcat

SEQ ID NO: 95978 - DNA, 15 bp, Homo sapiens
gtcgtttatggttca

SEQ ID NO: 95979 - DNA, 15 bp, Homo sapiens
tgtcgtttatggttc

SEQ ID NO: 95980 - DNA, 15 bp, Homo sapiens
ttgtcgtttatggtt

SEQ ID NO: 95981 - DNA, 15 bp, Homo sapiens
tttgtcgtttatggt

SEQ ID NO: 95982 - DNA, 15 bp, Homo sapiens
atttgtcgtttatgg

SEQ ID NO: 95983 - DNA, 15 bp, Homo sapiens
tatttgtcgtttatg

SEQ ID NO: 95984 - DNA, 15 bp, Homo sapiens
gtatttgtcgtttat

SEQ ID NO: 95985 - DNA, 15 bp, Homo sapiens
tgtatttgtcgttta

SEQ ID NO: 95986 - DNA, 15 bp, Homo sapiens
ttgtatttgtcgttt

SEQ ID NO: 95987 - DNA, 15 bp, Homo sapiens
tttgtatttgtcgtt

SEQ ID NO: 95988 - DNA, 15 bp, Homo sapiens
atttgtatttgtcgt

SEQ ID NO: 95989 - DNA, 15 bp, Homo sapiens
aatttgtatttgtcg

SEQ ID NO: 95990 - DNA, 15 bp, Homo sapiens
taatttgtatttgtc

SEQ ID NO: 95991 - DNA, 15 bp, Homo sapiens
ttaatttgtatttgt

SEQ ID NO: 95992 - DNA, 15 bp, Homo sapiens
attaatttgtatttg

SEQ ID NO: 95993 - DNA, 15 bp, Homo sapiens
aattaatttgtattt

SEQ ID NO: 95994 - DNA, 15 bp, Homo sapiens
taattaatttgtatt

SEQ ID NO: 95995 - DNA, 15 bp, Homo sapiens
gtaattaatttgtat

SEQ ID NO: 95996 - DNA, 15 bp, Homo sapiens
agtaattaatttgta

SEQ ID NO: 95997 - DNA, 15 bp, Homo sapiens
cagtaattaatttgt

SEQ ID NO: 95998 - DNA, 15 bp, Homo sapiens
tcagtaattaatttg

SEQ ID NO: 95999 - DNA, 15 bp, Homo sapiens
atcagtaattaattt

SEQ ID NO: 96000 - DNA, 15 bp, Homo sapiens
aatcagtaattaatt

SEQ ID NO: 96001 - DNA, 15 bp, Homo sapiens
taatcagtaattaat

SEQ ID NO: 96002 - DNA, 15 bp, Homo sapiens
ttaatcagtaattaa

SEQ ID NO: 96003 - DNA, 15 bp, Homo sapiens
tttaatcagtaatta

SEQ ID NO: 96004 - DNA, 15 bp, Homo sapiens
atttaatcagtaatt

SEQ ID NO: 96005 - DNA, 15 bp, Homo sapiens
aatttaatcagtaat

SEQ ID NO: 96006 - DNA, 15 bp, Homo sapiens
taatttaatcagtaa

SEQ ID NO: 96007 - DNA, 15 bp, Homo sapiens
ataatttaatcagta

SEQ ID NO: 96008 - DNA, 15 bp, Homo sapiens
cataatttaatcagt

SEQ ID NO: 96009 - DNA, 15 bp, Homo sapiens
acataatttaatcag

SEQ ID NO: 96010 - DNA, 15 bp, Homo sapiens
cacataatttaatca

SEQ ID NO: 96011 - DNA, 15 bp, Homo sapiens
tcacataatttaatc

SEQ ID NO: 96012 - DNA, 15 bp, Homo sapiens
atcacataatttaat

SEQ ID NO: 96013 - DNA, 15 bp, Homo sapiens
tatcacataatttaa

SEQ ID NO: 96014 - DNA, 15 bp, Homo sapiens
ttatcacataattta

SEQ ID NO: 96015 - DNA, 15 bp, Homo sapiens
cttatcacataattt

SEQ ID NO: 96016 - DNA, 15 bp, Homo sapiens
acttatcacataatt

SEQ ID NO: 96017 - DNA, 15 bp, Homo sapiens
cacttatcacataat

SEQ ID NO: 96018 - DNA, 15 bp, Homo sapiens
tcacttatcacataa

SEQ ID NO: 96019 - DNA, 15 bp, Homo sapiens
ttcacttatcacata

SEQ ID NO: 96020 - DNA, 15 bp, Homo sapiens
tttcacttatcacat

SEQ ID NO: 96021 - DNA, 15 bp, Homo sapiens
ttttcacttatcaca

SEQ ID NO: 96022 - DNA, 15 bp, Homo sapiens
attttcacttatcac

SEQ ID NO: 96023 - DNA, 15 bp, Homo sapiens
cattttcacttatca

SEQ ID NO: 96024 - DNA, 15 bp, Homo sapiens
ccattttcacttatc

SEQ ID NO: 96025 - DNA, 15 bp, Homo sapiens
tccattttcacttat

SEQ ID NO: 96026 - DNA, 15 bp, Homo sapiens
ttccattttcactta

SEQ ID NO: 96027 - DNA, 15 bp, Homo sapiens
cttccattttcactt

SEQ ID NO: 96028 - DNA, 15 bp, Homo sapiens
tcttccattttcact

SEQ ID NO: 96029 - DNA, 15 bp, Homo sapiens
ctcttccattttcac

SEQ ID NO: 96030 - DNA, 15 bp, Homo sapiens
gctcttccattttca

SEQ ID NO: 96031 - DNA, 15 bp, Homo sapiens
tgctcttccattttc

SEQ ID NO: 96032 - DNA, 15 bp, Homo sapiens
ctgctcttccatttt

SEQ ID NO: 96033 - DNA, 15 bp, Homo sapiens
tctgctcttccattt

SEQ ID NO: 96034 - DNA, 15 bp, Homo sapiens
ctctgctcttccatt

SEQ ID NO: 96035 - DNA, 15 bp, Homo sapiens
cctctgctcttccat

SEQ ID NO: 96036 - DNA, 15 bp, Homo sapiens
tcctctgctcttcca

SEQ ID NO: 96037 - DNA, 15 bp, Homo sapiens
ttcctctgctcttcc

SEQ ID NO: 96038 - DNA, 15 bp, Homo sapiens
cttcctctgctcttc

SEQ ID NO: 96039 - DNA, 15 bp, Homo sapiens
ccttcctctgctctt

SEQ ID NO: 96040 - DNA, 15 bp, Homo sapiens
tccttcctctgctct

SEQ ID NO: 96041 - DNA, 15 bp, Homo sapiens
ctccttcctctgctc

SEQ ID NO: 96042 - DNA, 15 bp, Homo sapiens
cctccttcctctgct

SEQ ID NO: 96043 - DNA, 15 bp, Homo sapiens
tcctccttcctctgc

SEQ ID NO: 96044 - DNA, 15 bp, Homo sapiens
atcctccttcctctg

SEQ ID NO: 96045 - DNA, 15 bp, Homo sapiens
catcctccttcctct

SEQ ID NO: 96046 - DNA, 15 bp, Homo sapiens
tcatcctccttcctc

SEQ ID NO: 96047 - DNA, 15 bp, Homo sapiens
ctcatcctccttcct

SEQ ID NO: 96048 - DNA, 15 bp, Homo sapiens
cctcatcctccttcc

SEQ ID NO: 96049 - DNA, 15 bp, Homo sapiens
ccctcatcctccttc

SEQ ID NO: 96050 - DNA, 15 bp, Homo sapiens
tccctcatcctcctt

SEQ ID NO: 96051 - DNA, 15 bp, Homo sapiens
ctccctcatcctcct

SEQ ID NO: 96052 - DNA, 15 bp, Homo sapiens
actccctcatcctcc

SEQ ID NO: 96053 - DNA, 15 bp, Homo sapiens
aactccctcatcctc

SEQ ID NO: 96054 - DNA, 15 bp, Homo sapiens
caactccctcatcct

SEQ ID NO: 96055 - DNA, 15 bp, Homo sapiens
gcaactccctcatcc

SEQ ID NO: 96056 - DNA, 15 bp, Homo sapiens
cgcaactccctcatc

SEQ ID NO: 96057 - DNA, 15 bp, Homo sapiens
ccgcaactccctcat

SEQ ID NO: 96058 - DNA, 15 bp, Homo sapiens
cccgcaactccctca

SEQ ID NO: 96059 - DNA, 15 bp, Homo sapiens
ccccgcaactccctc

SEQ ID NO: 96060 - DNA, 15 bp, Homo sapiens
tccccgcaactccct

SEQ ID NO: 96061 - DNA, 15 bp, Homo sapiens
ctccccgcaactccc

SEQ ID NO: 96062 - DNA, 15 bp, Homo sapiens
cctccccgcaactcc

SEQ ID NO: 96063 - DNA, 15 bp, Homo sapiens
tcctccccgcaactc

SEQ ID NO: 96064 - DNA, 15 bp, Homo sapiens
ctcctccccgcaact

SEQ ID NO: 96065 - DNA, 15 bp, Homo sapiens
cctcctccccgcaac

SEQ ID NO: 96066 - DNA, 15 bp, Homo sapiens
ccctcctccccgcaa

SEQ ID NO: 96067 - DNA, 15 bp, Homo sapiens
tccctcctccccgca

SEQ ID NO: 96068 - DNA, 15 bp, Homo sapiens
ttccctcctccccgc

SEQ ID NO: 96069 - DNA, 15 bp, Homo sapiens
attccctcctccccg

SEQ ID NO: 96070 - DNA, 15 bp, Homo sapiens
aattccctcctcccc

SEQ ID NO: 96071 - DNA, 15 bp, Homo sapiens
taattccctcctccc

SEQ ID NO: 96072 - DNA, 15 bp, Homo sapiens
ttaattccctcctcc

SEQ ID NO: 96073 - DNA, 15 bp, Homo sapiens
attaattccctcctc

SEQ ID NO: 96074 - DNA, 15 bp, Homo sapiens
cattaattccctcct

SEQ ID NO: 96075 - DNA, 15 bp, Homo sapiens
acattaattccctcc

SEQ ID NO: 96076 - DNA, 15 bp, Homo sapiens
cacattaattccctc

SEQ ID NO: 96077 - DNA, 15 bp, Homo sapiens
ccacattaattccct

SEQ ID NO: 96078 - DNA, 15 bp, Homo sapiens
tccacattaattccc

SEQ ID NO: 96079 - DNA, 15 bp, Homo sapiens
atccacattaattcc

SEQ ID NO: 96080 - DNA, 15 bp, Homo sapiens
aatccacattaattc

SEQ ID NO: 96081 - DNA, 15 bp, Homo sapiens
aaatccacattaatt

SEQ ID NO: 96082 - DNA, 15 bp, Homo sapiens
caaatccacattaat

SEQ ID NO: 96083 - DNA, 15 bp, Homo sapiens
ccaaatccacattaa

SEQ ID NO: 96084 - DNA, 15 bp, Homo sapiens
tccaaatccacatta

SEQ ID NO: 96085 - DNA, 15 bp, Homo sapiens
ttccaaatccacatt

SEQ ID NO: 96086 - DNA, 15 bp, Homo sapiens
cttccaaatccacat

SEQ ID NO: 96087 - DNA, 15 bp, Homo sapiens
ccttccaaatccaca

SEQ ID NO: 96088 - DNA, 15 bp, Homo sapiens
gccttccaaatccac

SEQ ID NO: 96089 - DNA, 15 bp, Homo sapiens
agccttccaaatcca

SEQ ID NO: 96090 - DNA, 15 bp, Homo sapiens
cagccttccaaatcc

SEQ ID NO: 96091 - DNA, 15 bp, Homo sapiens
gcagccttccaaatc

SEQ ID NO: 96092 - DNA, 15 bp, Homo sapiens
ggcagccttccaaat

SEQ ID NO: 96093 - DNA, 15 bp, Homo sapiens
gggcagccttccaaa

SEQ ID NO: 96094 - DNA, 15 bp, Homo sapiens
tgggcagccttccaa

SEQ ID NO: 96095 - DNA, 15 bp, Homo sapiens
ttgggcagccttcca

SEQ ID NO: 96096 - DNA, 15 bp, Homo sapiens
gttgggcagccttcc

SEQ ID NO: 96097 - DNA, 15 bp, Homo sapiens
tgttgggcagccttc

SEQ ID NO: 96098 - DNA, 15 bp, Homo sapiens
atgttgggcagcctt

SEQ ID NO: 96099 - DNA, 15 bp, Homo sapiens
catgttgggcagcct

SEQ ID NO: 96100 - DNA, 15 bp, Homo sapiens
acatgttgggcagcc

SEQ ID NO: 96101 - DNA, 15 bp, Homo sapiens
aacatgttgggcagc

SEQ ID NO: 96102 - DNA, 15 bp, Homo sapiens
aaacatgttgggcag

SEQ ID NO: 96103 - DNA, 15 bp, Homo sapiens
gaaacatgttgggca

SEQ ID NO: 96104 - DNA, 15 bp, Homo sapiens
agaaacatgttgggc

SEQ ID NO: 96105 - DNA, 15 bp, Homo sapiens
cagaaacatgttggg

SEQ ID NO: 96106 - DNA, 15 bp, Homo sapiens
ccagaaacatgttgg

SEQ ID NO: 96107 - DNA, 15 bp, Homo sapiens
cccagaaacatgttg

SEQ ID NO: 96108 - DNA, 15 bp, Homo sapiens
acccagaaacatgtt

SEQ ID NO: 96109 - DNA, 15 bp, Homo sapiens
gacccagaaacatgt

SEQ ID NO: 96110 - DNA, 15 bp, Homo sapiens
agacccagaaacatg

SEQ ID NO: 96111 - DNA, 15 bp, Homo sapiens
cagacccagaaacat

SEQ ID NO: 96112 - DNA, 15 bp, Homo sapiens
tcagacccagaaaca

SEQ ID NO: 96113 - DNA, 15 bp, Homo sapiens
ttcagacccagaaac

SEQ ID NO: 96114 - DNA, 15 bp, Homo sapiens
attcagacccagaaa

SEQ ID NO: 96115 - DNA, 15 bp, Homo sapiens
tattcagacccagaa

SEQ ID NO: 96116 - DNA, 15 bp, Homo sapiens
atattcagacccaga

SEQ ID NO: 96117 - DNA, 15 bp, Homo sapiens
aatattcagacccag

SEQ ID NO: 96118 - DNA, 15 bp, Homo sapiens
aaatattcagaccca

SEQ ID NO: 96119 - DNA, 15 bp, Homo sapiens
aaaatattcagaccc

SEQ ID NO: 96120 - DNA, 15 bp, Homo sapiens
aaaaatattcagacc

SEQ ID NO: 96121 - DNA, 15 bp, Homo sapiens
caaaaatattcagac

SEQ ID NO: 96122 - DNA, 15 bp, Homo sapiens
ccaaaaatattcaga

SEQ ID NO: 96123 - DNA, 15 bp, Homo sapiens
accaaaaatattcag

SEQ ID NO: 96124 - DNA, 15 bp, Homo sapiens
gaccaaaaatattca

SEQ ID NO: 96125 - DNA, 15 bp, Homo sapiens
agaccaaaaatattc

SEQ ID NO: 96126 - DNA, 15 bp, Homo sapiens
cagaccaaaaatatt

SEQ ID NO: 96127 - DNA, 15 bp, Homo sapiens
acagaccaaaaatat

SEQ ID NO: 96128 - DNA, 15 bp, Homo sapiens
cacagaccaaaaata

SEQ ID NO: 96129 - DNA, 15 bp, Homo sapiens
tcacagaccaaaaat

SEQ ID NO: 96130 - DNA, 15 bp, Homo sapiens
gtcacagaccaaaaa

SEQ ID NO: 96131 - DNA, 15 bp, Homo sapiens
tgtcacagaccaaaa

SEQ ID NO: 96132 - DNA, 15 bp, Homo sapiens
gtgtcacagaccaaa

SEQ ID NO: 96133 - DNA, 15 bp, Homo sapiens
tgtgtcacagaccaa

SEQ ID NO: 96134 - DNA, 15 bp, Homo sapiens
ttgtgtcacagacca

SEQ ID NO: 96135 - DNA, 15 bp, Homo sapiens
tttgtgtcacagacc

SEQ ID NO: 96136 - DNA, 15 bp, Homo sapiens
atttgtgtcacagac

SEQ ID NO: 96137 - DNA, 15 bp, Homo sapiens
gatttgtgtcacaga

SEQ ID NO: 96138 - DNA, 15 bp, Homo sapiens
cgatttgtgtcacag

SEQ ID NO: 96139 - DNA, 15 bp, Homo sapiens
acgatttgtgtcaca

SEQ ID NO: 96140 - DNA, 15 bp, Homo sapiens
tacgatttgtgtcac

SEQ ID NO: 96141 - DNA, 15 bp, Homo sapiens
atacgatttgtgtca

SEQ ID NO: 96142 - DNA, 15 bp, Homo sapiens
aatacgatttgtgtc

SEQ ID NO: 96143 - DNA, 15 bp, Homo sapiens
gaatacgatttgtgt

SEQ ID NO: 96144 - DNA, 15 bp, Homo sapiens
agaatacgatttgtg

SEQ ID NO: 96145 - DNA, 15 bp, Homo sapiens
aagaatacgatttgt

SEQ ID NO: 96146 - DNA, 15 bp, Homo sapiens
caagaatacgatttg

SEQ ID NO: 96147 - DNA, 15 bp, Homo sapiens
tcaagaatacgattt

SEQ ID NO: 96148 - DNA, 15 bp, Homo sapiens
atcaagaatacgatt

SEQ ID NO: 96149 - DNA, 15 bp, Homo sapiens
aatcaagaatacgat

SEQ ID NO: 96150 - DNA, 15 bp, Homo sapiens
caatcaagaatacga

SEQ ID NO: 96151 - DNA, 15 bp, Homo sapiens
gcaatcaagaatacg

SEQ ID NO: 96152 - DNA, 15 bp, Homo sapiens
agcaatcaagaatac

SEQ ID NO: 96153 - DNA, 15 bp, Homo sapiens
tagcaatcaagaata

SEQ ID NO: 96154 - DNA, 15 bp, Homo sapiens
ttagcaatcaagaat

SEQ ID NO: 96155 - DNA, 15 bp, Homo sapiens
gttagcaatcaagaa

SEQ ID NO: 96156 - DNA, 15 bp, Homo sapiens
tgttagcaatcaaga

SEQ ID NO: 96157 - DNA, 15 bp, Homo sapiens
atgttagcaatcaag

SEQ ID NO: 96158 - DNA, 15 bp, Homo sapiens
gatgttagcaatcaa

SEQ ID NO: 96159 - DNA, 15 bp, Homo sapiens
ggatgttagcaatca

SEQ ID NO: 96160 - DNA, 15 bp, Homo sapiens
tggatgttagcaatc

SEQ ID NO: 96161 - DNA, 15 bp, Homo sapiens
gtggatgttagcaat

SEQ ID NO: 96162 - DNA, 15 bp, Homo sapiens
agtggatgttagcaa

SEQ ID NO: 96163 - DNA, 15 bp, Homo sapiens
cagtggatgttagca

SEQ ID NO: 96164 - DNA, 15 bp, Homo sapiens
tcagtggatgttagc

SEQ ID NO: 96165 - DNA, 15 bp, Homo sapiens
ctcagtggatgttag

SEQ ID NO: 96166 - DNA, 15 bp, Homo sapiens
cctcagtggatgtta

SEQ ID NO: 96167 - DNA, 15 bp, Homo sapiens
gcctcagtggatgtt

SEQ ID NO: 96168 - DNA, 15 bp, Homo sapiens
ggcctcagtggatgt

SEQ ID NO: 96169 - DNA, 15 bp, Homo sapiens
tggcctcagtggatg

SEQ ID NO: 96170 - DNA, 15 bp, Homo sapiens
gtggcctcagtggat

SEQ ID NO: 96171 - DNA, 15 bp, Homo sapiens
ggtggcctcagtgga

SEQ ID NO: 96172 - DNA, 15 bp, Homo sapiens
aggtggcctcagtgg

SEQ ID NO: 96173 - DNA, 15 bp, Homo sapiens
gaggtggcctcagtg

SEQ ID NO: 96174 - DNA, 15 bp, Homo sapiens
agaggtggcctcagt

SEQ ID NO: 96175 - DNA, 15 bp, Homo sapiens
cagaggtggcctcag

SEQ ID NO: 96176 - DNA, 15 bp, Homo sapiens
acagaggtggcctca

SEQ ID NO: 96177 - DNA, 15 bp, Homo sapiens
cacagaggtggcctc

SEQ ID NO: 96178 - DNA, 15 bp, Homo sapiens
gcacagaggtggcct

SEQ ID NO: 96179 - DNA, 15 bp, Homo sapiens
agcacagaggtggcc

SEQ ID NO: 96180 - DNA, 15 bp, Homo sapiens
cagcacagaggtggc

SEQ ID NO: 96181 - DNA, 15 bp, Homo sapiens
ccagcacagaggtgg

SEQ ID NO: 96182 - DNA, 15 bp, Homo sapiens
cccagcacagaggtg

SEQ ID NO: 96183 - DNA, 15 bp, Homo sapiens
gcccagcacagaggt

SEQ ID NO: 96184 - DNA, 15 bp, Homo sapiens
tgcccagcacagagg

SEQ ID NO: 96185 - DNA, 15 bp, Homo sapiens
gtgcccagcacagag

SEQ ID NO: 96186 - DNA, 15 bp, Homo sapiens
agtgcccagcacaga

SEQ ID NO: 96187 - DNA, 15 bp, Homo sapiens
tagtgcccagcacag

SEQ ID NO: 96188 - DNA, 15 bp, Homo sapiens
atagtgcccagcaca

SEQ ID NO: 96189 - DNA, 15 bp, Homo sapiens
catagtgcccagcac

SEQ ID NO: 96190 - DNA, 15 bp, Homo sapiens
gcatagtgcccagca

SEQ ID NO: 96191 - DNA, 15 bp, Homo sapiens
agcatagtgcccagc

SEQ ID NO: 96192 - DNA, 15 bp, Homo sapiens
cagcatagtgcccag

SEQ ID NO: 96193 - DNA, 15 bp, Homo sapiens
ccagcatagtgccca

SEQ ID NO: 96194 - DNA, 15 bp, Homo sapiens
cccagcatagtgccc

SEQ ID NO: 96195 - DNA, 15 bp, Homo sapiens
acccagcatagtgcc

SEQ ID NO: 96196 - DNA, 15 bp, Homo sapiens
cacccagcatagtgc

SEQ ID NO: 96197 - DNA, 15 bp, Homo sapiens
acacccagcatagtg

SEQ ID NO: 96198 - DNA, 15 bp, Homo sapiens
aacacccagcatagt

SEQ ID NO: 96199 - DNA, 15 bp, Homo sapiens
aaacacccagcatag

SEQ ID NO: 96200 - DNA, 15 bp, Homo sapiens
taaacacccagcata

SEQ ID NO: 96201 - DNA, 15 bp, Homo sapiens
gtaaacacccagcat

SEQ ID NO: 96202 - DNA, 15 bp, Homo sapiens
agtaaacacccagca

SEQ ID NO: 96203 - DNA, 15 bp, Homo sapiens
aagtaaacacccagc

SEQ ID NO: 96204 - DNA, 15 bp, Homo sapiens
caagtaaacacccag

SEQ ID NO: 96205 - DNA, 15 bp, Homo sapiens
ccaagtaaacaccca

SEQ ID NO: 96206 - DNA, 15 bp, Homo sapiens
cccaagtaaacaccc

SEQ ID NO: 96207 - DNA, 15 bp, Homo sapiens
acccaagtaaacacc

SEQ ID NO: 96208 - DNA, 15 bp, Homo sapiens
tacccaagtaaacac

SEQ ID NO: 96209 - DNA, 15 bp, Homo sapiens
atacccaagtaaaca

SEQ ID NO: 96210 - DNA, 15 bp, Homo sapiens
gatacccaagtaaac

SEQ ID NO: 96211 - DNA, 15 bp, Homo sapiens
agatacccaagtaaa

SEQ ID NO: 96212 - DNA, 15 bp, Homo sapiens
gagatacccaagtaa

SEQ ID NO: 96213 - DNA, 15 bp, Homo sapiens
tgagatacccaagta

SEQ ID NO: 96214 - DNA, 15 bp, Homo sapiens
atgagatacccaagt

SEQ ID NO: 96215 - DNA, 15 bp, Homo sapiens
aatgagatacccaag

SEQ ID NO: 96216 - DNA, 15 bp, Homo sapiens
aaatgagatacccaa

SEQ ID NO: 96217 - DNA, 15 bp, Homo sapiens
taaatgagataccca

SEQ ID NO: 96218 - DNA, 15 bp, Homo sapiens
gtaaatgagataccc

SEQ ID NO: 96219 - DNA, 15 bp, Homo sapiens
agtaaatgagatacc

SEQ ID NO: 96220 - DNA, 15 bp, Homo sapiens
gagtaaatgagatac

SEQ ID NO: 96221 - DNA, 15 bp, Homo sapiens
agagtaaatgagata

SEQ ID NO: 96222 - DNA, 15 bp, Homo sapiens
cagagtaaatgagat

SEQ ID NO: 96223 - DNA, 15 bp, Homo sapiens
gcagagtaaatgaga

SEQ ID NO: 96224 - DNA, 15 bp, Homo sapiens
tgcagagtaaatgag

SEQ ID NO: 96225 - DNA, 15 bp, Homo sapiens
ttgcagagtaaatga

SEQ ID NO: 96226 - DNA, 15 bp, Homo sapiens
cttgcagagtaaatg

SEQ ID NO: 96227 - DNA, 15 bp, Homo sapiens
ccttgcagagtaaat

SEQ ID NO: 96228 - DNA, 15 bp, Homo sapiens
gccttgcagagtaaa

SEQ ID NO: 96229 - DNA, 15 bp, Homo sapiens
agccttgcagagtaa

SEQ ID NO: 96230 - DNA, 15 bp, Homo sapiens
cagccttgcagagta

SEQ ID NO: 96231 - DNA, 15 bp, Homo sapiens
ccagccttgcagagt

SEQ ID NO: 96232 - DNA, 15 bp, Homo sapiens
gccagccttgcagag

SEQ ID NO: 96233 - DNA, 15 bp, Homo sapiens
ggccagccttgcaga

SEQ ID NO: 96234 - DNA, 15 bp, Homo sapiens
aggccagccttgcag

SEQ ID NO: 96235 - DNA, 15 bp, Homo sapiens
caggccagccttgca

SEQ ID NO: 96236 - DNA, 15 bp, Homo sapiens
ccaggccagccttgc

SEQ ID NO: 96237 - DNA, 15 bp, Homo sapiens
accaggccagccttg

SEQ ID NO: 96238 - DNA, 15 bp, Homo sapiens
aaccaggccagcctt

SEQ ID NO: 96239 - DNA, 15 bp, Homo sapiens
gaaccaggccagcct

SEQ ID NO: 96240 - DNA, 15 bp, Homo sapiens
agaaccaggccagcc

SEQ ID NO: 96241 - DNA, 15 bp, Homo sapiens
aagaaccaggccagc

SEQ ID NO: 96242 - DNA, 15 bp, Homo sapiens
gaagaaccaggccag

SEQ ID NO: 96243 - DNA, 15 bp, Homo sapiens
tgaagaaccaggcca

SEQ ID NO: 96244 - DNA, 15 bp, Homo sapiens
atgaagaaccaggcc

SEQ ID NO: 96245 - DNA, 15 bp, Homo sapiens
tatgaagaaccaggc

SEQ ID NO: 96246 - DNA, 15 bp, Homo sapiens
gtatgaagaaccagg

SEQ ID NO: 96247 - DNA, 15 bp, Homo sapiens
ggtatgaagaaccag

SEQ ID NO: 96248 - DNA, 15 bp, Homo sapiens
gggtatgaagaacca

SEQ ID NO: 96249 - DNA, 15 bp, Homo sapiens
ggggtatgaagaacc

SEQ ID NO: 96250 - DNA, 15 bp, Homo sapiens
aggggtatgaagaac

SEQ ID NO: 96251 - DNA, 15 bp, Homo sapiens
taggggtatgaagaa

SEQ ID NO: 96252 - DNA, 15 bp, Homo sapiens
ctaggggtatgaaga

SEQ ID NO: 96253 - DNA, 15 bp, Homo sapiens
cctaggggtatgaag

SEQ ID NO: 96254 - DNA, 15 bp, Homo sapiens
ccctaggggtatgaa

SEQ ID NO: 96255 - DNA, 15 bp, Homo sapiens
gccctaggggtatga

SEQ ID NO: 96256 - DNA, 15 bp, Homo sapiens
tgccctaggggtatg

SEQ ID NO: 96257 - DNA, 15 bp, Homo sapiens
ctgccctaggggtat

SEQ ID NO: 96258 - DNA, 15 bp, Homo sapiens
tctgccctaggggta

SEQ ID NO: 96259 - DNA, 15 bp, Homo sapiens
ttctgccctaggggt

SEQ ID NO: 96260 - DNA, 15 bp, Homo sapiens
attctgccctagggg

SEQ ID NO: 96261 - DNA, 15 bp, Homo sapiens
cattctgccctaggg

SEQ ID NO: 96262 - DNA, 15 bp, Homo sapiens
gcattctgccctagg

SEQ ID NO: 96263 - DNA, 15 bp, Homo sapiens
tgcattctgccctag

SEQ ID NO: 96264 - DNA, 15 bp, Homo sapiens
ttgcattctgcccta

SEQ ID NO: 96265 - DNA, 15 bp, Homo sapiens
cttgcattctgccct

SEQ ID NO: 96266 - DNA, 15 bp, Homo sapiens
tcttgcattctgccc

SEQ ID NO: 96267 - DNA, 15 bp, Homo sapiens
gtcttgcattctgcc

SEQ ID NO: 96268 - DNA, 15 bp, Homo sapiens
agtcttgcattctgc

SEQ ID NO: 96269 - DNA, 15 bp, Homo sapiens
aagtcttgcattctg

SEQ ID NO: 96270 - DNA, 15 bp, Homo sapiens
aaagtcttgcattct

SEQ ID NO: 96271 - DNA, 15 bp, Homo sapiens
taaagtcttgcattc

SEQ ID NO: 96272 - DNA, 15 bp, Homo sapiens
ctaaagtcttgcatt

SEQ ID NO: 96273 - DNA, 15 bp, Homo sapiens
actaaagtcttgcat

SEQ ID NO: 96274 - DNA, 15 bp, Homo sapiens
aactaaagtcttgca

SEQ ID NO: 96275 - DNA, 15 bp, Homo sapiens
gaactaaagtcttgc

SEQ ID NO: 96276 - DNA, 15 bp, Homo sapiens
agaactaaagtcttg

SEQ ID NO: 96277 - DNA, 15 bp, Homo sapiens
aagaactaaagtctt

SEQ ID NO: 96278 - DNA, 15 bp, Homo sapiens
caagaactaaagtct

SEQ ID NO: 96279 - DNA, 15 bp, Homo sapiens
ccaagaactaaagtc

SEQ ID NO: 96280 - DNA, 15 bp, Homo sapiens
gccaagaactaaagt

SEQ ID NO: 96281 - DNA, 15 bp, Homo sapiens
ggccaagaactaaag

SEQ ID NO: 96282 - DNA, 15 bp, Homo sapiens
aggccaagaactaaa

SEQ ID NO: 96283 - DNA, 15 bp, Homo sapiens
aaggccaagaactaa

SEQ ID NO: 96284 - DNA, 15 bp, Homo sapiens
gaaggccaagaacta

SEQ ID NO: 96285 - DNA, 15 bp, Homo sapiens
agaaggccaagaact

SEQ ID NO: 96286 - DNA, 15 bp, Homo sapiens
cagaaggccaagaac

SEQ ID NO: 96287 - DNA, 15 bp, Homo sapiens
gcagaaggccaagaa

SEQ ID NO: 96288 - DNA, 15 bp, Homo sapiens
tgcagaaggccaaga

SEQ ID NO: 96289 - DNA, 15 bp, Homo sapiens
atgcagaaggccaag

SEQ ID NO: 96290 - DNA, 15 bp, Homo sapiens
gatgcagaaggccaa

SEQ ID NO: 96291 - DNA, 15 bp, Homo sapiens
agatgcagaaggcca

SEQ ID NO: 96292 - DNA, 15 bp, Homo sapiens
aagatgcagaaggcc

SEQ ID NO: 96293 - DNA, 15 bp, Homo sapiens
gaagatgcagaaggc

SEQ ID NO: 96294 - DNA, 15 bp, Homo sapiens
tgaagatgcagaagg

SEQ ID NO: 96295 - DNA, 15 bp, Homo sapiens
atgaagatgcagaag

SEQ ID NO: 96296 - DNA, 15 bp, Homo sapiens
catgaagatgcagaa

SEQ ID NO: 96297 - DNA, 15 bp, Homo sapiens
gcatgaagatgcaga

SEQ ID NO: 96298 - DNA, 15 bp, Homo sapiens
agcatgaagatgcag

SEQ ID NO: 96299 - DNA, 15 bp, Homo sapiens
aagcatgaagatgca

SEQ ID NO: 96300 - DNA, 15 bp, Homo sapiens
aaagcatgaagatgc

SEQ ID NO: 96301 - DNA, 15 bp, Homo sapiens
aaaagcatgaagatg

SEQ ID NO: 96302 - DNA, 15 bp, Homo sapiens
aaaaagcatgaagat

SEQ ID NO: 96303 - DNA, 15 bp, Homo sapiens
gaaaaagcatgaaga

SEQ ID NO: 96304 - DNA, 15 bp, Homo sapiens
agaaaaagcatgaag

SEQ ID NO: 96305 - DNA, 15 bp, Homo sapiens
aagaaaaagcatgaa

SEQ ID NO: 96306 - DNA, 15 bp, Homo sapiens
aaagaaaaagcatga

SEQ ID NO: 96307 - DNA, 15 bp, Homo sapiens
caaagaaaaagcatg

SEQ ID NO: 96308 - DNA, 15 bp, Homo sapiens
ccaaagaaaaagcat

SEQ ID NO: 96309 - DNA, 15 bp, Homo sapiens
tccaaagaaaaagca

SEQ ID NO: 96310 - DNA, 15 bp, Homo sapiens
ctccaaagaaaaagc

SEQ ID NO: 96311 - DNA, 15 bp, Homo sapiens
gctccaaagaaaaag

SEQ ID NO: 96312 - DNA, 15 bp, Homo sapiens
tgctccaaagaaaaa

SEQ ID NO: 96313 - DNA, 15 bp, Homo sapiens
ctgctccaaagaaaa

SEQ ID NO: 96314 - DNA, 15 bp, Homo sapiens
tctgctccaaagaaa

SEQ ID NO: 96315 - DNA, 15 bp, Homo sapiens
ttctgctccaaagaa

SEQ ID NO: 96316 - DNA, 15 bp, Homo sapiens
tttctgctccaaaga

SEQ ID NO: 96317 - DNA, 15 bp, Homo sapiens
atttctgctccaaag

SEQ ID NO: 96318 - DNA, 15 bp, Homo sapiens
aatttctgctccaaa

SEQ ID NO: 96319 - DNA, 15 bp, Homo sapiens
caatttctgctccaa

SEQ ID NO: 96320 - DNA, 15 bp, Homo sapiens
gcaatttctgctcca

SEQ ID NO: 96321 - DNA, 15 bp, Homo sapiens
agcaatttctgctcc

SEQ ID NO: 96322 - DNA, 15 bp, Homo sapiens
gagcaatttctgctc

SEQ ID NO: 96323 - DNA, 15 bp, Homo sapiens
agagcaatttctgct

SEQ ID NO: 96324 - DNA, 15 bp, Homo sapiens
cagagcaatttctgc

SEQ ID NO: 96325 - DNA, 15 bp, Homo sapiens
tcagagcaatttctg

SEQ ID NO: 96326 - DNA, 15 bp, Homo sapiens
ttcagagcaatttct

SEQ ID NO: 96327 - DNA, 15 bp, Homo sapiens
tttcagagcaatttc

SEQ ID NO: 96328 - DNA, 15 bp, Homo sapiens
ttttcagagcaattt

SEQ ID NO: 96329 - DNA, 15 bp, Homo sapiens
attttcagagcaatt

SEQ ID NO: 96330 - DNA, 15 bp, Homo sapiens
cattttcagagcaat

SEQ ID NO: 96331 - DNA, 15 bp, Homo sapiens
gcattttcagagcaa

SEQ ID NO: 96332 - DNA, 15 bp, Homo sapiens
agcattttcagagca

SEQ ID NO: 96333 - DNA, 15 bp, Homo sapiens
cagcattttcagagc

SEQ ID NO: 96334 - DNA, 15 bp, Homo sapiens
ccagcattttcagag

SEQ ID NO: 96335 - DNA, 15 bp, Homo sapiens
cccagcattttcaga

SEQ ID NO: 96336 - DNA, 15 bp, Homo sapiens
acccagcattttcag

SEQ ID NO: 96337 - DNA, 15 bp, Homo sapiens
aacccagcattttca

SEQ ID NO: 96338 - DNA, 15 bp, Homo sapiens
aaacccagcattttc

SEQ ID NO: 96339 - DNA, 15 bp, Homo sapiens
taaacccagcatttt

SEQ ID NO: 96340 - DNA, 15 bp, Homo sapiens
ttaaacccagcattt

SEQ ID NO: 96341 - DNA, 15 bp, Homo sapiens
gttaaacccagcatt

SEQ ID NO: 96342 - DNA, 15 bp, Homo sapiens
agttaaacccagcat

SEQ ID NO: 96343 - DNA, 15 bp, Homo sapiens
aagttaaacccagca

SEQ ID NO: 96344 - DNA, 15 bp, Homo sapiens
taagttaaacccagc

SEQ ID NO: 96345 - DNA, 15 bp, Homo sapiens
ttaagttaaacccag

SEQ ID NO: 96346 - DNA, 15 bp, Homo sapiens
tttaagttaaaccca

SEQ ID NO: 96347 - DNA, 15 bp, Homo sapiens
atttaagttaaaccc

SEQ ID NO: 96348 - DNA, 15 bp, Homo sapiens
gatttaagttaaacc

SEQ ID NO: 96349 - DNA, 15 bp, Homo sapiens
agatttaagttaaac

SEQ ID NO: 96350 - DNA, 15 bp, Homo sapiens
aagatttaagttaaa

SEQ ID NO: 96351 - DNA, 15 bp, Homo sapiens
taagatttaagttaa

SEQ ID NO: 96352 - DNA, 15 bp, Homo sapiens
gtaagatttaagtta

SEQ ID NO: 96353 - DNA, 15 bp, Homo sapiens
tgtaagatttaagtt

SEQ ID NO: 96354 - DNA, 15 bp, Homo sapiens
atgtaagatttaagt

SEQ ID NO: 96355 - DNA, 15 bp, Homo sapiens
aatgtaagatttaag

SEQ ID NO: 96356 - DNA, 15 bp, Homo sapiens
caatgtaagatttaa

SEQ ID NO: 96357 - DNA, 15 bp, Homo sapiens
tcaatgtaagattta

SEQ ID NO: 96358 - DNA, 15 bp, Homo sapiens
gtcaatgtaagattt

SEQ ID NO: 96359 - DNA, 15 bp, Homo sapiens
ggtcaatgtaagatt

SEQ ID NO: 96360 - DNA, 15 bp, Homo sapiens
tggtcaatgtaagat

SEQ ID NO: 96361 - DNA, 15 bp, Homo sapiens
ctggtcaatgtaaga

SEQ ID NO: 96362 - DNA, 15 bp, Homo sapiens
tctggtcaatgtaag

SEQ ID NO: 96363 - DNA, 15 bp, Homo sapiens
gtctggtcaatgtaa

SEQ ID NO: 96364 - DNA, 15 bp, Homo sapiens
cgtctggtcaatgta

SEQ ID NO: 96365 - DNA, 15 bp, Homo sapiens
acgtctggtcaatgt

SEQ ID NO: 96366 - DNA, 15 bp, Homo sapiens
gacgtctggtcaatg

SEQ ID NO: 96367 - DNA, 15 bp, Homo sapiens
agacgtctggtcaat

SEQ ID NO: 96368 - DNA, 15 bp, Homo sapiens
gagacgtctggtcaa

SEQ ID NO: 96369 - DNA, 15 bp, Homo sapiens
ggagacgtctggtca

SEQ ID NO: 96370 - DNA, 15 bp, Homo sapiens
aggagacgtctggtc

SEQ ID NO: 96371 - DNA, 15 bp, Homo sapiens
gaggagacgtctggt

SEQ ID NO: 96372 - DNA, 15 bp, Homo sapiens
cgaggagacgtctgg

SEQ ID NO: 96373 - DNA, 15 bp, Homo sapiens
tcgaggagacgtctg

SEQ ID NO: 96374 - DNA, 15 bp, Homo sapiens
ctcgaggagacgtct

SEQ ID NO: 96375 - DNA, 15 bp, Homo sapiens
gctcgaggagacgtc

SEQ ID NO: 96376 - DNA, 15 bp, Homo sapiens
ggctcgaggagacgt

SEQ ID NO: 96377 - DNA, 15 bp, Homo sapiens
gggctcgaggagacg

SEQ ID NO: 96378 - DNA, 15 bp, Homo sapiens
ggggctcgaggagac

SEQ ID NO: 96379 - DNA, 15 bp, Homo sapiens
tggggctcgaggaga

SEQ ID NO: 96380 - DNA, 15 bp, Homo sapiens
ctggggctcgaggag

SEQ ID NO: 96381 - DNA, 15 bp, Homo sapiens
tctggggctcgagga

SEQ ID NO: 96382 - DNA, 15 bp, Homo sapiens
ctctggggctcgagg

SEQ ID NO: 96383 - DNA, 15 bp, Homo sapiens
gctctggggctcgag

SEQ ID NO: 96384 - DNA, 15 bp, Homo sapiens
ggctctggggctcga

SEQ ID NO: 96385 - DNA, 15 bp, Homo sapiens
aggctctggggctcg

SEQ ID NO: 96386 - DNA, 15 bp, Homo sapiens
taggctctggggctc

SEQ ID NO: 96387 - DNA, 15 bp, Homo sapiens
gtaggctctggggct

SEQ ID NO: 96388 - DNA, 15 bp, Homo sapiens
cgtaggctctggggc

SEQ ID NO: 96389 - DNA, 15 bp, Homo sapiens
ccgtaggctctgggg

SEQ ID NO: 96390 - DNA, 15 bp, Homo sapiens
tccgtaggctctggg

SEQ ID NO: 96391 - DNA, 15 bp, Homo sapiens
ctccgtaggctctgg

SEQ ID NO: 96392 - DNA, 15 bp, Homo sapiens
actccgtaggctctg

SEQ ID NO: 96393 - DNA, 15 bp, Homo sapiens
cactccgtaggctct

SEQ ID NO: 96394 - DNA, 15 bp, Homo sapiens
gcactccgtaggctc

SEQ ID NO: 96395 - DNA, 15 bp, Homo sapiens
agcactccgtaggct

SEQ ID NO: 96396 - DNA, 15 bp, Homo sapiens
aagcactccgtaggc

SEQ ID NO: 96397 - DNA, 15 bp, Homo sapiens
aaagcactccgtagg

SEQ ID NO: 96398 - DNA, 15 bp, Homo sapiens
aaaagcactccgtag

SEQ ID NO: 96399 - DNA, 15 bp, Homo sapiens
caaaagcactccgta

SEQ ID NO: 96400 - DNA, 15 bp, Homo sapiens
acaaaagcactccgt

SEQ ID NO: 96401 - DNA, 15 bp, Homo sapiens
aacaaaagcactccg

SEQ ID NO: 96402 - DNA, 15 bp, Homo sapiens
taacaaaagcactcc

SEQ ID NO: 96403 - DNA, 15 bp, Homo sapiens
ttaacaaaagcactc

SEQ ID NO: 96404 - DNA, 15 bp, Homo sapiens
tttaacaaaagcact

SEQ ID NO: 96405 - DNA, 15 bp, Homo sapiens
gtttaacaaaagcac

SEQ ID NO: 96406 - DNA, 15 bp, Homo sapiens
ggtttaacaaaagca

SEQ ID NO: 96407 - DNA, 15 bp, Homo sapiens
gggtttaacaaaagc

SEQ ID NO: 96408 - DNA, 15 bp, Homo sapiens
ggggtttaacaaaag

SEQ ID NO: 96409 - DNA, 15 bp, Homo sapiens
tggggtttaacaaaa

SEQ ID NO: 96410 - DNA, 15 bp, Homo sapiens
ctggggtttaacaaa

SEQ ID NO: 96411 - DNA, 15 bp, Homo sapiens
tctggggtttaacaa

SEQ ID NO: 96412 - DNA, 15 bp, Homo sapiens
ctctggggtttaaca

SEQ ID NO: 96413 - DNA, 15 bp, Homo sapiens
gctctggggtttaac

SEQ ID NO: 96414 - DNA, 15 bp, Homo sapiens
ggctctggggtttaa

SEQ ID NO: 96415 - DNA, 15 bp, Homo sapiens
tggctctggggttta

SEQ ID NO: 96416 - DNA, 15 bp, Homo sapiens
ttggctctggggttt

SEQ ID NO: 96417 - DNA, 15 bp, Homo sapiens
attggctctggggtt

SEQ ID NO: 96418 - DNA, 15 bp, Homo sapiens
cattggctctggggt

SEQ ID NO: 96419 - DNA, 15 bp, Homo sapiens
acattggctctgggg

SEQ ID NO: 96420 - DNA, 15 bp, Homo sapiens
cacattggctctggg

SEQ ID NO: 96421 - DNA, 15 bp, Homo sapiens
gcacattggctctgg

SEQ ID NO: 96422 - DNA, 15 bp, Homo sapiens
agcacattggctctg

SEQ ID NO: 96423 - DNA, 15 bp, Homo sapiens
gagcacattggctct

SEQ ID NO: 96424 - DNA, 15 bp, Homo sapiens
tgagcacattggctc

SEQ ID NO: 96425 - DNA, 15 bp, Homo sapiens
ctgagcacattggct

SEQ ID NO: 96426 - DNA, 15 bp, Homo sapiens
cctgagcacattggc

SEQ ID NO: 96427 - DNA, 15 bp, Homo sapiens
gcctgagcacattgg

SEQ ID NO: 96428 - DNA, 15 bp, Homo sapiens
agcctgagcacattg

SEQ ID NO: 96429 - DNA, 15 bp, Homo sapiens
cagcctgagcacatt

SEQ ID NO: 96430 - DNA, 15 bp, Homo sapiens
acagcctgagcacat

SEQ ID NO: 96431 - DNA, 15 bp, Homo sapiens
gacagcctgagcaca

SEQ ID NO: 96432 - DNA, 15 bp, Homo sapiens
ggacagcctgagcac

SEQ ID NO: 96433 - DNA, 15 bp, Homo sapiens
aggacagcctgagca

SEQ ID NO: 96434 - DNA, 15 bp, Homo sapiens
aaggacagcctgagc

SEQ ID NO: 96435 - DNA, 15 bp, Homo sapiens
aaaggacagcctgag

SEQ ID NO: 96436 - DNA, 15 bp, Homo sapiens
caaaggacagcctga

SEQ ID NO: 96437 - DNA, 15 bp, Homo sapiens
acaaaggacagcctg

SEQ ID NO: 96438 - DNA, 15 bp, Homo sapiens
cacaaaggacagcct

SEQ ID NO: 96439 - DNA, 15 bp, Homo sapiens
gcacaaaggacagcc

SEQ ID NO: 96440 - DNA, 15 bp, Homo sapiens
tgcacaaaggacagc

SEQ ID NO: 96441 - DNA, 15 bp, Homo sapiens
ctgcacaaaggacag

SEQ ID NO: 96442 - DNA, 15 bp, Homo sapiens
gctgcacaaaggaca

SEQ ID NO: 96443 - DNA, 15 bp, Homo sapiens
ggctgcacaaaggac

SEQ ID NO: 96444 - DNA, 15 bp, Homo sapiens
tggctgcacaaagga

SEQ ID NO: 96445 - DNA, 15 bp, Homo sapiens
ctggctgcacaaagg

SEQ ID NO: 96446 - DNA, 15 bp, Homo sapiens
cctggctgcacaaag

SEQ ID NO: 96447 - DNA, 15 bp, Homo sapiens
acctggctgcacaaa

SEQ ID NO: 96448 - DNA, 15 bp, Homo sapiens
tacctggctgcacaa

SEQ ID NO: 96449 - DNA, 15 bp, Homo sapiens
gtacctggctgcaca

SEQ ID NO: 96450 - DNA, 15 bp, Homo sapiens
ggtacctggctgcac

SEQ ID NO: 96451 - DNA, 15 bp, Homo sapiens
tggtacctggctgca

SEQ ID NO: 96452 - DNA, 15 bp, Homo sapiens
ctggtacctggctgc

SEQ ID NO: 96453 - DNA, 15 bp, Homo sapiens
actggtacctggctg

SEQ ID NO: 96454 - DNA, 15 bp, Homo sapiens
cactggtacctggct

SEQ ID NO: 96455 - DNA, 15 bp, Homo sapiens
ccactggtacctggc

SEQ ID NO: 96456 - DNA, 15 bp, Homo sapiens
cccactggtacctgg

SEQ ID NO: 96457 - DNA, 15 bp, Homo sapiens
tcccactggtacctg

SEQ ID NO: 96458 - DNA, 15 bp, Homo sapiens
ttcccactggtacct

SEQ ID NO: 96459 - DNA, 15 bp, Homo sapiens
cttcccactggtacc

SEQ ID NO: 96460 - DNA, 15 bp, Homo sapiens
tcttcccactggtac

SEQ ID NO: 96461 - DNA, 15 bp, Homo sapiens
atcttcccactggta

SEQ ID NO: 96462 - DNA, 15 bp, Homo sapiens
aatcttcccactggt

SEQ ID NO: 96463 - DNA, 15 bp, Homo sapiens
aaatcttcccactgg

SEQ ID NO: 96464 - DNA, 15 bp, Homo sapiens
aaaatcttcccactg

SEQ ID NO: 96465 - DNA, 15 bp, Homo sapiens
gaaaatcttcccact

SEQ ID NO: 96466 - DNA, 15 bp, Homo sapiens
ggaaaatcttcccac

SEQ ID NO: 96467 - DNA, 15 bp, Homo sapiens
tggaaaatcttccca

SEQ ID NO: 96468 - DNA, 15 bp, Homo sapiens
atggaaaatcttccc

SEQ ID NO: 96469 - DNA, 15 bp, Homo sapiens
catggaaaatcttcc

SEQ ID NO: 96470 - DNA, 15 bp, Homo sapiens
gcatggaaaatcttc

SEQ ID NO: 96471 - DNA, 15 bp, Homo sapiens
tgcatggaaaatctt

SEQ ID NO: 96472 - DNA, 15 bp, Homo sapiens
ttgcatggaaaatct

SEQ ID NO: 96473 - DNA, 15 bp, Homo sapiens
tttgcatggaaaatc

SEQ ID NO: 96474 - DNA, 15 bp, Homo sapiens
atttgcatggaaaat

SEQ ID NO: 96475 - DNA, 15 bp, Homo sapiens
tatttgcatggaaaa

SEQ ID NO: 96476 - DNA, 15 bp, Homo sapiens
gtatttgcatggaaa

SEQ ID NO: 96477 - DNA, 15 bp, Homo sapiens
agtatttgcatggaa

SEQ ID NO: 96478 - DNA, 15 bp, Homo sapiens
aagtatttgcatgga

SEQ ID NO: 96479 - DNA, 15 bp, Homo sapiens
caagtatttgcatgg

SEQ ID NO: 96480 - DNA, 15 bp, Homo sapiens
ccaagtatttgcatg

SEQ ID NO: 96481 - DNA, 15 bp, Homo sapiens
cccaagtatttgcat

SEQ ID NO: 96482 - DNA, 15 bp, Homo sapiens
tcccaagtatttgca

SEQ ID NO: 96483 - DNA, 15 bp, Homo sapiens
ttcccaagtatttgc

SEQ ID NO: 96484 - DNA, 15 bp, Homo sapiens
attcccaagtatttg

SEQ ID NO: 96485 - DNA, 15 bp, Homo sapiens
tattcccaagtattt

SEQ ID NO: 96486 - DNA, 15 bp, Homo sapiens
ttattcccaagtatt

SEQ ID NO: 96487 - DNA, 15 bp, Homo sapiens
tttattcccaagtat

SEQ ID NO: 96488 - DNA, 15 bp, Homo sapiens
ttttattcccaagta

SEQ ID NO: 96489 - DNA, 15 bp, Homo sapiens
tttttattcccaagt

SEQ ID NO: 96490 - DNA, 15 bp, Homo sapiens
ttttttattcccaag

SEQ ID NO: 96491 - DNA, 15 bp, Homo sapiens
cttttttattcccaa

SEQ ID NO: 96492 - DNA, 15 bp, Homo sapiens
tcttttttattccca

SEQ ID NO: 96493 - DNA, 15 bp, Homo sapiens
ttcttttttattccc

SEQ ID NO: 96494 - DNA, 15 bp, Homo sapiens
tttcttttttattcc

SEQ ID NO: 96495 - DNA, 15 bp, Homo sapiens
atttcttttttattc

SEQ ID NO: 96496 - DNA, 15 bp, Homo sapiens
catttcttttttatt

SEQ ID NO: 96497 - DNA, 15 bp, Homo sapiens
tcatttcttttttat

SEQ ID NO: 96498 - DNA, 15 bp, Homo sapiens
ctcatttctttttta

SEQ ID NO: 96499 - DNA, 15 bp, Homo sapiens
tctcatttctttttt

SEQ ID NO: 96500 - DNA, 15 bp, Homo sapiens
ctctcatttcttttt

SEQ ID NO: 96501 - DNA, 15 bp, Homo sapiens
cctctcatttctttt

SEQ ID NO: 96502 - DNA, 15 bp, Homo sapiens
ccctctcatttcttt

SEQ ID NO: 96503 - DNA, 15 bp, Homo sapiens
tccctctcatttctt

SEQ ID NO: 96504 - DNA, 15 bp, Homo sapiens
ctccctctcatttct

SEQ ID NO: 96505 - DNA, 15 bp, Homo sapiens
cctccctctcatttc

SEQ ID NO: 96506 - DNA, 15 bp, Homo sapiens
gcctccctctcattt

SEQ ID NO: 96507 - DNA, 15 bp, Homo sapiens
ggcctccctctcatt

SEQ ID NO: 96508 - DNA, 15 bp, Homo sapiens
aggcctccctctcat

SEQ ID NO: 96509 - DNA, 15 bp, Homo sapiens
caggcctccctctca

SEQ ID NO: 96510 - DNA, 15 bp, Homo sapiens
acaggcctccctctc

SEQ ID NO: 96511 - DNA, 15 bp, Homo sapiens
cacaggcctccctct

SEQ ID NO: 96512 - DNA, 15 bp, Homo sapiens
ccacaggcctccctc

SEQ ID NO: 96513 - DNA, 15 bp, Homo sapiens
accacaggcctccct

SEQ ID NO: 96514 - DNA, 15 bp, Homo sapiens
gaccacaggcctccc

SEQ ID NO: 96515 - DNA, 15 bp, Homo sapiens
agaccacaggcctcc

SEQ ID NO: 96516 - DNA, 15 bp, Homo sapiens
aagaccacaggcctc

SEQ ID NO: 96517 - DNA, 15 bp, Homo sapiens
aaagaccacaggcct

SEQ ID NO: 96518 - DNA, 15 bp, Homo sapiens
caaagaccacaggcc

SEQ ID NO: 96519 - DNA, 15 bp, Homo sapiens
gcaaagaccacaggc

SEQ ID NO: 96520 - DNA, 15 bp, Homo sapiens
agcaaagaccacagg

SEQ ID NO: 96521 - DNA, 15 bp, Homo sapiens
tagcaaagaccacag

SEQ ID NO: 96522 - DNA, 15 bp, Homo sapiens
gtagcaaagaccaca

SEQ ID NO: 96523 - DNA, 15 bp, Homo sapiens
agtagcaaagaccac

SEQ ID NO: 96524 - DNA, 15 bp, Homo sapiens
gagtagcaaagacca

SEQ ID NO: 96525 - DNA, 15 bp, Homo sapiens
agagtagcaaagacc

SEQ ID NO: 96526 - DNA, 15 bp, Homo sapiens
cagagtagcaaagac

SEQ ID NO: 96527 - DNA, 15 bp, Homo sapiens
tcagagtagcaaaga

SEQ ID NO: 96528 - DNA, 15 bp, Homo sapiens
gtcagagtagcaaag

SEQ ID NO: 96529 - DNA, 15 bp, Homo sapiens
agtcagagtagcaaa

SEQ ID NO: 96530 - DNA, 15 bp, Homo sapiens
gagtcagagtagcaa

SEQ ID NO: 96531 - DNA, 15 bp, Homo sapiens
ggagtcagagtagca

SEQ ID NO: 96532 - DNA, 15 bp, Homo sapiens
tggagtcagagtagc

SEQ ID NO: 96533 - DNA, 15 bp, Homo sapiens
gtggagtcagagtag

SEQ ID NO: 96534 - DNA, 15 bp, Homo sapiens
tgtggagtcagagta

SEQ ID NO: 96535 - DNA, 15 bp, Homo sapiens
ctgtggagtcagagt

SEQ ID NO: 96536 - DNA, 15 bp, Homo sapiens
cctgtggagtcagag

SEQ ID NO: 96537 - DNA, 15 bp, Homo sapiens
gcctgtggagtcaga

SEQ ID NO: 96538 - DNA, 15 bp, Homo sapiens
agcctgtggagtcag

SEQ ID NO: 96539 - DNA, 15 bp, Homo sapiens
cagcctgtggagtca

SEQ ID NO: 96540 - DNA, 15 bp, Homo sapiens
gcagcctgtggagtc

SEQ ID NO: 96541 - DNA, 15 bp, Homo sapiens
agcagcctgtggagt

SEQ ID NO: 96542 - DNA, 15 bp, Homo sapiens
cagcagcctgtggag

SEQ ID NO: 96543 - DNA, 15 bp, Homo sapiens
ccagcagcctgtgga

SEQ ID NO: 96544 - DNA, 15 bp, Homo sapiens
cccagcagcctgtgg

SEQ ID NO: 96545 - DNA, 15 bp, Homo sapiens
tcccagcagcctgtg

SEQ ID NO: 96546 - DNA, 15 bp, Homo sapiens
atcccagcagcctgt

SEQ ID NO: 96547 - DNA, 15 bp, Homo sapiens
catcccagcagcctg

SEQ ID NO: 96548 - DNA, 15 bp, Homo sapiens
ccatcccagcagcct

SEQ ID NO: 96549 - DNA, 15 bp, Homo sapiens
tccatcccagcagcc

SEQ ID NO: 96550 - DNA, 15 bp, Homo sapiens
gtccatcccagcagc

SEQ ID NO: 96551 - DNA, 15 bp, Homo sapiens
cgtccatcccagcag

SEQ ID NO: 96552 - DNA, 15 bp, Homo sapiens
acgtccatcccagca

SEQ ID NO: 96553 - DNA, 15 bp, Homo sapiens
aacgtccatcccagc

SEQ ID NO: 96554 - DNA, 15 bp, Homo sapiens
caacgtccatcccag

SEQ ID NO: 96555 - DNA, 15 bp, Homo sapiens
ccaacgtccatccca

SEQ ID NO: 96556 - DNA, 15 bp, Homo sapiens
tccaacgtccatccc

SEQ ID NO: 96557 - DNA, 15 bp, Homo sapiens
atccaacgtccatcc

SEQ ID NO: 96558 - DNA, 15 bp, Homo sapiens
catccaacgtccatc

SEQ ID NO: 96559 - DNA, 15 bp, Homo sapiens
tcatccaacgtccat

SEQ ID NO: 96560 - DNA, 15 bp, Homo sapiens
ttcatccaacgtcca

SEQ ID NO: 96561 - DNA, 15 bp, Homo sapiens
cttcatccaacgtcc

SEQ ID NO: 96562 - DNA, 15 bp, Homo sapiens
tcttcatccaacgtc

SEQ ID NO: 96563 - DNA, 15 bp, Homo sapiens
gtcttcatccaacgt

SEQ ID NO: 96564 - DNA, 15 bp, Homo sapiens
tgtcttcatccaacg

SEQ ID NO: 96565 - DNA, 15 bp, Homo sapiens
gtgtcttcatccaac

SEQ ID NO: 96566 - DNA, 15 bp, Homo sapiens
ggtgtcttcatccaa

SEQ ID NO: 96567 - DNA, 15 bp, Homo sapiens
tggtgtcttcatcca

SEQ ID NO: 96568 - DNA, 15 bp, Homo sapiens
ctggtgtcttcatcc

SEQ ID NO: 96569 - DNA, 15 bp, Homo sapiens
gctggtgtcttcatc

SEQ ID NO: 96570 - DNA, 15 bp, Homo sapiens
agctggtgtcttcat

SEQ ID NO: 96571 - DNA, 15 bp, Homo sapiens
aagctggtgtcttca

SEQ ID NO: 96572 - DNA, 15 bp, Homo sapiens
taagctggtgtcttc

SEQ ID NO: 96573 - DNA, 15 bp, Homo sapiens
ctaagctggtgtctt

SEQ ID NO: 96574 - DNA, 15 bp, Homo sapiens
cctaagctggtgtct

SEQ ID NO: 96575 - DNA, 15 bp, Homo sapiens
ccctaagctggtgtc

SEQ ID NO: 96576 - DNA, 15 bp, Homo sapiens
gccctaagctggtgt

SEQ ID NO: 96577 - DNA, 15 bp, Homo sapiens
tgccctaagctggtg

SEQ ID NO: 96578 - DNA, 15 bp, Homo sapiens
atgccctaagctggt

SEQ ID NO: 96579 - DNA, 15 bp, Homo sapiens
catgccctaagctgg

SEQ ID NO: 96580 - DNA, 15 bp, Homo sapiens
ccatgccctaagctg

SEQ ID NO: 96581 - DNA, 15 bp, Homo sapiens
gccatgccctaagct

SEQ ID NO: 96582 - DNA, 15 bp, Homo sapiens
ggccatgccctaagc

SEQ ID NO: 96583 - DNA, 15 bp, Homo sapiens
aggccatgccctaag

SEQ ID NO: 96584 - DNA, 15 bp, Homo sapiens
caggccatgccctaa

SEQ ID NO: 96585 - DNA, 15 bp, Homo sapiens
acaggccatgcccta

SEQ ID NO: 96586 - DNA, 15 bp, Homo sapiens
aacaggccatgccct

SEQ ID NO: 96587 - DNA, 15 bp, Homo sapiens
caacaggccatgccc

SEQ ID NO: 96588 - DNA, 15 bp, Homo sapiens
gcaacaggccatgcc

SEQ ID NO: 96589 - DNA, 15 bp, Homo sapiens
agcaacaggccatgc

SEQ ID NO: 96590 - DNA, 15 bp, Homo sapiens
tagcaacaggccatg

SEQ ID NO: 96591 - DNA, 15 bp, Homo sapiens
atagcaacaggccat

SEQ ID NO: 96592 - DNA, 15 bp, Homo sapiens
aatagcaacaggcca

SEQ ID NO: 96593 - DNA, 15 bp, Homo sapiens
aaatagcaacaggcc

SEQ ID NO: 96594 - DNA, 15 bp, Homo sapiens
taaatagcaacaggc

SEQ ID NO: 96595 - DNA, 15 bp, Homo sapiens
ataaatagcaacagg

SEQ ID NO: 96596 - DNA, 15 bp, Homo sapiens
cataaatagcaacag

SEQ ID NO: 96597 - DNA, 15 bp, Homo sapiens
tcataaatagcaaca

SEQ ID NO: 96598 - DNA, 15 bp, Homo sapiens
gtcataaatagcaac

SEQ ID NO: 96599 - DNA, 15 bp, Homo sapiens
agtcataaatagcaa

SEQ ID NO: 96600 - DNA, 15 bp, Homo sapiens
gagtcataaatagca

SEQ ID NO: 96601 - DNA, 15 bp, Homo sapiens
agagtcataaatagc

SEQ ID NO: 96602 - DNA, 15 bp, Homo sapiens
tagagtcataaatag

SEQ ID NO: 96603 - DNA, 15 bp, Homo sapiens
atagagtcataaata

SEQ ID NO: 96604 - DNA, 15 bp, Homo sapiens
aatagagtcataaat

SEQ ID NO: 96605 - DNA, 15 bp, Homo sapiens
taatagagtcataaa

SEQ ID NO: 96606 - DNA, 15 bp, Homo sapiens
gtaatagagtcataa

SEQ ID NO: 96607 - DNA, 15 bp, Homo sapiens
agtaatagagtcata

SEQ ID NO: 96608 - DNA, 15 bp, Homo sapiens
aagtaatagagtcat

SEQ ID NO: 96609 - DNA, 15 bp, Homo sapiens
gaagtaatagagtca

SEQ ID NO: 96610 - DNA, 15 bp, Homo sapiens
tgaagtaatagagtc

SEQ ID NO: 96611 - DNA, 15 bp, Homo sapiens
gtgaagtaatagagt

SEQ ID NO: 96612 - DNA, 15 bp, Homo sapiens
tgtgaagtaatagag

SEQ ID NO: 96613 - DNA, 15 bp, Homo sapiens
ctgtgaagtaataga

SEQ ID NO: 96614 - DNA, 15 bp, Homo sapiens
actgtgaagtaatag

SEQ ID NO: 96615 - DNA, 15 bp, Homo sapiens
cactgtgaagtaata

SEQ ID NO: 96616 - DNA, 15 bp, Homo sapiens
tcactgtgaagtaat

SEQ ID NO: 96617 - DNA, 15 bp, Homo sapiens
ctcactgtgaagtaa

SEQ ID NO: 96618 - DNA, 15 bp, Homo sapiens
tctcactgtgaagta

SEQ ID NO: 96619 - DNA, 15 bp, Homo sapiens
ctctcactgtgaagt

SEQ ID NO: 96620 - DNA, 15 bp, Homo sapiens
gctctcactgtgaag

SEQ ID NO: 96621 - DNA, 15 bp, Homo sapiens
tgctctcactgtgaa

SEQ ID NO: 96622 - DNA, 15 bp, Homo sapiens
gtgctctcactgtga

SEQ ID NO: 96623 - DNA, 15 bp, Homo sapiens
tgtgctctcactgtg

SEQ ID NO: 96624 - DNA, 15 bp, Homo sapiens
ctgtgctctcactgt

SEQ ID NO: 96625 - DNA, 15 bp, Homo sapiens
actgtgctctcactg

SEQ ID NO: 96626 - DNA, 15 bp, Homo sapiens
aactgtgctctcact

SEQ ID NO: 96627 - DNA, 15 bp, Homo sapiens
gaactgtgctctcac

SEQ ID NO: 96628 - DNA, 15 bp, Homo sapiens
tgaactgtgctctca

SEQ ID NO: 96629 - DNA, 15 bp, Homo sapiens
ctgaactgtgctctc

SEQ ID NO: 96630 - DNA, 15 bp, Homo sapiens
cctgaactgtgctct

SEQ ID NO: 96631 - DNA, 15 bp, Homo sapiens
gcctgaactgtgctc

SEQ ID NO: 96632 - DNA, 15 bp, Homo sapiens
agcctgaactgtgct

SEQ ID NO: 96633 - DNA, 15 bp, Homo sapiens
cagcctgaactgtgc

SEQ ID NO: 96634 - DNA, 15 bp, Homo sapiens
tcagcctgaactgtg

SEQ ID NO: 96635 - DNA, 15 bp, Homo sapiens
gtcagcctgaactgt

SEQ ID NO: 96636 - DNA, 15 bp, Homo sapiens
agtcagcctgaactg

SEQ ID NO: 96637 - DNA, 15 bp, Homo sapiens
cagtcagcctgaact

SEQ ID NO: 96638 - DNA, 15 bp, Homo sapiens
gcagtcagcctgaac

SEQ ID NO: 96639 - DNA, 15 bp, Homo sapiens
agcagtcagcctgaa

SEQ ID NO: 96640 - DNA, 15 bp, Homo sapiens
cagcagtcagcctga

SEQ ID NO: 96641 - DNA, 15 bp, Homo sapiens
ccagcagtcagcctg

SEQ ID NO: 96642 - DNA, 15 bp, Homo sapiens
cccagcagtcagcct

SEQ ID NO: 96643 - DNA, 15 bp, Homo sapiens
acccagcagtcagcc

SEQ ID NO: 96644 - DNA, 15 bp, Homo sapiens
cacccagcagtcagc

SEQ ID NO: 96645 - DNA, 15 bp, Homo sapiens
ccacccagcagtcag

SEQ ID NO: 96646 - DNA, 15 bp, Homo sapiens
gccacccagcagtca

SEQ ID NO: 96647 - DNA, 15 bp, Homo sapiens
ggccacccagcagtc

SEQ ID NO: 96648 - DNA, 15 bp, Homo sapiens
aggccacccagcagt

SEQ ID NO: 96649 - DNA, 15 bp, Homo sapiens
gaggccacccagcag

SEQ ID NO: 96650 - DNA, 15 bp, Homo sapiens
agaggccacccagca

SEQ ID NO: 96651 - DNA, 15 bp, Homo sapiens
cagaggccacccagc

SEQ ID NO: 96652 - DNA, 15 bp, Homo sapiens
acagaggccacccag

SEQ ID NO: 96653 - DNA, 15 bp, Homo sapiens
cacagaggccaccca

SEQ ID NO: 96654 - DNA, 15 bp, Homo sapiens
acacagaggccaccc

SEQ ID NO: 96655 - DNA, 15 bp, Homo sapiens
aacacagaggccacc

SEQ ID NO: 96656 - DNA, 15 bp, Homo sapiens
aaacacagaggccac

SEQ ID NO: 96657 - DNA, 15 bp, Homo sapiens
gaaacacagaggcca

SEQ ID NO: 96658 - DNA, 15 bp, Homo sapiens
agaaacacagaggcc

SEQ ID NO: 96659 - DNA, 15 bp, Homo sapiens
cagaaacacagaggc

SEQ ID NO: 96660 - DNA, 15 bp, Homo sapiens
acagaaacacagagg

SEQ ID NO: 96661 - DNA, 15 bp, Homo sapiens
gacagaaacacagag

SEQ ID NO: 96662 - DNA, 15 bp, Homo sapiens
tgacagaaacacaga

SEQ ID NO: 96663 - DNA, 15 bp, Homo sapiens
gtgacagaaacacag

SEQ ID NO: 96664 - DNA, 15 bp, Homo sapiens
agtgacagaaacaca

SEQ ID NO: 96665 - DNA, 15 bp, Homo sapiens
aagtgacagaaacac

SEQ ID NO: 96666 - DNA, 15 bp, Homo sapiens
gaagtgacagaaaca

SEQ ID NO: 96667 - DNA, 15 bp, Homo sapiens
ggaagtgacagaaac

SEQ ID NO: 96668 - DNA, 15 bp, Homo sapiens
aggaagtgacagaaa

SEQ ID NO: 96669 - DNA, 15 bp, Homo sapiens
aaggaagtgacagaa

SEQ ID NO: 96670 - DNA, 15 bp, Homo sapiens
aaaggaagtgacaga

SEQ ID NO: 96671 - DNA, 15 bp, Homo sapiens
aaaaggaagtgacag

SEQ ID NO: 96672 - DNA, 15 bp, Homo sapiens
aaaaaggaagtgaca

SEQ ID NO: 96673 - DNA, 15 bp, Homo sapiens
gaaaaaggaagtgac

SEQ ID NO: 96674 - DNA, 15 bp, Homo sapiens
tgaaaaaggaagtga

SEQ ID NO: 96675 - DNA, 15 bp, Homo sapiens
gtgaaaaaggaagtg

SEQ ID NO: 96676 - DNA, 15 bp, Homo sapiens
ggtgaaaaaggaagt

SEQ ID NO: 96677 - DNA, 15 bp, Homo sapiens
aggtgaaaaaggaag

SEQ ID NO: 96678 - DNA, 15 bp, Homo sapiens
taggtgaaaaaggaa

SEQ ID NO: 96679 - DNA, 15 bp, Homo sapiens
ataggtgaaaaagga

SEQ ID NO: 96680 - DNA, 15 bp, Homo sapiens
cataggtgaaaaagg

SEQ ID NO: 96681 - DNA, 15 bp, Homo sapiens
acataggtgaaaaag

SEQ ID NO: 96682 - DNA, 15 bp, Homo sapiens
cacataggtgaaaaa

SEQ ID NO: 96683 - DNA, 15 bp, Homo sapiens
tcacataggtgaaaa

SEQ ID NO: 96684 - DNA, 15 bp, Homo sapiens
ctcacataggtgaaa

SEQ ID NO: 96685 - DNA, 15 bp, Homo sapiens
cctcacataggtgaa

SEQ ID NO: 96686 - DNA, 15 bp, Homo sapiens
tcctcacataggtga

SEQ ID NO: 96687 - DNA, 15 bp, Homo sapiens
gtcctcacataggtg

SEQ ID NO: 96688 - DNA, 15 bp, Homo sapiens
agtcctcacataggt

SEQ ID NO: 96689 - DNA, 15 bp, Homo sapiens
cagtcctcacatagg

SEQ ID NO: 96690 - DNA, 15 bp, Homo sapiens
acagtcctcacatag

SEQ ID NO: 96691 - DNA, 15 bp, Homo sapiens
tacagtcctcacata

SEQ ID NO: 96692 - DNA, 15 bp, Homo sapiens
ctacagtcctcacat

SEQ ID NO: 96693 - DNA, 15 bp, Homo sapiens
gctacagtcctcaca

SEQ ID NO: 96694 - DNA, 15 bp, Homo sapiens
tgctacagtcctcac

SEQ ID NO: 96695 - DNA, 15 bp, Homo sapiens
atgctacagtcctca

SEQ ID NO: 96696 - DNA, 15 bp, Homo sapiens
aatgctacagtcctc

SEQ ID NO: 96697 - DNA, 15 bp, Homo sapiens
caatgctacagtcct

SEQ ID NO: 96698 - DNA, 15 bp, Homo sapiens
tcaatgctacagtcc

SEQ ID NO: 96699 - DNA, 15 bp, Homo sapiens
atcaatgctacagtc

SEQ ID NO: 96700 - DNA, 15 bp, Homo sapiens
aatcaatgctacagt

SEQ ID NO: 96701 - DNA, 15 bp, Homo sapiens
caatcaatgctacag

SEQ ID NO: 96702 - DNA, 15 bp, Homo sapiens
ccaatcaatgctaca

SEQ ID NO: 96703 - DNA, 15 bp, Homo sapiens
cccaatcaatgctac

SEQ ID NO: 96704 - DNA, 15 bp, Homo sapiens
tcccaatcaatgcta

SEQ ID NO: 96705 - DNA, 15 bp, Homo sapiens
gtcccaatcaatgct

SEQ ID NO: 96706 - DNA, 15 bp, Homo sapiens
agtcccaatcaatgc

SEQ ID NO: 96707 - DNA, 15 bp, Homo sapiens
aagtcccaatcaatg

SEQ ID NO: 96708 - DNA, 15 bp, Homo sapiens
gaagtcccaatcaat

SEQ ID NO: 96709 - DNA, 15 bp, Homo sapiens
ggaagtcccaatcaa

SEQ ID NO: 96710 - DNA, 15 bp, Homo sapiens
tggaagtcccaatca

SEQ ID NO: 96711 - DNA, 15 bp, Homo sapiens
ttggaagtcccaatc

SEQ ID NO: 96712 - DNA, 15 bp, Homo sapiens
tttggaagtcccaat

SEQ ID NO: 96713 - DNA, 15 bp, Homo sapiens
ctttggaagtcccaa

SEQ ID NO: 96714 - DNA, 15 bp, Homo sapiens
actttggaagtccca

SEQ ID NO: 96715 - DNA, 15 bp, Homo sapiens
gactttggaagtccc

SEQ ID NO: 96716 - DNA, 15 bp, Homo sapiens
ggactttggaagtcc

SEQ ID NO: 96717 - DNA, 15 bp, Homo sapiens
aggactttggaagtc

SEQ ID NO: 96718 - DNA, 15 bp, Homo sapiens
caggactttggaagt

SEQ ID NO: 96719 - DNA, 15 bp, Homo sapiens
acaggactttggaag

SEQ ID NO: 96720 - DNA, 15 bp, Homo sapiens
aacaggactttggaa

SEQ ID NO: 96721 - DNA, 15 bp, Homo sapiens
taacaggactttgga

SEQ ID NO: 96722 - DNA, 15 bp, Homo sapiens
ctaacaggactttgg

SEQ ID NO: 96723 - DNA, 15 bp, Homo sapiens
gctaacaggactttg

SEQ ID NO: 96724 - DNA, 15 bp, Homo sapiens
ggctaacaggacttt

SEQ ID NO: 96725 - DNA, 15 bp, Homo sapiens
tggctaacaggactt

SEQ ID NO: 96726 - DNA, 15 bp, Homo sapiens
ttggctaacaggact

SEQ ID NO: 96727 - DNA, 15 bp, Homo sapiens
cttggctaacaggac

SEQ ID NO: 96728 - DNA, 15 bp, Homo sapiens
gcttggctaacagga

SEQ ID NO: 96729 - DNA, 15 bp, Homo sapiens
agcttggctaacagg

SEQ ID NO: 96730 - DNA, 15 bp, Homo sapiens
aagcttggctaacag

SEQ ID NO: 96731 - DNA, 15 bp, Homo sapiens
gaagcttggctaaca

SEQ ID NO: 96732 - DNA, 15 bp, Homo sapiens
agaagcttggctaac

SEQ ID NO: 96733 - DNA, 15 bp, Homo sapiens
cagaagcttggctaa

SEQ ID NO: 96734 - DNA, 15 bp, Homo sapiens
gcagaagcttggcta

SEQ ID NO: 96735 - DNA, 15 bp, Homo sapiens
ggcagaagcttggct

SEQ ID NO: 96736 - DNA, 15 bp, Homo sapiens
tggcagaagcttggc

SEQ ID NO: 96737 - DNA, 15 bp, Homo sapiens
atggcagaagcttgg

SEQ ID NO: 96738 - DNA, 15 bp, Homo sapiens
gatggcagaagcttg

SEQ ID NO: 96739 - DNA, 15 bp, Homo sapiens
tgatggcagaagctt

SEQ ID NO: 96740 - DNA, 15 bp, Homo sapiens
ctgatggcagaagct

SEQ ID NO: 96741 - DNA, 15 bp, Homo sapiens
tctgatggcagaagc

SEQ ID NO: 96742 - DNA, 15 bp, Homo sapiens
atctgatggcagaag

SEQ ID NO: 96743 - DNA, 15 bp, Homo sapiens
catctgatggcagaa

SEQ ID NO: 96744 - DNA, 15 bp, Homo sapiens
ccatctgatggcaga

SEQ ID NO: 96745 - DNA, 15 bp, Homo sapiens
cccatctgatggcag

SEQ ID NO: 96746 - DNA, 15 bp, Homo sapiens
gcccatctgatggca

SEQ ID NO: 96747 - DNA, 15 bp, Homo sapiens
ggcccatctgatggc

SEQ ID NO: 96748 - DNA, 15 bp, Homo sapiens
aggcccatctgatgg

SEQ ID NO: 96749 - DNA, 15 bp, Homo sapiens
caggcccatctgatg

SEQ ID NO: 96750 - DNA, 15 bp, Homo sapiens
acaggcccatctgat

SEQ ID NO: 96751 - DNA, 15 bp, Homo sapiens
cacaggcccatctga

SEQ ID NO: 96752 - DNA, 15 bp, Homo sapiens
ccacaggcccatctg

SEQ ID NO: 96753 - DNA, 15 bp, Homo sapiens
cccacaggcccatct

SEQ ID NO: 96754 - DNA, 15 bp, Homo sapiens
gcccacaggcccatc

SEQ ID NO: 96755 - DNA, 15 bp, Homo sapiens
tgcccacaggcccat

SEQ ID NO: 96756 - DNA, 15 bp, Homo sapiens
gtgcccacaggccca

SEQ ID NO: 96757 - DNA, 15 bp, Homo sapiens
tgtgcccacaggccc

SEQ ID NO: 96758 - DNA, 15 bp, Homo sapiens
atgtgcccacaggcc

SEQ ID NO: 96759 - DNA, 15 bp, Homo sapiens
aatgtgcccacaggc

SEQ ID NO: 96760 - DNA, 15 bp, Homo sapiens
caatgtgcccacagg

SEQ ID NO: 96761 - DNA, 15 bp, Homo sapiens
tcaatgtgcccacag

SEQ ID NO: 96762 - DNA, 15 bp, Homo sapiens
gtcaatgtgcccaca

SEQ ID NO: 96763 - DNA, 15 bp, Homo sapiens
ggtcaatgtgcccac

SEQ ID NO: 96764 - DNA, 15 bp, Homo sapiens
gggtcaatgtgccca

SEQ ID NO: 96765 - DNA, 15 bp, Homo sapiens
tgggtcaatgtgccc

SEQ ID NO: 96766 - DNA, 15 bp, Homo sapiens
atgggtcaatgtgcc

SEQ ID NO: 96767 - DNA, 15 bp, Homo sapiens
tatgggtcaatgtgc

SEQ ID NO: 96768 - DNA, 15 bp, Homo sapiens
ttatgggtcaatgtg

SEQ ID NO: 96769 - DNA, 15 bp, Homo sapiens
tttatgggtcaatgt

SEQ ID NO: 96770 - DNA, 15 bp, Homo sapiens
ttttatgggtcaatg

SEQ ID NO: 96771 - DNA, 15 bp, Homo sapiens
gttttatgggtcaat

SEQ ID NO: 96772 - DNA, 15 bp, Homo sapiens
agttttatgggtcaa

SEQ ID NO: 96773 - DNA, 15 bp, Homo sapiens
gagttttatgggtca

SEQ ID NO: 96774 - DNA, 15 bp, Homo sapiens
agagttttatgggtc

SEQ ID NO: 96775 - DNA, 15 bp, Homo sapiens
cagagttttatgggt

SEQ ID NO: 96776 - DNA, 15 bp, Homo sapiens
gcagagttttatggg

SEQ ID NO: 96777 - DNA, 15 bp, Homo sapiens
ggcagagttttatgg

SEQ ID NO: 96778 - DNA, 15 bp, Homo sapiens
aggcagagttttatg

SEQ ID NO: 96779 - DNA, 15 bp, Homo sapiens
gaggcagagttttat

SEQ ID NO: 96780 - DNA, 15 bp, Homo sapiens
ggaggcagagtttta

SEQ ID NO: 96781 - DNA, 15 bp, Homo sapiens
aggaggcagagtttt

SEQ ID NO: 96782 - DNA, 15 bp, Homo sapiens
aaggaggcagagttt

SEQ ID NO: 96783 - DNA, 15 bp, Homo sapiens
gaaggaggcagagtt

SEQ ID NO: 96784 - DNA, 15 bp, Homo sapiens
ggaaggaggcagagt

SEQ ID NO: 96785 - DNA, 15 bp, Homo sapiens
aggaaggaggcagag

SEQ ID NO: 96786 - DNA, 15 bp, Homo sapiens
taggaaggaggcaga

SEQ ID NO: 96787 - DNA, 15 bp, Homo sapiens
ttaggaaggaggcag

SEQ ID NO: 96788 - DNA, 15 bp, Homo sapiens
cttaggaaggaggca

SEQ ID NO: 96789 - DNA, 15 bp, Homo sapiens
ccttaggaaggaggc

SEQ ID NO: 96790 - DNA, 15 bp, Homo sapiens
gccttaggaaggagg

SEQ ID NO: 96791 - DNA, 15 bp, Homo sapiens
ggccttaggaaggag

SEQ ID NO: 96792 - DNA, 15 bp, Homo sapiens
gggccttaggaagga

SEQ ID NO: 96793 - DNA, 15 bp, Homo sapiens
agggccttaggaagg

SEQ ID NO: 96794 - DNA, 15 bp, Homo sapiens
cagggccttaggaag

SEQ ID NO: 96795 - DNA, 15 bp, Homo sapiens
ccagggccttaggaa

SEQ ID NO: 96796 - DNA, 15 bp, Homo sapiens
cccagggccttagga

SEQ ID NO: 96797 - DNA, 15 bp, Homo sapiens
ccccagggccttagg

SEQ ID NO: 96798 - DNA, 15 bp, Homo sapiens
gccccagggccttag

SEQ ID NO: 96799 - DNA, 15 bp, Homo sapiens
tgccccagggcctta

SEQ ID NO: 96800 - DNA, 15 bp, Homo sapiens
gtgccccagggcctt

SEQ ID NO: 96801 - DNA, 15 bp, Homo sapiens
ggtgccccagggcct

SEQ ID NO: 96802 - DNA, 15 bp, Homo sapiens
tggtgccccagggcc

SEQ ID NO: 96803 - DNA, 15 bp, Homo sapiens
gtggtgccccagggc

SEQ ID NO: 96804 - DNA, 15 bp, Homo sapiens
tgtggtgccccaggg

SEQ ID NO: 96805 - DNA, 15 bp, Homo sapiens
ctgtggtgccccagg

SEQ ID NO: 96806 - DNA, 15 bp, Homo sapiens
tctgtggtgccccag

SEQ ID NO: 96807 - DNA, 15 bp, Homo sapiens
ttctgtggtgcccca

SEQ ID NO: 96808 - DNA, 15 bp, Homo sapiens
tttctgtggtgcccc

SEQ ID NO: 96809 - DNA, 15 bp, Homo sapiens
ctttctgtggtgccc

SEQ ID NO: 96810 - DNA, 15 bp, Homo sapiens
tctttctgtggtgcc

SEQ ID NO: 96811 - DNA, 15 bp, Homo sapiens
atctttctgtggtgc

SEQ ID NO: 96812 - DNA, 15 bp, Homo sapiens
catctttctgtggtg

SEQ ID NO: 96813 - DNA, 15 bp, Homo sapiens
ccatctttctgtggt

SEQ ID NO: 96814 - DNA, 15 bp, Homo sapiens
cccatctttctgtgg

SEQ ID NO: 96815 - DNA, 15 bp, Homo sapiens
gcccatctttctgtg

SEQ ID NO: 96816 - DNA, 15 bp, Homo sapiens
ggcccatctttctgt

SEQ ID NO: 96817 - DNA, 15 bp, Homo sapiens
aggcccatctttctg

SEQ ID NO: 96818 - DNA, 15 bp, Homo sapiens
caggcccatctttct

SEQ ID NO: 96819 - DNA, 15 bp, Homo sapiens
gcaggcccatctttc

SEQ ID NO: 96820 - DNA, 15 bp, Homo sapiens
ggcaggcccatcttt

SEQ ID NO: 96821 - DNA, 15 bp, Homo sapiens
tggcaggcccatctt

SEQ ID NO: 96822 - DNA, 15 bp, Homo sapiens
ttggcaggcccatct

SEQ ID NO: 96823 - DNA, 15 bp, Homo sapiens
cttggcaggcccatc

SEQ ID NO: 96824 - DNA, 15 bp, Homo sapiens
gcttggcaggcccat

SEQ ID NO: 96825 - DNA, 15 bp, Homo sapiens
ggcttggcaggccca

SEQ ID NO: 96826 - DNA, 15 bp, Homo sapiens
tggcttggcaggccc

SEQ ID NO: 96827 - DNA, 15 bp, Homo sapiens
gtggcttggcaggcc

SEQ ID NO: 96828 - DNA, 15 bp, Homo sapiens
agtggcttggcaggc

SEQ ID NO: 96829 - DNA, 15 bp, Homo sapiens
cagtggcttggcagg

SEQ ID NO: 96830 - DNA, 15 bp, Homo sapiens
gcagtggcttggcag

SEQ ID NO: 96831 - DNA, 15 bp, Homo sapiens
agcagtggcttggca

SEQ ID NO: 96832 - DNA, 15 bp, Homo sapiens
gagcagtggcttggc

SEQ ID NO: 96833 - DNA, 15 bp, Homo sapiens
agagcagtggcttgg

SEQ ID NO: 96834 - DNA, 15 bp, Homo sapiens
cagagcagtggcttg

SEQ ID NO: 96835 - DNA, 15 bp, Homo sapiens
tcagagcagtggctt

SEQ ID NO: 96836 - DNA, 15 bp, Homo sapiens
atcagagcagtggct

SEQ ID NO: 96837 - DNA, 15 bp, Homo sapiens
tatcagagcagtggc

SEQ ID NO: 96838 - DNA, 15 bp, Homo sapiens
ttatcagagcagtgg

SEQ ID NO: 96839 - DNA, 15 bp, Homo sapiens
cttatcagagcagtg

SEQ ID NO: 96840 - DNA, 15 bp, Homo sapiens
ccttatcagagcagt

SEQ ID NO: 96841 - DNA, 15 bp, Homo sapiens
gccttatcagagcag

SEQ ID NO: 96842 - DNA, 15 bp, Homo sapiens
tgccttatcagagca

SEQ ID NO: 96843 - DNA, 15 bp, Homo sapiens
atgccttatcagagc

SEQ ID NO: 96844 - DNA, 15 bp, Homo sapiens
catgccttatcagag

SEQ ID NO: 96845 - DNA, 15 bp, Homo sapiens
gccagataacttggc

SEQ ID NO: 96846 - DNA, 15 bp, Homo sapiens
ggccagataacttgg

SEQ ID NO: 96847 - DNA, 15 bp, Homo sapiens
aggccagataacttg

SEQ ID NO: 96848 - DNA, 15 bp, Homo sapiens
aaggccagataactt

SEQ ID NO: 96849 - DNA, 15 bp, Homo sapiens
taaggccagataact

SEQ ID NO: 96850 - DNA, 15 bp, Homo sapiens
ataaggccagataac

SEQ ID NO: 96851 - DNA, 15 bp, Homo sapiens
tataaggccagataa

SEQ ID NO: 96852 - DNA, 15 bp, Homo sapiens
ttataaggccagata

SEQ ID NO: 96853 - DNA, 15 bp, Homo sapiens
tttataaggccagat

SEQ ID NO: 96854 - DNA, 15 bp, Homo sapiens
ttttataaggccaga

SEQ ID NO: 96855 - DNA, 15 bp, Homo sapiens
cttttataaggccag

SEQ ID NO: 96856 - DNA, 15 bp, Homo sapiens
tcttttataaggcca

SEQ ID NO: 96857 - DNA, 15 bp, Homo sapiens
ctcttttataaggcc

SEQ ID NO: 96858 - DNA, 15 bp, Homo sapiens
tctcttttataaggc

SEQ ID NO: 96859 - DNA, 15 bp, Homo sapiens
atctcttttataagg

SEQ ID NO: 96860 - DNA, 15 bp, Homo sapiens
catctcttttataag

SEQ ID NO: 96861 - DNA, 15 bp, Homo sapiens
acatctcttttataa

SEQ ID NO: 96862 - DNA, 15 bp, Homo sapiens
cacatctcttttata

SEQ ID NO: 96863 - DNA, 15 bp, Homo sapiens
acacatctcttttat

SEQ ID NO: 96864 - DNA, 15 bp, Homo sapiens
gacacatctctttta

SEQ ID NO: 96865 - DNA, 15 bp, Homo sapiens
ggacacatctctttt

SEQ ID NO: 96866 - DNA, 15 bp, Homo sapiens
aggacacatctcttt

SEQ ID NO: 96867 - DNA, 15 bp, Homo sapiens
caggacacatctctt

SEQ ID NO: 96868 - DNA, 15 bp, Homo sapiens
ccaggacacatctct

SEQ ID NO: 96869 - DNA, 15 bp, Homo sapiens
tccaggacacatctc

SEQ ID NO: 96870 - DNA, 15 bp, Homo sapiens
ttccaggacacatct

SEQ ID NO: 96871 - DNA, 15 bp, Homo sapiens
tttccaggacacatc

SEQ ID NO: 96872 - DNA, 15 bp, Homo sapiens
ttttccaggacacat

SEQ ID NO: 96873 - DNA, 15 bp, Homo sapiens
cttttccaggacaca

SEQ ID NO: 96874 - DNA, 15 bp, Homo sapiens
acttttccaggacac

SEQ ID NO: 96875 - DNA, 15 bp, Homo sapiens
aacttttccaggaca

SEQ ID NO: 96876 - DNA, 15 bp, Homo sapiens
caacttttccaggac

SEQ ID NO: 96877 - DNA, 15 bp, Homo sapiens
gcaacttttccagga

SEQ ID NO: 96878 - DNA, 15 bp, Homo sapiens
tgcaacttttccagg

SEQ ID NO: 96879 - DNA, 15 bp, Homo sapiens
ctgcaacttttccag

SEQ ID NO: 96880 - DNA, 15 bp, Homo sapiens
tctgcaacttttcca

SEQ ID NO: 96881 - DNA, 15 bp, Homo sapiens
atctgcaacttttcc

SEQ ID NO: 96882 - DNA, 15 bp, Homo sapiens
tatctgcaacttttc

SEQ ID NO: 96883 - DNA, 15 bp, Homo sapiens
atatctgcaactttt

SEQ ID NO: 96884 - DNA, 15 bp, Homo sapiens
tatatctgcaacttt

SEQ ID NO: 96885 - DNA, 15 bp, Homo sapiens
ctatatctgcaactt

SEQ ID NO: 96886 - DNA, 15 bp, Homo sapiens
actatatctgcaact

SEQ ID NO: 96887 - DNA, 15 bp, Homo sapiens
gactatatctgcaac

SEQ ID NO: 96888 - DNA, 15 bp, Homo sapiens
tgactatatctgcaa

SEQ ID NO: 96889 - DNA, 15 bp, Homo sapiens
ttgactatatctgca

SEQ ID NO: 96890 - DNA, 15 bp, Homo sapiens
attgactatatctgc

SEQ ID NO: 96891 - DNA, 15 bp, Homo sapiens
aattgactatatctg

SEQ ID NO: 96892 - DNA, 15 bp, Homo sapiens
aaattgactatatct

SEQ ID NO: 96893 - DNA, 15 bp, Homo sapiens
caaattgactatatc

SEQ ID NO: 96894 - DNA, 15 bp, Homo sapiens
tcaaattgactatat

SEQ ID NO: 96895 - DNA, 15 bp, Homo sapiens
gtcaaattgactata

SEQ ID NO: 96896 - DNA, 15 bp, Homo sapiens
ggtcaaattgactat

SEQ ID NO: 96897 - DNA, 15 bp, Homo sapiens
aggtcaaattgacta

SEQ ID NO: 96898 - DNA, 15 bp, Homo sapiens
aaggtcaaattgact

SEQ ID NO: 96899 - DNA, 15 bp, Homo sapiens
caaggtcaaattgac

SEQ ID NO: 96900 - DNA, 15 bp, Homo sapiens
acaaggtcaaattga

SEQ ID NO: 96901 - DNA, 15 bp, Homo sapiens
tacaaggtcaaattg

SEQ ID NO: 96902 - DNA, 15 bp, Homo sapiens
gtacaaggtcaaatt

SEQ ID NO: 96903 - DNA, 15 bp, Homo sapiens
agtacaaggtcaaat

SEQ ID NO: 96904 - DNA, 15 bp, Homo sapiens
aagtacaaggtcaaa

SEQ ID NO: 96905 - DNA, 15 bp, Homo sapiens
aaagtacaaggtcaa

SEQ ID NO: 96906 - DNA, 15 bp, Homo sapiens
taaagtacaaggtca

SEQ ID NO: 96907 - DNA, 15 bp, Homo sapiens
ttaaagtacaaggtc

SEQ ID NO: 96908 - DNA, 15 bp, Homo sapiens
tttaaagtacaaggt

SEQ ID NO: 96909 - DNA, 15 bp, Homo sapiens
ctttaaagtacaagg

SEQ ID NO: 96910 - DNA, 15 bp, Homo sapiens
tctttaaagtacaag

SEQ ID NO: 96911 - DNA, 15 bp, Homo sapiens
atctttaaagtacaa

SEQ ID NO: 96912 - DNA, 15 bp, Homo sapiens
aatctttaaagtaca

SEQ ID NO: 96913 - DNA, 15 bp, Homo sapiens
aaatctttaaagtac

SEQ ID NO: 96914 - DNA, 15 bp, Homo sapiens
taaatctttaaagta

SEQ ID NO: 96915 - DNA, 15 bp, Homo sapiens
ctaaatctttaaagt

SEQ ID NO: 96916 - DNA, 15 bp, Homo sapiens
actaaatctttaaag

SEQ ID NO: 96917 - DNA, 15 bp, Homo sapiens
tactaaatctttaaa

SEQ ID NO: 96918 - DNA, 15 bp, Homo sapiens
atactaaatctttaa

SEQ ID NO: 96919 - DNA, 15 bp, Homo sapiens
gatactaaatcttta

SEQ ID NO: 96920 - DNA, 15 bp, Homo sapiens
tgatactaaatcttt

SEQ ID NO: 96921 - DNA, 15 bp, Homo sapiens
ttgatactaaatctt

SEQ ID NO: 96922 - DNA, 15 bp, Homo sapiens
tttgatactaaatct

SEQ ID NO: 96923 - DNA, 15 bp, Homo sapiens
ttttgatactaaatc

SEQ ID NO: 96924 - DNA, 15 bp, Homo sapiens
tttttgatactaaat

SEQ ID NO: 96925 - DNA, 15 bp, Homo sapiens
atttttgatactaaa

SEQ ID NO: 96926 - DNA, 15 bp, Homo sapiens
tatttttgatactaa

SEQ ID NO: 96927 - DNA, 15 bp, Homo sapiens
ttatttttgatacta

SEQ ID NO: 96928 - DNA, 15 bp, Homo sapiens
gttatttttgatact

SEQ ID NO: 96929 - DNA, 15 bp, Homo sapiens
agttatttttgatac

SEQ ID NO: 96930 - DNA, 15 bp, Homo sapiens
gagttatttttgata

SEQ ID NO: 96931 - DNA, 15 bp, Homo sapiens
agagttatttttgat

SEQ ID NO: 96932 - DNA, 15 bp, Homo sapiens
gagagttatttttga

SEQ ID NO: 96933 - DNA, 15 bp, Homo sapiens
tgagagttatttttg

SEQ ID NO: 96934 - DNA, 15 bp, Homo sapiens
ttgagagttattttt

SEQ ID NO: 96935 - DNA, 15 bp, Homo sapiens
cttgagagttatttt

SEQ ID NO: 96936 - DNA, 15 bp, Homo sapiens
tcttgagagttattt

SEQ ID NO: 96937 - DNA, 15 bp, Homo sapiens
ctcttgagagttatt

SEQ ID NO: 96938 - DNA, 15 bp, Homo sapiens
cctcttgagagttat

SEQ ID NO: 96939 - DNA, 15 bp, Homo sapiens
ccctcttgagagtta

SEQ ID NO: 96940 - DNA, 15 bp, Homo sapiens
accctcttgagagtt

SEQ ID NO: 96941 - DNA, 15 bp, Homo sapiens
gaccctcttgagagt

SEQ ID NO: 96942 - DNA, 15 bp, Homo sapiens
ggaccctcttgagag

SEQ ID NO: 96943 - DNA, 15 bp, Homo sapiens
aggaccctcttgaga

SEQ ID NO: 96944 - DNA, 15 bp, Homo sapiens
aaggaccctcttgag

SEQ ID NO: 96945 - DNA, 15 bp, Homo sapiens
gaaggaccctcttga

SEQ ID NO: 96946 - DNA, 15 bp, Homo sapiens
agaaggaccctcttg

SEQ ID NO: 96947 - DNA, 15 bp, Homo sapiens
tagaaggaccctctt

SEQ ID NO: 96948 - DNA, 15 bp, Homo sapiens
ttagaaggaccctct

SEQ ID NO: 96949 - DNA, 15 bp, Homo sapiens
tttagaaggaccctc

SEQ ID NO: 96950 - DNA, 15 bp, Homo sapiens
gtttagaaggaccct

SEQ ID NO: 96951 - DNA, 15 bp, Homo sapiens
ggtttagaaggaccc

SEQ ID NO: 96952 - DNA, 15 bp, Homo sapiens
tggtttagaaggacc

SEQ ID NO: 96953 - DNA, 15 bp, Homo sapiens
ttggtttagaaggac

SEQ ID NO: 96954 - DNA, 15 bp, Homo sapiens
cttggtttagaagga

SEQ ID NO: 96955 - DNA, 15 bp, Homo sapiens
acttggtttagaagg

SEQ ID NO: 96956 - DNA, 15 bp, Homo sapiens
gacttggtttagaag

SEQ ID NO: 96957 - DNA, 15 bp, Homo sapiens
ggacttggtttagaa

SEQ ID NO: 96958 - DNA, 15 bp, Homo sapiens
tggacttggtttaga

SEQ ID NO: 96959 - DNA, 15 bp, Homo sapiens
atggacttggtttag

SEQ ID NO: 96960 - DNA, 15 bp, Homo sapiens
gatggacttggttta

SEQ ID NO: 96961 - DNA, 15 bp, Homo sapiens
cgatggacttggttt

SEQ ID NO: 96962 - DNA, 15 bp, Homo sapiens
tcgatggacttggtt

SEQ ID NO: 96963 - DNA, 15 bp, Homo sapiens
ctcgatggacttggt

SEQ ID NO: 96964 - DNA, 15 bp, Homo sapiens
tctcgatggacttgg

SEQ ID NO: 96965 - DNA, 15 bp, Homo sapiens
atctcgatggacttg

SEQ ID NO: 96966 - DNA, 15 bp, Homo sapiens
aatctcgatggactt

SEQ ID NO: 96967 - DNA, 15 bp, Homo sapiens
caatctcgatggact

SEQ ID NO: 96968 - DNA, 15 bp, Homo sapiens
ccaatctcgatggac

SEQ ID NO: 96969 - DNA, 15 bp, Homo sapiens
cccaatctcgatgga

SEQ ID NO: 96970 - DNA, 15 bp, Homo sapiens
tcccaatctcgatgg

SEQ ID NO: 96971 - DNA, 15 bp, Homo sapiens
ctcccaatctcgatg

SEQ ID NO: 96972 - DNA, 15 bp, Homo sapiens
gctcccaatctcgat

SEQ ID NO: 96973 - DNA, 15 bp, Homo sapiens
agctcccaatctcga

SEQ ID NO: 96974 - DNA, 15 bp, Homo sapiens
tagctcccaatctcg

SEQ ID NO: 96975 - DNA, 15 bp, Homo sapiens
ctagctcccaatctc

SEQ ID NO: 96976 - DNA, 15 bp, Homo sapiens
gctagctcccaatct

SEQ ID NO: 96977 - DNA, 15 bp, Homo sapiens
tgctagctcccaatc

SEQ ID NO: 96978 - DNA, 15 bp, Homo sapiens
ctgctagctcccaat

SEQ ID NO: 96979 - DNA, 15 bp, Homo sapiens
cctgctagctcccaa

SEQ ID NO: 96980 - DNA, 15 bp, Homo sapiens
gcctgctagctccca

SEQ ID NO: 96981 - DNA, 15 bp, Homo sapiens
ggcctgctagctccc

SEQ ID NO: 96982 - DNA, 15 bp, Homo sapiens
gggcctgctagctcc

SEQ ID NO: 96983 - DNA, 15 bp, Homo sapiens
agggcctgctagctc

SEQ ID NO: 96984 - DNA, 15 bp, Homo sapiens
aagggcctgctagct

SEQ ID NO: 96985 - DNA, 15 bp, Homo sapiens
caagggcctgctagc

SEQ ID NO: 96986 - DNA, 15 bp, Homo sapiens
acaagggcctgctag

SEQ ID NO: 96987 - DNA, 15 bp, Homo sapiens
gacaagggcctgcta

SEQ ID NO: 96988 - DNA, 15 bp, Homo sapiens
cgacaagggcctgct

SEQ ID NO: 96989 - DNA, 15 bp, Homo sapiens
gcgacaagggcctgc

SEQ ID NO: 96990 - DNA, 15 bp, Homo sapiens
tgcgacaagggcctg

SEQ ID NO: 96991 - DNA, 15 bp, Homo sapiens
ctgcgacaagggcct

SEQ ID NO: 96992 - DNA, 15 bp, Homo sapiens
actgcgacaagggcc

SEQ ID NO: 96993 - DNA, 15 bp, Homo sapiens
cactgcgacaagggc

SEQ ID NO: 96994 - DNA, 15 bp, Homo sapiens
acactgcgacaaggg

SEQ ID NO: 96995 - DNA, 15 bp, Homo sapiens
cacactgcgacaagg

SEQ ID NO: 96996 - DNA, 15 bp, Homo sapiens
ccacactgcgacaag

SEQ ID NO: 96997 - DNA, 15 bp, Homo sapiens
gccacactgcgacaa

SEQ ID NO: 96998 - DNA, 15 bp, Homo sapiens
ggccacactgcgaca

SEQ ID NO: 96999 - DNA, 15 bp, Homo sapiens
gggccacactgcgac

SEQ ID NO: 97000 - DNA, 15 bp, Homo sapiens
tgggccacactgcga

SEQ ID NO: 97001 - DNA, 15 bp, Homo sapiens
gtgggccacactgcg

SEQ ID NO: 97002 - DNA, 15 bp, Homo sapiens
agtgggccacactgc

SEQ ID NO: 97003 - DNA, 15 bp, Homo sapiens
gagtgggccacactg

SEQ ID NO: 97004 - DNA, 15 bp, Homo sapiens
tgagtgggccacact

SEQ ID NO: 97005 - DNA, 15 bp, Homo sapiens
gtgagtgggccacac

SEQ ID NO: 97006 - DNA, 15 bp, Homo sapiens
ggtgagtgggccaca

SEQ ID NO: 97007 - DNA, 15 bp, Homo sapiens
aggtgagtgggccac

SEQ ID NO: 97008 - DNA, 15 bp, Homo sapiens
aaggtgagtgggcca

SEQ ID NO: 97009 - DNA, 15 bp, Homo sapiens
gaaggtgagtgggcc

SEQ ID NO: 97010 - DNA, 15 bp, Homo sapiens
ggaaggtgagtgggc

SEQ ID NO: 97011 - DNA, 15 bp, Homo sapiens
gggaaggtgagtggg

SEQ ID NO: 97012 - DNA, 15 bp, Homo sapiens
tgggaaggtgagtgg

SEQ ID NO: 97013 - DNA, 15 bp, Homo sapiens
atgggaaggtgagtg

SEQ ID NO: 97014 - DNA, 15 bp, Homo sapiens
gatgggaaggtgagt

SEQ ID NO: 97015 - DNA, 15 bp, Homo sapiens
ggatgggaaggtgag

SEQ ID NO: 97016 - DNA, 15 bp, Homo sapiens
gggatgggaaggtga

SEQ ID NO: 97017 - DNA, 15 bp, Homo sapiens
tgggatgggaaggtg

SEQ ID NO: 97018 - DNA, 15 bp, Homo sapiens
ctgggatgggaaggt

SEQ ID NO: 97019 - DNA, 15 bp, Homo sapiens
cctgggatgggaagg

SEQ ID NO: 97020 - DNA, 15 bp, Homo sapiens
ccctgggatgggaag

SEQ ID NO: 97021 - DNA, 15 bp, Homo sapiens
tccctgggatgggaa

SEQ ID NO: 97022 - DNA, 15 bp, Homo sapiens
gtccctgggatggga

SEQ ID NO: 97023 - DNA, 15 bp, Homo sapiens
agtccctgggatggg

SEQ ID NO: 97024 - DNA, 15 bp, Homo sapiens
gagtccctgggatgg

SEQ ID NO: 97025 - DNA, 15 bp, Homo sapiens
agagtccctgggatg

SEQ ID NO: 97026 - DNA, 15 bp, Homo sapiens
cagagtccctgggat

SEQ ID NO: 97027 - DNA, 15 bp, Homo sapiens
gcagagtccctggga

SEQ ID NO: 97028 - DNA, 15 bp, Homo sapiens
ggcagagtccctggg

SEQ ID NO: 97029 - DNA, 15 bp, Homo sapiens
aggcagagtccctgg

SEQ ID NO: 97030 - DNA, 15 bp, Homo sapiens
taggcagagtccctg

SEQ ID NO: 97031 - DNA, 15 bp, Homo sapiens
gtaggcagagtccct

SEQ ID NO: 97032 - DNA, 15 bp, Homo sapiens
ggtaggcagagtccc

SEQ ID NO: 97033 - DNA, 15 bp, Homo sapiens
gggtaggcagagtcc

SEQ ID NO: 97034 - DNA, 15 bp, Homo sapiens
tgggtaggcagagtc

SEQ ID NO: 97035 - DNA, 15 bp, Homo sapiens
atgggtaggcagagt

SEQ ID NO: 97036 - DNA, 15 bp, Homo sapiens
aatgggtaggcagag

SEQ ID NO: 97037 - DNA, 15 bp, Homo sapiens
gaatgggtaggcaga

SEQ ID NO: 97038 - DNA, 15 bp, Homo sapiens
ggaatgggtaggcag

SEQ ID NO: 97039 - DNA, 15 bp, Homo sapiens
aggaatgggtaggca

SEQ ID NO: 97040 - DNA, 15 bp, Homo sapiens
aaggaatgggtaggc

SEQ ID NO: 97041 - DNA, 15 bp, Homo sapiens
taaggaatgggtagg

SEQ ID NO: 97042 - DNA, 15 bp, Homo sapiens
ctaaggaatgggtag

SEQ ID NO: 97043 - DNA, 15 bp, Homo sapiens
actaaggaatgggta

SEQ ID NO: 97044 - DNA, 15 bp, Homo sapiens
cactaaggaatgggt

SEQ ID NO: 97045 - DNA, 15 bp, Homo sapiens
gcactaaggaatggg

SEQ ID NO: 97046 - DNA, 15 bp, Homo sapiens
ggcactaaggaatgg

SEQ ID NO: 97047 - DNA, 15 bp, Homo sapiens
aggcactaaggaatg

SEQ ID NO: 97048 - DNA, 15 bp, Homo sapiens
caggcactaaggaat

SEQ ID NO: 97049 - DNA, 15 bp, Homo sapiens
ccaggcactaaggaa

SEQ ID NO: 97050 - DNA, 15 bp, Homo sapiens
accaggcactaagga

SEQ ID NO: 97051 - DNA, 15 bp, Homo sapiens
gaccaggcactaagg

SEQ ID NO: 97052 - DNA, 15 bp, Homo sapiens
tgaccaggcactaag

SEQ ID NO: 97053 - DNA, 15 bp, Homo sapiens
atgaccaggcactaa

SEQ ID NO: 97054 - DNA, 15 bp, Homo sapiens
aatgaccaggcacta

SEQ ID NO: 97055 - DNA, 15 bp, Homo sapiens
taatgaccaggcact

SEQ ID NO: 97056 - DNA, 15 bp, Homo sapiens
gtaatgaccaggcac

SEQ ID NO: 97057 - DNA, 15 bp, Homo sapiens
agtaatgaccaggca

SEQ ID NO: 97058 - DNA, 15 bp, Homo sapiens
cagtaatgaccaggc

SEQ ID NO: 97059 - DNA, 15 bp, Homo sapiens
gcagtaatgaccagg

SEQ ID NO: 97060 - DNA, 15 bp, Homo sapiens
ggcagtaatgaccag

SEQ ID NO: 97061 - DNA, 15 bp, Homo sapiens
tggcagtaatgacca

SEQ ID NO: 97062 - DNA, 15 bp, Homo sapiens
ctggcagtaatgacc

SEQ ID NO: 97063 - DNA, 15 bp, Homo sapiens
tctggcagtaatgac

SEQ ID NO: 97064 - DNA, 15 bp, Homo sapiens
ctctggcagtaatga

SEQ ID NO: 97065 - DNA, 15 bp, Homo sapiens
cctctggcagtaatg

SEQ ID NO: 97066 - DNA, 15 bp, Homo sapiens
tcctctggcagtaat

SEQ ID NO: 97067 - DNA, 15 bp, Homo sapiens
ctcctctggcagtaa

SEQ ID NO: 97068 - DNA, 15 bp, Homo sapiens
tctcctctggcagta

SEQ ID NO: 97069 - DNA, 15 bp, Homo sapiens
ttctcctctggcagt

SEQ ID NO: 97070 - DNA, 15 bp, Homo sapiens
tttctcctctggcag

SEQ ID NO: 97071 - DNA, 15 bp, Homo sapiens
ctttctcctctggca

SEQ ID NO: 97072 - DNA, 15 bp, Homo sapiens
gctttctcctctggc

SEQ ID NO: 97073 - DNA, 15 bp, Homo sapiens
tgctttctcctctgg

SEQ ID NO: 97074 - DNA, 15 bp, Homo sapiens
ctgctttctcctctg

SEQ ID NO: 97075 - DNA, 15 bp, Homo sapiens
gctgctttctcctct

SEQ ID NO: 97076 - DNA, 15 bp, Homo sapiens
ggctgctttctcctc

SEQ ID NO: 97077 - DNA, 15 bp, Homo sapiens
tggctgctttctcct

SEQ ID NO: 97078 - DNA, 15 bp, Homo sapiens
gtggctgctttctcc

SEQ ID NO: 97079 - DNA, 15 bp, Homo sapiens
ggtggctgctttctc

SEQ ID NO: 97080 - DNA, 15 bp, Homo sapiens
gggtggctgctttct

SEQ ID NO: 97081 - DNA, 15 bp, Homo sapiens
tgggtggctgctttc

SEQ ID NO: 97082 - DNA, 15 bp, Homo sapiens
ctgggtggctgcttt

SEQ ID NO: 97083 - DNA, 15 bp, Homo sapiens
gctgggtggctgctt

SEQ ID NO: 97084 - DNA, 15 bp, Homo sapiens
tgctgggtggctgct

SEQ ID NO: 97085 - DNA, 15 bp, Homo sapiens
atgctgggtggctgc

SEQ ID NO: 97086 - DNA, 15 bp, Homo sapiens
tatgctgggtggctg

SEQ ID NO: 97087 - DNA, 15 bp, Homo sapiens
atatgctgggtggct

SEQ ID NO: 97088 - DNA, 15 bp, Homo sapiens
aatatgctgggtggc

SEQ ID NO: 97089 - DNA, 15 bp, Homo sapiens
gaatatgctgggtgg

SEQ ID NO: 97090 - DNA, 15 bp, Homo sapiens
agaatatgctgggtg

SEQ ID NO: 97091 - DNA, 15 bp, Homo sapiens
cagaatatgctgggt

SEQ ID NO: 97092 - DNA, 15 bp, Homo sapiens
ccagaatatgctggg

SEQ ID NO: 97093 - DNA, 15 bp, Homo sapiens
cccagaatatgctgg

SEQ ID NO: 97094 - DNA, 15 bp, Homo sapiens
acccagaatatgctg

SEQ ID NO: 97095 - DNA, 15 bp, Homo sapiens
tacccagaatatgct

SEQ ID NO: 97096 - DNA, 15 bp, Homo sapiens
atacccagaatatgc

SEQ ID NO: 97097 - DNA, 15 bp, Homo sapiens
aatacccagaatatg

SEQ ID NO: 97098 - DNA, 15 bp, Homo sapiens
aaatacccagaatat

SEQ ID NO: 97099 - DNA, 15 bp, Homo sapiens
aaaatacccagaata

SEQ ID NO: 97100 - DNA, 15 bp, Homo sapiens
aaaaatacccagaat

SEQ ID NO: 97101 - DNA, 15 bp, Homo sapiens
gaaaaatacccagaa

SEQ ID NO: 97102 - DNA, 15 bp, Homo sapiens
agaaaaatacccaga

SEQ ID NO: 97103 - DNA, 15 bp, Homo sapiens
gagaaaaatacccag

SEQ ID NO: 97104 - DNA, 15 bp, Homo sapiens
agagaaaaataccca

SEQ ID NO: 97105 - DNA, 15 bp, Homo sapiens
gagagaaaaataccc

SEQ ID NO: 97106 - DNA, 15 bp, Homo sapiens
agagagaaaaatacc

SEQ ID NO: 97107 - DNA, 15 bp, Homo sapiens
cagagagaaaaatac

SEQ ID NO: 97108 - DNA, 15 bp, Homo sapiens
gcagagagaaaaata

SEQ ID NO: 97109 - DNA, 15 bp, Homo sapiens
tgcagagagaaaaat

SEQ ID NO: 97110 - DNA, 15 bp, Homo sapiens
gtgcagagagaaaaa

SEQ ID NO: 97111 - DNA, 15 bp, Homo sapiens
tgtgcagagagaaaa

SEQ ID NO: 97112 - DNA, 15 bp, Homo sapiens
ttgtgcagagagaaa

SEQ ID NO: 97113 - DNA, 15 bp, Homo sapiens
cttgtgcagagagaa

SEQ ID NO: 97114 - DNA, 15 bp, Homo sapiens
acttgtgcagagaga

SEQ ID NO: 97115 - DNA, 15 bp, Homo sapiens
aacttgtgcagagag

SEQ ID NO: 97116 - DNA, 15 bp, Homo sapiens
gaacttgtgcagaga

SEQ ID NO: 97117 - DNA, 15 bp, Homo sapiens
agaacttgtgcagag

SEQ ID NO: 97118 - DNA, 15 bp, Homo sapiens
gagaacttgtgcaga

SEQ ID NO: 97119 - DNA, 15 bp, Homo sapiens
agagaacttgtgcag

SEQ ID NO: 97120 - DNA, 15 bp, Homo sapiens
cagagaacttgtgca

SEQ ID NO: 97121 - DNA, 15 bp, Homo sapiens
acagagaacttgtgc

SEQ ID NO: 97122 - DNA, 15 bp, Homo sapiens
tacagagaacttgtg

SEQ ID NO: 97123 - DNA, 15 bp, Homo sapiens
ctacagagaacttgt

SEQ ID NO: 97124 - DNA, 15 bp, Homo sapiens
tctacagagaacttg

SEQ ID NO: 97125 - DNA, 15 bp, Homo sapiens
ttctacagagaactt

SEQ ID NO: 97126 - DNA, 15 bp, Homo sapiens
gttctacagagaact

SEQ ID NO: 97127 - DNA, 15 bp, Homo sapiens
agttctacagagaac

SEQ ID NO: 97128 - DNA, 15 bp, Homo sapiens
aagttctacagagaa

SEQ ID NO: 97129 - DNA, 15 bp, Homo sapiens
taagttctacagaga

SEQ ID NO: 97130 - DNA, 15 bp, Homo sapiens
ctaagttctacagag

SEQ ID NO: 97131 - DNA, 15 bp, Homo sapiens
tctaagttctacaga

SEQ ID NO: 97132 - DNA, 15 bp, Homo sapiens
ctctaagttctacag

SEQ ID NO: 97133 - DNA, 15 bp, Homo sapiens
gctctaagttctaca

SEQ ID NO: 97134 - DNA, 15 bp, Homo sapiens
agctctaagttctac

SEQ ID NO: 97135 - DNA, 15 bp, Homo sapiens
cagctctaagttcta

SEQ ID NO: 97136 - DNA, 15 bp, Homo sapiens
gcagctctaagttct

SEQ ID NO: 97137 - DNA, 15 bp, Homo sapiens
tgcagctctaagttc

SEQ ID NO: 97138 - DNA, 15 bp, Homo sapiens
ttgcagctctaagtt

SEQ ID NO: 97139 - DNA, 15 bp, Homo sapiens
cttgcagctctaagt

SEQ ID NO: 97140 - DNA, 15 bp, Homo sapiens
gcttgcagctctaag

SEQ ID NO: 97141 - DNA, 15 bp, Homo sapiens
ggcttgcagctctaa

SEQ ID NO: 97142 - DNA, 15 bp, Homo sapiens
tggcttgcagctcta

SEQ ID NO: 97143 - DNA, 15 bp, Homo sapiens
ttggcttgcagctct

SEQ ID NO: 97144 - DNA, 15 bp, Homo sapiens
cttggcttgcagctc

SEQ ID NO: 97145 - DNA, 15 bp, Homo sapiens
gcttggcttgcagct

SEQ ID NO: 97146 - DNA, 15 bp, Homo sapiens
agcttggcttgcagc

SEQ ID NO: 97147 - DNA, 15 bp, Homo sapiens
gagcttggcttgcag

SEQ ID NO: 97148 - DNA, 15 bp, Homo sapiens
agagcttggcttgca

SEQ ID NO: 97149 - DNA, 15 bp, Homo sapiens
cagagcttggcttgc

SEQ ID NO: 97150 - DNA, 15 bp, Homo sapiens
ccagagcttggcttg

SEQ ID NO: 97151 - DNA, 15 bp, Homo sapiens
cccagagcttggctt

SEQ ID NO: 97152 - DNA, 15 bp, Homo sapiens
gcccagagcttggct

SEQ ID NO: 97153 - DNA, 15 bp, Homo sapiens
ggcccagagcttggc

SEQ ID NO: 97154 - DNA, 15 bp, Homo sapiens
aggcccagagcttgg

SEQ ID NO: 97155 - DNA, 15 bp, Homo sapiens
caggcccagagcttg

SEQ ID NO: 97156 - DNA, 15 bp, Homo sapiens
gcaggcccagagctt

SEQ ID NO: 97157 - DNA, 15 bp, Homo sapiens
ggcaggcccagagct

SEQ ID NO: 97158 - DNA, 15 bp, Homo sapiens
tggcaggcccagagc

SEQ ID NO: 97159 - DNA, 15 bp, Homo sapiens
ttggcaggcccagag

SEQ ID NO: 97160 - DNA, 15 bp, Homo sapiens
cttggcaggcccaga

SEQ ID NO: 97161 - DNA, 15 bp, Homo sapiens
ccttggcaggcccag

SEQ ID NO: 97162 - DNA, 15 bp, Homo sapiens
cccttggcaggccca

SEQ ID NO: 97163 - DNA, 15 bp, Homo sapiens
gcccttggcaggccc

SEQ ID NO: 97164 - DNA, 15 bp, Homo sapiens
ggcccttggcaggcc

SEQ ID NO: 97165 - DNA, 15 bp, Homo sapiens
tggcccttggcaggc

SEQ ID NO: 97166 - DNA, 15 bp, Homo sapiens
ttggcccttggcagg

SEQ ID NO: 97167 - DNA, 15 bp, Homo sapiens
attggcccttggcag

SEQ ID NO: 97168 - DNA, 15 bp, Homo sapiens
gattggcccttggca

SEQ ID NO: 97169 - DNA, 15 bp, Homo sapiens
ggattggcccttggc

SEQ ID NO: 97170 - DNA, 15 bp, Homo sapiens
tggattggcccttgg

SEQ ID NO: 97171 - DNA, 15 bp, Homo sapiens
ctggattggcccttg

SEQ ID NO: 97172 - DNA, 15 bp, Homo sapiens
cctggattggccctt

SEQ ID NO: 97173 - DNA, 15 bp, Homo sapiens
acctggattggccct

SEQ ID NO: 97174 - DNA, 15 bp, Homo sapiens
gacctggattggccc

SEQ ID NO: 97175 - DNA, 15 bp, Homo sapiens
ggacctggattggcc

SEQ ID NO: 97176 - DNA, 15 bp, Homo sapiens
aggacctggattggc

SEQ ID NO: 97177 - DNA, 15 bp, Homo sapiens
caggacctggattgg

SEQ ID NO: 97178 - DNA, 15 bp, Homo sapiens
acaggacctggattg

SEQ ID NO: 97179 - DNA, 15 bp, Homo sapiens
gacaggacctggatt

SEQ ID NO: 97180 - DNA, 15 bp, Homo sapiens
ggacaggacctggat

SEQ ID NO: 97181 - DNA, 15 bp, Homo sapiens
tggacaggacctgga

SEQ ID NO: 97182 - DNA, 15 bp, Homo sapiens
atggacaggacctgg

SEQ ID NO: 97183 - DNA, 15 bp, Homo sapiens
gatggacaggacctg

SEQ ID NO: 97184 - DNA, 15 bp, Homo sapiens
ggatggacaggacct

SEQ ID NO: 97185 - DNA, 15 bp, Homo sapiens
tggatggacaggacc

SEQ ID NO: 97186 - DNA, 15 bp, Homo sapiens
ttggatggacaggac

SEQ ID NO: 97187 - DNA, 15 bp, Homo sapiens
tttggatggacagga

SEQ ID NO: 97188 - DNA, 15 bp, Homo sapiens
ttttggatggacagg

SEQ ID NO: 97189 - DNA, 15 bp, Homo sapiens
cttttggatggacag

SEQ ID NO: 97190 - DNA, 15 bp, Homo sapiens
gcttttggatggaca

SEQ ID NO: 97191 - DNA, 15 bp, Homo sapiens
agcttttggatggac

SEQ ID NO: 97192 - DNA, 15 bp, Homo sapiens
tagcttttggatgga

SEQ ID NO: 97193 - DNA, 15 bp, Homo sapiens
ttagcttttggatgg

SEQ ID NO: 97194 - DNA, 15 bp, Homo sapiens
tttagcttttggatg

SEQ ID NO: 97195 - DNA, 15 bp, Homo sapiens
ctttagcttttggat

SEQ ID NO: 97196 - DNA, 15 bp, Homo sapiens
gctttagcttttgga

SEQ ID NO: 97197 - DNA, 15 bp, Homo sapiens
agctttagcttttgg

SEQ ID NO: 97198 - DNA, 15 bp, Homo sapiens
gagctttagcttttg

SEQ ID NO: 97199 - DNA, 15 bp, Homo sapiens
tgagctttagctttt

SEQ ID NO: 97200 - DNA, 15 bp, Homo sapiens
atgagctttagcttt

SEQ ID NO: 97201 - DNA, 15 bp, Homo sapiens
catgagctttagctt

SEQ ID NO: 97202 - DNA, 15 bp, Homo sapiens
ccatgagctttagct

SEQ ID NO: 97203 - DNA, 15 bp, Homo sapiens
gccatgagctttagc

SEQ ID NO: 97204 - DNA, 15 bp, Homo sapiens
cgccatgagctttag

SEQ ID NO: 97205 - DNA, 15 bp, Homo sapiens
gcgccatgagcttta

SEQ ID NO: 97206 - DNA, 15 bp, Homo sapiens
tgcgccatgagcttt

SEQ ID NO: 97207 - DNA, 15 bp, Homo sapiens
ctgcgccatgagctt

SEQ ID NO: 97208 - DNA, 15 bp, Homo sapiens
gctgcgccatgagct

SEQ ID NO: 97209 - DNA, 15 bp, Homo sapiens
agctgcgccatgagc

SEQ ID NO: 97210 - DNA, 15 bp, Homo sapiens
aagctgcgccatgag

SEQ ID NO: 97211 - DNA, 15 bp, Homo sapiens
gaagctgcgccatga

SEQ ID NO: 97212 - DNA, 15 bp, Homo sapiens
agaagctgcgccatg

SEQ ID NO: 97213 - DNA, 15 bp, Homo sapiens
gagaagctgcgccat

SEQ ID NO: 97214 - DNA, 15 bp, Homo sapiens
ggagaagctgcgcca

SEQ ID NO: 97215 - DNA, 15 bp, Homo sapiens
gggagaagctgcgcc

SEQ ID NO: 97216 - DNA, 15 bp, Homo sapiens
tgggagaagctgcgc

SEQ ID NO: 97217 - DNA, 15 bp, Homo sapiens
ttgggagaagctgcg

SEQ ID NO: 97218 - DNA, 15 bp, Homo sapiens
attgggagaagctgc

SEQ ID NO: 97219 - DNA, 15 bp, Homo sapiens
cattgggagaagctg

SEQ ID NO: 97220 - DNA, 15 bp, Homo sapiens
tcattgggagaagct

SEQ ID NO: 97221 - DNA, 15 bp, Homo sapiens
gtcattgggagaagc

SEQ ID NO: 97222 - DNA, 15 bp, Homo sapiens
agtcattgggagaag

SEQ ID NO: 97223 - DNA, 15 bp, Homo sapiens
gagtcattgggagaa

SEQ ID NO: 97224 - DNA, 15 bp, Homo sapiens
ggagtcattgggaga

SEQ ID NO: 97225 - DNA, 15 bp, Homo sapiens
gggagtcattgggag

SEQ ID NO: 97226 - DNA, 15 bp, Homo sapiens
tgggagtcattggga

SEQ ID NO: 97227 - DNA, 15 bp, Homo sapiens
gtgggagtcattggg

SEQ ID NO: 97228 - DNA, 15 bp, Homo sapiens
tgtgggagtcattgg

SEQ ID NO: 97229 - DNA, 15 bp, Homo sapiens
ctgtgggagtcattg

SEQ ID NO: 97230 - DNA, 15 bp, Homo sapiens
actgtgggagtcatt

SEQ ID NO: 97231 - DNA, 15 bp, Homo sapiens
gactgtgggagtcat

SEQ ID NO: 97232 - DNA, 15 bp, Homo sapiens
tgactgtgggagtca

SEQ ID NO: 97233 - DNA, 15 bp, Homo sapiens
atgactgtgggagtc

SEQ ID NO: 97234 - DNA, 15 bp, Homo sapiens
catgactgtgggagt

SEQ ID NO: 97235 - DNA, 15 bp, Homo sapiens
gcatgactgtgggag

SEQ ID NO: 97236 - DNA, 15 bp, Homo sapiens
ggcatgactgtggga

SEQ ID NO: 97237 - DNA, 15 bp, Homo sapiens
aggcatgactgtggg

SEQ ID NO: 97238 - DNA, 15 bp, Homo sapiens
aaggcatgactgtgg

SEQ ID NO: 97239 - DNA, 15 bp, Homo sapiens
caaggcatgactgtg

SEQ ID NO: 97240 - DNA, 15 bp, Homo sapiens
gcaaggcatgactgt

SEQ ID NO: 97241 - DNA, 15 bp, Homo sapiens
ggcaaggcatgactg

SEQ ID NO: 97242 - DNA, 15 bp, Homo sapiens
gggcaaggcatgact

SEQ ID NO: 97243 - DNA, 15 bp, Homo sapiens
ggggcaaggcatgac

SEQ ID NO: 97244 - DNA, 15 bp, Homo sapiens
aggggcaaggcatga

SEQ ID NO: 97245 - DNA, 15 bp, Homo sapiens
caggggcaaggcatg

SEQ ID NO: 97246 - DNA, 15 bp, Homo sapiens
tcaggggcaaggcat

SEQ ID NO: 97247 - DNA, 15 bp, Homo sapiens
gtcaggggcaaggca

SEQ ID NO: 97248 - DNA, 15 bp, Homo sapiens
agtcaggggcaaggc

SEQ ID NO: 97249 - DNA, 15 bp, Homo sapiens
aagtcaggggcaagg

SEQ ID NO: 97250 - DNA, 15 bp, Homo sapiens
aaagtcaggggcaag

SEQ ID NO: 97251 - DNA, 15 bp, Homo sapiens
aaaagtcaggggcaa

SEQ ID NO: 97252 - DNA, 15 bp, Homo sapiens
aaaaagtcaggggca

SEQ ID NO: 97253 - DNA, 15 bp, Homo sapiens
taaaaagtcaggggc

SEQ ID NO: 97254 - DNA, 15 bp, Homo sapiens
ataaaaagtcagggg

SEQ ID NO: 97255 - DNA, 15 bp, Homo sapiens
aataaaaagtcaggg

SEQ ID NO: 97256 - DNA, 15 bp, Homo sapiens
caataaaaagtcagg

SEQ ID NO: 97257 - DNA, 15 bp, Homo sapiens
gcaataaaaagtcag

SEQ ID NO: 97258 - DNA, 15 bp, Homo sapiens
agcaataaaaagtca

SEQ ID NO: 97259 - DNA, 15 bp, Homo sapiens
cagcaataaaaagtc

SEQ ID NO: 97260 - DNA, 15 bp, Homo sapiens
tcagcaataaaaagt

SEQ ID NO: 97261 - DNA, 15 bp, Homo sapiens
gtcagcaataaaaag

SEQ ID NO: 97262 - DNA, 15 bp, Homo sapiens
tgtcagcaataaaaa

SEQ ID NO: 97263 - DNA, 15 bp, Homo sapiens
ctgtcagcaataaaa

SEQ ID NO: 97264 - DNA, 15 bp, Homo sapiens
cctgtcagcaataaa

SEQ ID NO: 97265 - DNA, 15 bp, Homo sapiens
ccctgtcagcaataa

SEQ ID NO: 97266 - DNA, 15 bp, Homo sapiens
tccctgtcagcaata

SEQ ID NO: 97267 - DNA, 15 bp, Homo sapiens
ttccctgtcagcaat

SEQ ID NO: 97268 - DNA, 15 bp, Homo sapiens
attccctgtcagcaa

SEQ ID NO: 97269 - DNA, 15 bp, Homo sapiens
aattccctgtcagca

SEQ ID NO: 97270 - DNA, 15 bp, Homo sapiens
gaattccctgtcagc

SEQ ID NO: 97271 - DNA, 15 bp, Homo sapiens
ggaattccctgtcag

SEQ ID NO: 97272 - DNA, 15 bp, Homo sapiens
gggaattccctgtca

SEQ ID NO: 97273 - DNA, 15 bp, Homo sapiens
agggaattccctgtc

SEQ ID NO: 97274 - DNA, 15 bp, Homo sapiens
cagggaattccctgt

SEQ ID NO: 97275 - DNA, 15 bp, Homo sapiens
ccagggaattccctg

SEQ ID NO: 97276 - DNA, 15 bp, Homo sapiens
cccagggaattccct

SEQ ID NO: 97277 - DNA, 15 bp, Homo sapiens
ccccagggaattccc

SEQ ID NO: 97278 - DNA, 15 bp, Homo sapiens
cccccagggaattcc

SEQ ID NO: 97279 - DNA, 15 bp, Homo sapiens
tcccccagggaattc

SEQ ID NO: 97280 - DNA, 15 bp, Homo sapiens
gtcccccagggaatt

SEQ ID NO: 97281 - DNA, 15 bp, Homo sapiens
tgtcccccagggaat

SEQ ID NO: 97282 - DNA, 15 bp, Homo sapiens
atgtcccccagggaa

SEQ ID NO: 97283 - DNA, 15 bp, Homo sapiens
catgtcccccaggga

SEQ ID NO: 97284 - DNA, 15 bp, Homo sapiens
tcatgtcccccaggg

SEQ ID NO: 97285 - DNA, 15 bp, Homo sapiens
gtcatgtcccccagg

SEQ ID NO: 97286 - DNA, 15 bp, Homo sapiens
ggtcatgtcccccag

SEQ ID NO: 97287 - DNA, 15 bp, Homo sapiens
tggtcatgtccccca

SEQ ID NO: 97288 - DNA, 15 bp, Homo sapiens
gtggtcatgtccccc

SEQ ID NO: 97289 - DNA, 15 bp, Homo sapiens
agtggtcatgtcccc

SEQ ID NO: 97290 - DNA, 15 bp, Homo sapiens
tagtggtcatgtccc

SEQ ID NO: 97291 - DNA, 15 bp, Homo sapiens
ttagtggtcatgtcc

SEQ ID NO: 97292 - DNA, 15 bp, Homo sapiens
attagtggtcatgtc

SEQ ID NO: 97293 - DNA, 15 bp, Homo sapiens
aattagtggtcatgt

SEQ ID NO: 97294 - DNA, 15 bp, Homo sapiens
taattagtggtcatg

SEQ ID NO: 97295 - DNA, 15 bp, Homo sapiens
ctaattagtggtcat

SEQ ID NO: 97296 - DNA, 15 bp, Homo sapiens
tctaattagtggtca

SEQ ID NO: 97297 - DNA, 15 bp, Homo sapiens
ctctaattagtggtc

SEQ ID NO: 97298 - DNA, 15 bp, Homo sapiens
tctctaattagtggt

SEQ ID NO: 97299 - DNA, 15 bp, Homo sapiens
atctctaattagtgg

SEQ ID NO: 97300 - DNA, 15 bp, Homo sapiens
gatctctaattagtg

SEQ ID NO: 97301 - DNA, 15 bp, Homo sapiens
tgatctctaattagt

SEQ ID NO: 97302 - DNA, 15 bp, Homo sapiens
ctgatctctaattag

SEQ ID NO: 97303 - DNA, 15 bp, Homo sapiens
actgatctctaatta

SEQ ID NO: 97304 - DNA, 15 bp, Homo sapiens
gactgatctctaatt

SEQ ID NO: 97305 - DNA, 15 bp, Homo sapiens
tgactgatctctaat

SEQ ID NO: 97306 - DNA, 15 bp, Homo sapiens
ctgactgatctctaa

SEQ ID NO: 97307 - DNA, 15 bp, Homo sapiens
actgactgatctcta

SEQ ID NO: 97308 - DNA, 15 bp, Homo sapiens
cactgactgatctct

SEQ ID NO: 97309 - DNA, 15 bp, Homo sapiens
tcactgactgatctc

SEQ ID NO: 97310 - DNA, 15 bp, Homo sapiens
atcactgactgatct

SEQ ID NO: 97311 - DNA, 15 bp, Homo sapiens
aatcactgactgatc

SEQ ID NO: 97312 - DNA, 15 bp, Homo sapiens
gaatcactgactgat

SEQ ID NO: 97313 - DNA, 15 bp, Homo sapiens
tgaatcactgactga

SEQ ID NO: 97314 - DNA, 15 bp, Homo sapiens
ctgaatcactgactg

SEQ ID NO: 97315 - DNA, 15 bp, Homo sapiens
cctgaatcactgact

SEQ ID NO: 97316 - DNA, 15 bp, Homo sapiens
gcctgaatcactgac

SEQ ID NO: 97317 - DNA, 15 bp, Homo sapiens
ggcctgaatcactga

SEQ ID NO: 97318 - DNA, 15 bp, Homo sapiens
aggcctgaatcactg

SEQ ID NO: 97319 - DNA, 15 bp, Homo sapiens
aaggcctgaatcact

SEQ ID NO: 97320 - DNA, 15 bp, Homo sapiens
aaaggcctgaatcac

SEQ ID NO: 97321 - DNA, 15 bp, Homo sapiens
gaaaggcctgaatca

SEQ ID NO: 97322 - DNA, 15 bp, Homo sapiens
agaaaggcctgaatc

SEQ ID NO: 97323 - DNA, 15 bp, Homo sapiens
tagaaaggcctgaat

SEQ ID NO: 97324 - DNA, 15 bp, Homo sapiens
ctagaaaggcctgaa

SEQ ID NO: 97325 - DNA, 15 bp, Homo sapiens
tctagaaaggcctga

SEQ ID NO: 97326 - DNA, 15 bp, Homo sapiens
atctagaaaggcctg

SEQ ID NO: 97327 - DNA, 15 bp, Homo sapiens
catctagaaaggcct

SEQ ID NO: 97328 - DNA, 15 bp, Homo sapiens
tcatctagaaaggcc

SEQ ID NO: 97329 - DNA, 15 bp, Homo sapiens
ttcatctagaaaggc

SEQ ID NO: 97330 - DNA, 15 bp, Homo sapiens
cttcatctagaaagg

SEQ ID NO: 97331 - DNA, 15 bp, Homo sapiens
tcttcatctagaaag

SEQ ID NO: 97332 - DNA, 15 bp, Homo sapiens
ctcttcatctagaaa

SEQ ID NO: 97333 - DNA, 15 bp, Homo sapiens
tctcttcatctagaa

SEQ ID NO: 97334 - DNA, 15 bp, Homo sapiens
atctcttcatctaga

SEQ ID NO: 97335 - DNA, 15 bp, Homo sapiens
aatctcttcatctag

SEQ ID NO: 97336 - DNA, 15 bp, Homo sapiens
gaatctcttcatcta

SEQ ID NO: 97337 - DNA, 15 bp, Homo sapiens
tgaatctcttcatct

SEQ ID NO: 97338 - DNA, 15 bp, Homo sapiens
ttgaatctcttcatc

SEQ ID NO: 97339 - DNA, 15 bp, Homo sapiens
tttgaatctcttcat

SEQ ID NO: 97340 - DNA, 15 bp, Homo sapiens
ttttgaatctcttca

SEQ ID NO: 97341 - DNA, 15 bp, Homo sapiens
cttttgaatctcttc

SEQ ID NO: 97342 - DNA, 15 bp, Homo sapiens
gcttttgaatctctt

SEQ ID NO: 97343 - DNA, 15 bp, Homo sapiens
ggcttttgaatctct

SEQ ID NO: 97344 - DNA, 15 bp, Homo sapiens
aggcttttgaatctc

SEQ ID NO: 97345 - DNA, 15 bp, Homo sapiens
aaggcttttgaatct

SEQ ID NO: 97346 - DNA, 15 bp, Homo sapiens
caaggcttttgaatc

SEQ ID NO: 97347 - DNA, 15 bp, Homo sapiens
gcaaggcttttgaat

SEQ ID NO: 97348 - DNA, 15 bp, Homo sapiens
ggcaaggcttttgaa

SEQ ID NO: 97349 - DNA, 15 bp, Homo sapiens
tggcaaggcttttga

SEQ ID NO: 97350 - DNA, 15 bp, Homo sapiens
ttggcaaggcttttg

SEQ ID NO: 97351 - DNA, 15 bp, Homo sapiens
tttggcaaggctttt

SEQ ID NO: 97352 - DNA, 15 bp, Homo sapiens
ctttggcaaggcttt

SEQ ID NO: 97353 - DNA, 15 bp, Homo sapiens
cctttggcaaggctt

SEQ ID NO: 97354 - DNA, 15 bp, Homo sapiens
ccctttggcaaggct

SEQ ID NO: 97355 - DNA, 15 bp, Homo sapiens
tccctttggcaaggc

SEQ ID NO: 97356 - DNA, 15 bp, Homo sapiens
atccctttggcaagg

SEQ ID NO: 97357 - DNA, 15 bp, Homo sapiens
aatccctttggcaag

SEQ ID NO: 97358 - DNA, 15 bp, Homo sapiens
caatccctttggcaa

SEQ ID NO: 97359 - DNA, 15 bp, Homo sapiens
tcaatccctttggca

SEQ ID NO: 97360 - DNA, 15 bp, Homo sapiens
ctcaatccctttggc

SEQ ID NO: 97361 - DNA, 15 bp, Homo sapiens
cctcaatccctttgg

SEQ ID NO: 97362 - DNA, 15 bp, Homo sapiens
ccctcaatccctttg

SEQ ID NO: 97363 - DNA, 15 bp, Homo sapiens
cccctcaatcccttt

SEQ ID NO: 97364 - DNA, 15 bp, Homo sapiens
ccccctcaatccctt

SEQ ID NO: 97365 - DNA, 15 bp, Homo sapiens
cccccctcaatccct

SEQ ID NO: 97366 - DNA, 15 bp, Homo sapiens
tcccccctcaatccc

SEQ ID NO: 97367 - DNA, 15 bp, Homo sapiens
atcccccctcaatcc

SEQ ID NO: 97368 - DNA, 15 bp, Homo sapiens
tatcccccctcaatc

SEQ ID NO: 97369 - DNA, 15 bp, Homo sapiens
atatcccccctcaat

SEQ ID NO: 97370 - DNA, 15 bp, Homo sapiens
catatcccccctcaa

SEQ ID NO: 97371 - DNA, 15 bp, Homo sapiens
ccatatcccccctca

SEQ ID NO: 97372 - DNA, 15 bp, Homo sapiens
gccatatcccccctc

SEQ ID NO: 97373 - DNA, 15 bp, Homo sapiens
agccatatcccccct

SEQ ID NO: 97374 - DNA, 15 bp, Homo sapiens
gagccatatcccccc

SEQ ID NO: 97375 - DNA, 15 bp, Homo sapiens
tgagccatatccccc

SEQ ID NO: 97376 - DNA, 15 bp, Homo sapiens
gtgagccatatcccc

SEQ ID NO: 97377 - DNA, 15 bp, Homo sapiens
ggtgagccatatccc

SEQ ID NO: 97378 - DNA, 15 bp, Homo sapiens
gggtgagccatatcc

SEQ ID NO: 97379 - DNA, 15 bp, Homo sapiens
tgggtgagccatatc

SEQ ID NO: 97380 - DNA, 15 bp, Homo sapiens
ttgggtgagccatat

SEQ ID NO: 97381 - DNA, 15 bp, Homo sapiens
cttgggtgagccata

SEQ ID NO: 97382 - DNA, 15 bp, Homo sapiens
tcttgggtgagccat

SEQ ID NO: 97383 - DNA, 15 bp, Homo sapiens
atcttgggtgagcca

SEQ ID NO: 97384 - DNA, 15 bp, Homo sapiens
gatcttgggtgagcc

SEQ ID NO: 97385 - DNA, 15 bp, Homo sapiens
tgatcttgggtgagc

SEQ ID NO: 97386 - DNA, 15 bp, Homo sapiens
gtgatcttgggtgag

SEQ ID NO: 97387 - DNA, 15 bp, Homo sapiens
tgtgatcttgggtga

SEQ ID NO: 97388 - DNA, 15 bp, Homo sapiens
gtgtgatcttgggtg

SEQ ID NO: 97389 - DNA, 15 bp, Homo sapiens
tgtgtgatcttgggt

SEQ ID NO: 97390 - DNA, 15 bp, Homo sapiens
ctgtgtgatcttggg

SEQ ID NO: 97391 - DNA, 15 bp, Homo sapiens
gctgtgtgatcttgg

SEQ ID NO: 97392 - DNA, 15 bp, Homo sapiens
agctgtgtgatcttg

SEQ ID NO: 97393 - DNA, 15 bp, Homo sapiens
tagctgtgtgatctt

SEQ ID NO: 97394 - DNA, 15 bp, Homo sapiens
ctagctgtgtgatct

SEQ ID NO: 97395 - DNA, 15 bp, Homo sapiens
actagctgtgtgatc

SEQ ID NO: 97396 - DNA, 15 bp, Homo sapiens
aactagctgtgtgat

SEQ ID NO: 97397 - DNA, 15 bp, Homo sapiens
gaactagctgtgtga

SEQ ID NO: 97398 - DNA, 15 bp, Homo sapiens
agaactagctgtgtg

SEQ ID NO: 97399 - DNA, 15 bp, Homo sapiens
cagaactagctgtgt

SEQ ID NO: 97400 - DNA, 15 bp, Homo sapiens
ccagaactagctgtg

SEQ ID NO: 97401 - DNA, 15 bp, Homo sapiens
cccagaactagctgt

SEQ ID NO: 97402 - DNA, 15 bp, Homo sapiens
gcccagaactagctg

SEQ ID NO: 97403 - DNA, 15 bp, Homo sapiens
tgcccagaactagct

SEQ ID NO: 97404 - DNA, 15 bp, Homo sapiens
ctgcccagaactagc

SEQ ID NO: 97405 - DNA, 15 bp, Homo sapiens
tctgcccagaactag

SEQ ID NO: 97406 - DNA, 15 bp, Homo sapiens
ctctgcccagaacta

SEQ ID NO: 97407 - DNA, 15 bp, Homo sapiens
actctgcccagaact

SEQ ID NO: 97408 - DNA, 15 bp, Homo sapiens
aactctgcccagaac

SEQ ID NO: 97409 - DNA, 15 bp, Homo sapiens
aaactctgcccagaa

SEQ ID NO: 97410 - DNA, 15 bp, Homo sapiens
caaactctgcccaga

SEQ ID NO: 97411 - DNA, 15 bp, Homo sapiens
gcaaactctgcccag

SEQ ID NO: 97412 - DNA, 15 bp, Homo sapiens
tgcaaactctgccca

SEQ ID NO: 97413 - DNA, 15 bp, Homo sapiens
gtgcaaactctgccc

SEQ ID NO: 97414 - DNA, 15 bp, Homo sapiens
ggtgcaaactctgcc

SEQ ID NO: 97415 - DNA, 15 bp, Homo sapiens
aggtgcaaactctgc

SEQ ID NO: 97416 - DNA, 15 bp, Homo sapiens
gaggtgcaaactctg

SEQ ID NO: 97417 - DNA, 15 bp, Homo sapiens
tgaggtgcaaactct

SEQ ID NO: 97418 - DNA, 15 bp, Homo sapiens
gtgaggtgcaaactc

SEQ ID NO: 97419 - DNA, 15 bp, Homo sapiens
agtgaggtgcaaact

SEQ ID NO: 97420 - DNA, 15 bp, Homo sapiens
aagtgaggtgcaaac

SEQ ID NO: 97421 - DNA, 15 bp, Homo sapiens
gaagtgaggtgcaaa

SEQ ID NO: 97422 - DNA, 15 bp, Homo sapiens
ggaagtgaggtgcaa

SEQ ID NO: 97423 - DNA, 15 bp, Homo sapiens
gggaagtgaggtgca

SEQ ID NO: 97424 - DNA, 15 bp, Homo sapiens
tgggaagtgaggtgc

SEQ ID NO: 97425 - DNA, 15 bp, Homo sapiens
gtgggaagtgaggtg

SEQ ID NO: 97426 - DNA, 15 bp, Homo sapiens
tgtgggaagtgaggt

SEQ ID NO: 97427 - DNA, 15 bp, Homo sapiens
atgtgggaagtgagg

SEQ ID NO: 97428 - DNA, 15 bp, Homo sapiens
aatgtgggaagtgag

SEQ ID NO: 97429 - DNA, 15 bp, Homo sapiens
gaatgtgggaagtga

SEQ ID NO: 97430 - DNA, 15 bp, Homo sapiens
ggaatgtgggaagtg

SEQ ID NO: 97431 - DNA, 15 bp, Homo sapiens
tggaatgtgggaagt

SEQ ID NO: 97432 - DNA, 15 bp, Homo sapiens
atggaatgtgggaag

SEQ ID NO: 97433 - DNA, 15 bp, Homo sapiens
aatggaatgtgggaa

SEQ ID NO: 97434 - DNA, 15 bp, Homo sapiens
aaatggaatgtggga

SEQ ID NO: 97435 - DNA, 15 bp, Homo sapiens
taaatggaatgtggg

SEQ ID NO: 97436 - DNA, 15 bp, Homo sapiens
gtaaatggaatgtgg

SEQ ID NO: 97437 - DNA, 15 bp, Homo sapiens
ggtaaatggaatgtg

SEQ ID NO: 97438 - DNA, 15 bp, Homo sapiens
tggtaaatggaatgt

SEQ ID NO: 97439 - DNA, 15 bp, Homo sapiens
ctggtaaatggaatg

SEQ ID NO: 97440 - DNA, 15 bp, Homo sapiens
cctggtaaatggaat

SEQ ID NO: 97441 - DNA, 15 bp, Homo sapiens
gcctggtaaatggaa

SEQ ID NO: 97442 - DNA, 15 bp, Homo sapiens
ggcctggtaaatgga

SEQ ID NO: 97443 - DNA, 15 bp, Homo sapiens
aggcctggtaaatgg

SEQ ID NO: 97444 - DNA, 15 bp, Homo sapiens
aaggcctggtaaatg

SEQ ID NO: 97445 - DNA, 15 bp, Homo sapiens
caaggcctggtaaat

SEQ ID NO: 97446 - DNA, 15 bp, Homo sapiens
ccaaggcctggtaaa

SEQ ID NO: 97447 - DNA, 15 bp, Homo sapiens
cccaaggcctggtaa

SEQ ID NO: 97448 - DNA, 15 bp, Homo sapiens
ccccaaggcctggta

SEQ ID NO: 97449 - DNA, 15 bp, Homo sapiens
gccccaaggcctggt

SEQ ID NO: 97450 - DNA, 15 bp, Homo sapiens
tgccccaaggcctgg

SEQ ID NO: 97451 - DNA, 15 bp, Homo sapiens
ttgccccaaggcctg

SEQ ID NO: 97452 - DNA, 15 bp, Homo sapiens
tttgccccaaggcct

SEQ ID NO: 97453 - DNA, 15 bp, Homo sapiens
ctttgccccaaggcc

SEQ ID NO: 97454 - DNA, 15 bp, Homo sapiens
gctttgccccaaggc

SEQ ID NO: 97455 - DNA, 15 bp, Homo sapiens
tgctttgccccaagg

SEQ ID NO: 97456 - DNA, 15 bp, Homo sapiens
atgctttgccccaag

SEQ ID NO: 97457 - DNA, 15 bp, Homo sapiens
gatgctttgccccaa

SEQ ID NO: 97458 - DNA, 15 bp, Homo sapiens
agatgctttgcccca

SEQ ID NO: 97459 - DNA, 15 bp, Homo sapiens
aagatgctttgcccc

SEQ ID NO: 97460 - DNA, 15 bp, Homo sapiens
taagatgctttgccc

SEQ ID NO: 97461 - DNA, 15 bp, Homo sapiens
ctaagatgctttgcc

SEQ ID NO: 97462 - DNA, 15 bp, Homo sapiens
cctaagatgctttgc

SEQ ID NO: 97463 - DNA, 15 bp, Homo sapiens
tcctaagatgctttg

SEQ ID NO: 97464 - DNA, 15 bp, Homo sapiens
atcctaagatgcttt

SEQ ID NO: 97465 - DNA, 15 bp, Homo sapiens
gatcctaagatgctt

SEQ ID NO: 97466 - DNA, 15 bp, Homo sapiens
agatcctaagatgct

SEQ ID NO: 97467 - DNA, 15 bp, Homo sapiens
tagatcctaagatgc

SEQ ID NO: 97468 - DNA, 15 bp, Homo sapiens
ttagatcctaagatg

SEQ ID NO: 97469 - DNA, 15 bp, Homo sapiens
gttagatcctaagat

SEQ ID NO: 97470 - DNA, 15 bp, Homo sapiens
ggttagatcctaaga

SEQ ID NO: 97471 - DNA, 15 bp, Homo sapiens
aggttagatcctaag

SEQ ID NO: 97472 - DNA, 15 bp, Homo sapiens
gaggttagatcctaa

SEQ ID NO: 97473 - DNA, 15 bp, Homo sapiens
cgaggttagatccta

SEQ ID NO: 97474 - DNA, 15 bp, Homo sapiens
gcgaggttagatcct

SEQ ID NO: 97475 - DNA, 15 bp, Homo sapiens
agcgaggttagatcc

SEQ ID NO: 97476 - DNA, 15 bp, Homo sapiens
aagcgaggttagatc

SEQ ID NO: 97477 - DNA, 15 bp, Homo sapiens
taagcgaggttagat

SEQ ID NO: 97478 - DNA, 15 bp, Homo sapiens
ataagcgaggttaga

SEQ ID NO: 97479 - DNA, 15 bp, Homo sapiens
aataagcgaggttag

SEQ ID NO: 97480 - DNA, 15 bp, Homo sapiens
taataagcgaggtta

SEQ ID NO: 97481 - DNA, 15 bp, Homo sapiens
ataataagcgaggtt

SEQ ID NO: 97482 - DNA, 15 bp, Homo sapiens
tataataagcgaggt

SEQ ID NO: 97483 - DNA, 15 bp, Homo sapiens
gtataataagcgagg

SEQ ID NO: 97484 - DNA, 15 bp, Homo sapiens
ggtataataagcgag

SEQ ID NO: 97485 - DNA, 15 bp, Homo sapiens
gggtataataagcga

SEQ ID NO: 97486 - DNA, 15 bp, Homo sapiens
tgggtataataagcg

SEQ ID NO: 97487 - DNA, 15 bp, Homo sapiens
atgggtataataagc

SEQ ID NO: 97488 - DNA, 15 bp, Homo sapiens
gatgggtataataag

SEQ ID NO: 97489 - DNA, 15 bp, Homo sapiens
agatgggtataataa

SEQ ID NO: 97490 - DNA, 15 bp, Homo sapiens
gagatgggtataata

SEQ ID NO: 97491 - DNA, 15 bp, Homo sapiens
ggagatgggtataat

SEQ ID NO: 97492 - DNA, 15 bp, Homo sapiens
tggagatgggtataa

SEQ ID NO: 97493 - DNA, 15 bp, Homo sapiens
ttggagatgggtata

SEQ ID NO: 97494 - DNA, 15 bp, Homo sapiens
cttggagatgggtat

SEQ ID NO: 97495 - DNA, 15 bp, Homo sapiens
ccttggagatgggta

SEQ ID NO: 97496 - DNA, 15 bp, Homo sapiens
gccttggagatgggt

SEQ ID NO: 97497 - DNA, 15 bp, Homo sapiens
tgccttggagatggg

SEQ ID NO: 97498 - DNA, 15 bp, Homo sapiens
ttgccttggagatgg

SEQ ID NO: 97499 - DNA, 15 bp, Homo sapiens
cttgccttggagatg

SEQ ID NO: 97500 - DNA, 15 bp, Homo sapiens
gcttgccttggagat

SEQ ID NO: 97501 - DNA, 15 bp, Homo sapiens
tgcttgccttggaga

SEQ ID NO: 97502 - DNA, 15 bp, Homo sapiens
ctgcttgccttggag

SEQ ID NO: 97503 - DNA, 15 bp, Homo sapiens
tctgcttgccttgga

SEQ ID NO: 97504 - DNA, 15 bp, Homo sapiens
ttctgcttgccttgg

SEQ ID NO: 97505 - DNA, 15 bp, Homo sapiens
tttctgcttgccttg

SEQ ID NO: 97506 - DNA, 15 bp, Homo sapiens
ctttctgcttgcctt

SEQ ID NO: 97507 - DNA, 15 bp, Homo sapiens
cctttctgcttgcct

SEQ ID NO: 97508 - DNA, 15 bp, Homo sapiens
gcctttctgcttgcc

SEQ ID NO: 97509 - DNA, 15 bp, Homo sapiens
tgcctttctgcttgc

SEQ ID NO: 97510 - DNA, 15 bp, Homo sapiens
ttgcctttctgcttg

SEQ ID NO: 97511 - DNA, 15 bp, Homo sapiens
tttgcctttctgctt

SEQ ID NO: 97512 - DNA, 15 bp, Homo sapiens
atttgcctttctgct

SEQ ID NO: 97513 - DNA, 15 bp, Homo sapiens
gatttgcctttctgc

SEQ ID NO: 97514 - DNA, 15 bp, Homo sapiens
tgatttgcctttctg

SEQ ID NO: 97515 - DNA, 15 bp, Homo sapiens
ttgatttgcctttct

SEQ ID NO: 97516 - DNA, 15 bp, Homo sapiens
gttgatttgcctttc

SEQ ID NO: 97517 - DNA, 15 bp, Homo sapiens
tgttgatttgccttt

SEQ ID NO: 97518 - DNA, 15 bp, Homo sapiens
ttgttgatttgcctt

SEQ ID NO: 97519 - DNA, 15 bp, Homo sapiens
attgttgatttgcct

SEQ ID NO: 97520 - DNA, 15 bp, Homo sapiens
cattgttgatttgcc

SEQ ID NO: 97521 - DNA, 15 bp, Homo sapiens
tcattgttgatttgc

SEQ ID NO: 97522 - DNA, 15 bp, Homo sapiens
gtcattgttgatttg

SEQ ID NO: 97523 - DNA, 15 bp, Homo sapiens
tgtcattgttgattt

SEQ ID NO: 97524 - DNA, 15 bp, Homo sapiens
atgtcattgttgatt

SEQ ID NO: 97525 - DNA, 15 bp, Homo sapiens
tatgtcattgttgat

SEQ ID NO: 97526 - DNA, 15 bp, Homo sapiens
ttatgtcattgttga

SEQ ID NO: 97527 - DNA, 15 bp, Homo sapiens
cttatgtcattgttg

SEQ ID NO: 97528 - DNA, 15 bp, Homo sapiens
tcttatgtcattgtt

SEQ ID NO: 97529 - DNA, 15 bp, Homo sapiens
ttcttatgtcattgt

SEQ ID NO: 97530 - DNA, 15 bp, Homo sapiens
cttcttatgtcattg

SEQ ID NO: 97531 - DNA, 15 bp, Homo sapiens
ccttcttatgtcatt

SEQ ID NO: 97532 - DNA, 15 bp, Homo sapiens
cccttcttatgtcat

SEQ ID NO: 97533 - DNA, 15 bp, Homo sapiens
gcccttcttatgtca

SEQ ID NO: 97534 - DNA, 15 bp, Homo sapiens
agcccttcttatgtc

SEQ ID NO: 97535 - DNA, 15 bp, Homo sapiens
aagcccttcttatgt

SEQ ID NO: 97536 - DNA, 15 bp, Homo sapiens
caagcccttcttatg

SEQ ID NO: 97537 - DNA, 15 bp, Homo sapiens
acaagcccttcttat

SEQ ID NO: 97538 - DNA, 15 bp, Homo sapiens
gacaagcccttctta

SEQ ID NO: 97539 - DNA, 15 bp, Homo sapiens
tgacaagcccttctt

SEQ ID NO: 97540 - DNA, 15 bp, Homo sapiens
ttgacaagcccttct

SEQ ID NO: 97541 - DNA, 15 bp, Homo sapiens
cttgacaagcccttc

SEQ ID NO: 97542 - DNA, 15 bp, Homo sapiens
acttgacaagccctt

SEQ ID NO: 97543 - DNA, 15 bp, Homo sapiens
gacttgacaagccct

SEQ ID NO: 97544 - DNA, 15 bp, Homo sapiens
cgacttgacaagccc

SEQ ID NO: 97545 - DNA, 15 bp, Homo sapiens
tcgacttgacaagcc

SEQ ID NO: 97546 - DNA, 15 bp, Homo sapiens
atcgacttgacaagc

SEQ ID NO: 97547 - DNA, 15 bp, Homo sapiens
gatcgacttgacaag

SEQ ID NO: 97548 - DNA, 15 bp, Homo sapiens
ggatcgacttgacaa

SEQ ID NO: 97549 - DNA, 15 bp, Homo sapiens
gggatcgacttgaca

SEQ ID NO: 97550 - DNA, 15 bp, Homo sapiens
tgggatcgacttgac

SEQ ID NO: 97551 - DNA, 15 bp, Homo sapiens
ttgggatcgacttga

SEQ ID NO: 97552 - DNA, 15 bp, Homo sapiens
attgggatcgacttg

SEQ ID NO: 97553 - DNA, 15 bp, Homo sapiens
cattgggatcgactt

SEQ ID NO: 97554 - DNA, 15 bp, Homo sapiens
acattgggatcgact

SEQ ID NO: 97555 - DNA, 15 bp, Homo sapiens
gacattgggatcgac

SEQ ID NO: 97556 - DNA, 15 bp, Homo sapiens
cgacattgggatcga

SEQ ID NO: 97557 - DNA, 15 bp, Homo sapiens
tcgacattgggatcg

SEQ ID NO: 97558 - DNA, 15 bp, Homo sapiens
ttcgacattgggatc

SEQ ID NO: 97559 - DNA, 15 bp, Homo sapiens
cttcgacattgggat

SEQ ID NO: 97560 - DNA, 15 bp, Homo sapiens
ccttcgacattggga

SEQ ID NO: 97561 - DNA, 15 bp, Homo sapiens
tccttcgacattggg

SEQ ID NO: 97562 - DNA, 15 bp, Homo sapiens
ttccttcgacattgg

SEQ ID NO: 97563 - DNA, 15 bp, Homo sapiens
tttccttcgacattg

SEQ ID NO: 97564 - DNA, 15 bp, Homo sapiens
gtttccttcgacatt

SEQ ID NO: 97565 - DNA, 15 bp, Homo sapiens
tgtttccttcgacat

SEQ ID NO: 97566 - DNA, 15 bp, Homo sapiens
ttgtttccttcgaca

SEQ ID NO: 97567 - DNA, 15 bp, Homo sapiens
tttgtttccttcgac

SEQ ID NO: 97568 - DNA, 15 bp, Homo sapiens
ttttgtttccttcga

SEQ ID NO: 97569 - DNA, 15 bp, Homo sapiens
cttttgtttccttcg

SEQ ID NO: 97570 - DNA, 15 bp, Homo sapiens
ccttttgtttccttc

SEQ ID NO: 97571 - DNA, 15 bp, Homo sapiens
accttttgtttcctt

SEQ ID NO: 97572 - DNA, 15 bp, Homo sapiens
aaccttttgtttcct

SEQ ID NO: 97573 - DNA, 15 bp, Homo sapiens
aaaccttttgtttcc

SEQ ID NO: 97574 - DNA, 15 bp, Homo sapiens
gaaaccttttgtttc

SEQ ID NO: 97575 - DNA, 15 bp, Homo sapiens
agaaaccttttgttt

SEQ ID NO: 97576 - DNA, 15 bp, Homo sapiens
aagaaaccttttgtt

SEQ ID NO: 97577 - DNA, 15 bp, Homo sapiens
aaagaaaccttttgt

SEQ ID NO: 97578 - DNA, 15 bp, Homo sapiens
taaagaaaccttttg

SEQ ID NO: 97579 - DNA, 15 bp, Homo sapiens
ttaaagaaacctttt

SEQ ID NO: 97580 - DNA, 15 bp, Homo sapiens
tttaaagaaaccttt

SEQ ID NO: 97581 - DNA, 15 bp, Homo sapiens
ttttaaagaaacctt

SEQ ID NO: 97582 - DNA, 15 bp, Homo sapiens
cttttaaagaaacct

SEQ ID NO: 97583 - DNA, 15 bp, Homo sapiens
ccttttaaagaaacc

SEQ ID NO: 97584 - DNA, 15 bp, Homo sapiens
tccttttaaagaaac

SEQ ID NO: 97585 - DNA, 15 bp, Homo sapiens
atccttttaaagaaa

SEQ ID NO: 97586 - DNA, 15 bp, Homo sapiens
catccttttaaagaa

SEQ ID NO: 97587 - DNA, 15 bp, Homo sapiens
tcatccttttaaaga

SEQ ID NO: 97588 - DNA, 15 bp, Homo sapiens
ctcatccttttaaag

SEQ ID NO: 97589 - DNA, 15 bp, Homo sapiens
tctcatccttttaaa

SEQ ID NO: 97590 - DNA, 15 bp, Homo sapiens
ttctcatccttttaa

SEQ ID NO: 97591 - DNA, 15 bp, Homo sapiens
cttctcatcctttta

SEQ ID NO: 97592 - DNA, 15 bp, Homo sapiens
gcttctcatcctttt

SEQ ID NO: 97593 - DNA, 15 bp, Homo sapiens
agcttctcatccttt

SEQ ID NO: 97594 - DNA, 15 bp, Homo sapiens
gagcttctcatcctt

SEQ ID NO: 97595 - DNA, 15 bp, Homo sapiens
ggagcttctcatcct

SEQ ID NO: 97596 - DNA, 15 bp, Homo sapiens
gggagcttctcatcc

SEQ ID NO: 97597 - DNA, 15 bp, Homo sapiens
agggagcttctcatc

SEQ ID NO: 97598 - DNA, 15 bp, Homo sapiens
cagggagcttctcat

SEQ ID NO: 97599 - DNA, 15 bp, Homo sapiens
gcagggagcttctca

SEQ ID NO: 97600 - DNA, 15 bp, Homo sapiens
tgcagggagcttctc

SEQ ID NO: 97601 - DNA, 15 bp, Homo sapiens
atgcagggagcttct

SEQ ID NO: 97602 - DNA, 15 bp, Homo sapiens
aatgcagggagcttc

SEQ ID NO: 97603 - DNA, 15 bp, Homo sapiens
aaatgcagggagctt

SEQ ID NO: 97604 - DNA, 15 bp, Homo sapiens
taaatgcagggagct

SEQ ID NO: 97605 - DNA, 15 bp, Homo sapiens
ctaaatgcagggagc

SEQ ID NO: 97606 - DNA, 15 bp, Homo sapiens
cctaaatgcagggag

SEQ ID NO: 97607 - DNA, 15 bp, Homo sapiens
ccctaaatgcaggga

SEQ ID NO: 97608 - DNA, 15 bp, Homo sapiens
tccctaaatgcaggg

SEQ ID NO: 97609 - DNA, 15 bp, Homo sapiens
ttccctaaatgcagg

SEQ ID NO: 97610 - DNA, 15 bp, Homo sapiens
gttccctaaatgcag

SEQ ID NO: 97611 - DNA, 15 bp, Homo sapiens
agttccctaaatgca

SEQ ID NO: 97612 - DNA, 15 bp, Homo sapiens
cagttccctaaatgc

SEQ ID NO: 97613 - DNA, 15 bp, Homo sapiens
ccagttccctaaatg

SEQ ID NO: 97614 - DNA, 15 bp, Homo sapiens
cccagttccctaaat

SEQ ID NO: 97615 - DNA, 15 bp, Homo sapiens
acccagttccctaaa

SEQ ID NO: 97616 - DNA, 15 bp, Homo sapiens
aacccagttccctaa

SEQ ID NO: 97617 - DNA, 15 bp, Homo sapiens
gaacccagttcccta

SEQ ID NO: 97618 - DNA, 15 bp, Homo sapiens
agaacccagttccct

SEQ ID NO: 97619 - DNA, 15 bp, Homo sapiens
cagaacccagttccc

SEQ ID NO: 97620 - DNA, 15 bp, Homo sapiens
gcagaacccagttcc

SEQ ID NO: 97621 - DNA, 15 bp, Homo sapiens
ggcagaacccagttc

SEQ ID NO: 97622 - DNA, 15 bp, Homo sapiens
aggcagaacccagtt

SEQ ID NO: 97623 - DNA, 15 bp, Homo sapiens
aaggcagaacccagt

SEQ ID NO: 97624 - DNA, 15 bp, Homo sapiens
gaaggcagaacccag

SEQ ID NO: 97625 - DNA, 15 bp, Homo sapiens
agaaggcagaaccca

SEQ ID NO: 97626 - DNA, 15 bp, Homo sapiens
gagaaggcagaaccc

SEQ ID NO: 97627 - DNA, 15 bp, Homo sapiens
agagaaggcagaacc

SEQ ID NO: 97628 - DNA, 15 bp, Homo sapiens
cagagaaggcagaac

SEQ ID NO: 97629 - DNA, 15 bp, Homo sapiens
ccagagaaggcagaa

SEQ ID NO: 97630 - DNA, 15 bp, Homo sapiens
cccagagaaggcaga

SEQ ID NO: 97631 - DNA, 15 bp, Homo sapiens
gcccagagaaggcag

SEQ ID NO: 97632 - DNA, 15 bp, Homo sapiens
agcccagagaaggca

SEQ ID NO: 97633 - DNA, 15 bp, Homo sapiens
cagcccagagaaggc

SEQ ID NO: 97634 - DNA, 15 bp, Homo sapiens
tcagcccagagaagg

SEQ ID NO: 97635 - DNA, 15 bp, Homo sapiens
ctcagcccagagaag

SEQ ID NO: 97636 - DNA, 15 bp, Homo sapiens
cctcagcccagagaa

SEQ ID NO: 97637 - DNA, 15 bp, Homo sapiens
acctcagcccagaga

SEQ ID NO: 97638 - DNA, 15 bp, Homo sapiens
cacctcagcccagag

SEQ ID NO: 97639 - DNA, 15 bp, Homo sapiens
acacctcagcccaga

SEQ ID NO: 97640 - DNA, 15 bp, Homo sapiens
aacacctcagcccag

SEQ ID NO: 97641 - DNA, 15 bp, Homo sapiens
gaacacctcagccca

SEQ ID NO: 97642 - DNA, 15 bp, Homo sapiens
agaacacctcagccc

SEQ ID NO: 97643 - DNA, 15 bp, Homo sapiens
cagaacacctcagcc

SEQ ID NO: 97644 - DNA, 15 bp, Homo sapiens
acagaacacctcagc

SEQ ID NO: 97645 - DNA, 15 bp, Homo sapiens
aacagaacacctcag

SEQ ID NO: 97646 - DNA, 15 bp, Homo sapiens
gaacagaacacctca

SEQ ID NO: 97647 - DNA, 15 bp, Homo sapiens
agaacagaacacctc

SEQ ID NO: 97648 - DNA, 15 bp, Homo sapiens
gagaacagaacacct

SEQ ID NO: 97649 - DNA, 15 bp, Homo sapiens
agagaacagaacacc

SEQ ID NO: 97650 - DNA, 15 bp, Homo sapiens
gagagaacagaacac

SEQ ID NO: 97651 - DNA, 15 bp, Homo sapiens
ggagagaacagaaca

SEQ ID NO: 97652 - DNA, 15 bp, Homo sapiens
gggagagaacagaac

SEQ ID NO: 97653 - DNA, 15 bp, Homo sapiens
cgggagagaacagaa

SEQ ID NO: 97654 - DNA, 15 bp, Homo sapiens
acgggagagaacaga

SEQ ID NO: 97655 - DNA, 15 bp, Homo sapiens
aacgggagagaacag

SEQ ID NO: 97656 - DNA, 15 bp, Homo sapiens
aaacgggagagaaca

SEQ ID NO: 97657 - DNA, 15 bp, Homo sapiens
caaacgggagagaac

SEQ ID NO: 97658 - DNA, 15 bp, Homo sapiens
gcaaacgggagagaa

SEQ ID NO: 97659 - DNA, 15 bp, Homo sapiens
ggcaaacgggagaga

SEQ ID NO: 97660 - DNA, 15 bp, Homo sapiens
aggcaaacgggagag

SEQ ID NO: 97661 - DNA, 15 bp, Homo sapiens
gaggcaaacgggaga

SEQ ID NO: 97662 - DNA, 15 bp, Homo sapiens
tgaggcaaacgggag

SEQ ID NO: 97663 - DNA, 15 bp, Homo sapiens
gtgaggcaaacggga

SEQ ID NO: 97664 - DNA, 15 bp, Homo sapiens
cgtgaggcaaacggg

SEQ ID NO: 97665 - DNA, 15 bp, Homo sapiens
ccgtgaggcaaacgg

SEQ ID NO: 97666 - DNA, 15 bp, Homo sapiens
gccgtgaggcaaacg

SEQ ID NO: 97667 - DNA, 15 bp, Homo sapiens
cgccgtgaggcaaac

SEQ ID NO: 97668 - DNA, 15 bp, Homo sapiens
acgccgtgaggcaaa

SEQ ID NO: 97669 - DNA, 15 bp, Homo sapiens
cacgccgtgaggcaa

SEQ ID NO: 97670 - DNA, 15 bp, Homo sapiens
gcacgccgtgaggca

SEQ ID NO: 97671 - DNA, 15 bp, Homo sapiens
tgcacgccgtgaggc

SEQ ID NO: 97672 - DNA, 15 bp, Homo sapiens
ctgcacgccgtgagg

SEQ ID NO: 97673 - DNA, 15 bp, Homo sapiens
cctgcacgccgtgag

SEQ ID NO: 97674 - DNA, 15 bp, Homo sapiens
tcctgcacgccgtga

SEQ ID NO: 97675 - DNA, 15 bp, Homo sapiens
ttcctgcacgccgtg

SEQ ID NO: 97676 - DNA, 15 bp, Homo sapiens
cttcctgcacgccgt

SEQ ID NO: 97677 - DNA, 15 bp, Homo sapiens
gcttcctgcacgccg

SEQ ID NO: 97678 - DNA, 15 bp, Homo sapiens
cgcttcctgcacgcc

SEQ ID NO: 97679 - DNA, 15 bp, Homo sapiens
ccgcttcctgcacgc

SEQ ID NO: 97680 - DNA, 15 bp, Homo sapiens
cccgcttcctgcacg

SEQ ID NO: 97681 - DNA, 15 bp, Homo sapiens
gcccgcttcctgcac

SEQ ID NO: 97682 - DNA, 15 bp, Homo sapiens
tgcccgcttcctgca

SEQ ID NO: 97683 - DNA, 15 bp, Homo sapiens
ctgcccgcttcctgc

SEQ ID NO: 97684 - DNA, 15 bp, Homo sapiens
tctgcccgcttcctg

SEQ ID NO: 97685 - DNA, 15 bp, Homo sapiens
atctgcccgcttcct

SEQ ID NO: 97686 - DNA, 15 bp, Homo sapiens
gatctgcccgcttcc

SEQ ID NO: 97687 - DNA, 15 bp, Homo sapiens
ggatctgcccgcttc

SEQ ID NO: 97688 - DNA, 15 bp, Homo sapiens
tggatctgcccgctt

SEQ ID NO: 97689 - DNA, 15 bp, Homo sapiens
ctggatctgcccgct

SEQ ID NO: 97690 - DNA, 15 bp, Homo sapiens
gctggatctgcccgc

SEQ ID NO: 97691 - DNA, 15 bp, Homo sapiens
agctggatctgcccg

SEQ ID NO: 97692 - DNA, 15 bp, Homo sapiens
cagctggatctgccc

SEQ ID NO: 97693 - DNA, 15 bp, Homo sapiens
acagctggatctgcc

SEQ ID NO: 97694 - DNA, 15 bp, Homo sapiens
cacagctggatctgc

SEQ ID NO: 97695 - DNA, 15 bp, Homo sapiens
ccacagctggatctg

SEQ ID NO: 97696 - DNA, 15 bp, Homo sapiens
gccacagctggatct

SEQ ID NO: 97697 - DNA, 15 bp, Homo sapiens
tgccacagctggatc

SEQ ID NO: 97698 - DNA, 15 bp, Homo sapiens
ttgccacagctggat

SEQ ID NO: 97699 - DNA, 15 bp, Homo sapiens
attgccacagctgga

SEQ ID NO: 97700 - DNA, 15 bp, Homo sapiens
aattgccacagctgg

SEQ ID NO: 97701 - DNA, 15 bp, Homo sapiens
gaattgccacagctg

SEQ ID NO: 97702 - DNA, 15 bp, Homo sapiens
ggaattgccacagct

SEQ ID NO: 97703 - DNA, 15 bp, Homo sapiens
aggaattgccacagc

SEQ ID NO: 97704 - DNA, 15 bp, Homo sapiens
gaggaattgccacag

SEQ ID NO: 97705 - DNA, 15 bp, Homo sapiens
ggaggaattgccaca

SEQ ID NO: 97706 - DNA, 15 bp, Homo sapiens
aggaggaattgccac

SEQ ID NO: 97707 - DNA, 15 bp, Homo sapiens
caggaggaattgcca

SEQ ID NO: 97708 - DNA, 15 bp, Homo sapiens
ccaggaggaattgcc

SEQ ID NO: 97709 - DNA, 15 bp, Homo sapiens
tccaggaggaattgc

SEQ ID NO: 97710 - DNA, 15 bp, Homo sapiens
ctccaggaggaattg

SEQ ID NO: 97711 - DNA, 15 bp, Homo sapiens
gctccaggaggaatt

SEQ ID NO: 97712 - DNA, 15 bp, Homo sapiens
agctccaggaggaat

SEQ ID NO: 97713 - DNA, 15 bp, Homo sapiens
cagctccaggaggaa

SEQ ID NO: 97714 - DNA, 15 bp, Homo sapiens
gcagctccaggagga

SEQ ID NO: 97715 - DNA, 15 bp, Homo sapiens
agcagctccaggagg

SEQ ID NO: 97716 - DNA, 15 bp, Homo sapiens
gagcagctccaggag

SEQ ID NO: 97717 - DNA, 15 bp, Homo sapiens
agagcagctccagga

SEQ ID NO: 97718 - DNA, 15 bp, Homo sapiens
gagagcagctccagg

SEQ ID NO: 97719 - DNA, 15 bp, Homo sapiens
ggagagcagctccag

SEQ ID NO: 97720 - DNA, 15 bp, Homo sapiens
cggagagcagctcca

SEQ ID NO: 97721 - DNA, 15 bp, Homo sapiens
tcggagagcagctcc

SEQ ID NO: 97722 - DNA, 15 bp, Homo sapiens
gtcggagagcagctc

SEQ ID NO: 97723 - DNA, 15 bp, Homo sapiens
tgtcggagagcagct

SEQ ID NO: 97724 - DNA, 15 bp, Homo sapiens
ctgtcggagagcagc

SEQ ID NO: 97725 - DNA, 15 bp, Homo sapiens
gctgtcggagagcag

SEQ ID NO: 97726 - DNA, 15 bp, Homo sapiens
cgctgtcggagagca

SEQ ID NO: 97727 - DNA, 15 bp, Homo sapiens
gcgctgtcggagagc

SEQ ID NO: 97728 - DNA, 15 bp, Homo sapiens
ggcgctgtcggagag

SEQ ID NO: 97729 - DNA, 15 bp, Homo sapiens
tggcgctgtcggaga

SEQ ID NO: 97730 - DNA, 15 bp, Homo sapiens
ttggcgctgtcggag

SEQ ID NO: 97731 - DNA, 15 bp, Homo sapiens
gttggcgctgtcgga

SEQ ID NO: 97732 - DNA, 15 bp, Homo sapiens
cgttggcgctgtcgg

SEQ ID NO: 97733 - DNA, 15 bp, Homo sapiens
gcgttggcgctgtcg

SEQ ID NO: 97734 - DNA, 15 bp, Homo sapiens
ggcgttggcgctgtc

SEQ ID NO: 97735 - DNA, 15 bp, Homo sapiens
tggcgttggcgctgt

SEQ ID NO: 97736 - DNA, 15 bp, Homo sapiens
ctggcgttggcgctg

SEQ ID NO: 97737 - DNA, 15 bp, Homo sapiens
gctggcgttggcgct

SEQ ID NO: 97738 - DNA, 15 bp, Homo sapiens
agctggcgttggcgc

SEQ ID NO: 97739 - DNA, 15 bp, Homo sapiens
cagctggcgttggcg

SEQ ID NO: 97740 - DNA, 15 bp, Homo sapiens
acagctggcgttggc

SEQ ID NO: 97741 - DNA, 15 bp, Homo sapiens
tacagctggcgttgg

SEQ ID NO: 97742 - DNA, 15 bp, Homo sapiens
atacagctggcgttg

SEQ ID NO: 97743 - DNA, 15 bp, Homo sapiens
gatacagctggcgtt

SEQ ID NO: 97744 - DNA, 15 bp, Homo sapiens
tgatacagctggcgt

SEQ ID NO: 97745 - DNA, 15 bp, Homo sapiens
gtgatacagctggcg

SEQ ID NO: 97746 - DNA, 15 bp, Homo sapiens
ggtgatacagctggc

SEQ ID NO: 97747 - DNA, 15 bp, Homo sapiens
aggtgatacagctgg

SEQ ID NO: 97748 - DNA, 15 bp, Homo sapiens
caggtgatacagctg

SEQ ID NO: 97749 - DNA, 15 bp, Homo sapiens
ccaggtgatacagct

SEQ ID NO: 97750 - DNA, 15 bp, Homo sapiens
cccaggtgatacagc

SEQ ID NO: 97751 - DNA, 15 bp, Homo sapiens
tcccaggtgatacag

SEQ ID NO: 97752 - DNA, 15 bp, Homo sapiens
ctcccaggtgataca

SEQ ID NO: 97753 - DNA, 15 bp, Homo sapiens
cctcccaggtgatac

SEQ ID NO: 97754 - DNA, 15 bp, Homo sapiens
ccctcccaggtgata

SEQ ID NO: 97755 - DNA, 15 bp, Homo sapiens
cccctcccaggtgat

SEQ ID NO: 97756 - DNA, 15 bp, Homo sapiens
tcccctcccaggtga

SEQ ID NO: 97757 - DNA, 15 bp, Homo sapiens
gtcccctcccaggtg

SEQ ID NO: 97758 - DNA, 15 bp, Homo sapiens
ggtcccctcccaggt

SEQ ID NO: 97759 - DNA, 15 bp, Homo sapiens
tggtcccctcccagg

SEQ ID NO: 97760 - DNA, 15 bp, Homo sapiens
ttggtcccctcccag

SEQ ID NO: 97761 - DNA, 15 bp, Homo sapiens
gttggtcccctccca

SEQ ID NO: 97762 - DNA, 15 bp, Homo sapiens
cgttggtcccctccc

SEQ ID NO: 97763 - DNA, 15 bp, Homo sapiens
ccgttggtcccctcc

SEQ ID NO: 97764 - DNA, 15 bp, Homo sapiens
cccgttggtcccctc

SEQ ID NO: 97765 - DNA, 15 bp, Homo sapiens
ccccgttggtcccct

SEQ ID NO: 97766 - DNA, 15 bp, Homo sapiens
tccccgttggtcccc

SEQ ID NO: 97767 - DNA, 15 bp, Homo sapiens
ctccccgttggtccc

SEQ ID NO: 97768 - DNA, 15 bp, Homo sapiens
actccccgttggtcc

SEQ ID NO: 97769 - DNA, 15 bp, Homo sapiens
aactccccgttggtc

SEQ ID NO: 97770 - DNA, 15 bp, Homo sapiens
gaactccccgttggt

SEQ ID NO: 97771 - DNA, 15 bp, Homo sapiens
tgaactccccgttgg

SEQ ID NO: 97772 - DNA, 15 bp, Homo sapiens
ttgaactccccgttg

SEQ ID NO: 97773 - DNA, 15 bp, Homo sapiens
tttgaactccccgtt

SEQ ID NO: 97774 - DNA, 15 bp, Homo sapiens
ttttgaactccccgt

SEQ ID NO: 97775 - DNA, 15 bp, Homo sapiens
attttgaactccccg

SEQ ID NO: 97776 - DNA, 15 bp, Homo sapiens
cattttgaactcccc

SEQ ID NO: 97777 - DNA, 15 bp, Homo sapiens
tcattttgaactccc

SEQ ID NO: 97778 - DNA, 15 bp, Homo sapiens
gtcattttgaactcc

SEQ ID NO: 97779 - DNA, 15 bp, Homo sapiens
cgtcattttgaactc

SEQ ID NO: 97780 - DNA, 15 bp, Homo sapiens
ccgtcattttgaact

SEQ ID NO: 97781 - DNA, 15 bp, Homo sapiens
tccgtcattttgaac

SEQ ID NO: 97782 - DNA, 15 bp, Homo sapiens
gtccgtcattttgaa

SEQ ID NO: 97783 - DNA, 15 bp, Homo sapiens
ggtccgtcattttga

SEQ ID NO: 97784 - DNA, 15 bp, Homo sapiens
gggtccgtcattttg

SEQ ID NO: 97785 - DNA, 15 bp, Homo sapiens
ggggtccgtcatttt

SEQ ID NO: 97786 - DNA, 15 bp, Homo sapiens
cggggtccgtcattt

SEQ ID NO: 97787 - DNA, 15 bp, Homo sapiens
tcggggtccgtcatt

SEQ ID NO: 97788 - DNA, 15 bp, Homo sapiens
atcggggtccgtcat

SEQ ID NO: 97789 - DNA, 15 bp, Homo sapiens
catcggggtccgtca

SEQ ID NO: 97790 - DNA, 15 bp, Homo sapiens
tcatcggggtccgtc

SEQ ID NO: 97791 - DNA, 15 bp, Homo sapiens
ctcatcggggtccgt

SEQ ID NO: 97792 - DNA, 15 bp, Homo sapiens
cctcatcggggtccg

SEQ ID NO: 97793 - DNA, 15 bp, Homo sapiens
acctcatcggggtcc

SEQ ID NO: 97794 - DNA, 15 bp, Homo sapiens
cacctcatcggggtc

SEQ ID NO: 97795 - DNA, 15 bp, Homo sapiens
ccacctcatcggggt

SEQ ID NO: 97796 - DNA, 15 bp, Homo sapiens
gccacctcatcgggg

SEQ ID NO: 97797 - DNA, 15 bp, Homo sapiens
ggccacctcatcggg

SEQ ID NO: 97798 - DNA, 15 bp, Homo sapiens
tggccacctcatcgg

SEQ ID NO: 97799 - DNA, 15 bp, Homo sapiens
ctggccacctcatcg

SEQ ID NO: 97800 - DNA, 15 bp, Homo sapiens
cctggccacctcatc

SEQ ID NO: 97801 - DNA, 15 bp, Homo sapiens
gcctggccacctcat

SEQ ID NO: 97802 - DNA, 15 bp, Homo sapiens
cgcctggccacctca

SEQ ID NO: 97803 - DNA, 15 bp, Homo sapiens
gcgcctggccacctc

SEQ ID NO: 97804 - DNA, 15 bp, Homo sapiens
agcgcctggccacct

SEQ ID NO: 97805 - DNA, 15 bp, Homo sapiens
cagcgcctggccacc

SEQ ID NO: 97806 - DNA, 15 bp, Homo sapiens
ccagcgcctggccac

SEQ ID NO: 97807 - DNA, 15 bp, Homo sapiens
cccagcgcctggcca

SEQ ID NO: 97808 - DNA, 15 bp, Homo sapiens
ccccagcgcctggcc

SEQ ID NO: 97809 - DNA, 15 bp, Homo sapiens
gccccagcgcctggc

SEQ ID NO: 97810 - DNA, 15 bp, Homo sapiens
cgccccagcgcctgg

SEQ ID NO: 97811 - DNA, 15 bp, Homo sapiens
tcgccccagcgcctg

SEQ ID NO: 97812 - DNA, 15 bp, Homo sapiens
ctcgccccagcgcct

SEQ ID NO: 97813 - DNA, 15 bp, Homo sapiens
gctcgccccagcgcc

SEQ ID NO: 97814 - DNA, 15 bp, Homo sapiens
cgctcgccccagcgc

SEQ ID NO: 97815 - DNA, 15 bp, Homo sapiens
ccgctcgccccagcg

SEQ ID NO: 97816 - DNA, 15 bp, Homo sapiens
tccgctcgccccagc

SEQ ID NO: 97817 - DNA, 15 bp, Homo sapiens
ttccgctcgccccag

SEQ ID NO: 97818 - DNA, 15 bp, Homo sapiens
tttccgctcgcccca

SEQ ID NO: 97819 - DNA, 15 bp, Homo sapiens
ttttccgctcgcccc

SEQ ID NO: 97820 - DNA, 15 bp, Homo sapiens
cttttccgctcgccc

SEQ ID NO: 97821 - DNA, 15 bp, Homo sapiens
gcttttccgctcgcc

SEQ ID NO: 97822 - DNA, 15 bp, Homo sapiens
tgcttttccgctcgc

SEQ ID NO: 97823 - DNA, 15 bp, Homo sapiens
ttgcttttccgctcg

SEQ ID NO: 97824 - DNA, 15 bp, Homo sapiens
cttgcttttccgctc

SEQ ID NO: 97825 - DNA, 15 bp, Homo sapiens
gcttgcttttccgct

SEQ ID NO: 97826 - DNA, 15 bp, Homo sapiens
ggcttgcttttccgc

SEQ ID NO: 97827 - DNA, 15 bp, Homo sapiens
gggcttgcttttccg

SEQ ID NO: 97828 - DNA, 15 bp, Homo sapiens
tgggcttgcttttcc

SEQ ID NO: 97829 - DNA, 15 bp, Homo sapiens
ttgggcttgcttttc

SEQ ID NO: 97830 - DNA, 15 bp, Homo sapiens
gttgggcttgctttt

SEQ ID NO: 97831 - DNA, 15 bp, Homo sapiens
tgttgggcttgcttt

SEQ ID NO: 97832 - DNA, 15 bp, Homo sapiens
atgttgggcttgctt

SEQ ID NO: 97833 - DNA, 15 bp, Homo sapiens
catgttgggcttgct

SEQ ID NO: 97834 - DNA, 15 bp, Homo sapiens
tcatgttgggcttgc

SEQ ID NO: 97835 - DNA, 15 bp, Homo sapiens
ttcatgttgggcttg

SEQ ID NO: 97836 - DNA, 15 bp, Homo sapiens
attcatgttgggctt

SEQ ID NO: 97837 - DNA, 15 bp, Homo sapiens
aattcatgttgggct

SEQ ID NO: 97838 - DNA, 15 bp, Homo sapiens
taattcatgttgggc

SEQ ID NO: 97839 - DNA, 15 bp, Homo sapiens
gtaattcatgttggg

SEQ ID NO: 97840 - DNA, 15 bp, Homo sapiens
cgtaattcatgttgg

SEQ ID NO: 97841 - DNA, 15 bp, Homo sapiens
tcgtaattcatgttg

SEQ ID NO: 97842 - DNA, 15 bp, Homo sapiens
gtcgtaattcatgtt

SEQ ID NO: 97843 - DNA, 15 bp, Homo sapiens
tgtcgtaattcatgt

SEQ ID NO: 97844 - DNA, 15 bp, Homo sapiens
ttgtcgtaattcatg

SEQ ID NO: 97845 - DNA, 15 bp, Homo sapiens
cttgtcgtaattcat

SEQ ID NO: 97846 - DNA, 15 bp, Homo sapiens
gcttgtcgtaattca

SEQ ID NO: 97847 - DNA, 15 bp, Homo sapiens
agcttgtcgtaattc

SEQ ID NO: 97848 - DNA, 15 bp, Homo sapiens
cagcttgtcgtaatt

SEQ ID NO: 97849 - DNA, 15 bp, Homo sapiens
tcagcttgtcgtaat

SEQ ID NO: 97850 - DNA, 15 bp, Homo sapiens
ctcagcttgtcgtaa

SEQ ID NO: 97851 - DNA, 15 bp, Homo sapiens
gctcagcttgtcgta

SEQ ID NO: 97852 - DNA, 15 bp, Homo sapiens
ggctcagcttgtcgt

SEQ ID NO: 97853 - DNA, 15 bp, Homo sapiens
cggctcagcttgtcg

SEQ ID NO: 97854 - DNA, 15 bp, Homo sapiens
ccggctcagcttgtc

SEQ ID NO: 97855 - DNA, 15 bp, Homo sapiens
cccggctcagcttgt

SEQ ID NO: 97856 - DNA, 15 bp, Homo sapiens
gcccggctcagcttg

SEQ ID NO: 97857 - DNA, 15 bp, Homo sapiens
ggcccggctcagctt

SEQ ID NO: 97858 - DNA, 15 bp, Homo sapiens
gggcccggctcagct

SEQ ID NO: 97859 - DNA, 15 bp, Homo sapiens
agggcccggctcagc

SEQ ID NO: 97860 - DNA, 15 bp, Homo sapiens
gagggcccggctcag

SEQ ID NO: 97861 - DNA, 15 bp, Homo sapiens
ggagggcccggctca

SEQ ID NO: 97862 - DNA, 15 bp, Homo sapiens
cggagggcccggctc

SEQ ID NO: 97863 - DNA, 15 bp, Homo sapiens
acggagggcccggct

SEQ ID NO: 97864 - DNA, 15 bp, Homo sapiens
aacggagggcccggc

SEQ ID NO: 97865 - DNA, 15 bp, Homo sapiens
taacggagggcccgg

SEQ ID NO: 97866 - DNA, 15 bp, Homo sapiens
ataacggagggcccg

SEQ ID NO: 97867 - DNA, 15 bp, Homo sapiens
aataacggagggccc

SEQ ID NO: 97868 - DNA, 15 bp, Homo sapiens
taataacggagggcc

SEQ ID NO: 97869 - DNA, 15 bp, Homo sapiens
gtaataacggagggc

SEQ ID NO: 97870 - DNA, 15 bp, Homo sapiens
agtaataacggaggg

SEQ ID NO: 97871 - DNA, 15 bp, Homo sapiens
tagtaataacggagg

SEQ ID NO: 97872 - DNA, 15 bp, Homo sapiens
atagtaataacggag

SEQ ID NO: 97873 - DNA, 15 bp, Homo sapiens
catagtaataacgga

SEQ ID NO: 97874 - DNA, 15 bp, Homo sapiens
tcatagtaataacgg

SEQ ID NO: 97875 - DNA, 15 bp, Homo sapiens
atcatagtaataacg

SEQ ID NO: 97876 - DNA, 15 bp, Homo sapiens
tatcatagtaataac

SEQ ID NO: 97877 - DNA, 15 bp, Homo sapiens
ttatcatagtaataa

SEQ ID NO: 97878 - DNA, 15 bp, Homo sapiens
tttatcatagtaata

SEQ ID NO: 97879 - DNA, 15 bp, Homo sapiens
ttttatcatagtaat

SEQ ID NO: 97880 - DNA, 15 bp, Homo sapiens
tttttatcatagtaa

SEQ ID NO: 97881 - DNA, 15 bp, Homo sapiens
gtttttatcatagta

SEQ ID NO: 97882 - DNA, 15 bp, Homo sapiens
tgtttttatcatagt

SEQ ID NO: 97883 - DNA, 15 bp, Homo sapiens
atgtttttatcatag

SEQ ID NO: 97884 - DNA, 15 bp, Homo sapiens
aatgtttttatcata

SEQ ID NO: 97885 - DNA, 15 bp, Homo sapiens
taatgtttttatcat

SEQ ID NO: 97886 - DNA, 15 bp, Homo sapiens
ataatgtttttatca

SEQ ID NO: 97887 - DNA, 15 bp, Homo sapiens
cataatgtttttatc

SEQ ID NO: 97888 - DNA, 15 bp, Homo sapiens
tcataatgtttttat

SEQ ID NO: 97889 - DNA, 15 bp, Homo sapiens
gtcataatgttttta

SEQ ID NO: 97890 - DNA, 15 bp, Homo sapiens
ggtcataatgttttt

SEQ ID NO: 97891 - DNA, 15 bp, Homo sapiens
tggtcataatgtttt

SEQ ID NO: 97892 - DNA, 15 bp, Homo sapiens
ttggtcataatgttt

SEQ ID NO: 97893 - DNA, 15 bp, Homo sapiens
tttggtcataatgtt

SEQ ID NO: 97894 - DNA, 15 bp, Homo sapiens
ctttggtcataatgt

SEQ ID NO: 97895 - DNA, 15 bp, Homo sapiens
actttggtcataatg

SEQ ID NO: 97896 - DNA, 15 bp, Homo sapiens
cactttggtcataat

SEQ ID NO: 97897 - DNA, 15 bp, Homo sapiens
gcactttggtcataa

SEQ ID NO: 97898 - DNA, 15 bp, Homo sapiens
tgcactttggtcata

SEQ ID NO: 97899 - DNA, 15 bp, Homo sapiens
gtgcactttggtcat

SEQ ID NO: 97900 - DNA, 15 bp, Homo sapiens
cgtgcactttggtca

SEQ ID NO: 97901 - DNA, 15 bp, Homo sapiens
ccgtgcactttggtc

SEQ ID NO: 97902 - DNA, 15 bp, Homo sapiens
gccgtgcactttggt

SEQ ID NO: 97903 - DNA, 15 bp, Homo sapiens
tgccgtgcactttgg

SEQ ID NO: 97904 - DNA, 15 bp, Homo sapiens
ttgccgtgcactttg

SEQ ID NO: 97905 - DNA, 15 bp, Homo sapiens
tttgccgtgcacttt

SEQ ID NO: 97906 - DNA, 15 bp, Homo sapiens
ttttgccgtgcactt

SEQ ID NO: 97907 - DNA, 15 bp, Homo sapiens
cttttgccgtgcact

SEQ ID NO: 97908 - DNA, 15 bp, Homo sapiens
tcttttgccgtgcac

SEQ ID NO: 97909 - DNA, 15 bp, Homo sapiens
atcttttgccgtgca

SEQ ID NO: 97910 - DNA, 15 bp, Homo sapiens
tatcttttgccgtgc

SEQ ID NO: 97911 - DNA, 15 bp, Homo sapiens
atatcttttgccgtg

SEQ ID NO: 97912 - DNA, 15 bp, Homo sapiens
catatcttttgccgt

SEQ ID NO: 97913 - DNA, 15 bp, Homo sapiens
gcatatcttttgccg

SEQ ID NO: 97914 - DNA, 15 bp, Homo sapiens
agcatatcttttgcc

SEQ ID NO: 97915 - DNA, 15 bp, Homo sapiens
aagcatatcttttgc

SEQ ID NO: 97916 - DNA, 15 bp, Homo sapiens
taagcatatcttttg

SEQ ID NO: 97917 - DNA, 15 bp, Homo sapiens
gtaagcatatctttt

SEQ ID NO: 97918 - DNA, 15 bp, Homo sapiens
tgtaagcatatcttt

SEQ ID NO: 97919 - DNA, 15 bp, Homo sapiens
ttgtaagcatatctt

SEQ ID NO: 97920 - DNA, 15 bp, Homo sapiens
tttgtaagcatatct

SEQ ID NO: 97921 - DNA, 15 bp, Homo sapiens
atttgtaagcatatc

SEQ ID NO: 97922 - DNA, 15 bp, Homo sapiens
aatttgtaagcatat

SEQ ID NO: 97923 - DNA, 15 bp, Homo sapiens
aaatttgtaagcata

SEQ ID NO: 97924 - DNA, 15 bp, Homo sapiens
caaatttgtaagcat

SEQ ID NO: 97925 - DNA, 15 bp, Homo sapiens
tcaaatttgtaagca

SEQ ID NO: 97926 - DNA, 15 bp, Homo sapiens
gtcaaatttgtaagc

SEQ ID NO: 97927 - DNA, 15 bp, Homo sapiens
agtcaaatttgtaag

SEQ ID NO: 97928 - DNA, 15 bp, Homo sapiens
aagtcaaatttgtaa

SEQ ID NO: 97929 - DNA, 15 bp, Homo sapiens
gaagtcaaatttgta

SEQ ID NO: 97930 - DNA, 15 bp, Homo sapiens
ggaagtcaaatttgt

SEQ ID NO: 97931 - DNA, 15 bp, Homo sapiens
tggaagtcaaatttg

SEQ ID NO: 97932 - DNA, 15 bp, Homo sapiens
gtggaagtcaaattt

SEQ ID NO: 97933 - DNA, 15 bp, Homo sapiens
cgtggaagtcaaatt

SEQ ID NO: 97934 - DNA, 15 bp, Homo sapiens
ccgtggaagtcaaat

SEQ ID NO: 97935 - DNA, 15 bp, Homo sapiens
gccgtggaagtcaaa

SEQ ID NO: 97936 - DNA, 15 bp, Homo sapiens
tgccgtggaagtcaa

SEQ ID NO: 97937 - DNA, 15 bp, Homo sapiens
atgccgtggaagtca

SEQ ID NO: 97938 - DNA, 15 bp, Homo sapiens
aatgccgtggaagtc

SEQ ID NO: 97939 - DNA, 15 bp, Homo sapiens
caatgccgtggaagt

SEQ ID NO: 97940 - DNA, 15 bp, Homo sapiens
gcaatgccgtggaag

SEQ ID NO: 97941 - DNA, 15 bp, Homo sapiens
ggcaatgccgtggaa

SEQ ID NO: 97942 - DNA, 15 bp, Homo sapiens
gggcaatgccgtgga

SEQ ID NO: 97943 - DNA, 15 bp, Homo sapiens
tgggcaatgccgtgg

SEQ ID NO: 97944 - DNA, 15 bp, Homo sapiens
ctgggcaatgccgtg

SEQ ID NO: 97945 - DNA, 15 bp, Homo sapiens
cctgggcaatgccgt

SEQ ID NO: 97946 - DNA, 15 bp, Homo sapiens
gcctgggcaatgccg

SEQ ID NO: 97947 - DNA, 15 bp, Homo sapiens
agcctgggcaatgcc

SEQ ID NO: 97948 - DNA, 15 bp, Homo sapiens
gagcctgggcaatgc

SEQ ID NO: 97949 - DNA, 15 bp, Homo sapiens
agagcctgggcaatg

SEQ ID NO: 97950 - DNA, 15 bp, Homo sapiens
cagagcctgggcaat

SEQ ID NO: 97951 - DNA, 15 bp, Homo sapiens
gcagagcctgggcaa

SEQ ID NO: 97952 - DNA, 15 bp, Homo sapiens
tgcagagcctgggca

SEQ ID NO: 97953 - DNA, 15 bp, Homo sapiens
ctgcagagcctgggc

SEQ ID NO: 97954 - DNA, 15 bp, Homo sapiens
gctgcagagcctggg

SEQ ID NO: 97955 - DNA, 15 bp, Homo sapiens
ggctgcagagcctgg

SEQ ID NO: 97956 - DNA, 15 bp, Homo sapiens
tggctgcagagcctg

SEQ ID NO: 97957 - DNA, 15 bp, Homo sapiens
gtggctgcagagcct

SEQ ID NO: 97958 - DNA, 15 bp, Homo sapiens
tgtggctgcagagcc

SEQ ID NO: 97959 - DNA, 15 bp, Homo sapiens
atgtggctgcagagc

SEQ ID NO: 97960 - DNA, 15 bp, Homo sapiens
gatgtggctgcagag

SEQ ID NO: 97961 - DNA, 15 bp, Homo sapiens
ggatgtggctgcaga

SEQ ID NO: 97962 - DNA, 15 bp, Homo sapiens
cggatgtggctgcag

SEQ ID NO: 97963 - DNA, 15 bp, Homo sapiens
tcggatgtggctgca

SEQ ID NO: 97964 - DNA, 15 bp, Homo sapiens
gtcggatgtggctgc

SEQ ID NO: 97965 - DNA, 15 bp, Homo sapiens
ggtcggatgtggctg

SEQ ID NO: 97966 - DNA, 15 bp, Homo sapiens
cggtcggatgtggct

SEQ ID NO: 97967 - DNA, 15 bp, Homo sapiens
tcggtcggatgtggc

SEQ ID NO: 97968 - DNA, 15 bp, Homo sapiens
ctcggtcggatgtgg

SEQ ID NO: 97969 - DNA, 15 bp, Homo sapiens
actcggtcggatgtg

SEQ ID NO: 97970 - DNA, 15 bp, Homo sapiens
gactcggtcggatgt

SEQ ID NO: 97971 - DNA, 15 bp, Homo sapiens
cgactcggtcggatg

SEQ ID NO: 97972 - DNA, 15 bp, Homo sapiens
acgactcggtcggat

SEQ ID NO: 97973 - DNA, 15 bp, Homo sapiens
gacgactcggtcgga

SEQ ID NO: 97974 - DNA, 15 bp, Homo sapiens
ggacgactcggtcgg

SEQ ID NO: 97975 - DNA, 15 bp, Homo sapiens
tggacgactcggtcg

SEQ ID NO: 97976 - DNA, 15 bp, Homo sapiens
atggacgactcggtc

SEQ ID NO: 97977 - DNA, 15 bp, Homo sapiens
catggacgactcggt

SEQ ID NO: 97978 - DNA, 15 bp, Homo sapiens
acatggacgactcgg

SEQ ID NO: 97979 - DNA, 15 bp, Homo sapiens
tacatggacgactcg

SEQ ID NO: 97980 - DNA, 15 bp, Homo sapiens
gtacatggacgactc

SEQ ID NO: 97981 - DNA, 15 bp, Homo sapiens
tgtacatggacgact

SEQ ID NO: 97982 - DNA, 15 bp, Homo sapiens
ttgtacatggacgac

SEQ ID NO: 97983 - DNA, 15 bp, Homo sapiens
cttgtacatggacga

SEQ ID NO: 97984 - DNA, 15 bp, Homo sapiens
acttgtacatggacg

SEQ ID NO: 97985 - DNA, 15 bp, Homo sapiens
tacttgtacatggac

SEQ ID NO: 97986 - DNA, 15 bp, Homo sapiens
gtacttgtacatgga

SEQ ID NO: 97987 - DNA, 15 bp, Homo sapiens
ggtacttgtacatgg

SEQ ID NO: 97988 - DNA, 15 bp, Homo sapiens
gggtacttgtacatg

SEQ ID NO: 97989 - DNA, 15 bp, Homo sapiens
agggtacttgtacat

SEQ ID NO: 97990 - DNA, 15 bp, Homo sapiens
aagggtacttgtaca

SEQ ID NO: 97991 - DNA, 15 bp, Homo sapiens
gaagggtacttgtac

SEQ ID NO: 97992 - DNA, 15 bp, Homo sapiens
agaagggtacttgta

SEQ ID NO: 97993 - DNA, 15 bp, Homo sapiens
cagaagggtacttgt

SEQ ID NO: 97994 - DNA, 15 bp, Homo sapiens
tcagaagggtacttg

SEQ ID NO: 97995 - DNA, 15 bp, Homo sapiens
gtcagaagggtactt

SEQ ID NO: 97996 - DNA, 15 bp, Homo sapiens
tgtcagaagggtact

SEQ ID NO: 97997 - DNA, 15 bp, Homo sapiens
atgtcagaagggtac

SEQ ID NO: 97998 - DNA, 15 bp, Homo sapiens
gatgtcagaagggta

SEQ ID NO: 97999 - DNA, 15 bp, Homo sapiens
agatgtcagaagggt

SEQ ID NO: 98000 - DNA, 15 bp, Homo sapiens
gagatgtcagaaggg

SEQ ID NO: 98001 - DNA, 15 bp, Homo sapiens
ggagatgtcagaagg

SEQ ID NO: 98002 - DNA, 15 bp, Homo sapiens
aggagatgtcagaag

SEQ ID NO: 98003 - DNA, 15 bp, Homo sapiens
taggagatgtcagaa

SEQ ID NO: 98004 - DNA, 15 bp, Homo sapiens
gtaggagatgtcaga

SEQ ID NO: 98005 - DNA, 15 bp, Homo sapiens
tgtaggagatgtcag

SEQ ID NO: 98006 - DNA, 15 bp, Homo sapiens
atgtaggagatgtca

SEQ ID NO: 98007 - DNA, 15 bp, Homo sapiens
catgtaggagatgtc

SEQ ID NO: 98008 - DNA, 15 bp, Homo sapiens
gcatgtaggagatgt

SEQ ID NO: 98009 - DNA, 15 bp, Homo sapiens
ggcatgtaggagatg

SEQ ID NO: 98010 - DNA, 15 bp, Homo sapiens
aggcatgtaggagat

SEQ ID NO: 98011 - DNA, 15 bp, Homo sapiens
aaggcatgtaggaga

SEQ ID NO: 98012 - DNA, 15 bp, Homo sapiens
gaaggcatgtaggag

SEQ ID NO: 98013 - DNA, 15 bp, Homo sapiens
ggaaggcatgtagga

SEQ ID NO: 98014 - DNA, 15 bp, Homo sapiens
aggaaggcatgtagg

SEQ ID NO: 98015 - DNA, 15 bp, Homo sapiens
taggaaggcatgtag

SEQ ID NO: 98016 - DNA, 15 bp, Homo sapiens
gtaggaaggcatgta

SEQ ID NO: 98017 - DNA, 15 bp, Homo sapiens
ggtaggaaggcatgt

SEQ ID NO: 98018 - DNA, 15 bp, Homo sapiens
tggtaggaaggcatg

SEQ ID NO: 98019 - DNA, 15 bp, Homo sapiens
atggtaggaaggcat

SEQ ID NO: 98020 - DNA, 15 bp, Homo sapiens
catggtaggaaggca

SEQ ID NO: 98021 - DNA, 15 bp, Homo sapiens
gcatggtaggaaggc

SEQ ID NO: 98022 - DNA, 15 bp, Homo sapiens
ggcatggtaggaagg

SEQ ID NO: 98023 - DNA, 15 bp, Homo sapiens
gggcatggtaggaag

SEQ ID NO: 98024 - DNA, 15 bp, Homo sapiens
tgggcatggtaggaa

SEQ ID NO: 98025 - DNA, 15 bp, Homo sapiens
gtgggcatggtagga

SEQ ID NO: 98026 - DNA, 15 bp, Homo sapiens
ggtgggcatggtagg

SEQ ID NO: 98027 - DNA, 15 bp, Homo sapiens
tggtgggcatggtag

SEQ ID NO: 98028 - DNA, 15 bp, Homo sapiens
ctggtgggcatggta

SEQ ID NO: 98029 - DNA, 15 bp, Homo sapiens
gctggtgggcatggt

SEQ ID NO: 98030 - DNA, 15 bp, Homo sapiens
tgctggtgggcatgg

SEQ ID NO: 98031 - DNA, 15 bp, Homo sapiens
ctgctggtgggcatg

SEQ ID NO: 98032 - DNA, 15 bp, Homo sapiens
tctgctggtgggcat

SEQ ID NO: 98033 - DNA, 15 bp, Homo sapiens
ttctgctggtgggca

SEQ ID NO: 98034 - DNA, 15 bp, Homo sapiens
cttctgctggtgggc

SEQ ID NO: 98035 - DNA, 15 bp, Homo sapiens
ccttctgctggtggg

SEQ ID NO: 98036 - DNA, 15 bp, Homo sapiens
accttctgctggtgg

SEQ ID NO: 98037 - DNA, 15 bp, Homo sapiens
caccttctgctggtg

SEQ ID NO: 98038 - DNA, 15 bp, Homo sapiens
tcaccttctgctggt

SEQ ID NO: 98039 - DNA, 15 bp, Homo sapiens
ttcaccttctgctgg

SEQ ID NO: 98040 - DNA, 15 bp, Homo sapiens
gttcaccttctgctg

SEQ ID NO: 98041 - DNA, 15 bp, Homo sapiens
agttcaccttctgct

SEQ ID NO: 98042 - DNA, 15 bp, Homo sapiens
aagttcaccttctgc

SEQ ID NO: 98043 - DNA, 15 bp, Homo sapiens
aaagttcaccttctg

SEQ ID NO: 98044 - DNA, 15 bp, Homo sapiens
caaagttcaccttct

SEQ ID NO: 98045 - DNA, 15 bp, Homo sapiens
acaaagttcaccttc

SEQ ID NO: 98046 - DNA, 15 bp, Homo sapiens
gacaaagttcacctt

SEQ ID NO: 98047 - DNA, 15 bp, Homo sapiens
ggacaaagttcacct

SEQ ID NO: 98048 - DNA, 15 bp, Homo sapiens
gggacaaagttcacc

SEQ ID NO: 98049 - DNA, 15 bp, Homo sapiens
agggacaaagttcac

SEQ ID NO: 98050 - DNA, 15 bp, Homo sapiens
gagggacaaagttca

SEQ ID NO: 98051 - DNA, 15 bp, Homo sapiens
ggagggacaaagttc

SEQ ID NO: 98052 - DNA, 15 bp, Homo sapiens
gggagggacaaagtt

SEQ ID NO: 98053 - DNA, 15 bp, Homo sapiens
ggggagggacaaagt

SEQ ID NO: 98054 - DNA, 15 bp, Homo sapiens
tggggagggacaaag

SEQ ID NO: 98055 - DNA, 15 bp, Homo sapiens
atggggagggacaaa

SEQ ID NO: 98056 - DNA, 15 bp, Homo sapiens
gatggggagggacaa

SEQ ID NO: 98057 - DNA, 15 bp, Homo sapiens
ggatggggagggaca

SEQ ID NO: 98058 - DNA, 15 bp, Homo sapiens
tggatggggagggac

SEQ ID NO: 98059 - DNA, 15 bp, Homo sapiens
atggatggggaggga

SEQ ID NO: 98060 - DNA, 15 bp, Homo sapiens
gatggatggggaggg

SEQ ID NO: 98061 - DNA, 15 bp, Homo sapiens
ggatggatggggagg

SEQ ID NO: 98062 - DNA, 15 bp, Homo sapiens
aggatggatggggag

SEQ ID NO: 98063 - DNA, 15 bp, Homo sapiens
gaggatggatgggga

SEQ ID NO: 98064 - DNA, 15 bp, Homo sapiens
ggaggatggatgggg

SEQ ID NO: 98065 - DNA, 15 bp, Homo sapiens
tggaggatggatggg

SEQ ID NO: 98066 - DNA, 15 bp, Homo sapiens
atggaggatggatgg

SEQ ID NO: 98067 - DNA, 15 bp, Homo sapiens
catggaggatggatg

SEQ ID NO: 98068 - DNA, 15 bp, Homo sapiens
gcatggaggatggat

SEQ ID NO: 98069 - DNA, 15 bp, Homo sapiens
ggcatggaggatgga

SEQ ID NO: 98070 - DNA, 15 bp, Homo sapiens
aggcatggaggatgg

SEQ ID NO: 98071 - DNA, 15 bp, Homo sapiens
caggcatggaggatg

SEQ ID NO: 98072 - DNA, 15 bp, Homo sapiens
acaggcatggaggat

SEQ ID NO: 98073 - DNA, 15 bp, Homo sapiens
gacaggcatggagga

SEQ ID NO: 98074 - DNA, 15 bp, Homo sapiens
tgacaggcatggagg

SEQ ID NO: 98075 - DNA, 15 bp, Homo sapiens
gtgacaggcatggag

SEQ ID NO: 98076 - DNA, 15 bp, Homo sapiens
agtgacaggcatgga

SEQ ID NO: 98077 - DNA, 15 bp, Homo sapiens
aagtgacaggcatgg

SEQ ID NO: 98078 - DNA, 15 bp, Homo sapiens
gaagtgacaggcatg

SEQ ID NO: 98079 - DNA, 15 bp, Homo sapiens
ggaagtgacaggcat

SEQ ID NO: 98080 - DNA, 15 bp, Homo sapiens
aggaagtgacaggca

SEQ ID NO: 98081 - DNA, 15 bp, Homo sapiens
gaggaagtgacaggc

SEQ ID NO: 98082 - DNA, 15 bp, Homo sapiens
ggaggaagtgacagg

SEQ ID NO: 98083 - DNA, 15 bp, Homo sapiens
tggaggaagtgacag

SEQ ID NO: 98084 - DNA, 15 bp, Homo sapiens
ctggaggaagtgaca

SEQ ID NO: 98085 - DNA, 15 bp, Homo sapiens
gctggaggaagtgac

SEQ ID NO: 98086 - DNA, 15 bp, Homo sapiens
agctggaggaagtga

SEQ ID NO: 98087 - DNA, 15 bp, Homo sapiens
aagctggaggaagtg

SEQ ID NO: 98088 - DNA, 15 bp, Homo sapiens
gaagctggaggaagt

SEQ ID NO: 98089 - DNA, 15 bp, Homo sapiens
agaagctggaggaag

SEQ ID NO: 98090 - DNA, 15 bp, Homo sapiens
aagaagctggaggaa

SEQ ID NO: 98091 - DNA, 15 bp, Homo sapiens
aaagaagctggagga

SEQ ID NO: 98092 - DNA, 15 bp, Homo sapiens
caaagaagctggagg

SEQ ID NO: 98093 - DNA, 15 bp, Homo sapiens
ccaaagaagctggag

SEQ ID NO: 98094 - DNA, 15 bp, Homo sapiens
tccaaagaagctgga

SEQ ID NO: 98095 - DNA, 15 bp, Homo sapiens
ctccaaagaagctgg

SEQ ID NO: 98096 - DNA, 15 bp, Homo sapiens
gctccaaagaagctg

SEQ ID NO: 98097 - DNA, 15 bp, Homo sapiens
ggctccaaagaagct

SEQ ID NO: 98098 - DNA, 15 bp, Homo sapiens
cggctccaaagaagc

SEQ ID NO: 98099 - DNA, 15 bp, Homo sapiens
gcggctccaaagaag

SEQ ID NO: 98100 - DNA, 15 bp, Homo sapiens
tgcggctccaaagaa

SEQ ID NO: 98101 - DNA, 15 bp, Homo sapiens
atgcggctccaaaga

SEQ ID NO: 98102 - DNA, 15 bp, Homo sapiens
gatgcggctccaaag

SEQ ID NO: 98103 - DNA, 15 bp, Homo sapiens
tgatgcggctccaaa

SEQ ID NO: 98104 - DNA, 15 bp, Homo sapiens
gtgatgcggctccaa

SEQ ID NO: 98105 - DNA, 15 bp, Homo sapiens
tgtgatgcggctcca

SEQ ID NO: 98106 - DNA, 15 bp, Homo sapiens
ttgtgatgcggctcc

SEQ ID NO: 98107 - DNA, 15 bp, Homo sapiens
attgtgatgcggctc

SEQ ID NO: 98108 - DNA, 15 bp, Homo sapiens
tattgtgatgcggct

SEQ ID NO: 98109 - DNA, 15 bp, Homo sapiens
gtattgtgatgcggc

SEQ ID NO: 98110 - DNA, 15 bp, Homo sapiens
agtattgtgatgcgg

SEQ ID NO: 98111 - DNA, 15 bp, Homo sapiens
cagtattgtgatgcg

SEQ ID NO: 98112 - DNA, 15 bp, Homo sapiens
ccagtattgtgatgc

SEQ ID NO: 98113 - DNA, 15 bp, Homo sapiens
tccagtattgtgatg

SEQ ID NO: 98114 - DNA, 15 bp, Homo sapiens
gtccagtattgtgat

SEQ ID NO: 98115 - DNA, 15 bp, Homo sapiens
ggtccagtattgtga

SEQ ID NO: 98116 - DNA, 15 bp, Homo sapiens
aggtccagtattgtg

SEQ ID NO: 98117 - DNA, 15 bp, Homo sapiens
gaggtccagtattgt

SEQ ID NO: 98118 - DNA, 15 bp, Homo sapiens
ggaggtccagtattg

SEQ ID NO: 98119 - DNA, 15 bp, Homo sapiens
gggaggtccagtatt

SEQ ID NO: 98120 - DNA, 15 bp, Homo sapiens
ggggaggtccagtat

SEQ ID NO: 98121 - DNA, 15 bp, Homo sapiens
gggggaggtccagta

SEQ ID NO: 98122 - DNA, 15 bp, Homo sapiens
tgggggaggtccagt

SEQ ID NO: 98123 - DNA, 15 bp, Homo sapiens
gtgggggaggtccag

SEQ ID NO: 98124 - DNA, 15 bp, Homo sapiens
cgtgggggaggtcca

SEQ ID NO: 98125 - DNA, 15 bp, Homo sapiens
ccgtgggggaggtcc

SEQ ID NO: 98126 - DNA, 15 bp, Homo sapiens
cccgtgggggaggtc

SEQ ID NO: 98127 - DNA, 15 bp, Homo sapiens
ccccgtgggggaggt

SEQ ID NO: 98128 - DNA, 15 bp, Homo sapiens
cccccgtgggggagg

SEQ ID NO: 98129 - DNA, 15 bp, Homo sapiens
ccccccgtgggggag

SEQ ID NO: 98130 - DNA, 15 bp, Homo sapiens
tccccccgtggggga

SEQ ID NO: 98131 - DNA, 15 bp, Homo sapiens
ttccccccgtggggg

SEQ ID NO: 98132 - DNA, 15 bp, Homo sapiens
attccccccgtgggg

SEQ ID NO: 98133 - DNA, 15 bp, Homo sapiens
gattccccccgtggg

SEQ ID NO: 98134 - DNA, 15 bp, Homo sapiens
agattccccccgtgg

SEQ ID NO: 98135 - DNA, 15 bp, Homo sapiens
tagattccccccgtg

SEQ ID NO: 98136 - DNA, 15 bp, Homo sapiens
gtagattccccccgt

SEQ ID NO: 98137 - DNA, 15 bp, Homo sapiens
ggtagattccccccg

SEQ ID NO: 98138 - DNA, 15 bp, Homo sapiens
gggtagattcccccc

SEQ ID NO: 98139 - DNA, 15 bp, Homo sapiens
ggggtagattccccc

SEQ ID NO: 98140 - DNA, 15 bp, Homo sapiens
tggggtagattcccc

SEQ ID NO: 98141 - DNA, 15 bp, Homo sapiens
ttggggtagattccc

SEQ ID NO: 98142 - DNA, 15 bp, Homo sapiens
gttggggtagattcc

SEQ ID NO: 98143 - DNA, 15 bp, Homo sapiens
ggttggggtagattc

SEQ ID NO: 98144 - DNA, 15 bp, Homo sapiens
gggttggggtagatt

SEQ ID NO: 98145 - DNA, 15 bp, Homo sapiens
ggggttggggtagat

SEQ ID NO: 98146 - DNA, 15 bp, Homo sapiens
tggggttggggtaga

SEQ ID NO: 98147 - DNA, 15 bp, Homo sapiens
ttggggttggggtag

SEQ ID NO: 98148 - DNA, 15 bp, Homo sapiens
gttggggttggggta

SEQ ID NO: 98149 - DNA, 15 bp, Homo sapiens
cgttggggttggggt

SEQ ID NO: 98150 - DNA, 15 bp, Homo sapiens
acgttggggttgggg

SEQ ID NO: 98151 - DNA, 15 bp, Homo sapiens
gacgttggggttggg

SEQ ID NO: 98152 - DNA, 15 bp, Homo sapiens
ggacgttggggttgg

SEQ ID NO: 98153 - DNA, 15 bp, Homo sapiens
gggacgttggggttg

SEQ ID NO: 98154 - DNA, 15 bp, Homo sapiens
ggggacgttggggtt

SEQ ID NO: 98155 - DNA, 15 bp, Homo sapiens
gggggacgttggggt

SEQ ID NO: 98156 - DNA, 15 bp, Homo sapiens
cgggggacgttgggg

SEQ ID NO: 98157 - DNA, 15 bp, Homo sapiens
gcgggggacgttggg

SEQ ID NO: 98158 - DNA, 15 bp, Homo sapiens
ggcgggggacgttgg

SEQ ID NO: 98159 - DNA, 15 bp, Homo sapiens
tggcgggggacgttg

SEQ ID NO: 98160 - DNA, 15 bp, Homo sapiens
atggcgggggacgtt

SEQ ID NO: 98161 - DNA, 15 bp, Homo sapiens
gatggcgggggacgt

SEQ ID NO: 98162 - DNA, 15 bp, Homo sapiens
ggatggcgggggacg

SEQ ID NO: 98163 - DNA, 15 bp, Homo sapiens
aggatggcgggggac

SEQ ID NO: 98164 - DNA, 15 bp, Homo sapiens
taggatggcggggga

SEQ ID NO: 98165 - DNA, 15 bp, Homo sapiens
ttaggatggcggggg

SEQ ID NO: 98166 - DNA, 15 bp, Homo sapiens
gttaggatggcgggg

SEQ ID NO: 98167 - DNA, 15 bp, Homo sapiens
tgttaggatggcggg

SEQ ID NO: 98168 - DNA, 15 bp, Homo sapiens
gtgttaggatggcgg

SEQ ID NO: 98169 - DNA, 15 bp, Homo sapiens
ggtgttaggatggcg

SEQ ID NO: 98170 - DNA, 15 bp, Homo sapiens
gggtgttaggatggc

SEQ ID NO: 98171 - DNA, 15 bp, Homo sapiens
tgggtgttaggatgg

SEQ ID NO: 98172 - DNA, 15 bp, Homo sapiens
gtgggtgttaggatg

SEQ ID NO: 98173 - DNA, 15 bp, Homo sapiens
cgtgggtgttaggat

SEQ ID NO: 98174 - DNA, 15 bp, Homo sapiens
acgtgggtgttagga

SEQ ID NO: 98175 - DNA, 15 bp, Homo sapiens
cacgtgggtgttagg

SEQ ID NO: 98176 - DNA, 15 bp, Homo sapiens
gcacgtgggtgttag

SEQ ID NO: 98177 - DNA, 15 bp, Homo sapiens
ggcacgtgggtgtta

SEQ ID NO: 98178 - DNA, 15 bp, Homo sapiens
aggcacgtgggtgtt

SEQ ID NO: 98179 - DNA, 15 bp, Homo sapiens
aaggcacgtgggtgt

SEQ ID NO: 98180 - DNA, 15 bp, Homo sapiens
gaaggcacgtgggtg

SEQ ID NO: 98181 - DNA, 15 bp, Homo sapiens
tgaaggcacgtgggt

SEQ ID NO: 98182 - DNA, 15 bp, Homo sapiens
gtgaaggcacgtggg

SEQ ID NO: 98183 - DNA, 15 bp, Homo sapiens
tgtgaaggcacgtgg

SEQ ID NO: 98184 - DNA, 15 bp, Homo sapiens
gtgtgaaggcacgtg

SEQ ID NO: 98185 - DNA, 15 bp, Homo sapiens
agtgtgaaggcacgt

SEQ ID NO: 98186 - DNA, 15 bp, Homo sapiens
aagtgtgaaggcacg

SEQ ID NO: 98187 - DNA, 15 bp, Homo sapiens
taagtgtgaaggcac

SEQ ID NO: 98188 - DNA, 15 bp, Homo sapiens
ctaagtgtgaaggca

SEQ ID NO: 98189 - DNA, 15 bp, Homo sapiens
cctaagtgtgaaggc

SEQ ID NO: 98190 - DNA, 15 bp, Homo sapiens
gcctaagtgtgaagg

SEQ ID NO: 98191 - DNA, 15 bp, Homo sapiens
tgcctaagtgtgaag

SEQ ID NO: 98192 - DNA, 15 bp, Homo sapiens
ctgcctaagtgtgaa

SEQ ID NO: 98193 - DNA, 15 bp, Homo sapiens
gctgcctaagtgtga

SEQ ID NO: 98194 - DNA, 15 bp, Homo sapiens
agctgcctaagtgtg

SEQ ID NO: 98195 - DNA, 15 bp, Homo sapiens
tagctgcctaagtgt

SEQ ID NO: 98196 - DNA, 15 bp, Homo sapiens
gtagctgcctaagtg

SEQ ID NO: 98197 - DNA, 15 bp, Homo sapiens
agtagctgcctaagt

SEQ ID NO: 98198 - DNA, 15 bp, Homo sapiens
tagtagctgcctaag

SEQ ID NO: 98199 - DNA, 15 bp, Homo sapiens
gtagtagctgcctaa

SEQ ID NO: 98200 - DNA, 15 bp, Homo sapiens
agtagtagctgccta

SEQ ID NO: 98201 - DNA, 15 bp, Homo sapiens
tagtagtagctgcct

SEQ ID NO: 98202 - DNA, 15 bp, Homo sapiens
ctagtagtagctgcc

SEQ ID NO: 98203 - DNA, 15 bp, Homo sapiens
tctagtagtagctgc

SEQ ID NO: 98204 - DNA, 15 bp, Homo sapiens
ttctagtagtagctg

SEQ ID NO: 98205 - DNA, 15 bp, Homo sapiens
cttctagtagtagct

SEQ ID NO: 98206 - DNA, 15 bp, Homo sapiens
gcttctagtagtagc

SEQ ID NO: 98207 - DNA, 15 bp, Homo sapiens
agcttctagtagtag

SEQ ID NO: 98208 - DNA, 15 bp, Homo sapiens
aagcttctagtagta

SEQ ID NO: 98209 - DNA, 15 bp, Homo sapiens
taagcttctagtagt

SEQ ID NO: 98210 - DNA, 15 bp, Homo sapiens
gtaagcttctagtag

SEQ ID NO: 98211 - DNA, 15 bp, Homo sapiens
agtaagcttctagta

SEQ ID NO: 98212 - DNA, 15 bp, Homo sapiens
gagtaagcttctagt

SEQ ID NO: 98213 - DNA, 15 bp, Homo sapiens
tgagtaagcttctag

SEQ ID NO: 98214 - DNA, 15 bp, Homo sapiens
atgagtaagcttcta

SEQ ID NO: 98215 - DNA, 15 bp, Homo sapiens
gatgagtaagcttct

SEQ ID NO: 98216 - DNA, 15 bp, Homo sapiens
tgatgagtaagcttc

SEQ ID NO: 98217 - DNA, 15 bp, Homo sapiens
ctgatgagtaagctt

SEQ ID NO: 98218 - DNA, 15 bp, Homo sapiens
actgatgagtaagct

SEQ ID NO: 98219 - DNA, 15 bp, Homo sapiens
cactgatgagtaagc

SEQ ID NO: 98220 - DNA, 15 bp, Homo sapiens
ccactgatgagtaag

SEQ ID NO: 98221 - DNA, 15 bp, Homo sapiens
gccactgatgagtaa

SEQ ID NO: 98222 - DNA, 15 bp, Homo sapiens
ggccactgatgagta

SEQ ID NO: 98223 - DNA, 15 bp, Homo sapiens
aggccactgatgagt

SEQ ID NO: 98224 - DNA, 15 bp, Homo sapiens
aaggccactgatgag

SEQ ID NO: 98225 - DNA, 15 bp, Homo sapiens
gaaggccactgatga

SEQ ID NO: 98226 - DNA, 15 bp, Homo sapiens
agaaggccactgatg

SEQ ID NO: 98227 - DNA, 15 bp, Homo sapiens
tagaaggccactgat

SEQ ID NO: 98228 - DNA, 15 bp, Homo sapiens
ctagaaggccactga

SEQ ID NO: 98229 - DNA, 15 bp, Homo sapiens
gctagaaggccactg

SEQ ID NO: 98230 - DNA, 15 bp, Homo sapiens
agctagaaggccact

SEQ ID NO: 98231 - DNA, 15 bp, Homo sapiens
cagctagaaggccac

SEQ ID NO: 98232 - DNA, 15 bp, Homo sapiens
tcagctagaaggcca

SEQ ID NO: 98233 - DNA, 15 bp, Homo sapiens
ttcagctagaaggcc

SEQ ID NO: 98234 - DNA, 15 bp, Homo sapiens
cttcagctagaaggc

SEQ ID NO: 98235 - DNA, 15 bp, Homo sapiens
gcttcagctagaagg

SEQ ID NO: 98236 - DNA, 15 bp, Homo sapiens
ggcttcagctagaag

SEQ ID NO: 98237 - DNA, 15 bp, Homo sapiens
gggcttcagctagaa

SEQ ID NO: 98238 - DNA, 15 bp, Homo sapiens
tgggcttcagctaga

SEQ ID NO: 98239 - DNA, 15 bp, Homo sapiens
atgggcttcagctag

SEQ ID NO: 98240 - DNA, 15 bp, Homo sapiens
gatgggcttcagcta

SEQ ID NO: 98241 - DNA, 15 bp, Homo sapiens
ggatgggcttcagct

SEQ ID NO: 98242 - DNA, 15 bp, Homo sapiens
aggatgggcttcagc

SEQ ID NO: 98243 - DNA, 15 bp, Homo sapiens
caggatgggcttcag

SEQ ID NO: 98244 - DNA, 15 bp, Homo sapiens
gcaggatgggcttca

SEQ ID NO: 98245 - DNA, 15 bp, Homo sapiens
tgcaggatgggcttc

SEQ ID NO: 98246 - DNA, 15 bp, Homo sapiens
gtgcaggatgggctt

SEQ ID NO: 98247 - DNA, 15 bp, Homo sapiens
tgtgcaggatgggct

SEQ ID NO: 98248 - DNA, 15 bp, Homo sapiens
gtgtgcaggatgggc

SEQ ID NO: 98249 - DNA, 15 bp, Homo sapiens
agtgtgcaggatggg

SEQ ID NO: 98250 - DNA, 15 bp, Homo sapiens
aagtgtgcaggatgg

SEQ ID NO: 98251 - DNA, 15 bp, Homo sapiens
taagtgtgcaggatg

SEQ ID NO: 98252 - DNA, 15 bp, Homo sapiens
gtaagtgtgcaggat

SEQ ID NO: 98253 - DNA, 15 bp, Homo sapiens
agtaagtgtgcagga

SEQ ID NO: 98254 - DNA, 15 bp, Homo sapiens
cagtaagtgtgcagg

SEQ ID NO: 98255 - DNA, 15 bp, Homo sapiens
ccagtaagtgtgcag

SEQ ID NO: 98256 - DNA, 15 bp, Homo sapiens
tccagtaagtgtgca

SEQ ID NO: 98257 - DNA, 15 bp, Homo sapiens
atccagtaagtgtgc

SEQ ID NO: 98258 - DNA, 15 bp, Homo sapiens
catccagtaagtgtg

SEQ ID NO: 98259 - DNA, 15 bp, Homo sapiens
gcatccagtaagtgt

SEQ ID NO: 98260 - DNA, 15 bp, Homo sapiens
agcatccagtaagtg

SEQ ID NO: 98261 - DNA, 15 bp, Homo sapiens
aagcatccagtaagt

SEQ ID NO: 98262 - DNA, 15 bp, Homo sapiens
aaagcatccagtaag

SEQ ID NO: 98263 - DNA, 15 bp, Homo sapiens
caaagcatccagtaa

SEQ ID NO: 98264 - DNA, 15 bp, Homo sapiens
ccaaagcatccagta

SEQ ID NO: 98265 - DNA, 15 bp, Homo sapiens
tccaaagcatccagt

SEQ ID NO: 98266 - DNA, 15 bp, Homo sapiens
gtccaaagcatccag

SEQ ID NO: 98267 - DNA, 15 bp, Homo sapiens
agtccaaagcatcca

SEQ ID NO: 98268 - DNA, 15 bp, Homo sapiens
gagtccaaagcatcc

SEQ ID NO: 98269 - DNA, 15 bp, Homo sapiens
tgagtccaaagcatc

SEQ ID NO: 98270 - DNA, 15 bp, Homo sapiens
ttgagtccaaagcat

SEQ ID NO: 98271 - DNA, 15 bp, Homo sapiens
gttgagtccaaagca

SEQ ID NO: 98272 - DNA, 15 bp, Homo sapiens
tgttgagtccaaagc

SEQ ID NO: 98273 - DNA, 15 bp, Homo sapiens
ctgttgagtccaaag

SEQ ID NO: 98274 - DNA, 15 bp, Homo sapiens
cctgttgagtccaaa

SEQ ID NO: 98275 - DNA, 15 bp, Homo sapiens
tcctgttgagtccaa

SEQ ID NO: 98276 - DNA, 15 bp, Homo sapiens
gtcctgttgagtcca

SEQ ID NO: 98277 - DNA, 15 bp, Homo sapiens
tgtcctgttgagtcc

SEQ ID NO: 98278 - DNA, 15 bp, Homo sapiens
atgtcctgttgagtc

SEQ ID NO: 98279 - DNA, 15 bp, Homo sapiens
tatgtcctgttgagt

SEQ ID NO: 98280 - DNA, 15 bp, Homo sapiens
atatgtcctgttgag

SEQ ID NO: 98281 - DNA, 15 bp, Homo sapiens
catatgtcctgttga

SEQ ID NO: 98282 - DNA, 15 bp, Homo sapiens
acatatgtcctgttg

SEQ ID NO: 98283 - DNA, 15 bp, Homo sapiens
cacatatgtcctgtt

SEQ ID NO: 98284 - DNA, 15 bp, Homo sapiens
ccacatatgtcctgt

SEQ ID NO: 98285 - DNA, 15 bp, Homo sapiens
gccacatatgtcctg

SEQ ID NO: 98286 - DNA, 15 bp, Homo sapiens
ggccacatatgtcct

SEQ ID NO: 98287 - DNA, 15 bp, Homo sapiens
aggccacatatgtcc

SEQ ID NO: 98288 - DNA, 15 bp, Homo sapiens
aaggccacatatgtc

SEQ ID NO: 98289 - DNA, 15 bp, Homo sapiens
caaggccacatatgt

SEQ ID NO: 98290 - DNA, 15 bp, Homo sapiens
tcaaggccacatatg

SEQ ID NO: 98291 - DNA, 15 bp, Homo sapiens
ttcaaggccacatat

SEQ ID NO: 98292 - DNA, 15 bp, Homo sapiens
cttcaaggccacata

SEQ ID NO: 98293 - DNA, 15 bp, Homo sapiens
ccttcaaggccacat

SEQ ID NO: 98294 - DNA, 15 bp, Homo sapiens
cccttcaaggccaca

SEQ ID NO: 98295 - DNA, 15 bp, Homo sapiens
tcccttcaaggccac

SEQ ID NO: 98296 - DNA, 15 bp, Homo sapiens
ttcccttcaaggcca

SEQ ID NO: 98297 - DNA, 15 bp, Homo sapiens
cttcccttcaaggcc

SEQ ID NO: 98298 - DNA, 15 bp, Homo sapiens
tcttcccttcaaggc

SEQ ID NO: 98299 - DNA, 15 bp, Homo sapiens
gtcttcccttcaagg

SEQ ID NO: 98300 - DNA, 15 bp, Homo sapiens
tgtcttcccttcaag

SEQ ID NO: 98301 - DNA, 15 bp, Homo sapiens
ttgtcttcccttcaa

SEQ ID NO: 98302 - DNA, 15 bp, Homo sapiens
tttgtcttcccttca

SEQ ID NO: 98303 - DNA, 15 bp, Homo sapiens
ttttgtcttcccttc

SEQ ID NO: 98304 - DNA, 15 bp, Homo sapiens
gttttgtcttccctt

SEQ ID NO: 98305 - DNA, 15 bp, Homo sapiens
agttttgtcttccct

SEQ ID NO: 98306 - DNA, 15 bp, Homo sapiens
cagttttgtcttccc

SEQ ID NO: 98307 - DNA, 15 bp, Homo sapiens
ccagttttgtcttcc

SEQ ID NO: 98308 - DNA, 15 bp, Homo sapiens
tccagttttgtcttc

SEQ ID NO: 98309 - DNA, 15 bp, Homo sapiens
atccagttttgtctt

SEQ ID NO: 98310 - DNA, 15 bp, Homo sapiens
catccagttttgtct

SEQ ID NO: 98311 - DNA, 15 bp, Homo sapiens
acatccagttttgtc

SEQ ID NO: 98312 - DNA, 15 bp, Homo sapiens
aacatccagttttgt

SEQ ID NO: 98313 - DNA, 15 bp, Homo sapiens
gaacatccagttttg

SEQ ID NO: 98314 - DNA, 15 bp, Homo sapiens
agaacatccagtttt

SEQ ID NO: 98315 - DNA, 15 bp, Homo sapiens
aagaacatccagttt

SEQ ID NO: 98316 - DNA, 15 bp, Homo sapiens
aaagaacatccagtt

SEQ ID NO: 98317 - DNA, 15 bp, Homo sapiens
gaaagaacatccagt

SEQ ID NO: 98318 - DNA, 15 bp, Homo sapiens
agaaagaacatccag

SEQ ID NO: 98319 - DNA, 15 bp, Homo sapiens
aagaaagaacatcca

SEQ ID NO: 98320 - DNA, 15 bp, Homo sapiens
caagaaagaacatcc

SEQ ID NO: 98321 - DNA, 15 bp, Homo sapiens
acaagaaagaacatc

SEQ ID NO: 98322 - DNA, 15 bp, Homo sapiens
aacaagaaagaacat

SEQ ID NO: 98323 - DNA, 15 bp, Homo sapiens
caacaagaaagaaca

SEQ ID NO: 98324 - DNA, 15 bp, Homo sapiens
ccaacaagaaagaac

SEQ ID NO: 98325 - DNA, 15 bp, Homo sapiens
tccaacaagaaagaa

SEQ ID NO: 98326 - DNA, 15 bp, Homo sapiens
atccaacaagaaaga

SEQ ID NO: 98327 - DNA, 15 bp, Homo sapiens
tatccaacaagaaag

SEQ ID NO: 98328 - DNA, 15 bp, Homo sapiens
ctatccaacaagaaa

SEQ ID NO: 98329 - DNA, 15 bp, Homo sapiens
tctatccaacaagaa

SEQ ID NO: 98330 - DNA, 15 bp, Homo sapiens
ttctatccaacaaga

SEQ ID NO: 98331 - DNA, 15 bp, Homo sapiens
gttctatccaacaag

SEQ ID NO: 98332 - DNA, 15 bp, Homo sapiens
ggttctatccaacaa

SEQ ID NO: 98333 - DNA, 15 bp, Homo sapiens
aggttctatccaaca

SEQ ID NO: 98334 - DNA, 15 bp, Homo sapiens
aaggttctatccaac

SEQ ID NO: 98335 - DNA, 15 bp, Homo sapiens
aaaggttctatccaa

SEQ ID NO: 98336 - DNA, 15 bp, Homo sapiens
caaaggttctatcca

SEQ ID NO: 98337 - DNA, 15 bp, Homo sapiens
acaaaggttctatcc

SEQ ID NO: 98338 - DNA, 15 bp, Homo sapiens
tacaaaggttctatc

SEQ ID NO: 98339 - DNA, 15 bp, Homo sapiens
atacaaaggttctat

SEQ ID NO: 98340 - DNA, 15 bp, Homo sapiens
aatacaaaggttcta

SEQ ID NO: 98341 - DNA, 15 bp, Homo sapiens
aaatacaaaggttct

SEQ ID NO: 98342 - DNA, 15 bp, Homo sapiens
caaatacaaaggttc

SEQ ID NO: 98343 - DNA, 15 bp, Homo sapiens
acaaatacaaaggtt

SEQ ID NO: 98344 - DNA, 15 bp, Homo sapiens
aacaaatacaaaggt

SEQ ID NO: 98345 - DNA, 15 bp, Homo sapiens
gaacaaatacaaagg

SEQ ID NO: 98346 - DNA, 15 bp, Homo sapiens
agaacaaatacaaag

SEQ ID NO: 98347 - DNA, 15 bp, Homo sapiens
aagaacaaatacaaa

SEQ ID NO: 98348 - DNA, 15 bp, Homo sapiens
aaagaacaaatacaa

SEQ ID NO: 98349 - DNA, 15 bp, Homo sapiens
taaagaacaaataca

SEQ ID NO: 98350 - DNA, 15 bp, Homo sapiens
ttaaagaacaaatac

SEQ ID NO: 98351 - DNA, 15 bp, Homo sapiens
tttaaagaacaaata

SEQ ID NO: 98352 - DNA, 15 bp, Homo sapiens
ttttaaagaacaaat

SEQ ID NO: 98353 - DNA, 15 bp, Homo sapiens
tttttaaagaacaaa

SEQ ID NO: 98354 - DNA, 15 bp, Homo sapiens
gtttttaaagaacaa

SEQ ID NO: 98355 - DNA, 15 bp, Homo sapiens
tgtttttaaagaaca

SEQ ID NO: 98356 - DNA, 15 bp, Homo sapiens
atgtttttaaagaac

SEQ ID NO: 98357 - DNA, 15 bp, Homo sapiens
aatgtttttaaagaa

SEQ ID NO: 98358 - DNA, 15 bp, Homo sapiens
aaatgtttttaaaga

SEQ ID NO: 98359 - DNA, 15 bp, Homo sapiens
aaaatgtttttaaag

SEQ ID NO: 98360 - DNA, 15 bp, Homo sapiens
aaaaatgtttttaaa

SEQ ID NO: 98361 - DNA, 15 bp, Homo sapiens
aaaaaatgtttttaa

SEQ ID NO: 98362 - DNA, 15 bp, Homo sapiens
aaaaaaatgttttta

SEQ ID NO: 98363 - DNA, 15 bp, Homo sapiens
aaaaaaaatgttttt

SEQ ID NO: 98364 - DNA, 15 bp, Homo sapiens
taaaaaaaatgtttt

SEQ ID NO: 98365 - DNA, 15 bp, Homo sapiens
ttaaaaaaaatgttt

SEQ ID NO: 98366 - DNA, 15 bp, Homo sapiens
attaaaaaaaatgtt

SEQ ID NO: 98367 - DNA, 15 bp, Homo sapiens
cattaaaaaaaatgt

SEQ ID NO: 98368 - DNA, 15 bp, Homo sapiens
acattaaaaaaaatg

SEQ ID NO: 98369 - DNA, 15 bp, Homo sapiens
aacattaaaaaaaat

SEQ ID NO: 98370 - DNA, 15 bp, Homo sapiens
caacattaaaaaaaa

SEQ ID NO: 98371 - DNA, 15 bp, Homo sapiens
ccaacattaaaaaaa

SEQ ID NO: 98372 - DNA, 15 bp, Homo sapiens
accaacattaaaaaa

SEQ ID NO: 98373 - DNA, 15 bp, Homo sapiens
taccaacattaaaaa

SEQ ID NO: 98374 - DNA, 15 bp, Homo sapiens
ttaccaacattaaaa

SEQ ID NO: 98375 - DNA, 15 bp, Homo sapiens
gttaccaacattaaa

SEQ ID NO: 98376 - DNA, 15 bp, Homo sapiens
agttaccaacattaa

SEQ ID NO: 98377 - DNA, 15 bp, Homo sapiens
aagttaccaacatta

SEQ ID NO: 98378 - DNA, 15 bp, Homo sapiens
aaagttaccaacatt

SEQ ID NO: 98379 - DNA, 15 bp, Homo sapiens
aaaagttaccaacat

SEQ ID NO: 98380 - DNA, 15 bp, Homo sapiens
caaaagttaccaaca

SEQ ID NO: 98381 - DNA, 15 bp, Homo sapiens
gcaaaagttaccaac

SEQ ID NO: 98382 - DNA, 15 bp, Homo sapiens
agcaaaagttaccaa

SEQ ID NO: 98383 - DNA, 15 bp, Homo sapiens
aagcaaaagttacca

SEQ ID NO: 98384 - DNA, 15 bp, Homo sapiens
gaagcaaaagttacc

SEQ ID NO: 98385 - DNA, 15 bp, Homo sapiens
ggaagcaaaagttac

SEQ ID NO: 98386 - DNA, 15 bp, Homo sapiens
aggaagcaaaagtta

SEQ ID NO: 98387 - DNA, 15 bp, Homo sapiens
gaggaagcaaaagtt

SEQ ID NO: 98388 - DNA, 15 bp, Homo sapiens
agaggaagcaaaagt

SEQ ID NO: 98389 - DNA, 15 bp, Homo sapiens
tagaggaagcaaaag

SEQ ID NO: 98390 - DNA, 15 bp, Homo sapiens
gtagaggaagcaaaa

SEQ ID NO: 98391 - DNA, 15 bp, Homo sapiens
ggtagaggaagcaaa

SEQ ID NO: 98392 - DNA, 15 bp, Homo sapiens
aggtagaggaagcaa

SEQ ID NO: 98393 - DNA, 15 bp, Homo sapiens
caggtagaggaagca

SEQ ID NO: 98394 - DNA, 15 bp, Homo sapiens
tcaggtagaggaagc

SEQ ID NO: 98395 - DNA, 15 bp, Homo sapiens
ttcaggtagaggaag

SEQ ID NO: 98396 - DNA, 15 bp, Homo sapiens
gttcaggtagaggaa

SEQ ID NO: 98397 - DNA, 15 bp, Homo sapiens
tgttcaggtagagga

SEQ ID NO: 98398 - DNA, 15 bp, Homo sapiens
ttgttcaggtagagg

SEQ ID NO: 98399 - DNA, 15 bp, Homo sapiens
tttgttcaggtagag

SEQ ID NO: 98400 - DNA, 15 bp, Homo sapiens
ctttgttcaggtaga

SEQ ID NO: 98401 - DNA, 15 bp, Homo sapiens
tctttgttcaggtag

SEQ ID NO: 98402 - DNA, 15 bp, Homo sapiens
ctctttgttcaggta

SEQ ID NO: 98403 - DNA, 15 bp, Homo sapiens
tctctttgttcaggt

SEQ ID NO: 98404 - DNA, 15 bp, Homo sapiens
atctctttgttcagg

SEQ ID NO: 98405 - DNA, 15 bp, Homo sapiens
catctctttgttcag

SEQ ID NO: 98406 - DNA, 15 bp, Homo sapiens
tcatctctttgttca

SEQ ID NO: 98407 - DNA, 15 bp, Homo sapiens
ttcatctctttgttc

SEQ ID NO: 98408 - DNA, 15 bp, Homo sapiens
attcatctctttgtt

SEQ ID NO: 98409 - DNA, 15 bp, Homo sapiens
tattcatctctttgt

SEQ ID NO: 98410 - DNA, 15 bp, Homo sapiens
ttattcatctctttg

SEQ ID NO: 98411 - DNA, 15 bp, Homo sapiens
attattcatctcttt

SEQ ID NO: 98412 - DNA, 15 bp, Homo sapiens
aattattcatctctt

SEQ ID NO: 98413 - DNA, 15 bp, Homo sapiens
gaattattcatctct

SEQ ID NO: 98414 - DNA, 15 bp, Homo sapiens
ggaattattcatctc

SEQ ID NO: 98415 - DNA, 15 bp, Homo sapiens
tggaattattcatct

SEQ ID NO: 98416 - DNA, 15 bp, Homo sapiens
atggaattattcatc

SEQ ID NO: 98417 - DNA, 15 bp, Homo sapiens
catggaattattcat

SEQ ID NO: 98418 - DNA, 15 bp, Homo sapiens
ccatggaattattca

SEQ ID NO: 98419 - DNA, 15 bp, Homo sapiens
cccatggaattattc

SEQ ID NO: 98420 - DNA, 15 bp, Homo sapiens
gcccatggaattatt

SEQ ID NO: 98421 - DNA, 15 bp, Homo sapiens
ggcccatggaattat

SEQ ID NO: 98422 - DNA, 15 bp, Homo sapiens
tggcccatggaatta

SEQ ID NO: 98423 - DNA, 15 bp, Homo sapiens
ctggcccatggaatt

SEQ ID NO: 98424 - DNA, 15 bp, Homo sapiens
actggcccatggaat

SEQ ID NO: 98425 - DNA, 15 bp, Homo sapiens
tactggcccatggaa

SEQ ID NO: 98426 - DNA, 15 bp, Homo sapiens
atactggcccatgga

SEQ ID NO: 98427 - DNA, 15 bp, Homo sapiens
catactggcccatgg

SEQ ID NO: 98428 - DNA, 15 bp, Homo sapiens
gcatactggcccatg

SEQ ID NO: 98429 - DNA, 15 bp, Homo sapiens
ggcatactggcccat

SEQ ID NO: 98430 - DNA, 15 bp, Homo sapiens
tggcatactggccca

SEQ ID NO: 98431 - DNA, 15 bp, Homo sapiens
ctggcatactggccc

SEQ ID NO: 98432 - DNA, 15 bp, Homo sapiens
actggcatactggcc

SEQ ID NO: 98433 - DNA, 15 bp, Homo sapiens
aactggcatactggc

SEQ ID NO: 98434 - DNA, 15 bp, Homo sapiens
aaactggcatactgg

SEQ ID NO: 98435 - DNA, 15 bp, Homo sapiens
caaactggcatactg

SEQ ID NO: 98436 - DNA, 15 bp, Homo sapiens
tcaaactggcatact

SEQ ID NO: 98437 - DNA, 15 bp, Homo sapiens
ttcaaactggcatac

SEQ ID NO: 98438 - DNA, 15 bp, Homo sapiens
attcaaactggcata

SEQ ID NO: 98439 - DNA, 15 bp, Homo sapiens
aattcaaactggcat

SEQ ID NO: 98440 - DNA, 15 bp, Homo sapiens
gaattcaaactggca

SEQ ID NO: 98441 - DNA, 15 bp, Homo sapiens
agaattcaaactggc

SEQ ID NO: 98442 - DNA, 15 bp, Homo sapiens
gagaattcaaactgg

SEQ ID NO: 98443 - DNA, 15 bp, Homo sapiens
tgagaattcaaactg

SEQ ID NO: 98444 - DNA, 15 bp, Homo sapiens
ctgagaattcaaact

SEQ ID NO: 98445 - DNA, 15 bp, Homo sapiens
actgagaattcaaac

SEQ ID NO: 98446 - DNA, 15 bp, Homo sapiens
gactgagaattcaaa

SEQ ID NO: 98447 - DNA, 15 bp, Homo sapiens
agactgagaattcaa

SEQ ID NO: 98448 - DNA, 15 bp, Homo sapiens
gagactgagaattca

SEQ ID NO: 98449 - DNA, 15 bp, Homo sapiens
ggagactgagaattc

SEQ ID NO: 98450 - DNA, 15 bp, Homo sapiens
aggagactgagaatt

SEQ ID NO: 98451 - DNA, 15 bp, Homo sapiens
taggagactgagaat

SEQ ID NO: 98452 - DNA, 15 bp, Homo sapiens
ctaggagactgagaa

SEQ ID NO: 98453 - DNA, 15 bp, Homo sapiens
gctaggagactgaga

SEQ ID NO: 98454 - DNA, 15 bp, Homo sapiens
tgctaggagactgag

SEQ ID NO: 98455 - DNA, 15 bp, Homo sapiens
atgctaggagactga

SEQ ID NO: 98456 - DNA, 15 bp, Homo sapiens
gatgctaggagactg

SEQ ID NO: 98457 - DNA, 15 bp, Homo sapiens
agatgctaggagact

SEQ ID NO: 98458 - DNA, 15 bp, Homo sapiens
aagatgctaggagac

SEQ ID NO: 98459 - DNA, 15 bp, Homo sapiens
caagatgctaggaga

SEQ ID NO: 98460 - DNA, 15 bp, Homo sapiens
acaagatgctaggag

SEQ ID NO: 98461 - DNA, 15 bp, Homo sapiens
cacaagatgctagga

SEQ ID NO: 98462 - DNA, 15 bp, Homo sapiens
tcacaagatgctagg

SEQ ID NO: 98463 - DNA, 15 bp, Homo sapiens
ctcacaagatgctag

SEQ ID NO: 98464 - DNA, 15 bp, Homo sapiens
actcacaagatgcta

SEQ ID NO: 98465 - DNA, 15 bp, Homo sapiens
aactcacaagatgct

SEQ ID NO: 98466 - DNA, 15 bp, Homo sapiens
caactcacaagatgc

SEQ ID NO: 98467 - DNA, 15 bp, Homo sapiens
gcaactcacaagatg

SEQ ID NO: 98468 - DNA, 15 bp, Homo sapiens
tgcaactcacaagat

SEQ ID NO: 98469 - DNA, 15 bp, Homo sapiens
atgcaactcacaaga

SEQ ID NO: 98470 - DNA, 15 bp, Homo sapiens
tatgcaactcacaag

SEQ ID NO: 98471 - DNA, 15 bp, Homo sapiens
atatgcaactcacaa

SEQ ID NO: 98472 - DNA, 15 bp, Homo sapiens
aatatgcaactcaca

SEQ ID NO: 98473 - DNA, 15 bp, Homo sapiens
taatatgcaactcac

SEQ ID NO: 98474 - DNA, 15 bp, Homo sapiens
ttaatatgcaactca

SEQ ID NO: 98475 - DNA, 15 bp, Homo sapiens
cttaatatgcaactc

SEQ ID NO: 98476 - DNA, 15 bp, Homo sapiens
tcttaatatgcaact

SEQ ID NO: 98477 - DNA, 15 bp, Homo sapiens
atcttaatatgcaac

SEQ ID NO: 98478 - DNA, 15 bp, Homo sapiens
aatcttaatatgcaa

SEQ ID NO: 98479 - DNA, 15 bp, Homo sapiens
taatcttaatatgca

SEQ ID NO: 98480 - DNA, 15 bp, Homo sapiens
gtaatcttaatatgc

SEQ ID NO: 98481 - DNA, 15 bp, Homo sapiens
agtaatcttaatatg

SEQ ID NO: 98482 - DNA, 15 bp, Homo sapiens
cagtaatcttaatat

SEQ ID NO: 98483 - DNA, 15 bp, Homo sapiens
ccagtaatcttaata

SEQ ID NO: 98484 - DNA, 15 bp, Homo sapiens
tccagtaatcttaat

SEQ ID NO: 98485 - DNA, 15 bp, Homo sapiens
ttccagtaatcttaa

SEQ ID NO: 98486 - DNA, 15 bp, Homo sapiens
attccagtaatctta

SEQ ID NO: 98487 - DNA, 15 bp, Homo sapiens
cattccagtaatctt

SEQ ID NO: 98488 - DNA, 15 bp, Homo sapiens
ccattccagtaatct

SEQ ID NO: 98489 - DNA, 15 bp, Homo sapiens
accattccagtaatc

SEQ ID NO: 98490 - DNA, 15 bp, Homo sapiens
aaccattccagtaat

SEQ ID NO: 98491 - DNA, 15 bp, Homo sapiens
taaccattccagtaa

SEQ ID NO: 98492 - DNA, 15 bp, Homo sapiens
ttaaccattccagta

SEQ ID NO: 98493 - DNA, 15 bp, Homo sapiens
cttaaccattccagt

SEQ ID NO: 98494 - DNA, 15 bp, Homo sapiens
acttaaccattccag

SEQ ID NO: 98495 - DNA, 15 bp, Homo sapiens
gacttaaccattcca

SEQ ID NO: 98496 - DNA, 15 bp, Homo sapiens
tgacttaaccattcc

SEQ ID NO: 98497 - DNA, 15 bp, Homo sapiens
atgacttaaccattc

SEQ ID NO: 98498 - DNA, 15 bp, Homo sapiens
catgacttaaccatt

SEQ ID NO: 98499 - DNA, 15 bp, Homo sapiens
ccatgacttaaccat

SEQ ID NO: 98500 - DNA, 15 bp, Homo sapiens
accatgacttaacca

SEQ ID NO: 98501 - DNA, 15 bp, Homo sapiens
aaccatgacttaacc

SEQ ID NO: 98502 - DNA, 15 bp, Homo sapiens
gaaccatgacttaac

SEQ ID NO: 98503 - DNA, 15 bp, Homo sapiens
agaaccatgacttaa

SEQ ID NO: 98504 - DNA, 15 bp, Homo sapiens
cagaaccatgactta

SEQ ID NO: 98505 - DNA, 15 bp, Homo sapiens
tcagaaccatgactt

SEQ ID NO: 98506 - DNA, 15 bp, Homo sapiens
ctcagaaccatgact

SEQ ID NO: 98507 - DNA, 15 bp, Homo sapiens
tctcagaaccatgac

SEQ ID NO: 98508 - DNA, 15 bp, Homo sapiens
ttctcagaaccatga

SEQ ID NO: 98509 - DNA, 15 bp, Homo sapiens
tttctcagaaccatg

SEQ ID NO: 98510 - DNA, 15 bp, Homo sapiens
ctttctcagaaccat

SEQ ID NO: 98511 - DNA, 15 bp, Homo sapiens
tctttctcagaacca

SEQ ID NO: 98512 - DNA, 15 bp, Homo sapiens
ttctttctcagaacc

SEQ ID NO: 98513 - DNA, 15 bp, Homo sapiens
cttctttctcagaac

SEQ ID NO: 98514 - DNA, 15 bp, Homo sapiens
gcttctttctcagaa

SEQ ID NO: 98515 - DNA, 15 bp, Homo sapiens
agcttctttctcaga

SEQ ID NO: 98516 - DNA, 15 bp, Homo sapiens
cagcttctttctcag

SEQ ID NO: 98517 - DNA, 15 bp, Homo sapiens
acagcttctttctca

SEQ ID NO: 98518 - DNA, 15 bp, Homo sapiens
tacagcttctttctc

SEQ ID NO: 98519 - DNA, 15 bp, Homo sapiens
gtacagcttctttct

SEQ ID NO: 98520 - DNA, 15 bp, Homo sapiens
cgtacagcttctttc

SEQ ID NO: 98521 - DNA, 15 bp, Homo sapiens
acgtacagcttcttt

SEQ ID NO: 98522 - DNA, 15 bp, Homo sapiens
aacgtacagcttctt

SEQ ID NO: 98523 - DNA, 15 bp, Homo sapiens
aaacgtacagcttct

SEQ ID NO: 98524 - DNA, 15 bp, Homo sapiens
aaaacgtacagcttc

SEQ ID NO: 98525 - DNA, 15 bp, Homo sapiens
gaaaacgtacagctt

SEQ ID NO: 98526 - DNA, 15 bp, Homo sapiens
agaaaacgtacagct

SEQ ID NO: 98527 - DNA, 15 bp, Homo sapiens
aagaaaacgtacagc

SEQ ID NO: 98528 - DNA, 15 bp, Homo sapiens
aaagaaaacgtacag

SEQ ID NO: 98529 - DNA, 15 bp, Homo sapiens
taaagaaaacgtaca

SEQ ID NO: 98530 - DNA, 15 bp, Homo sapiens
ataaagaaaacgtac

SEQ ID NO: 98531 - DNA, 15 bp, Homo sapiens
cataaagaaaacgta

SEQ ID NO: 98532 - DNA, 15 bp, Homo sapiens
acataaagaaaacgt

SEQ ID NO: 98533 - DNA, 15 bp, Homo sapiens
aacataaagaaaacg

SEQ ID NO: 98534 - DNA, 15 bp, Homo sapiens
aaacataaagaaaac

SEQ ID NO: 98535 - DNA, 15 bp, Homo sapiens
aaaacataaagaaaa

SEQ ID NO: 98536 - DNA, 15 bp, Homo sapiens
aaaaacataaagaaa

SEQ ID NO: 98537 - DNA, 15 bp, Homo sapiens
taaaaacataaagaa

SEQ ID NO: 98538 - DNA, 15 bp, Homo sapiens
ataaaaacataaaga

SEQ ID NO: 98539 - DNA, 15 bp, Homo sapiens
cataaaaacataaag

SEQ ID NO: 98540 - DNA, 15 bp, Homo sapiens
tcataaaaacataaa

SEQ ID NO: 98541 - DNA, 15 bp, Homo sapiens
gtcataaaaacataa

SEQ ID NO: 98542 - DNA, 15 bp, Homo sapiens
ggtcataaaaacata

SEQ ID NO: 98543 - DNA, 15 bp, Homo sapiens
tggtcataaaaacat

SEQ ID NO: 98544 - DNA, 15 bp, Homo sapiens
ttggtcataaaaaca

SEQ ID NO: 98545 - DNA, 15 bp, Homo sapiens
tttggtcataaaaac

SEQ ID NO: 98546 - DNA, 15 bp, Homo sapiens
ctttggtcataaaaa

SEQ ID NO: 98547 - DNA, 15 bp, Homo sapiens
gctttggtcataaaa

SEQ ID NO: 98548 - DNA, 15 bp, Homo sapiens
tgctttggtcataaa

SEQ ID NO: 98549 - DNA, 15 bp, Homo sapiens
ctgctttggtcataa

SEQ ID NO: 98550 - DNA, 15 bp, Homo sapiens
actgctttggtcata

SEQ ID NO: 98551 - DNA, 15 bp, Homo sapiens
aactgctttggtcat

SEQ ID NO: 98552 - DNA, 15 bp, Homo sapiens
aaactgctttggtca

SEQ ID NO: 98553 - DNA, 15 bp, Homo sapiens
gaaactgctttggtc

SEQ ID NO: 98554 - DNA, 15 bp, Homo sapiens
agaaactgctttggt

SEQ ID NO: 98555 - DNA, 15 bp, Homo sapiens
aagaaactgctttgg

SEQ ID NO: 98556 - DNA, 15 bp, Homo sapiens
caagaaactgctttg

SEQ ID NO: 98557 - DNA, 15 bp, Homo sapiens
acaagaaactgcttt

SEQ ID NO: 98558 - DNA, 15 bp, Homo sapiens
gacaagaaactgctt

SEQ ID NO: 98559 - DNA, 15 bp, Homo sapiens
tgacaagaaactgct

SEQ ID NO: 98560 - DNA, 15 bp, Homo sapiens
ttgacaagaaactgc

SEQ ID NO: 98561 - DNA, 15 bp, Homo sapiens
attgacaagaaactg

SEQ ID NO: 98562 - DNA, 15 bp, Homo sapiens
tattgacaagaaact

SEQ ID NO: 98563 - DNA, 15 bp, Homo sapiens
gtattgacaagaaac

SEQ ID NO: 98564 - DNA, 15 bp, Homo sapiens
tgtattgacaagaaa

SEQ ID NO: 98565 - DNA, 15 bp, Homo sapiens
gtgtattgacaagaa

SEQ ID NO: 98566 - DNA, 15 bp, Homo sapiens
cgtgtattgacaaga

SEQ ID NO: 98567 - DNA, 15 bp, Homo sapiens
ccgtgtattgacaag

SEQ ID NO: 98568 - DNA, 15 bp, Homo sapiens
cccgtgtattgacaa

SEQ ID NO: 98569 - DNA, 15 bp, Homo sapiens
ccccgtgtattgaca

SEQ ID NO: 98570 - DNA, 15 bp, Homo sapiens
accccgtgtattgac

SEQ ID NO: 98571 - DNA, 15 bp, Homo sapiens
aaccccgtgtattga

SEQ ID NO: 98572 - DNA, 15 bp, Homo sapiens
gaaccccgtgtattg

SEQ ID NO: 98573 - DNA, 15 bp, Homo sapiens
tgaaccccgtgtatt

SEQ ID NO: 98574 - DNA, 15 bp, Homo sapiens
ctgaaccccgtgtat

SEQ ID NO: 98575 - DNA, 15 bp, Homo sapiens
actgaaccccgtgta

SEQ ID NO: 98576 - DNA, 15 bp, Homo sapiens
tactgaaccccgtgt

SEQ ID NO: 98577 - DNA, 15 bp, Homo sapiens
atactgaaccccgtg

SEQ ID NO: 98578 - DNA, 15 bp, Homo sapiens
catactgaaccccgt

SEQ ID NO: 98579 - DNA, 15 bp, Homo sapiens
tcatactgaaccccg

SEQ ID NO: 98580 - DNA, 15 bp, Homo sapiens
gtcatactgaacccc

SEQ ID NO: 98581 - DNA, 15 bp, Homo sapiens
tgtcatactgaaccc

SEQ ID NO: 98582 - DNA, 15 bp, Homo sapiens
gtgtcatactgaacc

SEQ ID NO: 98583 - DNA, 15 bp, Homo sapiens
tgtgtcatactgaac

SEQ ID NO: 98584 - DNA, 15 bp, Homo sapiens
ctgtgtcatactgaa

SEQ ID NO: 98585 - DNA, 15 bp, Homo sapiens
tctgtgtcatactga

SEQ ID NO: 98586 - DNA, 15 bp, Homo sapiens
ttctgtgtcatactg

SEQ ID NO: 98587 - DNA, 15 bp, Homo sapiens
attctgtgtcatact

SEQ ID NO: 98588 - DNA, 15 bp, Homo sapiens
gattctgtgtcatac

SEQ ID NO: 98589 - DNA, 15 bp, Homo sapiens
tgattctgtgtcata

SEQ ID NO: 98590 - DNA, 15 bp, Homo sapiens
atgattctgtgtcat

SEQ ID NO: 98591 - DNA, 15 bp, Homo sapiens
catgattctgtgtca

SEQ ID NO: 98592 - DNA, 15 bp, Homo sapiens
ccatgattctgtgtc

SEQ ID NO: 98593 - DNA, 15 bp, Homo sapiens
tccatgattctgtgt

SEQ ID NO: 98594 - DNA, 15 bp, Homo sapiens
gtccatgattctgtg

SEQ ID NO: 98595 - DNA, 15 bp, Homo sapiens
agtccatgattctgt

SEQ ID NO: 98596 - DNA, 15 bp, Homo sapiens
aagtccatgattctg

SEQ ID NO: 98597 - DNA, 15 bp, Homo sapiens
taagtccatgattct

SEQ ID NO: 98598 - DNA, 15 bp, Homo sapiens
ttaagtccatgattc

SEQ ID NO: 98599 - DNA, 15 bp, Homo sapiens
gttaagtccatgatt

SEQ ID NO: 98600 - DNA, 15 bp, Homo sapiens
ggttaagtccatgat

SEQ ID NO: 98601 - DNA, 15 bp, Homo sapiens
gggttaagtccatga

SEQ ID NO: 98602 - DNA, 15 bp, Homo sapiens
cgggttaagtccatg

SEQ ID NO: 98603 - DNA, 15 bp, Homo sapiens
acgggttaagtccat

SEQ ID NO: 98604 - DNA, 15 bp, Homo sapiens
gacgggttaagtcca

SEQ ID NO: 98605 - DNA, 15 bp, Homo sapiens
tgacgggttaagtcc

SEQ ID NO: 98606 - DNA, 15 bp, Homo sapiens
atgacgggttaagtc

SEQ ID NO: 98607 - DNA, 15 bp, Homo sapiens
catgacgggttaagt

SEQ ID NO: 98608 - DNA, 15 bp, Homo sapiens
acatgacgggttaag

SEQ ID NO: 98609 - DNA, 15 bp, Homo sapiens
aacatgacgggttaa

SEQ ID NO: 98610 - DNA, 15 bp, Homo sapiens
gaacatgacgggtta

SEQ ID NO: 98611 - DNA, 15 bp, Homo sapiens
agaacatgacgggtt

SEQ ID NO: 98612 - DNA, 15 bp, Homo sapiens
cagaacatgacgggt

SEQ ID NO: 98613 - DNA, 15 bp, Homo sapiens
ccagaacatgacggg

SEQ ID NO: 98614 - DNA, 15 bp, Homo sapiens
accagaacatgacgg

SEQ ID NO: 98615 - DNA, 15 bp, Homo sapiens
aaccagaacatgacg

SEQ ID NO: 98616 - DNA, 15 bp, Homo sapiens
aaaccagaacatgac

SEQ ID NO: 98617 - DNA, 15 bp, Homo sapiens
caaaccagaacatga

SEQ ID NO: 98618 - DNA, 15 bp, Homo sapiens
tcaaaccagaacatg

SEQ ID NO: 98619 - DNA, 15 bp, Homo sapiens
ctcaaaccagaacat

SEQ ID NO: 98620 - DNA, 15 bp, Homo sapiens
tctcaaaccagaaca

SEQ ID NO: 98621 - DNA, 15 bp, Homo sapiens
atctcaaaccagaac

SEQ ID NO: 98622 - DNA, 15 bp, Homo sapiens
aatctcaaaccagaa

SEQ ID NO: 98623 - DNA, 15 bp, Homo sapiens
aaatctcaaaccaga

SEQ ID NO: 98624 - DNA, 15 bp, Homo sapiens
taaatctcaaaccag

SEQ ID NO: 98625 - DNA, 15 bp, Homo sapiens
ctaaatctcaaacca

SEQ ID NO: 98626 - DNA, 15 bp, Homo sapiens
actaaatctcaaacc

SEQ ID NO: 98627 - DNA, 15 bp, Homo sapiens
cactaaatctcaaac

SEQ ID NO: 98628 - DNA, 15 bp, Homo sapiens
tcactaaatctcaaa

SEQ ID NO: 98629 - DNA, 15 bp, Homo sapiens
gtcactaaatctcaa

SEQ ID NO: 98630 - DNA, 15 bp, Homo sapiens
tgtcactaaatctca

SEQ ID NO: 98631 - DNA, 15 bp, Homo sapiens
ttgtcactaaatctc

SEQ ID NO: 98632 - DNA, 15 bp, Homo sapiens
tttgtcactaaatct

SEQ ID NO: 98633 - DNA, 15 bp, Homo sapiens
atttgtcactaaatc

SEQ ID NO: 98634 - DNA, 15 bp, Homo sapiens
tatttgtcactaaat

SEQ ID NO: 98635 - DNA, 15 bp, Homo sapiens
ctatttgtcactaaa

SEQ ID NO: 98636 - DNA, 15 bp, Homo sapiens
tctatttgtcactaa

SEQ ID NO: 98637 - DNA, 15 bp, Homo sapiens
ctctatttgtcacta

SEQ ID NO: 98638 - DNA, 15 bp, Homo sapiens
cctctatttgtcact

SEQ ID NO: 98639 - DNA, 15 bp, Homo sapiens
acctctatttgtcac

SEQ ID NO: 98640 - DNA, 15 bp, Homo sapiens
cacctctatttgtca

SEQ ID NO: 98641 - DNA, 15 bp, Homo sapiens
ccacctctatttgtc

SEQ ID NO: 98642 - DNA, 15 bp, Homo sapiens
cccacctctatttgt

SEQ ID NO: 98643 - DNA, 15 bp, Homo sapiens
tcccacctctatttg

SEQ ID NO: 98644 - DNA, 15 bp, Homo sapiens
ttcccacctctattt

SEQ ID NO: 98645 - DNA, 15 bp, Homo sapiens
cttcccacctctatt

SEQ ID NO: 98646 - DNA, 15 bp, Homo sapiens
gcttcccacctctat

SEQ ID NO: 98647 - DNA, 15 bp, Homo sapiens
agcttcccacctcta

SEQ ID NO: 98648 - DNA, 15 bp, Homo sapiens
aagcttcccacctct

SEQ ID NO: 98649 - DNA, 15 bp, Homo sapiens
taagcttcccacctc

SEQ ID NO: 98650 - DNA, 15 bp, Homo sapiens
ataagcttcccacct

SEQ ID NO: 98651 - DNA, 15 bp, Homo sapiens
tataagcttcccacc

SEQ ID NO: 98652 - DNA, 15 bp, Homo sapiens
ttataagcttcccac

SEQ ID NO: 98653 - DNA, 15 bp, Homo sapiens
attataagcttccca

SEQ ID NO: 98654 - DNA, 15 bp, Homo sapiens
gattataagcttccc

SEQ ID NO: 98655 - DNA, 15 bp, Homo sapiens
agattataagcttcc

SEQ ID NO: 98656 - DNA, 15 bp, Homo sapiens
tagattataagcttc

SEQ ID NO: 98657 - DNA, 15 bp, Homo sapiens
ttagattataagctt

SEQ ID NO: 98658 - DNA, 15 bp, Homo sapiens
attagattataagct

SEQ ID NO: 98659 - DNA, 15 bp, Homo sapiens
aattagattataagc

SEQ ID NO: 98660 - DNA, 15 bp, Homo sapiens
aaattagattataag

SEQ ID NO: 98661 - DNA, 15 bp, Homo sapiens
aaaattagattataa

SEQ ID NO: 98662 - DNA, 15 bp, Homo sapiens
taaaattagattata

SEQ ID NO: 98663 - DNA, 15 bp, Homo sapiens
ctaaaattagattat

SEQ ID NO: 98664 - DNA, 15 bp, Homo sapiens
cctaaaattagatta

SEQ ID NO: 98665 - DNA, 15 bp, Homo sapiens
tcctaaaattagatt

SEQ ID NO: 98666 - DNA, 15 bp, Homo sapiens
ctcctaaaattagat

SEQ ID NO: 98667 - DNA, 15 bp, Homo sapiens
cctcctaaaattaga

SEQ ID NO: 98668 - DNA, 15 bp, Homo sapiens
tcctcctaaaattag

SEQ ID NO: 98669 - DNA, 15 bp, Homo sapiens
gtcctcctaaaatta

SEQ ID NO: 98670 - DNA, 15 bp, Homo sapiens
ggtcctcctaaaatt

SEQ ID NO: 98671 - DNA, 15 bp, Homo sapiens
tggtcctcctaaaat

SEQ ID NO: 98672 - DNA, 15 bp, Homo sapiens
ttggtcctcctaaaa

SEQ ID NO: 98673 - DNA, 15 bp, Homo sapiens
tttggtcctcctaaa

SEQ ID NO: 98674 - DNA, 15 bp, Homo sapiens
atttggtcctcctaa

SEQ ID NO: 98675 - DNA, 15 bp, Homo sapiens
aatttggtcctccta

SEQ ID NO: 98676 - DNA, 15 bp, Homo sapiens
gaatttggtcctcct

SEQ ID NO: 98677 - DNA, 15 bp, Homo sapiens
tgaatttggtcctcc

SEQ ID NO: 98678 - DNA, 15 bp, Homo sapiens
ctgaatttggtcctc

SEQ ID NO: 98679 - DNA, 15 bp, Homo sapiens
actgaatttggtcct

SEQ ID NO: 98680 - DNA, 15 bp, Homo sapiens
cactgaatttggtcc

SEQ ID NO: 98681 - DNA, 15 bp, Homo sapiens
ccactgaatttggtc

SEQ ID NO: 98682 - DNA, 15 bp, Homo sapiens
tccactgaatttggt

SEQ ID NO: 98683 - DNA, 15 bp, Homo sapiens
atccactgaatttgg

SEQ ID NO: 98684 - DNA, 15 bp, Homo sapiens
catccactgaatttg

SEQ ID NO: 98685 - DNA, 15 bp, Homo sapiens
ccatccactgaattt

SEQ ID NO: 98686 - DNA, 15 bp, Homo sapiens
gccatccactgaatt

SEQ ID NO: 98687 - DNA, 15 bp, Homo sapiens
tgccatccactgaat

SEQ ID NO: 98688 - DNA, 15 bp, Homo sapiens
ttgccatccactgaa

SEQ ID NO: 98689 - DNA, 15 bp, Homo sapiens
gttgccatccactga

SEQ ID NO: 98690 - DNA, 15 bp, Homo sapiens
agttgccatccactg

SEQ ID NO: 98691 - DNA, 15 bp, Homo sapiens
cagttgccatccact

SEQ ID NO: 98692 - DNA, 15 bp, Homo sapiens
ccagttgccatccac

SEQ ID NO: 98693 - DNA, 15 bp, Homo sapiens
tccagttgccatcca

SEQ ID NO: 98694 - DNA, 15 bp, Homo sapiens
ttccagttgccatcc

SEQ ID NO: 98695 - DNA, 15 bp, Homo sapiens
gttccagttgccatc

SEQ ID NO: 98696 - DNA, 15 bp, Homo sapiens
tgttccagttgccat

SEQ ID NO: 98697 - DNA, 15 bp, Homo sapiens
atgttccagttgcca

SEQ ID NO: 98698 - DNA, 15 bp, Homo sapiens
aatgttccagttgcc

SEQ ID NO: 98699 - DNA, 15 bp, Homo sapiens
caatgttccagttgc

SEQ ID NO: 98700 - DNA, 15 bp, Homo sapiens
tcaatgttccagttg

SEQ ID NO: 98701 - DNA, 15 bp, Homo sapiens
atcaatgttccagtt

SEQ ID NO: 98702 - DNA, 15 bp, Homo sapiens
aatcaatgttccagt

SEQ ID NO: 98703 - DNA, 15 bp, Homo sapiens
caatcaatgttccag

SEQ ID NO: 98704 - DNA, 15 bp, Homo sapiens
acaatcaatgttcca

SEQ ID NO: 98705 - DNA, 15 bp, Homo sapiens
tacaatcaatgttcc

SEQ ID NO: 98706 - DNA, 15 bp, Homo sapiens
ttacaatcaatgttc

SEQ ID NO: 98707 - DNA, 15 bp, Homo sapiens
cttacaatcaatgtt

SEQ ID NO: 98708 - DNA, 15 bp, Homo sapiens
ccttacaatcaatgt

SEQ ID NO: 98709 - DNA, 15 bp, Homo sapiens
gccttacaatcaatg

SEQ ID NO: 98710 - DNA, 15 bp, Homo sapiens
ggccttacaatcaat

SEQ ID NO: 98711 - DNA, 15 bp, Homo sapiens
tggccttacaatcaa

SEQ ID NO: 98712 - DNA, 15 bp, Homo sapiens
ctggccttacaatca

SEQ ID NO: 98713 - DNA, 15 bp, Homo sapiens
actggccttacaatc

SEQ ID NO: 98714 - DNA, 15 bp, Homo sapiens
cactggccttacaat

SEQ ID NO: 98715 - DNA, 15 bp, Homo sapiens
tcactggccttacaa

SEQ ID NO: 98716 - DNA, 15 bp, Homo sapiens
ttcactggccttaca

SEQ ID NO: 98717 - DNA, 15 bp, Homo sapiens
cttcactggccttac

SEQ ID NO: 98718 - DNA, 15 bp, Homo sapiens
acttcactggcctta

SEQ ID NO: 98719 - DNA, 15 bp, Homo sapiens
aacttcactggcctt

SEQ ID NO: 98720 - DNA, 15 bp, Homo sapiens
aaacttcactggcct

SEQ ID NO: 98721 - DNA, 15 bp, Homo sapiens
aaaacttcactggcc

SEQ ID NO: 98722 - DNA, 15 bp, Homo sapiens
gaaaacttcactggc

SEQ ID NO: 98723 - DNA, 15 bp, Homo sapiens
tgaaaacttcactgg

SEQ ID NO: 98724 - DNA, 15 bp, Homo sapiens
gtgaaaacttcactg

SEQ ID NO: 98725 - DNA, 15 bp, Homo sapiens
ggtgaaaacttcact

SEQ ID NO: 98726 - DNA, 15 bp, Homo sapiens
gggtgaaaacttcac

SEQ ID NO: 98727 - DNA, 15 bp, Homo sapiens
tgggtgaaaacttca

SEQ ID NO: 98728 - DNA, 15 bp, Homo sapiens
ttgggtgaaaacttc

SEQ ID NO: 98729 - DNA, 15 bp, Homo sapiens
gttgggtgaaaactt

SEQ ID NO: 98730 - DNA, 15 bp, Homo sapiens
agttgggtgaaaact

SEQ ID NO: 98731 - DNA, 15 bp, Homo sapiens
cagttgggtgaaaac

SEQ ID NO: 98732 - DNA, 15 bp, Homo sapiens
ccagttgggtgaaaa

SEQ ID NO: 98733 - DNA, 15 bp, Homo sapiens
tccagttgggtgaaa

SEQ ID NO: 98734 - DNA, 15 bp, Homo sapiens
ttccagttgggtgaa

SEQ ID NO: 98735 - DNA, 15 bp, Homo sapiens
attccagttgggtga

SEQ ID NO: 98736 - DNA, 15 bp, Homo sapiens
aattccagttgggtg

SEQ ID NO: 98737 - DNA, 15 bp, Homo sapiens
aaattccagttgggt

SEQ ID NO: 98738 - DNA, 15 bp, Homo sapiens
caaattccagttggg

SEQ ID NO: 98739 - DNA, 15 bp, Homo sapiens
tcaaattccagttgg

SEQ ID NO: 98740 - DNA, 15 bp, Homo sapiens
atcaaattccagttg

SEQ ID NO: 98741 - DNA, 15 bp, Homo sapiens
catcaaattccagtt

SEQ ID NO: 98742 - DNA, 15 bp, Homo sapiens
ccatcaaattccagt

SEQ ID NO: 98743 - DNA, 15 bp, Homo sapiens
tccatcaaattccag

SEQ ID NO: 98744 - DNA, 15 bp, Homo sapiens
ttccatcaaattcca

SEQ ID NO: 98745 - DNA, 15 bp, Homo sapiens
tttccatcaaattcc

SEQ ID NO: 98746 - DNA, 15 bp, Homo sapiens
ctttccatcaaattc

SEQ ID NO: 98747 - DNA, 15 bp, Homo sapiens
tctttccatcaaatt

SEQ ID NO: 98748 - DNA, 15 bp, Homo sapiens
ttctttccatcaaat

SEQ ID NO: 98749 - DNA, 15 bp, Homo sapiens
cttctttccatcaaa

SEQ ID NO: 98750 - DNA, 15 bp, Homo sapiens
ccttctttccatcaa

SEQ ID NO: 98751 - DNA, 15 bp, Homo sapiens
accttctttccatca

SEQ ID NO: 98752 - DNA, 15 bp, Homo sapiens
aaccttctttccatc

SEQ ID NO: 98753 - DNA, 15 bp, Homo sapiens
aaaccttctttccat

SEQ ID NO: 98754 - DNA, 15 bp, Homo sapiens
caaaccttctttcca

SEQ ID NO: 98755 - DNA, 15 bp, Homo sapiens
acaaaccttctttcc

SEQ ID NO: 98756 - DNA, 15 bp, Homo sapiens
cacaaaccttctttc

SEQ ID NO: 98757 - DNA, 15 bp, Homo sapiens
acacaaaccttcttt

SEQ ID NO: 98758 - DNA, 15 bp, Homo sapiens
cacacaaaccttctt

SEQ ID NO: 98759 - DNA, 15 bp, Homo sapiens
acacacaaaccttct

SEQ ID NO: 98760 - DNA, 15 bp, Homo sapiens
aacacacaaaccttc

SEQ ID NO: 98761 - DNA, 15 bp, Homo sapiens
aaacacacaaacctt

SEQ ID NO: 98762 - DNA, 15 bp, Homo sapiens
taaacacacaaacct

SEQ ID NO: 98763 - DNA, 15 bp, Homo sapiens
ttaaacacacaaacc

SEQ ID NO: 98764 - DNA, 15 bp, Homo sapiens
cttaaacacacaaac

SEQ ID NO: 98765 - DNA, 15 bp, Homo sapiens
tcttaaacacacaaa

SEQ ID NO: 98766 - DNA, 15 bp, Homo sapiens
gtcttaaacacacaa

SEQ ID NO: 98767 - DNA, 15 bp, Homo sapiens
cgtcttaaacacaca

SEQ ID NO: 98768 - DNA, 15 bp, Homo sapiens
gcgtcttaaacacac

SEQ ID NO: 98769 - DNA, 15 bp, Homo sapiens
ggcgtcttaaacaca

SEQ ID NO: 98770 - DNA, 15 bp, Homo sapiens
tggcgtcttaaacac

SEQ ID NO: 98771 - DNA, 15 bp, Homo sapiens
ttggcgtcttaaaca

SEQ ID NO: 98772 - DNA, 15 bp, Homo sapiens
cttggcgtcttaaac

SEQ ID NO: 98773 - DNA, 15 bp, Homo sapiens
ccttggcgtcttaaa

SEQ ID NO: 98774 - DNA, 15 bp, Homo sapiens
cccttggcgtcttaa

SEQ ID NO: 98775 - DNA, 15 bp, Homo sapiens
gcccttggcgtctta

SEQ ID NO: 98776 - DNA, 15 bp, Homo sapiens
tgcccttggcgtctt

SEQ ID NO: 98777 - DNA, 15 bp, Homo sapiens
atgcccttggcgtct

SEQ ID NO: 98778 - DNA, 15 bp, Homo sapiens
aatgcccttggcgtc

SEQ ID NO: 98779 - DNA, 15 bp, Homo sapiens
caatgcccttggcgt

SEQ ID NO: 98780 - DNA, 15 bp, Homo sapiens
gcaatgcccttggcg

SEQ ID NO: 98781 - DNA, 15 bp, Homo sapiens
tgcaatgcccttggc

SEQ ID NO: 98782 - DNA, 15 bp, Homo sapiens
ctgcaatgcccttgg

SEQ ID NO: 98783 - DNA, 15 bp, Homo sapiens
tctgcaatgcccttg

SEQ ID NO: 98784 - DNA, 15 bp, Homo sapiens
ttctgcaatgccctt

SEQ ID NO: 98785 - DNA, 15 bp, Homo sapiens
attctgcaatgccct

SEQ ID NO: 98786 - DNA, 15 bp, Homo sapiens
gattctgcaatgccc

SEQ ID NO: 98787 - DNA, 15 bp, Homo sapiens
ggattctgcaatgcc

SEQ ID NO: 98788 - DNA, 15 bp, Homo sapiens
gggattctgcaatgc

SEQ ID NO: 98789 - DNA, 15 bp, Homo sapiens
agggattctgcaatg

SEQ ID NO: 98790 - DNA, 15 bp, Homo sapiens
gagggattctgcaat

SEQ ID NO: 98791 - DNA, 15 bp, Homo sapiens
agagggattctgcaa

SEQ ID NO: 98792 - DNA, 15 bp, Homo sapiens
gagagggattctgca

SEQ ID NO: 98793 - DNA, 15 bp, Homo sapiens
tgagagggattctgc

SEQ ID NO: 98794 - DNA, 15 bp, Homo sapiens
ctgagagggattctg

SEQ ID NO: 98795 - DNA, 15 bp, Homo sapiens
actgagagggattct

SEQ ID NO: 98796 - DNA, 15 bp, Homo sapiens
cactgagagggattc

SEQ ID NO: 98797 - DNA, 15 bp, Homo sapiens
ccactgagagggatt

SEQ ID NO: 98798 - DNA, 15 bp, Homo sapiens
tccactgagagggat

SEQ ID NO: 98799 - DNA, 15 bp, Homo sapiens
gtccactgagaggga

SEQ ID NO: 98800 - DNA, 15 bp, Homo sapiens
tgtccactgagaggg

SEQ ID NO: 98801 - DNA, 15 bp, Homo sapiens
ctgtccactgagagg

SEQ ID NO: 98802 - DNA, 15 bp, Homo sapiens
actgtccactgagag

SEQ ID NO: 98803 - DNA, 15 bp, Homo sapiens
tactgtccactgaga

SEQ ID NO: 98804 - DNA, 15 bp, Homo sapiens
atactgtccactgag

SEQ ID NO: 98805 - DNA, 15 bp, Homo sapiens
catactgtccactga

SEQ ID NO: 98806 - DNA, 15 bp, Homo sapiens
gcatactgtccactg

SEQ ID NO: 98807 - DNA, 15 bp, Homo sapiens
tgcatactgtccact

SEQ ID NO: 98808 - DNA, 15 bp, Homo sapiens
gtgcatactgtccac

SEQ ID NO: 98809 - DNA, 15 bp, Homo sapiens
agtgcatactgtcca

SEQ ID NO: 98810 - DNA, 15 bp, Homo sapiens
gagtgcatactgtcc

SEQ ID NO: 98811 - DNA, 15 bp, Homo sapiens
tgagtgcatactgtc

SEQ ID NO: 98812 - DNA, 15 bp, Homo sapiens
ctgagtgcatactgt

SEQ ID NO: 98813 - DNA, 15 bp, Homo sapiens
gctgagtgcatactg

SEQ ID NO: 98814 - DNA, 15 bp, Homo sapiens
agctgagtgcatact

SEQ ID NO: 98815 - DNA, 15 bp, Homo sapiens
cagctgagtgcatac

SEQ ID NO: 98816 - DNA, 15 bp, Homo sapiens
tcagctgagtgcata

SEQ ID NO: 98817 - DNA, 15 bp, Homo sapiens
gtcagctgagtgcat

SEQ ID NO: 98818 - DNA, 15 bp, Homo sapiens
ggtcagctgagtgca

SEQ ID NO: 98819 - DNA, 15 bp, Homo sapiens
tggtcagctgagtgc

SEQ ID NO: 98820 - DNA, 15 bp, Homo sapiens
gtggtcagctgagtg

SEQ ID NO: 98821 - DNA, 15 bp, Homo sapiens
agtggtcagctgagt

SEQ ID NO: 98822 - DNA, 15 bp, Homo sapiens
gagtggtcagctgag

SEQ ID NO: 98823 - DNA, 15 bp, Homo sapiens
agagtggtcagctga

SEQ ID NO: 98824 - DNA, 15 bp, Homo sapiens
gagagtggtcagctg

SEQ ID NO: 98825 - DNA, 15 bp, Homo sapiens
agagagtggtcagct

SEQ ID NO: 98826 - DNA, 15 bp, Homo sapiens
gagagagtggtcagc

SEQ ID NO: 98827 - DNA, 15 bp, Homo sapiens
agagagagtggtcag

SEQ ID NO: 98828 - DNA, 15 bp, Homo sapiens
tagagagagtggtca

SEQ ID NO: 98829 - DNA, 15 bp, Homo sapiens
ctagagagagtggtc

SEQ ID NO: 98830 - DNA, 15 bp, Homo sapiens
tctagagagagtggt

SEQ ID NO: 98831 - DNA, 15 bp, Homo sapiens
ttctagagagagtgg

SEQ ID NO: 98832 - DNA, 15 bp, Homo sapiens
tttctagagagagtg

SEQ ID NO: 98833 - DNA, 15 bp, Homo sapiens
atttctagagagagt

SEQ ID NO: 98834 - DNA, 15 bp, Homo sapiens
tatttctagagagag

SEQ ID NO: 98835 - DNA, 15 bp, Homo sapiens
ctatttctagagaga

SEQ ID NO: 98836 - DNA, 15 bp, Homo sapiens
actatttctagagag

SEQ ID NO: 98837 - DNA, 15 bp, Homo sapiens
gactatttctagaga

SEQ ID NO: 98838 - DNA, 15 bp, Homo sapiens
tgactatttctagag

SEQ ID NO: 98839 - DNA, 15 bp, Homo sapiens
ttgactatttctaga

SEQ ID NO: 98840 - DNA, 15 bp, Homo sapiens
cttgactatttctag

SEQ ID NO: 98841 - DNA, 15 bp, Homo sapiens
tcttgactatttcta

SEQ ID NO: 98842 - DNA, 15 bp, Homo sapiens
atcttgactatttct

SEQ ID NO: 98843 - DNA, 15 bp, Homo sapiens
tatcttgactatttc

SEQ ID NO: 98844 - DNA, 15 bp, Homo sapiens
atatcttgactattt

SEQ ID NO: 98845 - DNA, 15 bp, Homo sapiens
catatcttgactatt

SEQ ID NO: 98846 - DNA, 15 bp, Homo sapiens
tcatatcttgactat

SEQ ID NO: 98847 - DNA, 15 bp, Homo sapiens
ttcatatcttgacta

SEQ ID NO: 98848 - DNA, 15 bp, Homo sapiens
gttcatatcttgact

SEQ ID NO: 98849 - DNA, 15 bp, Homo sapiens
agttcatatcttgac

SEQ ID NO: 98850 - DNA, 15 bp, Homo sapiens
tagttcatatcttga

SEQ ID NO: 98851 - DNA, 15 bp, Homo sapiens
ttagttcatatcttg

SEQ ID NO: 98852 - DNA, 15 bp, Homo sapiens
cttagttcatatctt

SEQ ID NO: 98853 - DNA, 15 bp, Homo sapiens
tcttagttcatatct

SEQ ID NO: 98854 - DNA, 15 bp, Homo sapiens
ttcttagttcatatc

SEQ ID NO: 98855 - DNA, 15 bp, Homo sapiens
tttcttagttcatat

SEQ ID NO: 98856 - DNA, 15 bp, Homo sapiens
atttcttagttcata

SEQ ID NO: 98857 - DNA, 15 bp, Homo sapiens
aatttcttagttcat

SEQ ID NO: 98858 - DNA, 15 bp, Homo sapiens
aaatttcttagttca

SEQ ID NO: 98859 - DNA, 15 bp, Homo sapiens
aaaatttcttagttc

SEQ ID NO: 98860 - DNA, 15 bp, Homo sapiens
taaaatttcttagtt

SEQ ID NO: 98861 - DNA, 15 bp, Homo sapiens
ttaaaatttcttagt

SEQ ID NO: 98862 - DNA, 15 bp, Homo sapiens
attaaaatttcttag

SEQ ID NO: 98863 - DNA, 15 bp, Homo sapiens
cattaaaatttctta

SEQ ID NO: 98864 - DNA, 15 bp, Homo sapiens
gcattaaaatttctt

SEQ ID NO: 98865 - DNA, 15 bp, Homo sapiens
tgcattaaaatttct

SEQ ID NO: 98866 - DNA, 15 bp, Homo sapiens
ttgcattaaaatttc

SEQ ID NO: 98867 - DNA, 15 bp, Homo sapiens
tttgcattaaaattt

SEQ ID NO: 98868 - DNA, 15 bp, Homo sapiens
atttgcattaaaatt

SEQ ID NO: 98869 - DNA, 15 bp, Homo sapiens
tatttgcattaaaat

SEQ ID NO: 98870 - DNA, 15 bp, Homo sapiens
gtatttgcattaaaa

SEQ ID NO: 98871 - DNA, 15 bp, Homo sapiens
tgtatttgcattaaa

SEQ ID NO: 98872 - DNA, 15 bp, Homo sapiens
atgtatttgcattaa

SEQ ID NO: 98873 - DNA, 15 bp, Homo sapiens
tatgtatttgcatta

SEQ ID NO: 98874 - DNA, 15 bp, Homo sapiens
gtatgtatttgcatt

SEQ ID NO: 98875 - DNA, 15 bp, Homo sapiens
tgtatgtatttgcat

SEQ ID NO: 98876 - DNA, 15 bp, Homo sapiens
atgtatgtatttgca

SEQ ID NO: 98877 - DNA, 15 bp, Homo sapiens
aatgtatgtatttgc

SEQ ID NO: 98878 - DNA, 15 bp, Homo sapiens
gaatgtatgtatttg

SEQ ID NO: 98879 - DNA, 15 bp, Homo sapiens
ggaatgtatgtattt

SEQ ID NO: 98880 - DNA, 15 bp, Homo sapiens
aggaatgtatgtatt

SEQ ID NO: 98881 - DNA, 15 bp, Homo sapiens
caggaatgtatgtat

SEQ ID NO: 98882 - DNA, 15 bp, Homo sapiens
tcaggaatgtatgta

SEQ ID NO: 98883 - DNA, 15 bp, Homo sapiens
ttcaggaatgtatgt

SEQ ID NO: 98884 - DNA, 15 bp, Homo sapiens
tttcaggaatgtatg

SEQ ID NO: 98885 - DNA, 15 bp, Homo sapiens
ctttcaggaatgtat

SEQ ID NO: 98886 - DNA, 15 bp, Homo sapiens
tctttcaggaatgta

SEQ ID NO: 98887 - DNA, 15 bp, Homo sapiens
gtctttcaggaatgt

SEQ ID NO: 98888 - DNA, 15 bp, Homo sapiens
cgtctttcaggaatg

SEQ ID NO: 98889 - DNA, 15 bp, Homo sapiens
ccgtctttcaggaat

SEQ ID NO: 98890 - DNA, 15 bp, Homo sapiens
cccgtctttcaggaa

SEQ ID NO: 98891 - DNA, 15 bp, Homo sapiens
ccccgtctttcagga

SEQ ID NO: 98892 - DNA, 15 bp, Homo sapiens
tccccgtctttcagg

SEQ ID NO: 98893 - DNA, 15 bp, Homo sapiens
ttccccgtctttcag

SEQ ID NO: 98894 - DNA, 15 bp, Homo sapiens
attccccgtctttca

SEQ ID NO: 98895 - DNA, 15 bp, Homo sapiens
aattccccgtctttc

SEQ ID NO: 98896 - DNA, 15 bp, Homo sapiens
taattccccgtcttt

SEQ ID NO: 98897 - DNA, 15 bp, Homo sapiens
ttaattccccgtctt

SEQ ID NO: 98898 - DNA, 15 bp, Homo sapiens
tttaattccccgtct

SEQ ID NO: 98899 - DNA, 15 bp, Homo sapiens
atttaattccccgtc

SEQ ID NO: 98900 - DNA, 15 bp, Homo sapiens
aatttaattccccgt

SEQ ID NO: 98901 - DNA, 15 bp, Homo sapiens
taatttaattccccg

SEQ ID NO: 98902 - DNA, 15 bp, Homo sapiens
gtaatttaattcccc

SEQ ID NO: 98903 - DNA, 15 bp, Homo sapiens
agtaatttaattccc

SEQ ID NO: 98904 - DNA, 15 bp, Homo sapiens
tagtaatttaattcc

SEQ ID NO: 98905 - DNA, 15 bp, Homo sapiens
ttagtaatttaattc

SEQ ID NO: 98906 - DNA, 15 bp, Homo sapiens
attagtaatttaatt

SEQ ID NO: 98907 - DNA, 15 bp, Homo sapiens
aattagtaatttaat

SEQ ID NO: 98908 - DNA, 15 bp, Homo sapiens
aaattagtaatttaa

SEQ ID NO: 98909 - DNA, 15 bp, Homo sapiens
aaaattagtaattta

SEQ ID NO: 98910 - DNA, 15 bp, Homo sapiens
aaaaattagtaattt

SEQ ID NO: 98911 - DNA, 15 bp, Homo sapiens
aaaaaattagtaatt

SEQ ID NO: 98912 - DNA, 15 bp, Homo sapiens
aaaaaaattagtaat

SEQ ID NO: 98913 - DNA, 15 bp, Homo sapiens
aaaaaaaattagtaa

SEQ ID NO: 98914 - DNA, 15 bp, Homo sapiens
aaaaaaaaattagta

SEQ ID NO: 98915 - DNA, 15 bp, Homo sapiens
aaaaaaaaaattagt

SEQ ID NO: 98916 - DNA, 15 bp, Homo sapiens
aaaaaaaaaaattag

SEQ ID NO: 98917 - DNA, 15 bp, Homo sapiens
aaaaaaaaaaaatta

SEQ ID NO: 98918 - DNA, 15 bp, Homo sapiens
taaaaaaaaaaaaaa

SEQ ID NO: 98919 - DNA, 15 bp, Homo sapiens
ttaaaaaaaaaaaaa

SEQ ID NO: 98920 - DNA, 15 bp, Homo sapiens
tttaaaaaaaaaaaa

SEQ ID NO: 98921 - DNA, 15 bp, Homo sapiens
atttaaaaaaaaaaa

SEQ ID NO: 98922 - DNA, 15 bp, Homo sapiens
catttaaaaaaaaaa

SEQ ID NO: 98923 - DNA, 15 bp, Homo sapiens
tcatttaaaaaaaaa

SEQ ID NO: 98924 - DNA, 15 bp, Homo sapiens
atcatttaaaaaaaa

SEQ ID NO: 98925 - DNA, 15 bp, Homo sapiens
catcatttaaaaaaa

SEQ ID NO: 98926 - DNA, 15 bp, Homo sapiens
tcatcatttaaaaaa

SEQ ID NO: 98927 - DNA, 15 bp, Homo sapiens
gtcatcatttaaaaa

SEQ ID NO: 98928 - DNA, 15 bp, Homo sapiens
tgtcatcatttaaaa

SEQ ID NO: 98929 - DNA, 15 bp, Homo sapiens
ctgtcatcatttaaa

SEQ ID NO: 98930 - DNA, 15 bp, Homo sapiens
actgtcatcatttaa

SEQ ID NO: 98931 - DNA, 15 bp, Homo sapiens
cactgtcatcattta

SEQ ID NO: 98932 - DNA, 15 bp, Homo sapiens
ccactgtcatcattt

SEQ ID NO: 98933 - DNA, 15 bp, Homo sapiens
accactgtcatcatt

SEQ ID NO: 98934 - DNA, 15 bp, Homo sapiens
gaccactgtcatcat

SEQ ID NO: 98935 - DNA, 15 bp, Homo sapiens
ggaccactgtcatca

SEQ ID NO: 98936 - DNA, 15 bp, Homo sapiens
gggaccactgtcatc

SEQ ID NO: 98937 - DNA, 15 bp, Homo sapiens
tgggaccactgtcat

SEQ ID NO: 98938 - DNA, 15 bp, Homo sapiens
ctgggaccactgtca

SEQ ID NO: 98939 - DNA, 15 bp, Homo sapiens
tctgggaccactgtc

SEQ ID NO: 98940 - DNA, 15 bp, Homo sapiens
ttctgggaccactgt

SEQ ID NO: 98941 - DNA, 15 bp, Homo sapiens
gttctgggaccactg

SEQ ID NO: 98942 - DNA, 15 bp, Homo sapiens
agttctgggaccact

SEQ ID NO: 98943 - DNA, 15 bp, Homo sapiens
aagttctgggaccac

SEQ ID NO: 98944 - DNA, 15 bp, Homo sapiens
caagttctgggacca

SEQ ID NO: 98945 - DNA, 15 bp, Homo sapiens
ccaagttctgggacc

SEQ ID NO: 98946 - DNA, 15 bp, Homo sapiens
tccaagttctgggac

SEQ ID NO: 98947 - DNA, 15 bp, Homo sapiens
ttccaagttctggga

SEQ ID NO: 98948 - DNA, 15 bp, Homo sapiens
tttccaagttctggg

SEQ ID NO: 98949 - DNA, 15 bp, Homo sapiens
ttttccaagttctgg

SEQ ID NO: 98950 - DNA, 15 bp, Homo sapiens
cttttccaagttctg

SEQ ID NO: 98951 - DNA, 15 bp, Homo sapiens
acttttccaagttct

SEQ ID NO: 98952 - DNA, 15 bp, Homo sapiens
aacttttccaagttc

SEQ ID NO: 98953 - DNA, 15 bp, Homo sapiens
caacttttccaagtt

SEQ ID NO: 98954 - DNA, 15 bp, Homo sapiens
acaacttttccaagt

SEQ ID NO: 98955 - DNA, 15 bp, Homo sapiens
tacaacttttccaag

SEQ ID NO: 98956 - DNA, 15 bp, Homo sapiens
ctacaacttttccaa

SEQ ID NO: 98957 - DNA, 15 bp, Homo sapiens
cctacaacttttcca

SEQ ID NO: 98958 - DNA, 15 bp, Homo sapiens
ccctacaacttttcc

SEQ ID NO: 98959 - DNA, 15 bp, Homo sapiens
tccctacaacttttc

SEQ ID NO: 98960 - DNA, 15 bp, Homo sapiens
atccctacaactttt

SEQ ID NO: 98961 - DNA, 15 bp, Homo sapiens
aatccctacaacttt

SEQ ID NO: 98962 - DNA, 15 bp, Homo sapiens
aaatccctacaactt

SEQ ID NO: 98963 - DNA, 15 bp, Homo sapiens
gaaatccctacaact

SEQ ID NO: 98964 - DNA, 15 bp, Homo sapiens
agaaatccctacaac

SEQ ID NO: 98965 - DNA, 15 bp, Homo sapiens
tagaaatccctacaa

SEQ ID NO: 98966 - DNA, 15 bp, Homo sapiens
ttagaaatccctaca

SEQ ID NO: 98967 - DNA, 15 bp, Homo sapiens
tttagaaatccctac

SEQ ID NO: 98968 - DNA, 15 bp, Homo sapiens
gtttagaaatcccta

SEQ ID NO: 98969 - DNA, 15 bp, Homo sapiens
agtttagaaatccct

SEQ ID NO: 98970 - DNA, 15 bp, Homo sapiens
gagtttagaaatccc

SEQ ID NO: 98971 - DNA, 15 bp, Homo sapiens
tgagtttagaaatcc

SEQ ID NO: 98972 - DNA, 15 bp, Homo sapiens
ttgagtttagaaatc

SEQ ID NO: 98973 - DNA, 15 bp, Homo sapiens
cttgagtttagaaat

SEQ ID NO: 98974 - DNA, 15 bp, Homo sapiens
gcttgagtttagaaa

SEQ ID NO: 98975 - DNA, 15 bp, Homo sapiens
tgcttgagtttagaa

SEQ ID NO: 98976 - DNA, 15 bp, Homo sapiens
ctgcttgagtttaga

SEQ ID NO: 98977 - DNA, 15 bp, Homo sapiens
tctgcttgagtttag

SEQ ID NO: 98978 - DNA, 15 bp, Homo sapiens
atctgcttgagttta

SEQ ID NO: 98979 - DNA, 15 bp, Homo sapiens
aatctgcttgagttt

SEQ ID NO: 98980 - DNA, 15 bp, Homo sapiens
gaatctgcttgagtt

SEQ ID NO: 98981 - DNA, 15 bp, Homo sapiens
cgaatctgcttgagt

SEQ ID NO: 98982 - DNA, 15 bp, Homo sapiens
gcgaatctgcttgag

SEQ ID NO: 98983 - DNA, 15 bp, Homo sapiens
tgcgaatctgcttga

SEQ ID NO: 98984 - DNA, 15 bp, Homo sapiens
ttgcgaatctgcttg

SEQ ID NO: 98985 - DNA, 15 bp, Homo sapiens
cttgcgaatctgctt

SEQ ID NO: 98986 - DNA, 15 bp, Homo sapiens
acttgcgaatctgct

SEQ ID NO: 98987 - DNA, 15 bp, Homo sapiens
cacttgcgaatctgc

SEQ ID NO: 98988 - DNA, 15 bp, Homo sapiens
gcacttgcgaatctg

SEQ ID NO: 98989 - DNA, 15 bp, Homo sapiens
agcacttgcgaatct

SEQ ID NO: 98990 - DNA, 15 bp, Homo sapiens
cagcacttgcgaatc

SEQ ID NO: 98991 - DNA, 15 bp, Homo sapiens
acagcacttgcgaat

SEQ ID NO: 98992 - DNA, 15 bp, Homo sapiens
cacagcacttgcgaa

SEQ ID NO: 98993 - DNA, 15 bp, Homo sapiens
gcacagcacttgcga

SEQ ID NO: 98994 - DNA, 15 bp, Homo sapiens
cgcacagcacttgcg

SEQ ID NO: 98995 - DNA, 15 bp, Homo sapiens
gcgcacagcacttgc

SEQ ID NO: 98996 - DNA, 15 bp, Homo sapiens
agcgcacagcacttg

SEQ ID NO: 98997 - DNA, 15 bp, Homo sapiens
aagcgcacagcactt

SEQ ID NO: 98998 - DNA, 15 bp, Homo sapiens
caagcgcacagcact

SEQ ID NO: 98999 - DNA, 15 bp, Homo sapiens
acaagcgcacagcac

SEQ ID NO: 99000 - DNA, 15 bp, Homo sapiens
gacaagcgcacagca

SEQ ID NO: 99001 - DNA, 15 bp, Homo sapiens
tgacaagcgcacagc

SEQ ID NO: 99002 - DNA, 15 bp, Homo sapiens
ctgacaagcgcacag

SEQ ID NO: 99003 - DNA, 15 bp, Homo sapiens
tctgacaagcgcaca

SEQ ID NO: 99004 - DNA, 15 bp, Homo sapiens
gtctgacaagcgcac

SEQ ID NO: 99005 - DNA, 15 bp, Homo sapiens
ggtctgacaagcgca

SEQ ID NO: 99006 - DNA, 15 bp, Homo sapiens
tggtctgacaagcgc

SEQ ID NO: 99007 - DNA, 15 bp, Homo sapiens
atggtctgacaagcg

SEQ ID NO: 99008 - DNA, 15 bp, Homo sapiens
gatggtctgacaagc

SEQ ID NO: 99009 - DNA, 15 bp, Homo sapiens
tgatggtctgacaag

SEQ ID NO: 99010 - DNA, 15 bp, Homo sapiens
ctgatggtctgacaa

SEQ ID NO: 99011 - DNA, 15 bp, Homo sapiens
tctgatggtctgaca

SEQ ID NO: 99012 - DNA, 15 bp, Homo sapiens
gtctgatggtctgac

SEQ ID NO: 99013 - DNA, 15 bp, Homo sapiens
ggtctgatggtctga

SEQ ID NO: 99014 - DNA, 15 bp, Homo sapiens
tggtctgatggtctg

SEQ ID NO: 99015 - DNA, 15 bp, Homo sapiens
ctggtctgatggtct

SEQ ID NO: 99016 - DNA, 15 bp, Homo sapiens
cctggtctgatggtc

SEQ ID NO: 99017 - DNA, 15 bp, Homo sapiens
ccctggtctgatggt

SEQ ID NO: 99018 - DNA, 15 bp, Homo sapiens
gccctggtctgatgg

SEQ ID NO: 99019 - DNA, 15 bp, Homo sapiens
ggccctggtctgatg

SEQ ID NO: 99020 - DNA, 15 bp, Homo sapiens
tggccctggtctgat

SEQ ID NO: 99021 - DNA, 15 bp, Homo sapiens
ttggccctggtctga

SEQ ID NO: 99022 - DNA, 15 bp, Homo sapiens
gttggccctggtctg

SEQ ID NO: 99023 - DNA, 15 bp, Homo sapiens
ggttggccctggtct

SEQ ID NO: 99024 - DNA, 15 bp, Homo sapiens
tggttggccctggtc

SEQ ID NO: 99025 - DNA, 15 bp, Homo sapiens
ttggttggccctggt

SEQ ID NO: 99026 - DNA, 15 bp, Homo sapiens
attggttggccctgg

SEQ ID NO: 99027 - DNA, 15 bp, Homo sapiens
gattggttggccctg

SEQ ID NO: 99028 - DNA, 15 bp, Homo sapiens
tgattggttggccct

SEQ ID NO: 99029 - DNA, 15 bp, Homo sapiens
ctgattggttggccc

SEQ ID NO: 99030 - DNA, 15 bp, Homo sapiens
tctgattggttggcc

SEQ ID NO: 99031 - DNA, 15 bp, Homo sapiens
ttctgattggttggc

SEQ ID NO: 99032 - DNA, 15 bp, Homo sapiens
cttctgattggttgg

SEQ ID NO: 99033 - DNA, 15 bp, Homo sapiens
ccttctgattggttg

SEQ ID NO: 99034 - DNA, 15 bp, Homo sapiens
gccttctgattggtt

SEQ ID NO: 99035 - DNA, 15 bp, Homo sapiens
tgccttctgattggt

SEQ ID NO: 99036 - DNA, 15 bp, Homo sapiens
ttgccttctgattgg

SEQ ID NO: 99037 - DNA, 15 bp, Homo sapiens
gttgccttctgattg

SEQ ID NO: 99038 - DNA, 15 bp, Homo sapiens
agttgccttctgatt

SEQ ID NO: 99039 - DNA, 15 bp, Homo sapiens
aagttgccttctgat

SEQ ID NO: 99040 - DNA, 15 bp, Homo sapiens
taagttgccttctga

SEQ ID NO: 99041 - DNA, 15 bp, Homo sapiens
gtaagttgccttctg

SEQ ID NO: 99042 - DNA, 15 bp, Homo sapiens
agtaagttgccttct

SEQ ID NO: 99043 - DNA, 15 bp, Homo sapiens
cagtaagttgccttc

SEQ ID NO: 99044 - DNA, 15 bp, Homo sapiens
acagtaagttgcctt

SEQ ID NO: 99045 - DNA, 15 bp, Homo sapiens
tacagtaagttgcct

SEQ ID NO: 99046 - DNA, 15 bp, Homo sapiens
atacagtaagttgcc

SEQ ID NO: 99047 - DNA, 15 bp, Homo sapiens
tatacagtaagttgc

SEQ ID NO: 99048 - DNA, 15 bp, Homo sapiens
ttatacagtaagttg

SEQ ID NO: 99049 - DNA, 15 bp, Homo sapiens
tttatacagtaagtt

SEQ ID NO: 99050 - DNA, 15 bp, Homo sapiens
atttatacagtaagt

SEQ ID NO: 99051 - DNA, 15 bp, Homo sapiens
aatttatacagtaag

SEQ ID NO: 99052 - DNA, 15 bp, Homo sapiens
taatttatacagtaa

SEQ ID NO: 99053 - DNA, 15 bp, Homo sapiens
ataatttatacagta

SEQ ID NO: 99054 - DNA, 15 bp, Homo sapiens
cataatttatacagt

SEQ ID NO: 99055 - DNA, 15 bp, Homo sapiens
gcataatttatacag

SEQ ID NO: 99056 - DNA, 15 bp, Homo sapiens
tgcataatttataca

SEQ ID NO: 99057 - DNA, 15 bp, Homo sapiens
ctgcataatttatac

SEQ ID NO: 99058 - DNA, 15 bp, Homo sapiens
tctgcataatttata

SEQ ID NO: 99059 - DNA, 15 bp, Homo sapiens
ctctgcataatttat

SEQ ID NO: 99060 - DNA, 15 bp, Homo sapiens
actctgcataattta

SEQ ID NO: 99061 - DNA, 15 bp, Homo sapiens
aactctgcataattt

SEQ ID NO: 99062 - DNA, 15 bp, Homo sapiens
taactctgcataatt

SEQ ID NO: 99063 - DNA, 15 bp, Homo sapiens
ataactctgcataat

SEQ ID NO: 99064 - DNA, 15 bp, Homo sapiens
aataactctgcataa

SEQ ID NO: 99065 - DNA, 15 bp, Homo sapiens
aaataactctgcata

SEQ ID NO: 99066 - DNA, 15 bp, Homo sapiens
aaaataactctgcat

SEQ ID NO: 99067 - DNA, 15 bp, Homo sapiens
gaaaataactctgca

SEQ ID NO: 99068 - DNA, 15 bp, Homo sapiens
ggaaaataactctgc

SEQ ID NO: 99069 - DNA, 15 bp, Homo sapiens
aggaaaataactctg

SEQ ID NO: 99070 - DNA, 15 bp, Homo sapiens
taggaaaataactct

SEQ ID NO: 99071 - DNA, 15 bp, Homo sapiens
ataggaaaataactc

SEQ ID NO: 99072 - DNA, 15 bp, Homo sapiens
tataggaaaataact

SEQ ID NO: 99073 - DNA, 15 bp, Homo sapiens
atataggaaaataac

SEQ ID NO: 99074 - DNA, 15 bp, Homo sapiens
gatataggaaaataa

SEQ ID NO: 99075 - DNA, 15 bp, Homo sapiens
agatataggaaaata

SEQ ID NO: 99076 - DNA, 15 bp, Homo sapiens
gagatataggaaaat

SEQ ID NO: 99077 - DNA, 15 bp, Homo sapiens
tgagatataggaaaa

SEQ ID NO: 99078 - DNA, 15 bp, Homo sapiens
gtgagatataggaaa

SEQ ID NO: 99079 - DNA, 15 bp, Homo sapiens
tgtgagatataggaa

SEQ ID NO: 99080 - DNA, 15 bp, Homo sapiens
ctgtgagatatagga

SEQ ID NO: 99081 - DNA, 15 bp, Homo sapiens
actgtgagatatagg

SEQ ID NO: 99082 - DNA, 15 bp, Homo sapiens
tactgtgagatatag

SEQ ID NO: 99083 - DNA, 15 bp, Homo sapiens
atactgtgagatata

SEQ ID NO: 99084 - DNA, 15 bp, Homo sapiens
aatactgtgagatat

SEQ ID NO: 99085 - DNA, 15 bp, Homo sapiens
taatactgtgagata

SEQ ID NO: 99086 - DNA, 15 bp, Homo sapiens
ttaatactgtgagat

SEQ ID NO: 99087 - DNA, 15 bp, Homo sapiens
tttaatactgtgaga

SEQ ID NO: 99088 - DNA, 15 bp, Homo sapiens
ttttaatactgtgag

SEQ ID NO: 99089 - DNA, 15 bp, Homo sapiens
tttttaatactgtga

SEQ ID NO: 99090 - DNA, 15 bp, Homo sapiens
atttttaatactgtg

SEQ ID NO: 99091 - DNA, 15 bp, Homo sapiens
tatttttaatactgt

SEQ ID NO: 99092 - DNA, 15 bp, Homo sapiens
ttatttttaatactg

SEQ ID NO: 99093 - DNA, 15 bp, Homo sapiens
tttatttttaatact

SEQ ID NO: 99094 - DNA, 15 bp, Homo sapiens
atttatttttaatac

SEQ ID NO: 99095 - DNA, 15 bp, Homo sapiens
tatttatttttaata

SEQ ID NO: 99096 - DNA, 15 bp, Homo sapiens
ttatttatttttaat

SEQ ID NO: 99097 - DNA, 15 bp, Homo sapiens
attatttatttttaa

SEQ ID NO: 99098 - DNA, 15 bp, Homo sapiens
aattatttattttta

SEQ ID NO: 99099 - DNA, 15 bp, Homo sapiens
taattatttattttt

SEQ ID NO: 99100 - DNA, 15 bp, Homo sapiens
ttaattatttatttt

SEQ ID NO: 99101 - DNA, 15 bp, Homo sapiens
tttaattatttattt

SEQ ID NO: 99102 - DNA, 15 bp, Homo sapiens
ttttaattatttatt

SEQ ID NO: 99103 - DNA, 15 bp, Homo sapiens
tttttaattatttat

SEQ ID NO: 99104 - DNA, 15 bp, Homo sapiens
atttttaattattta

SEQ ID NO: 99105 - DNA, 15 bp, Homo sapiens
aatttttaattattt

SEQ ID NO: 99106 - DNA, 15 bp, Homo sapiens
taatttttaattatt

SEQ ID NO: 99107 - DNA, 15 bp, Homo sapiens
ttaatttttaattat

SEQ ID NO: 99108 - DNA, 15 bp, Homo sapiens
cttaatttttaatta

SEQ ID NO: 99109 - DNA, 15 bp, Homo sapiens
tcttaatttttaatt

SEQ ID NO: 99110 - DNA, 15 bp, Homo sapiens
ttcttaatttttaat

SEQ ID NO: 99111 - DNA, 15 bp, Homo sapiens
attcttaatttttaa

SEQ ID NO: 99112 - DNA, 15 bp, Homo sapiens
tattcttaattttta

SEQ ID NO: 99113 - DNA, 15 bp, Homo sapiens
ttattcttaattttt

SEQ ID NO: 99114 - DNA, 15 bp, Homo sapiens
tttattcttaatttt

SEQ ID NO: 99115 - DNA, 15 bp, Homo sapiens
atttattcttaattt

SEQ ID NO: 99116 - DNA, 15 bp, Homo sapiens
tatttattcttaatt

SEQ ID NO: 99117 - DNA, 15 bp, Homo sapiens
ttatttattcttaat

SEQ ID NO: 99118 - DNA, 15 bp, Homo sapiens
tttatttattcttaa

SEQ ID NO: 99119 - DNA, 15 bp, Homo sapiens
gtttatttattctta

SEQ ID NO: 99120 - DNA, 15 bp, Homo sapiens
cgtttatttattctt

SEQ ID NO: 99121 - DNA, 15 bp, Homo sapiens
tcgtttatttattct

SEQ ID NO: 99122 - DNA, 15 bp, Homo sapiens
ctcgtttatttattc

SEQ ID NO: 99123 - DNA, 15 bp, Homo sapiens
actcgtttatttatt

SEQ ID NO: 99124 - DNA, 15 bp, Homo sapiens
aactcgtttatttat

SEQ ID NO: 99125 - DNA, 15 bp, Homo sapiens
caactcgtttattta

SEQ ID NO: 99126 - DNA, 15 bp, Homo sapiens
tcaactcgtttattt

SEQ ID NO: 99127 - DNA, 15 bp, Homo sapiens
gtcaactcgtttatt

SEQ ID NO: 99128 - DNA, 15 bp, Homo sapiens
ggtcaactcgtttat

SEQ ID NO: 99129 - DNA, 15 bp, Homo sapiens
aggtcaactcgttta

SEQ ID NO: 99130 - DNA, 15 bp, Homo sapiens
gaggtcaactcgttt

SEQ ID NO: 99131 - DNA, 15 bp, Homo sapiens
cgaggtcaactcgtt

SEQ ID NO: 99132 - DNA, 15 bp, Homo sapiens
ccgaggtcaactcgt

SEQ ID NO: 99133 - DNA, 15 bp, Homo sapiens
accgaggtcaactcg

SEQ ID NO: 99134 - DNA, 15 bp, Homo sapiens
gaccgaggtcaactc

SEQ ID NO: 99135 - DNA, 15 bp, Homo sapiens
tgaccgaggtcaact

SEQ ID NO: 99136 - DNA, 15 bp, Homo sapiens
gtgaccgaggtcaac

SEQ ID NO: 99137 - DNA, 15 bp, Homo sapiens
tgtgaccgaggtcaa

SEQ ID NO: 99138 - DNA, 15 bp, Homo sapiens
ttgtgaccgaggtca

SEQ ID NO: 99139 - DNA, 15 bp, Homo sapiens
tttgtgaccgaggtc

SEQ ID NO: 99140 - DNA, 15 bp, Homo sapiens
ttttgtgaccgaggt

SEQ ID NO: 99141 - DNA, 15 bp, Homo sapiens
cttttgtgaccgagg

SEQ ID NO: 99142 - DNA, 15 bp, Homo sapiens
gcttttgtgaccgag

SEQ ID NO: 99143 - DNA, 15 bp, Homo sapiens
tgcttttgtgaccga

SEQ ID NO: 99144 - DNA, 15 bp, Homo sapiens
ctgcttttgtgaccg

SEQ ID NO: 99145 - DNA, 15 bp, Homo sapiens
actgcttttgtgacc

SEQ ID NO: 99146 - DNA, 15 bp, Homo sapiens
aactgcttttgtgac

SEQ ID NO: 99147 - DNA, 15 bp, Homo sapiens
aaactgcttttgtga

SEQ ID NO: 99148 - DNA, 15 bp, Homo sapiens
aaaactgcttttgtg

SEQ ID NO: 99149 - DNA, 15 bp, Homo sapiens
taaaactgcttttgt

SEQ ID NO: 99150 - DNA, 15 bp, Homo sapiens
gtaaaactgcttttg

SEQ ID NO: 99151 - DNA, 15 bp, Homo sapiens
agtaaaactgctttt

SEQ ID NO: 99152 - DNA, 15 bp, Homo sapiens
tagtaaaactgcttt

SEQ ID NO: 99153 - DNA, 15 bp, Homo sapiens
atagtaaaactgctt

SEQ ID NO: 99154 - DNA, 15 bp, Homo sapiens
gatagtaaaactgct

SEQ ID NO: 99155 - DNA, 15 bp, Homo sapiens
cgatagtaaaactgc

SEQ ID NO: 99156 - DNA, 15 bp, Homo sapiens
tcgatagtaaaactg

SEQ ID NO: 99157 - DNA, 15 bp, Homo sapiens
ttcgatagtaaaact

SEQ ID NO: 99158 - DNA, 15 bp, Homo sapiens
attcgatagtaaaac

SEQ ID NO: 99159 - DNA, 15 bp, Homo sapiens
gattcgatagtaaaa

SEQ ID NO: 99160 - DNA, 15 bp, Homo sapiens
tgattcgatagtaaa

SEQ ID NO: 99161 - DNA, 15 bp, Homo sapiens
ttgattcgatagtaa

SEQ ID NO: 99162 - DNA, 15 bp, Homo sapiens
attgattcgatagta

SEQ ID NO: 99163 - DNA, 15 bp, Homo sapiens
gattgattcgatagt

SEQ ID NO: 99164 - DNA, 15 bp, Homo sapiens
cgattgattcgatag

SEQ ID NO: 99165 - DNA, 15 bp, Homo sapiens
gcgattgattcgata

SEQ ID NO: 99166 - DNA, 15 bp, Homo sapiens
agcgattgattcgat

SEQ ID NO: 99167 - DNA, 15 bp, Homo sapiens
cagcgattgattcga

SEQ ID NO: 99168 - DNA, 15 bp, Homo sapiens
acagcgattgattcg

SEQ ID NO: 99169 - DNA, 15 bp, Homo sapiens
aacagcgattgattc

SEQ ID NO: 99170 - DNA, 15 bp, Homo sapiens
taacagcgattgatt

SEQ ID NO: 99171 - DNA, 15 bp, Homo sapiens
ataacagcgattgat

SEQ ID NO: 99172 - DNA, 15 bp, Homo sapiens
aataacagcgattga

SEQ ID NO: 99173 - DNA, 15 bp, Homo sapiens
aaataacagcgattg

SEQ ID NO: 99174 - DNA, 15 bp, Homo sapiens
aaaataacagcgatt

SEQ ID NO: 99175 - DNA, 15 bp, Homo sapiens
aaaaataacagcgat

SEQ ID NO: 99176 - DNA, 15 bp, Homo sapiens
aaaaaataacagcga

SEQ ID NO: 99177 - DNA, 15 bp, Homo sapiens
aaaaaaataacagcg

SEQ ID NO: 99178 - DNA, 15 bp, Homo sapiens
aaaaaaaataacagc

SEQ ID NO: 99179 - DNA, 15 bp, Homo sapiens
taaaaaaaataacag

SEQ ID NO: 99180 - DNA, 15 bp, Homo sapiens
ttaaaaaaaataaca

SEQ ID NO: 99181 - DNA, 15 bp, Homo sapiens
attaaaaaaaataac

SEQ ID NO: 99182 - DNA, 15 bp, Homo sapiens
cattaaaaaaaataa

SEQ ID NO: 99183 - DNA, 15 bp, Homo sapiens
acattaaaaaaaata

SEQ ID NO: 99184 - DNA, 15 bp, Homo sapiens
tacattaaaaaaaat

SEQ ID NO: 99185 - DNA, 15 bp, Homo sapiens
ttacattaaaaaaaa

SEQ ID NO: 99186 - DNA, 15 bp, Homo sapiens
attacattaaaaaaa

SEQ ID NO: 99187 - DNA, 15 bp, Homo sapiens
aattacattaaaaaa

SEQ ID NO: 99188 - DNA, 15 bp, Homo sapiens
aaattacattaaaaa

SEQ ID NO: 99189 - DNA, 15 bp, Homo sapiens
caaattacattaaaa

SEQ ID NO: 99190 - DNA, 15 bp, Homo sapiens
acaaattacattaaa

SEQ ID NO: 99191 - DNA, 15 bp, Homo sapiens
tacaaattacattaa

SEQ ID NO: 99192 - DNA, 15 bp, Homo sapiens
gtacaaattacatta

SEQ ID NO: 99193 - DNA, 15 bp, Homo sapiens
tgtacaaattacatt

SEQ ID NO: 99194 - DNA, 15 bp, Homo sapiens
atgtacaaattacat

SEQ ID NO: 99195 - DNA, 15 bp, Homo sapiens
gatgtacaaattaca

SEQ ID NO: 99196 - DNA, 15 bp, Homo sapiens
agatgtacaaattac

SEQ ID NO: 99197 - DNA, 15 bp, Homo sapiens
aagatgtacaaatta

SEQ ID NO: 99198 - DNA, 15 bp, Homo sapiens
aaagatgtacaaatt

SEQ ID NO: 99199 - DNA, 15 bp, Homo sapiens
aaaagatgtacaaat

SEQ ID NO: 99200 - DNA, 15 bp, Homo sapiens
aaaaagatgtacaaa

SEQ ID NO: 99201 - DNA, 15 bp, Homo sapiens
aaaaaagatgtacaa

SEQ ID NO: 99202 - DNA, 15 bp, Homo sapiens
gaaaaaagatgtaca

SEQ ID NO: 99203 - DNA, 15 bp, Homo sapiens
tgaaaaaagatgtac

SEQ ID NO: 99204 - DNA, 15 bp, Homo sapiens
ttgaaaaaagatgta

SEQ ID NO: 99205 - DNA, 15 bp, Homo sapiens
attgaaaaaagatgt

SEQ ID NO: 99206 - DNA, 15 bp, Homo sapiens
gattgaaaaaagatg

SEQ ID NO: 99207 - DNA, 15 bp, Homo sapiens
agattgaaaaaagat

SEQ ID NO: 99208 - DNA, 15 bp, Homo sapiens
cagattgaaaaaaga

SEQ ID NO: 99209 - DNA, 15 bp, Homo sapiens
acagattgaaaaaag

SEQ ID NO: 99210 - DNA, 15 bp, Homo sapiens
tacagattgaaaaaa

SEQ ID NO: 99211 - DNA, 15 bp, Homo sapiens
gtacagattgaaaaa

SEQ ID NO: 99212 - DNA, 15 bp, Homo sapiens
tgtacagattgaaaa

SEQ ID NO: 99213 - DNA, 15 bp, Homo sapiens
atgtacagattgaaa

SEQ ID NO: 99214 - DNA, 15 bp, Homo sapiens
aatgtacagattgaa

SEQ ID NO: 99215 - DNA, 15 bp, Homo sapiens
aaatgtacagattga

SEQ ID NO: 99216 - DNA, 15 bp, Homo sapiens
caaatgtacagattg

SEQ ID NO: 99217 - DNA, 15 bp, Homo sapiens
ccaaatgtacagatt

SEQ ID NO: 99218 - DNA, 15 bp, Homo sapiens
cccaaatgtacagat

SEQ ID NO: 99219 - DNA, 15 bp, Homo sapiens
gcccaaatgtacaga

SEQ ID NO: 99220 - DNA, 15 bp, Homo sapiens
agcccaaatgtacag

SEQ ID NO: 99221 - DNA, 15 bp, Homo sapiens
cagcccaaatgtaca

SEQ ID NO: 99222 - DNA, 15 bp, Homo sapiens
acagcccaaatgtac

SEQ ID NO: 99223 - DNA, 15 bp, Homo sapiens
gacagcccaaatgta

SEQ ID NO: 99224 - DNA, 15 bp, Homo sapiens
agacagcccaaatgt

SEQ ID NO: 99225 - DNA, 15 bp, Homo sapiens
cagacagcccaaatg

SEQ ID NO: 99226 - DNA, 15 bp, Homo sapiens
acagacagcccaaat

SEQ ID NO: 99227 - DNA, 15 bp, Homo sapiens
tacagacagcccaaa

SEQ ID NO: 99228 - DNA, 15 bp, Homo sapiens
atacagacagcccaa

SEQ ID NO: 99229 - DNA, 15 bp, Homo sapiens
catacagacagccca

SEQ ID NO: 99230 - DNA, 15 bp, Homo sapiens
acatacagacagccc

SEQ ID NO: 99231 - DNA, 15 bp, Homo sapiens
aacatacagacagcc

SEQ ID NO: 99232 - DNA, 15 bp, Homo sapiens
aaacatacagacagc

SEQ ID NO: 99233 - DNA, 15 bp, Homo sapiens
aaaacatacagacag

SEQ ID NO: 99234 - DNA, 15 bp, Homo sapiens
aaaaacatacagaca

SEQ ID NO: 99235 - DNA, 15 bp, Homo sapiens
taaaaacatacagac

SEQ ID NO: 99236 - DNA, 15 bp, Homo sapiens
ataaaaacatacaga

SEQ ID NO: 99237 - DNA, 15 bp, Homo sapiens
tataaaaacatacag

SEQ ID NO: 99238 - DNA, 15 bp, Homo sapiens
ctataaaaacataca

SEQ ID NO: 99239 - DNA, 15 bp, Homo sapiens
gctataaaaacatac

SEQ ID NO: 99240 - DNA, 15 bp, Homo sapiens
agctataaaaacata

SEQ ID NO: 99241 - DNA, 15 bp, Homo sapiens
cagctataaaaacat

SEQ ID NO: 99242 - DNA, 15 bp, Homo sapiens
ccagctataaaaaca

SEQ ID NO: 99243 - DNA, 15 bp, Homo sapiens
accagctataaaaac

SEQ ID NO: 99244 - DNA, 15 bp, Homo sapiens
aaccagctataaaaa

SEQ ID NO: 99245 - DNA, 15 bp, Homo sapiens
aaaccagctataaaa

SEQ ID NO: 99246 - DNA, 15 bp, Homo sapiens
aaaaccagctataaa

SEQ ID NO: 99247 - DNA, 15 bp, Homo sapiens
aaaaaccagctataa

SEQ ID NO: 99248 - DNA, 15 bp, Homo sapiens
taaaaaccagctata

SEQ ID NO: 99249 - DNA, 15 bp, Homo sapiens
ttaaaaaccagctat

SEQ ID NO: 99250 - DNA, 15 bp, Homo sapiens
tttaaaaaccagcta

SEQ ID NO: 99251 - DNA, 15 bp, Homo sapiens
ttttaaaaaccagct

SEQ ID NO: 99252 - DNA, 15 bp, Homo sapiens
tttttaaaaaccagc

SEQ ID NO: 99253 - DNA, 15 bp, Homo sapiens
ctttttaaaaaccag

SEQ ID NO: 99254 - DNA, 15 bp, Homo sapiens
gctttttaaaaacca

SEQ ID NO: 99255 - DNA, 15 bp, Homo sapiens
tgctttttaaaaacc

SEQ ID NO: 99256 - DNA, 15 bp, Homo sapiens
atgctttttaaaaac

SEQ ID NO: 99257 - DNA, 15 bp, Homo sapiens
tatgctttttaaaaa

SEQ ID NO: 99258 - DNA, 15 bp, Homo sapiens
ttatgctttttaaaa

SEQ ID NO: 99259 - DNA, 15 bp, Homo sapiens
attatgctttttaaa

SEQ ID NO: 99260 - DNA, 15 bp, Homo sapiens
tattatgctttttaa

SEQ ID NO: 99261 - DNA, 15 bp, Homo sapiens
atattatgcttttta

SEQ ID NO: 99262 - DNA, 15 bp, Homo sapiens
catattatgcttttt

SEQ ID NO: 99263 - DNA, 15 bp, Homo sapiens
gcatattatgctttt

SEQ ID NO: 99264 - DNA, 15 bp, Homo sapiens
ggcatattatgcttt

SEQ ID NO: 99265 - DNA, 15 bp, Homo sapiens
aggcatattatgctt

SEQ ID NO: 99266 - DNA, 15 bp, Homo sapiens
taggcatattatgct

SEQ ID NO: 99267 - DNA, 15 bp, Homo sapiens
ataggcatattatgc

SEQ ID NO: 99268 - DNA, 15 bp, Homo sapiens
tataggcatattatg

SEQ ID NO: 99269 - DNA, 15 bp, Homo sapiens
ctataggcatattat

SEQ ID NO: 99270 - DNA, 15 bp, Homo sapiens
gctataggcatatta

SEQ ID NO: 99271 - DNA, 15 bp, Homo sapiens
agctataggcatatt

SEQ ID NO: 99272 - DNA, 15 bp, Homo sapiens
cagctataggcatat

SEQ ID NO: 99273 - DNA, 15 bp, Homo sapiens
tcagctataggcata

SEQ ID NO: 99274 - DNA, 15 bp, Homo sapiens
ttcagctataggcat

SEQ ID NO: 99275 - DNA, 15 bp, Homo sapiens
tttcagctataggca

SEQ ID NO: 99276 - DNA, 15 bp, Homo sapiens
ttttcagctataggc

SEQ ID NO: 99277 - DNA, 15 bp, Homo sapiens
cttttcagctatagg

SEQ ID NO: 99278 - DNA, 15 bp, Homo sapiens
ccttttcagctatag

SEQ ID NO: 99279 - DNA, 15 bp, Homo sapiens
tccttttcagctata

SEQ ID NO: 99280 - DNA, 15 bp, Homo sapiens
ttccttttcagctat

SEQ ID NO: 99281 - DNA, 15 bp, Homo sapiens
tttccttttcagcta

SEQ ID NO: 99282 - DNA, 15 bp, Homo sapiens
gtttccttttcagct

SEQ ID NO: 99283 - DNA, 15 bp, Homo sapiens
ctgtttccttttcag

SEQ ID NO: 99284 - DNA, 15 bp, Homo sapiens
cctgtttccttttca

SEQ ID NO: 99285 - DNA, 15 bp, Homo sapiens
ccctgtttccttttc

SEQ ID NO: 99286 - DNA, 15 bp, Homo sapiens
gccctgtttcctttt

SEQ ID NO: 99287 - DNA, 15 bp, Homo sapiens
agccctgtttccttt

SEQ ID NO: 99288 - DNA, 15 bp, Homo sapiens
cagccctgtttcctt

SEQ ID NO: 99289 - DNA, 15 bp, Homo sapiens
acagccctgtttcct

SEQ ID NO: 99290 - DNA, 15 bp, Homo sapiens
aacagccctgtttcc

SEQ ID NO: 99291 - DNA, 15 bp, Homo sapiens
aaacagccctgtttc

SEQ ID NO: 99292 - DNA, 15 bp, Homo sapiens
taaacagccctgttt

SEQ ID NO: 99293 - DNA, 15 bp, Homo sapiens
ttaaacagccctgtt

SEQ ID NO: 99294 - DNA, 15 bp, Homo sapiens
cttaaacagccctgt

SEQ ID NO: 99295 - DNA, 15 bp, Homo sapiens
acttaaacagccctg

SEQ ID NO: 99296 - DNA, 15 bp, Homo sapiens
gacttaaacagccct

SEQ ID NO: 99297 - DNA, 15 bp, Homo sapiens
tgacttaaacagccc

SEQ ID NO: 99298 - DNA, 15 bp, Homo sapiens
gtgacttaaacagcc

SEQ ID NO: 99299 - DNA, 15 bp, Homo sapiens
agtgacttaaacagc

SEQ ID NO: 99300 - DNA, 15 bp, Homo sapiens
cagtgacttaaacag

SEQ ID NO: 99301 - DNA, 15 bp, Homo sapiens
tcagtgacttaaaca

SEQ ID NO: 99302 - DNA, 15 bp, Homo sapiens
gtcagtgacttaaac

SEQ ID NO: 99303 - DNA, 15 bp, Homo sapiens
agtcagtgacttaaa

SEQ ID NO: 99304 - DNA, 15 bp, Homo sapiens
aagtcagtgacttaa

SEQ ID NO: 99305 - DNA, 15 bp, Homo sapiens
taagtcagtgactta

SEQ ID NO: 99306 - DNA, 15 bp, Homo sapiens
ataagtcagtgactt

SEQ ID NO: 99307 - DNA, 15 bp, Homo sapiens
cataagtcagtgact

SEQ ID NO: 99308 - DNA, 15 bp, Homo sapiens
tcataagtcagtgac

SEQ ID NO: 99309 - DNA, 15 bp, Homo sapiens
ctcataagtcagtga

SEQ ID NO: 99310 - DNA, 15 bp, Homo sapiens
tctcataagtcagtg

SEQ ID NO: 99311 - DNA, 15 bp, Homo sapiens
ttctcataagtcagt

SEQ ID NO: 99312 - DNA, 15 bp, Homo sapiens
tttctcataagtcag

SEQ ID NO: 99313 - DNA, 15 bp, Homo sapiens
ctttctcataagtca

SEQ ID NO: 99314 - DNA, 15 bp, Homo sapiens
gctttctcataagtc

SEQ ID NO: 99315 - DNA, 15 bp, Homo sapiens
tgctttctcataagt

SEQ ID NO: 99316 - DNA, 15 bp, Homo sapiens
ttgctttctcataag

SEQ ID NO: 99317 - DNA, 15 bp, Homo sapiens
tttgctttctcataa

SEQ ID NO: 99318 - DNA, 15 bp, Homo sapiens
ctttgctttctcata

SEQ ID NO: 99319 - DNA, 15 bp, Homo sapiens
gctttgctttctcat

SEQ ID NO: 99320 - DNA, 15 bp, Homo sapiens
tgctttgctttctca

SEQ ID NO: 99321 - DNA, 15 bp, Homo sapiens
gtgctttgctttctc

SEQ ID NO: 99322 - DNA, 15 bp, Homo sapiens
agtgctttgctttct

SEQ ID NO: 99323 - DNA, 15 bp, Homo sapiens
cagtgctttgctttc

SEQ ID NO: 99324 - DNA, 15 bp, Homo sapiens
ccagtgctttgcttt

SEQ ID NO: 99325 - DNA, 15 bp, Homo sapiens
accagtgctttgctt

SEQ ID NO: 99326 - DNA, 15 bp, Homo sapiens
taccagtgctttgct

SEQ ID NO: 99327 - DNA, 15 bp, Homo sapiens
gtaccagtgctttgc

SEQ ID NO: 99328 - DNA, 15 bp, Homo sapiens
tgtaccagtgctttg

SEQ ID NO: 99329 - DNA, 15 bp, Homo sapiens
ctgtaccagtgcttt

SEQ ID NO: 99330 - DNA, 15 bp, Homo sapiens
actgtaccagtgctt

SEQ ID NO: 99331 - DNA, 15 bp, Homo sapiens
aactgtaccagtgct

SEQ ID NO: 99332 - DNA, 15 bp, Homo sapiens
taactgtaccagtgc

SEQ ID NO: 99333 - DNA, 15 bp, Homo sapiens
ataactgtaccagtg

SEQ ID NO: 99334 - DNA, 15 bp, Homo sapiens
aataactgtaccagt

SEQ ID NO: 99335 - DNA, 15 bp, Homo sapiens
aaataactgtaccag

SEQ ID NO: 99336 - DNA, 15 bp, Homo sapiens
taaataactgtacca

SEQ ID NO: 99337 - DNA, 15 bp, Homo sapiens
ttaaataactgtacc

SEQ ID NO: 99338 - DNA, 15 bp, Homo sapiens
gttaaataactgtac

SEQ ID NO: 99339 - DNA, 15 bp, Homo sapiens
tgttaaataactgta

SEQ ID NO: 99340 - DNA, 15 bp, Homo sapiens
ctgttaaataactgt

SEQ ID NO: 99341 - DNA, 15 bp, Homo sapiens
cctgttaaataactg

SEQ ID NO: 99342 - DNA, 15 bp, Homo sapiens
gcctgttaaataact

SEQ ID NO: 99343 - DNA, 15 bp, Homo sapiens
tgcctgttaaataac

SEQ ID NO: 99344 - DNA, 15 bp, Homo sapiens
atgcctgttaaataa

SEQ ID NO: 99345 - DNA, 15 bp, Homo sapiens
tatgcctgttaaata

SEQ ID NO: 99346 - DNA, 15 bp, Homo sapiens
gtatgcctgttaaat

SEQ ID NO: 99347 - DNA, 15 bp, Homo sapiens
tgtatgcctgttaaa

SEQ ID NO: 99348 - DNA, 15 bp, Homo sapiens
gtgtatgcctgttaa

SEQ ID NO: 99349 - DNA, 15 bp, Homo sapiens
tgtgtatgcctgtta

SEQ ID NO: 99350 - DNA, 15 bp, Homo sapiens
ttgtgtatgcctgtt

SEQ ID NO: 99351 - DNA, 15 bp, Homo sapiens
cttgtgtatgcctgt

SEQ ID NO: 99352 - DNA, 15 bp, Homo sapiens
gcttgtgtatgcctg

SEQ ID NO: 99353 - DNA, 15 bp, Homo sapiens
tgcttgtgtatgcct

SEQ ID NO: 99354 - DNA, 15 bp, Homo sapiens
ctgcttgtgtatgcc

SEQ ID NO: 99355 - DNA, 15 bp, Homo sapiens
cctgcttgtgtatgc

SEQ ID NO: 99356 - DNA, 15 bp, Homo sapiens
ccctgcttgtgtatg

SEQ ID NO: 99357 - DNA, 15 bp, Homo sapiens
tccctgcttgtgtat

SEQ ID NO: 99358 - DNA, 15 bp, Homo sapiens
ttccctgcttgtgta

SEQ ID NO: 99359 - DNA, 15 bp, Homo sapiens
tttccctgcttgtgt

SEQ ID NO: 99360 - DNA, 15 bp, Homo sapiens
ttttccctgcttgtg

SEQ ID NO: 99361 - DNA, 15 bp, Homo sapiens
cttttccctgcttgt

SEQ ID NO: 99362 - DNA, 15 bp, Homo sapiens
tcttttccctgcttg

SEQ ID NO: 99363 - DNA, 15 bp, Homo sapiens
atcttttccctgctt

SEQ ID NO: 99364 - DNA, 15 bp, Homo sapiens
tatcttttccctgct

SEQ ID NO: 99365 - DNA, 15 bp, Homo sapiens
ttatcttttccctgc

SEQ ID NO: 99366 - DNA, 15 bp, Homo sapiens
attatcttttccctg

SEQ ID NO: 99367 - DNA, 15 bp, Homo sapiens
gattatcttttccct

SEQ ID NO: 99368 - DNA, 15 bp, Homo sapiens
ggattatcttttccc

SEQ ID NO: 99369 - DNA, 15 bp, Homo sapiens
tggattatcttttcc

SEQ ID NO: 99370 - DNA, 15 bp, Homo sapiens
atggattatcttttc

SEQ ID NO: 99371 - DNA, 15 bp, Homo sapiens
aatggattatctttt

SEQ ID NO: 99372 - DNA, 15 bp, Homo sapiens
aaatggattatcttt

SEQ ID NO: 99373 - DNA, 15 bp, Homo sapiens
taaatggattatctt

SEQ ID NO: 99374 - DNA, 15 bp, Homo sapiens
ctaaatggattatct

SEQ ID NO: 99375 - DNA, 15 bp, Homo sapiens
tctaaatggattatc

SEQ ID NO: 99376 - DNA, 15 bp, Homo sapiens
atctaaatggattat

SEQ ID NO: 99377 - DNA, 15 bp, Homo sapiens
gatctaaatggatta

SEQ ID NO: 99378 - DNA, 15 bp, Homo sapiens
agatctaaatggatt

SEQ ID NO: 99379 - DNA, 15 bp, Homo sapiens
aagatctaaatggat

SEQ ID NO: 99380 - DNA, 15 bp, Homo sapiens
aaagatctaaatgga

SEQ ID NO: 99381 - DNA, 15 bp, Homo sapiens
taaagatctaaatgg

SEQ ID NO: 99382 - DNA, 15 bp, Homo sapiens
ttaaagatctaaatg

SEQ ID NO: 99383 - DNA, 15 bp, Homo sapiens
attaaagatctaaat

SEQ ID NO: 99384 - DNA, 15 bp, Homo sapiens
cattaaagatctaaa

SEQ ID NO: 99385 - DNA, 15 bp, Homo sapiens
gcattaaagatctaa

SEQ ID NO: 99386 - DNA, 15 bp, Homo sapiens
agcattaaagatcta

SEQ ID NO: 99387 - DNA, 15 bp, Homo sapiens
aagcattaaagatct

SEQ ID NO: 99388 - DNA, 15 bp, Homo sapiens
aaagcattaaagatc

SEQ ID NO: 99389 - DNA, 15 bp, Homo sapiens
caaagcattaaagat

SEQ ID NO: 99390 - DNA, 15 bp, Homo sapiens
ccaaagcattaaaga

SEQ ID NO: 99391 - DNA, 15 bp, Homo sapiens
tccaaagcattaaag

SEQ ID NO: 99392 - DNA, 15 bp, Homo sapiens
ttccaaagcattaaa

SEQ ID NO: 99393 - DNA, 15 bp, Homo sapiens
tttccaaagcattaa

SEQ ID NO: 99394 - DNA, 15 bp, Homo sapiens
atttccaaagcatta

SEQ ID NO: 99395 - DNA, 15 bp, Homo sapiens
catttccaaagcatt

SEQ ID NO: 99396 - DNA, 15 bp, Homo sapiens
gcatttccaaagcat

SEQ ID NO: 99397 - DNA, 15 bp, Homo sapiens
cgcatttccaaagca

SEQ ID NO: 99398 - DNA, 15 bp, Homo sapiens
acgcatttccaaagc

SEQ ID NO: 99399 - DNA, 15 bp, Homo sapiens
cacgcatttccaaag

SEQ ID NO: 99400 - DNA, 15 bp, Homo sapiens
acacgcatttccaaa

SEQ ID NO: 99401 - DNA, 15 bp, Homo sapiens
tacacgcatttccaa

SEQ ID NO: 99402 - DNA, 15 bp, Homo sapiens
ttacacgcatttcca

SEQ ID NO: 99403 - DNA, 15 bp, Homo sapiens
gttacacgcatttcc

SEQ ID NO: 99404 - DNA, 15 bp, Homo sapiens
tgttacacgcatttc

SEQ ID NO: 99405 - DNA, 15 bp, Homo sapiens
ctgttacacgcattt

SEQ ID NO: 99406 - DNA, 15 bp, Homo sapiens
actgttacacgcatt

SEQ ID NO: 99407 - DNA, 15 bp, Homo sapiens
tactgttacacgcat

SEQ ID NO: 99408 - DNA, 15 bp, Homo sapiens
gtactgttacacgca

SEQ ID NO: 99409 - DNA, 15 bp, Homo sapiens
agtactgttacacgc

SEQ ID NO: 99410 - DNA, 15 bp, Homo sapiens
cagtactgttacacg

SEQ ID NO: 99411 - DNA, 15 bp, Homo sapiens
gcagtactgttacac

SEQ ID NO: 99412 - DNA, 15 bp, Homo sapiens
tgcagtactgttaca

SEQ ID NO: 99413 - DNA, 15 bp, Homo sapiens
ttgcagtactgttac

SEQ ID NO: 99414 - DNA, 15 bp, Homo sapiens
attgcagtactgtta

SEQ ID NO: 99415 - DNA, 15 bp, Homo sapiens
tattgcagtactgtt

SEQ ID NO: 99416 - DNA, 15 bp, Homo sapiens
ttattgcagtactgt

SEQ ID NO: 99417 - DNA, 15 bp, Homo sapiens
attattgcagtactg

SEQ ID NO: 99418 - DNA, 15 bp, Homo sapiens
gattattgcagtact

SEQ ID NO: 99419 - DNA, 15 bp, Homo sapiens
tgattattgcagtac

SEQ ID NO: 99420 - DNA, 15 bp, Homo sapiens
gtgattattgcagta

SEQ ID NO: 99421 - DNA, 15 bp, Homo sapiens
tgtgattattgcagt

SEQ ID NO: 99422 - DNA, 15 bp, Homo sapiens
ctgtgattattgcag

SEQ ID NO: 99423 - DNA, 15 bp, Homo sapiens
gctgtgattattgca

SEQ ID NO: 99424 - DNA, 15 bp, Homo sapiens
agctgtgattattgc

SEQ ID NO: 99425 - DNA, 15 bp, Homo sapiens
gagctgtgattattg

SEQ ID NO: 99426 - DNA, 15 bp, Homo sapiens
agagctgtgattatt

SEQ ID NO: 99427 - DNA, 15 bp, Homo sapiens
cagagctgtgattat

SEQ ID NO: 99428 - DNA, 15 bp, Homo sapiens
ccagagctgtgatta

SEQ ID NO: 99429 - DNA, 15 bp, Homo sapiens
cccagagctgtgatt

SEQ ID NO: 99430 - DNA, 15 bp, Homo sapiens
tcccagagctgtgat

SEQ ID NO: 99431 - DNA, 15 bp, Homo sapiens
ttcccagagctgtga

SEQ ID NO: 99432 - DNA, 15 bp, Homo sapiens
tttcccagagctgtg

SEQ ID NO: 99433 - DNA, 15 bp, Homo sapiens
ttttcccagagctgt

SEQ ID NO: 99434 - DNA, 15 bp, Homo sapiens
tttttcccagagctg

SEQ ID NO: 99435 - DNA, 15 bp, Homo sapiens
gtttttcccagagct

SEQ ID NO: 99436 - DNA, 15 bp, Homo sapiens
tgtttttcccagagc

SEQ ID NO: 99437 - DNA, 15 bp, Homo sapiens
ttgtttttcccagag

SEQ ID NO: 99438 - DNA, 15 bp, Homo sapiens
gttgtttttcccaga

SEQ ID NO: 99439 - DNA, 15 bp, Homo sapiens
cgttgtttttcccag

SEQ ID NO: 99440 - DNA, 15 bp, Homo sapiens
tcgttgtttttccca

SEQ ID NO: 99441 - DNA, 15 bp, Homo sapiens
ttcgttgtttttccc

SEQ ID NO: 99442 - DNA, 15 bp, Homo sapiens
tttcgttgtttttcc

SEQ ID NO: 99443 - DNA, 15 bp, Homo sapiens
gtttcgttgtttttc

SEQ ID NO: 99444 - DNA, 15 bp, Homo sapiens
agtttcgttgttttt

SEQ ID NO: 99445 - DNA, 15 bp, Homo sapiens
aagtttcgttgtttt

SEQ ID NO: 99446 - DNA, 15 bp, Homo sapiens
aaagtttcgttgttt

SEQ ID NO: 99447 - DNA, 15 bp, Homo sapiens
gaaagtttcgttgtt

SEQ ID NO: 99448 - DNA, 15 bp, Homo sapiens
ggaaagtttcgttgt

SEQ ID NO: 99449 - DNA, 15 bp, Homo sapiens
gggaaagtttcgttg

SEQ ID NO: 99450 - DNA, 15 bp, Homo sapiens
agggaaagtttcgtt

SEQ ID NO: 99451 - DNA, 15 bp, Homo sapiens
aagggaaagtttcgt

SEQ ID NO: 99452 - DNA, 15 bp, Homo sapiens
caagggaaagtttcg

SEQ ID NO: 99453 - DNA, 15 bp, Homo sapiens
acaagggaaagtttc

SEQ ID NO: 99454 - DNA, 15 bp, Homo sapiens
cacaagggaaagttt

SEQ ID NO: 99455 - DNA, 15 bp, Homo sapiens
ccacaagggaaagtt

SEQ ID NO: 99456 - DNA, 15 bp, Homo sapiens
tccacaagggaaagt

SEQ ID NO: 99457 - DNA, 15 bp, Homo sapiens
ctccacaagggaaag

SEQ ID NO: 99458 - DNA, 15 bp, Homo sapiens
tctccacaagggaaa

SEQ ID NO: 99459 - DNA, 15 bp, Homo sapiens
ctctccacaagggaa

SEQ ID NO: 99460 - DNA, 15 bp, Homo sapiens
cctctccacaaggga

SEQ ID NO: 99461 - DNA, 15 bp, Homo sapiens
tcctctccacaaggg

SEQ ID NO: 99462 - DNA, 15 bp, Homo sapiens
ctcctctccacaagg

SEQ ID NO: 99463 - DNA, 15 bp, Homo sapiens
cctcctctccacaag

SEQ ID NO: 99464 - DNA, 15 bp, Homo sapiens
ccctcctctccacaa

SEQ ID NO: 99465 - DNA, 15 bp, Homo sapiens
tccctcctctccaca

SEQ ID NO: 99466 - DNA, 15 bp, Homo sapiens
atccctcctctccac

SEQ ID NO: 99467 - DNA, 15 bp, Homo sapiens
aatccctcctctcca

SEQ ID NO: 99468 - DNA, 15 bp, Homo sapiens
aaatccctcctctcc

SEQ ID NO: 99469 - DNA, 15 bp, Homo sapiens
aaaatccctcctctc

SEQ ID NO: 99470 - DNA, 15 bp, Homo sapiens
gaaaatccctcctct

SEQ ID NO: 99471 - DNA, 15 bp, Homo sapiens
ggaaaatccctcctc

SEQ ID NO: 99472 - DNA, 15 bp, Homo sapiens
aggaaaatccctcct

SEQ ID NO: 99473 - DNA, 15 bp, Homo sapiens
caggaaaatccctcc

SEQ ID NO: 99474 - DNA, 15 bp, Homo sapiens
gcaggaaaatccctc

SEQ ID NO: 99475 - DNA, 15 bp, Homo sapiens
agcaggaaaatccct

SEQ ID NO: 99476 - DNA, 15 bp, Homo sapiens
gagcaggaaaatccc

SEQ ID NO: 99477 - DNA, 15 bp, Homo sapiens
agagcaggaaaatcc

SEQ ID NO: 99478 - DNA, 15 bp, Homo sapiens
tagagcaggaaaatc

SEQ ID NO: 99479 - DNA, 15 bp, Homo sapiens
atagagcaggaaaat

SEQ ID NO: 99480 - DNA, 15 bp, Homo sapiens
tatagagcaggaaaa

SEQ ID NO: 99481 - DNA, 15 bp, Homo sapiens
atatagagcaggaaa

SEQ ID NO: 99482 - DNA, 15 bp, Homo sapiens
tatatagagcaggaa

SEQ ID NO: 99483 - DNA, 15 bp, Homo sapiens
ttatatagagcagga

SEQ ID NO: 99484 - DNA, 15 bp, Homo sapiens
cttatatagagcagg

SEQ ID NO: 99485 - DNA, 15 bp, Homo sapiens
gcttatatagagcag

SEQ ID NO: 99486 - DNA, 15 bp, Homo sapiens
tgcttatatagagca

SEQ ID NO: 99487 - DNA, 15 bp, Homo sapiens
ttgcttatatagagc

SEQ ID NO: 99488 - DNA, 15 bp, Homo sapiens
gttgcttatatagag

SEQ ID NO: 99489 - DNA, 15 bp, Homo sapiens
tgttgcttatataga

SEQ ID NO: 99490 - DNA, 15 bp, Homo sapiens
atgttgcttatatag

SEQ ID NO: 99491 - DNA, 15 bp, Homo sapiens
tatgttgcttatata

SEQ ID NO: 99492 - DNA, 15 bp, Homo sapiens
atatgttgcttatat

SEQ ID NO: 99493 - DNA, 15 bp, Homo sapiens
aatatgttgcttata

SEQ ID NO: 99494 - DNA, 15 bp, Homo sapiens
aaatatgttgcttat

SEQ ID NO: 99495 - DNA, 15 bp, Homo sapiens
aaaatatgttgctta

SEQ ID NO: 99496 - DNA, 15 bp, Homo sapiens
aaaaatatgttgctt

SEQ ID NO: 99497 - DNA, 15 bp, Homo sapiens
taaaaatatgttgct

SEQ ID NO: 99498 - DNA, 15 bp, Homo sapiens
ctaaaaatatgttgc

SEQ ID NO: 99499 - DNA, 15 bp, Homo sapiens
tctaaaaatatgttg

SEQ ID NO: 99500 - DNA, 15 bp, Homo sapiens
gtctaaaaatatgtt

SEQ ID NO: 99501 - DNA, 15 bp, Homo sapiens
tgtctaaaaatatgt

SEQ ID NO: 99502 - DNA, 15 bp, Homo sapiens
atgtctaaaaatatg

SEQ ID NO: 99503 - DNA, 15 bp, Homo sapiens
aatgtctaaaaatat

SEQ ID NO: 99504 - DNA, 15 bp, Homo sapiens
taatgtctaaaaata

SEQ ID NO: 99505 - DNA, 15 bp, Homo sapiens
ttaatgtctaaaaat

SEQ ID NO: 99506 - DNA, 15 bp, Homo sapiens
tttaatgtctaaaaa

SEQ ID NO: 99507 - DNA, 15 bp, Homo sapiens
ttttaatgtctaaaa

SEQ ID NO: 99508 - DNA, 15 bp, Homo sapiens
attttaatgtctaaa

SEQ ID NO: 99509 - DNA, 15 bp, Homo sapiens
tattttaatgtctaa

SEQ ID NO: 99510 - DNA, 15 bp, Homo sapiens
atattttaatgtcta

SEQ ID NO: 99511 - DNA, 15 bp, Homo sapiens
tatattttaatgtct

SEQ ID NO: 99512 - DNA, 15 bp, Homo sapiens
atatattttaatgtc

SEQ ID NO: 99513 - DNA, 15 bp, Homo sapiens
tatatattttaatgt

SEQ ID NO: 99514 - DNA, 15 bp, Homo sapiens
atatatattttaatg

SEQ ID NO: 99515 - DNA, 15 bp, Homo sapiens
tatatatattttaat

SEQ ID NO: 99516 - DNA, 15 bp, Homo sapiens
ttatatatattttaa

SEQ ID NO: 99517 - DNA, 15 bp, Homo sapiens
attatatatatttta

SEQ ID NO: 99518 - DNA, 15 bp, Homo sapiens
aattatatatatttt

SEQ ID NO: 99519 - DNA, 15 bp, Homo sapiens
aaattatatatattt

SEQ ID NO: 99520 - DNA, 15 bp, Homo sapiens
aaaattatatatatt

SEQ ID NO: 99521 - DNA, 15 bp, Homo sapiens
caaaattatatatat

SEQ ID NO: 99522 - DNA, 15 bp, Homo sapiens
gcaaaattatatata

SEQ ID NO: 99523 - DNA, 15 bp, Homo sapiens
tgcaaaattatatat

SEQ ID NO: 99524 - DNA, 15 bp, Homo sapiens
ctgcaaaattatata

SEQ ID NO: 99525 - DNA, 15 bp, Homo sapiens
cctgcaaaattatat

SEQ ID NO: 99526 - DNA, 15 bp, Homo sapiens
acctgcaaaattata

SEQ ID NO: 99527 - DNA, 15 bp, Homo sapiens
tacctgcaaaattat

SEQ ID NO: 99528 - DNA, 15 bp, Homo sapiens
ttacctgcaaaatta

SEQ ID NO: 99529 - DNA, 15 bp, Homo sapiens
attacctgcaaaatt

SEQ ID NO: 99530 - DNA, 15 bp, Homo sapiens
aattacctgcaaaat

SEQ ID NO: 99531 - DNA, 15 bp, Homo sapiens
caattacctgcaaaa

SEQ ID NO: 99532 - DNA, 15 bp, Homo sapiens
acaattacctgcaaa

SEQ ID NO: 99533 - DNA, 15 bp, Homo sapiens
aacaattacctgcaa

SEQ ID NO: 99534 - DNA, 15 bp, Homo sapiens
caacaattacctgca

SEQ ID NO: 99535 - DNA, 15 bp, Homo sapiens
tcaacaattacctgc

SEQ ID NO: 99536 - DNA, 15 bp, Homo sapiens
gtcaacaattacctg

SEQ ID NO: 99537 - DNA, 15 bp, Homo sapiens
agtcaacaattacct

SEQ ID NO: 99538 - DNA, 15 bp, Homo sapiens
aagtcaacaattacc

SEQ ID NO: 99539 - DNA, 15 bp, Homo sapiens
aaagtcaacaattac

SEQ ID NO: 99540 - DNA, 15 bp, Homo sapiens
aaaagtcaacaatta

SEQ ID NO: 99541 - DNA, 15 bp, Homo sapiens
aaaaagtcaacaatt

SEQ ID NO: 99542 - DNA, 15 bp, Homo sapiens
aaaaaagtcaacaat

SEQ ID NO: 99543 - DNA, 15 bp, Homo sapiens
taaaaaagtcaacaa

SEQ ID NO: 99544 - DNA, 15 bp, Homo sapiens
ttaaaaaagtcaaca

SEQ ID NO: 99545 - DNA, 15 bp, Homo sapiens
gttaaaaaagtcaac

SEQ ID NO: 99546 - DNA, 15 bp, Homo sapiens
agttaaaaaagtcaa

SEQ ID NO: 99547 - DNA, 15 bp, Homo sapiens
tagttaaaaaagtca

SEQ ID NO: 99548 - DNA, 15 bp, Homo sapiens
atagttaaaaaagtc

SEQ ID NO: 99549 - DNA, 15 bp, Homo sapiens
tatagttaaaaaagt

SEQ ID NO: 99550 - DNA, 15 bp, Homo sapiens
atatagttaaaaaag

SEQ ID NO: 99551 - DNA, 15 bp, Homo sapiens
aatatagttaaaaaa

SEQ ID NO: 99552 - DNA, 15 bp, Homo sapiens
taatatagttaaaaa

SEQ ID NO: 99553 - DNA, 15 bp, Homo sapiens
ttaatatagttaaaa

SEQ ID NO: 99554 - DNA, 15 bp, Homo sapiens
cttaatatagttaaa

SEQ ID NO: 99555 - DNA, 15 bp, Homo sapiens
acttaatatagttaa

SEQ ID NO: 99556 - DNA, 15 bp, Homo sapiens
cacttaatatagtta

SEQ ID NO: 99557 - DNA, 15 bp, Homo sapiens
acacttaatatagtt

SEQ ID NO: 99558 - DNA, 15 bp, Homo sapiens
aacacttaatatagt

SEQ ID NO: 99559 - DNA, 15 bp, Homo sapiens
taacacttaatatag

SEQ ID NO: 99560 - DNA, 15 bp, Homo sapiens
ttaacacttaatata

SEQ ID NO: 99561 - DNA, 15 bp, Homo sapiens
cttaacacttaatat

SEQ ID NO: 99562 - DNA, 15 bp, Homo sapiens
gcttaacacttaata

SEQ ID NO: 99563 - DNA, 15 bp, Homo sapiens
agcttaacacttaat

SEQ ID NO: 99564 - DNA, 15 bp, Homo sapiens
cagcttaacacttaa

SEQ ID NO: 99565 - DNA, 15 bp, Homo sapiens
tcagcttaacactta

SEQ ID NO: 99566 - DNA, 15 bp, Homo sapiens
gtcagcttaacactt

SEQ ID NO: 99567 - DNA, 15 bp, Homo sapiens
tgtcagcttaacact

SEQ ID NO: 99568 - DNA, 15 bp, Homo sapiens
ttgtcagcttaacac

SEQ ID NO: 99569 - DNA, 15 bp, Homo sapiens
gttgtcagcttaaca

SEQ ID NO: 99570 - DNA, 15 bp, Homo sapiens
agttgtcagcttaac

SEQ ID NO: 99571 - DNA, 15 bp, Homo sapiens
cagttgtcagcttaa

SEQ ID NO: 99572 - DNA, 15 bp, Homo sapiens
acagttgtcagctta

SEQ ID NO: 99573 - DNA, 15 bp, Homo sapiens
gacagttgtcagctt

SEQ ID NO: 99574 - DNA, 15 bp, Homo sapiens
tgacagttgtcagct

SEQ ID NO: 99575 - DNA, 15 bp, Homo sapiens
ttgacagttgtcagc

SEQ ID NO: 99576 - DNA, 15 bp, Homo sapiens
tttgacagttgtcag

SEQ ID NO: 99577 - DNA, 15 bp, Homo sapiens
ctttgacagttgtca

SEQ ID NO: 99578 - DNA, 15 bp, Homo sapiens
tctttgacagttgtc

SEQ ID NO: 99579 - DNA, 15 bp, Homo sapiens
ttctttgacagttgt

SEQ ID NO: 99580 - DNA, 15 bp, Homo sapiens
cttctttgacagttg

SEQ ID NO: 99581 - DNA, 15 bp, Homo sapiens
tcttctttgacagtt

SEQ ID NO: 99582 - DNA, 15 bp, Homo sapiens
gtcttctttgacagt

SEQ ID NO: 99583 - DNA, 15 bp, Homo sapiens
ggtcttctttgacag

SEQ ID NO: 99584 - DNA, 15 bp, Homo sapiens
tggtcttctttgaca

SEQ ID NO: 99585 - DNA, 15 bp, Homo sapiens
atggtcttctttgac

SEQ ID NO: 99586 - DNA, 15 bp, Homo sapiens
catggtcttctttga

SEQ ID NO: 99587 - DNA, 15 bp, Homo sapiens
acatggtcttctttg

SEQ ID NO: 99588 - DNA, 15 bp, Homo sapiens
aacatggtcttcttt

SEQ ID NO: 99589 - DNA, 15 bp, Homo sapiens
caacatggtcttctt

SEQ ID NO: 99590 - DNA, 15 bp, Homo sapiens
acaacatggtcttct

SEQ ID NO: 99591 - DNA, 15 bp, Homo sapiens
tacaacatggtcttc

SEQ ID NO: 99592 - DNA, 15 bp, Homo sapiens
ttacaacatggtctt

SEQ ID NO: 99593 - DNA, 15 bp, Homo sapiens
tttacaacatggtct

SEQ ID NO: 99594 - DNA, 15 bp, Homo sapiens
ttttacaacatggtc

SEQ ID NO: 99595 - DNA, 15 bp, Homo sapiens
attttacaacatggt

SEQ ID NO: 99596 - DNA, 15 bp, Homo sapiens
tattttacaacatgg

SEQ ID NO: 99597 - DNA, 15 bp, Homo sapiens
ttattttacaacatg

SEQ ID NO: 99598 - DNA, 15 bp, Homo sapiens
attattttacaacat

SEQ ID NO: 99599 - DNA, 15 bp, Homo sapiens
aattattttacaaca

SEQ ID NO: 99600 - DNA, 15 bp, Homo sapiens
aaattattttacaac

SEQ ID NO: 99601 - DNA, 15 bp, Homo sapiens
caaattattttacaa

SEQ ID NO: 99602 - DNA, 15 bp, Homo sapiens
tcaaattattttaca

SEQ ID NO: 99603 - DNA, 15 bp, Homo sapiens
gtcaaattattttac

SEQ ID NO: 99604 - DNA, 15 bp, Homo sapiens
agtcaaattatttta

SEQ ID NO: 99605 - DNA, 15 bp, Homo sapiens
tagtcaaattatttt

SEQ ID NO: 99606 - DNA, 15 bp, Homo sapiens
ttagtcaaattattt

SEQ ID NO: 99607 - DNA, 15 bp, Homo sapiens
tttagtcaaattatt

SEQ ID NO: 99608 - DNA, 15 bp, Homo sapiens
atttagtcaaattat

SEQ ID NO: 99609 - DNA, 15 bp, Homo sapiens
tatttagtcaaatta

SEQ ID NO: 99610 - DNA, 15 bp, Homo sapiens
ttatttagtcaaatt

SEQ ID NO: 99611 - DNA, 15 bp, Homo sapiens
tttatttagtcaaat

SEQ ID NO: 99612 - DNA, 15 bp, Homo sapiens
atttatttagtcaaa

SEQ ID NO: 99613 - DNA, 15 bp, Homo sapiens
catttatttagtcaa

SEQ ID NO: 99614 - DNA, 15 bp, Homo sapiens
ccatttatttagtca

SEQ ID NO: 99615 - DNA, 15 bp, Homo sapiens
accatttatttagtc

SEQ ID NO: 99616 - DNA, 15 bp, Homo sapiens
aaccatttatttagt

SEQ ID NO: 99617 - DNA, 15 bp, Homo sapiens
gaaccatttatttag

SEQ ID NO: 99618 - DNA, 15 bp, Homo sapiens
ggaaccatttattta

SEQ ID NO: 99619 - DNA, 15 bp, Homo sapiens
aggaaccatttattt

SEQ ID NO: 99620 - DNA, 15 bp, Homo sapiens
aaggaaccatttatt

SEQ ID NO: 99621 - DNA, 15 bp, Homo sapiens
gaaggaaccatttat

SEQ ID NO: 99622 - DNA, 15 bp, Homo sapiens
agaaggaaccattta

SEQ ID NO: 99623 - DNA, 15 bp, Homo sapiens
gagaaggaaccattt

SEQ ID NO: 99624 - DNA, 15 bp, Homo sapiens
agagaaggaaccatt

SEQ ID NO: 99625 - DNA, 15 bp, Homo sapiens
gagagaaggaaccat

SEQ ID NO: 99626 - DNA, 15 bp, Homo sapiens
tgagagaaggaacca

SEQ ID NO: 99627 - DNA, 15 bp, Homo sapiens
ctgagagaaggaacc

SEQ ID NO: 99628 - DNA, 15 bp, Homo sapiens
actgagagaaggaac

SEQ ID NO: 99629 - DNA, 15 bp, Homo sapiens
cactgagagaaggaa

SEQ ID NO: 99630 - DNA, 15 bp, Homo sapiens
gcactgagagaagga

SEQ ID NO: 99631 - DNA, 15 bp, Homo sapiens
agcactgagagaagg

SEQ ID NO: 99632 - DNA, 15 bp, Homo sapiens
cagcactgagagaag

SEQ ID NO: 99633 - DNA, 15 bp, Homo sapiens
tcagcactgagagaa

SEQ ID NO: 99634 - DNA, 15 bp, Homo sapiens
ctcagcactgagaga

SEQ ID NO: 99635 - DNA, 15 bp, Homo sapiens
cctcagcactgagag

SEQ ID NO: 99636 - DNA, 15 bp, Homo sapiens
tcctcagcactgaga

SEQ ID NO: 99637 - DNA, 15 bp, Homo sapiens
gtcctcagcactgag

SEQ ID NO: 99638 - DNA, 15 bp, Homo sapiens
tgtcctcagcactga

SEQ ID NO: 99639 - DNA, 15 bp, Homo sapiens
ctgtcctcagcactg

SEQ ID NO: 99640 - DNA, 15 bp, Homo sapiens
actgtcctcagcact

SEQ ID NO: 99641 - DNA, 15 bp, Homo sapiens
aactgtcctcagcac

SEQ ID NO: 99642 - DNA, 15 bp, Homo sapiens
aaactgtcctcagca

SEQ ID NO: 99643 - DNA, 15 bp, Homo sapiens
aaaactgtcctcagc

SEQ ID NO: 99644 - DNA, 15 bp, Homo sapiens
gaaaactgtcctcag

SEQ ID NO: 99645 - DNA, 15 bp, Homo sapiens
agaaaactgtcctca

SEQ ID NO: 99646 - DNA, 15 bp, Homo sapiens
aagaaaactgtcctc

SEQ ID NO: 99647 - DNA, 15 bp, Homo sapiens
taagaaaactgtcct

SEQ ID NO: 99648 - DNA, 15 bp, Homo sapiens
ataagaaaactgtcc

SEQ ID NO: 99649 - DNA, 15 bp, Homo sapiens
aataagaaaactgtc

SEQ ID NO: 99650 - DNA, 15 bp, Homo sapiens
aaataagaaaactgt

SEQ ID NO: 99651 - DNA, 15 bp, Homo sapiens
taaataagaaaactg

SEQ ID NO: 99652 - DNA, 15 bp, Homo sapiens
gtaaataagaaaact

SEQ ID NO: 99653 - DNA, 15 bp, Homo sapiens
ggtaaataagaaaac

SEQ ID NO: 99654 - DNA, 15 bp, Homo sapiens
cggtaaataagaaaa

SEQ ID NO: 99655 - DNA, 15 bp, Homo sapiens
gcggtaaataagaaa

SEQ ID NO: 99656 - DNA, 15 bp, Homo sapiens
ggcggtaaataagaa

SEQ ID NO: 99657 - DNA, 15 bp, Homo sapiens
gggcggtaaataaga

SEQ ID NO: 99658 - DNA, 15 bp, Homo sapiens
ggggcggtaaataag

SEQ ID NO: 99659 - DNA, 15 bp, Homo sapiens
gggggcggtaaataa

SEQ ID NO: 99660 - DNA, 15 bp, Homo sapiens
cgggggcggtaaata

SEQ ID NO: 99661 - DNA, 15 bp, Homo sapiens
acgggggcggtaaat

SEQ ID NO: 99662 - DNA, 15 bp, Homo sapiens
aacgggggcggtaaa

SEQ ID NO: 99663 - DNA, 15 bp, Homo sapiens
taacgggggcggtaa

SEQ ID NO: 99664 - DNA, 15 bp, Homo sapiens
ctaacgggggcggta

SEQ ID NO: 99665 - DNA, 15 bp, Homo sapiens
cctaacgggggcggt

SEQ ID NO: 99666 - DNA, 15 bp, Homo sapiens
acctaacgggggcgg

SEQ ID NO: 99667 - DNA, 15 bp, Homo sapiens
gacctaacgggggcg

SEQ ID NO: 99668 - DNA, 15 bp, Homo sapiens
tgacctaacgggggc

SEQ ID NO: 99669 - DNA, 15 bp, Homo sapiens
ttgacctaacggggg

SEQ ID NO: 99670 - DNA, 15 bp, Homo sapiens
tttgacctaacgggg

SEQ ID NO: 99671 - DNA, 15 bp, Homo sapiens
ctttgacctaacggg

SEQ ID NO: 99672 - DNA, 15 bp, Homo sapiens
cctttgacctaacgg

SEQ ID NO: 99673 - DNA, 15 bp, Homo sapiens
ccctttgacctaacg

SEQ ID NO: 99674 - DNA, 15 bp, Homo sapiens
accctttgacctaac

SEQ ID NO: 99675 - DNA, 15 bp, Homo sapiens
aaccctttgacctaa

SEQ ID NO: 99676 - DNA, 15 bp, Homo sapiens
aaaccctttgaccta

SEQ ID NO: 99677 - DNA, 15 bp, Homo sapiens
aaaaccctttgacct

SEQ ID NO: 99678 - DNA, 15 bp, Homo sapiens
gaaaaccctttgacc

SEQ ID NO: 99679 - DNA, 15 bp, Homo sapiens
ggaaaaccctttgac

SEQ ID NO: 99680 - DNA, 15 bp, Homo sapiens
gggaaaaccctttga

SEQ ID NO: 99681 - DNA, 15 bp, Homo sapiens
agggaaaaccctttg

SEQ ID NO: 99682 - DNA, 15 bp, Homo sapiens
cagggaaaacccttt

SEQ ID NO: 99683 - DNA, 15 bp, Homo sapiens
ccagggaaaaccctt

SEQ ID NO: 99684 - DNA, 15 bp, Homo sapiens
cccagggaaaaccct

SEQ ID NO: 99685 - DNA, 15 bp, Homo sapiens
ccccagggaaaaccc

SEQ ID NO: 99686 - DNA, 15 bp, Homo sapiens
tccccagggaaaacc

SEQ ID NO: 99687 - DNA, 15 bp, Homo sapiens
ttccccagggaaaac

SEQ ID NO: 99688 - DNA, 15 bp, Homo sapiens
gttccccagggaaaa

SEQ ID NO: 99689 - DNA, 15 bp, Homo sapiens
agttccccagggaaa

SEQ ID NO: 99690 - DNA, 15 bp, Homo sapiens
aagttccccagggaa

SEQ ID NO: 99691 - DNA, 15 bp, Homo sapiens
aaagttccccaggga

SEQ ID NO: 99692 - DNA, 15 bp, Homo sapiens
gaaagttccccaggg

SEQ ID NO: 99693 - DNA, 15 bp, Homo sapiens
ggaaagttccccagg

SEQ ID NO: 99694 - DNA, 15 bp, Homo sapiens
aggaaagttccccag

SEQ ID NO: 99695 - DNA, 15 bp, Homo sapiens
taggaaagttcccca

SEQ ID NO: 99696 - DNA, 15 bp, Homo sapiens
ataggaaagttcccc

SEQ ID NO: 99697 - DNA, 15 bp, Homo sapiens
aataggaaagttccc

SEQ ID NO: 99698 - DNA, 15 bp, Homo sapiens
aaataggaaagttcc

SEQ ID NO: 99699 - DNA, 15 bp, Homo sapiens
taaataggaaagttc

SEQ ID NO: 99700 - DNA, 15 bp, Homo sapiens
gtaaataggaaagtt

SEQ ID NO: 99701 - DNA, 15 bp, Homo sapiens
agtaaataggaaagt

SEQ ID NO: 99702 - DNA, 15 bp, Homo sapiens
aagtaaataggaaag

SEQ ID NO: 99703 - DNA, 15 bp, Homo sapiens
gaagtaaataggaaa

SEQ ID NO: 99704 - DNA, 15 bp, Homo sapiens
agaagtaaataggaa

SEQ ID NO: 99705 - DNA, 15 bp, Homo sapiens
aagaagtaaatagga

SEQ ID NO: 99706 - DNA, 15 bp, Homo sapiens
caagaagtaaatagg

SEQ ID NO: 99707 - DNA, 15 bp, Homo sapiens
gcaagaagtaaatag

SEQ ID NO: 99708 - DNA, 15 bp, Homo sapiens
tgcaagaagtaaata

SEQ ID NO: 99709 - DNA, 15 bp, Homo sapiens
gtgcaagaagtaaat

SEQ ID NO: 99710 - DNA, 15 bp, Homo sapiens
agtgcaagaagtaaa

SEQ ID NO: 99711 - DNA, 15 bp, Homo sapiens
tagtgcaagaagtaa

SEQ ID NO: 99712 - DNA, 15 bp, Homo sapiens
atagtgcaagaagta

SEQ ID NO: 99713 - DNA, 15 bp, Homo sapiens
gatagtgcaagaagt

SEQ ID NO: 99714 - DNA, 15 bp, Homo sapiens
tgatagtgcaagaag

SEQ ID NO: 99715 - DNA, 15 bp, Homo sapiens
ttgatagtgcaagaa

SEQ ID NO: 99716 - DNA, 15 bp, Homo sapiens
cttgatagtgcaaga

SEQ ID NO: 99717 - DNA, 15 bp, Homo sapiens
tcttgatagtgcaag

SEQ ID NO: 99718 - DNA, 15 bp, Homo sapiens
ttcttgatagtgcaa

SEQ ID NO: 99719 - DNA, 15 bp, Homo sapiens
attcttgatagtgca

SEQ ID NO: 99720 - DNA, 15 bp, Homo sapiens
aattcttgatagtgc

SEQ ID NO: 99721 - DNA, 15 bp, Homo sapiens
aaattcttgatagtg

SEQ ID NO: 99722 - DNA, 15 bp, Homo sapiens
aaaattcttgatagt

SEQ ID NO: 99723 - DNA, 15 bp, Homo sapiens
aaaaattcttgatag

SEQ ID NO: 99724 - DNA, 15 bp, Homo sapiens
gaaaaattcttgata

SEQ ID NO: 99725 - DNA, 15 bp, Homo sapiens
cgaaaaattcttgat

SEQ ID NO: 99726 - DNA, 15 bp, Homo sapiens
tcgaaaaattcttga

SEQ ID NO: 99727 - DNA, 15 bp, Homo sapiens
ttcgaaaaattcttg

SEQ ID NO: 99728 - DNA, 15 bp, Homo sapiens
attcgaaaaattctt

SEQ ID NO: 99729 - DNA, 15 bp, Homo sapiens
cattcgaaaaattct

SEQ ID NO: 99730 - DNA, 15 bp, Homo sapiens
acattcgaaaaattc

SEQ ID NO: 99731 - DNA, 15 bp, Homo sapiens
tacattcgaaaaatt

SEQ ID NO: 99732 - DNA, 15 bp, Homo sapiens
gtacattcgaaaaat

SEQ ID NO: 99733 - DNA, 15 bp, Homo sapiens
ggtacattcgaaaaa

SEQ ID NO: 99734 - DNA, 15 bp, Homo sapiens
aggtacattcgaaaa

SEQ ID NO: 99735 - DNA, 15 bp, Homo sapiens
taggtacattcgaaa

SEQ ID NO: 99736 - DNA, 15 bp, Homo sapiens
gtaggtacattcgaa

SEQ ID NO: 99737 - DNA, 15 bp, Homo sapiens
agtaggtacattcga

SEQ ID NO: 99738 - DNA, 15 bp, Homo sapiens
cagtaggtacattcg

SEQ ID NO: 99739 - DNA, 15 bp, Homo sapiens
gcagtaggtacattc

SEQ ID NO: 99740 - DNA, 15 bp, Homo sapiens
tgcagtaggtacatt

SEQ ID NO: 99741 - DNA, 15 bp, Homo sapiens
ctgcagtaggtacat

SEQ ID NO: 99742 - DNA, 15 bp, Homo sapiens
actgcagtaggtaca

SEQ ID NO: 99743 - DNA, 15 bp, Homo sapiens
tactgcagtaggtac

SEQ ID NO: 99744 - DNA, 15 bp, Homo sapiens
gtactgcagtaggta

SEQ ID NO: 99745 - DNA, 15 bp, Homo sapiens
tgtactgcagtaggt

SEQ ID NO: 99746 - DNA, 15 bp, Homo sapiens
ctgtactgcagtagg

SEQ ID NO: 99747 - DNA, 15 bp, Homo sapiens
gctgtactgcagtag

SEQ ID NO: 99748 - DNA, 15 bp, Homo sapiens
tgctgtactgcagta

SEQ ID NO: 99749 - DNA, 15 bp, Homo sapiens
ctgctgtactgcagt

SEQ ID NO: 99750 - DNA, 15 bp, Homo sapiens
tctgctgtactgcag

SEQ ID NO: 99751 - DNA, 15 bp, Homo sapiens
ttctgctgtactgca

SEQ ID NO: 99752 - DNA, 15 bp, Homo sapiens
cttctgctgtactgc

SEQ ID NO: 99753 - DNA, 15 bp, Homo sapiens
ccttctgctgtactg

SEQ ID NO: 99754 - DNA, 15 bp, Homo sapiens
accttctgctgtact

SEQ ID NO: 99755 - DNA, 15 bp, Homo sapiens
taccttctgctgtac

SEQ ID NO: 99756 - DNA, 15 bp, Homo sapiens
ttaccttctgctgta

SEQ ID NO: 99757 - DNA, 15 bp, Homo sapiens
tttaccttctgctgt

SEQ ID NO: 99758 - DNA, 15 bp, Homo sapiens
ttttaccttctgctg

SEQ ID NO: 99759 - DNA, 15 bp, Homo sapiens
tttttaccttctgct

SEQ ID NO: 99760 - DNA, 15 bp, Homo sapiens
ttttttaccttctgc

SEQ ID NO: 99761 - DNA, 15 bp, Homo sapiens
attttttaccttctg

SEQ ID NO: 99762 - DNA, 15 bp, Homo sapiens
gattttttaccttct

SEQ ID NO: 99763 - DNA, 15 bp, Homo sapiens
tgattttttaccttc

SEQ ID NO: 99764 - DNA, 15 bp, Homo sapiens
ctgattttttacctt

SEQ ID NO: 99765 - DNA, 15 bp, Homo sapiens
actgattttttacct

SEQ ID NO: 99766 - DNA, 15 bp, Homo sapiens
cactgattttttacc

SEQ ID NO: 99767 - DNA, 15 bp, Homo sapiens
acactgattttttac

SEQ ID NO: 99768 - DNA, 15 bp, Homo sapiens
cacactgatttttta

SEQ ID NO: 99769 - DNA, 15 bp, Homo sapiens
ccacactgatttttt

SEQ ID NO: 99770 - DNA, 15 bp, Homo sapiens
accacactgattttt

SEQ ID NO: 99771 - DNA, 15 bp, Homo sapiens
aaccacactgatttt

SEQ ID NO: 99772 - DNA, 15 bp, Homo sapiens
aaaccacactgattt

SEQ ID NO: 99773 - DNA, 15 bp, Homo sapiens
aaaaccacactgatt

SEQ ID NO: 99774 - DNA, 15 bp, Homo sapiens
aaaaaccacactgat

SEQ ID NO: 99775 - DNA, 15 bp, Homo sapiens
gaaaaaccacactga

SEQ ID NO: 99776 - DNA, 15 bp, Homo sapiens
tgaaaaaccacactg

SEQ ID NO: 99777 - DNA, 15 bp, Homo sapiens
atgaaaaaccacact

SEQ ID NO: 99778 - DNA, 15 bp, Homo sapiens
aatgaaaaaccacac

SEQ ID NO: 99779 - DNA, 15 bp, Homo sapiens
caatgaaaaaccaca

SEQ ID NO: 99780 - DNA, 15 bp, Homo sapiens
acaatgaaaaaccac

SEQ ID NO: 99781 - DNA, 15 bp, Homo sapiens
aacaatgaaaaacca

SEQ ID NO: 99782 - DNA, 15 bp, Homo sapiens
caacaatgaaaaacc

SEQ ID NO: 99783 - DNA, 15 bp, Homo sapiens
acaacaatgaaaaac

SEQ ID NO: 99784 - DNA, 15 bp, Homo sapiens
aacaacaatgaaaaa

SEQ ID NO: 99785 - DNA, 15 bp, Homo sapiens
caacaacaatgaaaa

SEQ ID NO: 99786 - DNA, 15 bp, Homo sapiens
tcaacaacaatgaaa

SEQ ID NO: 99787 - DNA, 15 bp, Homo sapiens
atcaacaacaatgaa

SEQ ID NO: 99788 - DNA, 15 bp, Homo sapiens
catcaacaacaatga

SEQ ID NO: 99789 - DNA, 15 bp, Homo sapiens
tcatcaacaacaatg

SEQ ID NO: 99790 - DNA, 15 bp, Homo sapiens
atcatcaacaacaat

SEQ ID NO: 99791 - DNA, 15 bp, Homo sapiens
catcatcaacaacaa

SEQ ID NO: 99792 - DNA, 15 bp, Homo sapiens
acatcatcaacaaca

SEQ ID NO: 99793 - DNA, 15 bp, Homo sapiens
aacatcatcaacaac

SEQ ID NO: 99794 - DNA, 15 bp, Homo sapiens
aaacatcatcaacaa

SEQ ID NO: 99795 - DNA, 15 bp, Homo sapiens
caaacatcatcaaca

SEQ ID NO: 99796 - DNA, 15 bp, Homo sapiens
acaaacatcatcaac

SEQ ID NO: 99797 - DNA, 15 bp, Homo sapiens
tacaaacatcatcaa

SEQ ID NO: 99798 - DNA, 15 bp, Homo sapiens
ctacaaacatcatca

SEQ ID NO: 99799 - DNA, 15 bp, Homo sapiens
actacaaacatcatc

SEQ ID NO: 99800 - DNA, 15 bp, Homo sapiens
cactacaaacatcat

SEQ ID NO: 99801 - DNA, 15 bp, Homo sapiens
acactacaaacatca

SEQ ID NO: 99802 - DNA, 15 bp, Homo sapiens
aacactacaaacatc

SEQ ID NO: 99803 - DNA, 15 bp, Homo sapiens
aaacactacaaacat

SEQ ID NO: 99804 - DNA, 15 bp, Homo sapiens
aaaacactacaaaca

SEQ ID NO: 99805 - DNA, 15 bp, Homo sapiens
aaaaacactacaaac

SEQ ID NO: 99806 - DNA, 15 bp, Homo sapiens
caaaaacactacaaa

SEQ ID NO: 99807 - DNA, 15 bp, Homo sapiens
acaaaaacactacaa

SEQ ID NO: 99808 - DNA, 15 bp, Homo sapiens
cacaaaaacactaca

SEQ ID NO: 99809 - DNA, 15 bp, Homo sapiens
acacaaaaacactac

SEQ ID NO: 99810 - DNA, 15 bp, Homo sapiens
cacacaaaaacacta

SEQ ID NO: 99811 - DNA, 15 bp, Homo sapiens
acacacaaaaacact

SEQ ID NO: 99812 - DNA, 15 bp, Homo sapiens
cacacacaaaaacac

SEQ ID NO: 99813 - DNA, 15 bp, Homo sapiens
acacacacaaaaaca

SEQ ID NO: 99814 - DNA, 15 bp, Homo sapiens
aacacacacaaaaac

SEQ ID NO: 99815 - DNA, 15 bp, Homo sapiens
taacacacacaaaaa

SEQ ID NO: 99816 - DNA, 15 bp, Homo sapiens
ataacacacacaaaa

SEQ ID NO: 99817 - DNA, 15 bp, Homo sapiens
aataacacacacaaa

SEQ ID NO: 99818 - DNA, 15 bp, Homo sapiens
aaataacacacacaa

SEQ ID NO: 99819 - DNA, 15 bp, Homo sapiens
taaataacacacaca

SEQ ID NO: 99820 - DNA, 15 bp, Homo sapiens
ttaaataacacacac

SEQ ID NO: 99821 - DNA, 15 bp, Homo sapiens
tttaaataacacaca

SEQ ID NO: 99822 - DNA, 15 bp, Homo sapiens
atttaaataacacac

SEQ ID NO: 99823 - DNA, 15 bp, Homo sapiens
gatttaaataacaca

SEQ ID NO: 99824 - DNA, 15 bp, Homo sapiens
agatttaaataacac

SEQ ID NO: 99825 - DNA, 15 bp, Homo sapiens
aagatttaaataaca

SEQ ID NO: 99826 - DNA, 15 bp, Homo sapiens
gaagatttaaataac

SEQ ID NO: 99827 - DNA, 15 bp, Homo sapiens
ggaagatttaaataa

SEQ ID NO: 99828 - DNA, 15 bp, Homo sapiens
aggaagatttaaata

SEQ ID NO: 99829 - DNA, 15 bp, Homo sapiens
gaggaagatttaaat

SEQ ID NO: 99830 - DNA, 15 bp, Homo sapiens
ggaggaagatttaaa

SEQ ID NO: 99831 - DNA, 15 bp, Homo sapiens
tggaggaagatttaa

SEQ ID NO: 99832 - DNA, 15 bp, Homo sapiens
ctggaggaagattta

SEQ ID NO: 99833 - DNA, 15 bp, Homo sapiens
gctggaggaagattt

SEQ ID NO: 99834 - DNA, 15 bp, Homo sapiens
ggctggaggaagatt

SEQ ID NO: 99835 - DNA, 15 bp, Homo sapiens
aggctggaggaagat

SEQ ID NO: 99836 - DNA, 15 bp, Homo sapiens
taggctggaggaaga

SEQ ID NO: 99837 - DNA, 15 bp, Homo sapiens
ttaggctggaggaag

SEQ ID NO: 99838 - DNA, 15 bp, Homo sapiens
tttaggctggaggaa

SEQ ID NO: 99839 - DNA, 15 bp, Homo sapiens
ttttaggctggagga

SEQ ID NO: 99840 - DNA, 15 bp, Homo sapiens
cttttaggctggagg

SEQ ID NO: 99841 - DNA, 15 bp, Homo sapiens
ccttttaggctggag

SEQ ID NO: 99842 - DNA, 15 bp, Homo sapiens
cccttttaggctgga

SEQ ID NO: 99843 - DNA, 15 bp, Homo sapiens
acccttttaggctgg

SEQ ID NO: 99844 - DNA, 15 bp, Homo sapiens
aacccttttaggctg

SEQ ID NO: 99845 - DNA, 15 bp, Homo sapiens
aaacccttttaggct

SEQ ID NO: 99846 - DNA, 15 bp, Homo sapiens
aaaacccttttaggc

SEQ ID NO: 99847 - DNA, 15 bp, Homo sapiens
taaaacccttttagg

SEQ ID NO: 99848 - DNA, 15 bp, Homo sapiens
ataaaacccttttag

SEQ ID NO: 99849 - DNA, 15 bp, Homo sapiens
tataaaaccctttta

SEQ ID NO: 99850 - DNA, 15 bp, Homo sapiens
ttataaaaccctttt

SEQ ID NO: 99851 - DNA, 15 bp, Homo sapiens
tttataaaacccttt

SEQ ID NO: 99852 - DNA, 15 bp, Homo sapiens
ttttataaaaccctt

SEQ ID NO: 99853 - DNA, 15 bp, Homo sapiens
gttttataaaaccct

SEQ ID NO: 99854 - DNA, 15 bp, Homo sapiens
tgttttataaaaccc

SEQ ID NO: 99855 - DNA, 15 bp, Homo sapiens
ctgttttataaaacc

SEQ ID NO: 99856 - DNA, 15 bp, Homo sapiens
gctgttttataaaac

SEQ ID NO: 99857 - DNA, 15 bp, Homo sapiens
tgctgttttataaaa

SEQ ID NO: 99858 - DNA, 15 bp, Homo sapiens
ctgctgttttataaa

SEQ ID NO: 99859 - DNA, 15 bp, Homo sapiens
gctgctgttttataa

SEQ ID NO: 99860 - DNA, 15 bp, Homo sapiens
agctgctgttttata

SEQ ID NO: 99861 - DNA, 15 bp, Homo sapiens
tagctgctgttttat

SEQ ID NO: 99862 - DNA, 15 bp, Homo sapiens
ttagctgctgtttta

SEQ ID NO: 99863 - DNA, 15 bp, Homo sapiens
cttagctgctgtttt

SEQ ID NO: 99864 - DNA, 15 bp, Homo sapiens
ccttagctgctgttt

SEQ ID NO: 99865 - DNA, 15 bp, Homo sapiens
gccttagctgctgtt

SEQ ID NO: 99866 - DNA, 15 bp, Homo sapiens
ggccttagctgctgt

SEQ ID NO: 99867 - DNA, 15 bp, Homo sapiens
tggccttagctgctg

SEQ ID NO: 99868 - DNA, 15 bp, Homo sapiens
atggccttagctgct

SEQ ID NO: 99869 - DNA, 15 bp, Homo sapiens
catggccttagctgc

SEQ ID NO: 99870 - DNA, 15 bp, Homo sapiens
ccatggccttagctg

SEQ ID NO: 99871 - DNA, 15 bp, Homo sapiens
tccatggccttagct

SEQ ID NO: 99872 - DNA, 15 bp, Homo sapiens
atccatggccttagc

SEQ ID NO: 99873 - DNA, 15 bp, Homo sapiens
tatccatggccttag

SEQ ID NO: 99874 - DNA, 15 bp, Homo sapiens
ttatccatggcctta

SEQ ID NO: 99875 - DNA, 15 bp, Homo sapiens
tttatccatggcctt

SEQ ID NO: 99876 - DNA, 15 bp, Homo sapiens
gtttatccatggcct

SEQ ID NO: 99877 - DNA, 15 bp, Homo sapiens
ggtttatccatggcc

SEQ ID NO: 99878 - DNA, 15 bp, Homo sapiens
aggtttatccatggc

SEQ ID NO: 99879 - DNA, 15 bp, Homo sapiens
caggtttatccatgg

SEQ ID NO: 99880 - DNA, 15 bp, Homo sapiens
acaggtttatccatg

SEQ ID NO: 99881 - DNA, 15 bp, Homo sapiens
tacaggtttatccat

SEQ ID NO: 99882 - DNA, 15 bp, Homo sapiens
atacaggtttatcca

SEQ ID NO: 99883 - DNA, 15 bp, Homo sapiens
catacaggtttatcc

SEQ ID NO: 99884 - DNA, 15 bp, Homo sapiens
acatacaggtttatc

SEQ ID NO: 99885 - DNA, 15 bp, Homo sapiens
tacatacaggtttat

SEQ ID NO: 99886 - DNA, 15 bp, Homo sapiens
ttacatacaggttta

SEQ ID NO: 99887 - DNA, 15 bp, Homo sapiens
cttacatacaggttt

SEQ ID NO: 99888 - DNA, 15 bp, Homo sapiens
ccttacatacaggtt

SEQ ID NO: 99889 - DNA, 15 bp, Homo sapiens
tccttacatacaggt

SEQ ID NO: 99890 - DNA, 15 bp, Homo sapiens
gtccttacatacagg

SEQ ID NO: 99891 - DNA, 15 bp, Homo sapiens
agtccttacatacag

SEQ ID NO: 99892 - DNA, 15 bp, Homo sapiens
cagtccttacataca

SEQ ID NO: 99893 - DNA, 15 bp, Homo sapiens
ccagtccttacatac

SEQ ID NO: 99894 - DNA, 15 bp, Homo sapiens
tccagtccttacata

SEQ ID NO: 99895 - DNA, 15 bp, Homo sapiens
ctccagtccttacat

SEQ ID NO: 99896 - DNA, 15 bp, Homo sapiens
gctccagtccttaca

SEQ ID NO: 99897 - DNA, 15 bp, Homo sapiens
tgctccagtccttac

SEQ ID NO: 99898 - DNA, 15 bp, Homo sapiens
ttgctccagtcctta

SEQ ID NO: 99899 - DNA, 15 bp, Homo sapiens
tttgctccagtcctt

SEQ ID NO: 99900 - DNA, 15 bp, Homo sapiens
ctttgctccagtcct

SEQ ID NO: 99901 - DNA, 15 bp, Homo sapiens
gctttgctccagtcc

SEQ ID NO: 99902 - DNA, 15 bp, Homo sapiens
cgctttgctccagtc

SEQ ID NO: 99903 - DNA, 15 bp, Homo sapiens
tcgctttgctccagt

SEQ ID NO: 99904 - DNA, 15 bp, Homo sapiens
ctcgctttgctccag

SEQ ID NO: 99905 - DNA, 15 bp, Homo sapiens
gctcgctttgctcca

SEQ ID NO: 99906 - DNA, 15 bp, Homo sapiens
agctcgctttgctcc

SEQ ID NO: 99907 - DNA, 15 bp, Homo sapiens
cagctcgctttgctc

SEQ ID NO: 99908 - DNA, 15 bp, Homo sapiens
ccagctcgctttgct

SEQ ID NO: 99909 - DNA, 15 bp, Homo sapiens
accagctcgctttgc

SEQ ID NO: 99910 - DNA, 15 bp, Homo sapiens
gaccagctcgctttg

SEQ ID NO: 99911 - DNA, 15 bp, Homo sapiens
agaccagctcgcttt

SEQ ID NO: 99912 - DNA, 15 bp, Homo sapiens
tagaccagctcgctt

SEQ ID NO: 99913 - DNA, 15 bp, Homo sapiens
atagaccagctcgct

SEQ ID NO: 99914 - DNA, 15 bp, Homo sapiens
gatagaccagctcgc

SEQ ID NO: 99915 - DNA, 15 bp, Homo sapiens
ggatagaccagctcg

SEQ ID NO: 99916 - DNA, 15 bp, Homo sapiens
tggatagaccagctc

SEQ ID NO: 99917 - DNA, 15 bp, Homo sapiens
ctggatagaccagct

SEQ ID NO: 99918 - DNA, 15 bp, Homo sapiens
tctggatagaccagc

SEQ ID NO: 99919 - DNA, 15 bp, Homo sapiens
gtctggatagaccag

SEQ ID NO: 99920 - DNA, 15 bp, Homo sapiens
agtctggatagacca

SEQ ID NO: 99921 - DNA, 15 bp, Homo sapiens
cagtctggatagacc

SEQ ID NO: 99922 - DNA, 15 bp, Homo sapiens
ccagtctggatagac

SEQ ID NO: 99923 - DNA, 15 bp, Homo sapiens
accagtctggataga

SEQ ID NO: 99924 - DNA, 15 bp, Homo sapiens
gaccagtctggatag

SEQ ID NO: 99925 - DNA, 15 bp, Homo sapiens
agaccagtctggata

SEQ ID NO: 99926 - DNA, 15 bp, Homo sapiens
cagaccagtctggat

SEQ ID NO: 99927 - DNA, 15 bp, Homo sapiens
acagaccagtctgga

SEQ ID NO: 99928 - DNA, 15 bp, Homo sapiens
cacagaccagtctgg

SEQ ID NO: 99929 - DNA, 15 bp, Homo sapiens
tcacagaccagtctg

SEQ ID NO: 99930 - DNA, 15 bp, Homo sapiens
ctcacagaccagtct

SEQ ID NO: 99931 - DNA, 15 bp, Homo sapiens
tctcacagaccagtc

SEQ ID NO: 99932 - DNA, 15 bp, Homo sapiens
atctcacagaccagt

SEQ ID NO: 99933 - DNA, 15 bp, Homo sapiens
aatctcacagaccag

SEQ ID NO: 99934 - DNA, 15 bp, Homo sapiens
aaatctcacagacca

SEQ ID NO: 99935 - DNA, 15 bp, Homo sapiens
taaatctcacagacc

SEQ ID NO: 99936 - DNA, 15 bp, Homo sapiens
ttaaatctcacagac

SEQ ID NO: 99937 - DNA, 15 bp, Homo sapiens
gttaaatctcacaga

SEQ ID NO: 99938 - DNA, 15 bp, Homo sapiens
agttaaatctcacag

SEQ ID NO: 99939 - DNA, 15 bp, Homo sapiens
gagttaaatctcaca

SEQ ID NO: 99940 - DNA, 15 bp, Homo sapiens
agagttaaatctcac

SEQ ID NO: 99941 - DNA, 15 bp, Homo sapiens
cagagttaaatctca

SEQ ID NO: 99942 - DNA, 15 bp, Homo sapiens
gcagagttaaatctc

SEQ ID NO: 99943 - DNA, 15 bp, Homo sapiens
tgcagagttaaatct

SEQ ID NO: 99944 - DNA, 15 bp, Homo sapiens
ctgcagagttaaatc

SEQ ID NO: 99945 - DNA, 15 bp, Homo sapiens
gctgcagagttaaat

SEQ ID NO: 99946 - DNA, 15 bp, Homo sapiens
ggctgcagagttaaa

SEQ ID NO: 99947 - DNA, 15 bp, Homo sapiens
aggctgcagagttaa

SEQ ID NO: 99948 - DNA, 15 bp, Homo sapiens
gaggctgcagagtta

SEQ ID NO: 99949 - DNA, 15 bp, Homo sapiens
ggaggctgcagagtt

SEQ ID NO: 99950 - DNA, 15 bp, Homo sapiens
gggaggctgcagagt

SEQ ID NO: 99951 - DNA, 15 bp, Homo sapiens
ggggaggctgcagag

SEQ ID NO: 99952 - DNA, 15 bp, Homo sapiens
aggggaggctgcaga

SEQ ID NO: 99953 - DNA, 15 bp, Homo sapiens
caggggaggctgcag

SEQ ID NO: 99954 - DNA, 15 bp, Homo sapiens
ccaggggaggctgca

SEQ ID NO: 99955 - DNA, 15 bp, Homo sapiens
cccaggggaggctgc

SEQ ID NO: 99956 - DNA, 15 bp, Homo sapiens
gcccaggggaggctg

SEQ ID NO: 99957 - DNA, 15 bp, Homo sapiens
tgcccaggggaggct

SEQ ID NO: 99958 - DNA, 15 bp, Homo sapiens
gtgcccaggggaggc

SEQ ID NO: 99959 - DNA, 15 bp, Homo sapiens
agtgcccaggggagg

SEQ ID NO: 99960 - DNA, 15 bp, Homo sapiens
aagtgcccaggggag

SEQ ID NO: 99961 - DNA, 15 bp, Homo sapiens
gaagtgcccagggga

SEQ ID NO: 99962 - DNA, 15 bp, Homo sapiens
tgaagtgcccagggg

SEQ ID NO: 99963 - DNA, 15 bp, Homo sapiens
ctgaagtgcccaggg

SEQ ID NO: 99964 - DNA, 15 bp, Homo sapiens
tctgaagtgcccagg

SEQ ID NO: 99965 - DNA, 15 bp, Homo sapiens
gtctgaagtgcccag

SEQ ID NO: 99966 - DNA, 15 bp, Homo sapiens
ggtctgaagtgccca

SEQ ID NO: 99967 - DNA, 15 bp, Homo sapiens
gggtctgaagtgccc

SEQ ID NO: 99968 - DNA, 15 bp, Homo sapiens
tgggtctgaagtgcc

SEQ ID NO: 99969 - DNA, 15 bp, Homo sapiens
ctgggtctgaagtgc

SEQ ID NO: 99970 - DNA, 15 bp, Homo sapiens
tctgggtctgaagtg

SEQ ID NO: 99971 - DNA, 15 bp, Homo sapiens
gtctgggtctgaagt

SEQ ID NO: 99972 - DNA, 15 bp, Homo sapiens
cgtctgggtctgaag

SEQ ID NO: 99973 - DNA, 15 bp, Homo sapiens
ccgtctgggtctgaa

SEQ ID NO: 99974 - DNA, 15 bp, Homo sapiens
gccgtctgggtctga

SEQ ID NO: 99975 - DNA, 15 bp, Homo sapiens
ggccgtctgggtctg

SEQ ID NO: 99976 - DNA, 15 bp, Homo sapiens
tggccgtctgggtct

SEQ ID NO: 99977 - DNA, 15 bp, Homo sapiens
gtggccgtctgggtc

SEQ ID NO: 99978 - DNA, 15 bp, Homo sapiens
ggtggccgtctgggt

SEQ ID NO: 99979 - DNA, 15 bp, Homo sapiens
aggtggccgtctggg

SEQ ID NO: 99980 - DNA, 15 bp, Homo sapiens
aaggtggccgtctgg

SEQ ID NO: 99981 - DNA, 15 bp, Homo sapiens
gaaggtggccgtctg

SEQ ID NO: 99982 - DNA, 15 bp, Homo sapiens
agaaggtggccgtct

SEQ ID NO: 99983 - DNA, 15 bp, Homo sapiens
cagaaggtggccgtc

SEQ ID NO: 99984 - DNA, 15 bp, Homo sapiens
gcagaaggtggccgt

SEQ ID NO: 99985 - DNA, 15 bp, Homo sapiens
ggcagaaggtggccg

SEQ ID NO: 99986 - DNA, 15 bp, Homo sapiens
tggcagaaggtggcc

SEQ ID NO: 99987 - DNA, 15 bp, Homo sapiens
gtggcagaaggtggc

SEQ ID NO: 99988 - DNA, 15 bp, Homo sapiens
agtggcagaaggtgg

SEQ ID NO: 99989 - DNA, 15 bp, Homo sapiens
gagtggcagaaggtg

SEQ ID NO: 99990 - DNA, 15 bp, Homo sapiens
ggagtggcagaaggt

SEQ ID NO: 99991 - DNA, 15 bp, Homo sapiens
tggagtggcagaagg

SEQ ID NO: 99992 - DNA, 15 bp, Homo sapiens
ctggagtggcagaag

SEQ ID NO: 99993 - DNA, 15 bp, Homo sapiens
gctggagtggcagaa

SEQ ID NO: 99994 - DNA, 15 bp, Homo sapiens
tgctggagtggcaga

SEQ ID NO: 99995 - DNA, 15 bp, Homo sapiens
ttgctggagtggcag

SEQ ID NO: 99996 - DNA, 15 bp, Homo sapiens
tttgctggagtggca

SEQ ID NO: 99997 - DNA, 15 bp, Homo sapiens
ctttgctggagtggc

SEQ ID NO: 99998 - DNA, 15 bp, Homo sapiens
tctttgctggagtgg

SEQ ID NO: 99999 - DNA, 15 bp, Homo sapiens
ttctttgctggagtg

SEQ ID NO: 100000 - DNA, 15 bp, Homo sapiens
attctttgctggagt

SEQ ID NO: 100001 - DNA, 15 bp, Homo sapiens
tattctttgctggag

SEQ ID NO: 100002 - DNA, 15 bp, Homo sapiens
ttattctttgctgga

SEQ ID NO: 100003 - DNA, 15 bp, Homo sapiens
cttattctttgctgg

SEQ ID NO: 100004 - DNA, 15 bp, Homo sapiens
gcttattctttgctg

SEQ ID NO: 100005 - DNA, 15 bp, Homo sapiens
cgcttattctttgct

SEQ ID NO: 100006 - DNA, 15 bp, Homo sapiens
gcgcttattctttgc

SEQ ID NO: 100007 - DNA, 15 bp, Homo sapiens
ggcgcttattctttg

SEQ ID NO: 100008 - DNA, 15 bp, Homo sapiens
gggcgcttattcttt

SEQ ID NO: 100009 - DNA, 15 bp, Homo sapiens
agggcgcttattctt

SEQ ID NO: 100010 - DNA, 15 bp, Homo sapiens
cagggcgcttattct

SEQ ID NO: 100011 - DNA, 15 bp, Homo sapiens
gcagggcgcttattc

SEQ ID NO: 100012 - DNA, 15 bp, Homo sapiens
agcagggcgcttatt

SEQ ID NO: 100013 - DNA, 15 bp, Homo sapiens
aagcagggcgcttat

SEQ ID NO: 100014 - DNA, 15 bp, Homo sapiens
gaagcagggcgctta

SEQ ID NO: 100015 - DNA, 15 bp, Homo sapiens
ggaagcagggcgctt

SEQ ID NO: 100016 - DNA, 15 bp, Homo sapiens
aggaagcagggcgct

SEQ ID NO: 100017 - DNA, 15 bp, Homo sapiens
aaggaagcagggcgc

SEQ ID NO: 100018 - DNA, 15 bp, Homo sapiens
gaaggaagcagggcg

SEQ ID NO: 100019 - DNA, 15 bp, Homo sapiens
tgaaggaagcagggc

SEQ ID NO: 100020 - DNA, 15 bp, Homo sapiens
ctgaaggaagcaggg

SEQ ID NO: 100021 - DNA, 15 bp, Homo sapiens
cctgaaggaagcagg

SEQ ID NO: 100022 - DNA, 15 bp, Homo sapiens
acctgaaggaagcag

SEQ ID NO: 100023 - DNA, 15 bp, Homo sapiens
gacctgaaggaagca

SEQ ID NO: 100024 - DNA, 15 bp, Homo sapiens
agacctgaaggaagc

SEQ ID NO: 100025 - DNA, 15 bp, Homo sapiens
gagacctgaaggaag

SEQ ID NO: 100026 - DNA, 15 bp, Homo sapiens
tgagacctgaaggaa

SEQ ID NO: 100027 - DNA, 15 bp, Homo sapiens
ctgagacctgaagga

SEQ ID NO: 100028 - DNA, 15 bp, Homo sapiens
tctgagacctgaagg

SEQ ID NO: 100029 - DNA, 15 bp, Homo sapiens
gtctgagacctgaag

SEQ ID NO: 100030 - DNA, 15 bp, Homo sapiens
ggtctgagacctgaa

SEQ ID NO: 100031 - DNA, 15 bp, Homo sapiens
tggtctgagacctga

SEQ ID NO: 100032 - DNA, 15 bp, Homo sapiens
ctggtctgagacctg

SEQ ID NO: 100033 - DNA, 15 bp, Homo sapiens
cctggtctgagacct

SEQ ID NO: 100034 - DNA, 15 bp, Homo sapiens
tcctggtctgagacc

SEQ ID NO: 100035 - DNA, 15 bp, Homo sapiens
gtcctggtctgagac

SEQ ID NO: 100036 - DNA, 15 bp, Homo sapiens
agtcctggtctgaga

SEQ ID NO: 100037 - DNA, 15 bp, Homo sapiens
aagtcctggtctgag

SEQ ID NO: 100038 - DNA, 15 bp, Homo sapiens
aaagtcctggtctga

SEQ ID NO: 100039 - DNA, 15 bp, Homo sapiens
taaagtcctggtctg

SEQ ID NO: 100040 - DNA, 15 bp, Homo sapiens
ataaagtcctggtct

SEQ ID NO: 100041 - DNA, 15 bp, Homo sapiens
cataaagtcctggtc

SEQ ID NO: 100042 - DNA, 15 bp, Homo sapiens
ccataaagtcctggt

SEQ ID NO: 100043 - DNA, 15 bp, Homo sapiens
gccataaagtcctgg

SEQ ID NO: 100044 - DNA, 15 bp, Homo sapiens
agccataaagtcctg

SEQ ID NO: 100045 - DNA, 15 bp, Homo sapiens
gagccataaagtcct

SEQ ID NO: 100046 - DNA, 15 bp, Homo sapiens
tgagccataaagtcc

SEQ ID NO: 100047 - DNA, 15 bp, Homo sapiens
atgagccataaagtc

SEQ ID NO: 100048 - DNA, 15 bp, Homo sapiens
catgagccataaagt

SEQ ID NO: 100049 - DNA, 15 bp, Homo sapiens
gcatgagccataaag

SEQ ID NO: 100050 - DNA, 15 bp, Homo sapiens
tgcatgagccataaa

SEQ ID NO: 100051 - DNA, 15 bp, Homo sapiens
ctgcatgagccataa

SEQ ID NO: 100052 - DNA, 15 bp, Homo sapiens
tctgcatgagccata

SEQ ID NO: 100053 - DNA, 15 bp, Homo sapiens
atctgcatgagccat

SEQ ID NO: 100054 - DNA, 15 bp, Homo sapiens
aatctgcatgagcca

SEQ ID NO: 100055 - DNA, 15 bp, Homo sapiens
aaatctgcatgagcc

SEQ ID NO: 100056 - DNA, 15 bp, Homo sapiens
aaaatctgcatgagc

SEQ ID NO: 100057 - DNA, 15 bp, Homo sapiens
aaaaatctgcatgag

SEQ ID NO: 100058 - DNA, 15 bp, Homo sapiens
taaaaatctgcatga

SEQ ID NO: 100059 - DNA, 15 bp, Homo sapiens
ttaaaaatctgcatg

SEQ ID NO: 100060 - DNA, 15 bp, Homo sapiens
cttaaaaatctgcat

SEQ ID NO: 100061 - DNA, 15 bp, Homo sapiens
ccttaaaaatctgca

SEQ ID NO: 100062 - DNA, 15 bp, Homo sapiens
accttaaaaatctgc

SEQ ID NO: 100063 - DNA, 15 bp, Homo sapiens
gaccttaaaaatctg

SEQ ID NO: 100064 - DNA, 15 bp, Homo sapiens
tgaccttaaaaatct

SEQ ID NO: 100065 - DNA, 15 bp, Homo sapiens
atgaccttaaaaatc

SEQ ID NO: 100066 - DNA, 15 bp, Homo sapiens
gaaaaatgaccttaa

SEQ ID NO: 100067 - DNA, 15 bp, Homo sapiens
agaaaaatgacctta

SEQ ID NO: 100068 - DNA, 15 bp, Homo sapiens
aagaaaaatgacctt

SEQ ID NO: 100069 - DNA, 15 bp, Homo sapiens
gaagaaaaatgacct

SEQ ID NO: 100070 - DNA, 15 bp, Homo sapiens
ggaagaaaaatgacc

SEQ ID NO: 100071 - DNA, 15 bp, Homo sapiens
gggaagaaaaatgac

SEQ ID NO: 100072 - DNA, 15 bp, Homo sapiens
tgggaagaaaaatga

SEQ ID NO: 100073 - DNA, 15 bp, Homo sapiens
ttgggaagaaaaatg

SEQ ID NO: 100074 - DNA, 15 bp, Homo sapiens
cttgggaagaaaaat

SEQ ID NO: 100075 - DNA, 15 bp, Homo sapiens
ccttgggaagaaaaa

SEQ ID NO: 100076 - DNA, 15 bp, Homo sapiens
tccttgggaagaaaa

SEQ ID NO: 100077 - DNA, 15 bp, Homo sapiens
ttccttgggaagaaa

SEQ ID NO: 100078 - DNA, 15 bp, Homo sapiens
cttccttgggaagaa

SEQ ID NO: 100079 - DNA, 15 bp, Homo sapiens
tcttccttgggaaga

SEQ ID NO: 100080 - DNA, 15 bp, Homo sapiens
ttcttccttgggaag

SEQ ID NO: 100081 - DNA, 15 bp, Homo sapiens
tttcttccttgggaa

SEQ ID NO: 100082 - DNA, 15 bp, Homo sapiens
gtttcttccttggga

SEQ ID NO: 100083 - DNA, 15 bp, Homo sapiens
agtttcttccttggg

SEQ ID NO: 100084 - DNA, 15 bp, Homo sapiens
aagtttcttccttgg

SEQ ID NO: 100085 - DNA, 15 bp, Homo sapiens
caagtttcttccttg

SEQ ID NO: 100086 - DNA, 15 bp, Homo sapiens
gcaagtttcttcctt

SEQ ID NO: 100087 - DNA, 15 bp, Homo sapiens
ggcaagtttcttcct

SEQ ID NO: 100088 - DNA, 15 bp, Homo sapiens
aggcaagtttcttcc

SEQ ID NO: 100089 - DNA, 15 bp, Homo sapiens
gaggcaagtttcttc

SEQ ID NO: 100090 - DNA, 15 bp, Homo sapiens
ggaggcaagtttctt

SEQ ID NO: 100091 - DNA, 15 bp, Homo sapiens
tggaggcaagtttct

SEQ ID NO: 100092 - DNA, 15 bp, Homo sapiens
ctggaggcaagtttc

SEQ ID NO: 100093 - DNA, 15 bp, Homo sapiens
actggaggcaagttt

SEQ ID NO: 100094 - DNA, 15 bp, Homo sapiens
aactggaggcaagtt

SEQ ID NO: 100095 - DNA, 15 bp, Homo sapiens
gaactggaggcaagt

SEQ ID NO: 100096 - DNA, 15 bp, Homo sapiens
ggaactggaggcaag

SEQ ID NO: 100097 - DNA, 15 bp, Homo sapiens
aggaactggaggcaa

SEQ ID NO: 100098 - DNA, 15 bp, Homo sapiens
aaggaactggaggca

SEQ ID NO: 100099 - DNA, 15 bp, Homo sapiens
gaaggaactggaggc

SEQ ID NO: 100100 - DNA, 15 bp, Homo sapiens
tgaaggaactggagg

SEQ ID NO: 100101 - DNA, 15 bp, Homo sapiens
gtgaaggaactggag

SEQ ID NO: 100102 - DNA, 15 bp, Homo sapiens
agtgaaggaactgga

SEQ ID NO: 100103 - DNA, 15 bp, Homo sapiens
cagtgaaggaactgg

SEQ ID NO: 100104 - DNA, 15 bp, Homo sapiens
acagtgaaggaactg

SEQ ID NO: 100105 - DNA, 15 bp, Homo sapiens
aacagtgaaggaact

SEQ ID NO: 100106 - DNA, 15 bp, Homo sapiens
taacagtgaaggaac

SEQ ID NO: 100107 - DNA, 15 bp, Homo sapiens
ctaacagtgaaggaa

SEQ ID NO: 100108 - DNA, 15 bp, Homo sapiens
cctaacagtgaagga

SEQ ID NO: 100109 - DNA, 15 bp, Homo sapiens
acctaacagtgaagg

SEQ ID NO: 100110 - DNA, 15 bp, Homo sapiens
tacctaacagtgaag

SEQ ID NO: 100111 - DNA, 15 bp, Homo sapiens
ctacctaacagtgaa

SEQ ID NO: 100112 - DNA, 15 bp, Homo sapiens
gctacctaacagtga

SEQ ID NO: 100113 - DNA, 15 bp, Homo sapiens
agctacctaacagtg

SEQ ID NO: 100114 - DNA, 15 bp, Homo sapiens
aagctacctaacagt

SEQ ID NO: 100115 - DNA, 15 bp, Homo sapiens
taagctacctaacag

SEQ ID NO: 100116 - DNA, 15 bp, Homo sapiens
ataagctacctaaca

SEQ ID NO: 100117 - DNA, 15 bp, Homo sapiens
aataagctacctaac

SEQ ID NO: 100118 - DNA, 15 bp, Homo sapiens
aaataagctacctaa

SEQ ID NO: 100119 - DNA, 15 bp, Homo sapiens
aaaataagctaccta

SEQ ID NO: 100120 - DNA, 15 bp, Homo sapiens
gaaaataagctacct

SEQ ID NO: 100121 - DNA, 15 bp, Homo sapiens
tgaaaataagctacc

SEQ ID NO: 100122 - DNA, 15 bp, Homo sapiens
atgaaaataagctac

SEQ ID NO: 100123 - DNA, 15 bp, Homo sapiens
aatgaaaataagcta

SEQ ID NO: 100124 - DNA, 15 bp, Homo sapiens
aaatgaaaataagct

SEQ ID NO: 100125 - DNA, 15 bp, Homo sapiens
aaaatgaaaataagc

SEQ ID NO: 100126 - DNA, 15 bp, Homo sapiens
agaaaatgaaaataa

SEQ ID NO: 100127 - DNA, 15 bp, Homo sapiens
gagaaaatgaaaata

SEQ ID NO: 100128 - DNA, 15 bp, Homo sapiens
agagaaaatgaaaat

SEQ ID NO: 100129 - DNA, 15 bp, Homo sapiens
tagagaaaatgaaaa

SEQ ID NO: 100130 - DNA, 15 bp, Homo sapiens
atagagaaaatgaaa

SEQ ID NO: 100131 - DNA, 15 bp, Homo sapiens
aatagagaaaatgaa

SEQ ID NO: 100132 - DNA, 15 bp, Homo sapiens
aaatagagaaaatga

SEQ ID NO: 100133 - DNA, 15 bp, Homo sapiens
aaaatagagaaaatg

SEQ ID NO: 100134 - DNA, 15 bp, Homo sapiens
taaaatagagaaaat

SEQ ID NO: 100135 - DNA, 15 bp, Homo sapiens
gtaaaatagagaaaa

SEQ ID NO: 100136 - DNA, 15 bp, Homo sapiens
tgtaaaatagagaaa

SEQ ID NO: 100137 - DNA, 15 bp, Homo sapiens
ttgtaaaatagagaa

SEQ ID NO: 100138 - DNA, 15 bp, Homo sapiens
attgtaaaatagaga

SEQ ID NO: 100139 - DNA, 15 bp, Homo sapiens
cattgtaaaatagag

SEQ ID NO: 100140 - DNA, 15 bp, Homo sapiens
tcattgtaaaataga

SEQ ID NO: 100141 - DNA, 15 bp, Homo sapiens
ttcattgtaaaatag

SEQ ID NO: 100142 - DNA, 15 bp, Homo sapiens
tttcattgtaaaata

SEQ ID NO: 100143 - DNA, 15 bp, Homo sapiens
ttttcattgtaaaat

SEQ ID NO: 100144 - DNA, 15 bp, Homo sapiens
cttttcattgtaaaa

SEQ ID NO: 100145 - DNA, 15 bp, Homo sapiens
tcttttcattgtaaa

SEQ ID NO: 100146 - DNA, 15 bp, Homo sapiens
ctcttttcattgtaa

SEQ ID NO: 100147 - DNA, 15 bp, Homo sapiens
actcttttcattgta

SEQ ID NO: 100148 - DNA, 15 bp, Homo sapiens
cactcttttcattgt

SEQ ID NO: 100149 - DNA, 15 bp, Homo sapiens
tcactcttttcattg

SEQ ID NO: 100150 - DNA, 15 bp, Homo sapiens
ctcactcttttcatt

SEQ ID NO: 100151 - DNA, 15 bp, Homo sapiens
tctcactcttttcat

SEQ ID NO: 100152 - DNA, 15 bp, Homo sapiens
gtctcactcttttca

SEQ ID NO: 100153 - DNA, 15 bp, Homo sapiens
ggtctcactcttttc

SEQ ID NO: 100154 - DNA, 15 bp, Homo sapiens
aggtctcactctttt

SEQ ID NO: 100155 - DNA, 15 bp, Homo sapiens
caggtctcactcttt

SEQ ID NO: 100156 - DNA, 15 bp, Homo sapiens
ccaggtctcactctt

SEQ ID NO: 100157 - DNA, 15 bp, Homo sapiens
cccaggtctcactct

SEQ ID NO: 100158 - DNA, 15 bp, Homo sapiens
tcccaggtctcactc

SEQ ID NO: 100159 - DNA, 15 bp, Homo sapiens
ttcccaggtctcact

SEQ ID NO: 100160 - DNA, 15 bp, Homo sapiens
cttcccaggtctcac

SEQ ID NO: 100161 - DNA, 15 bp, Homo sapiens
acttcccaggtctca

SEQ ID NO: 100162 - DNA, 15 bp, Homo sapiens
gacttcccaggtctc

SEQ ID NO: 100163 - DNA, 15 bp, Homo sapiens
ggacttcccaggtct

SEQ ID NO: 100164 - DNA, 15 bp, Homo sapiens
aggacttcccaggtc

SEQ ID NO: 100165 - DNA, 15 bp, Homo sapiens
aaggacttcccaggt

SEQ ID NO: 100166 - DNA, 15 bp, Homo sapiens
caaggacttcccagg

SEQ ID NO: 100167 - DNA, 15 bp, Homo sapiens
tcaaggacttcccag

SEQ ID NO: 100168 - DNA, 15 bp, Homo sapiens
atcaaggacttccca

SEQ ID NO: 100169 - DNA, 15 bp, Homo sapiens
aatcaaggacttccc

SEQ ID NO: 100170 - DNA, 15 bp, Homo sapiens
aaatcaaggacttcc

SEQ ID NO: 100171 - DNA, 15 bp, Homo sapiens
caaatcaaggacttc

SEQ ID NO: 100172 - DNA, 15 bp, Homo sapiens
gcaaatcaaggactt

SEQ ID NO: 100173 - DNA, 15 bp, Homo sapiens
tgcaaatcaaggact

SEQ ID NO: 100174 - DNA, 15 bp, Homo sapiens
ttgcaaatcaaggac

SEQ ID NO: 100175 - DNA, 15 bp, Homo sapiens
cttgcaaatcaagga

SEQ ID NO: 100176 - DNA, 15 bp, Homo sapiens
ccttgcaaatcaagg

SEQ ID NO: 100177 - DNA, 15 bp, Homo sapiens
tccttgcaaatcaag

SEQ ID NO: 100178 - DNA, 15 bp, Homo sapiens
ttccttgcaaatcaa

SEQ ID NO: 100179 - DNA, 15 bp, Homo sapiens
attccttgcaaatca

SEQ ID NO: 100180 - DNA, 15 bp, Homo sapiens
aattccttgcaaatc

SEQ ID NO: 100181 - DNA, 15 bp, Homo sapiens
taattccttgcaaat

SEQ ID NO: 100182 - DNA, 15 bp, Homo sapiens
ctaattccttgcaaa

SEQ ID NO: 100183 - DNA, 15 bp, Homo sapiens
tctaattccttgcaa

SEQ ID NO: 100184 - DNA, 15 bp, Homo sapiens
gtctaattccttgca

SEQ ID NO: 100185 - DNA, 15 bp, Homo sapiens
agtctaattccttgc

SEQ ID NO: 100186 - DNA, 15 bp, Homo sapiens
gagtctaattccttg

SEQ ID NO: 100187 - DNA, 15 bp, Homo sapiens
tgagtctaattcctt

SEQ ID NO: 100188 - DNA, 15 bp, Homo sapiens
gtgagtctaattcct

SEQ ID NO: 100189 - DNA, 15 bp, Homo sapiens
tgtgagtctaattcc

SEQ ID NO: 100190 - DNA, 15 bp, Homo sapiens
ctgtgagtctaattc

SEQ ID NO: 100191 - DNA, 15 bp, Homo sapiens
gctgtgagtctaatt

SEQ ID NO: 100192 - DNA, 15 bp, Homo sapiens
tgctgtgagtctaat

SEQ ID NO: 100193 - DNA, 15 bp, Homo sapiens
atgctgtgagtctaa

SEQ ID NO: 100194 - DNA, 15 bp, Homo sapiens
aatgctgtgagtcta

SEQ ID NO: 100195 - DNA, 15 bp, Homo sapiens
caatgctgtgagtct

SEQ ID NO: 100196 - DNA, 15 bp, Homo sapiens
ccaatgctgtgagtc

SEQ ID NO: 100197 - DNA, 15 bp, Homo sapiens
accaatgctgtgagt

SEQ ID NO: 100198 - DNA, 15 bp, Homo sapiens
taccaatgctgtgag

SEQ ID NO: 100199 - DNA, 15 bp, Homo sapiens
ttaccaatgctgtga

SEQ ID NO: 100200 - DNA, 15 bp, Homo sapiens
gttaccaatgctgtg

SEQ ID NO: 100201 - DNA, 15 bp, Homo sapiens
ggttaccaatgctgt

SEQ ID NO: 100202 - DNA, 15 bp, Homo sapiens
gggttaccaatgctg

SEQ ID NO: 100203 - DNA, 15 bp, Homo sapiens
agggttaccaatgct

SEQ ID NO: 100204 - DNA, 15 bp, Homo sapiens
tagggttaccaatgc

SEQ ID NO: 100205 - DNA, 15 bp, Homo sapiens
ctagggttaccaatg

SEQ ID NO: 100206 - DNA, 15 bp, Homo sapiens
tctagggttaccaat

SEQ ID NO: 100207 - DNA, 15 bp, Homo sapiens
ttctagggttaccaa

SEQ ID NO: 100208 - DNA, 15 bp, Homo sapiens
gttctagggttacca

SEQ ID NO: 100209 - DNA, 15 bp, Homo sapiens
ggttctagggttacc

SEQ ID NO: 100210 - DNA, 15 bp, Homo sapiens
aggttctagggttac

SEQ ID NO: 100211 - DNA, 15 bp, Homo sapiens
aaggttctagggtta

SEQ ID NO: 100212 - DNA, 15 bp, Homo sapiens
gaaggttctagggtt

SEQ ID NO: 100213 - DNA, 15 bp, Homo sapiens
agaaggttctagggt

SEQ ID NO: 100214 - DNA, 15 bp, Homo sapiens
aagaaggttctaggg

SEQ ID NO: 100215 - DNA, 15 bp, Homo sapiens
taagaaggttctagg

SEQ ID NO: 100216 - DNA, 15 bp, Homo sapiens
ctaagaaggttctag

SEQ ID NO: 100217 - DNA, 15 bp, Homo sapiens
cctaagaaggttcta

SEQ ID NO: 100218 - DNA, 15 bp, Homo sapiens
ccctaagaaggttct

SEQ ID NO: 100219 - DNA, 15 bp, Homo sapiens
accctaagaaggttc

SEQ ID NO: 100220 - DNA, 15 bp, Homo sapiens
taccctaagaaggtt

SEQ ID NO: 100221 - DNA, 15 bp, Homo sapiens
ttaccctaagaaggt

SEQ ID NO: 100222 - DNA, 15 bp, Homo sapiens
gttaccctaagaagg

SEQ ID NO: 100223 - DNA, 15 bp, Homo sapiens
tgttaccctaagaag

SEQ ID NO: 100224 - DNA, 15 bp, Homo sapiens
gtgttaccctaagaa

SEQ ID NO: 100225 - DNA, 15 bp, Homo sapiens
agtgttaccctaaga

SEQ ID NO: 100226 - DNA, 15 bp, Homo sapiens
tagtgttaccctaag

SEQ ID NO: 100227 - DNA, 15 bp, Homo sapiens
ttagtgttaccctaa

SEQ ID NO: 100228 - DNA, 15 bp, Homo sapiens
cttagtgttacccta

SEQ ID NO: 100229 - DNA, 15 bp, Homo sapiens
acttagtgttaccct

SEQ ID NO: 100230 - DNA, 15 bp, Homo sapiens
tacttagtgttaccc

SEQ ID NO: 100231 - DNA, 15 bp, Homo sapiens
gtacttagtgttacc

SEQ ID NO: 100232 - DNA, 15 bp, Homo sapiens
ggtacttagtgttac

SEQ ID NO: 100233 - DNA, 15 bp, Homo sapiens
aggtacttagtgtta

SEQ ID NO: 100234 - DNA, 15 bp, Homo sapiens
aaggtacttagtgtt

SEQ ID NO: 100235 - DNA, 15 bp, Homo sapiens
gaaggtacttagtgt

SEQ ID NO: 100236 - DNA, 15 bp, Homo sapiens
agaaggtacttagtg

SEQ ID NO: 100237 - DNA, 15 bp, Homo sapiens
tagaaggtacttagt

SEQ ID NO: 100238 - DNA, 15 bp, Homo sapiens
ctagaaggtacttag

SEQ ID NO: 100239 - DNA, 15 bp, Homo sapiens
tctagaaggtactta

SEQ ID NO: 100240 - DNA, 15 bp, Homo sapiens
gtctagaaggtactt

SEQ ID NO: 100241 - DNA, 15 bp, Homo sapiens
tgtctagaaggtact

SEQ ID NO: 100242 - DNA, 15 bp, Homo sapiens
ttgtctagaaggtac

SEQ ID NO: 100243 - DNA, 15 bp, Homo sapiens
gttgtctagaaggta

SEQ ID NO: 100244 - DNA, 15 bp, Homo sapiens
tgttgtctagaaggt

SEQ ID NO: 100245 - DNA, 15 bp, Homo sapiens
atgttgtctagaagg

SEQ ID NO: 100246 - DNA, 15 bp, Homo sapiens
catgttgtctagaag

SEQ ID NO: 100247 - DNA, 15 bp, Homo sapiens
acatgttgtctagaa

SEQ ID NO: 100248 - DNA, 15 bp, Homo sapiens
gacatgttgtctaga

SEQ ID NO: 100249 - DNA, 15 bp, Homo sapiens
agacatgttgtctag

SEQ ID NO: 100250 - DNA, 15 bp, Homo sapiens
tagacatgttgtcta

SEQ ID NO: 100251 - DNA, 15 bp, Homo sapiens
gtagacatgttgtct

SEQ ID NO: 100252 - DNA, 15 bp, Homo sapiens
ggtagacatgttgtc

SEQ ID NO: 100253 - DNA, 15 bp, Homo sapiens
aggtagacatgttgt

SEQ ID NO: 100254 - DNA, 15 bp, Homo sapiens
taggtagacatgttg

SEQ ID NO: 100255 - DNA, 15 bp, Homo sapiens
ttaggtagacatgtt

SEQ ID NO: 100256 - DNA, 15 bp, Homo sapiens
tttaggtagacatgt

SEQ ID NO: 100257 - DNA, 15 bp, Homo sapiens
atttaggtagacatg

SEQ ID NO: 100258 - DNA, 15 bp, Homo sapiens
catttaggtagacat

SEQ ID NO: 100259 - DNA, 15 bp, Homo sapiens
tcatttaggtagaca

SEQ ID NO: 100260 - DNA, 15 bp, Homo sapiens
ttcatttaggtagac

SEQ ID NO: 100261 - DNA, 15 bp, Homo sapiens
tttcatttaggtaga

SEQ ID NO: 100262 - DNA, 15 bp, Homo sapiens
atttcatttaggtag

SEQ ID NO: 100263 - DNA, 15 bp, Homo sapiens
catttcatttaggta

SEQ ID NO: 100264 - DNA, 15 bp, Homo sapiens
ccatttcatttaggt

SEQ ID NO: 100265 - DNA, 15 bp, Homo sapiens
cccatttcatttagg

SEQ ID NO: 100266 - DNA, 15 bp, Homo sapiens
tcccatttcatttag

SEQ ID NO: 100267 - DNA, 15 bp, Homo sapiens
atcccatttcattta

SEQ ID NO: 100268 - DNA, 15 bp, Homo sapiens
catcccatttcattt

SEQ ID NO: 100269 - DNA, 15 bp, Homo sapiens
acatcccatttcatt

SEQ ID NO: 100270 - DNA, 15 bp, Homo sapiens
cacatcccatttcat

SEQ ID NO: 100271 - DNA, 15 bp, Homo sapiens
acacatcccatttca

SEQ ID NO: 100272 - DNA, 15 bp, Homo sapiens
aacacatcccatttc

SEQ ID NO: 100273 - DNA, 15 bp, Homo sapiens
aaacacatcccattt

SEQ ID NO: 100274 - DNA, 15 bp, Homo sapiens
gaaacacatcccatt

SEQ ID NO: 100275 - DNA, 15 bp, Homo sapiens
cgaaacacatcccat

SEQ ID NO: 100276 - DNA, 15 bp, Homo sapiens
ccgaaacacatccca

SEQ ID NO: 100277 - DNA, 15 bp, Homo sapiens
tccgaaacacatccc

SEQ ID NO: 100278 - DNA, 15 bp, Homo sapiens
ttccgaaacacatcc

SEQ ID NO: 100279 - DNA, 15 bp, Homo sapiens
gttccgaaacacatc

SEQ ID NO: 100280 - DNA, 15 bp, Homo sapiens
tgttccgaaacacat

SEQ ID NO: 100281 - DNA, 15 bp, Homo sapiens
atgttccgaaacaca

SEQ ID NO: 100282 - DNA, 15 bp, Homo sapiens
aatgttccgaaacac

SEQ ID NO: 100283 - DNA, 15 bp, Homo sapiens
aaatgttccgaaaca

SEQ ID NO: 100284 - DNA, 15 bp, Homo sapiens
caaatgttccgaaac

SEQ ID NO: 100285 - DNA, 15 bp, Homo sapiens
acaaatgttccgaaa

SEQ ID NO: 100286 - DNA, 15 bp, Homo sapiens
gacaaatgttccgaa

SEQ ID NO: 100287 - DNA, 15 bp, Homo sapiens
agacaaatgttccga

SEQ ID NO: 100288 - DNA, 15 bp, Homo sapiens
gagacaaatgttccg

SEQ ID NO: 100289 - DNA, 15 bp, Homo sapiens
ggagacaaatgttcc

SEQ ID NO: 100290 - DNA, 15 bp, Homo sapiens
tggagacaaatgttc

SEQ ID NO: 100291 - DNA, 15 bp, Homo sapiens
ctggagacaaatgtt

SEQ ID NO: 100292 - DNA, 15 bp, Homo sapiens
actggagacaaatgt

SEQ ID NO: 100293 - DNA, 15 bp, Homo sapiens
aactggagacaaatg

SEQ ID NO: 100294 - DNA, 15 bp, Homo sapiens
aaactggagacaaat

SEQ ID NO: 100295 - DNA, 15 bp, Homo sapiens
aaaactggagacaaa

SEQ ID NO: 100296 - DNA, 15 bp, Homo sapiens
aaaaactggagacaa

SEQ ID NO: 100297 - DNA, 15 bp, Homo sapiens
aaaaaactggagaca

SEQ ID NO: 100298 - DNA, 15 bp, Homo sapiens
aaaaaaactggagac

SEQ ID NO: 100299 - DNA, 15 bp, Homo sapiens
aaaaaaaactggaga

SEQ ID NO: 100300 - DNA, 15 bp, Homo sapiens
aaaaaaaaactggag

SEQ ID NO: 100301 - DNA, 15 bp, Homo sapiens
taaaaaaaaactgga

SEQ ID NO: 100302 - DNA, 15 bp, Homo sapiens
ttaaaaaaaaactgg

SEQ ID NO: 100303 - DNA, 15 bp, Homo sapiens
attaaaaaaaaactg

SEQ ID NO: 100304 - DNA, 15 bp, Homo sapiens
gattaaaaaaaaact

SEQ ID NO: 100305 - DNA, 15 bp, Homo sapiens
agattaaaaaaaaac

SEQ ID NO: 100306 - DNA, 15 bp, Homo sapiens
aagattaaaaaaaaa

SEQ ID NO: 100307 - DNA, 15 bp, Homo sapiens
caagattaaaaaaaa

SEQ ID NO: 100308 - DNA, 15 bp, Homo sapiens
gcaagattaaaaaaa

SEQ ID NO: 100309 - DNA, 15 bp, Homo sapiens
tgcaagattaaaaaa

SEQ ID NO: 100310 - DNA, 15 bp, Homo sapiens
gtgcaagattaaaaa

SEQ ID NO: 100311 - DNA, 15 bp, Homo sapiens
ggtgcaagattaaaa

SEQ ID NO: 100312 - DNA, 15 bp, Homo sapiens
gggtgcaagattaaa

SEQ ID NO: 100313 - DNA, 15 bp, Homo sapiens
agggtgcaagattaa

SEQ ID NO: 100314 - DNA, 15 bp, Homo sapiens
cagggtgcaagatta

SEQ ID NO: 100315 - DNA, 15 bp, Homo sapiens
gcagggtgcaagatt

SEQ ID NO: 100316 - DNA, 15 bp, Homo sapiens
ggcagggtgcaagat

SEQ ID NO: 100317 - DNA, 15 bp, Homo sapiens
tggcagggtgcaaga

SEQ ID NO: 100318 - DNA, 15 bp, Homo sapiens
atggcagggtgcaag

SEQ ID NO: 100319 - DNA, 15 bp, Homo sapiens
aatggcagggtgcaa

SEQ ID NO: 100320 - DNA, 15 bp, Homo sapiens
aaatggcagggtgca

SEQ ID NO: 100321 - DNA, 15 bp, Homo sapiens
taaatggcagggtgc

SEQ ID NO: 100322 - DNA, 15 bp, Homo sapiens
ttaaatggcagggtg

SEQ ID NO: 100323 - DNA, 15 bp, Homo sapiens
tttaaatggcagggt

SEQ ID NO: 100324 - DNA, 15 bp, Homo sapiens
ttttaaatggcaggg

SEQ ID NO: 100325 - DNA, 15 bp, Homo sapiens
tttttaaatggcagg

SEQ ID NO: 100326 - DNA, 15 bp, Homo sapiens
ctttttaaatggcag

SEQ ID NO: 100327 - DNA, 15 bp, Homo sapiens
tctttttaaatggca

SEQ ID NO: 100328 - DNA, 15 bp, Homo sapiens
atctttttaaatggc

SEQ ID NO: 100329 - DNA, 15 bp, Homo sapiens
catctttttaaatgg

SEQ ID NO: 100330 - DNA, 15 bp, Homo sapiens
acatctttttaaatg

SEQ ID NO: 100331 - DNA, 15 bp, Homo sapiens
cacatctttttaaat

SEQ ID NO: 100332 - DNA, 15 bp, Homo sapiens
acacatctttttaaa

SEQ ID NO: 100333 - DNA, 15 bp, Homo sapiens
tacacatctttttaa

SEQ ID NO: 100334 - DNA, 15 bp, Homo sapiens
ttacacatcttttta

SEQ ID NO: 100335 - DNA, 15 bp, Homo sapiens
tttacacatcttttt

SEQ ID NO: 100336 - DNA, 15 bp, Homo sapiens
ctttacacatctttt

SEQ ID NO: 100337 - DNA, 15 bp, Homo sapiens
gctttacacatcttt

SEQ ID NO: 100338 - DNA, 15 bp, Homo sapiens
tgctttacacatctt

SEQ ID NO: 100339 - DNA, 15 bp, Homo sapiens
gtgctttacacatct

SEQ ID NO: 100340 - DNA, 15 bp, Homo sapiens
tgtgctttacacatc

SEQ ID NO: 100341 - DNA, 15 bp, Homo sapiens
atgtgctttacacat

SEQ ID NO: 100342 - DNA, 15 bp, Homo sapiens
tatgtgctttacaca

SEQ ID NO: 100343 - DNA, 15 bp, Homo sapiens
atatgtgctttacac

SEQ ID NO: 100344 - DNA, 15 bp, Homo sapiens
aatatgtgctttaca

SEQ ID NO: 100345 - DNA, 15 bp, Homo sapiens
gaatatgtgctttac

SEQ ID NO: 100346 - DNA, 15 bp, Homo sapiens
agaatatgtgcttta

SEQ ID NO: 100347 - DNA, 15 bp, Homo sapiens
gagaatatgtgcttt

SEQ ID NO: 100348 - DNA, 15 bp, Homo sapiens
tgagaatatgtgctt

SEQ ID NO: 100349 - DNA, 15 bp, Homo sapiens
ttgagaatatgtgct

SEQ ID NO: 100350 - DNA, 15 bp, Homo sapiens
gttgagaatatgtgc

SEQ ID NO: 100351 - DNA, 15 bp, Homo sapiens
tgttgagaatatgtg

SEQ ID NO: 100352 - DNA, 15 bp, Homo sapiens
atgttgagaatatgt

SEQ ID NO: 100353 - DNA, 15 bp, Homo sapiens
tatgttgagaatatg

SEQ ID NO: 100354 - DNA, 15 bp, Homo sapiens
atatgttgagaatat

SEQ ID NO: 100355 - DNA, 15 bp, Homo sapiens
catatgttgagaata

SEQ ID NO: 100356 - DNA, 15 bp, Homo sapiens
gcatatgttgagaat

SEQ ID NO: 100357 - DNA, 15 bp, Homo sapiens
tgcatatgttgagaa

SEQ ID NO: 100358 - DNA, 15 bp, Homo sapiens
gtgcatatgttgaga

SEQ ID NO: 100359 - DNA, 15 bp, Homo sapiens
tgtgcatatgttgag

SEQ ID NO: 100360 - DNA, 15 bp, Homo sapiens
atgtgcatatgttga

SEQ ID NO: 100361 - DNA, 15 bp, Homo sapiens
aatgtgcatatgttg

SEQ ID NO: 100362 - DNA, 15 bp, Homo sapiens
caatgtgcatatgtt

SEQ ID NO: 100363 - DNA, 15 bp, Homo sapiens
tcaatgtgcatatgt

SEQ ID NO: 100364 - DNA, 15 bp, Homo sapiens
atcaatgtgcatatg

SEQ ID NO: 100365 - DNA, 15 bp, Homo sapiens
aatcaatgtgcatat

SEQ ID NO: 100366 - DNA, 15 bp, Homo sapiens
aaatcaatgtgcata

SEQ ID NO: 100367 - DNA, 15 bp, Homo sapiens
taaatcaatgtgcat

SEQ ID NO: 100368 - DNA, 15 bp, Homo sapiens
ataaatcaatgtgca

SEQ ID NO: 100369 - DNA, 15 bp, Homo sapiens
tataaatcaatgtgc

SEQ ID NO: 100370 - DNA, 15 bp, Homo sapiens
ttataaatcaatgtg

SEQ ID NO: 100371 - DNA, 15 bp, Homo sapiens
tttataaatcaatgt

SEQ ID NO: 100372 - DNA, 15 bp, Homo sapiens
atttataaatcaatg

SEQ ID NO: 100373 - DNA, 15 bp, Homo sapiens
gatttataaatcaat

SEQ ID NO: 100374 - DNA, 15 bp, Homo sapiens
tgatttataaatcaa

SEQ ID NO: 100375 - DNA, 15 bp, Homo sapiens
atgatttataaatca

SEQ ID NO: 100376 - DNA, 15 bp, Homo sapiens
tatgatttataaatc

SEQ ID NO: 100377 - DNA, 15 bp, Homo sapiens
atatgatttataaat

SEQ ID NO: 100378 - DNA, 15 bp, Homo sapiens
tatatgatttataaa

SEQ ID NO: 100379 - DNA, 15 bp, Homo sapiens
atatatgatttataa

SEQ ID NO: 100380 - DNA, 15 bp, Homo sapiens
tatatatgatttata

SEQ ID NO: 100381 - DNA, 15 bp, Homo sapiens
gtatatatgatttat

SEQ ID NO: 100382 - DNA, 15 bp, Homo sapiens
tgtatatatgattta

SEQ ID NO: 100383 - DNA, 15 bp, Homo sapiens
ttgtatatatgattt

SEQ ID NO: 100384 - DNA, 15 bp, Homo sapiens
tttgtatatatgatt

SEQ ID NO: 100385 - DNA, 15 bp, Homo sapiens
gtttgtatatatgat

SEQ ID NO: 100386 - DNA, 15 bp, Homo sapiens
agtttgtatatatga

SEQ ID NO: 100387 - DNA, 15 bp, Homo sapiens
cagtttgtatatatg

SEQ ID NO: 100388 - DNA, 15 bp, Homo sapiens
acagtttgtatatat

SEQ ID NO: 100389 - DNA, 15 bp, Homo sapiens
aacagtttgtatata

SEQ ID NO: 100390 - DNA, 15 bp, Homo sapiens
taacagtttgtatat

SEQ ID NO: 100391 - DNA, 15 bp, Homo sapiens
gtaacagtttgtata

SEQ ID NO: 100392 - DNA, 15 bp, Homo sapiens
tgtaacagtttgtat

SEQ ID NO: 100393 - DNA, 15 bp, Homo sapiens
atgtaacagtttgta

SEQ ID NO: 100394 - DNA, 15 bp, Homo sapiens
aatgtaacagtttgt

SEQ ID NO: 100395 - DNA, 15 bp, Homo sapiens
taatgtaacagtttg

SEQ ID NO: 100396 - DNA, 15 bp, Homo sapiens
ataatgtaacagttt

SEQ ID NO: 100397 - DNA, 15 bp, Homo sapiens
aataatgtaacagtt

SEQ ID NO: 100398 - DNA, 15 bp, Homo sapiens
gaataatgtaacagt

SEQ ID NO: 100399 - DNA, 15 bp, Homo sapiens
agaataatgtaacag

SEQ ID NO: 100400 - DNA, 15 bp, Homo sapiens
aagaataatgtaaca

SEQ ID NO: 100401 - DNA, 15 bp, Homo sapiens
gaagaataatgtaac

SEQ ID NO: 100402 - DNA, 15 bp, Homo sapiens
tgaagaataatgtaa

SEQ ID NO: 100403 - DNA, 15 bp, Homo sapiens
atgaagaataatgta

SEQ ID NO: 100404 - DNA, 15 bp, Homo sapiens
tatgaagaataatgt

SEQ ID NO: 100405 - DNA, 15 bp, Homo sapiens
atatgaagaataatg

SEQ ID NO: 100406 - DNA, 15 bp, Homo sapiens
aatatgaagaataat

SEQ ID NO: 100407 - DNA, 15 bp, Homo sapiens
taatatgaagaataa

SEQ ID NO: 100408 - DNA, 15 bp, Homo sapiens
ctaatatgaagaata

SEQ ID NO: 100409 - DNA, 15 bp, Homo sapiens
tctaatatgaagaat

SEQ ID NO: 100410 - DNA, 15 bp, Homo sapiens
ttctaatatgaagaa

SEQ ID NO: 100411 - DNA, 15 bp, Homo sapiens
tttctaatatgaaga

SEQ ID NO: 100412 - DNA, 15 bp, Homo sapiens
ttttctaatatgaag

SEQ ID NO: 100413 - DNA, 15 bp, Homo sapiens
gttttctaatatgaa

SEQ ID NO: 100414 - DNA, 15 bp, Homo sapiens
tgttttctaatatga

SEQ ID NO: 100415 - DNA, 15 bp, Homo sapiens
ttgttttctaatatg

SEQ ID NO: 100416 - DNA, 15 bp, Homo sapiens
tttgttttctaatat

SEQ ID NO: 100417 - DNA, 15 bp, Homo sapiens
atttgttttctaata

SEQ ID NO: 100418 - DNA, 15 bp, Homo sapiens
tatttgttttctaat

SEQ ID NO: 100419 - DNA, 15 bp, Homo sapiens
gtatttgttttctaa

SEQ ID NO: 100420 - DNA, 15 bp, Homo sapiens
tgtatttgttttcta

SEQ ID NO: 100421 - DNA, 15 bp, Homo sapiens
ttgtatttgttttct

SEQ ID NO: 100422 - DNA, 15 bp, Homo sapiens
tttgtatttgttttc

SEQ ID NO: 100423 - DNA, 15 bp, Homo sapiens
ttttgtatttgtttt

SEQ ID NO: 100424 - DNA, 15 bp, Homo sapiens
attttgtatttgttt

SEQ ID NO: 100425 - DNA, 15 bp, Homo sapiens
tattttgtatttgtt

SEQ ID NO: 100426 - DNA, 15 bp, Homo sapiens
ctattttgtatttgt

SEQ ID NO: 100427 - DNA, 15 bp, Homo sapiens
tctattttgtatttg

SEQ ID NO: 100428 - DNA, 15 bp, Homo sapiens
ttctattttgtattt

SEQ ID NO: 100429 - DNA, 15 bp, Homo sapiens
gttctattttgtatt

SEQ ID NO: 100430 - DNA, 15 bp, Homo sapiens
tgttctattttgtat

SEQ ID NO: 100431 - DNA, 15 bp, Homo sapiens
atgttctattttgta

SEQ ID NO: 100432 - DNA, 15 bp, Homo sapiens
aatgttctattttgt

SEQ ID NO: 100433 - DNA, 15 bp, Homo sapiens
aaatgttctattttg

SEQ ID NO: 100434 - DNA, 15 bp, Homo sapiens
aaaatgttctatttt

SEQ ID NO: 100435 - DNA, 15 bp, Homo sapiens
taaaatgttctattt

SEQ ID NO: 100436 - DNA, 15 bp, Homo sapiens
ttaaaatgttctatt

SEQ ID NO: 100437 - DNA, 15 bp, Homo sapiens
tttaaaatgttctat

SEQ ID NO: 100438 - DNA, 15 bp, Homo sapiens
atttaaaatgttcta

SEQ ID NO: 100439 - DNA, 15 bp, Homo sapiens
catttaaaatgttct

SEQ ID NO: 100440 - DNA, 15 bp, Homo sapiens
ccatttaaaatgttc

SEQ ID NO: 100441 - DNA, 15 bp, Homo sapiens
accatttaaaatgtt

SEQ ID NO: 100442 - DNA, 15 bp, Homo sapiens
caccatttaaaatgt

SEQ ID NO: 100443 - DNA, 15 bp, Homo sapiens
tcaccatttaaaatg

SEQ ID NO: 100444 - DNA, 15 bp, Homo sapiens
atcaccatttaaaat

SEQ ID NO: 100445 - DNA, 15 bp, Homo sapiens
tatcaccatttaaaa

SEQ ID NO: 100446 - DNA, 15 bp, Homo sapiens
atatcaccatttaaa

SEQ ID NO: 100447 - DNA, 15 bp, Homo sapiens
tatatcaccatttaa

SEQ ID NO: 100448 - DNA, 15 bp, Homo sapiens
ttatatcaccattta

SEQ ID NO: 100449 - DNA, 15 bp, Homo sapiens
tttatatcaccattt

SEQ ID NO: 100450 - DNA, 15 bp, Homo sapiens
ttttatatcaccatt

SEQ ID NO: 100451 - DNA, 15 bp, Homo sapiens
tttttatatcaccat

SEQ ID NO: 100452 - DNA, 15 bp, Homo sapiens
atttttatatcacca

SEQ ID NO: 100453 - DNA, 15 bp, Homo sapiens
tatttttatatcacc

SEQ ID NO: 100454 - DNA, 15 bp, Homo sapiens
ttatttttatatcac

SEQ ID NO: 100455 - DNA, 15 bp, Homo sapiens
tttatttttatatca

SEQ ID NO: 100456 - DNA, 15 bp, Homo sapiens
atttatttttatatc

SEQ ID NO: 100457 - DNA, 15 bp, Homo sapiens
aatttatttttatat

SEQ ID NO: 100458 - DNA, 15 bp, Homo sapiens
caatttatttttata

SEQ ID NO: 100459 - DNA, 15 bp, Homo sapiens
tcaatttatttttat

SEQ ID NO: 100460 - DNA, 15 bp, Homo sapiens
ttcaatttattttta

SEQ ID NO: 100461 - DNA, 15 bp, Homo sapiens
tttcaatttattttt

SEQ ID NO: 100462 - DNA, 15 bp, Homo sapiens
gtttcaatttatttt

SEQ ID NO: 100463 - DNA, 15 bp, Homo sapiens
agtttcaatttattt

SEQ ID NO: 100464 - DNA, 15 bp, Homo sapiens
cagtttcaatttatt

SEQ ID NO: 100465 - DNA, 15 bp, Homo sapiens
tcagtttcaatttat

SEQ ID NO: 100466 - DNA, 15 bp, Homo sapiens
ttcagtttcaattta

SEQ ID NO: 100467 - DNA, 15 bp, Homo sapiens
tttcagtttcaattt

SEQ ID NO: 100468 - DNA, 15 bp, Homo sapiens
atttcagtttcaatt

SEQ ID NO: 100469 - DNA, 15 bp, Homo sapiens
aatttcagtttcaat

SEQ ID NO: 100470 - DNA, 15 bp, Homo sapiens
gaatttcagtttcaa

SEQ ID NO: 100471 - DNA, 15 bp, Homo sapiens
agaatttcagtttca

SEQ ID NO: 100472 - DNA, 15 bp, Homo sapiens
tagaatttcagtttc

SEQ ID NO: 100473 - DNA, 15 bp, Homo sapiens
gtagaatttcagttt

SEQ ID NO: 100474 - DNA, 15 bp, Homo sapiens
agtagaatttcagtt

SEQ ID NO: 100475 - DNA, 15 bp, Homo sapiens
gagtagaatttcagt

SEQ ID NO: 100476 - DNA, 15 bp, Homo sapiens
agagtagaatttcag

SEQ ID NO: 100477 - DNA, 15 bp, Homo sapiens
aagagtagaatttca

SEQ ID NO: 100478 - DNA, 15 bp, Homo sapiens
aaagagtagaatttc

SEQ ID NO: 100479 - DNA, 15 bp, Homo sapiens
aaaagagtagaattt

SEQ ID NO: 100480 - DNA, 15 bp, Homo sapiens
gaaaagagtagaatt

SEQ ID NO: 100481 - DNA, 15 bp, Homo sapiens
ggaaaagagtagaat

SEQ ID NO: 100482 - DNA, 15 bp, Homo sapiens
aggaaaagagtagaa

SEQ ID NO: 100483 - DNA, 15 bp, Homo sapiens
gaggaaaagagtaga

SEQ ID NO: 100484 - DNA, 15 bp, Homo sapiens
ggaggaaaagagtag

SEQ ID NO: 100485 - DNA, 15 bp, Homo sapiens
aggaggaaaagagta

SEQ ID NO: 100486 - DNA, 15 bp, Homo sapiens
taggaggaaaagagt

SEQ ID NO: 100487 - DNA, 15 bp, Homo sapiens
ataggaggaaaagag

SEQ ID NO: 100488 - DNA, 15 bp, Homo sapiens
aataggaggaaaaga

SEQ ID NO: 100489 - DNA, 15 bp, Homo sapiens
aaataggaggaaaag

SEQ ID NO: 100490 - DNA, 15 bp, Homo sapiens
aaaataggaggaaaa

SEQ ID NO: 100491 - DNA, 15 bp, Homo sapiens
gaaaataggaggaaa

SEQ ID NO: 100492 - DNA, 15 bp, Homo sapiens
agaaaataggaggaa

SEQ ID NO: 100493 - DNA, 15 bp, Homo sapiens
gagaaaataggagga

SEQ ID NO: 100494 - DNA, 15 bp, Homo sapiens
agagaaaataggagg

SEQ ID NO: 100495 - DNA, 15 bp, Homo sapiens
tagagaaaataggag

SEQ ID NO: 100496 - DNA, 15 bp, Homo sapiens
atagagaaaatagga

SEQ ID NO: 100497 - DNA, 15 bp, Homo sapiens
tatagagaaaatagg

SEQ ID NO: 100498 - DNA, 15 bp, Homo sapiens
atatagagaaaatag

SEQ ID NO: 100499 - DNA, 15 bp, Homo sapiens
aatatagagaaaata

SEQ ID NO: 100500 - DNA, 15 bp, Homo sapiens
caatatagagaaaat

SEQ ID NO: 100501 - DNA, 15 bp, Homo sapiens
tcaatatagagaaaa

SEQ ID NO: 100502 - DNA, 15 bp, Homo sapiens
ttcaatatagagaaa

SEQ ID NO: 100503 - DNA, 15 bp, Homo sapiens
attcaatatagagaa

SEQ ID NO: 100504 - DNA, 15 bp, Homo sapiens
tattcaatatagaga

SEQ ID NO: 100505 - DNA, 15 bp, Homo sapiens
atattcaatatagag

SEQ ID NO: 100506 - DNA, 15 bp, Homo sapiens
gatattcaatataga

SEQ ID NO: 100507 - DNA, 15 bp, Homo sapiens
ggatattcaatatag

SEQ ID NO: 100508 - DNA, 15 bp, Homo sapiens
aggatattcaatata

SEQ ID NO: 100509 - DNA, 15 bp, Homo sapiens
gaggatattcaatat

SEQ ID NO: 100510 - DNA, 15 bp, Homo sapiens
agaggatattcaata

SEQ ID NO: 100511 - DNA, 15 bp, Homo sapiens
cagaggatattcaat

SEQ ID NO: 100512 - DNA, 15 bp, Homo sapiens
gcagaggatattcaa

SEQ ID NO: 100513 - DNA, 15 bp, Homo sapiens
agcagaggatattca

SEQ ID NO: 100514 - DNA, 15 bp, Homo sapiens
tagcagaggatattc

SEQ ID NO: 100515 - DNA, 15 bp, Homo sapiens
atagcagaggatatt

SEQ ID NO: 100516 - DNA, 15 bp, Homo sapiens
aatagcagaggatat

SEQ ID NO: 100517 - DNA, 15 bp, Homo sapiens
taatagcagaggata

SEQ ID NO: 100518 - DNA, 15 bp, Homo sapiens
ttaatagcagaggat

SEQ ID NO: 100519 - DNA, 15 bp, Homo sapiens
gttaatagcagagga

SEQ ID NO: 100520 - DNA, 15 bp, Homo sapiens
agttaatagcagagg

SEQ ID NO: 100521 - DNA, 15 bp, Homo sapiens
gagttaatagcagag

SEQ ID NO: 100522 - DNA, 15 bp, Homo sapiens
agagttaatagcaga

SEQ ID NO: 100523 - DNA, 15 bp, Homo sapiens
gagagttaatagcag

SEQ ID NO: 100524 - DNA, 15 bp, Homo sapiens
tgagagttaatagca

SEQ ID NO: 100525 - DNA, 15 bp, Homo sapiens
ttgagagttaatagc

SEQ ID NO: 100526 - DNA, 15 bp, Homo sapiens
tttgagagttaatag

SEQ ID NO: 100527 - DNA, 15 bp, Homo sapiens
ttttgagagttaata

SEQ ID NO: 100528 - DNA, 15 bp, Homo sapiens
gttttgagagttaat

SEQ ID NO: 100529 - DNA, 15 bp, Homo sapiens
tgttttgagagttaa

SEQ ID NO: 100530 - DNA, 15 bp, Homo sapiens
ttgttttgagagtta

SEQ ID NO: 100531 - DNA, 15 bp, Homo sapiens
tttgttttgagagtt

SEQ ID NO: 100532 - DNA, 15 bp, Homo sapiens
ctttgttttgagagt

SEQ ID NO: 100533 - DNA, 15 bp, Homo sapiens
tctttgttttgagag

SEQ ID NO: 100534 - DNA, 15 bp, Homo sapiens
atctttgttttgaga

SEQ ID NO: 100535 - DNA, 15 bp, Homo sapiens
catctttgttttgag

SEQ ID NO: 100536 - DNA, 15 bp, Homo sapiens
acatctttgttttga

SEQ ID NO: 100537 - DNA, 15 bp, Homo sapiens
aacatctttgttttg

SEQ ID NO: 100538 - DNA, 15 bp, Homo sapiens
caacatctttgtttt

SEQ ID NO: 100539 - DNA, 15 bp, Homo sapiens
ccaacatctttgttt

SEQ ID NO: 100540 - DNA, 15 bp, Homo sapiens
accaacatctttgtt

SEQ ID NO: 100541 - DNA, 15 bp, Homo sapiens
gaccaacatctttgt

SEQ ID NO: 100542 - DNA, 15 bp, Homo sapiens
agaccaacatctttg

SEQ ID NO: 100543 - DNA, 15 bp, Homo sapiens
aagaccaacatcttt

SEQ ID NO: 100544 - DNA, 15 bp, Homo sapiens
aaagaccaacatctt

SEQ ID NO: 100545 - DNA, 15 bp, Homo sapiens
taaagaccaacatct

SEQ ID NO: 100546 - DNA, 15 bp, Homo sapiens
ctaaagaccaacatc

SEQ ID NO: 100547 - DNA, 15 bp, Homo sapiens
actaaagaccaacat

SEQ ID NO: 100548 - DNA, 15 bp, Homo sapiens
cactaaagaccaaca

SEQ ID NO: 100549 - DNA, 15 bp, Homo sapiens
tcactaaagaccaac

SEQ ID NO: 100550 - DNA, 15 bp, Homo sapiens
ttcactaaagaccaa

SEQ ID NO: 100551 - DNA, 15 bp, Homo sapiens
tttcactaaagacca

SEQ ID NO: 100552 - DNA, 15 bp, Homo sapiens
ttttcactaaagacc

SEQ ID NO: 100553 - DNA, 15 bp, Homo sapiens
tttttcactaaagac

SEQ ID NO: 100554 - DNA, 15 bp, Homo sapiens
ttttttcactaaaga

SEQ ID NO: 100555 - DNA, 15 bp, Homo sapiens
cttttttcactaaag

SEQ ID NO: 100556 - DNA, 15 bp, Homo sapiens
acttttttcactaaa

SEQ ID NO: 100557 - DNA, 15 bp, Homo sapiens
cacttttttcactaa

SEQ ID NO: 100558 - DNA, 15 bp, Homo sapiens
acacttttttcacta

SEQ ID NO: 100559 - DNA, 15 bp, Homo sapiens
tacacttttttcact

SEQ ID NO: 100560 - DNA, 15 bp, Homo sapiens
atacacttttttcac

SEQ ID NO: 100561 - DNA, 15 bp, Homo sapiens
catacacttttttca

SEQ ID NO: 100562 - DNA, 15 bp, Homo sapiens
gcatacacttttttc

SEQ ID NO: 100563 - DNA, 15 bp, Homo sapiens
tgcatacactttttt

SEQ ID NO: 100564 - DNA, 15 bp, Homo sapiens
atgcatacacttttt

SEQ ID NO: 100565 - DNA, 15 bp, Homo sapiens
catgcatacactttt

SEQ ID NO: 100566 - DNA, 15 bp, Homo sapiens
acatgcatacacttt

SEQ ID NO: 100567 - DNA, 15 bp, Homo sapiens
tacatgcatacactt

SEQ ID NO: 100568 - DNA, 15 bp, Homo sapiens
gtacatgcatacact

SEQ ID NO: 100569 - DNA, 15 bp, Homo sapiens
agtacatgcatacac

SEQ ID NO: 100570 - DNA, 15 bp, Homo sapiens
cagtacatgcataca

SEQ ID NO: 100571 - DNA, 15 bp, Homo sapiens
ccagtacatgcatac

SEQ ID NO: 100572 - DNA, 15 bp, Homo sapiens
tccagtacatgcata

SEQ ID NO: 100573 - DNA, 15 bp, Homo sapiens
atccagtacatgcat

SEQ ID NO: 100574 - DNA, 15 bp, Homo sapiens
aatccagtacatgca

SEQ ID NO: 100575 - DNA, 15 bp, Homo sapiens
aaatccagtacatgc

SEQ ID NO: 100576 - DNA, 15 bp, Homo sapiens
gaaatccagtacatg

SEQ ID NO: 100577 - DNA, 15 bp, Homo sapiens
agaaatccagtacat

SEQ ID NO: 100578 - DNA, 15 bp, Homo sapiens
tagaaatccagtaca

SEQ ID NO: 100579 - DNA, 15 bp, Homo sapiens
ctagaaatccagtac

SEQ ID NO: 100580 - DNA, 15 bp, Homo sapiens
actagaaatccagta

SEQ ID NO: 100581 - DNA, 15 bp, Homo sapiens
cactagaaatccagt

SEQ ID NO: 100582 - DNA, 15 bp, Homo sapiens
tcactagaaatccag

SEQ ID NO: 100583 - DNA, 15 bp, Homo sapiens
gtcactagaaatcca

SEQ ID NO: 100584 - DNA, 15 bp, Homo sapiens
agtcactagaaatcc

SEQ ID NO: 100585 - DNA, 15 bp, Homo sapiens
aagtcactagaaatc

SEQ ID NO: 100586 - DNA, 15 bp, Homo sapiens
gaagtcactagaaat

SEQ ID NO: 100587 - DNA, 15 bp, Homo sapiens
ggaagtcactagaaa

SEQ ID NO: 100588 - DNA, 15 bp, Homo sapiens
tggaagtcactagaa

SEQ ID NO: 100589 - DNA, 15 bp, Homo sapiens
ttggaagtcactaga

SEQ ID NO: 100590 - DNA, 15 bp, Homo sapiens
cttggaagtcactag

SEQ ID NO: 100591 - DNA, 15 bp, Homo sapiens
tcttggaagtcacta

SEQ ID NO: 100592 - DNA, 15 bp, Homo sapiens
ttcttggaagtcact

SEQ ID NO: 100593 - DNA, 15 bp, Homo sapiens
tttcttggaagtcac

SEQ ID NO: 100594 - DNA, 15 bp, Homo sapiens
ctttcttggaagtca

SEQ ID NO: 100595 - DNA, 15 bp, Homo sapiens
cctttcttggaagtc

SEQ ID NO: 100596 - DNA, 15 bp, Homo sapiens
tcctttcttggaagt

SEQ ID NO: 100597 - DNA, 15 bp, Homo sapiens
ctcctttcttggaag

SEQ ID NO: 100598 - DNA, 15 bp, Homo sapiens
tctcctttcttggaa

SEQ ID NO: 100599 - DNA, 15 bp, Homo sapiens
ttctcctttcttgga

SEQ ID NO: 100600 - DNA, 15 bp, Homo sapiens
tttctcctttcttgg

SEQ ID NO: 100601 - DNA, 15 bp, Homo sapiens
ttttctcctttcttg

SEQ ID NO: 100602 - DNA, 15 bp, Homo sapiens
attttctcctttctt

SEQ ID NO: 100603 - DNA, 15 bp, Homo sapiens
aattttctcctttct

SEQ ID NO: 100604 - DNA, 15 bp, Homo sapiens
taattttctcctttc

SEQ ID NO: 100605 - DNA, 15 bp, Homo sapiens
ttaattttctccttt

SEQ ID NO: 100606 - DNA, 15 bp, Homo sapiens
tttaattttctcctt

SEQ ID NO: 100607 - DNA, 15 bp, Homo sapiens
ttttaattttctcct

SEQ ID NO: 100608 - DNA, 15 bp, Homo sapiens
gttttaattttctcc

SEQ ID NO: 100609 - DNA, 15 bp, Homo sapiens
agttttaattttctc

SEQ ID NO: 100610 - DNA, 15 bp, Homo sapiens
aagttttaattttct

SEQ ID NO: 100611 - DNA, 15 bp, Homo sapiens
caagttttaattttc

SEQ ID NO: 100612 - DNA, 15 bp, Homo sapiens
ccaagttttaatttt

SEQ ID NO: 100613 - DNA, 15 bp, Homo sapiens
accaagttttaattt

SEQ ID NO: 100614 - DNA, 15 bp, Homo sapiens
taccaagttttaatt

SEQ ID NO: 100615 - DNA, 15 bp, Homo sapiens
ataccaagttttaat

SEQ ID NO: 100616 - DNA, 15 bp, Homo sapiens
aataccaagttttaa

SEQ ID NO: 100617 - DNA, 15 bp, Homo sapiens
taataccaagtttta

SEQ ID NO: 100618 - DNA, 15 bp, Homo sapiens
ctaataccaagtttt

SEQ ID NO: 100619 - DNA, 15 bp, Homo sapiens
actaataccaagttt

SEQ ID NO: 100620 - DNA, 15 bp, Homo sapiens
cactaataccaagtt

SEQ ID NO: 100621 - DNA, 15 bp, Homo sapiens
ccactaataccaagt

SEQ ID NO: 100622 - DNA, 15 bp, Homo sapiens
gccactaataccaag

SEQ ID NO: 100623 - DNA, 15 bp, Homo sapiens
ggccactaataccaa

SEQ ID NO: 100624 - DNA, 15 bp, Homo sapiens
gggccactaatacca

SEQ ID NO: 100625 - DNA, 15 bp, Homo sapiens
tgggccactaatacc

SEQ ID NO: 100626 - DNA, 15 bp, Homo sapiens
ttgggccactaatac

SEQ ID NO: 100627 - DNA, 15 bp, Homo sapiens
cttgggccactaata

SEQ ID NO: 100628 - DNA, 15 bp, Homo sapiens
gcttgggccactaat

SEQ ID NO: 100629 - DNA, 15 bp, Homo sapiens
tgcttgggccactaa

SEQ ID NO: 100630 - DNA, 15 bp, Homo sapiens
atgcttgggccacta

SEQ ID NO: 100631 - DNA, 15 bp, Homo sapiens
tatgcttgggccact

SEQ ID NO: 100632 - DNA, 15 bp, Homo sapiens
ctatgcttgggccac

SEQ ID NO: 100633 - DNA, 15 bp, Homo sapiens
tctatgcttgggcca

SEQ ID NO: 100634 - DNA, 15 bp, Homo sapiens
ttctatgcttgggcc

SEQ ID NO: 100635 - DNA, 15 bp, Homo sapiens
tttctatgcttgggc

SEQ ID NO: 100636 - DNA, 15 bp, Homo sapiens
ctttctatgcttggg

SEQ ID NO: 100637 - DNA, 15 bp, Homo sapiens
tctttctatgcttgg

SEQ ID NO: 100638 - DNA, 15 bp, Homo sapiens
ctctttctatgcttg

SEQ ID NO: 100639 - DNA, 15 bp, Homo sapiens
cctctttctatgctt

SEQ ID NO: 100640 - DNA, 15 bp, Homo sapiens
tcctctttctatgct

SEQ ID NO: 100641 - DNA, 15 bp, Homo sapiens
ttcctctttctatgc

SEQ ID NO: 100642 - DNA, 15 bp, Homo sapiens
attcctctttctatg

SEQ ID NO: 100643 - DNA, 15 bp, Homo sapiens
cattcctctttctat

SEQ ID NO: 100644 - DNA, 15 bp, Homo sapiens
tcattcctctttcta

SEQ ID NO: 100645 - DNA, 15 bp, Homo sapiens
atcattcctctttct

SEQ ID NO: 100646 - DNA, 15 bp, Homo sapiens
catcattcctctttc

SEQ ID NO: 100647 - DNA, 15 bp, Homo sapiens
tcatcattcctcttt

SEQ ID NO: 100648 - DNA, 15 bp, Homo sapiens
ttcatcattcctctt

SEQ ID NO: 100649 - DNA, 15 bp, Homo sapiens
cttcatcattcctct

SEQ ID NO: 100650 - DNA, 15 bp, Homo sapiens
ccttcatcattcctc

SEQ ID NO: 100651 - DNA, 15 bp, Homo sapiens
gccttcatcattcct

SEQ ID NO: 100652 - DNA, 15 bp, Homo sapiens
ggccttcatcattcc

SEQ ID NO: 100653 - DNA, 15 bp, Homo sapiens
tggccttcatcattc

SEQ ID NO: 100654 - DNA, 15 bp, Homo sapiens
ctggccttcatcatt

SEQ ID NO: 100655 - DNA, 15 bp, Homo sapiens
cctggccttcatcat

SEQ ID NO: 100656 - DNA, 15 bp, Homo sapiens
acctggccttcatca

SEQ ID NO: 100657 - DNA, 15 bp, Homo sapiens
tacctggccttcatc

SEQ ID NO: 100658 - DNA, 15 bp, Homo sapiens
atacctggccttcat

SEQ ID NO: 100659 - DNA, 15 bp, Homo sapiens
catacctggccttca

SEQ ID NO: 100660 - DNA, 15 bp, Homo sapiens
acatacctggccttc

SEQ ID NO: 100661 - DNA, 15 bp, Homo sapiens
aacatacctggcctt

SEQ ID NO: 100662 - DNA, 15 bp, Homo sapiens
aaacatacctggcct

SEQ ID NO: 100663 - DNA, 15 bp, Homo sapiens
taaacatacctggcc

SEQ ID NO: 100664 - DNA, 15 bp, Homo sapiens
ttaaacatacctggc

SEQ ID NO: 100665 - DNA, 15 bp, Homo sapiens
cttaaacatacctgg

SEQ ID NO: 100666 - DNA, 15 bp, Homo sapiens
tcttaaacatacctg

SEQ ID NO: 100667 - DNA, 15 bp, Homo sapiens
ttcttaaacatacct

SEQ ID NO: 100668 - DNA, 15 bp, Homo sapiens
gttcttaaacatacc

SEQ ID NO: 100669 - DNA, 15 bp, Homo sapiens
tgttcttaaacatac

SEQ ID NO: 100670 - DNA, 15 bp, Homo sapiens
ttgttcttaaacata

SEQ ID NO: 100671 - DNA, 15 bp, Homo sapiens
tttgttcttaaacat

SEQ ID NO: 100672 - DNA, 15 bp, Homo sapiens
gtttgttcttaaaca

SEQ ID NO: 100673 - DNA, 15 bp, Homo sapiens
agtttgttcttaaac

SEQ ID NO: 100674 - DNA, 15 bp, Homo sapiens
tagtttgttcttaaa

SEQ ID NO: 100675 - DNA, 15 bp, Homo sapiens
ctagtttgttcttaa

SEQ ID NO: 100676 - DNA, 15 bp, Homo sapiens
gctagtttgttctta

SEQ ID NO: 100677 - DNA, 15 bp, Homo sapiens
agctagtttgttctt

SEQ ID NO: 100678 - DNA, 15 bp, Homo sapiens
cagctagtttgttct

SEQ ID NO: 100679 - DNA, 15 bp, Homo sapiens
tcagctagtttgttc

SEQ ID NO: 100680 - DNA, 15 bp, Homo sapiens
ttcagctagtttgtt

SEQ ID NO: 100681 - DNA, 15 bp, Homo sapiens
attcagctagtttgt

SEQ ID NO: 100682 - DNA, 15 bp, Homo sapiens
aattcagctagtttg

SEQ ID NO: 100683 - DNA, 15 bp, Homo sapiens
gaattcagctagttt

SEQ ID NO: 100684 - DNA, 15 bp, Homo sapiens
agaattcagctagtt

SEQ ID NO: 100685 - DNA, 15 bp, Homo sapiens
aagaattcagctagt

SEQ ID NO: 100686 - DNA, 15 bp, Homo sapiens
aaagaattcagctag

SEQ ID NO: 100687 - DNA, 15 bp, Homo sapiens
caaagaattcagcta

SEQ ID NO: 100688 - DNA, 15 bp, Homo sapiens
ccaaagaattcagct

SEQ ID NO: 100689 - DNA, 15 bp, Homo sapiens
gccaaagaattcagc

SEQ ID NO: 100690 - DNA, 15 bp, Homo sapiens
tgccaaagaattcag

SEQ ID NO: 100691 - DNA, 15 bp, Homo sapiens
ctgccaaagaattca

SEQ ID NO: 100692 - DNA, 15 bp, Homo sapiens
tctgccaaagaattc

SEQ ID NO: 100693 - DNA, 15 bp, Homo sapiens
atctgccaaagaatt

SEQ ID NO: 100694 - DNA, 15 bp, Homo sapiens
gatctgccaaagaat

SEQ ID NO: 100695 - DNA, 15 bp, Homo sapiens
agatctgccaaagaa

SEQ ID NO: 100696 - DNA, 15 bp, Homo sapiens
gagatctgccaaaga

SEQ ID NO: 100697 - DNA, 15 bp, Homo sapiens
ggagatctgccaaag

SEQ ID NO: 100698 - DNA, 15 bp, Homo sapiens
tggagatctgccaaa

SEQ ID NO: 100699 - DNA, 15 bp, Homo sapiens
atggagatctgccaa

SEQ ID NO: 100700 - DNA, 15 bp, Homo sapiens
gatggagatctgcca

SEQ ID NO: 100701 - DNA, 15 bp, Homo sapiens
agatggagatctgcc

SEQ ID NO: 100702 - DNA, 15 bp, Homo sapiens
aagatggagatctgc

SEQ ID NO: 100703 - DNA, 15 bp, Homo sapiens
taagatggagatctg

SEQ ID NO: 100704 - DNA, 15 bp, Homo sapiens
ctaagatggagatct

SEQ ID NO: 100705 - DNA, 15 bp, Homo sapiens
gctaagatggagatc

SEQ ID NO: 100706 - DNA, 15 bp, Homo sapiens
ggctaagatggagat

SEQ ID NO: 100707 - DNA, 15 bp, Homo sapiens
tggctaagatggaga

SEQ ID NO: 100708 - DNA, 15 bp, Homo sapiens
gtggctaagatggag

SEQ ID NO: 100709 - DNA, 15 bp, Homo sapiens
cgtggctaagatgga

SEQ ID NO: 100710 - DNA, 15 bp, Homo sapiens
gcgtggctaagatgg

SEQ ID NO: 100711 - DNA, 15 bp, Homo sapiens
tgcgtggctaagatg

SEQ ID NO: 100712 - DNA, 15 bp, Homo sapiens
ttgcgtggctaagat

SEQ ID NO: 100713 - DNA, 15 bp, Homo sapiens
attgcgtggctaaga

SEQ ID NO: 100714 - DNA, 15 bp, Homo sapiens
aattgcgtggctaag

SEQ ID NO: 100715 - DNA, 15 bp, Homo sapiens
aaattgcgtggctaa

SEQ ID NO: 100716 - DNA, 15 bp, Homo sapiens
gaaattgcgtggcta

SEQ ID NO: 100717 - DNA, 15 bp, Homo sapiens
ggaaattgcgtggct

SEQ ID NO: 100718 - DNA, 15 bp, Homo sapiens
gggaaattgcgtggc

SEQ ID NO: 100719 - DNA, 15 bp, Homo sapiens
ggggaaattgcgtgg

SEQ ID NO: 100720 - DNA, 15 bp, Homo sapiens
tggggaaattgcgtg

SEQ ID NO: 100721 - DNA, 15 bp, Homo sapiens
atggggaaattgcgt

SEQ ID NO: 100722 - DNA, 15 bp, Homo sapiens
gatggggaaattgcg

SEQ ID NO: 100723 - DNA, 15 bp, Homo sapiens
tgatggggaaattgc

SEQ ID NO: 100724 - DNA, 15 bp, Homo sapiens
ttgatggggaaattg

SEQ ID NO: 100725 - DNA, 15 bp, Homo sapiens
attgatggggaaatt

SEQ ID NO: 100726 - DNA, 15 bp, Homo sapiens
aattgatggggaaat

SEQ ID NO: 100727 - DNA, 15 bp, Homo sapiens
aaattgatggggaaa

SEQ ID NO: 100728 - DNA, 15 bp, Homo sapiens
aaaattgatggggaa

SEQ ID NO: 100729 - DNA, 15 bp, Homo sapiens
caaaattgatgggga

SEQ ID NO: 100730 - DNA, 15 bp, Homo sapiens
tcaaaattgatgggg

SEQ ID NO: 100731 - DNA, 15 bp, Homo sapiens
ttcaaaattgatggg

SEQ ID NO: 100732 - DNA, 15 bp, Homo sapiens
tttcaaaattgatgg

SEQ ID NO: 100733 - DNA, 15 bp, Homo sapiens
atttcaaaattgatg

SEQ ID NO: 100734 - DNA, 15 bp, Homo sapiens
gatttcaaaattgat

SEQ ID NO: 100735 - DNA, 15 bp, Homo sapiens
agatttcaaaattga

SEQ ID NO: 100736 - DNA, 15 bp, Homo sapiens
cagatttcaaaattg

SEQ ID NO: 100737 - DNA, 15 bp, Homo sapiens
gcagatttcaaaatt

SEQ ID NO: 100738 - DNA, 15 bp, Homo sapiens
tgcagatttcaaaat

SEQ ID NO: 100739 - DNA, 15 bp, Homo sapiens
ttgcagatttcaaaa

SEQ ID NO: 100740 - DNA, 15 bp, Homo sapiens
tttgcagatttcaaa

SEQ ID NO: 100741 - DNA, 15 bp, Homo sapiens
ctttgcagatttcaa

SEQ ID NO: 100742 - DNA, 15 bp, Homo sapiens
actttgcagatttca

SEQ ID NO: 100743 - DNA, 15 bp, Homo sapiens
tactttgcagatttc

SEQ ID NO: 100744 - DNA, 15 bp, Homo sapiens
atactttgcagattt

SEQ ID NO: 100745 - DNA, 15 bp, Homo sapiens
aatactttgcagatt

SEQ ID NO: 100746 - DNA, 15 bp, Homo sapiens
gaatactttgcagat

SEQ ID NO: 100747 - DNA, 15 bp, Homo sapiens
tgaatactttgcaga

SEQ ID NO: 100748 - DNA, 15 bp, Homo sapiens
atgaatactttgcag

SEQ ID NO: 100749 - DNA, 15 bp, Homo sapiens
aatgaatactttgca

SEQ ID NO: 100750 - DNA, 15 bp, Homo sapiens
taatgaatactttgc

SEQ ID NO: 100751 - DNA, 15 bp, Homo sapiens
ctaatgaatactttg

SEQ ID NO: 100752 - DNA, 15 bp, Homo sapiens
cctaatgaatacttt

SEQ ID NO: 100753 - DNA, 15 bp, Homo sapiens
ccctaatgaatactt

SEQ ID NO: 100754 - DNA, 15 bp, Homo sapiens
tccctaatgaatact

SEQ ID NO: 100755 - DNA, 15 bp, Homo sapiens
ttccctaatgaatac

SEQ ID NO: 100756 - DNA, 15 bp, Homo sapiens
tttccctaatgaata

SEQ ID NO: 100757 - DNA, 15 bp, Homo sapiens
ttttccctaatgaat

SEQ ID NO: 100758 - DNA, 15 bp, Homo sapiens
attttccctaatgaa

SEQ ID NO: 100759 - DNA, 15 bp, Homo sapiens
cattttccctaatga

SEQ ID NO: 100760 - DNA, 15 bp, Homo sapiens
ccattttccctaatg

SEQ ID NO: 100761 - DNA, 15 bp, Homo sapiens
tccattttccctaat

SEQ ID NO: 100762 - DNA, 15 bp, Homo sapiens
ctccattttccctaa

SEQ ID NO: 100763 - DNA, 15 bp, Homo sapiens
cctccattttcccta

SEQ ID NO: 100764 - DNA, 15 bp, Homo sapiens
gcctccattttccct

SEQ ID NO: 100765 - DNA, 15 bp, Homo sapiens
tgcctccattttccc

SEQ ID NO: 100766 - DNA, 15 bp, Homo sapiens
atgcctccattttcc

SEQ ID NO: 100767 - DNA, 15 bp, Homo sapiens
tatgcctccattttc

SEQ ID NO: 100768 - DNA, 15 bp, Homo sapiens
atatgcctccatttt

SEQ ID NO: 100769 - DNA, 15 bp, Homo sapiens
tatatgcctccattt

SEQ ID NO: 100770 - DNA, 15 bp, Homo sapiens
atatatgcctccatt

SEQ ID NO: 100771 - DNA, 15 bp, Homo sapiens
aatatatgcctccat

SEQ ID NO: 100772 - DNA, 15 bp, Homo sapiens
aaatatatgcctcca

SEQ ID NO: 100773 - DNA, 15 bp, Homo sapiens
gaaatatatgcctcc

SEQ ID NO: 100774 - DNA, 15 bp, Homo sapiens
agaaatatatgcctc

SEQ ID NO: 100775 - DNA, 15 bp, Homo sapiens
cagaaatatatgcct

SEQ ID NO: 100776 - DNA, 15 bp, Homo sapiens
tcagaaatatatgcc

SEQ ID NO: 100777 - DNA, 15 bp, Homo sapiens
ctcagaaatatatgc

SEQ ID NO: 100778 - DNA, 15 bp, Homo sapiens
actcagaaatatatg

SEQ ID NO: 100779 - DNA, 15 bp, Homo sapiens
cactcagaaatatat

SEQ ID NO: 100780 - DNA, 15 bp, Homo sapiens
gcactcagaaatata

SEQ ID NO: 100781 - DNA, 15 bp, Homo sapiens
agcactcagaaatat

SEQ ID NO: 100782 - DNA, 15 bp, Homo sapiens
cagcactcagaaata

SEQ ID NO: 100783 - DNA, 15 bp, Homo sapiens
acagcactcagaaat

SEQ ID NO: 100784 - DNA, 15 bp, Homo sapiens
tacagcactcagaaa

SEQ ID NO: 100785 - DNA, 15 bp, Homo sapiens
ttacagcactcagaa

SEQ ID NO: 100786 - DNA, 15 bp, Homo sapiens
cttacagcactcaga

SEQ ID NO: 100787 - DNA, 15 bp, Homo sapiens
tcttacagcactcag

SEQ ID NO: 100788 - DNA, 15 bp, Homo sapiens
ttcttacagcactca

SEQ ID NO: 100789 - DNA, 15 bp, Homo sapiens
cttcttacagcactc

SEQ ID NO: 100790 - DNA, 15 bp, Homo sapiens
tcttcttacagcact

SEQ ID NO: 100791 - DNA, 15 bp, Homo sapiens
atcttcttacagcac

SEQ ID NO: 100792 - DNA, 15 bp, Homo sapiens
catcttcttacagca

SEQ ID NO: 100793 - DNA, 15 bp, Homo sapiens
gcatcttcttacagc

SEQ ID NO: 100794 - DNA, 15 bp, Homo sapiens
agcatcttcttacag

SEQ ID NO: 100795 - DNA, 15 bp, Homo sapiens
gagcatcttcttaca

SEQ ID NO: 100796 - DNA, 15 bp, Homo sapiens
tgagcatcttcttac

SEQ ID NO: 100797 - DNA, 15 bp, Homo sapiens
ctgagcatcttctta

SEQ ID NO: 100798 - DNA, 15 bp, Homo sapiens
gctgagcatcttctt

SEQ ID NO: 100799 - DNA, 15 bp, Homo sapiens
ggctgagcatcttct

SEQ ID NO: 100800 - DNA, 15 bp, Homo sapiens
gggctgagcatcttc

SEQ ID NO: 100801 - DNA, 15 bp, Homo sapiens
tgggctgagcatctt

SEQ ID NO: 100802 - DNA, 15 bp, Homo sapiens
atgggctgagcatct

SEQ ID NO: 100803 - DNA, 15 bp, Homo sapiens
aatgggctgagcatc

SEQ ID NO: 100804 - DNA, 15 bp, Homo sapiens
taatgggctgagcat

SEQ ID NO: 100805 - DNA, 15 bp, Homo sapiens
ctaatgggctgagca

SEQ ID NO: 100806 - DNA, 15 bp, Homo sapiens
actaatgggctgagc

SEQ ID NO: 100807 - DNA, 15 bp, Homo sapiens
aactaatgggctgag

SEQ ID NO: 100808 - DNA, 15 bp, Homo sapiens
gaactaatgggctga

SEQ ID NO: 100809 - DNA, 15 bp, Homo sapiens
tgaactaatgggctg

SEQ ID NO: 100810 - DNA, 15 bp, Homo sapiens
atgaactaatgggct

SEQ ID NO: 100811 - DNA, 15 bp, Homo sapiens
aatgaactaatgggc

SEQ ID NO: 100812 - DNA, 15 bp, Homo sapiens
gaatgaactaatggg

SEQ ID NO: 100813 - DNA, 15 bp, Homo sapiens
agaatgaactaatgg

SEQ ID NO: 100814 - DNA, 15 bp, Homo sapiens
aagaatgaactaatg

SEQ ID NO: 100815 - DNA, 15 bp, Homo sapiens
aaagaatgaactaat

SEQ ID NO: 100816 - DNA, 15 bp, Homo sapiens
aaaagaatgaactaa

SEQ ID NO: 100817 - DNA, 15 bp, Homo sapiens
taaaagaatgaacta

SEQ ID NO: 100818 - DNA, 15 bp, Homo sapiens
ttaaaagaatgaact

SEQ ID NO: 100819 - DNA, 15 bp, Homo sapiens
tttaaaagaatgaac

SEQ ID NO: 100820 - DNA, 15 bp, Homo sapiens
ctttaaaagaatgaa

SEQ ID NO: 100821 - DNA, 15 bp, Homo sapiens
cctttaaaagaatga

SEQ ID NO: 100822 - DNA, 15 bp, Homo sapiens
acctttaaaagaatg

SEQ ID NO: 100823 - DNA, 15 bp, Homo sapiens
aacctttaaaagaat

SEQ ID NO: 100824 - DNA, 15 bp, Homo sapiens
aaacctttaaaagaa

SEQ ID NO: 100825 - DNA, 15 bp, Homo sapiens
aaaacctttaaaaga

SEQ ID NO: 100826 - DNA, 15 bp, Homo sapiens
gaaaacctttaaaag

SEQ ID NO: 100827 - DNA, 15 bp, Homo sapiens
agaaaacctttaaaa

SEQ ID NO: 100828 - DNA, 15 bp, Homo sapiens
aagaaaacctttaaa

SEQ ID NO: 100829 - DNA, 15 bp, Homo sapiens
aaagaaaacctttaa

SEQ ID NO: 100830 - DNA, 15 bp, Homo sapiens
taaagaaaaccttta

SEQ ID NO: 100831 - DNA, 15 bp, Homo sapiens
ataaagaaaaccttt

SEQ ID NO: 100832 - DNA, 15 bp, Homo sapiens
cataaagaaaacctt

SEQ ID NO: 100833 - DNA, 15 bp, Homo sapiens
acataaagaaaacct

SEQ ID NO: 100834 - DNA, 15 bp, Homo sapiens
cacataaagaaaacc

SEQ ID NO: 100835 - DNA, 15 bp, Homo sapiens
acacataaagaaaac

SEQ ID NO: 100836 - DNA, 15 bp, Homo sapiens
gacacataaagaaaa

SEQ ID NO: 100837 - DNA, 15 bp, Homo sapiens
ggacacataaagaaa

SEQ ID NO: 100838 - DNA, 15 bp, Homo sapiens
aggacacataaagaa

SEQ ID NO: 100839 - DNA, 15 bp, Homo sapiens
taggacacataaaga

SEQ ID NO: 100840 - DNA, 15 bp, Homo sapiens
gtaggacacataaag

SEQ ID NO: 100841 - DNA, 15 bp, Homo sapiens
agtaggacacataaa

SEQ ID NO: 100842 - DNA, 15 bp, Homo sapiens
gagtaggacacataa

SEQ ID NO: 100843 - DNA, 15 bp, Homo sapiens
tgagtaggacacata

SEQ ID NO: 100844 - DNA, 15 bp, Homo sapiens
ttgagtaggacacat

SEQ ID NO: 100845 - DNA, 15 bp, Homo sapiens
tttgagtaggacaca

SEQ ID NO: 100846 - DNA, 15 bp, Homo sapiens
gtttgagtaggacac

SEQ ID NO: 100847 - DNA, 15 bp, Homo sapiens
tgtttgagtaggaca

SEQ ID NO: 100848 - DNA, 15 bp, Homo sapiens
gtgtttgagtaggac

SEQ ID NO: 100849 - DNA, 15 bp, Homo sapiens
agtgtttgagtagga

SEQ ID NO: 100850 - DNA, 15 bp, Homo sapiens
cagtgtttgagtagg

SEQ ID NO: 100851 - DNA, 15 bp, Homo sapiens
ccagtgtttgagtag

SEQ ID NO: 100852 - DNA, 15 bp, Homo sapiens
gccagtgtttgagta

SEQ ID NO: 100853 - DNA, 15 bp, Homo sapiens
agccagtgtttgagt

SEQ ID NO: 100854 - DNA, 15 bp, Homo sapiens
gagccagtgtttgag

SEQ ID NO: 100855 - DNA, 15 bp, Homo sapiens
tgagccagtgtttga

SEQ ID NO: 100856 - DNA, 15 bp, Homo sapiens
ctgagccagtgtttg

SEQ ID NO: 100857 - DNA, 15 bp, Homo sapiens
cctgagccagtgttt

SEQ ID NO: 100858 - DNA, 15 bp, Homo sapiens
gcctgagccagtgtt

SEQ ID NO: 100859 - DNA, 15 bp, Homo sapiens
agcctgagccagtgt

SEQ ID NO: 100860 - DNA, 15 bp, Homo sapiens
gagcctgagccagtg

SEQ ID NO: 100861 - DNA, 15 bp, Homo sapiens
tgagcctgagccagt

SEQ ID NO: 100862 - DNA, 15 bp, Homo sapiens
atgagcctgagccag

SEQ ID NO: 100863 - DNA, 15 bp, Homo sapiens
gatgagcctgagcca

SEQ ID NO: 100864 - DNA, 15 bp, Homo sapiens
agatgagcctgagcc

SEQ ID NO: 100865 - DNA, 15 bp, Homo sapiens
aagatgagcctgagc

SEQ ID NO: 100866 - DNA, 15 bp, Homo sapiens
gaagatgagcctgag

SEQ ID NO: 100867 - DNA, 15 bp, Homo sapiens
agaagatgagcctga

SEQ ID NO: 100868 - DNA, 15 bp, Homo sapiens
gagaagatgagcctg

SEQ ID NO: 100869 - DNA, 15 bp, Homo sapiens
agagaagatgagcct

SEQ ID NO: 100870 - DNA, 15 bp, Homo sapiens
tagagaagatgagcc

SEQ ID NO: 100871 - DNA, 15 bp, Homo sapiens
gtagagaagatgagc

SEQ ID NO: 100872 - DNA, 15 bp, Homo sapiens
tgtagagaagatgag

SEQ ID NO: 100873 - DNA, 15 bp, Homo sapiens
gtgtagagaagatga

SEQ ID NO: 100874 - DNA, 15 bp, Homo sapiens
tgtgtagagaagatg

SEQ ID NO: 100875 - DNA, 15 bp, Homo sapiens
ctgtgtagagaagat

SEQ ID NO: 100876 - DNA, 15 bp, Homo sapiens
actgtgtagagaaga

SEQ ID NO: 100877 - DNA, 15 bp, Homo sapiens
gactgtgtagagaag

SEQ ID NO: 100878 - DNA, 15 bp, Homo sapiens
tgactgtgtagagaa

SEQ ID NO: 100879 - DNA, 15 bp, Homo sapiens
atgactgtgtagaga

SEQ ID NO: 100880 - DNA, 15 bp, Homo sapiens
tatgactgtgtagag

SEQ ID NO: 100881 - DNA, 15 bp, Homo sapiens
ctatgactgtgtaga

SEQ ID NO: 100882 - DNA, 15 bp, Homo sapiens
tctatgactgtgtag

SEQ ID NO: 100883 - DNA, 15 bp, Homo sapiens
ctctatgactgtgta

SEQ ID NO: 100884 - DNA, 15 bp, Homo sapiens
gctctatgactgtgt

SEQ ID NO: 100885 - DNA, 15 bp, Homo sapiens
agctctatgactgtg

SEQ ID NO: 100886 - DNA, 15 bp, Homo sapiens
aagctctatgactgt

SEQ ID NO: 100887 - DNA, 15 bp, Homo sapiens
aaagctctatgactg

SEQ ID NO: 100888 - DNA, 15 bp, Homo sapiens
taaagctctatgact

SEQ ID NO: 100889 - DNA, 15 bp, Homo sapiens
ctaaagctctatgac

SEQ ID NO: 100890 - DNA, 15 bp, Homo sapiens
gctaaagctctatga

SEQ ID NO: 100891 - DNA, 15 bp, Homo sapiens
ggctaaagctctatg

SEQ ID NO: 100892 - DNA, 15 bp, Homo sapiens
tggctaaagctctat

SEQ ID NO: 100893 - DNA, 15 bp, Homo sapiens
ttggctaaagctcta

SEQ ID NO: 100894 - DNA, 15 bp, Homo sapiens
tttggctaaagctct

SEQ ID NO: 100895 - DNA, 15 bp, Homo sapiens
atttggctaaagctc

SEQ ID NO: 100896 - DNA, 15 bp, Homo sapiens
gatttggctaaagct

SEQ ID NO: 100897 - DNA, 15 bp, Homo sapiens
ggctcggcgccgaaa

SEQ ID NO: 100898 - DNA, 15 bp, Homo sapiens
gggctcggcgccgaa

SEQ ID NO: 100899 - DNA, 15 bp, Homo sapiens
ggggctcggcgccga

SEQ ID NO: 100900 - DNA, 15 bp, Homo sapiens
cggggctcggcgccg

SEQ ID NO: 100901 - DNA, 15 bp, Homo sapiens
gcggggctcggcgcc

SEQ ID NO: 100902 - DNA, 15 bp, Homo sapiens
ggcggggctcggcgc

SEQ ID NO: 100903 - DNA, 15 bp, Homo sapiens
cggcggggctcggcg

SEQ ID NO: 100904 - DNA, 15 bp, Homo sapiens
ccggcggggctcggc

SEQ ID NO: 100905 - DNA, 15 bp, Homo sapiens
cccggcggggctcgg

SEQ ID NO: 100906 - DNA, 15 bp, Homo sapiens
ccccggcggggctcg

SEQ ID NO: 100907 - DNA, 15 bp, Homo sapiens
accccggcggggctc

SEQ ID NO: 100908 - DNA, 15 bp, Homo sapiens
caccccggcggggct

SEQ ID NO: 100909 - DNA, 15 bp, Homo sapiens
tcaccccggcggggc

SEQ ID NO: 100910 - DNA, 15 bp, Homo sapiens
ctcaccccggcgggg

SEQ ID NO: 100911 - DNA, 15 bp, Homo sapiens
gctcaccccggcggg

SEQ ID NO: 100912 - DNA, 15 bp, Homo sapiens
agctcaccccggcgg

SEQ ID NO: 100913 - DNA, 15 bp, Homo sapiens
cagctcaccccggcg

SEQ ID NO: 100914 - DNA, 15 bp, Homo sapiens
ccagctcaccccggc

SEQ ID NO: 100915 - DNA, 15 bp, Homo sapiens
cccagctcaccccgg

SEQ ID NO: 100916 - DNA, 15 bp, Homo sapiens
ccccagctcaccccg

SEQ ID NO: 100917 - DNA, 15 bp, Homo sapiens
tccccagctcacccc

SEQ ID NO: 100918 - DNA, 15 bp, Homo sapiens
atccccagctcaccc

SEQ ID NO: 100919 - DNA, 15 bp, Homo sapiens
catccccagctcacc

SEQ ID NO: 100920 - DNA, 15 bp, Homo sapiens
ccatccccagctcac

SEQ ID NO: 100921 - DNA, 15 bp, Homo sapiens
cccatccccagctca

SEQ ID NO: 100922 - DNA, 15 bp, Homo sapiens
gcccatccccagctc

SEQ ID NO: 100923 - DNA, 15 bp, Homo sapiens
cgcccatccccagct

SEQ ID NO: 100924 - DNA, 15 bp, Homo sapiens
tcgcccatccccagc

SEQ ID NO: 100925 - DNA, 15 bp, Homo sapiens
ctcgcccatccccag

SEQ ID NO: 100926 - DNA, 15 bp, Homo sapiens
cctcgcccatcccca

SEQ ID NO: 100927 - DNA, 15 bp, Homo sapiens
ccctcgcccatcccc

SEQ ID NO: 100928 - DNA, 15 bp, Homo sapiens
gccctcgcccatccc

SEQ ID NO: 100929 - DNA, 15 bp, Homo sapiens
ggccctcgcccatcc

SEQ ID NO: 100930 - DNA, 15 bp, Homo sapiens
cggccctcgcccatc

SEQ ID NO: 100931 - DNA, 15 bp, Homo sapiens
ccggccctcgcccat

SEQ ID NO: 100932 - DNA, 15 bp, Homo sapiens
gccggccctcgccca

SEQ ID NO: 100933 - DNA, 15 bp, Homo sapiens
cgccggccctcgccc

SEQ ID NO: 100934 - DNA, 15 bp, Homo sapiens
ccgccggccctcgcc

SEQ ID NO: 100935 - DNA, 15 bp, Homo sapiens
gccgccggccctcgc

SEQ ID NO: 100936 - DNA, 15 bp, Homo sapiens
tgccgccggccctcg

SEQ ID NO: 100937 - DNA, 15 bp, Homo sapiens
ctgccgccggccctc

SEQ ID NO: 100938 - DNA, 15 bp, Homo sapiens
cctgccgccggccct

SEQ ID NO: 100939 - DNA, 15 bp, Homo sapiens
acctgccgccggccc

SEQ ID NO: 100940 - DNA, 15 bp, Homo sapiens
tacctgccgccggcc

SEQ ID NO: 100941 - DNA, 15 bp, Homo sapiens
gtacctgccgccggc

SEQ ID NO: 100942 - DNA, 15 bp, Homo sapiens
agtacctgccgccgg

SEQ ID NO: 100943 - DNA, 15 bp, Homo sapiens
tagtacctgccgccg

SEQ ID NO: 100944 - DNA, 15 bp, Homo sapiens
ctagtacctgccgcc

SEQ ID NO: 100945 - DNA, 15 bp, Homo sapiens
tctagtacctgccgc

SEQ ID NO: 100946 - DNA, 15 bp, Homo sapiens
ctctagtacctgccg

SEQ ID NO: 100947 - DNA, 15 bp, Homo sapiens
gctctagtacctgcc

SEQ ID NO: 100948 - DNA, 15 bp, Homo sapiens
ggctctagtacctgc

SEQ ID NO: 100949 - DNA, 15 bp, Homo sapiens
cggctctagtacctg

SEQ ID NO: 100950 - DNA, 15 bp, Homo sapiens
ccggctctagtacct

SEQ ID NO: 100951 - DNA, 15 bp, Homo sapiens
cccggctctagtacc

SEQ ID NO: 100952 - DNA, 15 bp, Homo sapiens
gcccggctctagtac

SEQ ID NO: 100953 - DNA, 15 bp, Homo sapiens
cgcccggctctagta

SEQ ID NO: 100954 - DNA, 15 bp, Homo sapiens
ccgcccggctctagt

SEQ ID NO: 100955 - DNA, 15 bp, Homo sapiens
cccgcccggctctag

SEQ ID NO: 100956 - DNA, 15 bp, Homo sapiens
tcccgcccggctcta

SEQ ID NO: 100957 - DNA, 15 bp, Homo sapiens
ttcccgcccggctct

SEQ ID NO: 100958 - DNA, 15 bp, Homo sapiens
cttcccgcccggctc

SEQ ID NO: 100959 - DNA, 15 bp, Homo sapiens
ccttcccgcccggct

SEQ ID NO: 100960 - DNA, 15 bp, Homo sapiens
cccttcccgcccggc

SEQ ID NO: 100961 - DNA, 15 bp, Homo sapiens
gcccttcccgcccgg

SEQ ID NO: 100962 - DNA, 15 bp, Homo sapiens
ggcccttcccgcccg

SEQ ID NO: 100963 - DNA, 15 bp, Homo sapiens
cggcccttcccgccc

SEQ ID NO: 100964 - DNA, 15 bp, Homo sapiens
tcggcccttcccgcc

SEQ ID NO: 100965 - DNA, 15 bp, Homo sapiens
ttcggcccttcccgc

SEQ ID NO: 100966 - DNA, 15 bp, Homo sapiens
tttcggcccttcccg

SEQ ID NO: 100967 - DNA, 15 bp, Homo sapiens
atttcggcccttccc

SEQ ID NO: 100968 - DNA, 15 bp, Homo sapiens
gatttcggcccttcc

SEQ ID NO: 100969 - DNA, 15 bp, Homo sapiens
cgatttcggcccttc

SEQ ID NO: 100970 - DNA, 15 bp, Homo sapiens
ccgatttcggccctt

SEQ ID NO: 100971 - DNA, 15 bp, Homo sapiens
gccgatttcggccct

SEQ ID NO: 100972 - DNA, 15 bp, Homo sapiens
cgccgatttcggccc

SEQ ID NO: 100973 - DNA, 15 bp, Homo sapiens
gcgccgatttcggcc

SEQ ID NO: 100974 - DNA, 15 bp, Homo sapiens
agcgccgatttcggc

SEQ ID NO: 100975 - DNA, 15 bp, Homo sapiens
tagcgccgatttcgg

SEQ ID NO: 100976 - DNA, 15 bp, Homo sapiens
ttagcgccgatttcg

SEQ ID NO: 100977 - DNA, 15 bp, Homo sapiens
cttagcgccgatttc

SEQ ID NO: 100978 - DNA, 15 bp, Homo sapiens
acttagcgccgattt

SEQ ID NO: 100979 - DNA, 15 bp, Homo sapiens
cacttagcgccgatt

SEQ ID NO: 100980 - DNA, 15 bp, Homo sapiens
tcacttagcgccgat

SEQ ID NO: 100981 - DNA, 15 bp, Homo sapiens
gtcacttagcgccga

SEQ ID NO: 100982 - DNA, 15 bp, Homo sapiens
cgtcacttagcgccg

SEQ ID NO: 100983 - DNA, 15 bp, Homo sapiens
ccgtcacttagcgcc

SEQ ID NO: 100984 - DNA, 15 bp, Homo sapiens
gccgtcacttagcgc

SEQ ID NO: 100985 - DNA, 15 bp, Homo sapiens
cgccgtcacttagcg

SEQ ID NO: 100986 - DNA, 15 bp, Homo sapiens
tcgccgtcacttagc

SEQ ID NO: 100987 - DNA, 15 bp, Homo sapiens
atcgccgtcacttag

SEQ ID NO: 100988 - DNA, 15 bp, Homo sapiens
catcgccgtcactta

SEQ ID NO: 100989 - DNA, 15 bp, Homo sapiens
ccatcgccgtcactt

SEQ ID NO: 100990 - DNA, 15 bp, Homo sapiens
gccatcgccgtcact

SEQ ID NO: 100991 - DNA, 15 bp, Homo sapiens
agccatcgccgtcac

SEQ ID NO: 100992 - DNA, 15 bp, Homo sapiens
aagccatcgccgtca

SEQ ID NO: 100993 - DNA, 15 bp, Homo sapiens
taagccatcgccgtc

SEQ ID NO: 100994 - DNA, 15 bp, Homo sapiens
ataagccatcgccgt

SEQ ID NO: 100995 - DNA, 15 bp, Homo sapiens
aataagccatcgccg

SEQ ID NO: 100996 - DNA, 15 bp, Homo sapiens
gaataagccatcgcc

SEQ ID NO: 100997 - DNA, 15 bp, Homo sapiens
ggaataagccatcgc

SEQ ID NO: 100998 - DNA, 15 bp, Homo sapiens
gggaataagccatcg

SEQ ID NO: 100999 - DNA, 15 bp, Homo sapiens
ggggaataagccatc

SEQ ID NO: 101000 - DNA, 15 bp, Homo sapiens
gggggaataagccat

SEQ ID NO: 101001 - DNA, 15 bp, Homo sapiens
agggggaataagcca

SEQ ID NO: 101002 - DNA, 15 bp, Homo sapiens
aagggggaataagcc

SEQ ID NO: 101003 - DNA, 15 bp, Homo sapiens
aaagggggaataagc

SEQ ID NO: 101004 - DNA, 15 bp, Homo sapiens
gaaagggggaataag

SEQ ID NO: 101005 - DNA, 15 bp, Homo sapiens
ggaaagggggaataa

SEQ ID NO: 101006 - DNA, 15 bp, Homo sapiens
aggaaagggggaata

SEQ ID NO: 101007 - DNA, 15 bp, Homo sapiens
taggaaagggggaat

SEQ ID NO: 101008 - DNA, 15 bp, Homo sapiens
ttaggaaagggggaa

SEQ ID NO: 101009 - DNA, 15 bp, Homo sapiens
tttaggaaaggggga

SEQ ID NO: 101010 - DNA, 15 bp, Homo sapiens
gtttaggaaaggggg

SEQ ID NO: 101011 - DNA, 15 bp, Homo sapiens
tgtttaggaaagggg

SEQ ID NO: 101012 - DNA, 15 bp, Homo sapiens
atgtttaggaaaggg

SEQ ID NO: 101013 - DNA, 15 bp, Homo sapiens
gatgtttaggaaagg

SEQ ID NO: 101014 - DNA, 15 bp, Homo sapiens
tgatgtttaggaaag

SEQ ID NO: 101015 - DNA, 15 bp, Homo sapiens
atgatgtttaggaaa

SEQ ID NO: 101016 - DNA, 15 bp, Homo sapiens
gatgatgtttaggaa

SEQ ID NO: 101017 - DNA, 15 bp, Homo sapiens
agatgatgtttagga

SEQ ID NO: 101018 - DNA, 15 bp, Homo sapiens
gagatgatgtttagg

SEQ ID NO: 101019 - DNA, 15 bp, Homo sapiens
ggagatgatgtttag

SEQ ID NO: 101020 - DNA, 15 bp, Homo sapiens
gggagatgatgttta

SEQ ID NO: 101021 - DNA, 15 bp, Homo sapiens
tgggagatgatgttt

SEQ ID NO: 101022 - DNA, 15 bp, Homo sapiens
ctgggagatgatgtt

SEQ ID NO: 101023 - DNA, 15 bp, Homo sapiens
gctgggagatgatgt

SEQ ID NO: 101024 - DNA, 15 bp, Homo sapiens
cgctgggagatgatg

SEQ ID NO: 101025 - DNA, 15 bp, Homo sapiens
ccgctgggagatgat

SEQ ID NO: 101026 - DNA, 15 bp, Homo sapiens
cccgctgggagatga

SEQ ID NO: 101027 - DNA, 15 bp, Homo sapiens
tcccgctgggagatg

SEQ ID NO: 101028 - DNA, 15 bp, Homo sapiens
atcccgctgggagat

SEQ ID NO: 101029 - DNA, 15 bp, Homo sapiens
gatcccgctgggaga

SEQ ID NO: 101030 - DNA, 15 bp, Homo sapiens
ggatcccgctgggag

SEQ ID NO: 101031 - DNA, 15 bp, Homo sapiens
cggatcccgctggga

SEQ ID NO: 101032 - DNA, 15 bp, Homo sapiens
ccggatcccgctggg

SEQ ID NO: 101033 - DNA, 15 bp, Homo sapiens
cccggatcccgctgg

SEQ ID NO: 101034 - DNA, 15 bp, Homo sapiens
gcccggatcccgctg

SEQ ID NO: 101035 - DNA, 15 bp, Homo sapiens
ggcccggatcccgct

SEQ ID NO: 101036 - DNA, 15 bp, Homo sapiens
aggcccggatcccgc

SEQ ID NO: 101037 - DNA, 15 bp, Homo sapiens
caggcccggatcccg

SEQ ID NO: 101038 - DNA, 15 bp, Homo sapiens
acaggcccggatccc

SEQ ID NO: 101039 - DNA, 15 bp, Homo sapiens
gacaggcccggatcc

SEQ ID NO: 101040 - DNA, 15 bp, Homo sapiens
cgacaggcccggatc

SEQ ID NO: 101041 - DNA, 15 bp, Homo sapiens
acgacaggcccggat

SEQ ID NO: 101042 - DNA, 15 bp, Homo sapiens
cacgacaggcccgga

SEQ ID NO: 101043 - DNA, 15 bp, Homo sapiens
acacgacaggcccgg

SEQ ID NO: 101044 - DNA, 15 bp, Homo sapiens
cacacgacaggcccg

SEQ ID NO: 101045 - DNA, 15 bp, Homo sapiens
ccacacgacaggccc

SEQ ID NO: 101046 - DNA, 15 bp, Homo sapiens
cccacacgacaggcc

SEQ ID NO: 101047 - DNA, 15 bp, Homo sapiens
acccacacgacaggc

SEQ ID NO: 101048 - DNA, 15 bp, Homo sapiens
tacccacacgacagg

SEQ ID NO: 101049 - DNA, 15 bp, Homo sapiens
ctacccacacgacag

SEQ ID NO: 101050 - DNA, 15 bp, Homo sapiens
actacccacacgaca

SEQ ID NO: 101051 - DNA, 15 bp, Homo sapiens
aactacccacacgac

SEQ ID NO: 101052 - DNA, 15 bp, Homo sapiens
caactacccacacga

SEQ ID NO: 101053 - DNA, 15 bp, Homo sapiens
acaactacccacacg

SEQ ID NO: 101054 - DNA, 15 bp, Homo sapiens
cacaactacccacac

SEQ ID NO: 101055 - DNA, 15 bp, Homo sapiens
ccacaactacccaca

SEQ ID NO: 101056 - DNA, 15 bp, Homo sapiens
tccacaactacccac

SEQ ID NO: 101057 - DNA, 15 bp, Homo sapiens
ctccacaactaccca

SEQ ID NO: 101058 - DNA, 15 bp, Homo sapiens
cctccacaactaccc

SEQ ID NO: 101059 - DNA, 15 bp, Homo sapiens
tcctccacaactacc

SEQ ID NO: 101060 - DNA, 15 bp, Homo sapiens
ctcctccacaactac

SEQ ID NO: 101061 - DNA, 15 bp, Homo sapiens
gctcctccacaacta

SEQ ID NO: 101062 - DNA, 15 bp, Homo sapiens
cgctcctccacaact

SEQ ID NO: 101063 - DNA, 15 bp, Homo sapiens
ccgctcctccacaac

SEQ ID NO: 101064 - DNA, 15 bp, Homo sapiens
cccgctcctccacaa

SEQ ID NO: 101065 - DNA, 15 bp, Homo sapiens
ccccgctcctccaca

SEQ ID NO: 101066 - DNA, 15 bp, Homo sapiens
cccccgctcctccac

SEQ ID NO: 101067 - DNA, 15 bp, Homo sapiens
ccccccgctcctcca

SEQ ID NO: 101068 - DNA, 15 bp, Homo sapiens
gccccccgctcctcc

SEQ ID NO: 101069 - DNA, 15 bp, Homo sapiens
cgccccccgctcctc

SEQ ID NO: 101070 - DNA, 15 bp, Homo sapiens
gcgccccccgctcct

SEQ ID NO: 101071 - DNA, 15 bp, Homo sapiens
agcgccccccgctcc

SEQ ID NO: 101072 - DNA, 15 bp, Homo sapiens
aagcgccccccgctc

SEQ ID NO: 101073 - DNA, 15 bp, Homo sapiens
gaagcgccccccgct

SEQ ID NO: 101074 - DNA, 15 bp, Homo sapiens
tgaagcgccccccgc

SEQ ID NO: 101075 - DNA, 15 bp, Homo sapiens
ctgaagcgccccccg

SEQ ID NO: 101076 - DNA, 15 bp, Homo sapiens
gctgaagcgcccccc

SEQ ID NO: 101077 - DNA, 15 bp, Homo sapiens
ggctgaagcgccccc

SEQ ID NO: 101078 - DNA, 15 bp, Homo sapiens
cggctgaagcgcccc

SEQ ID NO: 101079 - DNA, 15 bp, Homo sapiens
ccggctgaagcgccc

SEQ ID NO: 101080 - DNA, 15 bp, Homo sapiens
cccggctgaagcgcc

SEQ ID NO: 101081 - DNA, 15 bp, Homo sapiens
gcccggctgaagcgc

SEQ ID NO: 101082 - DNA, 15 bp, Homo sapiens
ggcccggctgaagcg

SEQ ID NO: 101083 - DNA, 15 bp, Homo sapiens
cggcccggctgaagc

SEQ ID NO: 101084 - DNA, 15 bp, Homo sapiens
gcggcccggctgaag

SEQ ID NO: 101085 - DNA, 15 bp, Homo sapiens
ggcggcccggctgaa

SEQ ID NO: 101086 - DNA, 15 bp, Homo sapiens
aggcggcccggctga

SEQ ID NO: 101087 - DNA, 15 bp, Homo sapiens
gaggcggcccggctg

SEQ ID NO: 101088 - DNA, 15 bp, Homo sapiens
ggaggcggcccggct

SEQ ID NO: 101089 - DNA, 15 bp, Homo sapiens
aggaggcggcccggc

SEQ ID NO: 101090 - DNA, 15 bp, Homo sapiens
caggaggcggcccgg

SEQ ID NO: 101091 - DNA, 15 bp, Homo sapiens
gcaggaggcggcccg

SEQ ID NO: 101092 - DNA, 15 bp, Homo sapiens
tgcaggaggcggccc

SEQ ID NO: 101093 - DNA, 15 bp, Homo sapiens
ctgcaggaggcggcc

SEQ ID NO: 101094 - DNA, 15 bp, Homo sapiens
gctgcaggaggcggc

SEQ ID NO: 101095 - DNA, 15 bp, Homo sapiens
cgctgcaggaggcgg

SEQ ID NO: 101096 - DNA, 15 bp, Homo sapiens
gcgctgcaggaggcg

SEQ ID NO: 101097 - DNA, 15 bp, Homo sapiens
ggcgctgcaggaggc

SEQ ID NO: 101098 - DNA, 15 bp, Homo sapiens
tggcgctgcaggagg

SEQ ID NO: 101099 - DNA, 15 bp, Homo sapiens
ttggcgctgcaggag

SEQ ID NO: 101100 - DNA, 15 bp, Homo sapiens
cttggcgctgcagga

SEQ ID NO: 101101 - DNA, 15 bp, Homo sapiens
tcttggcgctgcagg

SEQ ID NO: 101102 - DNA, 15 bp, Homo sapiens
ctcttggcgctgcag

SEQ ID NO: 101103 - DNA, 15 bp, Homo sapiens
cctcttggcgctgca

SEQ ID NO: 101104 - DNA, 15 bp, Homo sapiens
ccctcttggcgctgc

SEQ ID NO: 101105 - DNA, 15 bp, Homo sapiens
gccctcttggcgctg

SEQ ID NO: 101106 - DNA, 15 bp, Homo sapiens
agccctcttggcgct

SEQ ID NO: 101107 - DNA, 15 bp, Homo sapiens
aagccctcttggcgc

SEQ ID NO: 101108 - DNA, 15 bp, Homo sapiens
gaagccctcttggcg

SEQ ID NO: 101109 - DNA, 15 bp, Homo sapiens
tgaagccctcttggc

SEQ ID NO: 101110 - DNA, 15 bp, Homo sapiens
ctgaagccctcttgg

SEQ ID NO: 101111 - DNA, 15 bp, Homo sapiens
cctgaagccctcttg

SEQ ID NO: 101112 - DNA, 15 bp, Homo sapiens
acctgaagccctctt

SEQ ID NO: 101113 - DNA, 15 bp, Homo sapiens
gacctgaagccctct

SEQ ID NO: 101114 - DNA, 15 bp, Homo sapiens
agacctgaagccctc

SEQ ID NO: 101115 - DNA, 15 bp, Homo sapiens
gagacctgaagccct

SEQ ID NO: 101116 - DNA, 15 bp, Homo sapiens
ggagacctgaagccc

SEQ ID NO: 101117 - DNA, 15 bp, Homo sapiens
aggagacctgaagcc

SEQ ID NO: 101118 - DNA, 15 bp, Homo sapiens
aaggagacctgaagc

SEQ ID NO: 101119 - DNA, 15 bp, Homo sapiens
aaaggagacctgaag

SEQ ID NO: 101120 - DNA, 15 bp, Homo sapiens
caaaggagacctgaa

SEQ ID NO: 101121 - DNA, 15 bp, Homo sapiens
ccaaaggagacctga

SEQ ID NO: 101122 - DNA, 15 bp, Homo sapiens
gccaaaggagacctg

SEQ ID NO: 101123 - DNA, 15 bp, Homo sapiens
agccaaaggagacct

SEQ ID NO: 101124 - DNA, 15 bp, Homo sapiens
aagccaaaggagacc

SEQ ID NO: 101125 - DNA, 15 bp, Homo sapiens
gaagccaaaggagac

SEQ ID NO: 101126 - DNA, 15 bp, Homo sapiens
agaagccaaaggaga

SEQ ID NO: 101127 - DNA, 15 bp, Homo sapiens
gagaagccaaaggag

SEQ ID NO: 101128 - DNA, 15 bp, Homo sapiens
agagaagccaaagga

SEQ ID NO: 101129 - DNA, 15 bp, Homo sapiens
aagagaagccaaagg

SEQ ID NO: 101130 - DNA, 15 bp, Homo sapiens
aaagagaagccaaag

SEQ ID NO: 101131 - DNA, 15 bp, Homo sapiens
aaaagagaagccaaa

SEQ ID NO: 101132 - DNA, 15 bp, Homo sapiens
gaaaagagaagccaa

SEQ ID NO: 101133 - DNA, 15 bp, Homo sapiens
ggaaaagagaagcca

SEQ ID NO: 101134 - DNA, 15 bp, Homo sapiens
cggaaaagagaagcc

SEQ ID NO: 101135 - DNA, 15 bp, Homo sapiens
ccggaaaagagaagc

SEQ ID NO: 101136 - DNA, 15 bp, Homo sapiens
accggaaaagagaag

SEQ ID NO: 101137 - DNA, 15 bp, Homo sapiens
gaccggaaaagagaa

SEQ ID NO: 101138 - DNA, 15 bp, Homo sapiens
agaccggaaaagaga

SEQ ID NO: 101139 - DNA, 15 bp, Homo sapiens
tagaccggaaaagag

SEQ ID NO: 101140 - DNA, 15 bp, Homo sapiens
ctagaccggaaaaga

SEQ ID NO: 101141 - DNA, 15 bp, Homo sapiens
gctagaccggaaaag

SEQ ID NO: 101142 - DNA, 15 bp, Homo sapiens
tgctagaccggaaaa

SEQ ID NO: 101143 - DNA, 15 bp, Homo sapiens
atgctagaccggaaa

SEQ ID NO: 101144 - DNA, 15 bp, Homo sapiens
aatgctagaccggaa

SEQ ID NO: 101145 - DNA, 15 bp, Homo sapiens
caatgctagaccgga

SEQ ID NO: 101146 - DNA, 15 bp, Homo sapiens
ccaatgctagaccgg

SEQ ID NO: 101147 - DNA, 15 bp, Homo sapiens
cccaatgctagaccg

SEQ ID NO: 101148 - DNA, 15 bp, Homo sapiens
tcccaatgctagacc

SEQ ID NO: 101149 - DNA, 15 bp, Homo sapiens
gtcccaatgctagac

SEQ ID NO: 101150 - DNA, 15 bp, Homo sapiens
agtcccaatgctaga

SEQ ID NO: 101151 - DNA, 15 bp, Homo sapiens
aagtcccaatgctag

SEQ ID NO: 101152 - DNA, 15 bp, Homo sapiens
gaagtcccaatgcta

SEQ ID NO: 101153 - DNA, 15 bp, Homo sapiens
cgaagtcccaatgct

SEQ ID NO: 101154 - DNA, 15 bp, Homo sapiens
ccgaagtcccaatgc

SEQ ID NO: 101155 - DNA, 15 bp, Homo sapiens
tccgaagtcccaatg

SEQ ID NO: 101156 - DNA, 15 bp, Homo sapiens
ctccgaagtcccaat

SEQ ID NO: 101157 - DNA, 15 bp, Homo sapiens
tctccgaagtcccaa

SEQ ID NO: 101158 - DNA, 15 bp, Homo sapiens
ctctccgaagtccca

SEQ ID NO: 101159 - DNA, 15 bp, Homo sapiens
gctctccgaagtccc

SEQ ID NO: 101160 - DNA, 15 bp, Homo sapiens
agctctccgaagtcc

SEQ ID NO: 101161 - DNA, 15 bp, Homo sapiens
gagctctccgaagtc

SEQ ID NO: 101162 - DNA, 15 bp, Homo sapiens
ggagctctccgaagt

SEQ ID NO: 101163 - DNA, 15 bp, Homo sapiens
tggagctctccgaag

SEQ ID NO: 101164 - DNA, 15 bp, Homo sapiens
gtggagctctccgaa

SEQ ID NO: 101165 - DNA, 15 bp, Homo sapiens
agtggagctctccga

SEQ ID NO: 101166 - DNA, 15 bp, Homo sapiens
cagtggagctctccg

SEQ ID NO: 101167 - DNA, 15 bp, Homo sapiens
acagtggagctctcc

SEQ ID NO: 101168 - DNA, 15 bp, Homo sapiens
aacagtggagctctc

SEQ ID NO: 101169 - DNA, 15 bp, Homo sapiens
gaacagtggagctct

SEQ ID NO: 101170 - DNA, 15 bp, Homo sapiens
agaacagtggagctc

SEQ ID NO: 101171 - DNA, 15 bp, Homo sapiens
cagaacagtggagct

SEQ ID NO: 101172 - DNA, 15 bp, Homo sapiens
ccagaacagtggagc

SEQ ID NO: 101173 - DNA, 15 bp, Homo sapiens
cccagaacagtggag

SEQ ID NO: 101174 - DNA, 15 bp, Homo sapiens
gcccagaacagtgga

SEQ ID NO: 101175 - DNA, 15 bp, Homo sapiens
cgcccagaacagtgg

SEQ ID NO: 101176 - DNA, 15 bp, Homo sapiens
tcgcccagaacagtg

SEQ ID NO: 101177 - DNA, 15 bp, Homo sapiens
ctcgcccagaacagt

SEQ ID NO: 101178 - DNA, 15 bp, Homo sapiens
cctcgcccagaacag

SEQ ID NO: 101179 - DNA, 15 bp, Homo sapiens
ccctcgcccagaaca

SEQ ID NO: 101180 - DNA, 15 bp, Homo sapiens
gccctcgcccagaac

SEQ ID NO: 101181 - DNA, 15 bp, Homo sapiens
agccctcgcccagaa

SEQ ID NO: 101182 - DNA, 15 bp, Homo sapiens
cagccctcgcccaga

SEQ ID NO: 101183 - DNA, 15 bp, Homo sapiens
acagccctcgcccag

SEQ ID NO: 101184 - DNA, 15 bp, Homo sapiens
cacagccctcgccca

SEQ ID NO: 101185 - DNA, 15 bp, Homo sapiens
tcacagccctcgccc

SEQ ID NO: 101186 - DNA, 15 bp, Homo sapiens
ttcacagccctcgcc

SEQ ID NO: 101187 - DNA, 15 bp, Homo sapiens
cttcacagccctcgc

SEQ ID NO: 101188 - DNA, 15 bp, Homo sapiens
tcttcacagccctcg

SEQ ID NO: 101189 - DNA, 15 bp, Homo sapiens
ttcttcacagccctc

SEQ ID NO: 101190 - DNA, 15 bp, Homo sapiens
tttcttcacagccct

SEQ ID NO: 101191 - DNA, 15 bp, Homo sapiens
ctttcttcacagccc

SEQ ID NO: 101192 - DNA, 15 bp, Homo sapiens
tctttcttcacagcc

SEQ ID NO: 101193 - DNA, 15 bp, Homo sapiens
ctctttcttcacagc

SEQ ID NO: 101194 - DNA, 15 bp, Homo sapiens
actctttcttcacag

SEQ ID NO: 101195 - DNA, 15 bp, Homo sapiens
tactctttcttcaca

SEQ ID NO: 101196 - DNA, 15 bp, Homo sapiens
ctactctttcttcac

SEQ ID NO: 101197 - DNA, 15 bp, Homo sapiens
actactctttcttca

SEQ ID NO: 101198 - DNA, 15 bp, Homo sapiens
tactactctttcttc

SEQ ID NO: 101199 - DNA, 15 bp, Homo sapiens
ttactactctttctt

SEQ ID NO: 101200 - DNA, 15 bp, Homo sapiens
cttactactctttct

SEQ ID NO: 101201 - DNA, 15 bp, Homo sapiens
tcttactactctttc

SEQ ID NO: 101202 - DNA, 15 bp, Homo sapiens
ttcttactactcttt

SEQ ID NO: 101203 - DNA, 15 bp, Homo sapiens
cttcttactactctt

SEQ ID NO: 101204 - DNA, 15 bp, Homo sapiens
gcttcttactactct

SEQ ID NO: 101205 - DNA, 15 bp, Homo sapiens
cgcttcttactactc

SEQ ID NO: 101206 - DNA, 15 bp, Homo sapiens
ccgcttcttactact

SEQ ID NO: 101207 - DNA, 15 bp, Homo sapiens
accgcttcttactac

SEQ ID NO: 101208 - DNA, 15 bp, Homo sapiens
taccgcttcttacta

SEQ ID NO: 101209 - DNA, 15 bp, Homo sapiens
ctaccgcttcttact

SEQ ID NO: 101210 - DNA, 15 bp, Homo sapiens
actaccgcttcttac

SEQ ID NO: 101211 - DNA, 15 bp, Homo sapiens
gactaccgcttctta

SEQ ID NO: 101212 - DNA, 15 bp, Homo sapiens
cgactaccgcttctt

SEQ ID NO: 101213 - DNA, 15 bp, Homo sapiens
ccgactaccgcttct

SEQ ID NO: 101214 - DNA, 15 bp, Homo sapiens
gccgactaccgcttc

SEQ ID NO: 101215 - DNA, 15 bp, Homo sapiens
tgccgactaccgctt

SEQ ID NO: 101216 - DNA, 15 bp, Homo sapiens
gtgccgactaccgct

SEQ ID NO: 101217 - DNA, 15 bp, Homo sapiens
ggtgccgactaccgc

SEQ ID NO: 101218 - DNA, 15 bp, Homo sapiens
tggtgccgactaccg

SEQ ID NO: 101219 - DNA, 15 bp, Homo sapiens
ttggtgccgactacc

SEQ ID NO: 101220 - DNA, 15 bp, Homo sapiens
tttggtgccgactac

SEQ ID NO: 101221 - DNA, 15 bp, Homo sapiens
atttggtgccgacta

SEQ ID NO: 101222 - DNA, 15 bp, Homo sapiens
gatttggtgccgact

SEQ ID NO: 101223 - DNA, 15 bp, Homo sapiens
tgatttggtgccgac

SEQ ID NO: 101224 - DNA, 15 bp, Homo sapiens
gtgatttggtgccga

SEQ ID NO: 101225 - DNA, 15 bp, Homo sapiens
tgtgatttggtgccg

SEQ ID NO: 101226 - DNA, 15 bp, Homo sapiens
ttgtgatttggtgcc

SEQ ID NO: 101227 - DNA, 15 bp, Homo sapiens
attgtgatttggtgc

SEQ ID NO: 101228 - DNA, 15 bp, Homo sapiens
cattgtgatttggtg

SEQ ID NO: 101229 - DNA, 15 bp, Homo sapiens
ccattgtgatttggt

SEQ ID NO: 101230 - DNA, 15 bp, Homo sapiens
gccattgtgatttgg

SEQ ID NO: 101231 - DNA, 15 bp, Homo sapiens
tgccattgtgatttg

SEQ ID NO: 101232 - DNA, 15 bp, Homo sapiens
ttgccattgtgattt

SEQ ID NO: 101233 - DNA, 15 bp, Homo sapiens
gttgccattgtgatt

SEQ ID NO: 101234 - DNA, 15 bp, Homo sapiens
agttgccattgtgat

SEQ ID NO: 101235 - DNA, 15 bp, Homo sapiens
cagttgccattgtga

SEQ ID NO: 101236 - DNA, 15 bp, Homo sapiens
tcagttgccattgtg

SEQ ID NO: 101237 - DNA, 15 bp, Homo sapiens
atcagttgccattgt

SEQ ID NO: 101238 - DNA, 15 bp, Homo sapiens
aatcagttgccattg

SEQ ID NO: 101239 - DNA, 15 bp, Homo sapiens
aaatcagttgccatt

SEQ ID NO: 101240 - DNA, 15 bp, Homo sapiens
aaaatcagttgccat

SEQ ID NO: 101241 - DNA, 15 bp, Homo sapiens
aaaaatcagttgcca

SEQ ID NO: 101242 - DNA, 15 bp, Homo sapiens
taaaaatcagttgcc

SEQ ID NO: 101243 - DNA, 15 bp, Homo sapiens
ctaaaaatcagttgc

SEQ ID NO: 101244 - DNA, 15 bp, Homo sapiens
actaaaaatcagttg

SEQ ID NO: 101245 - DNA, 15 bp, Homo sapiens
cactaaaaatcagtt

SEQ ID NO: 101246 - DNA, 15 bp, Homo sapiens
ccactaaaaatcagt

SEQ ID NO: 101247 - DNA, 15 bp, Homo sapiens
gccactaaaaatcag

SEQ ID NO: 101248 - DNA, 15 bp, Homo sapiens
agccactaaaaatca

SEQ ID NO: 101249 - DNA, 15 bp, Homo sapiens
aagccactaaaaatc

SEQ ID NO: 101250 - DNA, 15 bp, Homo sapiens
gaagccactaaaaat

SEQ ID NO: 101251 - DNA, 15 bp, Homo sapiens
agaagccactaaaaa

SEQ ID NO: 101252 - DNA, 15 bp, Homo sapiens
gagaagccactaaaa

SEQ ID NO: 101253 - DNA, 15 bp, Homo sapiens
agagaagccactaaa

SEQ ID NO: 101254 - DNA, 15 bp, Homo sapiens
aagagaagccactaa

SEQ ID NO: 101255 - DNA, 15 bp, Homo sapiens
aaagagaagccacta

SEQ ID NO: 101256 - DNA, 15 bp, Homo sapiens
caaagagaagccact

SEQ ID NO: 101257 - DNA, 15 bp, Homo sapiens
acaaagagaagccac

SEQ ID NO: 101258 - DNA, 15 bp, Homo sapiens
cacaaagagaagcca

SEQ ID NO: 101259 - DNA, 15 bp, Homo sapiens
ccacaaagagaagcc

SEQ ID NO: 101260 - DNA, 15 bp, Homo sapiens
tccacaaagagaagc

SEQ ID NO: 101261 - DNA, 15 bp, Homo sapiens
atccacaaagagaag

SEQ ID NO: 101262 - DNA, 15 bp, Homo sapiens
aatccacaaagagaa

SEQ ID NO: 101263 - DNA, 15 bp, Homo sapiens
aaatccacaaagaga

SEQ ID NO: 101264 - DNA, 15 bp, Homo sapiens
gaaatccacaaagag

SEQ ID NO: 101265 - DNA, 15 bp, Homo sapiens
cgaaatccacaaaga

SEQ ID NO: 101266 - DNA, 15 bp, Homo sapiens
ccgaaatccacaaag

SEQ ID NO: 101267 - DNA, 15 bp, Homo sapiens
tccgaaatccacaaa

SEQ ID NO: 101268 - DNA, 15 bp, Homo sapiens
ctccgaaatccacaa

SEQ ID NO: 101269 - DNA, 15 bp, Homo sapiens
cctccgaaatccaca

SEQ ID NO: 101270 - DNA, 15 bp, Homo sapiens
tcctccgaaatccac

SEQ ID NO: 101271 - DNA, 15 bp, Homo sapiens
ctcctccgaaatcca

SEQ ID NO: 101272 - DNA, 15 bp, Homo sapiens
tctcctccgaaatcc

SEQ ID NO: 101273 - DNA, 15 bp, Homo sapiens
atctcctccgaaatc

SEQ ID NO: 101274 - DNA, 15 bp, Homo sapiens
aatctcctccgaaat

SEQ ID NO: 101275 - DNA, 15 bp, Homo sapiens
aaatctcctccgaaa

SEQ ID NO: 101276 - DNA, 15 bp, Homo sapiens
aaaatctcctccgaa

SEQ ID NO: 101277 - DNA, 15 bp, Homo sapiens
taaaatctcctccga

SEQ ID NO: 101278 - DNA, 15 bp, Homo sapiens
ctaaaatctcctccg

SEQ ID NO: 101279 - DNA, 15 bp, Homo sapiens
tctaaaatctcctcc

SEQ ID NO: 101280 - DNA, 15 bp, Homo sapiens
atctaaaatctcctc

SEQ ID NO: 101281 - DNA, 15 bp, Homo sapiens
gatctaaaatctcct

SEQ ID NO: 101282 - DNA, 15 bp, Homo sapiens
ggatctaaaatctcc

SEQ ID NO: 101283 - DNA, 15 bp, Homo sapiens
tggatctaaaatctc

SEQ ID NO: 101284 - DNA, 15 bp, Homo sapiens
ttggatctaaaatct

SEQ ID NO: 101285 - DNA, 15 bp, Homo sapiens
tttggatctaaaatc

SEQ ID NO: 101286 - DNA, 15 bp, Homo sapiens
ttttggatctaaaat

SEQ ID NO: 101287 - DNA, 15 bp, Homo sapiens
cttttggatctaaaa

SEQ ID NO: 101288 - DNA, 15 bp, Homo sapiens
acttttggatctaaa

SEQ ID NO: 101289 - DNA, 15 bp, Homo sapiens
aacttttggatctaa

SEQ ID NO: 101290 - DNA, 15 bp, Homo sapiens
aaacttttggatcta

SEQ ID NO: 101291 - DNA, 15 bp, Homo sapiens
gaaacttttggatct

SEQ ID NO: 101292 - DNA, 15 bp, Homo sapiens
tgaaacttttggatc

SEQ ID NO: 101293 - DNA, 15 bp, Homo sapiens
ctgaaacttttggat

SEQ ID NO: 101294 - DNA, 15 bp, Homo sapiens
cctgaaacttttgga

SEQ ID NO: 101295 - DNA, 15 bp, Homo sapiens
tcctgaaacttttgg

SEQ ID NO: 101296 - DNA, 15 bp, Homo sapiens
ttcctgaaacttttg

SEQ ID NO: 101297 - DNA, 15 bp, Homo sapiens
cttcctgaaactttt

SEQ ID NO: 101298 - DNA, 15 bp, Homo sapiens
tcttcctgaaacttt

SEQ ID NO: 101299 - DNA, 15 bp, Homo sapiens
gtcttcctgaaactt

SEQ ID NO: 101300 - DNA, 15 bp, Homo sapiens
ggtcttcctgaaact

SEQ ID NO: 101301 - DNA, 15 bp, Homo sapiens
gggtcttcctgaaac

SEQ ID NO: 101302 - DNA, 15 bp, Homo sapiens
agggtcttcctgaaa

SEQ ID NO: 101303 - DNA, 15 bp, Homo sapiens
tagggtcttcctgaa

SEQ ID NO: 101304 - DNA, 15 bp, Homo sapiens
ttagggtcttcctga

SEQ ID NO: 101305 - DNA, 15 bp, Homo sapiens
gttagggtcttcctg

SEQ ID NO: 101306 - DNA, 15 bp, Homo sapiens
tgttagggtcttcct

SEQ ID NO: 101307 - DNA, 15 bp, Homo sapiens
atgttagggtcttcc

SEQ ID NO: 101308 - DNA, 15 bp, Homo sapiens
catgttagggtcttc

SEQ ID NO: 101309 - DNA, 15 bp, Homo sapiens
ccatgttagggtctt

SEQ ID NO: 101310 - DNA, 15 bp, Homo sapiens
gccatgttagggtct

SEQ ID NO: 101311 - DNA, 15 bp, Homo sapiens
ggccatgttagggtc

SEQ ID NO: 101312 - DNA, 15 bp, Homo sapiens
gggccatgttagggt

SEQ ID NO: 101313 - DNA, 15 bp, Homo sapiens
tgggccatgttaggg

SEQ ID NO: 101314 - DNA, 15 bp, Homo sapiens
ctgggccatgttagg

SEQ ID NO: 101315 - DNA, 15 bp, Homo sapiens
gctgggccatgttag

SEQ ID NO: 101316 - DNA, 15 bp, Homo sapiens
tgctgggccatgtta

SEQ ID NO: 101317 - DNA, 15 bp, Homo sapiens
ctgctgggccatgtt

SEQ ID NO: 101318 - DNA, 15 bp, Homo sapiens
actgctgggccatgt

SEQ ID NO: 101319 - DNA, 15 bp, Homo sapiens
cactgctgggccatg

SEQ ID NO: 101320 - DNA, 15 bp, Homo sapiens
gcactgctgggccat

SEQ ID NO: 101321 - DNA, 15 bp, Homo sapiens
tgcactgctgggcca

SEQ ID NO: 101322 - DNA, 15 bp, Homo sapiens
atgcactgctgggcc

SEQ ID NO: 101323 - DNA, 15 bp, Homo sapiens
aatgcactgctgggc

SEQ ID NO: 101324 - DNA, 15 bp, Homo sapiens
caatgcactgctggg

SEQ ID NO: 101325 - DNA, 15 bp, Homo sapiens
tcaatgcactgctgg

SEQ ID NO: 101326 - DNA, 15 bp, Homo sapiens
ttcaatgcactgctg

SEQ ID NO: 101327 - DNA, 15 bp, Homo sapiens
cttcaatgcactgct

SEQ ID NO: 101328 - DNA, 15 bp, Homo sapiens
tcttcaatgcactgc

SEQ ID NO: 101329 - DNA, 15 bp, Homo sapiens
ttcttcaatgcactg

SEQ ID NO: 101330 - DNA, 15 bp, Homo sapiens
cttcttcaatgcact

SEQ ID NO: 101331 - DNA, 15 bp, Homo sapiens
acttcttcaatgcac

SEQ ID NO: 101332 - DNA, 15 bp, Homo sapiens
aacttcttcaatgca

SEQ ID NO: 101333 - DNA, 15 bp, Homo sapiens
caacttcttcaatgc

SEQ ID NO: 101334 - DNA, 15 bp, Homo sapiens
tcaacttcttcaatg

SEQ ID NO: 101335 - DNA, 15 bp, Homo sapiens
atcaacttcttcaat

SEQ ID NO: 101336 - DNA, 15 bp, Homo sapiens
gatcaacttcttcaa

SEQ ID NO: 101337 - DNA, 15 bp, Homo sapiens
tgatcaacttcttca

SEQ ID NO: 101338 - DNA, 15 bp, Homo sapiens
atgatcaacttcttc

SEQ ID NO: 101339 - DNA, 15 bp, Homo sapiens
gatgatcaacttctt

SEQ ID NO: 101340 - DNA, 15 bp, Homo sapiens
cgatgatcaacttct

SEQ ID NO: 101341 - DNA, 15 bp, Homo sapiens
acgatgatcaacttc

SEQ ID NO: 101342 - DNA, 15 bp, Homo sapiens
cacgatgatcaactt

SEQ ID NO: 101343 - DNA, 15 bp, Homo sapiens
tcacgatgatcaact

SEQ ID NO: 101344 - DNA, 15 bp, Homo sapiens
ttcacgatgatcaac

SEQ ID NO: 101345 - DNA, 15 bp, Homo sapiens
attcacgatgatcaa

SEQ ID NO: 101346 - DNA, 15 bp, Homo sapiens
tattcacgatgatca

SEQ ID NO: 101347 - DNA, 15 bp, Homo sapiens
atattcacgatgatc

SEQ ID NO: 101348 - DNA, 15 bp, Homo sapiens
aatattcacgatgat

SEQ ID NO: 101349 - DNA, 15 bp, Homo sapiens
gaatattcacgatga

SEQ ID NO: 101350 - DNA, 15 bp, Homo sapiens
cgaatattcacgatg

SEQ ID NO: 101351 - DNA, 15 bp, Homo sapiens
gcgaatattcacgat

SEQ ID NO: 101352 - DNA, 15 bp, Homo sapiens
cgcgaatattcacga

SEQ ID NO: 101353 - DNA, 15 bp, Homo sapiens
acgcgaatattcacg

SEQ ID NO: 101354 - DNA, 15 bp, Homo sapiens
gacgcgaatattcac

SEQ ID NO: 101355 - DNA, 15 bp, Homo sapiens
ggacgcgaatattca

SEQ ID NO: 101356 - DNA, 15 bp, Homo sapiens
gggacgcgaatattc

SEQ ID NO: 101357 - DNA, 15 bp, Homo sapiens
ggggacgcgaatatt

SEQ ID NO: 101358 - DNA, 15 bp, Homo sapiens
gggggacgcgaatat

SEQ ID NO: 101359 - DNA, 15 bp, Homo sapiens
agggggacgcgaata

SEQ ID NO: 101360 - DNA, 15 bp, Homo sapiens
aagggggacgcgaat

SEQ ID NO: 101361 - DNA, 15 bp, Homo sapiens
aaagggggacgcgaa

SEQ ID NO: 101362 - DNA, 15 bp, Homo sapiens
aaaagggggacgcga

SEQ ID NO: 101363 - DNA, 15 bp, Homo sapiens
aaaaagggggacgcg

SEQ ID NO: 101364 - DNA, 15 bp, Homo sapiens
caaaaagggggacgc

SEQ ID NO: 101365 - DNA, 15 bp, Homo sapiens
acaaaaagggggacg

SEQ ID NO: 101366 - DNA, 15 bp, Homo sapiens
aacaaaaagggggac

SEQ ID NO: 101367 - DNA, 15 bp, Homo sapiens
taacaaaaaggggga

SEQ ID NO: 101368 - DNA, 15 bp, Homo sapiens
ttaacaaaaaggggg

SEQ ID NO: 101369 - DNA, 15 bp, Homo sapiens
tttaacaaaaagggg

SEQ ID NO: 101370 - DNA, 15 bp, Homo sapiens
gtttaacaaaaaggg

SEQ ID NO: 101371 - DNA, 15 bp, Homo sapiens
cgtttaacaaaaagg

SEQ ID NO: 101372 - DNA, 15 bp, Homo sapiens
ccgtttaacaaaaag

SEQ ID NO: 101373 - DNA, 15 bp, Homo sapiens
cccgtttaacaaaaa

SEQ ID NO: 101374 - DNA, 15 bp, Homo sapiens
ccccgtttaacaaaa

SEQ ID NO: 101375 - DNA, 15 bp, Homo sapiens
accccgtttaacaaa

SEQ ID NO: 101376 - DNA, 15 bp, Homo sapiens
taccccgtttaacaa

SEQ ID NO: 101377 - DNA, 15 bp, Homo sapiens
ttaccccgtttaaca

SEQ ID NO: 101378 - DNA, 15 bp, Homo sapiens
tttaccccgtttaac

SEQ ID NO: 101379 - DNA, 15 bp, Homo sapiens
atttaccccgtttaa

SEQ ID NO: 101380 - DNA, 15 bp, Homo sapiens
aatttaccccgttta

SEQ ID NO: 101381 - DNA, 15 bp, Homo sapiens
gaatttaccccgttt

SEQ ID NO: 101382 - DNA, 15 bp, Homo sapiens
tgaatttaccccgtt

SEQ ID NO: 101383 - DNA, 15 bp, Homo sapiens
ctgaatttaccccgt

SEQ ID NO: 101384 - DNA, 15 bp, Homo sapiens
cctgaatttaccccg

SEQ ID NO: 101385 - DNA, 15 bp, Homo sapiens
tcctgaatttacccc

SEQ ID NO: 101386 - DNA, 15 bp, Homo sapiens
ttcctgaatttaccc

SEQ ID NO: 101387 - DNA, 15 bp, Homo sapiens
attcctgaatttacc

SEQ ID NO: 101388 - DNA, 15 bp, Homo sapiens
cattcctgaatttac

SEQ ID NO: 101389 - DNA, 15 bp, Homo sapiens
gcattcctgaattta

SEQ ID NO: 101390 - DNA, 15 bp, Homo sapiens
tgcattcctgaattt

SEQ ID NO: 101391 - DNA, 15 bp, Homo sapiens
gtgcattcctgaatt

SEQ ID NO: 101392 - DNA, 15 bp, Homo sapiens
tgtgcattcctgaat

SEQ ID NO: 101393 - DNA, 15 bp, Homo sapiens
atgtgcattcctgaa

SEQ ID NO: 101394 - DNA, 15 bp, Homo sapiens
catgtgcattcctga

SEQ ID NO: 101395 - DNA, 15 bp, Homo sapiens
gcatgtgcattcctg

SEQ ID NO: 101396 - DNA, 15 bp, Homo sapiens
agcatgtgcattcct

SEQ ID NO: 101397 - DNA, 15 bp, Homo sapiens
aagcatgtgcattcc

SEQ ID NO: 101398 - DNA, 15 bp, Homo sapiens
gaagcatgtgcattc

SEQ ID NO: 101399 - DNA, 15 bp, Homo sapiens
tgaagcatgtgcatt

SEQ ID NO: 101400 - DNA, 15 bp, Homo sapiens
ctgaagcatgtgcat

SEQ ID NO: 101401 - DNA, 15 bp, Homo sapiens
gctgaagcatgtgca

SEQ ID NO: 101402 - DNA, 15 bp, Homo sapiens
cgctgaagcatgtgc

SEQ ID NO: 101403 - DNA, 15 bp, Homo sapiens
acgctgaagcatgtg

SEQ ID NO: 101404 - DNA, 15 bp, Homo sapiens
gacgctgaagcatgt

SEQ ID NO: 101405 - DNA, 15 bp, Homo sapiens
agacgctgaagcatg

SEQ ID NO: 101406 - DNA, 15 bp, Homo sapiens
tagacgctgaagcat

SEQ ID NO: 101407 - DNA, 15 bp, Homo sapiens
ttagacgctgaagca

SEQ ID NO: 101408 - DNA, 15 bp, Homo sapiens
tttagacgctgaagc

SEQ ID NO: 101409 - DNA, 15 bp, Homo sapiens
ttttagacgctgaag

SEQ ID NO: 101410 - DNA, 15 bp, Homo sapiens
gttttagacgctgaa

SEQ ID NO: 101411 - DNA, 15 bp, Homo sapiens
ggttttagacgctga

SEQ ID NO: 101412 - DNA, 15 bp, Homo sapiens
tggttttagacgctg

SEQ ID NO: 101413 - DNA, 15 bp, Homo sapiens
atggttttagacgct

SEQ ID NO: 101414 - DNA, 15 bp, Homo sapiens
aatggttttagacgc

SEQ ID NO: 101415 - DNA, 15 bp, Homo sapiens
taatggttttagacg

SEQ ID NO: 101416 - DNA, 15 bp, Homo sapiens
ctaatggttttagac

SEQ ID NO: 101417 - DNA, 15 bp, Homo sapiens
gctaatggttttaga

SEQ ID NO: 101418 - DNA, 15 bp, Homo sapiens
tgctaatggttttag

SEQ ID NO: 101419 - DNA, 15 bp, Homo sapiens
ctgctaatggtttta

SEQ ID NO: 101420 - DNA, 15 bp, Homo sapiens
gctgctaatggtttt

SEQ ID NO: 101421 - DNA, 15 bp, Homo sapiens
cgctgctaatggttt

SEQ ID NO: 101422 - DNA, 15 bp, Homo sapiens
gcgctgctaatggtt

SEQ ID NO: 101423 - DNA, 15 bp, Homo sapiens
agcgctgctaatggt

SEQ ID NO: 101424 - DNA, 15 bp, Homo sapiens
cagcgctgctaatgg

SEQ ID NO: 101425 - DNA, 15 bp, Homo sapiens
gcagcgctgctaatg

SEQ ID NO: 101426 - DNA, 15 bp, Homo sapiens
agcagcgctgctaat

SEQ ID NO: 101427 - DNA, 15 bp, Homo sapiens
tagcagcgctgctaa

SEQ ID NO: 101428 - DNA, 15 bp, Homo sapiens
gtagcagcgctgcta

SEQ ID NO: 101429 - DNA, 15 bp, Homo sapiens
agtagcagcgctgct

SEQ ID NO: 101430 - DNA, 15 bp, Homo sapiens
aagtagcagcgctgc

SEQ ID NO: 101431 - DNA, 15 bp, Homo sapiens
taagtagcagcgctg

SEQ ID NO: 101432 - DNA, 15 bp, Homo sapiens
ttaagtagcagcgct

SEQ ID NO: 101433 - DNA, 15 bp, Homo sapiens
tttaagtagcagcgc

SEQ ID NO: 101434 - DNA, 15 bp, Homo sapiens
ttttaagtagcagcg

SEQ ID NO: 101435 - DNA, 15 bp, Homo sapiens
tttttaagtagcagc

SEQ ID NO: 101436 - DNA, 15 bp, Homo sapiens
atttttaagtagcag

SEQ ID NO: 101437 - DNA, 15 bp, Homo sapiens
aatttttaagtagca

SEQ ID NO: 101438 - DNA, 15 bp, Homo sapiens
caatttttaagtagc

SEQ ID NO: 101439 - DNA, 15 bp, Homo sapiens
acaatttttaagtag

SEQ ID NO: 101440 - DNA, 15 bp, Homo sapiens
cacaatttttaagta

SEQ ID NO: 101441 - DNA, 15 bp, Homo sapiens
acacaatttttaagt

SEQ ID NO: 101442 - DNA, 15 bp, Homo sapiens
cacacaatttttaag

SEQ ID NO: 101443 - DNA, 15 bp, Homo sapiens
acacacaatttttaa

SEQ ID NO: 101444 - DNA, 15 bp, Homo sapiens
cacacacaattttta

SEQ ID NO: 101445 - DNA, 15 bp, Homo sapiens
acacacacaattttt

SEQ ID NO: 101446 - DNA, 15 bp, Homo sapiens
cacacacacaatttt

SEQ ID NO: 101447 - DNA, 15 bp, Homo sapiens
acacacacacaattt

SEQ ID NO: 101448 - DNA, 15 bp, Homo sapiens
cacacacacacaatt

SEQ ID NO: 101449 - DNA, 15 bp, Homo sapiens
aacacacacacacaa

SEQ ID NO: 101450 - DNA, 15 bp, Homo sapiens
aaacacacacacaca

SEQ ID NO: 101451 - DNA, 15 bp, Homo sapiens
taaacacacacacac

SEQ ID NO: 101452 - DNA, 15 bp, Homo sapiens
ttaaacacacacaca

SEQ ID NO: 101453 - DNA, 15 bp, Homo sapiens
cttaaacacacacac

SEQ ID NO: 101454 - DNA, 15 bp, Homo sapiens
acttaaacacacaca

SEQ ID NO: 101455 - DNA, 15 bp, Homo sapiens
aacttaaacacacac

SEQ ID NO: 101456 - DNA, 15 bp, Homo sapiens
aaacttaaacacaca

SEQ ID NO: 101457 - DNA, 15 bp, Homo sapiens
gaaacttaaacacac

SEQ ID NO: 101458 - DNA, 15 bp, Homo sapiens
ggaaacttaaacaca

SEQ ID NO: 101459 - DNA, 15 bp, Homo sapiens
tggaaacttaaacac

SEQ ID NO: 101460 - DNA, 15 bp, Homo sapiens
ttggaaacttaaaca

SEQ ID NO: 101461 - DNA, 15 bp, Homo sapiens
tttggaaacttaaac

SEQ ID NO: 101462 - DNA, 15 bp, Homo sapiens
ctttggaaacttaaa

SEQ ID NO: 101463 - DNA, 15 bp, Homo sapiens
tctttggaaacttaa

SEQ ID NO: 101464 - DNA, 15 bp, Homo sapiens
gtctttggaaactta

SEQ ID NO: 101465 - DNA, 15 bp, Homo sapiens
ggtctttggaaactt

SEQ ID NO: 101466 - DNA, 15 bp, Homo sapiens
aggtctttggaaact

SEQ ID NO: 101467 - DNA, 15 bp, Homo sapiens
taggtctttggaaac

SEQ ID NO: 101468 - DNA, 15 bp, Homo sapiens
ttaggtctttggaaa

SEQ ID NO: 101469 - DNA, 15 bp, Homo sapiens
tttaggtctttggaa

SEQ ID NO: 101470 - DNA, 15 bp, Homo sapiens
atttaggtctttgga

SEQ ID NO: 101471 - DNA, 15 bp, Homo sapiens
tatttaggtctttgg

SEQ ID NO: 101472 - DNA, 15 bp, Homo sapiens
atatttaggtctttg

SEQ ID NO: 101473 - DNA, 15 bp, Homo sapiens
tatatttaggtcttt

SEQ ID NO: 101474 - DNA, 15 bp, Homo sapiens
atatatttaggtctt

SEQ ID NO: 101475 - DNA, 15 bp, Homo sapiens
catatatttaggtct

SEQ ID NO: 101476 - DNA, 15 bp, Homo sapiens
gcatatatttaggtc

SEQ ID NO: 101477 - DNA, 15 bp, Homo sapiens
ggcatatatttaggt

SEQ ID NO: 101478 - DNA, 15 bp, Homo sapiens
tggcatatatttagg

SEQ ID NO: 101479 - DNA, 15 bp, Homo sapiens
atggcatatatttag

SEQ ID NO: 101480 - DNA, 15 bp, Homo sapiens
catggcatatattta

SEQ ID NO: 101481 - DNA, 15 bp, Homo sapiens
tcatggcatatattt

SEQ ID NO: 101482 - DNA, 15 bp, Homo sapiens
ttcatggcatatatt

SEQ ID NO: 101483 - DNA, 15 bp, Homo sapiens
tttcatggcatatat

SEQ ID NO: 101484 - DNA, 15 bp, Homo sapiens
gtttcatggcatata

SEQ ID NO: 101485 - DNA, 15 bp, Homo sapiens
agtttcatggcatat

SEQ ID NO: 101486 - DNA, 15 bp, Homo sapiens
aagtttcatggcata

SEQ ID NO: 101487 - DNA, 15 bp, Homo sapiens
gaagtttcatggcat

SEQ ID NO: 101488 - DNA, 15 bp, Homo sapiens
tgaagtttcatggca

SEQ ID NO: 101489 - DNA, 15 bp, Homo sapiens
ctgaagtttcatggc

SEQ ID NO: 101490 - DNA, 15 bp, Homo sapiens
cctgaagtttcatgg

SEQ ID NO: 101491 - DNA, 15 bp, Homo sapiens
acctgaagtttcatg

SEQ ID NO: 101492 - DNA, 15 bp, Homo sapiens
tacctgaagtttcat

SEQ ID NO: 101493 - DNA, 15 bp, Homo sapiens
ttacctgaagtttca

SEQ ID NO: 101494 - DNA, 15 bp, Homo sapiens
attacctgaagtttc

SEQ ID NO: 101495 - DNA, 15 bp, Homo sapiens
aattacctgaagttt

SEQ ID NO: 101496 - DNA, 15 bp, Homo sapiens
taattacctgaagtt

SEQ ID NO: 101497 - DNA, 15 bp, Homo sapiens
ttaattacctgaagt

SEQ ID NO: 101498 - DNA, 15 bp, Homo sapiens
gttaattacctgaag

SEQ ID NO: 101499 - DNA, 15 bp, Homo sapiens
agttaattacctgaa

SEQ ID NO: 101500 - DNA, 15 bp, Homo sapiens
cagttaattacctga

SEQ ID NO: 101501 - DNA, 15 bp, Homo sapiens
tcagttaattacctg

SEQ ID NO: 101502 - DNA, 15 bp, Homo sapiens
ctcagttaattacct

SEQ ID NO: 101503 - DNA, 15 bp, Homo sapiens
tctcagttaattacc

SEQ ID NO: 101504 - DNA, 15 bp, Homo sapiens
ctctcagttaattac

SEQ ID NO: 101505 - DNA, 15 bp, Homo sapiens
actctcagttaatta

SEQ ID NO: 101506 - DNA, 15 bp, Homo sapiens
tactctcagttaatt

SEQ ID NO: 101507 - DNA, 15 bp, Homo sapiens
atactctcagttaat

SEQ ID NO: 101508 - DNA, 15 bp, Homo sapiens
tatactctcagttaa

SEQ ID NO: 101509 - DNA, 15 bp, Homo sapiens
atatactctcagtta

SEQ ID NO: 101510 - DNA, 15 bp, Homo sapiens
aatatactctcagtt

SEQ ID NO: 101511 - DNA, 15 bp, Homo sapiens
taatatactctcagt

SEQ ID NO: 101512 - DNA, 15 bp, Homo sapiens
ataatatactctcag

SEQ ID NO: 101513 - DNA, 15 bp, Homo sapiens
aataatatactctca

SEQ ID NO: 101514 - DNA, 15 bp, Homo sapiens
taataatatactctc

SEQ ID NO: 101515 - DNA, 15 bp, Homo sapiens
gtaataatatactct

SEQ ID NO: 101516 - DNA, 15 bp, Homo sapiens
agtaataatatactc

SEQ ID NO: 101517 - DNA, 15 bp, Homo sapiens
tagtaataatatact

SEQ ID NO: 101518 - DNA, 15 bp, Homo sapiens
ctagtaataatatac

SEQ ID NO: 101519 - DNA, 15 bp, Homo sapiens
cctagtaataatata

SEQ ID NO: 101520 - DNA, 15 bp, Homo sapiens
ccctagtaataatat

SEQ ID NO: 101521 - DNA, 15 bp, Homo sapiens
gccctagtaataata

SEQ ID NO: 101522 - DNA, 15 bp, Homo sapiens
tgccctagtaataat

SEQ ID NO: 101523 - DNA, 15 bp, Homo sapiens
atgccctagtaataa

SEQ ID NO: 101524 - DNA, 15 bp, Homo sapiens
aatgccctagtaata

SEQ ID NO: 101525 - DNA, 15 bp, Homo sapiens
aaatgccctagtaat

SEQ ID NO: 101526 - DNA, 15 bp, Homo sapiens
aaaatgccctagtaa

SEQ ID NO: 101527 - DNA, 15 bp, Homo sapiens
aaaaatgccctagta

SEQ ID NO: 101528 - DNA, 15 bp, Homo sapiens
aaaaaatgccctagt

SEQ ID NO: 101529 - DNA, 15 bp, Homo sapiens
aaaaaaatgccctag

SEQ ID NO: 101530 - DNA, 15 bp, Homo sapiens
aaaaaaaatgcccta

SEQ ID NO: 101531 - DNA, 15 bp, Homo sapiens
aaaaaaaaatgccct

SEQ ID NO: 101532 - DNA, 15 bp, Homo sapiens
aaaaaaaaaatgccc

SEQ ID NO: 101533 - DNA, 15 bp, Homo sapiens
taaaaaaaaaatgcc

SEQ ID NO: 101534 - DNA, 15 bp, Homo sapiens
ttaaaaaaaaaatgc

SEQ ID NO: 101535 - DNA, 15 bp, Homo sapiens
gttaaaaaaaaaatg

SEQ ID NO: 101536 - DNA, 15 bp, Homo sapiens
agttaaaaaaaaaat

SEQ ID NO: 101537 - DNA, 15 bp, Homo sapiens
cagttaaaaaaaaaa

SEQ ID NO: 101538 - DNA, 15 bp, Homo sapiens
tcagttaaaaaaaaa

SEQ ID NO: 101539 - DNA, 15 bp, Homo sapiens
ctcagttaaaaaaaa

SEQ ID NO: 101540 - DNA, 15 bp, Homo sapiens
gctcagttaaaaaaa

SEQ ID NO: 101541 - DNA, 15 bp, Homo sapiens
cgctcagttaaaaaa

SEQ ID NO: 101542 - DNA, 15 bp, Homo sapiens
tcgctcagttaaaaa

SEQ ID NO: 101543 - DNA, 15 bp, Homo sapiens
ttcgctcagttaaaa

SEQ ID NO: 101544 - DNA, 15 bp, Homo sapiens
tttcgctcagttaaa

SEQ ID NO: 101545 - DNA, 15 bp, Homo sapiens
ttttcgctcagttaa

SEQ ID NO: 101546 - DNA, 15 bp, Homo sapiens
attttcgctcagtta

SEQ ID NO: 101547 - DNA, 15 bp, Homo sapiens
tattttcgctcagtt

SEQ ID NO: 101548 - DNA, 15 bp, Homo sapiens
atattttcgctcagt

SEQ ID NO: 101549 - DNA, 15 bp, Homo sapiens
aatattttcgctcag

SEQ ID NO: 101550 - DNA, 15 bp, Homo sapiens
aaatattttcgctca

SEQ ID NO: 101551 - DNA, 15 bp, Homo sapiens
aaaatattttcgctc

SEQ ID NO: 101552 - DNA, 15 bp, Homo sapiens
aaaaatattttcgct

SEQ ID NO: 101553 - DNA, 15 bp, Homo sapiens
caaaaatattttcgc

SEQ ID NO: 101554 - DNA, 15 bp, Homo sapiens
acaaaaatattttcg

SEQ ID NO: 101555 - DNA, 15 bp, Homo sapiens
cacaaaaatattttc

SEQ ID NO: 101556 - DNA, 15 bp, Homo sapiens
gcacaaaaatatttt

SEQ ID NO: 101557 - DNA, 15 bp, Homo sapiens
ggcacaaaaatattt

SEQ ID NO: 101558 - DNA, 15 bp, Homo sapiens
gggcacaaaaatatt

SEQ ID NO: 101559 - DNA, 15 bp, Homo sapiens
ggggcacaaaaatat

SEQ ID NO: 101560 - DNA, 15 bp, Homo sapiens
aggggcacaaaaata

SEQ ID NO: 101561 - DNA, 15 bp, Homo sapiens
taggggcacaaaaat

SEQ ID NO: 101562 - DNA, 15 bp, Homo sapiens
ttaggggcacaaaaa

SEQ ID NO: 101563 - DNA, 15 bp, Homo sapiens
cttaggggcacaaaa

SEQ ID NO: 101564 - DNA, 15 bp, Homo sapiens
tcttaggggcacaaa

SEQ ID NO: 101565 - DNA, 15 bp, Homo sapiens
ttcttaggggcacaa

SEQ ID NO: 101566 - DNA, 15 bp, Homo sapiens
gttcttaggggcaca

SEQ ID NO: 101567 - DNA, 15 bp, Homo sapiens
agttcttaggggcac

SEQ ID NO: 101568 - DNA, 15 bp, Homo sapiens
aagttcttaggggca

SEQ ID NO: 101569 - DNA, 15 bp, Homo sapiens
caagttcttaggggc

SEQ ID NO: 101570 - DNA, 15 bp, Homo sapiens
tcaagttcttagggg

SEQ ID NO: 101571 - DNA, 15 bp, Homo sapiens
gtcaagttcttaggg

SEQ ID NO: 101572 - DNA, 15 bp, Homo sapiens
ggtcaagttcttagg

SEQ ID NO: 101573 - DNA, 15 bp, Homo sapiens
tggtcaagttcttag

SEQ ID NO: 101574 - DNA, 15 bp, Homo sapiens
gtggtcaagttctta

SEQ ID NO: 101575 - DNA, 15 bp, Homo sapiens
tgtggtcaagttctt

SEQ ID NO: 101576 - DNA, 15 bp, Homo sapiens
atgtggtcaagttct

SEQ ID NO: 101577 - DNA, 15 bp, Homo sapiens
aatgtggtcaagttc

SEQ ID NO: 101578 - DNA, 15 bp, Homo sapiens
aaatgtggtcaagtt

SEQ ID NO: 101579 - DNA, 15 bp, Homo sapiens
gaaatgtggtcaagt

SEQ ID NO: 101580 - DNA, 15 bp, Homo sapiens
ggaaatgtggtcaag

SEQ ID NO: 101581 - DNA, 15 bp, Homo sapiens
aggaaatgtggtcaa

SEQ ID NO: 101582 - DNA, 15 bp, Homo sapiens
aaggaaatgtggtca

SEQ ID NO: 101583 - DNA, 15 bp, Homo sapiens
aaaggaaatgtggtc

SEQ ID NO: 101584 - DNA, 15 bp, Homo sapiens
caaaggaaatgtggt

SEQ ID NO: 101585 - DNA, 15 bp, Homo sapiens
tcaaaggaaatgtgg

SEQ ID NO: 101586 - DNA, 15 bp, Homo sapiens
ttcaaaggaaatgtg

SEQ ID NO: 101587 - DNA, 15 bp, Homo sapiens
attcaaaggaaatgt

SEQ ID NO: 101588 - DNA, 15 bp, Homo sapiens
aattcaaaggaaatg

SEQ ID NO: 101589 - DNA, 15 bp, Homo sapiens
aaattcaaaggaaat

SEQ ID NO: 101590 - DNA, 15 bp, Homo sapiens
caaattcaaaggaaa

SEQ ID NO: 101591 - DNA, 15 bp, Homo sapiens
acaaattcaaaggaa

SEQ ID NO: 101592 - DNA, 15 bp, Homo sapiens
cacaaattcaaagga

SEQ ID NO: 101593 - DNA, 15 bp, Homo sapiens
ccacaaattcaaagg

SEQ ID NO: 101594 - DNA, 15 bp, Homo sapiens
accacaaattcaaag

SEQ ID NO: 101595 - DNA, 15 bp, Homo sapiens
caccacaaattcaaa

SEQ ID NO: 101596 - DNA, 15 bp, Homo sapiens
acaccacaaattcaa

SEQ ID NO: 101597 - DNA, 15 bp, Homo sapiens
aacaccacaaattca

SEQ ID NO: 101598 - DNA, 15 bp, Homo sapiens
caacaccacaaattc

SEQ ID NO: 101599 - DNA, 15 bp, Homo sapiens
gcaacaccacaaatt

SEQ ID NO: 101600 - DNA, 15 bp, Homo sapiens
tgcaacaccacaaat

SEQ ID NO: 101601 - DNA, 15 bp, Homo sapiens
ctgcaacaccacaaa

SEQ ID NO: 101602 - DNA, 15 bp, Homo sapiens
actgcaacaccacaa

SEQ ID NO: 101603 - DNA, 15 bp, Homo sapiens
cactgcaacaccaca

SEQ ID NO: 101604 - DNA, 15 bp, Homo sapiens
ccactgcaacaccac

SEQ ID NO: 101605 - DNA, 15 bp, Homo sapiens
tccactgcaacacca

SEQ ID NO: 101606 - DNA, 15 bp, Homo sapiens
gtccactgcaacacc

SEQ ID NO: 101607 - DNA, 15 bp, Homo sapiens
agtccactgcaacac

SEQ ID NO: 101608 - DNA, 15 bp, Homo sapiens
cagtccactgcaaca

SEQ ID NO: 101609 - DNA, 15 bp, Homo sapiens
tcagtccactgcaac

SEQ ID NO: 101610 - DNA, 15 bp, Homo sapiens
ttcagtccactgcaa

SEQ ID NO: 101611 - DNA, 15 bp, Homo sapiens
attcagtccactgca

SEQ ID NO: 101612 - DNA, 15 bp, Homo sapiens
aattcagtccactgc

SEQ ID NO: 101613 - DNA, 15 bp, Homo sapiens
caattcagtccactg

SEQ ID NO: 101614 - DNA, 15 bp, Homo sapiens
acaattcagtccact

SEQ ID NO: 101615 - DNA, 15 bp, Homo sapiens
aacaattcagtccac

SEQ ID NO: 101616 - DNA, 15 bp, Homo sapiens
caacaattcagtcca

SEQ ID NO: 101617 - DNA, 15 bp, Homo sapiens
tcaacaattcagtcc

SEQ ID NO: 101618 - DNA, 15 bp, Homo sapiens
ctcaacaattcagtc

SEQ ID NO: 101619 - DNA, 15 bp, Homo sapiens
cctcaacaattcagt

SEQ ID NO: 101620 - DNA, 15 bp, Homo sapiens
gcctcaacaattcag

SEQ ID NO: 101621 - DNA, 15 bp, Homo sapiens
agcctcaacaattca

SEQ ID NO: 101622 - DNA, 15 bp, Homo sapiens
aagcctcaacaattc

SEQ ID NO: 101623 - DNA, 15 bp, Homo sapiens
aaagcctcaacaatt

SEQ ID NO: 101624 - DNA, 15 bp, Homo sapiens
taaagcctcaacaat

SEQ ID NO: 101625 - DNA, 15 bp, Homo sapiens
ataaagcctcaacaa

SEQ ID NO: 101626 - DNA, 15 bp, Homo sapiens
tataaagcctcaaca

SEQ ID NO: 101627 - DNA, 15 bp, Homo sapiens
atataaagcctcaac

SEQ ID NO: 101628 - DNA, 15 bp, Homo sapiens
tatataaagcctcaa

SEQ ID NO: 101629 - DNA, 15 bp, Homo sapiens
ctatataaagcctca

SEQ ID NO: 101630 - DNA, 15 bp, Homo sapiens
cctatataaagcctc

SEQ ID NO: 101631 - DNA, 15 bp, Homo sapiens
gcctatataaagcct

SEQ ID NO: 101632 - DNA, 15 bp, Homo sapiens
tgcctatataaagcc

SEQ ID NO: 101633 - DNA, 15 bp, Homo sapiens
atgcctatataaagc

SEQ ID NO: 101634 - DNA, 15 bp, Homo sapiens
aatgcctatataaag

SEQ ID NO: 101635 - DNA, 15 bp, Homo sapiens
gaatgcctatataaa

SEQ ID NO: 101636 - DNA, 15 bp, Homo sapiens
tgaatgcctatataa

SEQ ID NO: 101637 - DNA, 15 bp, Homo sapiens
atgaatgcctatata

SEQ ID NO: 101638 - DNA, 15 bp, Homo sapiens
catgaatgcctatat

SEQ ID NO: 101639 - DNA, 15 bp, Homo sapiens
ccatgaatgcctata

SEQ ID NO: 101640 - DNA, 15 bp, Homo sapiens
cccatgaatgcctat

SEQ ID NO: 101641 - DNA, 15 bp, Homo sapiens
acccatgaatgccta

SEQ ID NO: 101642 - DNA, 15 bp, Homo sapiens
aacccatgaatgcct

SEQ ID NO: 101643 - DNA, 15 bp, Homo sapiens
aaacccatgaatgcc

SEQ ID NO: 101644 - DNA, 15 bp, Homo sapiens
taaacccatgaatgc

SEQ ID NO: 101645 - DNA, 15 bp, Homo sapiens
gtaaacccatgaatg

SEQ ID NO: 101646 - DNA, 15 bp, Homo sapiens
agtaaacccatgaat

SEQ ID NO: 101647 - DNA, 15 bp, Homo sapiens
cagtaaacccatgaa

SEQ ID NO: 101648 - DNA, 15 bp, Homo sapiens
acagtaaacccatga

SEQ ID NO: 101649 - DNA, 15 bp, Homo sapiens
cacagtaaacccatg

SEQ ID NO: 101650 - DNA, 15 bp, Homo sapiens
gcacagtaaacccat

SEQ ID NO: 101651 - DNA, 15 bp, Homo sapiens
agcacagtaaaccca

SEQ ID NO: 101652 - DNA, 15 bp, Homo sapiens
aagcacagtaaaccc

SEQ ID NO: 101653 - DNA, 15 bp, Homo sapiens
aaagcacagtaaacc

SEQ ID NO: 101654 - DNA, 15 bp, Homo sapiens
aaaagcacagtaaac

SEQ ID NO: 101655 - DNA, 15 bp, Homo sapiens
aaaaagcacagtaaa

SEQ ID NO: 101656 - DNA, 15 bp, Homo sapiens
taaaaagcacagtaa

SEQ ID NO: 101657 - DNA, 15 bp, Homo sapiens
ttaaaaagcacagta

SEQ ID NO: 101658 - DNA, 15 bp, Homo sapiens
tttaaaaagcacagt

SEQ ID NO: 101659 - DNA, 15 bp, Homo sapiens
ctttaaaaagcacag

SEQ ID NO: 101660 - DNA, 15 bp, Homo sapiens
actttaaaaagcaca

SEQ ID NO: 101661 - DNA, 15 bp, Homo sapiens
aactttaaaaagcac

SEQ ID NO: 101662 - DNA, 15 bp, Homo sapiens
taactttaaaaagca

SEQ ID NO: 101663 - DNA, 15 bp, Homo sapiens
gtaactttaaaaagc

SEQ ID NO: 101664 - DNA, 15 bp, Homo sapiens
tgtaactttaaaaag

SEQ ID NO: 101665 - DNA, 15 bp, Homo sapiens
gtgtaactttaaaaa

SEQ ID NO: 101666 - DNA, 15 bp, Homo sapiens
ggtgtaactttaaaa

SEQ ID NO: 101667 - DNA, 15 bp, Homo sapiens
tggtgtaactttaaa

SEQ ID NO: 101668 - DNA, 15 bp, Homo sapiens
atggtgtaactttaa

SEQ ID NO: 101669 - DNA, 15 bp, Homo sapiens
aatggtgtaacttta

SEQ ID NO: 101670 - DNA, 15 bp, Homo sapiens
caatggtgtaacttt

SEQ ID NO: 101671 - DNA, 15 bp, Homo sapiens
gcaatggtgtaactt

SEQ ID NO: 101672 - DNA, 15 bp, Homo sapiens
tgcaatggtgtaact

SEQ ID NO: 101673 - DNA, 15 bp, Homo sapiens
ctgcaatggtgtaac

SEQ ID NO: 101674 - DNA, 15 bp, Homo sapiens
tctgcaatggtgtaa

SEQ ID NO: 101675 - DNA, 15 bp, Homo sapiens
atctgcaatggtgta

SEQ ID NO: 101676 - DNA, 15 bp, Homo sapiens
gatctgcaatggtgt

SEQ ID NO: 101677 - DNA, 15 bp, Homo sapiens
tgatctgcaatggtg

SEQ ID NO: 101678 - DNA, 15 bp, Homo sapiens
ttgatctgcaatggt

SEQ ID NO: 101679 - DNA, 15 bp, Homo sapiens
gttgatctgcaatgg

SEQ ID NO: 101680 - DNA, 15 bp, Homo sapiens
agttgatctgcaatg

SEQ ID NO: 101681 - DNA, 15 bp, Homo sapiens
tagttgatctgcaat

SEQ ID NO: 101682 - DNA, 15 bp, Homo sapiens
ttagttgatctgcaa

SEQ ID NO: 101683 - DNA, 15 bp, Homo sapiens
gttagttgatctgca

SEQ ID NO: 101684 - DNA, 15 bp, Homo sapiens
tgttagttgatctgc

SEQ ID NO: 101685 - DNA, 15 bp, Homo sapiens
gtgttagttgatctg

SEQ ID NO: 101686 - DNA, 15 bp, Homo sapiens
ggtgttagttgatct

SEQ ID NO: 101687 - DNA, 15 bp, Homo sapiens
aggtgttagttgatc

SEQ ID NO: 101688 - DNA, 15 bp, Homo sapiens
aaggtgttagttgat

SEQ ID NO: 101689 - DNA, 15 bp, Homo sapiens
aaaggtgttagttga

SEQ ID NO: 101690 - DNA, 15 bp, Homo sapiens
gaaaggtgttagttg

SEQ ID NO: 101691 - DNA, 15 bp, Homo sapiens
tgaaaggtgttagtt

SEQ ID NO: 101692 - DNA, 15 bp, Homo sapiens
ctgaaaggtgttagt

SEQ ID NO: 101693 - DNA, 15 bp, Homo sapiens
actgaaaggtgttag

SEQ ID NO: 101694 - DNA, 15 bp, Homo sapiens
aactgaaaggtgtta

SEQ ID NO: 101695 - DNA, 15 bp, Homo sapiens
aaactgaaaggtgtt

SEQ ID NO: 101696 - DNA, 15 bp, Homo sapiens
aaaactgaaaggtgt

SEQ ID NO: 101697 - DNA, 15 bp, Homo sapiens
taaaactgaaaggtg

SEQ ID NO: 101698 - DNA, 15 bp, Homo sapiens
ttaaaactgaaaggt

SEQ ID NO: 101699 - DNA, 15 bp, Homo sapiens
tttaaaactgaaagg

SEQ ID NO: 101700 - DNA, 15 bp, Homo sapiens
ttttaaaactgaaag

SEQ ID NO: 101701 - DNA, 15 bp, Homo sapiens
cttttaaaactgaaa

SEQ ID NO: 101702 - DNA, 15 bp, Homo sapiens
ccttttaaaactgaa

SEQ ID NO: 101703 - DNA, 15 bp, Homo sapiens
tccttttaaaactga

SEQ ID NO: 101704 - DNA, 15 bp, Homo sapiens
ttccttttaaaactg

SEQ ID NO: 101705 - DNA, 15 bp, Homo sapiens
cttccttttaaaact

SEQ ID NO: 101706 - DNA, 15 bp, Homo sapiens
tcttccttttaaaac

SEQ ID NO: 101707 - DNA, 15 bp, Homo sapiens
atcttccttttaaaa

SEQ ID NO: 101708 - DNA, 15 bp, Homo sapiens
aatcttccttttaaa

SEQ ID NO: 101709 - DNA, 15 bp, Homo sapiens
aaatcttccttttaa

SEQ ID NO: 101710 - DNA, 15 bp, Homo sapiens
taaatcttcctttta

SEQ ID NO: 101711 - DNA, 15 bp, Homo sapiens
gtaaatcttcctttt

SEQ ID NO: 101712 - DNA, 15 bp, Homo sapiens
tgtaaatcttccttt

SEQ ID NO: 101713 - DNA, 15 bp, Homo sapiens
ttgtaaatcttcctt

SEQ ID NO: 101714 - DNA, 15 bp, Homo sapiens
tttgtaaatcttcct

SEQ ID NO: 101715 - DNA, 15 bp, Homo sapiens
atttgtaaatcttcc

SEQ ID NO: 101716 - DNA, 15 bp, Homo sapiens
aatttgtaaatcttc

SEQ ID NO: 101717 - DNA, 15 bp, Homo sapiens
aaatttgtaaatctt

SEQ ID NO: 101718 - DNA, 15 bp, Homo sapiens
caaatttgtaaatct

SEQ ID NO: 101719 - DNA, 15 bp, Homo sapiens
tcaaatttgtaaatc

SEQ ID NO: 101720 - DNA, 15 bp, Homo sapiens
atcaaatttgtaaat

SEQ ID NO: 101721 - DNA, 15 bp, Homo sapiens
catcaaatttgtaaa

SEQ ID NO: 101722 - DNA, 15 bp, Homo sapiens
acatcaaatttgtaa

SEQ ID NO: 101723 - DNA, 15 bp, Homo sapiens
tacatcaaatttgta

SEQ ID NO: 101724 - DNA, 15 bp, Homo sapiens
ctacatcaaatttgt

SEQ ID NO: 101725 - DNA, 15 bp, Homo sapiens
gctacatcaaatttg

SEQ ID NO: 101726 - DNA, 15 bp, Homo sapiens
tgctacatcaaattt

SEQ ID NO: 101727 - DNA, 15 bp, Homo sapiens
ctgctacatcaaatt

SEQ ID NO: 101728 - DNA, 15 bp, Homo sapiens
actgctacatcaaat

SEQ ID NO: 101729 - DNA, 15 bp, Homo sapiens
tactgctacatcaaa

SEQ ID NO: 101730 - DNA, 15 bp, Homo sapiens
ctactgctacatcaa

SEQ ID NO: 101731 - DNA, 15 bp, Homo sapiens
actactgctacatca

SEQ ID NO: 101732 - DNA, 15 bp, Homo sapiens
cactactgctacatc

SEQ ID NO: 101733 - DNA, 15 bp, Homo sapiens
gcactactgctacat

SEQ ID NO: 101734 - DNA, 15 bp, Homo sapiens
cgcactactgctaca

SEQ ID NO: 101735 - DNA, 15 bp, Homo sapiens
acgcactactgctac

SEQ ID NO: 101736 - DNA, 15 bp, Homo sapiens
aacgcactactgcta

SEQ ID NO: 101737 - DNA, 15 bp, Homo sapiens
aaacgcactactgct

SEQ ID NO: 101738 - DNA, 15 bp, Homo sapiens
caaacgcactactgc

SEQ ID NO: 101739 - DNA, 15 bp, Homo sapiens
acaaacgcactactg

SEQ ID NO: 101740 - DNA, 15 bp, Homo sapiens
aacaaacgcactact

SEQ ID NO: 101741 - DNA, 15 bp, Homo sapiens
caacaaacgcactac

SEQ ID NO: 101742 - DNA, 15 bp, Homo sapiens
ccaacaaacgcacta

SEQ ID NO: 101743 - DNA, 15 bp, Homo sapiens
accaacaaacgcact

SEQ ID NO: 101744 - DNA, 15 bp, Homo sapiens
taccaacaaacgcac

SEQ ID NO: 101745 - DNA, 15 bp, Homo sapiens
ataccaacaaacgca

SEQ ID NO: 101746 - DNA, 15 bp, Homo sapiens
cataccaacaaacgc

SEQ ID NO: 101747 - DNA, 15 bp, Homo sapiens
acataccaacaaacg

SEQ ID NO: 101748 - DNA, 15 bp, Homo sapiens
tacataccaacaaac

SEQ ID NO: 101749 - DNA, 15 bp, Homo sapiens
ctacataccaacaaa

SEQ ID NO: 101750 - DNA, 15 bp, Homo sapiens
cctacataccaacaa

SEQ ID NO: 101751 - DNA, 15 bp, Homo sapiens
acctacataccaaca

SEQ ID NO: 101752 - DNA, 15 bp, Homo sapiens
cacctacataccaac

SEQ ID NO: 101753 - DNA, 15 bp, Homo sapiens
gcacctacataccaa

SEQ ID NO: 101754 - DNA, 15 bp, Homo sapiens
agcacctacatacca

SEQ ID NO: 101755 - DNA, 15 bp, Homo sapiens
cagcacctacatacc

SEQ ID NO: 101756 - DNA, 15 bp, Homo sapiens
acagcacctacatac

SEQ ID NO: 101757 - DNA, 15 bp, Homo sapiens
tacagcacctacata

SEQ ID NO: 101758 - DNA, 15 bp, Homo sapiens
atacagcacctacat

SEQ ID NO: 101759 - DNA, 15 bp, Homo sapiens
tatacagcacctaca

SEQ ID NO: 101760 - DNA, 15 bp, Homo sapiens
ttatacagcacctac

SEQ ID NO: 101761 - DNA, 15 bp, Homo sapiens
tttatacagcaccta

SEQ ID NO: 101762 - DNA, 15 bp, Homo sapiens
atttatacagcacct

SEQ ID NO: 101763 - DNA, 15 bp, Homo sapiens
aatttatacagcacc

SEQ ID NO: 101764 - DNA, 15 bp, Homo sapiens
gaatttatacagcac

SEQ ID NO: 101765 - DNA, 15 bp, Homo sapiens
tgaatttatacagca

SEQ ID NO: 101766 - DNA, 15 bp, Homo sapiens
atgaatttatacagc

SEQ ID NO: 101767 - DNA, 15 bp, Homo sapiens
gatgaatttatacag

SEQ ID NO: 101768 - DNA, 15 bp, Homo sapiens
agatgaatttataca

SEQ ID NO: 101769 - DNA, 15 bp, Homo sapiens
tagatgaatttatac

SEQ ID NO: 101770 - DNA, 15 bp, Homo sapiens
atagatgaatttata

SEQ ID NO: 101771 - DNA, 15 bp, Homo sapiens
tatagatgaatttat

SEQ ID NO: 101772 - DNA, 15 bp, Homo sapiens
ttatagatgaattta

SEQ ID NO: 101773 - DNA, 15 bp, Homo sapiens
tttatagatgaattt

SEQ ID NO: 101774 - DNA, 15 bp, Homo sapiens
atttatagatgaatt

SEQ ID NO: 101775 - DNA, 15 bp, Homo sapiens
aatttatagatgaat

SEQ ID NO: 101776 - DNA, 15 bp, Homo sapiens
gaatttatagatgaa

SEQ ID NO: 101777 - DNA, 15 bp, Homo sapiens
agaatttatagatga

SEQ ID NO: 101778 - DNA, 15 bp, Homo sapiens
gagaatttatagatg

SEQ ID NO: 101779 - DNA, 15 bp, Homo sapiens
tgagaatttatagat

SEQ ID NO: 101780 - DNA, 15 bp, Homo sapiens
atgagaatttataga

SEQ ID NO: 101781 - DNA, 15 bp, Homo sapiens
aatgagaatttatag

SEQ ID NO: 101782 - DNA, 15 bp, Homo sapiens
aaatgagaatttata

SEQ ID NO: 101783 - DNA, 15 bp, Homo sapiens
gaaatgagaatttat

SEQ ID NO: 101784 - DNA, 15 bp, Homo sapiens
ggaaatgagaattta

SEQ ID NO: 101785 - DNA, 15 bp, Homo sapiens
aggaaatgagaattt

SEQ ID NO: 101786 - DNA, 15 bp, Homo sapiens
aaggaaatgagaatt

SEQ ID NO: 101787 - DNA, 15 bp, Homo sapiens
aaaggaaatgagaat

SEQ ID NO: 101788 - DNA, 15 bp, Homo sapiens
aaaaggaaatgagaa

SEQ ID NO: 101789 - DNA, 15 bp, Homo sapiens
caaaaggaaatgaga

SEQ ID NO: 101790 - DNA, 15 bp, Homo sapiens
tcaaaaggaaatgag

SEQ ID NO: 101791 - DNA, 15 bp, Homo sapiens
ttcaaaaggaaatga

SEQ ID NO: 101792 - DNA, 15 bp, Homo sapiens
attcaaaaggaaatg

SEQ ID NO: 101793 - DNA, 15 bp, Homo sapiens
cattcaaaaggaaat

SEQ ID NO: 101794 - DNA, 15 bp, Homo sapiens
acattcaaaaggaaa

SEQ ID NO: 101795 - DNA, 15 bp, Homo sapiens
gacattcaaaaggaa

SEQ ID NO: 101796 - DNA, 15 bp, Homo sapiens
agacattcaaaagga

SEQ ID NO: 101797 - DNA, 15 bp, Homo sapiens
tagacattcaaaagg

SEQ ID NO: 101798 - DNA, 15 bp, Homo sapiens
atagacattcaaaag

SEQ ID NO: 101799 - DNA, 15 bp, Homo sapiens
tatagacattcaaaa

SEQ ID NO: 101800 - DNA, 15 bp, Homo sapiens
ttatagacattcaaa

SEQ ID NO: 101801 - DNA, 15 bp, Homo sapiens
gttatagacattcaa

SEQ ID NO: 101802 - DNA, 15 bp, Homo sapiens
ggttatagacattca

SEQ ID NO: 101803 - DNA, 15 bp, Homo sapiens
aggttatagacattc

SEQ ID NO: 101804 - DNA, 15 bp, Homo sapiens
gaggttatagacatt

SEQ ID NO: 101805 - DNA, 15 bp, Homo sapiens
agaggttatagacat

SEQ ID NO: 101806 - DNA, 15 bp, Homo sapiens
aagaggttatagaca

SEQ ID NO: 101807 - DNA, 15 bp, Homo sapiens
aaagaggttatagac

SEQ ID NO: 101808 - DNA, 15 bp, Homo sapiens
gaaagaggttataga

SEQ ID NO: 101809 - DNA, 15 bp, Homo sapiens
tgaaagaggttatag

SEQ ID NO: 101810 - DNA, 15 bp, Homo sapiens
ttgaaagaggttata

SEQ ID NO: 101811 - DNA, 15 bp, Homo sapiens
attgaaagaggttat

SEQ ID NO: 101812 - DNA, 15 bp, Homo sapiens
tattgaaagaggtta

SEQ ID NO: 101813 - DNA, 15 bp, Homo sapiens
ttattgaaagaggtt

SEQ ID NO: 101814 - DNA, 15 bp, Homo sapiens
attattgaaagaggt

SEQ ID NO: 101815 - DNA, 15 bp, Homo sapiens
tattattgaaagagg

SEQ ID NO: 101816 - DNA, 15 bp, Homo sapiens
atattattgaaagag

SEQ ID NO: 101817 - DNA, 15 bp, Homo sapiens
gatattattgaaaga

SEQ ID NO: 101818 - DNA, 15 bp, Homo sapiens
ggatattattgaaag

SEQ ID NO: 101819 - DNA, 15 bp, Homo sapiens
gggatattattgaaa

SEQ ID NO: 101820 - DNA, 15 bp, Homo sapiens
tgggatattattgaa

SEQ ID NO: 101821 - DNA, 15 bp, Homo sapiens
gtgggatattattga

SEQ ID NO: 101822 - DNA, 15 bp, Homo sapiens
ggtgggatattattg

SEQ ID NO: 101823 - DNA, 15 bp, Homo sapiens
aggtgggatattatt

SEQ ID NO: 101824 - DNA, 15 bp, Homo sapiens
aaggtgggatattat

SEQ ID NO: 101825 - DNA, 15 bp, Homo sapiens
taaggtgggatatta

SEQ ID NO: 101826 - DNA, 15 bp, Homo sapiens
gtaaggtgggatatt

SEQ ID NO: 101827 - DNA, 15 bp, Homo sapiens
agtaaggtgggatat

SEQ ID NO: 101828 - DNA, 15 bp, Homo sapiens
tagtaaggtgggata

SEQ ID NO: 101829 - DNA, 15 bp, Homo sapiens
gtagtaaggtgggat

SEQ ID NO: 101830 - DNA, 15 bp, Homo sapiens
tgtagtaaggtggga

SEQ ID NO: 101831 - DNA, 15 bp, Homo sapiens
ctgtagtaaggtggg

SEQ ID NO: 101832 - DNA, 15 bp, Homo sapiens
actgtagtaaggtgg

SEQ ID NO: 101833 - DNA, 15 bp, Homo sapiens
tactgtagtaaggtg

SEQ ID NO: 101834 - DNA, 15 bp, Homo sapiens
atactgtagtaaggt

SEQ ID NO: 101835 - DNA, 15 bp, Homo sapiens
aatactgtagtaagg

SEQ ID NO: 101836 - DNA, 15 bp, Homo sapiens
aaatactgtagtaag

SEQ ID NO: 101837 - DNA, 15 bp, Homo sapiens
aaaatactgtagtaa

SEQ ID NO: 101838 - DNA, 15 bp, Homo sapiens
caaaatactgtagta

SEQ ID NO: 101839 - DNA, 15 bp, Homo sapiens
ccaaaatactgtagt

SEQ ID NO: 101840 - DNA, 15 bp, Homo sapiens
gccaaaatactgtag

SEQ ID NO: 101841 - DNA, 15 bp, Homo sapiens
tgccaaaatactgta

SEQ ID NO: 101842 - DNA, 15 bp, Homo sapiens
ttgccaaaatactgt

SEQ ID NO: 101843 - DNA, 15 bp, Homo sapiens
attgccaaaatactg

SEQ ID NO: 101844 - DNA, 15 bp, Homo sapiens
tattgccaaaatact

SEQ ID NO: 101845 - DNA, 15 bp, Homo sapiens
ctattgccaaaatac

SEQ ID NO: 101846 - DNA, 15 bp, Homo sapiens
tctattgccaaaata

SEQ ID NO: 101847 - DNA, 15 bp, Homo sapiens
ttctattgccaaaat

SEQ ID NO: 101848 - DNA, 15 bp, Homo sapiens
cttctattgccaaaa

SEQ ID NO: 101849 - DNA, 15 bp, Homo sapiens
ccttctattgccaaa

SEQ ID NO: 101850 - DNA, 15 bp, Homo sapiens
accttctattgccaa

SEQ ID NO: 101851 - DNA, 15 bp, Homo sapiens
caccttctattgcca

SEQ ID NO: 101852 - DNA, 15 bp, Homo sapiens
gcaccttctattgcc

SEQ ID NO: 101853 - DNA, 15 bp, Homo sapiens
cgcaccttctattgc

SEQ ID NO: 101854 - DNA, 15 bp, Homo sapiens
acgcaccttctattg

SEQ ID NO: 101855 - DNA, 15 bp, Homo sapiens
cacgcaccttctatt

SEQ ID NO: 101856 - DNA, 15 bp, Homo sapiens
acacgcaccttctat

SEQ ID NO: 101857 - DNA, 15 bp, Homo sapiens
atacatttaagaatt

SEQ ID NO: 101858 - DNA, 15 bp, Homo sapiens
aatacatttaagaat

SEQ ID NO: 101859 - DNA, 15 bp, Homo sapiens
caatacatttaagaa

SEQ ID NO: 101860 - DNA, 15 bp, Homo sapiens
acaatacatttaaga

SEQ ID NO: 101861 - DNA, 15 bp, Homo sapiens
tacaatacatttaag

SEQ ID NO: 101862 - DNA, 15 bp, Homo sapiens
ctacaatacatttaa

SEQ ID NO: 101863 - DNA, 15 bp, Homo sapiens
tctacaatacattta

SEQ ID NO: 101864 - DNA, 15 bp, Homo sapiens
ttctacaatacattt

SEQ ID NO: 101865 - DNA, 15 bp, Homo sapiens
attctacaatacatt

SEQ ID NO: 101866 - DNA, 15 bp, Homo sapiens
cattctacaatacat

SEQ ID NO: 101867 - DNA, 15 bp, Homo sapiens
ccattctacaataca

SEQ ID NO: 101868 - DNA, 15 bp, Homo sapiens
gccattctacaatac

SEQ ID NO: 101869 - DNA, 15 bp, Homo sapiens
agccattctacaata

SEQ ID NO: 101870 - DNA, 15 bp, Homo sapiens
aagccattctacaat

SEQ ID NO: 101871 - DNA, 15 bp, Homo sapiens
caagccattctacaa

SEQ ID NO: 101872 - DNA, 15 bp, Homo sapiens
tcaagccattctaca

SEQ ID NO: 101873 - DNA, 15 bp, Homo sapiens
ttcaagccattctac

SEQ ID NO: 101874 - DNA, 15 bp, Homo sapiens
attcaagccattcta

SEQ ID NO: 101875 - DNA, 15 bp, Homo sapiens
cattcaagccattct

SEQ ID NO: 101876 - DNA, 15 bp, Homo sapiens
acattcaagccattc

SEQ ID NO: 101877 - DNA, 15 bp, Homo sapiens
aacattcaagccatt

SEQ ID NO: 101878 - DNA, 15 bp, Homo sapiens
aaacattcaagccat

SEQ ID NO: 101879 - DNA, 15 bp, Homo sapiens
gaaacattcaagcca

SEQ ID NO: 101880 - DNA, 15 bp, Homo sapiens
tgaaacattcaagcc

SEQ ID NO: 101881 - DNA, 15 bp, Homo sapiens
ctgaaacattcaagc

SEQ ID NO: 101882 - DNA, 15 bp, Homo sapiens
tctgaaacattcaag

SEQ ID NO: 101883 - DNA, 15 bp, Homo sapiens
gtctgaaacattcaa

SEQ ID NO: 101884 - DNA, 15 bp, Homo sapiens
tgtctgaaacattca

SEQ ID NO: 101885 - DNA, 15 bp, Homo sapiens
ctgtctgaaacattc

SEQ ID NO: 101886 - DNA, 15 bp, Homo sapiens
cctgtctgaaacatt

SEQ ID NO: 101887 - DNA, 15 bp, Homo sapiens
tcctgtctgaaacat

SEQ ID NO: 101888 - DNA, 15 bp, Homo sapiens
gtcctgtctgaaaca

SEQ ID NO: 101889 - DNA, 15 bp, Homo sapiens
tgtcctgtctgaaac

SEQ ID NO: 101890 - DNA, 15 bp, Homo sapiens
gtgtcctgtctgaaa

SEQ ID NO: 101891 - DNA, 15 bp, Homo sapiens
cgtgtcctgtctgaa

SEQ ID NO: 101892 - DNA, 15 bp, Homo sapiens
acgtgtcctgtctga

SEQ ID NO: 101893 - DNA, 15 bp, Homo sapiens
aacgtgtcctgtctg

SEQ ID NO: 101894 - DNA, 15 bp, Homo sapiens
aaacgtgtcctgtct

SEQ ID NO: 101895 - DNA, 15 bp, Homo sapiens
caaacgtgtcctgtc

SEQ ID NO: 101896 - DNA, 15 bp, Homo sapiens
ccaaacgtgtcctgt

SEQ ID NO: 101897 - DNA, 15 bp, Homo sapiens
gccaaacgtgtcctg

SEQ ID NO: 101898 - DNA, 15 bp, Homo sapiens
agccaaacgtgtcct

SEQ ID NO: 101899 - DNA, 15 bp, Homo sapiens
tagccaaacgtgtcc

SEQ ID NO: 101900 - DNA, 15 bp, Homo sapiens
atagccaaacgtgtc

SEQ ID NO: 101901 - DNA, 15 bp, Homo sapiens
tatagccaaacgtgt

SEQ ID NO: 101902 - DNA, 15 bp, Homo sapiens
ctatagccaaacgtg

SEQ ID NO: 101903 - DNA, 15 bp, Homo sapiens
cctatagccaaacgt

SEQ ID NO: 101904 - DNA, 15 bp, Homo sapiens
tcctatagccaaacg

SEQ ID NO: 101905 - DNA, 15 bp, Homo sapiens
ttcctatagccaaac

SEQ ID NO: 101906 - DNA, 15 bp, Homo sapiens
tttcctatagccaaa

SEQ ID NO: 101907 - DNA, 15 bp, Homo sapiens
ttttcctatagccaa

SEQ ID NO: 101908 - DNA, 15 bp, Homo sapiens
attttcctatagcca

SEQ ID NO: 101909 - DNA, 15 bp, Homo sapiens
tattttcctatagcc

SEQ ID NO: 101910 - DNA, 15 bp, Homo sapiens
ttattttcctatagc

SEQ ID NO: 101911 - DNA, 15 bp, Homo sapiens
tttattttcctatag

SEQ ID NO: 101912 - DNA, 15 bp, Homo sapiens
gtttattttcctata

SEQ ID NO: 101913 - DNA, 15 bp, Homo sapiens
tgtttattttcctat

SEQ ID NO: 101914 - DNA, 15 bp, Homo sapiens
ttgtttattttccta

SEQ ID NO: 101915 - DNA, 15 bp, Homo sapiens
attgtttattttcct

SEQ ID NO: 101916 - DNA, 15 bp, Homo sapiens
aattgtttattttcc

SEQ ID NO: 101917 - DNA, 15 bp, Homo sapiens
caattgtttattttc

SEQ ID NO: 101918 - DNA, 15 bp, Homo sapiens
tcaattgtttatttt

SEQ ID NO: 101919 - DNA, 15 bp, Homo sapiens
gtcaattgtttattt

SEQ ID NO: 101920 - DNA, 15 bp, Homo sapiens
agtcaattgtttatt

SEQ ID NO: 101921 - DNA, 15 bp, Homo sapiens
aagtcaattgtttat

SEQ ID NO: 101922 - DNA, 15 bp, Homo sapiens
aaagtcaattgttta

SEQ ID NO: 101923 - DNA, 15 bp, Homo sapiens
taaagtcaattgttt

SEQ ID NO: 101924 - DNA, 15 bp, Homo sapiens
ataaagtcaattgtt

SEQ ID NO: 101925 - DNA, 15 bp, Homo sapiens
aataaagtcaattgt

SEQ ID NO: 101926 - DNA, 15 bp, Homo sapiens
gaataaagtcaattg

SEQ ID NO: 101927 - DNA, 15 bp, Homo sapiens
agaataaagtcaatt

SEQ ID NO: 101928 - DNA, 15 bp, Homo sapiens
cagaataaagtcaat

SEQ ID NO: 101929 - DNA, 15 bp, Homo sapiens
acagaataaagtcaa

SEQ ID NO: 101930 - DNA, 15 bp, Homo sapiens
cacagaataaagtca

SEQ ID NO: 101931 - DNA, 15 bp, Homo sapiens
acacagaataaagtc

SEQ ID NO: 101932 - DNA, 15 bp, Homo sapiens
aacacagaataaagt

SEQ ID NO: 101933 - DNA, 15 bp, Homo sapiens
aaacacagaataaag

SEQ ID NO: 101934 - DNA, 15 bp, Homo sapiens
taaacacagaataaa

SEQ ID NO: 101935 - DNA, 15 bp, Homo sapiens
gtaaacacagaataa

SEQ ID NO: 101936 - DNA, 15 bp, Homo sapiens
ggtaaacacagaata

SEQ ID NO: 101937 - DNA, 15 bp, Homo sapiens
tggtaaacacagaat

SEQ ID NO: 101938 - DNA, 15 bp, Homo sapiens
ttggtaaacacagaa

SEQ ID NO: 101939 - DNA, 15 bp, Homo sapiens
attggtaaacacaga

SEQ ID NO: 101940 - DNA, 15 bp, Homo sapiens
aattggtaaacacag

SEQ ID NO: 101941 - DNA, 15 bp, Homo sapiens
aaattggtaaacaca

SEQ ID NO: 101942 - DNA, 15 bp, Homo sapiens
aaaattggtaaacac

SEQ ID NO: 101943 - DNA, 15 bp, Homo sapiens
taaaattggtaaaca

SEQ ID NO: 101944 - DNA, 15 bp, Homo sapiens
ataaaattggtaaac

SEQ ID NO: 101945 - DNA, 15 bp, Homo sapiens
cataaaattggtaaa

SEQ ID NO: 101946 - DNA, 15 bp, Homo sapiens
tcataaaattggtaa

SEQ ID NO: 101947 - DNA, 15 bp, Homo sapiens
ttcataaaattggta

SEQ ID NO: 101948 - DNA, 15 bp, Homo sapiens
cttcataaaattggt

SEQ ID NO: 101949 - DNA, 15 bp, Homo sapiens
tcttcataaaattgg

SEQ ID NO: 101950 - DNA, 15 bp, Homo sapiens
gtcttcataaaattg

SEQ ID NO: 101951 - DNA, 15 bp, Homo sapiens
tgtcttcataaaatt

SEQ ID NO: 101952 - DNA, 15 bp, Homo sapiens
atgtcttcataaaat

SEQ ID NO: 101953 - DNA, 15 bp, Homo sapiens
aatgtcttcataaaa

SEQ ID NO: 101954 - DNA, 15 bp, Homo sapiens
aaatgtcttcataaa

SEQ ID NO: 101955 - DNA, 15 bp, Homo sapiens
caaatgtcttcataa

SEQ ID NO: 101956 - DNA, 15 bp, Homo sapiens
ccaaatgtcttcata

SEQ ID NO: 101957 - DNA, 15 bp, Homo sapiens
tccaaatgtcttcat

SEQ ID NO: 101958 - DNA, 15 bp, Homo sapiens
ctccaaatgtcttca

SEQ ID NO: 101959 - DNA, 15 bp, Homo sapiens
tctccaaatgtcttc

SEQ ID NO: 101960 - DNA, 15 bp, Homo sapiens
atctccaaatgtctt

SEQ ID NO: 101961 - DNA, 15 bp, Homo sapiens
gatctccaaatgtct

SEQ ID NO: 101962 - DNA, 15 bp, Homo sapiens
tgatctccaaatgtc

SEQ ID NO: 101963 - DNA, 15 bp, Homo sapiens
ctgatctccaaatgt

SEQ ID NO: 101964 - DNA, 15 bp, Homo sapiens
actgatctccaaatg

SEQ ID NO: 101965 - DNA, 15 bp, Homo sapiens
tactgatctccaaat

SEQ ID NO: 101966 - DNA, 15 bp, Homo sapiens
atactgatctccaaa

SEQ ID NO: 101967 - DNA, 15 bp, Homo sapiens
tatactgatctccaa

SEQ ID NO: 101968 - DNA, 15 bp, Homo sapiens
atatactgatctcca

SEQ ID NO: 101969 - DNA, 15 bp, Homo sapiens
aatatactgatctcc

SEQ ID NO: 101970 - DNA, 15 bp, Homo sapiens
aaatatactgatctc

SEQ ID NO: 101971 - DNA, 15 bp, Homo sapiens
gaaatatactgatct

SEQ ID NO: 101972 - DNA, 15 bp, Homo sapiens
tgaaatatactgatc

SEQ ID NO: 101973 - DNA, 15 bp, Homo sapiens
atgaaatatactgat

SEQ ID NO: 101974 - DNA, 15 bp, Homo sapiens
tatgaaatatactga

SEQ ID NO: 101975 - DNA, 15 bp, Homo sapiens
ttatgaaatatactg

SEQ ID NO: 101976 - DNA, 15 bp, Homo sapiens
tttatgaaatatact

SEQ ID NO: 101977 - DNA, 15 bp, Homo sapiens
atttatgaaatatac

SEQ ID NO: 101978 - DNA, 15 bp, Homo sapiens
catttatgaaatata

SEQ ID NO: 101979 - DNA, 15 bp, Homo sapiens
tcatttatgaaatat

SEQ ID NO: 101980 - DNA, 15 bp, Homo sapiens
ctcatttatgaaata

SEQ ID NO: 101981 - DNA, 15 bp, Homo sapiens
actcatttatgaaat

SEQ ID NO: 101982 - DNA, 15 bp, Homo sapiens
tactcatttatgaaa

SEQ ID NO: 101983 - DNA, 15 bp, Homo sapiens
ttactcatttatgaa

SEQ ID NO: 101984 - DNA, 15 bp, Homo sapiens
tttactcatttatga

SEQ ID NO: 101985 - DNA, 15 bp, Homo sapiens
ctttactcatttatg

SEQ ID NO: 101986 - DNA, 15 bp, Homo sapiens
actttactcatttat

SEQ ID NO: 101987 - DNA, 15 bp, Homo sapiens
tactttactcattta

SEQ ID NO: 101988 - DNA, 15 bp, Homo sapiens
atactttactcattt

SEQ ID NO: 101989 - DNA, 15 bp, Homo sapiens
catactttactcatt

SEQ ID NO: 101990 - DNA, 15 bp, Homo sapiens
acatactttactcat

SEQ ID NO: 101991 - DNA, 15 bp, Homo sapiens
tacatactttactca

SEQ ID NO: 101992 - DNA, 15 bp, Homo sapiens
ttacatactttactc

SEQ ID NO: 101993 - DNA, 15 bp, Homo sapiens
tttacatactttact

SEQ ID NO: 101994 - DNA, 15 bp, Homo sapiens
gtttacatactttac

SEQ ID NO: 101995 - DNA, 15 bp, Homo sapiens
agtttacatacttta

SEQ ID NO: 101996 - DNA, 15 bp, Homo sapiens
cagtttacatacttt

SEQ ID NO: 101997 - DNA, 15 bp, Homo sapiens
acagtttacatactt

SEQ ID NO: 101998 - DNA, 15 bp, Homo sapiens
aacagtttacatact

SEQ ID NO: 101999 - DNA, 15 bp, Homo sapiens
gaacagtttacatac

SEQ ID NO: 102000 - DNA, 15 bp, Homo sapiens
ggaacagtttacata

SEQ ID NO: 102001 - DNA, 15 bp, Homo sapiens
tggaacagtttacat

SEQ ID NO: 102002 - DNA, 15 bp, Homo sapiens
atggaacagtttaca

SEQ ID NO: 102003 - DNA, 15 bp, Homo sapiens
tatggaacagtttac

SEQ ID NO: 102004 - DNA, 15 bp, Homo sapiens
gtatggaacagttta

SEQ ID NO: 102005 - DNA, 15 bp, Homo sapiens
agtatggaacagttt

SEQ ID NO: 102006 - DNA, 15 bp, Homo sapiens
aagtatggaacagtt

SEQ ID NO: 102007 - DNA, 15 bp, Homo sapiens
aaagtatggaacagt

SEQ ID NO: 102008 - DNA, 15 bp, Homo sapiens
caaagtatggaacag

SEQ ID NO: 102009 - DNA, 15 bp, Homo sapiens
tcaaagtatggaaca

SEQ ID NO: 102010 - DNA, 15 bp, Homo sapiens
ctcaaagtatggaac

SEQ ID NO: 102011 - DNA, 15 bp, Homo sapiens
gctcaaagtatggaa

SEQ ID NO: 102012 - DNA, 15 bp, Homo sapiens
tgctcaaagtatgga

SEQ ID NO: 102013 - DNA, 15 bp, Homo sapiens
gtgctcaaagtatgg

SEQ ID NO: 102014 - DNA, 15 bp, Homo sapiens
tgtgctcaaagtatg

SEQ ID NO: 102015 - DNA, 15 bp, Homo sapiens
ttgtgctcaaagtat

SEQ ID NO: 102016 - DNA, 15 bp, Homo sapiens
tttgtgctcaaagta

SEQ ID NO: 102017 - DNA, 15 bp, Homo sapiens
ctttgtgctcaaagt

SEQ ID NO: 102018 - DNA, 15 bp, Homo sapiens
tctttgtgctcaaag

SEQ ID NO: 102019 - DNA, 15 bp, Homo sapiens
atctttgtgctcaaa

SEQ ID NO: 102020 - DNA, 15 bp, Homo sapiens
tatctttgtgctcaa

SEQ ID NO: 102021 - DNA, 15 bp, Homo sapiens
ttatctttgtgctca

SEQ ID NO: 102022 - DNA, 15 bp, Homo sapiens
tttatctttgtgctc

SEQ ID NO: 102023 - DNA, 15 bp, Homo sapiens
ctttatctttgtgct

SEQ ID NO: 102024 - DNA, 15 bp, Homo sapiens
gctttatctttgtgc

SEQ ID NO: 102025 - DNA, 15 bp, Homo sapiens
ggctttatctttgtg

SEQ ID NO: 102026 - DNA, 15 bp, Homo sapiens
aggctttatctttgt

SEQ ID NO: 102027 - DNA, 15 bp, Homo sapiens
aaggctttatctttg

SEQ ID NO: 102028 - DNA, 15 bp, Homo sapiens
aaaggctttatcttt

SEQ ID NO: 102029 - DNA, 15 bp, Homo sapiens
aaaaggctttatctt

SEQ ID NO: 102030 - DNA, 15 bp, Homo sapiens
caaaaggctttatct

SEQ ID NO: 102031 - DNA, 15 bp, Homo sapiens
gcaaaaggctttatc

SEQ ID NO: 102032 - DNA, 15 bp, Homo sapiens
agcaaaaggctttat

SEQ ID NO: 102033 - DNA, 15 bp, Homo sapiens
cagcaaaaggcttta

SEQ ID NO: 102034 - DNA, 15 bp, Homo sapiens
acagcaaaaggcttt

SEQ ID NO: 102035 - DNA, 15 bp, Homo sapiens
tacagcaaaaggctt

SEQ ID NO: 102036 - DNA, 15 bp, Homo sapiens
ttacagcaaaaggct

SEQ ID NO: 102037 - DNA, 15 bp, Homo sapiens
tttacagcaaaaggc

SEQ ID NO: 102038 - DNA, 15 bp, Homo sapiens
ttttacagcaaaagg

SEQ ID NO: 102039 - DNA, 15 bp, Homo sapiens
cttttacagcaaaag

SEQ ID NO: 102040 - DNA, 15 bp, Homo sapiens
ccttttacagcaaaa

SEQ ID NO: 102041 - DNA, 15 bp, Homo sapiens
tccttttacagcaaa

SEQ ID NO: 102042 - DNA, 15 bp, Homo sapiens
ctccttttacagcaa

SEQ ID NO: 102043 - DNA, 15 bp, Homo sapiens
cctccttttacagca

SEQ ID NO: 102044 - DNA, 15 bp, Homo sapiens
gcctccttttacagc

SEQ ID NO: 102045 - DNA, 15 bp, Homo sapiens
tgcctccttttacag

SEQ ID NO: 102046 - DNA, 15 bp, Homo sapiens
ttgcctccttttaca

SEQ ID NO: 102047 - DNA, 15 bp, Homo sapiens
tttgcctccttttac

SEQ ID NO: 102048 - DNA, 15 bp, Homo sapiens
ttttgcctcctttta

SEQ ID NO: 102049 - DNA, 15 bp, Homo sapiens
cttttgcctcctttt

SEQ ID NO: 102050 - DNA, 15 bp, Homo sapiens
ccttttgcctccttt

SEQ ID NO: 102051 - DNA, 15 bp, Homo sapiens
accttttgcctcctt

SEQ ID NO: 102052 - DNA, 15 bp, Homo sapiens
taccttttgcctcct

SEQ ID NO: 102053 - DNA, 15 bp, Homo sapiens
ttaccttttgcctcc

SEQ ID NO: 102054 - DNA, 15 bp, Homo sapiens
gttaccttttgcctc

SEQ ID NO: 102055 - DNA, 15 bp, Homo sapiens
ggttaccttttgcct

SEQ ID NO: 102056 - DNA, 15 bp, Homo sapiens
gggttaccttttgcc

SEQ ID NO: 102057 - DNA, 15 bp, Homo sapiens
ggggttaccttttgc

SEQ ID NO: 102058 - DNA, 15 bp, Homo sapiens
cggggttaccttttg

SEQ ID NO: 102059 - DNA, 15 bp, Homo sapiens
gcggggttacctttt

SEQ ID NO: 102060 - DNA, 15 bp, Homo sapiens
cgcggggttaccttt

SEQ ID NO: 102061 - DNA, 15 bp, Homo sapiens
acgcggggttacctt

SEQ ID NO: 102062 - DNA, 15 bp, Homo sapiens
aacgcggggttacct

SEQ ID NO: 102063 - DNA, 15 bp, Homo sapiens
aaacgcggggttacc

SEQ ID NO: 102064 - DNA, 15 bp, Homo sapiens
taaacgcggggttac

SEQ ID NO: 102065 - DNA, 15 bp, Homo sapiens
ataaacgcggggtta

SEQ ID NO: 102066 - DNA, 15 bp, Homo sapiens
cataaacgcggggtt

SEQ ID NO: 102067 - DNA, 15 bp, Homo sapiens
acataaacgcggggt

SEQ ID NO: 102068 - DNA, 15 bp, Homo sapiens
aacataaacgcgggg

SEQ ID NO: 102069 - DNA, 15 bp, Homo sapiens
gaacataaacgcggg

SEQ ID NO: 102070 - DNA, 15 bp, Homo sapiens
agaacataaacgcgg

SEQ ID NO: 102071 - DNA, 15 bp, Homo sapiens
aagaacataaacgcg

SEQ ID NO: 102072 - DNA, 15 bp, Homo sapiens
taagaacataaacgc

SEQ ID NO: 102073 - DNA, 15 bp, Homo sapiens
ttaagaacataaacg

SEQ ID NO: 102074 - DNA, 15 bp, Homo sapiens
gttaagaacataaac

SEQ ID NO: 102075 - DNA, 15 bp, Homo sapiens
tgttaagaacataaa

SEQ ID NO: 102076 - DNA, 15 bp, Homo sapiens
ctgttaagaacataa

SEQ ID NO: 102077 - DNA, 15 bp, Homo sapiens
actgttaagaacata

SEQ ID NO: 102078 - DNA, 15 bp, Homo sapiens
gactgttaagaacat

SEQ ID NO: 102079 - DNA, 15 bp, Homo sapiens
agactgttaagaaca

SEQ ID NO: 102080 - DNA, 15 bp, Homo sapiens
gagactgttaagaac

SEQ ID NO: 102081 - DNA, 15 bp, Homo sapiens
tgagactgttaagaa

SEQ ID NO: 102082 - DNA, 15 bp, Homo sapiens
atgagactgttaaga

SEQ ID NO: 102083 - DNA, 15 bp, Homo sapiens
catgagactgttaag

SEQ ID NO: 102084 - DNA, 15 bp, Homo sapiens
tcatgagactgttaa

SEQ ID NO: 102085 - DNA, 15 bp, Homo sapiens
ttcatgagactgtta

SEQ ID NO: 102086 - DNA, 15 bp, Homo sapiens
attcatgagactgtt

SEQ ID NO: 102087 - DNA, 15 bp, Homo sapiens
tattcatgagactgt

SEQ ID NO: 102088 - DNA, 15 bp, Homo sapiens
atattcatgagactg

SEQ ID NO: 102089 - DNA, 15 bp, Homo sapiens
catattcatgagact

SEQ ID NO: 102090 - DNA, 15 bp, Homo sapiens
tcatattcatgagac

SEQ ID NO: 102091 - DNA, 15 bp, Homo sapiens
ttcatattcatgaga

SEQ ID NO: 102092 - DNA, 15 bp, Homo sapiens
tttcatattcatgag

SEQ ID NO: 102093 - DNA, 15 bp, Homo sapiens
atttcatattcatga

SEQ ID NO: 102094 - DNA, 15 bp, Homo sapiens
aatttcatattcatg

SEQ ID NO: 102095 - DNA, 15 bp, Homo sapiens
caatttcatattcat

SEQ ID NO: 102096 - DNA, 15 bp, Homo sapiens
acaatttcatattca

SEQ ID NO: 102097 - DNA, 15 bp, Homo sapiens
aacaatttcatattc

SEQ ID NO: 102098 - DNA, 15 bp, Homo sapiens
aaacaatttcatatt

SEQ ID NO: 102099 - DNA, 15 bp, Homo sapiens
gaaacaatttcatat

SEQ ID NO: 102100 - DNA, 15 bp, Homo sapiens
tgaaacaatttcata

SEQ ID NO: 102101 - DNA, 15 bp, Homo sapiens
ctgaaacaatttcat

SEQ ID NO: 102102 - DNA, 15 bp, Homo sapiens
actgaaacaatttca

SEQ ID NO: 102103 - DNA, 15 bp, Homo sapiens
aactgaaacaatttc

SEQ ID NO: 102104 - DNA, 15 bp, Homo sapiens
caactgaaacaattt

SEQ ID NO: 102105 - DNA, 15 bp, Homo sapiens
tcaactgaaacaatt

SEQ ID NO: 102106 - DNA, 15 bp, Homo sapiens
gtcaactgaaacaat

SEQ ID NO: 102107 - DNA, 15 bp, Homo sapiens
agtcaactgaaacaa

SEQ ID NO: 102108 - DNA, 15 bp, Homo sapiens
gagtcaactgaaaca

SEQ ID NO: 102109 - DNA, 15 bp, Homo sapiens
agagtcaactgaaac

SEQ ID NO: 102110 - DNA, 15 bp, Homo sapiens
cagagtcaactgaaa

SEQ ID NO: 102111 - DNA, 15 bp, Homo sapiens
gcagagtcaactgaa

SEQ ID NO: 102112 - DNA, 15 bp, Homo sapiens
tgcagagtcaactga

SEQ ID NO: 102113 - DNA, 15 bp, Homo sapiens
ctgcagagtcaactg

SEQ ID NO: 102114 - DNA, 15 bp, Homo sapiens
actgcagagtcaact

SEQ ID NO: 102115 - DNA, 15 bp, Homo sapiens
gactgcagagtcaac

SEQ ID NO: 102116 - DNA, 15 bp, Homo sapiens
tgactgcagagtcaa

SEQ ID NO: 102117 - DNA, 15 bp, Homo sapiens
ttgactgcagagtca

SEQ ID NO: 102118 - DNA, 15 bp, Homo sapiens
tttgactgcagagtc

SEQ ID NO: 102119 - DNA, 15 bp, Homo sapiens
ttttgactgcagagt

SEQ ID NO: 102120 - DNA, 15 bp, Homo sapiens
attttgactgcagag

SEQ ID NO: 102121 - DNA, 15 bp, Homo sapiens
aattttgactgcaga

SEQ ID NO: 102122 - DNA, 15 bp, Homo sapiens
aaattttgactgcag

SEQ ID NO: 102123 - DNA, 15 bp, Homo sapiens
aaaattttgactgca

SEQ ID NO: 102124 - DNA, 15 bp, Homo sapiens
taaaattttgactgc

SEQ ID NO: 102125 - DNA, 15 bp, Homo sapiens
ttaaaattttgactg

SEQ ID NO: 102126 - DNA, 15 bp, Homo sapiens
attaaaattttgact

SEQ ID NO: 102127 - DNA, 15 bp, Homo sapiens
aattaaaattttgac

SEQ ID NO: 102128 - DNA, 15 bp, Homo sapiens
aaattaaaattttga

SEQ ID NO: 102129 - DNA, 15 bp, Homo sapiens
gaaattaaaattttg

SEQ ID NO: 102130 - DNA, 15 bp, Homo sapiens
tgaaattaaaatttt

SEQ ID NO: 102131 - DNA, 15 bp, Homo sapiens
atgaaattaaaattt

SEQ ID NO: 102132 - DNA, 15 bp, Homo sapiens
aatgaaattaaaatt

SEQ ID NO: 102133 - DNA, 15 bp, Homo sapiens
caatgaaattaaaat

SEQ ID NO: 102134 - DNA, 15 bp, Homo sapiens
tcaatgaaattaaaa

SEQ ID NO: 102135 - DNA, 15 bp, Homo sapiens
atcaatgaaattaaa

SEQ ID NO: 102136 - DNA, 15 bp, Homo sapiens
aatcaatgaaattaa

SEQ ID NO: 102137 - DNA, 15 bp, Homo sapiens
aaatcaatgaaatta

SEQ ID NO: 102138 - DNA, 15 bp, Homo sapiens
aaaatcaatgaaatt

SEQ ID NO: 102139 - DNA, 15 bp, Homo sapiens
taaaatcaatgaaat

SEQ ID NO: 102140 - DNA, 15 bp, Homo sapiens
ataaaatcaatgaaa

SEQ ID NO: 102141 - DNA, 15 bp, Homo sapiens
aataaaatcaatgaa

SEQ ID NO: 102142 - DNA, 15 bp, Homo sapiens
caataaaatcaatga

SEQ ID NO: 102143 - DNA, 15 bp, Homo sapiens
tcaataaaatcaatg

SEQ ID NO: 102144 - DNA, 15 bp, Homo sapiens
atcaataaaatcaat

SEQ ID NO: 102145 - DNA, 15 bp, Homo sapiens
gatcaataaaatcaa

SEQ ID NO: 102146 - DNA, 15 bp, Homo sapiens
ggatcaataaaatca

SEQ ID NO: 102147 - DNA, 15 bp, Homo sapiens
tggatcaataaaatc

SEQ ID NO: 102148 - DNA, 15 bp, Homo sapiens
atggatcaataaaat

SEQ ID NO: 102149 - DNA, 15 bp, Homo sapiens
tatggatcaataaaa

SEQ ID NO: 102150 - DNA, 15 bp, Homo sapiens
ttatggatcaataaa

SEQ ID NO: 102151 - DNA, 15 bp, Homo sapiens
attatggatcaataa

SEQ ID NO: 102152 - DNA, 15 bp, Homo sapiens
aattatggatcaata

SEQ ID NO: 102153 - DNA, 15 bp, Homo sapiens
aaattatggatcaat

SEQ ID NO: 102154 - DNA, 15 bp, Homo sapiens
gaaattatggatcaa

SEQ ID NO: 102155 - DNA, 15 bp, Homo sapiens
agaaattatggatca

SEQ ID NO: 102156 - DNA, 15 bp, Homo sapiens
aagaaattatggatc

SEQ ID NO: 102157 - DNA, 15 bp, Homo sapiens
gaagaaattatggat

SEQ ID NO: 102158 - DNA, 15 bp, Homo sapiens
agaagaaattatgga

SEQ ID NO: 102159 - DNA, 15 bp, Homo sapiens
cagaagaaattatgg

SEQ ID NO: 102160 - DNA, 15 bp, Homo sapiens
ccagaagaaattatg

SEQ ID NO: 102161 - DNA, 15 bp, Homo sapiens
accagaagaaattat

SEQ ID NO: 102162 - DNA, 15 bp, Homo sapiens
caccagaagaaatta

SEQ ID NO: 102163 - DNA, 15 bp, Homo sapiens
tcaccagaagaaatt

SEQ ID NO: 102164 - DNA, 15 bp, Homo sapiens
ctcaccagaagaaat

SEQ ID NO: 102165 - DNA, 15 bp, Homo sapiens
actcaccagaagaaa

SEQ ID NO: 102166 - DNA, 15 bp, Homo sapiens
aactcaccagaagaa

SEQ ID NO: 102167 - DNA, 15 bp, Homo sapiens
aaactcaccagaaga

SEQ ID NO: 102168 - DNA, 15 bp, Homo sapiens
caaactcaccagaag

SEQ ID NO: 102169 - DNA, 15 bp, Homo sapiens
gcaaactcaccagaa

SEQ ID NO: 102170 - DNA, 15 bp, Homo sapiens
cgcaaactcaccaga

SEQ ID NO: 102171 - DNA, 15 bp, Homo sapiens
acgcaaactcaccag

SEQ ID NO: 102172 - DNA, 15 bp, Homo sapiens
tacgcaaactcacca

SEQ ID NO: 102173 - DNA, 15 bp, Homo sapiens
ctacgcaaactcacc

SEQ ID NO: 102174 - DNA, 15 bp, Homo sapiens
tctacgcaaactcac

SEQ ID NO: 102175 - DNA, 15 bp, Homo sapiens
ttctacgcaaactca

SEQ ID NO: 102176 - DNA, 15 bp, Homo sapiens
attctacgcaaactc

SEQ ID NO: 102177 - DNA, 15 bp, Homo sapiens
gattctacgcaaact

SEQ ID NO: 102178 - DNA, 15 bp, Homo sapiens
cgattctacgcaaac

SEQ ID NO: 102179 - DNA, 15 bp, Homo sapiens
acgattctacgcaaa

SEQ ID NO: 102180 - DNA, 15 bp, Homo sapiens
aacgattctacgcaa

SEQ ID NO: 102181 - DNA, 15 bp, Homo sapiens
gaacgattctacgca

SEQ ID NO: 102182 - DNA, 15 bp, Homo sapiens
tgaacgattctacgc

SEQ ID NO: 102183 - DNA, 15 bp, Homo sapiens
gtgaacgattctacg

SEQ ID NO: 102184 - DNA, 15 bp, Homo sapiens
cgtgaacgattctac

SEQ ID NO: 102185 - DNA, 15 bp, Homo sapiens
ccgtgaacgattcta

SEQ ID NO: 102186 - DNA, 15 bp, Homo sapiens
accgtgaacgattct

SEQ ID NO: 102187 - DNA, 15 bp, Homo sapiens
gaccgtgaacgattc

SEQ ID NO: 102188 - DNA, 15 bp, Homo sapiens
ggaccgtgaacgatt

SEQ ID NO: 102189 - DNA, 15 bp, Homo sapiens
aggaccgtgaacgat

SEQ ID NO: 102190 - DNA, 15 bp, Homo sapiens
taggaccgtgaacga

SEQ ID NO: 102191 - DNA, 15 bp, Homo sapiens
ctaggaccgtgaacg

SEQ ID NO: 102192 - DNA, 15 bp, Homo sapiens
tctaggaccgtgaac

SEQ ID NO: 102193 - DNA, 15 bp, Homo sapiens
atctaggaccgtgaa

SEQ ID NO: 102194 - DNA, 15 bp, Homo sapiens
aatctaggaccgtga

SEQ ID NO: 102195 - DNA, 15 bp, Homo sapiens
taatctaggaccgtg

SEQ ID NO: 102196 - DNA, 15 bp, Homo sapiens
ctaatctaggaccgt

SEQ ID NO: 102197 - DNA, 15 bp, Homo sapiens
actaatctaggaccg

SEQ ID NO: 102198 - DNA, 15 bp, Homo sapiens
cactaatctaggacc

SEQ ID NO: 102199 - DNA, 15 bp, Homo sapiens
ccactaatctaggac

SEQ ID NO: 102200 - DNA, 15 bp, Homo sapiens
accactaatctagga

SEQ ID NO: 102201 - DNA, 15 bp, Homo sapiens
aaccactaatctagg

SEQ ID NO: 102202 - DNA, 15 bp, Homo sapiens
aaaccactaatctag

SEQ ID NO: 102203 - DNA, 15 bp, Homo sapiens
aaaaccactaatcta

SEQ ID NO: 102204 - DNA, 15 bp, Homo sapiens
caaaaccactaatct

SEQ ID NO: 102205 - DNA, 15 bp, Homo sapiens
ccaaaaccactaatc

SEQ ID NO: 102206 - DNA, 15 bp, Homo sapiens
accaaaaccactaat

SEQ ID NO: 102207 - DNA, 15 bp, Homo sapiens
gaccaaaaccactaa

SEQ ID NO: 102208 - DNA, 15 bp, Homo sapiens
tgaccaaaaccacta

SEQ ID NO: 102209 - DNA, 15 bp, Homo sapiens
gtgaccaaaaccact

SEQ ID NO: 102210 - DNA, 15 bp, Homo sapiens
agtgaccaaaaccac

SEQ ID NO: 102211 - DNA, 15 bp, Homo sapiens
tagtgaccaaaacca

SEQ ID NO: 102212 - DNA, 15 bp, Homo sapiens
ctagtgaccaaaacc

SEQ ID NO: 102213 - DNA, 15 bp, Homo sapiens
tctagtgaccaaaac

SEQ ID NO: 102214 - DNA, 15 bp, Homo sapiens
atctagtgaccaaaa

SEQ ID NO: 102215 - DNA, 15 bp, Homo sapiens
aatctagtgaccaaa

SEQ ID NO: 102216 - DNA, 15 bp, Homo sapiens
aaatctagtgaccaa

SEQ ID NO: 102217 - DNA, 15 bp, Homo sapiens
gaaatctagtgacca

SEQ ID NO: 102218 - DNA, 15 bp, Homo sapiens
agaaatctagtgacc

SEQ ID NO: 102219 - DNA, 15 bp, Homo sapiens
cagaaatctagtgac

SEQ ID NO: 102220 - DNA, 15 bp, Homo sapiens
ccagaaatctagtga

SEQ ID NO: 102221 - DNA, 15 bp, Homo sapiens
gccagaaatctagtg

SEQ ID NO: 102222 - DNA, 15 bp, Homo sapiens
tgccagaaatctagt

SEQ ID NO: 102223 - DNA, 15 bp, Homo sapiens
gtgccagaaatctag

SEQ ID NO: 102224 - DNA, 15 bp, Homo sapiens
agtgccagaaatcta

SEQ ID NO: 102225 - DNA, 15 bp, Homo sapiens
tagtgccagaaatct

SEQ ID NO: 102226 - DNA, 15 bp, Homo sapiens
ttagtgccagaaatc

SEQ ID NO: 102227 - DNA, 15 bp, Homo sapiens
attagtgccagaaat

SEQ ID NO: 102228 - DNA, 15 bp, Homo sapiens
tattagtgccagaaa

SEQ ID NO: 102229 - DNA, 15 bp, Homo sapiens
ttattagtgccagaa

SEQ ID NO: 102230 - DNA, 15 bp, Homo sapiens
gttattagtgccaga

SEQ ID NO: 102231 - DNA, 15 bp, Homo sapiens
agttattagtgccag

SEQ ID NO: 102232 - DNA, 15 bp, Homo sapiens
tagttattagtgcca

SEQ ID NO: 102233 - DNA, 15 bp, Homo sapiens
atagttattagtgcc

SEQ ID NO: 102234 - DNA, 15 bp, Homo sapiens
tatagttattagtgc

SEQ ID NO: 102235 - DNA, 15 bp, Homo sapiens
ttatagttattagtg

SEQ ID NO: 102236 - DNA, 15 bp, Homo sapiens
attatagttattagt

SEQ ID NO: 102237 - DNA, 15 bp, Homo sapiens
tattatagttattag

SEQ ID NO: 102238 - DNA, 15 bp, Homo sapiens
gtattatagttatta

SEQ ID NO: 102239 - DNA, 15 bp, Homo sapiens
tgtattatagttatt

SEQ ID NO: 102240 - DNA, 15 bp, Homo sapiens
atgtattatagttat

SEQ ID NO: 102241 - DNA, 15 bp, Homo sapiens
tatgtattatagtta

SEQ ID NO: 102242 - DNA, 15 bp, Homo sapiens
atatgtattatagtt

SEQ ID NO: 102243 - DNA, 15 bp, Homo sapiens
tatatgtattatagt

SEQ ID NO: 102244 - DNA, 15 bp, Homo sapiens
gtatatgtattatag

SEQ ID NO: 102245 - DNA, 15 bp, Homo sapiens
tgtatatgtattata

SEQ ID NO: 102246 - DNA, 15 bp, Homo sapiens
atgtatatgtattat

SEQ ID NO: 102247 - DNA, 15 bp, Homo sapiens
tatgtatatgtatta

SEQ ID NO: 102248 - DNA, 15 bp, Homo sapiens
atatgtatatgtatt

SEQ ID NO: 102249 - DNA, 15 bp, Homo sapiens
tatatgtatatgtat

SEQ ID NO: 102250 - DNA, 15 bp, Homo sapiens
atatatgtatatgta

SEQ ID NO: 102251 - DNA, 15 bp, Homo sapiens
tatatatgtatatgt

SEQ ID NO: 102252 - DNA, 15 bp, Homo sapiens
atatatatgtatatg

SEQ ID NO: 102253 - DNA, 15 bp, Homo sapiens
catatatatgtatat

SEQ ID NO: 102254 - DNA, 15 bp, Homo sapiens
acatatatatgtata

SEQ ID NO: 102255 - DNA, 15 bp, Homo sapiens
cacatatatatgtat

SEQ ID NO: 102256 - DNA, 15 bp, Homo sapiens
acacatatatatgta

SEQ ID NO: 102257 - DNA, 15 bp, Homo sapiens
cacacatatatatgt

SEQ ID NO: 102258 - DNA, 15 bp, Homo sapiens
tcacacatatatatg

SEQ ID NO: 102259 - DNA, 15 bp, Homo sapiens
ctcacacatatatat

SEQ ID NO: 102260 - DNA, 15 bp, Homo sapiens
actcacacatatata

SEQ ID NO: 102261 - DNA, 15 bp, Homo sapiens
tactcacacatatat

SEQ ID NO: 102262 - DNA, 15 bp, Homo sapiens
ttactcacacatata

SEQ ID NO: 102263 - DNA, 15 bp, Homo sapiens
gttactcacacatat

SEQ ID NO: 102264 - DNA, 15 bp, Homo sapiens
cgttactcacacata

SEQ ID NO: 102265 - DNA, 15 bp, Homo sapiens
ccgttactcacacat

SEQ ID NO: 102266 - DNA, 15 bp, Homo sapiens
gccgttactcacaca

SEQ ID NO: 102267 - DNA, 15 bp, Homo sapiens
agccgttactcacac

SEQ ID NO: 102268 - DNA, 15 bp, Homo sapiens
tagccgttactcaca

SEQ ID NO: 102269 - DNA, 15 bp, Homo sapiens
ttagccgttactcac

SEQ ID NO: 102270 - DNA, 15 bp, Homo sapiens
attagccgttactca

SEQ ID NO: 102271 - DNA, 15 bp, Homo sapiens
cattagccgttactc

SEQ ID NO: 102272 - DNA, 15 bp, Homo sapiens
ccattagccgttact

SEQ ID NO: 102273 - DNA, 15 bp, Homo sapiens
accattagccgttac

SEQ ID NO: 102274 - DNA, 15 bp, Homo sapiens
aaccattagccgtta

SEQ ID NO: 102275 - DNA, 15 bp, Homo sapiens
taaccattagccgtt

SEQ ID NO: 102276 - DNA, 15 bp, Homo sapiens
ctaaccattagccgt

SEQ ID NO: 102277 - DNA, 15 bp, Homo sapiens
cctaaccattagccg

SEQ ID NO: 102278 - DNA, 15 bp, Homo sapiens
gcctaaccattagcc

SEQ ID NO: 102279 - DNA, 15 bp, Homo sapiens
tgcctaaccattagc

SEQ ID NO: 102280 - DNA, 15 bp, Homo sapiens
ttgcctaaccattag

SEQ ID NO: 102281 - DNA, 15 bp, Homo sapiens
cttgcctaaccatta

SEQ ID NO: 102282 - DNA, 15 bp, Homo sapiens
tcttgcctaaccatt

SEQ ID NO: 102283 - DNA, 15 bp, Homo sapiens
atcttgcctaaccat

SEQ ID NO: 102284 - DNA, 15 bp, Homo sapiens
aatcttgcctaacca

SEQ ID NO: 102285 - DNA, 15 bp, Homo sapiens
aaatcttgcctaacc

SEQ ID NO: 102286 - DNA, 15 bp, Homo sapiens
aaaatcttgcctaac

SEQ ID NO: 102287 - DNA, 15 bp, Homo sapiens
caaaatcttgcctaa

SEQ ID NO: 102288 - DNA, 15 bp, Homo sapiens
tcaaaatcttgccta

SEQ ID NO: 102289 - DNA, 15 bp, Homo sapiens
atcaaaatcttgcct

SEQ ID NO: 102290 - DNA, 15 bp, Homo sapiens
aatcaaaatcttgcc

SEQ ID NO: 102291 - DNA, 15 bp, Homo sapiens
caatcaaaatcttgc

SEQ ID NO: 102292 - DNA, 15 bp, Homo sapiens
tcaatcaaaatcttg

SEQ ID NO: 102293 - DNA, 15 bp, Homo sapiens
gtcaatcaaaatctt

SEQ ID NO: 102294 - DNA, 15 bp, Homo sapiens
ggtcaatcaaaatct

SEQ ID NO: 102295 - DNA, 15 bp, Homo sapiens
aggtcaatcaaaatc

SEQ ID NO: 102296 - DNA, 15 bp, Homo sapiens
caggtcaatcaaaat

SEQ ID NO: 102297 - DNA, 15 bp, Homo sapiens
acaggtcaatcaaaa

SEQ ID NO: 102298 - DNA, 15 bp, Homo sapiens
cacaggtcaatcaaa

SEQ ID NO: 102299 - DNA, 15 bp, Homo sapiens
tcacaggtcaatcaa

SEQ ID NO: 102300 - DNA, 15 bp, Homo sapiens
atcacaggtcaatca

SEQ ID NO: 102301 - DNA, 15 bp, Homo sapiens
tatcacaggtcaatc

SEQ ID NO: 102302 - DNA, 15 bp, Homo sapiens
atatcacaggtcaat

SEQ ID NO: 102303 - DNA, 15 bp, Homo sapiens
tatatcacaggtcaa

SEQ ID NO: 102304 - DNA, 15 bp, Homo sapiens
ttatatcacaggtca

SEQ ID NO: 102305 - DNA, 15 bp, Homo sapiens
tttatatcacaggtc

SEQ ID NO: 102306 - DNA, 15 bp, Homo sapiens
gtttatatcacaggt

SEQ ID NO: 102307 - DNA, 15 bp, Homo sapiens
agtttatatcacagg

SEQ ID NO: 102308 - DNA, 15 bp, Homo sapiens
aagtttatatcacag

SEQ ID NO: 102309 - DNA, 15 bp, Homo sapiens
taagtttatatcaca

SEQ ID NO: 102310 - DNA, 15 bp, Homo sapiens
ctaagtttatatcac

SEQ ID NO: 102311 - DNA, 15 bp, Homo sapiens
tctaagtttatatca

SEQ ID NO: 102312 - DNA, 15 bp, Homo sapiens
atctaagtttatatc

SEQ ID NO: 102313 - DNA, 15 bp, Homo sapiens
aatctaagtttatat

SEQ ID NO: 102314 - DNA, 15 bp, Homo sapiens
caatctaagtttata

SEQ ID NO: 102315 - DNA, 15 bp, Homo sapiens
ccaatctaagtttat

SEQ ID NO: 102316 - DNA, 15 bp, Homo sapiens
tccaatctaagttta

SEQ ID NO: 102317 - DNA, 15 bp, Homo sapiens
atccaatctaagttt

SEQ ID NO: 102318 - DNA, 15 bp, Homo sapiens
catccaatctaagtt

SEQ ID NO: 102319 - DNA, 15 bp, Homo sapiens
gcatccaatctaagt

SEQ ID NO: 102320 - DNA, 15 bp, Homo sapiens
ggcatccaatctaag

SEQ ID NO: 102321 - DNA, 15 bp, Homo sapiens
tggcatccaatctaa

SEQ ID NO: 102322 - DNA, 15 bp, Homo sapiens
gtggcatccaatcta

SEQ ID NO: 102323 - DNA, 15 bp, Homo sapiens
agtggcatccaatct

SEQ ID NO: 102324 - DNA, 15 bp, Homo sapiens
tagtggcatccaatc

SEQ ID NO: 102325 - DNA, 15 bp, Homo sapiens
ttagtggcatccaat

SEQ ID NO: 102326 - DNA, 15 bp, Homo sapiens
tttagtggcatccaa

SEQ ID NO: 102327 - DNA, 15 bp, Homo sapiens
ctttagtggcatcca

SEQ ID NO: 102328 - DNA, 15 bp, Homo sapiens
actttagtggcatcc

SEQ ID NO: 102329 - DNA, 15 bp, Homo sapiens
aactttagtggcatc

SEQ ID NO: 102330 - DNA, 15 bp, Homo sapiens
aaactttagtggcat

SEQ ID NO: 102331 - DNA, 15 bp, Homo sapiens
caaactttagtggca

SEQ ID NO: 102332 - DNA, 15 bp, Homo sapiens
gcaaactttagtggc

SEQ ID NO: 102333 - DNA, 15 bp, Homo sapiens
agcaaactttagtgg

SEQ ID NO: 102334 - DNA, 15 bp, Homo sapiens
aagcaaactttagtg

SEQ ID NO: 102335 - DNA, 15 bp, Homo sapiens
taagcaaactttagt

SEQ ID NO: 102336 - DNA, 15 bp, Homo sapiens
ataagcaaactttag

SEQ ID NO: 102337 - DNA, 15 bp, Homo sapiens
gataagcaaacttta

SEQ ID NO: 102338 - DNA, 15 bp, Homo sapiens
tgataagcaaacttt

SEQ ID NO: 102339 - DNA, 15 bp, Homo sapiens
gtgataagcaaactt

SEQ ID NO: 102340 - DNA, 15 bp, Homo sapiens
tgtgataagcaaact

SEQ ID NO: 102341 - DNA, 15 bp, Homo sapiens
ctgtgataagcaaac

SEQ ID NO: 102342 - DNA, 15 bp, Homo sapiens
tctgtgataagcaaa

SEQ ID NO: 102343 - DNA, 15 bp, Homo sapiens
ctctgtgataagcaa

SEQ ID NO: 102344 - DNA, 15 bp, Homo sapiens
cctctgtgataagca

SEQ ID NO: 102345 - DNA, 15 bp, Homo sapiens
ccctctgtgataagc

SEQ ID NO: 102346 - DNA, 15 bp, Homo sapiens
gccctctgtgataag

SEQ ID NO: 102347 - DNA, 15 bp, Homo sapiens
tgccctctgtgataa

SEQ ID NO: 102348 - DNA, 15 bp, Homo sapiens
ttgccctctgtgata

SEQ ID NO: 102349 - DNA, 15 bp, Homo sapiens
cttgccctctgtgat

SEQ ID NO: 102350 - DNA, 15 bp, Homo sapiens
acttgccctctgtga

SEQ ID NO: 102351 - DNA, 15 bp, Homo sapiens
tacttgccctctgtg

SEQ ID NO: 102352 - DNA, 15 bp, Homo sapiens
ctacttgccctctgt

SEQ ID NO: 102353 - DNA, 15 bp, Homo sapiens
gctacttgccctctg

SEQ ID NO: 102354 - DNA, 15 bp, Homo sapiens
tgctacttgccctct

SEQ ID NO: 102355 - DNA, 15 bp, Homo sapiens
gtgctacttgccctc

SEQ ID NO: 102356 - DNA, 15 bp, Homo sapiens
tgtgctacttgccct

SEQ ID NO: 102357 - DNA, 15 bp, Homo sapiens
atgtgctacttgccc

SEQ ID NO: 102358 - DNA, 15 bp, Homo sapiens
aatgtgctacttgcc

SEQ ID NO: 102359 - DNA, 15 bp, Homo sapiens
taatgtgctacttgc

SEQ ID NO: 102360 - DNA, 15 bp, Homo sapiens
ataatgtgctacttg

SEQ ID NO: 102361 - DNA, 15 bp, Homo sapiens
cataatgtgctactt

SEQ ID NO: 102362 - DNA, 15 bp, Homo sapiens
ccataatgtgctact

SEQ ID NO: 102363 - DNA, 15 bp, Homo sapiens
gccataatgtgctac

SEQ ID NO: 102364 - DNA, 15 bp, Homo sapiens
ggccataatgtgcta

SEQ ID NO: 102365 - DNA, 15 bp, Homo sapiens
aggccataatgtgct

SEQ ID NO: 102366 - DNA, 15 bp, Homo sapiens
aaggccataatgtgc

SEQ ID NO: 102367 - DNA, 15 bp, Homo sapiens
caaggccataatgtg

SEQ ID NO: 102368 - DNA, 15 bp, Homo sapiens
tcaaggccataatgt

SEQ ID NO: 102369 - DNA, 15 bp, Homo sapiens
ttcaaggccataatg

SEQ ID NO: 102370 - DNA, 15 bp, Homo sapiens
cttcaaggccataat

SEQ ID NO: 102371 - DNA, 15 bp, Homo sapiens
acttcaaggccataa

SEQ ID NO: 102372 - DNA, 15 bp, Homo sapiens
tacttcaaggccata

SEQ ID NO: 102373 - DNA, 15 bp, Homo sapiens
gtacttcaaggccat

SEQ ID NO: 102374 - DNA, 15 bp, Homo sapiens
agtacttcaaggcca

SEQ ID NO: 102375 - DNA, 15 bp, Homo sapiens
aagtacttcaaggcc

SEQ ID NO: 102376 - DNA, 15 bp, Homo sapiens
taagtacttcaaggc

SEQ ID NO: 102377 - DNA, 15 bp, Homo sapiens
ataagtacttcaagg

SEQ ID NO: 102378 - DNA, 15 bp, Homo sapiens
aataagtacttcaag

SEQ ID NO: 102379 - DNA, 15 bp, Homo sapiens
caataagtacttcaa

SEQ ID NO: 102380 - DNA, 15 bp, Homo sapiens
acaataagtacttca

SEQ ID NO: 102381 - DNA, 15 bp, Homo sapiens
aacaataagtacttc

SEQ ID NO: 102382 - DNA, 15 bp, Homo sapiens
gaacaataagtactt

SEQ ID NO: 102383 - DNA, 15 bp, Homo sapiens
agaacaataagtact

SEQ ID NO: 102384 - DNA, 15 bp, Homo sapiens
gagaacaataagtac

SEQ ID NO: 102385 - DNA, 15 bp, Homo sapiens
agagaacaataagta

SEQ ID NO: 102386 - DNA, 15 bp, Homo sapiens
aagagaacaataagt

SEQ ID NO: 102387 - DNA, 15 bp, Homo sapiens
gaagagaacaataag

SEQ ID NO: 102388 - DNA, 15 bp, Homo sapiens
ggaagagaacaataa

SEQ ID NO: 102389 - DNA, 15 bp, Homo sapiens
tggaagagaacaata

SEQ ID NO: 102390 - DNA, 15 bp, Homo sapiens
ctggaagagaacaat

SEQ ID NO: 102391 - DNA, 15 bp, Homo sapiens
gctggaagagaacaa

SEQ ID NO: 102392 - DNA, 15 bp, Homo sapiens
tgctggaagagaaca

SEQ ID NO: 102393 - DNA, 15 bp, Homo sapiens
ttgctggaagagaac

SEQ ID NO: 102394 - DNA, 15 bp, Homo sapiens
gttgctggaagagaa

SEQ ID NO: 102395 - DNA, 15 bp, Homo sapiens
agttgctggaagaga

SEQ ID NO: 102396 - DNA, 15 bp, Homo sapiens
aagttgctggaagag

SEQ ID NO: 102397 - DNA, 15 bp, Homo sapiens
taagttgctggaaga

SEQ ID NO: 102398 - DNA, 15 bp, Homo sapiens
ataagttgctggaag

SEQ ID NO: 102399 - DNA, 15 bp, Homo sapiens
cataagttgctggaa

SEQ ID NO: 102400 - DNA, 15 bp, Homo sapiens
tcataagttgctgga

SEQ ID NO: 102401 - DNA, 15 bp, Homo sapiens
atcataagttgctgg

SEQ ID NO: 102402 - DNA, 15 bp, Homo sapiens
aatcataagttgctg

SEQ ID NO: 102403 - DNA, 15 bp, Homo sapiens
aaatcataagttgct

SEQ ID NO: 102404 - DNA, 15 bp, Homo sapiens
caaatcataagttgc

SEQ ID NO: 102405 - DNA, 15 bp, Homo sapiens
gcaaatcataagttg

SEQ ID NO: 102406 - DNA, 15 bp, Homo sapiens
agcaaatcataagtt

SEQ ID NO: 102407 - DNA, 15 bp, Homo sapiens
gagcaaatcataagt

SEQ ID NO: 102408 - DNA, 15 bp, Homo sapiens
ggagcaaatcataag

SEQ ID NO: 102409 - DNA, 15 bp, Homo sapiens
tggagcaaatcataa

SEQ ID NO: 102410 - DNA, 15 bp, Homo sapiens
ctggagcaaatcata

SEQ ID NO: 102411 - DNA, 15 bp, Homo sapiens
actggagcaaatcat

SEQ ID NO: 102412 - DNA, 15 bp, Homo sapiens
cactggagcaaatca

SEQ ID NO: 102413 - DNA, 15 bp, Homo sapiens
tcactggagcaaatc

SEQ ID NO: 102414 - DNA, 15 bp, Homo sapiens
atcactggagcaaat

SEQ ID NO: 102415 - DNA, 15 bp, Homo sapiens
aatcactggagcaaa

SEQ ID NO: 102416 - DNA, 15 bp, Homo sapiens
aaatcactggagcaa

SEQ ID NO: 102417 - DNA, 15 bp, Homo sapiens
aaaatcactggagca

SEQ ID NO: 102418 - DNA, 15 bp, Homo sapiens
caaaatcactggagc

SEQ ID NO: 102419 - DNA, 15 bp, Homo sapiens
gcaaaatcactggag

SEQ ID NO: 102420 - DNA, 15 bp, Homo sapiens
agcaaaatcactgga

SEQ ID NO: 102421 - DNA, 15 bp, Homo sapiens
aagcaaaatcactgg

SEQ ID NO: 102422 - DNA, 15 bp, Homo sapiens
caagcaaaatcactg

SEQ ID NO: 102423 - DNA, 15 bp, Homo sapiens
gcaagcaaaatcact

SEQ ID NO: 102424 - DNA, 15 bp, Homo sapiens
tgcaagcaaaatcac

SEQ ID NO: 102425 - DNA, 15 bp, Homo sapiens
gtgcaagcaaaatca

SEQ ID NO: 102426 - DNA, 15 bp, Homo sapiens
tgtgcaagcaaaatc

SEQ ID NO: 102427 - DNA, 15 bp, Homo sapiens
gtgtgcaagcaaaat

SEQ ID NO: 102428 - DNA, 15 bp, Homo sapiens
agtgtgcaagcaaaa

SEQ ID NO: 102429 - DNA, 15 bp, Homo sapiens
cagtgtgcaagcaaa

SEQ ID NO: 102430 - DNA, 15 bp, Homo sapiens
tcagtgtgcaagcaa

SEQ ID NO: 102431 - DNA, 15 bp, Homo sapiens
gtcagtgtgcaagca

SEQ ID NO: 102432 - DNA, 15 bp, Homo sapiens
agtcagtgtgcaagc

SEQ ID NO: 102433 - DNA, 15 bp, Homo sapiens
cagtcagtgtgcaag

SEQ ID NO: 102434 - DNA, 15 bp, Homo sapiens
ccagtcagtgtgcaa

SEQ ID NO: 102435 - DNA, 15 bp, Homo sapiens
tccagtcagtgtgca

SEQ ID NO: 102436 - DNA, 15 bp, Homo sapiens
ttccagtcagtgtgc

SEQ ID NO: 102437 - DNA, 15 bp, Homo sapiens
attccagtcagtgtg

SEQ ID NO: 102438 - DNA, 15 bp, Homo sapiens
tattccagtcagtgt

SEQ ID NO: 102439 - DNA, 15 bp, Homo sapiens
atattccagtcagtg

SEQ ID NO: 102440 - DNA, 15 bp, Homo sapiens
tatattccagtcagt

SEQ ID NO: 102441 - DNA, 15 bp, Homo sapiens
ttatattccagtcag

SEQ ID NO: 102442 - DNA, 15 bp, Homo sapiens
cttatattccagtca

SEQ ID NO: 102443 - DNA, 15 bp, Homo sapiens
tcttatattccagtc

SEQ ID NO: 102444 - DNA, 15 bp, Homo sapiens
ttcttatattccagt

SEQ ID NO: 102445 - DNA, 15 bp, Homo sapiens
tttcttatattccag

SEQ ID NO: 102446 - DNA, 15 bp, Homo sapiens
atttcttatattcca

SEQ ID NO: 102447 - DNA, 15 bp, Homo sapiens
catttcttatattcc

SEQ ID NO: 102448 - DNA, 15 bp, Homo sapiens
gcatttcttatattc

SEQ ID NO: 102449 - DNA, 15 bp, Homo sapiens
ggcatttcttatatt

SEQ ID NO: 102450 - DNA, 15 bp, Homo sapiens
aggcatttcttatat

SEQ ID NO: 102451 - DNA, 15 bp, Homo sapiens
aaggcatttcttata

SEQ ID NO: 102452 - DNA, 15 bp, Homo sapiens
gaaggcatttcttat

SEQ ID NO: 102453 - DNA, 15 bp, Homo sapiens
agaaggcatttctta

SEQ ID NO: 102454 - DNA, 15 bp, Homo sapiens
tagaaggcatttctt

SEQ ID NO: 102455 - DNA, 15 bp, Homo sapiens
atagaaggcatttct

SEQ ID NO: 102456 - DNA, 15 bp, Homo sapiens
aatagaaggcatttc

SEQ ID NO: 102457 - DNA, 15 bp, Homo sapiens
aaatagaaggcattt

SEQ ID NO: 102458 - DNA, 15 bp, Homo sapiens
aaaatagaaggcatt

SEQ ID NO: 102459 - DNA, 15 bp, Homo sapiens
aaaaatagaaggcat

SEQ ID NO: 102460 - DNA, 15 bp, Homo sapiens
caaaaatagaaggca

SEQ ID NO: 102461 - DNA, 15 bp, Homo sapiens
gcaaaaatagaaggc

SEQ ID NO: 102462 - DNA, 15 bp, Homo sapiens
agcaaaaatagaagg

SEQ ID NO: 102463 - DNA, 15 bp, Homo sapiens
tagcaaaaatagaag

SEQ ID NO: 102464 - DNA, 15 bp, Homo sapiens
atagcaaaaatagaa

SEQ ID NO: 102465 - DNA, 15 bp, Homo sapiens
aatagcaaaaataga

SEQ ID NO: 102466 - DNA, 15 bp, Homo sapiens
taatagcaaaaatag

SEQ ID NO: 102467 - DNA, 15 bp, Homo sapiens
ttaatagcaaaaata

SEQ ID NO: 102468 - DNA, 15 bp, Homo sapiens
attaatagcaaaaat

SEQ ID NO: 102469 - DNA, 15 bp, Homo sapiens
aattaatagcaaaaa

SEQ ID NO: 102470 - DNA, 15 bp, Homo sapiens
gaattaatagcaaaa

SEQ ID NO: 102471 - DNA, 15 bp, Homo sapiens
ggaattaatagcaaa

SEQ ID NO: 102472 - DNA, 15 bp, Homo sapiens
gggaattaatagcaa

SEQ ID NO: 102473 - DNA, 15 bp, Homo sapiens
agggaattaatagca

SEQ ID NO: 102474 - DNA, 15 bp, Homo sapiens
gagggaattaatagc

SEQ ID NO: 102475 - DNA, 15 bp, Homo sapiens
ggagggaattaatag

SEQ ID NO: 102476 - DNA, 15 bp, Homo sapiens
aggagggaattaata

SEQ ID NO: 102477 - DNA, 15 bp, Homo sapiens
aaggagggaattaat

SEQ ID NO: 102478 - DNA, 15 bp, Homo sapiens
aaaggagggaattaa

SEQ ID NO: 102479 - DNA, 15 bp, Homo sapiens
aaaaggagggaatta

SEQ ID NO: 102480 - DNA, 15 bp, Homo sapiens
aaaaaggagggaatt

SEQ ID NO: 102481 - DNA, 15 bp, Homo sapiens
aaaaaaggagggaat

SEQ ID NO: 102482 - DNA, 15 bp, Homo sapiens
caaaaaaggagggaa

SEQ ID NO: 102483 - DNA, 15 bp, Homo sapiens
acaaaaaaggaggga

SEQ ID NO: 102484 - DNA, 15 bp, Homo sapiens
aacaaaaaaggaggg

SEQ ID NO: 102485 - DNA, 15 bp, Homo sapiens
aaacaaaaaaggagg

SEQ ID NO: 102486 - DNA, 15 bp, Homo sapiens
aaaacaaaaaaggag

SEQ ID NO: 102487 - DNA, 15 bp, Homo sapiens
caaaacaaaaaagga

SEQ ID NO: 102488 - DNA, 15 bp, Homo sapiens
acaaaacaaaaaagg

SEQ ID NO: 102489 - DNA, 15 bp, Homo sapiens
aacaaaacaaaaaag

SEQ ID NO: 102490 - DNA, 15 bp, Homo sapiens
aaacaaaacaaaaaa

SEQ ID NO: 102491 - DNA, 15 bp, Homo sapiens
aaaacaaaacaaaaa

SEQ ID NO: 102492 - DNA, 15 bp, Homo sapiens
caaaacaaaacaaaa

SEQ ID NO: 102493 - DNA, 15 bp, Homo sapiens
acaaaacaaaacaaa

SEQ ID NO: 102494 - DNA, 15 bp, Homo sapiens
tacaaaacaaaacaa

SEQ ID NO: 102495 - DNA, 15 bp, Homo sapiens
ttacaaaacaaaaca

SEQ ID NO: 102496 - DNA, 15 bp, Homo sapiens
gttacaaaacaaaac

SEQ ID NO: 102497 - DNA, 15 bp, Homo sapiens
cgttacaaaacaaaa

SEQ ID NO: 102498 - DNA, 15 bp, Homo sapiens
tcgttacaaaacaaa

SEQ ID NO: 102499 - DNA, 15 bp, Homo sapiens
ttcgttacaaaacaa

SEQ ID NO: 102500 - DNA, 15 bp, Homo sapiens
cttcgttacaaaaca

SEQ ID NO: 102501 - DNA, 15 bp, Homo sapiens
acttcgttacaaaac

SEQ ID NO: 102502 - DNA, 15 bp, Homo sapiens
aacttcgttacaaaa

SEQ ID NO: 102503 - DNA, 15 bp, Homo sapiens
caacttcgttacaaa

SEQ ID NO: 102504 - DNA, 15 bp, Homo sapiens
acaacttcgttacaa

SEQ ID NO: 102505 - DNA, 15 bp, Homo sapiens
aacaacttcgttaca

SEQ ID NO: 102506 - DNA, 15 bp, Homo sapiens
aaacaacttcgttac

SEQ ID NO: 102507 - DNA, 15 bp, Homo sapiens
taaacaacttcgtta

SEQ ID NO: 102508 - DNA, 15 bp, Homo sapiens
ttaaacaacttcgtt

SEQ ID NO: 102509 - DNA, 15 bp, Homo sapiens
gttaaacaacttcgt

SEQ ID NO: 102510 - DNA, 15 bp, Homo sapiens
agttaaacaacttcg

SEQ ID NO: 102511 - DNA, 15 bp, Homo sapiens
aagttaaacaacttc

SEQ ID NO: 102512 - DNA, 15 bp, Homo sapiens
caagttaaacaactt

SEQ ID NO: 102513 - DNA, 15 bp, Homo sapiens
tcaagttaaacaact

SEQ ID NO: 102514 - DNA, 15 bp, Homo sapiens
ttcaagttaaacaac

SEQ ID NO: 102515 - DNA, 15 bp, Homo sapiens
cttcaagttaaacaa

SEQ ID NO: 102516 - DNA, 15 bp, Homo sapiens
ccttcaagttaaaca

SEQ ID NO: 102517 - DNA, 15 bp, Homo sapiens
accttcaagttaaac

SEQ ID NO: 102518 - DNA, 15 bp, Homo sapiens
caccttcaagttaaa

SEQ ID NO: 102519 - DNA, 15 bp, Homo sapiens
tcaccttcaagttaa

SEQ ID NO: 102520 - DNA, 15 bp, Homo sapiens
ttcaccttcaagtta

SEQ ID NO: 102521 - DNA, 15 bp, Homo sapiens
attcaccttcaagtt

SEQ ID NO: 102522 - DNA, 15 bp, Homo sapiens
cattcaccttcaagt

SEQ ID NO: 102523 - DNA, 15 bp, Homo sapiens
tcattcaccttcaag

SEQ ID NO: 102524 - DNA, 15 bp, Homo sapiens
ttcattcaccttcaa

SEQ ID NO: 102525 - DNA, 15 bp, Homo sapiens
cttcattcaccttca

SEQ ID NO: 102526 - DNA, 15 bp, Homo sapiens
tcttcattcaccttc

SEQ ID NO: 102527 - DNA, 15 bp, Homo sapiens
ttcttcattcacctt

SEQ ID NO: 102528 - DNA, 15 bp, Homo sapiens
attcttcattcacct

SEQ ID NO: 102529 - DNA, 15 bp, Homo sapiens
tattcttcattcacc

SEQ ID NO: 102530 - DNA, 15 bp, Homo sapiens
ctattcttcattcac

SEQ ID NO: 102531 - DNA, 15 bp, Homo sapiens
cctattcttcattca

SEQ ID NO: 102532 - DNA, 15 bp, Homo sapiens
acctattcttcattc

SEQ ID NO: 102533 - DNA, 15 bp, Homo sapiens
aacctattcttcatt

SEQ ID NO: 102534 - DNA, 15 bp, Homo sapiens
caacctattcttcat

SEQ ID NO: 102535 - DNA, 15 bp, Homo sapiens
ccaacctattcttca

SEQ ID NO: 102536 - DNA, 15 bp, Homo sapiens
accaacctattcttc

SEQ ID NO: 102537 - DNA, 15 bp, Homo sapiens
aaccaacctattctt

SEQ ID NO: 102538 - DNA, 15 bp, Homo sapiens
caaccaacctattct

SEQ ID NO: 102539 - DNA, 15 bp, Homo sapiens
gcaaccaacctattc

SEQ ID NO: 102540 - DNA, 15 bp, Homo sapiens
ggcaaccaacctatt

SEQ ID NO: 102541 - DNA, 15 bp, Homo sapiens
gggcaaccaacctat

SEQ ID NO: 102542 - DNA, 15 bp, Homo sapiens
ggggcaaccaaccta

SEQ ID NO: 102543 - DNA, 15 bp, Homo sapiens
aggggcaaccaacct

SEQ ID NO: 102544 - DNA, 15 bp, Homo sapiens
aaggggcaaccaacc

SEQ ID NO: 102545 - DNA, 15 bp, Homo sapiens
taaggggcaaccaac

SEQ ID NO: 102546 - DNA, 15 bp, Homo sapiens
ctaaggggcaaccaa

SEQ ID NO: 102547 - DNA, 15 bp, Homo sapiens
actaaggggcaacca

SEQ ID NO: 102548 - DNA, 15 bp, Homo sapiens
aactaaggggcaacc

SEQ ID NO: 102549 - DNA, 15 bp, Homo sapiens
gaactaaggggcaac

SEQ ID NO: 102550 - DNA, 15 bp, Homo sapiens
ggaactaaggggcaa

SEQ ID NO: 102551 - DNA, 15 bp, Homo sapiens
gggaactaaggggca

SEQ ID NO: 102552 - DNA, 15 bp, Homo sapiens
agggaactaaggggc

SEQ ID NO: 102553 - DNA, 15 bp, Homo sapiens
cagggaactaagggg

SEQ ID NO: 102554 - DNA, 15 bp, Homo sapiens
tcagggaactaaggg

SEQ ID NO: 102555 - DNA, 15 bp, Homo sapiens
ctcagggaactaagg

SEQ ID NO: 102556 - DNA, 15 bp, Homo sapiens
cctcagggaactaag

SEQ ID NO: 102557 - DNA, 15 bp, Homo sapiens
tcctcagggaactaa

SEQ ID NO: 102558 - DNA, 15 bp, Homo sapiens
ctcctcagggaacta

SEQ ID NO: 102559 - DNA, 15 bp, Homo sapiens
tctcctcagggaact

SEQ ID NO: 102560 - DNA, 15 bp, Homo sapiens
ttctcctcagggaac

SEQ ID NO: 102561 - DNA, 15 bp, Homo sapiens
tttctcctcagggaa

SEQ ID NO: 102562 - DNA, 15 bp, Homo sapiens
atttctcctcaggga

SEQ ID NO: 102563 - DNA, 15 bp, Homo sapiens
catttctcctcaggg

SEQ ID NO: 102564 - DNA, 15 bp, Homo sapiens
acatttctcctcagg

SEQ ID NO: 102565 - DNA, 15 bp, Homo sapiens
aacatttctcctcag

SEQ ID NO: 102566 - DNA, 15 bp, Homo sapiens
taacatttctcctca

SEQ ID NO: 102567 - DNA, 15 bp, Homo sapiens
ttaacatttctcctc

SEQ ID NO: 102568 - DNA, 15 bp, Homo sapiens
attaacatttctcct

SEQ ID NO: 102569 - DNA, 15 bp, Homo sapiens
tattaacatttctcc

SEQ ID NO: 102570 - DNA, 15 bp, Homo sapiens
gtattaacatttctc

SEQ ID NO: 102571 - DNA, 15 bp, Homo sapiens
agtattaacatttct

SEQ ID NO: 102572 - DNA, 15 bp, Homo sapiens
aagtattaacatttc

SEQ ID NO: 102573 - DNA, 15 bp, Homo sapiens
caagtattaacattt

SEQ ID NO: 102574 - DNA, 15 bp, Homo sapiens
tcaagtattaacatt

SEQ ID NO: 102575 - DNA, 15 bp, Homo sapiens
ttcaagtattaacat

SEQ ID NO: 102576 - DNA, 15 bp, Homo sapiens
gttcaagtattaaca

SEQ ID NO: 102577 - DNA, 15 bp, Homo sapiens
tgttcaagtattaac

SEQ ID NO: 102578 - DNA, 15 bp, Homo sapiens
ttgttcaagtattaa

SEQ ID NO: 102579 - DNA, 15 bp, Homo sapiens
cttgttcaagtatta

SEQ ID NO: 102580 - DNA, 15 bp, Homo sapiens
acttgttcaagtatt

SEQ ID NO: 102581 - DNA, 15 bp, Homo sapiens
cacttgttcaagtat

SEQ ID NO: 102582 - DNA, 15 bp, Homo sapiens
acacttgttcaagta

SEQ ID NO: 102583 - DNA, 15 bp, Homo sapiens
cacacttgttcaagt

SEQ ID NO: 102584 - DNA, 15 bp, Homo sapiens
acacacttgttcaag

SEQ ID NO: 102585 - DNA, 15 bp, Homo sapiens
cacacacttgttcaa

SEQ ID NO: 102586 - DNA, 15 bp, Homo sapiens
acacacacttgttca

SEQ ID NO: 102587 - DNA, 15 bp, Homo sapiens
gacacacacttgttc

SEQ ID NO: 102588 - DNA, 15 bp, Homo sapiens
tgacacacacttgtt

SEQ ID NO: 102589 - DNA, 15 bp, Homo sapiens
ctgacacacacttgt

SEQ ID NO: 102590 - DNA, 15 bp, Homo sapiens
tctgacacacacttg

SEQ ID NO: 102591 - DNA, 15 bp, Homo sapiens
gtctgacacacactt

SEQ ID NO: 102592 - DNA, 15 bp, Homo sapiens
tgtctgacacacact

SEQ ID NO: 102593 - DNA, 15 bp, Homo sapiens
ttgtctgacacacac

SEQ ID NO: 102594 - DNA, 15 bp, Homo sapiens
tttgtctgacacaca

SEQ ID NO: 102595 - DNA, 15 bp, Homo sapiens
atttgtctgacacac

SEQ ID NO: 102596 - DNA, 15 bp, Homo sapiens
aatttgtctgacaca

SEQ ID NO: 102597 - DNA, 15 bp, Homo sapiens
caatttgtctgacac

SEQ ID NO: 102598 - DNA, 15 bp, Homo sapiens
gcaatttgtctgaca

SEQ ID NO: 102599 - DNA, 15 bp, Homo sapiens
agcaatttgtctgac

SEQ ID NO: 102600 - DNA, 15 bp, Homo sapiens
cagcaatttgtctga

SEQ ID NO: 102601 - DNA, 15 bp, Homo sapiens
acagcaatttgtctg

SEQ ID NO: 102602 - DNA, 15 bp, Homo sapiens
aacagcaatttgtct

SEQ ID NO: 102603 - DNA, 15 bp, Homo sapiens
taacagcaatttgtc

SEQ ID NO: 102604 - DNA, 15 bp, Homo sapiens
ataacagcaatttgt

SEQ ID NO: 102605 - DNA, 15 bp, Homo sapiens
cataacagcaatttg

SEQ ID NO: 102606 - DNA, 15 bp, Homo sapiens
acataacagcaattt

SEQ ID NO: 102607 - DNA, 15 bp, Homo sapiens
aacataacagcaatt

SEQ ID NO: 102608 - DNA, 15 bp, Homo sapiens
aaacataacagcaat

SEQ ID NO: 102609 - DNA, 15 bp, Homo sapiens
taaacataacagcaa

SEQ ID NO: 102610 - DNA, 15 bp, Homo sapiens
ataaacataacagca

SEQ ID NO: 102611 - DNA, 15 bp, Homo sapiens
aataaacataacagc

SEQ ID NO: 102612 - DNA, 15 bp, Homo sapiens
aaataaacataacag

SEQ ID NO: 102613 - DNA, 15 bp, Homo sapiens
taaataaacataaca

SEQ ID NO: 102614 - DNA, 15 bp, Homo sapiens
ttaaataaacataac

SEQ ID NO: 102615 - DNA, 15 bp, Homo sapiens
attaaataaacataa

SEQ ID NO: 102616 - DNA, 15 bp, Homo sapiens
aattaaataaacata

SEQ ID NO: 102617 - DNA, 15 bp, Homo sapiens
taattaaataaacat

SEQ ID NO: 102618 - DNA, 15 bp, Homo sapiens
ttaattaaataaaca

SEQ ID NO: 102619 - DNA, 15 bp, Homo sapiens
cttaattaaataaac

SEQ ID NO: 102620 - DNA, 15 bp, Homo sapiens
acttaattaaataaa

SEQ ID NO: 102621 - DNA, 15 bp, Homo sapiens
aacttaattaaataa

SEQ ID NO: 102622 - DNA, 15 bp, Homo sapiens
aaacttaattaaata

SEQ ID NO: 102623 - DNA, 15 bp, Homo sapiens
caaacttaattaaat

SEQ ID NO: 102624 - DNA, 15 bp, Homo sapiens
tcaaacttaattaaa

SEQ ID NO: 102625 - DNA, 15 bp, Homo sapiens
atcaaacttaattaa

SEQ ID NO: 102626 - DNA, 15 bp, Homo sapiens
aatcaaacttaatta

SEQ ID NO: 102627 - DNA, 15 bp, Homo sapiens
aaatcaaacttaatt

SEQ ID NO: 102628 - DNA, 15 bp, Homo sapiens
gaaatcaaacttaat

SEQ ID NO: 102629 - DNA, 15 bp, Homo sapiens
agaaatcaaacttaa

SEQ ID NO: 102630 - DNA, 15 bp, Homo sapiens
tagaaatcaaactta

SEQ ID NO: 102631 - DNA, 15 bp, Homo sapiens
ttagaaatcaaactt

SEQ ID NO: 102632 - DNA, 15 bp, Homo sapiens
cttagaaatcaaact

SEQ ID NO: 102633 - DNA, 15 bp, Homo sapiens
tcttagaaatcaaac

SEQ ID NO: 102634 - DNA, 15 bp, Homo sapiens
ttcttagaaatcaaa

SEQ ID NO: 102635 - DNA, 15 bp, Homo sapiens
tttcttagaaatcaa

SEQ ID NO: 102636 - DNA, 15 bp, Homo sapiens
ttttcttagaaatca

SEQ ID NO: 102637 - DNA, 15 bp, Homo sapiens
attttcttagaaatc

SEQ ID NO: 102638 - DNA, 15 bp, Homo sapiens
gattttcttagaaat

SEQ ID NO: 102639 - DNA, 15 bp, Homo sapiens
agattttcttagaaa

SEQ ID NO: 102640 - DNA, 15 bp, Homo sapiens
gagattttcttagaa

SEQ ID NO: 102641 - DNA, 15 bp, Homo sapiens
tgagattttcttaga

SEQ ID NO: 102642 - DNA, 15 bp, Homo sapiens
ttgagattttcttag

SEQ ID NO: 102643 - DNA, 15 bp, Homo sapiens
tttgagattttctta

SEQ ID NO: 102644 - DNA, 15 bp, Homo sapiens
atttgagattttctt

SEQ ID NO: 102645 - DNA, 15 bp, Homo sapiens
catttgagattttct

SEQ ID NO: 102646 - DNA, 15 bp, Homo sapiens
ccatttgagattttc

SEQ ID NO: 102647 - DNA, 15 bp, Homo sapiens
accatttgagatttt

SEQ ID NO: 102648 - DNA, 15 bp, Homo sapiens
gaccatttgagattt

SEQ ID NO: 102649 - DNA, 15 bp, Homo sapiens
agaccatttgagatt

SEQ ID NO: 102650 - DNA, 15 bp, Homo sapiens
cagaccatttgagat

SEQ ID NO: 102651 - DNA, 15 bp, Homo sapiens
gcagaccatttgaga

SEQ ID NO: 102652 - DNA, 15 bp, Homo sapiens
tgcagaccatttgag

SEQ ID NO: 102653 - DNA, 15 bp, Homo sapiens
gtgcagaccatttga

SEQ ID NO: 102654 - DNA, 15 bp, Homo sapiens
agtgcagaccatttg

SEQ ID NO: 102655 - DNA, 15 bp, Homo sapiens
cagtgcagaccattt

SEQ ID NO: 102656 - DNA, 15 bp, Homo sapiens
tcagtgcagaccatt

SEQ ID NO: 102657 - DNA, 15 bp, Homo sapiens
atcagtgcagaccat

SEQ ID NO: 102658 - DNA, 15 bp, Homo sapiens
catcagtgcagacca

SEQ ID NO: 102659 - DNA, 15 bp, Homo sapiens
ccatcagtgcagacc

SEQ ID NO: 102660 - DNA, 15 bp, Homo sapiens
tccatcagtgcagac

SEQ ID NO: 102661 - DNA, 15 bp, Homo sapiens
ttccatcagtgcaga

SEQ ID NO: 102662 - DNA, 15 bp, Homo sapiens
cttccatcagtgcag

SEQ ID NO: 102663 - DNA, 15 bp, Homo sapiens
tcttccatcagtgca

SEQ ID NO: 102664 - DNA, 15 bp, Homo sapiens
ttcttccatcagtgc

SEQ ID NO: 102665 - DNA, 15 bp, Homo sapiens
gttcttccatcagtg

SEQ ID NO: 102666 - DNA, 15 bp, Homo sapiens
tgttcttccatcagt

SEQ ID NO: 102667 - DNA, 15 bp, Homo sapiens
ctgttcttccatcag

SEQ ID NO: 102668 - DNA, 15 bp, Homo sapiens
actgttcttccatca

SEQ ID NO: 102669 - DNA, 15 bp, Homo sapiens
aactgttcttccatc

SEQ ID NO: 102670 - DNA, 15 bp, Homo sapiens
aaactgttcttccat

SEQ ID NO: 102671 - DNA, 15 bp, Homo sapiens
gaaactgttcttcca

SEQ ID NO: 102672 - DNA, 15 bp, Homo sapiens
agaaactgttcttcc

SEQ ID NO: 102673 - DNA, 15 bp, Homo sapiens
cagaaactgttcttc

SEQ ID NO: 102674 - DNA, 15 bp, Homo sapiens
acagaaactgttctt

SEQ ID NO: 102675 - DNA, 15 bp, Homo sapiens
tacagaaactgttct

SEQ ID NO: 102676 - DNA, 15 bp, Homo sapiens
ttacagaaactgttc

SEQ ID NO: 102677 - DNA, 15 bp, Homo sapiens
gttacagaaactgtt

SEQ ID NO: 102678 - DNA, 15 bp, Homo sapiens
tgttacagaaactgt

SEQ ID NO: 102679 - DNA, 15 bp, Homo sapiens
ttgttacagaaactg

SEQ ID NO: 102680 - DNA, 15 bp, Homo sapiens
tttgttacagaaact

SEQ ID NO: 102681 - DNA, 15 bp, Homo sapiens
ttttgttacagaaac

SEQ ID NO: 102682 - DNA, 15 bp, Homo sapiens
tttttgttacagaaa

SEQ ID NO: 102683 - DNA, 15 bp, Homo sapiens
ttttttgttacagaa

SEQ ID NO: 102684 - DNA, 15 bp, Homo sapiens
cttttttgttacaga

SEQ ID NO: 102685 - DNA, 15 bp, Homo sapiens
gcttttttgttacag

SEQ ID NO: 102686 - DNA, 15 bp, Homo sapiens
agcttttttgttaca

SEQ ID NO: 102687 - DNA, 15 bp, Homo sapiens
aagcttttttgttac

SEQ ID NO: 102688 - DNA, 15 bp, Homo sapiens
caagcttttttgtta

SEQ ID NO: 102689 - DNA, 15 bp, Homo sapiens
tcaagcttttttgtt

SEQ ID NO: 102690 - DNA, 15 bp, Homo sapiens
ttcaagcttttttgt

SEQ ID NO: 102691 - DNA, 15 bp, Homo sapiens
tttcaagcttttttg

SEQ ID NO: 102692 - DNA, 15 bp, Homo sapiens
atttcaagctttttt

SEQ ID NO: 102693 - DNA, 15 bp, Homo sapiens
aatttcaagcttttt

SEQ ID NO: 102694 - DNA, 15 bp, Homo sapiens
aaatttcaagctttt

SEQ ID NO: 102695 - DNA, 15 bp, Homo sapiens
aaaatttcaagcttt

SEQ ID NO: 102696 - DNA, 15 bp, Homo sapiens
aaaaatttcaagctt

SEQ ID NO: 102697 - DNA, 15 bp, Homo sapiens
taaaaatttcaagct

SEQ ID NO: 102698 - DNA, 15 bp, Homo sapiens
ataaaaatttcaagc

SEQ ID NO: 102699 - DNA, 15 bp, Homo sapiens
tataaaaatttcaag

SEQ ID NO: 102700 - DNA, 15 bp, Homo sapiens
atataaaaatttcaa

SEQ ID NO: 102701 - DNA, 15 bp, Homo sapiens
catataaaaatttca

SEQ ID NO: 102702 - DNA, 15 bp, Homo sapiens
tcatataaaaatttc

SEQ ID NO: 102703 - DNA, 15 bp, Homo sapiens
gtcatataaaaattt

SEQ ID NO: 102704 - DNA, 15 bp, Homo sapiens
agtcatataaaaatt

SEQ ID NO: 102705 - DNA, 15 bp, Homo sapiens
aagtcatataaaaat

SEQ ID NO: 102706 - DNA, 15 bp, Homo sapiens
taagtcatataaaaa

SEQ ID NO: 102707 - DNA, 15 bp, Homo sapiens
ataagtcatataaaa

SEQ ID NO: 102708 - DNA, 15 bp, Homo sapiens
tataagtcatataaa

SEQ ID NO: 102709 - DNA, 15 bp, Homo sapiens
ttataagtcatataa

SEQ ID NO: 102710 - DNA, 15 bp, Homo sapiens
attataagtcatata

SEQ ID NO: 102711 - DNA, 15 bp, Homo sapiens
tattataagtcatat

SEQ ID NO: 102712 - DNA, 15 bp, Homo sapiens
gtattataagtcata

SEQ ID NO: 102713 - DNA, 15 bp, Homo sapiens
agtattataagtcat

SEQ ID NO: 102714 - DNA, 15 bp, Homo sapiens
cagtattataagtca

SEQ ID NO: 102715 - DNA, 15 bp, Homo sapiens
gcagtattataagtc

SEQ ID NO: 102716 - DNA, 15 bp, Homo sapiens
agcagtattataagt

SEQ ID NO: 102717 - DNA, 15 bp, Homo sapiens
cagcagtattataag

SEQ ID NO: 102718 - DNA, 15 bp, Homo sapiens
acagcagtattataa

SEQ ID NO: 102719 - DNA, 15 bp, Homo sapiens
cacagcagtattata

SEQ ID NO: 102720 - DNA, 15 bp, Homo sapiens
tcacagcagtattat

SEQ ID NO: 102721 - DNA, 15 bp, Homo sapiens
ctcacagcagtatta

SEQ ID NO: 102722 - DNA, 15 bp, Homo sapiens
actcacagcagtatt

SEQ ID NO: 102723 - DNA, 15 bp, Homo sapiens
aactcacagcagtat

SEQ ID NO: 102724 - DNA, 15 bp, Homo sapiens
aaactcacagcagta

SEQ ID NO: 102725 - DNA, 15 bp, Homo sapiens
aaaactcacagcagt

SEQ ID NO: 102726 - DNA, 15 bp, Homo sapiens
taaaactcacagcag

SEQ ID NO: 102727 - DNA, 15 bp, Homo sapiens
ttaaaactcacagca

SEQ ID NO: 102728 - DNA, 15 bp, Homo sapiens
tttaaaactcacagc

SEQ ID NO: 102729 - DNA, 15 bp, Homo sapiens
ttttaaaactcacag

SEQ ID NO: 102730 - DNA, 15 bp, Homo sapiens
cttttaaaactcaca

SEQ ID NO: 102731 - DNA, 15 bp, Homo sapiens
acttttaaaactcac

SEQ ID NO: 102732 - DNA, 15 bp, Homo sapiens
tacttttaaaactca

SEQ ID NO: 102733 - DNA, 15 bp, Homo sapiens
ttacttttaaaactc

SEQ ID NO: 102734 - DNA, 15 bp, Homo sapiens
tttacttttaaaact

SEQ ID NO: 102735 - DNA, 15 bp, Homo sapiens
ctttacttttaaaac

SEQ ID NO: 102736 - DNA, 15 bp, Homo sapiens
gctttacttttaaaa

SEQ ID NO: 102737 - DNA, 15 bp, Homo sapiens
tgctttacttttaaa

SEQ ID NO: 102738 - DNA, 15 bp, Homo sapiens
ttgctttacttttaa

SEQ ID NO: 102739 - DNA, 15 bp, Homo sapiens
tttgctttactttta

SEQ ID NO: 102740 - DNA, 15 bp, Homo sapiens
ttttgctttactttt

SEQ ID NO: 102741 - DNA, 15 bp, Homo sapiens
cttttgctttacttt

SEQ ID NO: 102742 - DNA, 15 bp, Homo sapiens
acttttgctttactt

SEQ ID NO: 102743 - DNA, 15 bp, Homo sapiens
tacttttgctttact

SEQ ID NO: 102744 - DNA, 15 bp, Homo sapiens
ttacttttgctttac

SEQ ID NO: 102745 - DNA, 15 bp, Homo sapiens
tttacttttgcttta

SEQ ID NO: 102746 - DNA, 15 bp, Homo sapiens
gtttacttttgcttt

SEQ ID NO: 102747 - DNA, 15 bp, Homo sapiens
agtttacttttgctt

SEQ ID NO: 102748 - DNA, 15 bp, Homo sapiens
cagtttacttttgct

SEQ ID NO: 102749 - DNA, 15 bp, Homo sapiens
tcagtttacttttgc

SEQ ID NO: 102750 - DNA, 15 bp, Homo sapiens
ctcagtttacttttg

SEQ ID NO: 102751 - DNA, 15 bp, Homo sapiens
actcagtttactttt

SEQ ID NO: 102752 - DNA, 15 bp, Homo sapiens
aactcagtttacttt

SEQ ID NO: 102753 - DNA, 15 bp, Homo sapiens
caactcagtttactt

SEQ ID NO: 102754 - DNA, 15 bp, Homo sapiens
gcaactcagtttact

SEQ ID NO: 102755 - DNA, 15 bp, Homo sapiens
agcaactcagtttac

SEQ ID NO: 102756 - DNA, 15 bp, Homo sapiens
aagcaactcagttta

SEQ ID NO: 102757 - DNA, 15 bp, Homo sapiens
caagcaactcagttt

SEQ ID NO: 102758 - DNA, 15 bp, Homo sapiens
acaagcaactcagtt

SEQ ID NO: 102759 - DNA, 15 bp, Homo sapiens
gacaagcaactcagt

SEQ ID NO: 102760 - DNA, 15 bp, Homo sapiens
ggacaagcaactcag

SEQ ID NO: 102761 - DNA, 15 bp, Homo sapiens
tggacaagcaactca

SEQ ID NO: 102762 - DNA, 15 bp, Homo sapiens
ctggacaagcaactc

SEQ ID NO: 102763 - DNA, 15 bp, Homo sapiens
actggacaagcaact

SEQ ID NO: 102764 - DNA, 15 bp, Homo sapiens
cactggacaagcaac

SEQ ID NO: 102765 - DNA, 15 bp, Homo sapiens
ccactggacaagcaa

SEQ ID NO: 102766 - DNA, 15 bp, Homo sapiens
cccactggacaagca

SEQ ID NO: 102767 - DNA, 15 bp, Homo sapiens
tcccactggacaagc

SEQ ID NO: 102768 - DNA, 15 bp, Homo sapiens
atcccactggacaag

SEQ ID NO: 102769 - DNA, 15 bp, Homo sapiens
catcccactggacaa

SEQ ID NO: 102770 - DNA, 15 bp, Homo sapiens
ccatcccactggaca

SEQ ID NO: 102771 - DNA, 15 bp, Homo sapiens
tccatcccactggac

SEQ ID NO: 102772 - DNA, 15 bp, Homo sapiens
gtccatcccactgga

SEQ ID NO: 102773 - DNA, 15 bp, Homo sapiens
tgtccatcccactgg

SEQ ID NO: 102774 - DNA, 15 bp, Homo sapiens
ctgtccatcccactg

SEQ ID NO: 102775 - DNA, 15 bp, Homo sapiens
cctgtccatcccact

SEQ ID NO: 102776 - DNA, 15 bp, Homo sapiens
tcctgtccatcccac

SEQ ID NO: 102777 - DNA, 15 bp, Homo sapiens
ttcctgtccatccca

SEQ ID NO: 102778 - DNA, 15 bp, Homo sapiens
tttcctgtccatccc

SEQ ID NO: 102779 - DNA, 15 bp, Homo sapiens
ctttcctgtccatcc

SEQ ID NO: 102780 - DNA, 15 bp, Homo sapiens
tctttcctgtccatc

SEQ ID NO: 102781 - DNA, 15 bp, Homo sapiens
atctttcctgtccat

SEQ ID NO: 102782 - DNA, 15 bp, Homo sapiens
catctttcctgtcca

SEQ ID NO: 102783 - DNA, 15 bp, Homo sapiens
acatctttcctgtcc

SEQ ID NO: 102784 - DNA, 15 bp, Homo sapiens
cacatctttcctgtc

SEQ ID NO: 102785 - DNA, 15 bp, Homo sapiens
tcacatctttcctgt

SEQ ID NO: 102786 - DNA, 15 bp, Homo sapiens
ttcacatctttcctg

SEQ ID NO: 102787 - DNA, 15 bp, Homo sapiens
tttcacatctttcct

SEQ ID NO: 102788 - DNA, 15 bp, Homo sapiens
atttcacatctttcc

SEQ ID NO: 102789 - DNA, 15 bp, Homo sapiens
tatttcacatctttc

SEQ ID NO: 102790 - DNA, 15 bp, Homo sapiens
ttatttcacatcttt

SEQ ID NO: 102791 - DNA, 15 bp, Homo sapiens
tttatttcacatctt

SEQ ID NO: 102792 - DNA, 15 bp, Homo sapiens
ttttatttcacatct

SEQ ID NO: 102793 - DNA, 15 bp, Homo sapiens
tttttatttcacatc

SEQ ID NO: 102794 - DNA, 15 bp, Homo sapiens
gtttttatttcacat

SEQ ID NO: 102795 - DNA, 15 bp, Homo sapiens
ggtttttatttcaca

SEQ ID NO: 102796 - DNA, 15 bp, Homo sapiens
tggtttttatttcac

SEQ ID NO: 102797 - DNA, 15 bp, Homo sapiens
ttggtttttatttca

SEQ ID NO: 102798 - DNA, 15 bp, Homo sapiens
attggtttttatttc

SEQ ID NO: 102799 - DNA, 15 bp, Homo sapiens
cattggtttttattt

SEQ ID NO: 102800 - DNA, 15 bp, Homo sapiens
tcattggtttttatt

SEQ ID NO: 102801 - DNA, 15 bp, Homo sapiens
ttcattggtttttat

SEQ ID NO: 102802 - DNA, 15 bp, Homo sapiens
tttcattggttttta

SEQ ID NO: 102803 - DNA, 15 bp, Homo sapiens
ttttcattggttttt

SEQ ID NO: 102804 - DNA, 15 bp, Homo sapiens
tttttcattggtttt

SEQ ID NO: 102805 - DNA, 15 bp, Homo sapiens
atttttcattggttt

SEQ ID NO: 102806 - DNA, 15 bp, Homo sapiens
catttttcattggtt

SEQ ID NO: 102807 - DNA, 15 bp, Homo sapiens
tcatttttcattggt

SEQ ID NO: 102808 - DNA, 15 bp, Homo sapiens
ttcatttttcattgg

SEQ ID NO: 102809 - DNA, 15 bp, Homo sapiens
gttcatttttcattg

SEQ ID NO: 102810 - DNA, 15 bp, Homo sapiens
agttcatttttcatt

SEQ ID NO: 102811 - DNA, 15 bp, Homo sapiens
cagttcatttttcat

SEQ ID NO: 102812 - DNA, 15 bp, Homo sapiens
gcagttcatttttca

SEQ ID NO: 102813 - DNA, 15 bp, Homo sapiens
agcagttcatttttc

SEQ ID NO: 102814 - DNA, 15 bp, Homo sapiens
cagcagttcattttt

SEQ ID NO: 102815 - DNA, 15 bp, Homo sapiens
acagcagttcatttt

SEQ ID NO: 102816 - DNA, 15 bp, Homo sapiens
cacagcagttcattt

SEQ ID NO: 102817 - DNA, 15 bp, Homo sapiens
ccacagcagttcatt

SEQ ID NO: 102818 - DNA, 15 bp, Homo sapiens
tccacagcagttcat

SEQ ID NO: 102819 - DNA, 15 bp, Homo sapiens
ctccacagcagttca

SEQ ID NO: 102820 - DNA, 15 bp, Homo sapiens
tctccacagcagttc

SEQ ID NO: 102821 - DNA, 15 bp, Homo sapiens
ttctccacagcagtt

SEQ ID NO: 102822 - DNA, 15 bp, Homo sapiens
cttctccacagcagt

SEQ ID NO: 102823 - DNA, 15 bp, Homo sapiens
acttctccacagcag

SEQ ID NO: 102824 - DNA, 15 bp, Homo sapiens
cacttctccacagca

SEQ ID NO: 102825 - DNA, 15 bp, Homo sapiens
acacttctccacagc

SEQ ID NO: 102826 - DNA, 15 bp, Homo sapiens
aacacttctccacag

SEQ ID NO: 102827 - DNA, 15 bp, Homo sapiens
taacacttctccaca

SEQ ID NO: 102828 - DNA, 15 bp, Homo sapiens
gtaacacttctccac

SEQ ID NO: 102829 - DNA, 15 bp, Homo sapiens
tgtaacacttctcca

SEQ ID NO: 102830 - DNA, 15 bp, Homo sapiens
atgtaacacttctcc

SEQ ID NO: 102831 - DNA, 15 bp, Homo sapiens
aatgtaacacttctc

SEQ ID NO: 102832 - DNA, 15 bp, Homo sapiens
aaatgtaacacttct

SEQ ID NO: 102833 - DNA, 15 bp, Homo sapiens
taaatgtaacacttc

SEQ ID NO: 102834 - DNA, 15 bp, Homo sapiens
ataaatgtaacactt

SEQ ID NO: 102835 - DNA, 15 bp, Homo sapiens
cataaatgtaacact

SEQ ID NO: 102836 - DNA, 15 bp, Homo sapiens
ccataaatgtaacac

SEQ ID NO: 102837 - DNA, 15 bp, Homo sapiens
tccataaatgtaaca

SEQ ID NO: 102838 - DNA, 15 bp, Homo sapiens
ttccataaatgtaac

SEQ ID NO: 102839 - DNA, 15 bp, Homo sapiens
tttccataaatgtaa

SEQ ID NO: 102840 - DNA, 15 bp, Homo sapiens
ttttccataaatgta

SEQ ID NO: 102841 - DNA, 15 bp, Homo sapiens
tttttccataaatgt

SEQ ID NO: 102842 - DNA, 15 bp, Homo sapiens
ctttttccataaatg

SEQ ID NO: 102843 - DNA, 15 bp, Homo sapiens
tctttttccataaat

SEQ ID NO: 102844 - DNA, 15 bp, Homo sapiens
ttctttttccataaa

SEQ ID NO: 102845 - DNA, 15 bp, Homo sapiens
tttctttttccataa

SEQ ID NO: 102846 - DNA, 15 bp, Homo sapiens
atttctttttccata

SEQ ID NO: 102847 - DNA, 15 bp, Homo sapiens
tatttctttttccat

SEQ ID NO: 102848 - DNA, 15 bp, Homo sapiens
ctatttctttttcca

SEQ ID NO: 102849 - DNA, 15 bp, Homo sapiens
cctatttctttttcc

SEQ ID NO: 102850 - DNA, 15 bp, Homo sapiens
tcctatttctttttc

SEQ ID NO: 102851 - DNA, 15 bp, Homo sapiens
ttcctatttcttttt

SEQ ID NO: 102852 - DNA, 15 bp, Homo sapiens
gttcctatttctttt

SEQ ID NO: 102853 - DNA, 15 bp, Homo sapiens
ggttcctatttcttt

SEQ ID NO: 102854 - DNA, 15 bp, Homo sapiens
aggttcctatttctt

SEQ ID NO: 102855 - DNA, 15 bp, Homo sapiens
aaggttcctatttct

SEQ ID NO: 102856 - DNA, 15 bp, Homo sapiens
caaggttcctatttc

SEQ ID NO: 102857 - DNA, 15 bp, Homo sapiens
acaaggttcctattt

SEQ ID NO: 102858 - DNA, 15 bp, Homo sapiens
aacaaggttcctatt

SEQ ID NO: 102859 - DNA, 15 bp, Homo sapiens
gaacaaggttcctat

SEQ ID NO: 102860 - DNA, 15 bp, Homo sapiens
tgaacaaggttccta

SEQ ID NO: 102861 - DNA, 15 bp, Homo sapiens
atgaacaaggttcct

SEQ ID NO: 102862 - DNA, 15 bp, Homo sapiens
gatgaacaaggttcc

SEQ ID NO: 102863 - DNA, 15 bp, Homo sapiens
tgatgaacaaggttc

SEQ ID NO: 102864 - DNA, 15 bp, Homo sapiens
ttgatgaacaaggtt

SEQ ID NO: 102865 - DNA, 15 bp, Homo sapiens
tttgatgaacaaggt

SEQ ID NO: 102866 - DNA, 15 bp, Homo sapiens
atttgatgaacaagg

SEQ ID NO: 102867 - DNA, 15 bp, Homo sapiens
aatttgatgaacaag

SEQ ID NO: 102868 - DNA, 15 bp, Homo sapiens
caatttgatgaacaa

SEQ ID NO: 102869 - DNA, 15 bp, Homo sapiens
tcaatttgatgaaca

SEQ ID NO: 102870 - DNA, 15 bp, Homo sapiens
atcaatttgatgaac

SEQ ID NO: 102871 - DNA, 15 bp, Homo sapiens
tatcaatttgatgaa

SEQ ID NO: 102872 - DNA, 15 bp, Homo sapiens
ctatcaatttgatga

SEQ ID NO: 102873 - DNA, 15 bp, Homo sapiens
tctatcaatttgatg

SEQ ID NO: 102874 - DNA, 15 bp, Homo sapiens
ttctatcaatttgat

SEQ ID NO: 102875 - DNA, 15 bp, Homo sapiens
tttctatcaatttga

SEQ ID NO: 102876 - DNA, 15 bp, Homo sapiens
ttttctatcaatttg

SEQ ID NO: 102877 - DNA, 15 bp, Homo sapiens
cttttctatcaattt

SEQ ID NO: 102878 - DNA, 15 bp, Homo sapiens
gcttttctatcaatt

SEQ ID NO: 102879 - DNA, 15 bp, Homo sapiens
agcttttctatcaat

SEQ ID NO: 102880 - DNA, 15 bp, Homo sapiens
aagcttttctatcaa

SEQ ID NO: 102881 - DNA, 15 bp, Homo sapiens
aaagcttttctatca

SEQ ID NO: 102882 - DNA, 15 bp, Homo sapiens
aaaagcttttctatc

SEQ ID NO: 102883 - DNA, 15 bp, Homo sapiens
taaaagcttttctat

SEQ ID NO: 102884 - DNA, 15 bp, Homo sapiens
ttaaaagcttttcta

SEQ ID NO: 102885 - DNA, 15 bp, Homo sapiens
tttaaaagcttttct

SEQ ID NO: 102886 - DNA, 15 bp, Homo sapiens
ttttaaaagcttttc

SEQ ID NO: 102887 - DNA, 15 bp, Homo sapiens
gttttaaaagctttt

SEQ ID NO: 102888 - DNA, 15 bp, Homo sapiens
agttttaaaagcttt

SEQ ID NO: 102889 - DNA, 15 bp, Homo sapiens
tagttttaaaagctt

SEQ ID NO: 102890 - DNA, 15 bp, Homo sapiens
ttagttttaaaagct

SEQ ID NO: 102891 - DNA, 15 bp, Homo sapiens
tttagttttaaaagc

SEQ ID NO: 102892 - DNA, 15 bp, Homo sapiens
gtttagttttaaaag

SEQ ID NO: 102893 - DNA, 15 bp, Homo sapiens
tgtttagttttaaaa

SEQ ID NO: 102894 - DNA, 15 bp, Homo sapiens
ttgtttagttttaaa

SEQ ID NO: 102895 - DNA, 15 bp, Homo sapiens
tttgtttagttttaa

SEQ ID NO: 102896 - DNA, 15 bp, Homo sapiens
atttgtttagtttta

SEQ ID NO: 102897 - DNA, 15 bp, Homo sapiens
gatttgtttagtttt

SEQ ID NO: 102898 - DNA, 15 bp, Homo sapiens
tgatttgtttagttt

SEQ ID NO: 102899 - DNA, 15 bp, Homo sapiens
ttgatttgtttagtt

SEQ ID NO: 102900 - DNA, 15 bp, Homo sapiens
tttgatttgtttagt

SEQ ID NO: 102901 - DNA, 15 bp, Homo sapiens
gtttgatttgtttag

SEQ ID NO: 102902 - DNA, 15 bp, Homo sapiens
tgtttgatttgttta

SEQ ID NO: 102903 - DNA, 15 bp, Homo sapiens
ttgtttgatttgttt

SEQ ID NO: 102904 - DNA, 15 bp, Homo sapiens
gttgtttgatttgtt

SEQ ID NO: 102905 - DNA, 15 bp, Homo sapiens
agttgtttgatttgt

SEQ ID NO: 102906 - DNA, 15 bp, Homo sapiens
aagttgtttgatttg

SEQ ID NO: 102907 - DNA, 15 bp, Homo sapiens
caagttgtttgattt

SEQ ID NO: 102908 - DNA, 15 bp, Homo sapiens
tcaagttgtttgatt

SEQ ID NO: 102909 - DNA, 15 bp, Homo sapiens
ctcaagttgtttgat

SEQ ID NO: 102910 - DNA, 15 bp, Homo sapiens
actcaagttgtttga

SEQ ID NO: 102911 - DNA, 15 bp, Homo sapiens
tactcaagttgtttg

SEQ ID NO: 102912 - DNA, 15 bp, Homo sapiens
atactcaagttgttt

SEQ ID NO: 102913 - DNA, 15 bp, Homo sapiens
tatactcaagttgtt

SEQ ID NO: 102914 - DNA, 15 bp, Homo sapiens
ttatactcaagttgt

SEQ ID NO: 102915 - DNA, 15 bp, Homo sapiens
attatactcaagttg

SEQ ID NO: 102916 - DNA, 15 bp, Homo sapiens
cattatactcaagtt

SEQ ID NO: 102917 - DNA, 15 bp, Homo sapiens
ccattatactcaagt

SEQ ID NO: 102918 - DNA, 15 bp, Homo sapiens
tccattatactcaag

SEQ ID NO: 102919 - DNA, 15 bp, Homo sapiens
ttccattatactcaa

SEQ ID NO: 102920 - DNA, 15 bp, Homo sapiens
attccattatactca

SEQ ID NO: 102921 - DNA, 15 bp, Homo sapiens
aattccattatactc

SEQ ID NO: 102922 - DNA, 15 bp, Homo sapiens
gaattccattatact

SEQ ID NO: 102923 - DNA, 15 bp, Homo sapiens
tgaattccattatac

SEQ ID NO: 102924 - DNA, 15 bp, Homo sapiens
ctgaattccattata

SEQ ID NO: 102925 - DNA, 15 bp, Homo sapiens
tctgaattccattat

SEQ ID NO: 102926 - DNA, 15 bp, Homo sapiens
gtctgaattccatta

SEQ ID NO: 102927 - DNA, 15 bp, Homo sapiens
agtctgaattccatt

SEQ ID NO: 102928 - DNA, 15 bp, Homo sapiens
aagtctgaattccat

SEQ ID NO: 102929 - DNA, 15 bp, Homo sapiens
aaagtctgaattcca

SEQ ID NO: 102930 - DNA, 15 bp, Homo sapiens
caaagtctgaattcc

SEQ ID NO: 102931 - DNA, 15 bp, Homo sapiens
tcaaagtctgaattc

SEQ ID NO: 102932 - DNA, 15 bp, Homo sapiens
atcaaagtctgaatt

SEQ ID NO: 102933 - DNA, 15 bp, Homo sapiens
aatcaaagtctgaat

SEQ ID NO: 102934 - DNA, 15 bp, Homo sapiens
aaatcaaagtctgaa

SEQ ID NO: 102935 - DNA, 15 bp, Homo sapiens
caaatcaaagtctga

SEQ ID NO: 102936 - DNA, 15 bp, Homo sapiens
gcaaatcaaagtctg

SEQ ID NO: 102937 - DNA, 15 bp, Homo sapiens
ggcaaatcaaagtct

SEQ ID NO: 102938 - DNA, 15 bp, Homo sapiens
aggcaaatcaaagtc

SEQ ID NO: 102939 - DNA, 15 bp, Homo sapiens
taggcaaatcaaagt

SEQ ID NO: 102940 - DNA, 15 bp, Homo sapiens
ttaggcaaatcaaag

SEQ ID NO: 102941 - DNA, 15 bp, Homo sapiens
gttaggcaaatcaaa

SEQ ID NO: 102942 - DNA, 15 bp, Homo sapiens
tgttaggcaaatcaa

SEQ ID NO: 102943 - DNA, 15 bp, Homo sapiens
atgttaggcaaatca

SEQ ID NO: 102944 - DNA, 15 bp, Homo sapiens
tatgttaggcaaatc

SEQ ID NO: 102945 - DNA, 15 bp, Homo sapiens
ttatgttaggcaaat

SEQ ID NO: 102946 - DNA, 15 bp, Homo sapiens
gttatgttaggcaaa

SEQ ID NO: 102947 - DNA, 15 bp, Homo sapiens
ggttatgttaggcaa

SEQ ID NO: 102948 - DNA, 15 bp, Homo sapiens
tggttatgttaggca

SEQ ID NO: 102949 - DNA, 15 bp, Homo sapiens
gtggttatgttaggc

SEQ ID NO: 102950 - DNA, 15 bp, Homo sapiens
ggtggttatgttagg

SEQ ID NO: 102951 - DNA, 15 bp, Homo sapiens
tggtggttatgttag

SEQ ID NO: 102952 - DNA, 15 bp, Homo sapiens
atggtggttatgtta

SEQ ID NO: 102953 - DNA, 15 bp, Homo sapiens
tatggtggttatgtt

SEQ ID NO: 102954 - DNA, 15 bp, Homo sapiens
atatggtggttatgt

SEQ ID NO: 102955 - DNA, 15 bp, Homo sapiens
aatatggtggttatg

SEQ ID NO: 102956 - DNA, 15 bp, Homo sapiens
aaatatggtggttat

SEQ ID NO: 102957 - DNA, 15 bp, Homo sapiens
caaatatggtggtta

SEQ ID NO: 102958 - DNA, 15 bp, Homo sapiens
gcaaatatggtggtt

SEQ ID NO: 102959 - DNA, 15 bp, Homo sapiens
tgcaaatatggtggt

SEQ ID NO: 102960 - DNA, 15 bp, Homo sapiens
ttgcaaatatggtgg

SEQ ID NO: 102961 - DNA, 15 bp, Homo sapiens
cttgcaaatatggtg

SEQ ID NO: 102962 - DNA, 15 bp, Homo sapiens
ccttgcaaatatggt

SEQ ID NO: 102963 - DNA, 15 bp, Homo sapiens
tccttgcaaatatgg

SEQ ID NO: 102964 - DNA, 15 bp, Homo sapiens
gtccttgcaaatatg

SEQ ID NO: 102965 - DNA, 15 bp, Homo sapiens
tgtccttgcaaatat

SEQ ID NO: 102966 - DNA, 15 bp, Homo sapiens
ctgtccttgcaaata

SEQ ID NO: 102967 - DNA, 15 bp, Homo sapiens
gctgtccttgcaaat

SEQ ID NO: 102968 - DNA, 15 bp, Homo sapiens
agctgtccttgcaaa

SEQ ID NO: 102969 - DNA, 15 bp, Homo sapiens
gagctgtccttgcaa

SEQ ID NO: 102970 - DNA, 15 bp, Homo sapiens
agagctgtccttgca

SEQ ID NO: 102971 - DNA, 15 bp, Homo sapiens
gagagctgtccttgc

SEQ ID NO: 102972 - DNA, 15 bp, Homo sapiens
agagagctgtccttg

SEQ ID NO: 102973 - DNA, 15 bp, Homo sapiens
tagagagctgtcctt

SEQ ID NO: 102974 - DNA, 15 bp, Homo sapiens
atagagagctgtcct

SEQ ID NO: 102975 - DNA, 15 bp, Homo sapiens
gatagagagctgtcc

SEQ ID NO: 102976 - DNA, 15 bp, Homo sapiens
agatagagagctgtc

SEQ ID NO: 102977 - DNA, 15 bp, Homo sapiens
aagatagagagctgt

SEQ ID NO: 102978 - DNA, 15 bp, Homo sapiens
gaagatagagagctg

SEQ ID NO: 102979 - DNA, 15 bp, Homo sapiens
agaagatagagagct

SEQ ID NO: 102980 - DNA, 15 bp, Homo sapiens
cagaagatagagagc

SEQ ID NO: 102981 - DNA, 15 bp, Homo sapiens
ccagaagatagagag

SEQ ID NO: 102982 - DNA, 15 bp, Homo sapiens
accagaagatagaga

SEQ ID NO: 102983 - DNA, 15 bp, Homo sapiens
caccagaagatagag

SEQ ID NO: 102984 - DNA, 15 bp, Homo sapiens
acaccagaagataga

SEQ ID NO: 102985 - DNA, 15 bp, Homo sapiens
aacaccagaagatag

SEQ ID NO: 102986 - DNA, 15 bp, Homo sapiens
aaacaccagaagata

SEQ ID NO: 102987 - DNA, 15 bp, Homo sapiens
taaacaccagaagat

SEQ ID NO: 102988 - DNA, 15 bp, Homo sapiens
ataaacaccagaaga

SEQ ID NO: 102989 - DNA, 15 bp, Homo sapiens
aataaacaccagaag

SEQ ID NO: 102990 - DNA, 15 bp, Homo sapiens
gaataaacaccagaa

SEQ ID NO: 102991 - DNA, 15 bp, Homo sapiens
agaataaacaccaga

SEQ ID NO: 102992 - DNA, 15 bp, Homo sapiens
aagaataaacaccag

SEQ ID NO: 102993 - DNA, 15 bp, Homo sapiens
taagaataaacacca

SEQ ID NO: 102994 - DNA, 15 bp, Homo sapiens
ttaagaataaacacc

SEQ ID NO: 102995 - DNA, 15 bp, Homo sapiens
tttaagaataaacac

SEQ ID NO: 102996 - DNA, 15 bp, Homo sapiens
ttttaagaataaaca

SEQ ID NO: 102997 - DNA, 15 bp, Homo sapiens
tttttaagaataaac

SEQ ID NO: 102998 - DNA, 15 bp, Homo sapiens
gtttttaagaataaa

SEQ ID NO: 102999 - DNA, 15 bp, Homo sapiens
agtttttaagaataa

SEQ ID NO: 103000 - DNA, 15 bp, Homo sapiens
aagtttttaagaata

SEQ ID NO: 103001 - DNA, 15 bp, Homo sapiens
taagtttttaagaat

SEQ ID NO: 103002 - DNA, 15 bp, Homo sapiens
ttaagtttttaagaa

SEQ ID NO: 103003 - DNA, 15 bp, Homo sapiens
tttaagtttttaaga

SEQ ID NO: 103004 - DNA, 15 bp, Homo sapiens
ttttaagtttttaag

SEQ ID NO: 103005 - DNA, 15 bp, Homo sapiens
cttttaagtttttaa

SEQ ID NO: 103006 - DNA, 15 bp, Homo sapiens
acttttaagttttta

SEQ ID NO: 103007 - DNA, 15 bp, Homo sapiens
aacttttaagttttt

SEQ ID NO: 103008 - DNA, 15 bp, Homo sapiens
taacttttaagtttt

SEQ ID NO: 103009 - DNA, 15 bp, Homo sapiens
ctaacttttaagttt

SEQ ID NO: 103010 - DNA, 15 bp, Homo sapiens
tctaacttttaagtt

SEQ ID NO: 103011 - DNA, 15 bp, Homo sapiens
atctaacttttaagt

SEQ ID NO: 103012 - DNA, 15 bp, Homo sapiens
aatctaacttttaag

SEQ ID NO: 103013 - DNA, 15 bp, Homo sapiens
aaatctaacttttaa

SEQ ID NO: 103014 - DNA, 15 bp, Homo sapiens
taaatctaactttta

SEQ ID NO: 103015 - DNA, 15 bp, Homo sapiens
ctaaatctaactttt

SEQ ID NO: 103016 - DNA, 15 bp, Homo sapiens
gctaaatctaacttt

SEQ ID NO: 103017 - DNA, 15 bp, Homo sapiens
cgctaaatctaactt

SEQ ID NO: 103018 - DNA, 15 bp, Homo sapiens
tcgctaaatctaact

SEQ ID NO: 103019 - DNA, 15 bp, Homo sapiens
atcgctaaatctaac

SEQ ID NO: 103020 - DNA, 15 bp, Homo sapiens
gatcgctaaatctaa

SEQ ID NO: 103021 - DNA, 15 bp, Homo sapiens
tgatcgctaaatcta

SEQ ID NO: 103022 - DNA, 15 bp, Homo sapiens
gtgatcgctaaatct

SEQ ID NO: 103023 - DNA, 15 bp, Homo sapiens
ggtgatcgctaaatc

SEQ ID NO: 103024 - DNA, 15 bp, Homo sapiens
tggtgatcgctaaat

SEQ ID NO: 103025 - DNA, 15 bp, Homo sapiens
ctggtgatcgctaaa

SEQ ID NO: 103026 - DNA, 15 bp, Homo sapiens
tctggtgatcgctaa

SEQ ID NO: 103027 - DNA, 15 bp, Homo sapiens
ctctggtgatcgcta

SEQ ID NO: 103028 - DNA, 15 bp, Homo sapiens
gctctggtgatcgct

SEQ ID NO: 103029 - DNA, 15 bp, Homo sapiens
ggctctggtgatcgc

SEQ ID NO: 103030 - DNA, 15 bp, Homo sapiens
tggctctggtgatcg

SEQ ID NO: 103031 - DNA, 15 bp, Homo sapiens
gtggctctggtgatc

SEQ ID NO: 103032 - DNA, 15 bp, Homo sapiens
agtggctctggtgat

SEQ ID NO: 103033 - DNA, 15 bp, Homo sapiens
tagtggctctggtga

SEQ ID NO: 103034 - DNA, 15 bp, Homo sapiens
gtagtggctctggtg

SEQ ID NO: 103035 - DNA, 15 bp, Homo sapiens
agtagtggctctggt

SEQ ID NO: 103036 - DNA, 15 bp, Homo sapiens
aagtagtggctctgg

SEQ ID NO: 103037 - DNA, 15 bp, Homo sapiens
aaagtagtggctctg

SEQ ID NO: 103038 - DNA, 15 bp, Homo sapiens
aaaagtagtggctct

SEQ ID NO: 103039 - DNA, 15 bp, Homo sapiens
taaaagtagtggctc

SEQ ID NO: 103040 - DNA, 15 bp, Homo sapiens
ataaaagtagtggct

SEQ ID NO: 103041 - DNA, 15 bp, Homo sapiens
cataaaagtagtggc

SEQ ID NO: 103042 - DNA, 15 bp, Homo sapiens
gcataaaagtagtgg

SEQ ID NO: 103043 - DNA, 15 bp, Homo sapiens
agcataaaagtagtg

SEQ ID NO: 103044 - DNA, 15 bp, Homo sapiens
aagcataaaagtagt

SEQ ID NO: 103045 - DNA, 15 bp, Homo sapiens
taagcataaaagtag

SEQ ID NO: 103046 - DNA, 15 bp, Homo sapiens
ctaagcataaaagta

SEQ ID NO: 103047 - DNA, 15 bp, Homo sapiens
cctaagcataaaagt

SEQ ID NO: 103048 - DNA, 15 bp, Homo sapiens
acctaagcataaaag

SEQ ID NO: 103049 - DNA, 15 bp, Homo sapiens
tacctaagcataaaa

SEQ ID NO: 103050 - DNA, 15 bp, Homo sapiens
atacctaagcataaa

SEQ ID NO: 103051 - DNA, 15 bp, Homo sapiens
aatacctaagcataa

SEQ ID NO: 103052 - DNA, 15 bp, Homo sapiens
aaatacctaagcata

SEQ ID NO: 103053 - DNA, 15 bp, Homo sapiens
caaatacctaagcat

SEQ ID NO: 103054 - DNA, 15 bp, Homo sapiens
acaaatacctaagca

SEQ ID NO: 103055 - DNA, 15 bp, Homo sapiens
aacaaatacctaagc

SEQ ID NO: 103056 - DNA, 15 bp, Homo sapiens
aaacaaatacctaag

SEQ ID NO: 103057 - DNA, 15 bp, Homo sapiens
caaacaaatacctaa

SEQ ID NO: 103058 - DNA, 15 bp, Homo sapiens
tcaaacaaataccta

SEQ ID NO: 103059 - DNA, 15 bp, Homo sapiens
gtcaaacaaatacct

SEQ ID NO: 103060 - DNA, 15 bp, Homo sapiens
agtcaaacaaatacc

SEQ ID NO: 103061 - DNA, 15 bp, Homo sapiens
aagtcaaacaaatac

SEQ ID NO: 103062 - DNA, 15 bp, Homo sapiens
taagtcaaacaaata

SEQ ID NO: 103063 - DNA, 15 bp, Homo sapiens
ctaagtcaaacaaat

SEQ ID NO: 103064 - DNA, 15 bp, Homo sapiens
tctaagtcaaacaaa

SEQ ID NO: 103065 - DNA, 15 bp, Homo sapiens
ttctaagtcaaacaa

SEQ ID NO: 103066 - DNA, 15 bp, Homo sapiens
tttctaagtcaaaca

SEQ ID NO: 103067 - DNA, 15 bp, Homo sapiens
ttttctaagtcaaac

SEQ ID NO: 103068 - DNA, 15 bp, Homo sapiens
tttttctaagtcaaa

SEQ ID NO: 103069 - DNA, 15 bp, Homo sapiens
ttttttctaagtcaa

SEQ ID NO: 103070 - DNA, 15 bp, Homo sapiens
attttttctaagtca

SEQ ID NO: 103071 - DNA, 15 bp, Homo sapiens
aattttttctaagtc

SEQ ID NO: 103072 - DNA, 15 bp, Homo sapiens
caattttttctaagt

SEQ ID NO: 103073 - DNA, 15 bp, Homo sapiens
ccaattttttctaag

SEQ ID NO: 103074 - DNA, 15 bp, Homo sapiens
accaattttttctaa

SEQ ID NO: 103075 - DNA, 15 bp, Homo sapiens
gaccaattttttcta

SEQ ID NO: 103076 - DNA, 15 bp, Homo sapiens
tgaccaattttttct

SEQ ID NO: 103077 - DNA, 15 bp, Homo sapiens
gtgaccaattttttc

SEQ ID NO: 103078 - DNA, 15 bp, Homo sapiens
cgtgaccaatttttt

SEQ ID NO: 103079 - DNA, 15 bp, Homo sapiens
acgtgaccaattttt

SEQ ID NO: 103080 - DNA, 15 bp, Homo sapiens
cacgtgaccaatttt

SEQ ID NO: 103081 - DNA, 15 bp, Homo sapiens
acacgtgaccaattt

SEQ ID NO: 103082 - DNA, 15 bp, Homo sapiens
tacacgtgaccaatt

SEQ ID NO: 103083 - DNA, 15 bp, Homo sapiens
gtacacgtgaccaat

SEQ ID NO: 103084 - DNA, 15 bp, Homo sapiens
ggtacacgtgaccaa

SEQ ID NO: 103085 - DNA, 15 bp, Homo sapiens
tggtacacgtgacca

SEQ ID NO: 103086 - DNA, 15 bp, Homo sapiens
gtggtacacgtgacc

SEQ ID NO: 103087 - DNA, 15 bp, Homo sapiens
agtggtacacgtgac

SEQ ID NO: 103088 - DNA, 15 bp, Homo sapiens
aagtggtacacgtga

SEQ ID NO: 103089 - DNA, 15 bp, Homo sapiens
aaagtggtacacgtg

SEQ ID NO: 103090 - DNA, 15 bp, Homo sapiens
taaagtggtacacgt

SEQ ID NO: 103091 - DNA, 15 bp, Homo sapiens
ataaagtggtacacg

SEQ ID NO: 103092 - DNA, 15 bp, Homo sapiens
tataaagtggtacac

SEQ ID NO: 103093 - DNA, 15 bp, Homo sapiens
ctataaagtggtaca

SEQ ID NO: 103094 - DNA, 15 bp, Homo sapiens
actataaagtggtac

SEQ ID NO: 103095 - DNA, 15 bp, Homo sapiens
cactataaagtggta

SEQ ID NO: 103096 - DNA, 15 bp, Homo sapiens
gcactataaagtggt

SEQ ID NO: 103097 - DNA, 15 bp, Homo sapiens
ggcactataaagtgg

SEQ ID NO: 103098 - DNA, 15 bp, Homo sapiens
gggcactataaagtg

SEQ ID NO: 103099 - DNA, 15 bp, Homo sapiens
agggcactataaagt

SEQ ID NO: 103100 - DNA, 15 bp, Homo sapiens
cagggcactataaag

SEQ ID NO: 103101 - DNA, 15 bp, Homo sapiens
gcagggcactataaa

SEQ ID NO: 103102 - DNA, 15 bp, Homo sapiens
tgcagggcactataa

SEQ ID NO: 103103 - DNA, 15 bp, Homo sapiens
ctgcagggcactata

SEQ ID NO: 103104 - DNA, 15 bp, Homo sapiens
cctgcagggcactat

SEQ ID NO: 103105 - DNA, 15 bp, Homo sapiens
acctgcagggcacta

SEQ ID NO: 103106 - DNA, 15 bp, Homo sapiens
cacctgcagggcact

SEQ ID NO: 103107 - DNA, 15 bp, Homo sapiens
acacctgcagggcac

SEQ ID NO: 103108 - DNA, 15 bp, Homo sapiens
aacacctgcagggca

SEQ ID NO: 103109 - DNA, 15 bp, Homo sapiens
taacacctgcagggc

SEQ ID NO: 103110 - DNA, 15 bp, Homo sapiens
ttaacacctgcaggg

SEQ ID NO: 103111 - DNA, 15 bp, Homo sapiens
cttaacacctgcagg

SEQ ID NO: 103112 - DNA, 15 bp, Homo sapiens
tcttaacacctgcag

SEQ ID NO: 103113 - DNA, 15 bp, Homo sapiens
atcttaacacctgca

SEQ ID NO: 103114 - DNA, 15 bp, Homo sapiens
tatcttaacacctgc

SEQ ID NO: 103115 - DNA, 15 bp, Homo sapiens
atatcttaacacctg

SEQ ID NO: 103116 - DNA, 15 bp, Homo sapiens
catatcttaacacct

SEQ ID NO: 103117 - DNA, 15 bp, Homo sapiens
tcatatcttaacacc

SEQ ID NO: 103118 - DNA, 15 bp, Homo sapiens
ttcatatcttaacac

SEQ ID NO: 103119 - DNA, 15 bp, Homo sapiens
cttcatatcttaaca

SEQ ID NO: 103120 - DNA, 15 bp, Homo sapiens
ccttcatatcttaac

SEQ ID NO: 103121 - DNA, 15 bp, Homo sapiens
gccttcatatcttaa

SEQ ID NO: 103122 - DNA, 15 bp, Homo sapiens
tgccttcatatctta

SEQ ID NO: 103123 - DNA, 15 bp, Homo sapiens
gtgccttcatatctt

SEQ ID NO: 103124 - DNA, 15 bp, Homo sapiens
agtgccttcatatct

SEQ ID NO: 103125 - DNA, 15 bp, Homo sapiens
aagtgccttcatatc

SEQ ID NO: 103126 - DNA, 15 bp, Homo sapiens
aaagtgccttcatat

SEQ ID NO: 103127 - DNA, 15 bp, Homo sapiens
caaagtgccttcata

SEQ ID NO: 103128 - DNA, 15 bp, Homo sapiens
tcaaagtgccttcat

SEQ ID NO: 103129 - DNA, 15 bp, Homo sapiens
gtcaaagtgccttca

SEQ ID NO: 103130 - DNA, 15 bp, Homo sapiens
agtcaaagtgccttc

SEQ ID NO: 103131 - DNA, 15 bp, Homo sapiens
aagtcaaagtgcctt

SEQ ID NO: 103132 - DNA, 15 bp, Homo sapiens
taagtcaaagtgcct

SEQ ID NO: 103133 - DNA, 15 bp, Homo sapiens
gtaagtcaaagtgcc

SEQ ID NO: 103134 - DNA, 15 bp, Homo sapiens
tgtaagtcaaagtgc

SEQ ID NO: 103135 - DNA, 15 bp, Homo sapiens
gtgtaagtcaaagtg

SEQ ID NO: 103136 - DNA, 15 bp, Homo sapiens
ggtgtaagtcaaagt

SEQ ID NO: 103137 - DNA, 15 bp, Homo sapiens
aggtgtaagtcaaag

SEQ ID NO: 103138 - DNA, 15 bp, Homo sapiens
gaggtgtaagtcaaa

SEQ ID NO: 103139 - DNA, 15 bp, Homo sapiens
tgaggtgtaagtcaa

SEQ ID NO: 103140 - DNA, 15 bp, Homo sapiens
atgaggtgtaagtca

SEQ ID NO: 103141 - DNA, 15 bp, Homo sapiens
tatgaggtgtaagtc

SEQ ID NO: 103142 - DNA, 15 bp, Homo sapiens
ttatgaggtgtaagt

SEQ ID NO: 103143 - DNA, 15 bp, Homo sapiens
tttatgaggtgtaag

SEQ ID NO: 103144 - DNA, 15 bp, Homo sapiens
ttttatgaggtgtaa

SEQ ID NO: 103145 - DNA, 15 bp, Homo sapiens
attttatgaggtgta

SEQ ID NO: 103146 - DNA, 15 bp, Homo sapiens
gattttatgaggtgt

SEQ ID NO: 103147 - DNA, 15 bp, Homo sapiens
agattttatgaggtg

SEQ ID NO: 103148 - DNA, 15 bp, Homo sapiens
aagattttatgaggt

SEQ ID NO: 103149 - DNA, 15 bp, Homo sapiens
aaagattttatgagg

SEQ ID NO: 103150 - DNA, 15 bp, Homo sapiens
taaagattttatgag

SEQ ID NO: 103151 - DNA, 15 bp, Homo sapiens
gtaaagattttatga

SEQ ID NO: 103152 - DNA, 15 bp, Homo sapiens
tgtaaagattttatg

SEQ ID NO: 103153 - DNA, 15 bp, Homo sapiens
ttgtaaagattttat

SEQ ID NO: 103154 - DNA, 15 bp, Homo sapiens
tttgtaaagatttta

SEQ ID NO: 103155 - DNA, 15 bp, Homo sapiens
ctttgtaaagatttt

SEQ ID NO: 103156 - DNA, 15 bp, Homo sapiens
actttgtaaagattt

SEQ ID NO: 103157 - DNA, 15 bp, Homo sapiens
tactttgtaaagatt

SEQ ID NO: 103158 - DNA, 15 bp, Homo sapiens
atactttgtaaagat

SEQ ID NO: 103159 - DNA, 15 bp, Homo sapiens
aatactttgtaaaga

SEQ ID NO: 103160 - DNA, 15 bp, Homo sapiens
aaatactttgtaaag

SEQ ID NO: 103161 - DNA, 15 bp, Homo sapiens
aaaatactttgtaaa

SEQ ID NO: 103162 - DNA, 15 bp, Homo sapiens
gaaaatactttgtaa

SEQ ID NO: 103163 - DNA, 15 bp, Homo sapiens
agaaaatactttgta

SEQ ID NO: 103164 - DNA, 15 bp, Homo sapiens
tagaaaatactttgt

SEQ ID NO: 103165 - DNA, 15 bp, Homo sapiens
ttagaaaatactttg

SEQ ID NO: 103166 - DNA, 15 bp, Homo sapiens
tttagaaaatacttt

SEQ ID NO: 103167 - DNA, 15 bp, Homo sapiens
atttagaaaatactt

SEQ ID NO: 103168 - DNA, 15 bp, Homo sapiens
catttagaaaatact

SEQ ID NO: 103169 - DNA, 15 bp, Homo sapiens
tcatttagaaaatac

SEQ ID NO: 103170 - DNA, 15 bp, Homo sapiens
ttcatttagaaaata

SEQ ID NO: 103171 - DNA, 15 bp, Homo sapiens
attcatttagaaaat

SEQ ID NO: 103172 - DNA, 15 bp, Homo sapiens
tattcatttagaaaa

SEQ ID NO: 103173 - DNA, 15 bp, Homo sapiens
ttattcatttagaaa

SEQ ID NO: 103174 - DNA, 15 bp, Homo sapiens
attattcatttagaa

SEQ ID NO: 103175 - DNA, 15 bp, Homo sapiens
cattattcatttaga

SEQ ID NO: 103176 - DNA, 15 bp, Homo sapiens
tcattattcatttag

SEQ ID NO: 103177 - DNA, 15 bp, Homo sapiens
atcattattcattta

SEQ ID NO: 103178 - DNA, 15 bp, Homo sapiens
catcattattcattt

SEQ ID NO: 103179 - DNA, 15 bp, Homo sapiens
tcatcattattcatt

SEQ ID NO: 103180 - DNA, 15 bp, Homo sapiens
ttcatcattattcat

SEQ ID NO: 103181 - DNA, 15 bp, Homo sapiens
tttcatcattattca

SEQ ID NO: 103182 - DNA, 15 bp, Homo sapiens
atttcatcattattc

SEQ ID NO: 103183 - DNA, 15 bp, Homo sapiens
tatttcatcattatt

SEQ ID NO: 103184 - DNA, 15 bp, Homo sapiens
ttatttcatcattat

SEQ ID NO: 103185 - DNA, 15 bp, Homo sapiens
tttatttcatcatta

SEQ ID NO: 103186 - DNA, 15 bp, Homo sapiens
ctttatttcatcatt

SEQ ID NO: 103187 - DNA, 15 bp, Homo sapiens
actttatttcatcat

SEQ ID NO: 103188 - DNA, 15 bp, Homo sapiens
gactttatttcatca

SEQ ID NO: 103189 - DNA, 15 bp, Homo sapiens
agactttatttcatc

SEQ ID NO: 103190 - DNA, 15 bp, Homo sapiens
aagactttatttcat

SEQ ID NO: 103191 - DNA, 15 bp, Homo sapiens
aaagactttatttca

SEQ ID NO: 103192 - DNA, 15 bp, Homo sapiens
taaagactttatttc

SEQ ID NO: 103193 - DNA, 15 bp, Homo sapiens
ataaagactttattt

SEQ ID NO: 103194 - DNA, 15 bp, Homo sapiens
aataaagactttatt

SEQ ID NO: 103195 - DNA, 15 bp, Homo sapiens
gaataaagactttat

SEQ ID NO: 103196 - DNA, 15 bp, Homo sapiens
agaataaagacttta

SEQ ID NO: 103197 - DNA, 15 bp, Homo sapiens
tagaataaagacttt

SEQ ID NO: 103198 - DNA, 15 bp, Homo sapiens
ctagaataaagactt

SEQ ID NO: 103199 - DNA, 15 bp, Homo sapiens
cctagaataaagact

SEQ ID NO: 103200 - DNA, 15 bp, Homo sapiens
acctagaataaagac

SEQ ID NO: 103201 - DNA, 15 bp, Homo sapiens
cacctagaataaaga

SEQ ID NO: 103202 - DNA, 15 bp, Homo sapiens
gcacctagaataaag

SEQ ID NO: 103203 - DNA, 15 bp, Homo sapiens
tgcacctagaataaa

SEQ ID NO: 103204 - DNA, 15 bp, Homo sapiens
atgcacctagaataa

SEQ ID NO: 103205 - DNA, 15 bp, Homo sapiens
gatgcacctagaata

SEQ ID NO: 103206 - DNA, 15 bp, Homo sapiens
agatgcacctagaat

SEQ ID NO: 103207 - DNA, 15 bp, Homo sapiens
cagatgcacctagaa

SEQ ID NO: 103208 - DNA, 15 bp, Homo sapiens
gcagatgcacctaga

SEQ ID NO: 103209 - DNA, 15 bp, Homo sapiens
ggcagatgcacctag

SEQ ID NO: 103210 - DNA, 15 bp, Homo sapiens
gggcagatgcaccta

SEQ ID NO: 103211 - DNA, 15 bp, Homo sapiens
ggggcagatgcacct

SEQ ID NO: 103212 - DNA, 15 bp, Homo sapiens
tggggcagatgcacc

SEQ ID NO: 103213 - DNA, 15 bp, Homo sapiens
gtggggcagatgcac

SEQ ID NO: 103214 - DNA, 15 bp, Homo sapiens
tgtggggcagatgca

SEQ ID NO: 103215 - DNA, 15 bp, Homo sapiens
atgtggggcagatgc

SEQ ID NO: 103216 - DNA, 15 bp, Homo sapiens
tatgtggggcagatg

SEQ ID NO: 103217 - DNA, 15 bp, Homo sapiens
ttatgtggggcagat

SEQ ID NO: 103218 - DNA, 15 bp, Homo sapiens
attatgtggggcaga

SEQ ID NO: 103219 - DNA, 15 bp, Homo sapiens
aattatgtggggcag

SEQ ID NO: 103220 - DNA, 15 bp, Homo sapiens
aaattatgtggggca

SEQ ID NO: 103221 - DNA, 15 bp, Homo sapiens
caaattatgtggggc

SEQ ID NO: 103222 - DNA, 15 bp, Homo sapiens
acaaattatgtgggg

SEQ ID NO: 103223 - DNA, 15 bp, Homo sapiens
aacaaattatgtggg

SEQ ID NO: 103224 - DNA, 15 bp, Homo sapiens
aaacaaattatgtgg

SEQ ID NO: 103225 - DNA, 15 bp, Homo sapiens
aaaacaaattatgtg

SEQ ID NO: 103226 - DNA, 15 bp, Homo sapiens
gaaaacaaattatgt

SEQ ID NO: 103227 - DNA, 15 bp, Homo sapiens
agaaaacaaattatg

SEQ ID NO: 103228 - DNA, 15 bp, Homo sapiens
aagaaaacaaattat

SEQ ID NO: 103229 - DNA, 15 bp, Homo sapiens
aaagaaaacaaatta

SEQ ID NO: 103230 - DNA, 15 bp, Homo sapiens
caaagaaaacaaatt

SEQ ID NO: 103231 - DNA, 15 bp, Homo sapiens
ccaaagaaaacaaat

SEQ ID NO: 103232 - DNA, 15 bp, Homo sapiens
tccaaagaaaacaaa

SEQ ID NO: 103233 - DNA, 15 bp, Homo sapiens
gtccaaagaaaacaa

SEQ ID NO: 103234 - DNA, 15 bp, Homo sapiens
agtccaaagaaaaca

SEQ ID NO: 103235 - DNA, 15 bp, Homo sapiens
tagtccaaagaaaac

SEQ ID NO: 103236 - DNA, 15 bp, Homo sapiens
ctagtccaaagaaaa

SEQ ID NO: 103237 - DNA, 15 bp, Homo sapiens
tctagtccaaagaaa

SEQ ID NO: 103238 - DNA, 15 bp, Homo sapiens
ttctagtccaaagaa

SEQ ID NO: 103239 - DNA, 15 bp, Homo sapiens
cttctagtccaaaga

SEQ ID NO: 103240 - DNA, 15 bp, Homo sapiens
acttctagtccaaag

SEQ ID NO: 103241 - DNA, 15 bp, Homo sapiens
aacttctagtccaaa

SEQ ID NO: 103242 - DNA, 15 bp, Homo sapiens
aaacttctagtccaa

SEQ ID NO: 103243 - DNA, 15 bp, Homo sapiens
aaaacttctagtcca

SEQ ID NO: 103244 - DNA, 15 bp, Homo sapiens
caaaacttctagtcc

SEQ ID NO: 103245 - DNA, 15 bp, Homo sapiens
tcaaaacttctagtc

SEQ ID NO: 103246 - DNA, 15 bp, Homo sapiens
atcaaaacttctagt

SEQ ID NO: 103247 - DNA, 15 bp, Homo sapiens
catcaaaacttctag

SEQ ID NO: 103248 - DNA, 15 bp, Homo sapiens
acatcaaaacttcta

SEQ ID NO: 103249 - DNA, 15 bp, Homo sapiens
cacatcaaaacttct

SEQ ID NO: 103250 - DNA, 15 bp, Homo sapiens
acacatcaaaacttc

SEQ ID NO: 103251 - DNA, 15 bp, Homo sapiens
aacacatcaaaactt

SEQ ID NO: 103252 - DNA, 15 bp, Homo sapiens
caacacatcaaaact

SEQ ID NO: 103253 - DNA, 15 bp, Homo sapiens
tcaacacatcaaaac

SEQ ID NO: 103254 - DNA, 15 bp, Homo sapiens
ctcaacacatcaaaa

SEQ ID NO: 103255 - DNA, 15 bp, Homo sapiens
tctcaacacatcaaa

SEQ ID NO: 103256 - DNA, 15 bp, Homo sapiens
ttctcaacacatcaa

SEQ ID NO: 103257 - DNA, 15 bp, Homo sapiens
attctcaacacatca

SEQ ID NO: 103258 - DNA, 15 bp, Homo sapiens
cattctcaacacatc

SEQ ID NO: 103259 - DNA, 15 bp, Homo sapiens
ccattctcaacacat

SEQ ID NO: 103260 - DNA, 15 bp, Homo sapiens
accattctcaacaca

SEQ ID NO: 103261 - DNA, 15 bp, Homo sapiens
taccattctcaacac

SEQ ID NO: 103262 - DNA, 15 bp, Homo sapiens
ttaccattctcaaca

SEQ ID NO: 103263 - DNA, 15 bp, Homo sapiens
attaccattctcaac

SEQ ID NO: 103264 - DNA, 15 bp, Homo sapiens
cattaccattctcaa

SEQ ID NO: 103265 - DNA, 15 bp, Homo sapiens
tcattaccattctca

SEQ ID NO: 103266 - DNA, 15 bp, Homo sapiens
ttcattaccattctc

SEQ ID NO: 103267 - DNA, 15 bp, Homo sapiens
attcattaccattct

SEQ ID NO: 103268 - DNA, 15 bp, Homo sapiens
aattcattaccattc

SEQ ID NO: 103269 - DNA, 15 bp, Homo sapiens
taattcattaccatt

SEQ ID NO: 103270 - DNA, 15 bp, Homo sapiens
ttaattcattaccat

SEQ ID NO: 103271 - DNA, 15 bp, Homo sapiens
gttaattcattacca

SEQ ID NO: 103272 - DNA, 15 bp, Homo sapiens
agttaattcattacc

SEQ ID NO: 103273 - DNA, 15 bp, Homo sapiens
gagttaattcattac

SEQ ID NO: 103274 - DNA, 15 bp, Homo sapiens
ggagttaattcatta

SEQ ID NO: 103275 - DNA, 15 bp, Homo sapiens
tggagttaattcatt

SEQ ID NO: 103276 - DNA, 15 bp, Homo sapiens
atggagttaattcat

SEQ ID NO: 103277 - DNA, 15 bp, Homo sapiens
aatggagttaattca

SEQ ID NO: 103278 - DNA, 15 bp, Homo sapiens
aaatggagttaattc

SEQ ID NO: 103279 - DNA, 15 bp, Homo sapiens
aaaatggagttaatt

SEQ ID NO: 103280 - DNA, 15 bp, Homo sapiens
taaaatggagttaat

SEQ ID NO: 103281 - DNA, 15 bp, Homo sapiens
ttaaaatggagttaa

SEQ ID NO: 103282 - DNA, 15 bp, Homo sapiens
tttaaaatggagtta

SEQ ID NO: 103283 - DNA, 15 bp, Homo sapiens
atttaaaatggagtt

SEQ ID NO: 103284 - DNA, 15 bp, Homo sapiens
catttaaaatggagt

SEQ ID NO: 103285 - DNA, 15 bp, Homo sapiens
acatttaaaatggag

SEQ ID NO: 103286 - DNA, 15 bp, Homo sapiens
tacatttaaaatgga

SEQ ID NO: 103287 - DNA, 15 bp, Homo sapiens
ctacatttaaaatgg

SEQ ID NO: 103288 - DNA, 15 bp, Homo sapiens
tctacatttaaaatg

SEQ ID NO: 103289 - DNA, 15 bp, Homo sapiens
ttctacatttaaaat

SEQ ID NO: 103290 - DNA, 15 bp, Homo sapiens
attctacatttaaaa

SEQ ID NO: 103291 - DNA, 15 bp, Homo sapiens
cattctacatttaaa

SEQ ID NO: 103292 - DNA, 15 bp, Homo sapiens
gcattctacatttaa

SEQ ID NO: 103293 - DNA, 15 bp, Homo sapiens
cgcattctacattta

SEQ ID NO: 103294 - DNA, 15 bp, Homo sapiens
acgcattctacattt

SEQ ID NO: 103295 - DNA, 15 bp, Homo sapiens
tacgcattctacatt

SEQ ID NO: 103296 - DNA, 15 bp, Homo sapiens
atacgcattctacat

SEQ ID NO: 103297 - DNA, 15 bp, Homo sapiens
gatacgcattctaca

SEQ ID NO: 103298 - DNA, 15 bp, Homo sapiens
tgatacgcattctac

SEQ ID NO: 103299 - DNA, 15 bp, Homo sapiens
gtgatacgcattcta

SEQ ID NO: 103300 - DNA, 15 bp, Homo sapiens
agtgatacgcattct

SEQ ID NO: 103301 - DNA, 15 bp, Homo sapiens
gagtgatacgcattc

SEQ ID NO: 103302 - DNA, 15 bp, Homo sapiens
ggagtgatacgcatt

SEQ ID NO: 103303 - DNA, 15 bp, Homo sapiens
tggagtgatacgcat

SEQ ID NO: 103304 - DNA, 15 bp, Homo sapiens
ttggagtgatacgca

SEQ ID NO: 103305 - DNA, 15 bp, Homo sapiens
attggagtgatacgc

SEQ ID NO: 103306 - DNA, 15 bp, Homo sapiens
tattggagtgatacg

SEQ ID NO: 103307 - DNA, 15 bp, Homo sapiens
atattggagtgatac

SEQ ID NO: 103308 - DNA, 15 bp, Homo sapiens
catattggagtgata

SEQ ID NO: 103309 - DNA, 15 bp, Homo sapiens
tcatattggagtgat

SEQ ID NO: 103310 - DNA, 15 bp, Homo sapiens
ttcatattggagtga

SEQ ID NO: 103311 - DNA, 15 bp, Homo sapiens
attcatattggagtg

SEQ ID NO: 103312 - DNA, 15 bp, Homo sapiens
cattcatattggagt

SEQ ID NO: 103313 - DNA, 15 bp, Homo sapiens
gcattcatattggag

SEQ ID NO: 103314 - DNA, 15 bp, Homo sapiens
ggcattcatattgga

SEQ ID NO: 103315 - DNA, 15 bp, Homo sapiens
gggcattcatattgg

SEQ ID NO: 103316 - DNA, 15 bp, Homo sapiens
agggcattcatattg

SEQ ID NO: 103317 - DNA, 15 bp, Homo sapiens
tagggcattcatatt

SEQ ID NO: 103318 - DNA, 15 bp, Homo sapiens
ttagggcattcatat

SEQ ID NO: 103319 - DNA, 15 bp, Homo sapiens
attagggcattcata

SEQ ID NO: 103320 - DNA, 15 bp, Homo sapiens
cattagggcattcat

SEQ ID NO: 103321 - DNA, 15 bp, Homo sapiens
tcattagggcattca

SEQ ID NO: 103322 - DNA, 15 bp, Homo sapiens
ttcattagggcattc

SEQ ID NO: 103323 - DNA, 15 bp, Homo sapiens
attcattagggcatt

SEQ ID NO: 103324 - DNA, 15 bp, Homo sapiens
gattcattagggcat

SEQ ID NO: 103325 - DNA, 15 bp, Homo sapiens
ggattcattagggca

SEQ ID NO: 103326 - DNA, 15 bp, Homo sapiens
aggattcattagggc

SEQ ID NO: 103327 - DNA, 15 bp, Homo sapiens
taggattcattaggg

SEQ ID NO: 103328 - DNA, 15 bp, Homo sapiens
ttaggattcattagg

SEQ ID NO: 103329 - DNA, 15 bp, Homo sapiens
cttaggattcattag

SEQ ID NO: 103330 - DNA, 15 bp, Homo sapiens
tcttaggattcatta

SEQ ID NO: 103331 - DNA, 15 bp, Homo sapiens
atcttaggattcatt

SEQ ID NO: 103332 - DNA, 15 bp, Homo sapiens
aatcttaggattcat

SEQ ID NO: 103333 - DNA, 15 bp, Homo sapiens
aaatcttaggattca

SEQ ID NO: 103334 - DNA, 15 bp, Homo sapiens
caaatcttaggattc

SEQ ID NO: 103335 - DNA, 15 bp, Homo sapiens
acaaatcttaggatt

SEQ ID NO: 103336 - DNA, 15 bp, Homo sapiens
tacaaatcttaggat

SEQ ID NO: 103337 - DNA, 15 bp, Homo sapiens
ctacaaatcttagga

SEQ ID NO: 103338 - DNA, 15 bp, Homo sapiens
cctacaaatcttagg

SEQ ID NO: 103339 - DNA, 15 bp, Homo sapiens
acctacaaatcttag

SEQ ID NO: 103340 - DNA, 15 bp, Homo sapiens
aacctacaaatctta

SEQ ID NO: 103341 - DNA, 15 bp, Homo sapiens
aaacctacaaatctt

SEQ ID NO: 103342 - DNA, 15 bp, Homo sapiens
aaaacctacaaatct

SEQ ID NO: 103343 - DNA, 15 bp, Homo sapiens
caaaacctacaaatc

SEQ ID NO: 103344 - DNA, 15 bp, Homo sapiens
acaaaacctacaaat

SEQ ID NO: 103345 - DNA, 15 bp, Homo sapiens
cacaaaacctacaaa

SEQ ID NO: 103346 - DNA, 15 bp, Homo sapiens
acacaaaacctacaa

SEQ ID NO: 103347 - DNA, 15 bp, Homo sapiens
tacacaaaacctaca

SEQ ID NO: 103348 - DNA, 15 bp, Homo sapiens
gtacacaaaacctac

SEQ ID NO: 103349 - DNA, 15 bp, Homo sapiens
agtacacaaaaccta

SEQ ID NO: 103350 - DNA, 15 bp, Homo sapiens
tagtacacaaaacct

SEQ ID NO: 103351 - DNA, 15 bp, Homo sapiens
ctagtacacaaaacc

SEQ ID NO: 103352 - DNA, 15 bp, Homo sapiens
actagtacacaaaac

SEQ ID NO: 103353 - DNA, 15 bp, Homo sapiens
tactagtacacaaaa

SEQ ID NO: 103354 - DNA, 15 bp, Homo sapiens
atactagtacacaaa

SEQ ID NO: 103355 - DNA, 15 bp, Homo sapiens
catactagtacacaa

SEQ ID NO: 103356 - DNA, 15 bp, Homo sapiens
tcatactagtacaca

SEQ ID NO: 103357 - DNA, 15 bp, Homo sapiens
ttcatactagtacac

SEQ ID NO: 103358 - DNA, 15 bp, Homo sapiens
tttcatactagtaca

SEQ ID NO: 103359 - DNA, 15 bp, Homo sapiens
ttttcatactagtac

SEQ ID NO: 103360 - DNA, 15 bp, Homo sapiens
attttcatactagta

SEQ ID NO: 103361 - DNA, 15 bp, Homo sapiens
aattttcatactagt

SEQ ID NO: 103362 - DNA, 15 bp, Homo sapiens
taattttcatactag

SEQ ID NO: 103363 - DNA, 15 bp, Homo sapiens
gtaattttcatacta

SEQ ID NO: 103364 - DNA, 15 bp, Homo sapiens
agtaattttcatact

SEQ ID NO: 103365 - DNA, 15 bp, Homo sapiens
tagtaattttcatac

SEQ ID NO: 103366 - DNA, 15 bp, Homo sapiens
ttagtaattttcata

SEQ ID NO: 103367 - DNA, 15 bp, Homo sapiens
tttagtaattttcat

SEQ ID NO: 103368 - DNA, 15 bp, Homo sapiens
ctttagtaattttca

SEQ ID NO: 103369 - DNA, 15 bp, Homo sapiens
tctttagtaattttc

SEQ ID NO: 103370 - DNA, 15 bp, Homo sapiens
atctttagtaatttt

SEQ ID NO: 103371 - DNA, 15 bp, Homo sapiens
catctttagtaattt

SEQ ID NO: 103372 - DNA, 15 bp, Homo sapiens
ccatctttagtaatt

SEQ ID NO: 103373 - DNA, 15 bp, Homo sapiens
tccatctttagtaat

SEQ ID NO: 103374 - DNA, 15 bp, Homo sapiens
ttccatctttagtaa

SEQ ID NO: 103375 - DNA, 15 bp, Homo sapiens
tttccatctttagta

SEQ ID NO: 103376 - DNA, 15 bp, Homo sapiens
ttttccatctttagt

SEQ ID NO: 103377 - DNA, 15 bp, Homo sapiens
tttttccatctttag

SEQ ID NO: 103378 - DNA, 15 bp, Homo sapiens
atttttccatcttta

SEQ ID NO: 103379 - DNA, 15 bp, Homo sapiens
gatttttccatcttt

SEQ ID NO: 103380 - DNA, 15 bp, Homo sapiens
tgatttttccatctt

SEQ ID NO: 103381 - DNA, 15 bp, Homo sapiens
gtgatttttccatct

SEQ ID NO: 103382 - DNA, 15 bp, Homo sapiens
tgtgatttttccatc

SEQ ID NO: 103383 - DNA, 15 bp, Homo sapiens
atgtgatttttccat

SEQ ID NO: 103384 - DNA, 15 bp, Homo sapiens
catgtgatttttcca

SEQ ID NO: 103385 - DNA, 15 bp, Homo sapiens
acatgtgatttttcc

SEQ ID NO: 103386 - DNA, 15 bp, Homo sapiens
aacatgtgatttttc

SEQ ID NO: 103387 - DNA, 15 bp, Homo sapiens
caacatgtgattttt

SEQ ID NO: 103388 - DNA, 15 bp, Homo sapiens
ccaacatgtgatttt

SEQ ID NO: 103389 - DNA, 15 bp, Homo sapiens
tccaacatgtgattt

SEQ ID NO: 103390 - DNA, 15 bp, Homo sapiens
ctccaacatgtgatt

SEQ ID NO: 103391 - DNA, 15 bp, Homo sapiens
tctccaacatgtgat

SEQ ID NO: 103392 - DNA, 15 bp, Homo sapiens
gtctccaacatgtga

SEQ ID NO: 103393 - DNA, 15 bp, Homo sapiens
tgtctccaacatgtg

SEQ ID NO: 103394 - DNA, 15 bp, Homo sapiens
atgtctccaacatgt

SEQ ID NO: 103395 - DNA, 15 bp, Homo sapiens
tatgtctccaacatg

SEQ ID NO: 103396 - DNA, 15 bp, Homo sapiens
ttatgtctccaacat

SEQ ID NO: 103397 - DNA, 15 bp, Homo sapiens
cttatgtctccaaca

SEQ ID NO: 103398 - DNA, 15 bp, Homo sapiens
tcttatgtctccaac

SEQ ID NO: 103399 - DNA, 15 bp, Homo sapiens
atcttatgtctccaa

SEQ ID NO: 103400 - DNA, 15 bp, Homo sapiens
tatcttatgtctcca

SEQ ID NO: 103401 - DNA, 15 bp, Homo sapiens
gtatcttatgtctcc

SEQ ID NO: 103402 - DNA, 15 bp, Homo sapiens
tgtatcttatgtctc

SEQ ID NO: 103403 - DNA, 15 bp, Homo sapiens
ttgtatcttatgtct

SEQ ID NO: 103404 - DNA, 15 bp, Homo sapiens
tttgtatcttatgtc

SEQ ID NO: 103405 - DNA, 15 bp, Homo sapiens
gtttgtatcttatgt

SEQ ID NO: 103406 - DNA, 15 bp, Homo sapiens
ggtttgtatcttatg

SEQ ID NO: 103407 - DNA, 15 bp, Homo sapiens
aggtttgtatcttat

SEQ ID NO: 103408 - DNA, 15 bp, Homo sapiens
aaggtttgtatctta

SEQ ID NO: 103409 - DNA, 15 bp, Homo sapiens
aaaggtttgtatctt

SEQ ID NO: 103410 - DNA, 15 bp, Homo sapiens
aaaaggtttgtatct

SEQ ID NO: 103411 - DNA, 15 bp, Homo sapiens
aaaaaggtttgtatc

SEQ ID NO: 103412 - DNA, 15 bp, Homo sapiens
caaaaaggtttgtat

SEQ ID NO: 103413 - DNA, 15 bp, Homo sapiens
acaaaaaggtttgta

SEQ ID NO: 103414 - DNA, 15 bp, Homo sapiens
aacaaaaaggtttgt

SEQ ID NO: 103415 - DNA, 15 bp, Homo sapiens
aaacaaaaaggtttg

SEQ ID NO: 103416 - DNA, 15 bp, Homo sapiens
aaaacaaaaaggttt

SEQ ID NO: 103417 - DNA, 15 bp, Homo sapiens
gaaaacaaaaaggtt

SEQ ID NO: 103418 - DNA, 15 bp, Homo sapiens
agaaaacaaaaaggt

SEQ ID NO: 103419 - DNA, 15 bp, Homo sapiens
cagaaaacaaaaagg

SEQ ID NO: 103420 - DNA, 15 bp, Homo sapiens
tcagaaaacaaaaag

SEQ ID NO: 103421 - DNA, 15 bp, Homo sapiens
ttcagaaaacaaaaa

SEQ ID NO: 103422 - DNA, 15 bp, Homo sapiens
tttcagaaaacaaaa

SEQ ID NO: 103423 - DNA, 15 bp, Homo sapiens
ttttcagaaaacaaa

SEQ ID NO: 103424 - DNA, 15 bp, Homo sapiens
attttcagaaaacaa

SEQ ID NO: 103425 - DNA, 15 bp, Homo sapiens
tattttcagaaaaca

SEQ ID NO: 103426 - DNA, 15 bp, Homo sapiens
gtattttcagaaaac

SEQ ID NO: 103427 - DNA, 15 bp, Homo sapiens
tgtattttcagaaaa

SEQ ID NO: 103428 - DNA, 15 bp, Homo sapiens
ttgtattttcagaaa

SEQ ID NO: 103429 - DNA, 15 bp, Homo sapiens
gttgtattttcagaa

SEQ ID NO: 103430 - DNA, 15 bp, Homo sapiens
ggttgtattttcaga

SEQ ID NO: 103431 - DNA, 15 bp, Homo sapiens
aggttgtattttcag

SEQ ID NO: 103432 - DNA, 15 bp, Homo sapiens
gaggttgtattttca

SEQ ID NO: 103433 - DNA, 15 bp, Homo sapiens
agaggttgtattttc

SEQ ID NO: 103434 - DNA, 15 bp, Homo sapiens
cagaggttgtatttt

SEQ ID NO: 103435 - DNA, 15 bp, Homo sapiens
tcagaggttgtattt

SEQ ID NO: 103436 - DNA, 15 bp, Homo sapiens
atcagaggttgtatt

SEQ ID NO: 103437 - DNA, 15 bp, Homo sapiens
aatcagaggttgtat

SEQ ID NO: 103438 - DNA, 15 bp, Homo sapiens
aaatcagaggttgta

SEQ ID NO: 103439 - DNA, 15 bp, Homo sapiens
gaaatcagaggttgt

SEQ ID NO: 103440 - DNA, 15 bp, Homo sapiens
agaaatcagaggttg

SEQ ID NO: 103441 - DNA, 15 bp, Homo sapiens
cagaaatcagaggtt

SEQ ID NO: 103442 - DNA, 15 bp, Homo sapiens
tcagaaatcagaggt

SEQ ID NO: 103443 - DNA, 15 bp, Homo sapiens
atcagaaatcagagg

SEQ ID NO: 103444 - DNA, 15 bp, Homo sapiens
aatcagaaatcagag

SEQ ID NO: 103445 - DNA, 15 bp, Homo sapiens
gaatcagaaatcaga

SEQ ID NO: 103446 - DNA, 15 bp, Homo sapiens
ggaatcagaaatcag

SEQ ID NO: 103447 - DNA, 15 bp, Homo sapiens
aggaatcagaaatca

SEQ ID NO: 103448 - DNA, 15 bp, Homo sapiens
aaggaatcagaaatc

SEQ ID NO: 103449 - DNA, 15 bp, Homo sapiens
caaggaatcagaaat

SEQ ID NO: 103450 - DNA, 15 bp, Homo sapiens
acaaggaatcagaaa

SEQ ID NO: 103451 - DNA, 15 bp, Homo sapiens
aacaaggaatcagaa

SEQ ID NO: 103452 - DNA, 15 bp, Homo sapiens
caacaaggaatcaga

SEQ ID NO: 103453 - DNA, 15 bp, Homo sapiens
acaacaaggaatcag

SEQ ID NO: 103454 - DNA, 15 bp, Homo sapiens
tacaacaaggaatca

SEQ ID NO: 103455 - DNA, 15 bp, Homo sapiens
ttacaacaaggaatc

SEQ ID NO: 103456 - DNA, 15 bp, Homo sapiens
attacaacaaggaat

SEQ ID NO: 103457 - DNA, 15 bp, Homo sapiens
tattacaacaaggaa

SEQ ID NO: 103458 - DNA, 15 bp, Homo sapiens
atattacaacaagga

SEQ ID NO: 103459 - DNA, 15 bp, Homo sapiens
catattacaacaagg

SEQ ID NO: 103460 - DNA, 15 bp, Homo sapiens
ccatattacaacaag

SEQ ID NO: 103461 - DNA, 15 bp, Homo sapiens
accatattacaacaa

SEQ ID NO: 103462 - DNA, 15 bp, Homo sapiens
caccatattacaaca

SEQ ID NO: 103463 - DNA, 15 bp, Homo sapiens
acaccatattacaac

SEQ ID NO: 103464 - DNA, 15 bp, Homo sapiens
tacaccatattacaa

SEQ ID NO: 103465 - DNA, 15 bp, Homo sapiens
ttacaccatattaca

SEQ ID NO: 103466 - DNA, 15 bp, Homo sapiens
attacaccatattac

SEQ ID NO: 103467 - DNA, 15 bp, Homo sapiens
aattacaccatatta

SEQ ID NO: 103468 - DNA, 15 bp, Homo sapiens
taattacaccatatt

SEQ ID NO: 103469 - DNA, 15 bp, Homo sapiens
ataattacaccatat

SEQ ID NO: 103470 - DNA, 15 bp, Homo sapiens
tataattacaccata

SEQ ID NO: 103471 - DNA, 15 bp, Homo sapiens
gtataattacaccat

SEQ ID NO: 103472 - DNA, 15 bp, Homo sapiens
agtataattacacca

SEQ ID NO: 103473 - DNA, 15 bp, Homo sapiens
tagtataattacacc

SEQ ID NO: 103474 - DNA, 15 bp, Homo sapiens
ctagtataattacac

SEQ ID NO: 103475 - DNA, 15 bp, Homo sapiens
tctagtataattaca

SEQ ID NO: 103476 - DNA, 15 bp, Homo sapiens
atctagtataattac

SEQ ID NO: 103477 - DNA, 15 bp, Homo sapiens
aatctagtataatta

SEQ ID NO: 103478 - DNA, 15 bp, Homo sapiens
caatctagtataatt

SEQ ID NO: 103479 - DNA, 15 bp, Homo sapiens
acaatctagtataat

SEQ ID NO: 103480 - DNA, 15 bp, Homo sapiens
tacaatctagtataa

SEQ ID NO: 103481 - DNA, 15 bp, Homo sapiens
ttacaatctagtata

SEQ ID NO: 103482 - DNA, 15 bp, Homo sapiens
attacaatctagtat

SEQ ID NO: 103483 - DNA, 15 bp, Homo sapiens
aattacaatctagta

SEQ ID NO: 103484 - DNA, 15 bp, Homo sapiens
aaattacaatctagt

SEQ ID NO: 103485 - DNA, 15 bp, Homo sapiens
aaaattacaatctag

SEQ ID NO: 103486 - DNA, 15 bp, Homo sapiens
caaaattacaatcta

SEQ ID NO: 103487 - DNA, 15 bp, Homo sapiens
acaaaattacaatct

SEQ ID NO: 103488 - DNA, 15 bp, Homo sapiens
aacaaaattacaatc

SEQ ID NO: 103489 - DNA, 15 bp, Homo sapiens
caacaaaattacaat

SEQ ID NO: 103490 - DNA, 15 bp, Homo sapiens
acaacaaaattacaa

SEQ ID NO: 103491 - DNA, 15 bp, Homo sapiens
aacaacaaaattaca

SEQ ID NO: 103492 - DNA, 15 bp, Homo sapiens
taacaacaaaattac

SEQ ID NO: 103493 - DNA, 15 bp, Homo sapiens
ctaacaacaaaatta

SEQ ID NO: 103494 - DNA, 15 bp, Homo sapiens
tctaacaacaaaatt

SEQ ID NO: 103495 - DNA, 15 bp, Homo sapiens
atctaacaacaaaat

SEQ ID NO: 103496 - DNA, 15 bp, Homo sapiens
aatctaacaacaaaa

SEQ ID NO: 103497 - DNA, 15 bp, Homo sapiens
taatctaacaacaaa

SEQ ID NO: 103498 - DNA, 15 bp, Homo sapiens
ataatctaacaacaa

SEQ ID NO: 103499 - DNA, 15 bp, Homo sapiens
tataatctaacaaca

SEQ ID NO: 103500 - DNA, 15 bp, Homo sapiens
gtataatctaacaac

SEQ ID NO: 103501 - DNA, 15 bp, Homo sapiens
agtataatctaacaa

SEQ ID NO: 103502 - DNA, 15 bp, Homo sapiens
aagtataatctaaca

SEQ ID NO: 103503 - DNA, 15 bp, Homo sapiens
aaagtataatctaac

SEQ ID NO: 103504 - DNA, 15 bp, Homo sapiens
aaaagtataatctaa

SEQ ID NO: 103505 - DNA, 15 bp, Homo sapiens
aaaaagtataatcta

SEQ ID NO: 103506 - DNA, 15 bp, Homo sapiens
aaaaaagtataatct

SEQ ID NO: 103507 - DNA, 15 bp, Homo sapiens
taaaaaagtataatc

SEQ ID NO: 103508 - DNA, 15 bp, Homo sapiens
ttaaaaaagtataat

SEQ ID NO: 103509 - DNA, 15 bp, Homo sapiens
cttaaaaaagtataa

SEQ ID NO: 103510 - DNA, 15 bp, Homo sapiens
acttaaaaaagtata

SEQ ID NO: 103511 - DNA, 15 bp, Homo sapiens
aacttaaaaaagtat

SEQ ID NO: 103512 - DNA, 15 bp, Homo sapiens
gaacttaaaaaagta

SEQ ID NO: 103513 - DNA, 15 bp, Homo sapiens
tgaacttaaaaaagt

SEQ ID NO: 103514 - DNA, 15 bp, Homo sapiens
ctgaacttaaaaaag

SEQ ID NO: 103515 - DNA, 15 bp, Homo sapiens
actgaacttaaaaaa

SEQ ID NO: 103516 - DNA, 15 bp, Homo sapiens
cactgaacttaaaaa

SEQ ID NO: 103517 - DNA, 15 bp, Homo sapiens
acactgaacttaaaa

SEQ ID NO: 103518 - DNA, 15 bp, Homo sapiens
aacactgaacttaaa

SEQ ID NO: 103519 - DNA, 15 bp, Homo sapiens
aaacactgaacttaa

SEQ ID NO: 103520 - DNA, 15 bp, Homo sapiens
caaacactgaactta

SEQ ID NO: 103521 - DNA, 15 bp, Homo sapiens
tcaaacactgaactt

SEQ ID NO: 103522 - DNA, 15 bp, Homo sapiens
ctcaaacactgaact

SEQ ID NO: 103523 - DNA, 15 bp, Homo sapiens
cctcaaacactgaac

SEQ ID NO: 103524 - DNA, 15 bp, Homo sapiens
tcctcaaacactgaa

SEQ ID NO: 103525 - DNA, 15 bp, Homo sapiens
gtcctcaaacactga

SEQ ID NO: 103526 - DNA, 15 bp, Homo sapiens
tgtcctcaaacactg

SEQ ID NO: 103527 - DNA, 15 bp, Homo sapiens
ctgtcctcaaacact

SEQ ID NO: 103528 - DNA, 15 bp, Homo sapiens
tctgtcctcaaacac

SEQ ID NO: 103529 - DNA, 15 bp, Homo sapiens
gtctgtcctcaaaca

SEQ ID NO: 103530 - DNA, 15 bp, Homo sapiens
agtctgtcctcaaac

SEQ ID NO: 103531 - DNA, 15 bp, Homo sapiens
aagtctgtcctcaaa

SEQ ID NO: 103532 - DNA, 15 bp, Homo sapiens
aaagtctgtcctcaa

SEQ ID NO: 103533 - DNA, 15 bp, Homo sapiens
gaaagtctgtcctca

SEQ ID NO: 103534 - DNA, 15 bp, Homo sapiens
tgaaagtctgtcctc

SEQ ID NO: 103535 - DNA, 15 bp, Homo sapiens
atgaaagtctgtcct

SEQ ID NO: 103536 - DNA, 15 bp, Homo sapiens
aatgaaagtctgtcc

SEQ ID NO: 103537 - DNA, 15 bp, Homo sapiens
aaatgaaagtctgtc

SEQ ID NO: 103538 - DNA, 15 bp, Homo sapiens
caaatgaaagtctgt

SEQ ID NO: 103539 - DNA, 15 bp, Homo sapiens
ccaaatgaaagtctg

SEQ ID NO: 103540 - DNA, 15 bp, Homo sapiens
accaaatgaaagtct

SEQ ID NO: 103541 - DNA, 15 bp, Homo sapiens
aaccaaatgaaagtc

SEQ ID NO: 103542 - DNA, 15 bp, Homo sapiens
taaccaaatgaaagt

SEQ ID NO: 103543 - DNA, 15 bp, Homo sapiens
ctaaccaaatgaaag

SEQ ID NO: 103544 - DNA, 15 bp, Homo sapiens
actaaccaaatgaaa

SEQ ID NO: 103545 - DNA, 15 bp, Homo sapiens
tactaaccaaatgaa

SEQ ID NO: 103546 - DNA, 15 bp, Homo sapiens
ctactaaccaaatga

SEQ ID NO: 103547 - DNA, 15 bp, Homo sapiens
actactaaccaaatg

SEQ ID NO: 103548 - DNA, 15 bp, Homo sapiens
tactactaaccaaat

SEQ ID NO: 103549 - DNA, 15 bp, Homo sapiens
atactactaaccaaa

SEQ ID NO: 103550 - DNA, 15 bp, Homo sapiens
aatactactaaccaa

SEQ ID NO: 103551 - DNA, 15 bp, Homo sapiens
taatactactaacca

SEQ ID NO: 103552 - DNA, 15 bp, Homo sapiens
ataatactactaacc

SEQ ID NO: 103553 - DNA, 15 bp, Homo sapiens
cataatactactaac

SEQ ID NO: 103554 - DNA, 15 bp, Homo sapiens
ccataatactactaa

SEQ ID NO: 103555 - DNA, 15 bp, Homo sapiens
gccataatactacta

SEQ ID NO: 103556 - DNA, 15 bp, Homo sapiens
tgccataatactact

SEQ ID NO: 103557 - DNA, 15 bp, Homo sapiens
ctgccataatactac

SEQ ID NO: 103558 - DNA, 15 bp, Homo sapiens
gctgccataatacta

SEQ ID NO: 103559 - DNA, 15 bp, Homo sapiens
agctgccataatact

SEQ ID NO: 103560 - DNA, 15 bp, Homo sapiens
tagctgccataatac

SEQ ID NO: 103561 - DNA, 15 bp, Homo sapiens
ctagctgccataata

SEQ ID NO: 103562 - DNA, 15 bp, Homo sapiens
gctagctgccataat

SEQ ID NO: 103563 - DNA, 15 bp, Homo sapiens
tgctagctgccataa

SEQ ID NO: 103564 - DNA, 15 bp, Homo sapiens
ctgctagctgccata

SEQ ID NO: 103565 - DNA, 15 bp, Homo sapiens
gctgctagctgccat

SEQ ID NO: 103566 - DNA, 15 bp, Homo sapiens
agctgctagctgcca

SEQ ID NO: 103567 - DNA, 15 bp, Homo sapiens
tagctgctagctgcc

SEQ ID NO: 103568 - DNA, 15 bp, Homo sapiens
ttagctgctagctgc

SEQ ID NO: 103569 - DNA, 15 bp, Homo sapiens
tttagctgctagctg

SEQ ID NO: 103570 - DNA, 15 bp, Homo sapiens
atttagctgctagct

SEQ ID NO: 103571 - DNA, 15 bp, Homo sapiens
tatttagctgctagc

SEQ ID NO: 103572 - DNA, 15 bp, Homo sapiens
atatttagctgctag

SEQ ID NO: 103573 - DNA, 15 bp, Homo sapiens
catatttagctgcta

SEQ ID NO: 103574 - DNA, 15 bp, Homo sapiens
tcatatttagctgct

SEQ ID NO: 103575 - DNA, 15 bp, Homo sapiens
atcatatttagctgc

SEQ ID NO: 103576 - DNA, 15 bp, Homo sapiens
tatcatatttagctg

SEQ ID NO: 103577 - DNA, 15 bp, Homo sapiens
ttatcatatttagct

SEQ ID NO: 103578 - DNA, 15 bp, Homo sapiens
tttatcatatttagc

SEQ ID NO: 103579 - DNA, 15 bp, Homo sapiens
ctttatcatatttag

SEQ ID NO: 103580 - DNA, 15 bp, Homo sapiens
actttatcatattta

SEQ ID NO: 103581 - DNA, 15 bp, Homo sapiens
cactttatcatattt

SEQ ID NO: 103582 - DNA, 15 bp, Homo sapiens
acactttatcatatt

SEQ ID NO: 103583 - DNA, 15 bp, Homo sapiens
tacactttatcatat

SEQ ID NO: 103584 - DNA, 15 bp, Homo sapiens
gtacactttatcata

SEQ ID NO: 103585 - DNA, 15 bp, Homo sapiens
tgtacactttatcat

SEQ ID NO: 103586 - DNA, 15 bp, Homo sapiens
ttgtacactttatca

SEQ ID NO: 103587 - DNA, 15 bp, Homo sapiens
attgtacactttatc

SEQ ID NO: 103588 - DNA, 15 bp, Homo sapiens
gattgtacactttat

SEQ ID NO: 103589 - DNA, 15 bp, Homo sapiens
tgattgtacacttta

SEQ ID NO: 103590 - DNA, 15 bp, Homo sapiens
ttgattgtacacttt

SEQ ID NO: 103591 - DNA, 15 bp, Homo sapiens
tttgattgtacactt

SEQ ID NO: 103592 - DNA, 15 bp, Homo sapiens
ttttgattgtacact

SEQ ID NO: 103593 - DNA, 15 bp, Homo sapiens
cttttgattgtacac

SEQ ID NO: 103594 - DNA, 15 bp, Homo sapiens
ccttttgattgtaca

SEQ ID NO: 103595 - DNA, 15 bp, Homo sapiens
tccttttgattgtac

SEQ ID NO: 103596 - DNA, 15 bp, Homo sapiens
atccttttgattgta

SEQ ID NO: 103597 - DNA, 15 bp, Homo sapiens
tatccttttgattgt

SEQ ID NO: 103598 - DNA, 15 bp, Homo sapiens
atatccttttgattg

SEQ ID NO: 103599 - DNA, 15 bp, Homo sapiens
aatatccttttgatt

SEQ ID NO: 103600 - DNA, 15 bp, Homo sapiens
aaatatccttttgat

SEQ ID NO: 103601 - DNA, 15 bp, Homo sapiens
aaaatatccttttga

SEQ ID NO: 103602 - DNA, 15 bp, Homo sapiens
aaaaatatccttttg

SEQ ID NO: 103603 - DNA, 15 bp, Homo sapiens
taaaaatatcctttt

SEQ ID NO: 103604 - DNA, 15 bp, Homo sapiens
ttaaaaatatccttt

SEQ ID NO: 103605 - DNA, 15 bp, Homo sapiens
attaaaaatatcctt

SEQ ID NO: 103606 - DNA, 15 bp, Homo sapiens
cattaaaaatatcct

SEQ ID NO: 103607 - DNA, 15 bp, Homo sapiens
tcattaaaaatatcc

SEQ ID NO: 103608 - DNA, 15 bp, Homo sapiens
ttcattaaaaatatc

SEQ ID NO: 103609 - DNA, 15 bp, Homo sapiens
cttcattaaaaatat

SEQ ID NO: 103610 - DNA, 15 bp, Homo sapiens
tcttcattaaaaata

SEQ ID NO: 103611 - DNA, 15 bp, Homo sapiens
atcttcattaaaaat

SEQ ID NO: 103612 - DNA, 15 bp, Homo sapiens
tatcttcattaaaaa

SEQ ID NO: 103613 - DNA, 15 bp, Homo sapiens
atatcttcattaaaa

SEQ ID NO: 103614 - DNA, 15 bp, Homo sapiens
aatatcttcattaaa

SEQ ID NO: 103615 - DNA, 15 bp, Homo sapiens
taatatcttcattaa

SEQ ID NO: 103616 - DNA, 15 bp, Homo sapiens
ctaatatcttcatta

SEQ ID NO: 103617 - DNA, 15 bp, Homo sapiens
actaatatcttcatt

SEQ ID NO: 103618 - DNA, 15 bp, Homo sapiens
cactaatatcttcat

SEQ ID NO: 103619 - DNA, 15 bp, Homo sapiens
ccactaatatcttca

SEQ ID NO: 103620 - DNA, 15 bp, Homo sapiens
accactaatatcttc

SEQ ID NO: 103621 - DNA, 15 bp, Homo sapiens
gaccactaatatctt

SEQ ID NO: 103622 - DNA, 15 bp, Homo sapiens
agaccactaatatct

SEQ ID NO: 103623 - DNA, 15 bp, Homo sapiens
tagaccactaatatc

SEQ ID NO: 103624 - DNA, 15 bp, Homo sapiens
ttagaccactaatat

SEQ ID NO: 103625 - DNA, 15 bp, Homo sapiens
gttagaccactaata

SEQ ID NO: 103626 - DNA, 15 bp, Homo sapiens
tgttagaccactaat

SEQ ID NO: 103627 - DNA, 15 bp, Homo sapiens
atgttagaccactaa

SEQ ID NO: 103628 - DNA, 15 bp, Homo sapiens
catgttagaccacta

SEQ ID NO: 103629 - DNA, 15 bp, Homo sapiens
acatgttagaccact

SEQ ID NO: 103630 - DNA, 15 bp, Homo sapiens
gacatgttagaccac

SEQ ID NO: 103631 - DNA, 15 bp, Homo sapiens
tgacatgttagacca

SEQ ID NO: 103632 - DNA, 15 bp, Homo sapiens
atgacatgttagacc

SEQ ID NO: 103633 - DNA, 15 bp, Homo sapiens
aatgacatgttagac

SEQ ID NO: 103634 - DNA, 15 bp, Homo sapiens
aaatgacatgttaga

SEQ ID NO: 103635 - DNA, 15 bp, Homo sapiens
gaaatgacatgttag

SEQ ID NO: 103636 - DNA, 15 bp, Homo sapiens
tgaaatgacatgtta

SEQ ID NO: 103637 - DNA, 15 bp, Homo sapiens
ctgaaatgacatgtt

SEQ ID NO: 103638 - DNA, 15 bp, Homo sapiens
tctgaaatgacatgt

SEQ ID NO: 103639 - DNA, 15 bp, Homo sapiens
atctgaaatgacatg

SEQ ID NO: 103640 - DNA, 15 bp, Homo sapiens
tatctgaaatgacat

SEQ ID NO: 103641 - DNA, 15 bp, Homo sapiens
gtatctgaaatgaca

SEQ ID NO: 103642 - DNA, 15 bp, Homo sapiens
tgtatctgaaatgac

SEQ ID NO: 103643 - DNA, 15 bp, Homo sapiens
atgtatctgaaatga

SEQ ID NO: 103644 - DNA, 15 bp, Homo sapiens
tatgtatctgaaatg

SEQ ID NO: 103645 - DNA, 15 bp, Homo sapiens
ctatgtatctgaaat

SEQ ID NO: 103646 - DNA, 15 bp, Homo sapiens
gctatgtatctgaaa

SEQ ID NO: 103647 - DNA, 15 bp, Homo sapiens
agctatgtatctgaa

SEQ ID NO: 103648 - DNA, 15 bp, Homo sapiens
cagctatgtatctga

SEQ ID NO: 103649 - DNA, 15 bp, Homo sapiens
tcagctatgtatctg

SEQ ID NO: 103650 - DNA, 15 bp, Homo sapiens
ttcagctatgtatct

SEQ ID NO: 103651 - DNA, 15 bp, Homo sapiens
tttcagctatgtatc

SEQ ID NO: 103652 - DNA, 15 bp, Homo sapiens
atttcagctatgtat

SEQ ID NO: 103653 - DNA, 15 bp, Homo sapiens
catttcagctatgta

SEQ ID NO: 103654 - DNA, 15 bp, Homo sapiens
acatttcagctatgt

SEQ ID NO: 103655 - DNA, 15 bp, Homo sapiens
tacatttcagctatg

SEQ ID NO: 103656 - DNA, 15 bp, Homo sapiens
ctacatttcagctat

SEQ ID NO: 103657 - DNA, 15 bp, Homo sapiens
actacatttcagcta

SEQ ID NO: 103658 - DNA, 15 bp, Homo sapiens
tactacatttcagct

SEQ ID NO: 103659 - DNA, 15 bp, Homo sapiens
ttactacatttcagc

SEQ ID NO: 103660 - DNA, 15 bp, Homo sapiens
tttactacatttcag

SEQ ID NO: 103661 - DNA, 15 bp, Homo sapiens
ttttactacatttca

SEQ ID NO: 103662 - DNA, 15 bp, Homo sapiens
attttactacatttc

SEQ ID NO: 103663 - DNA, 15 bp, Homo sapiens
gattttactacattt

SEQ ID NO: 103664 - DNA, 15 bp, Homo sapiens
tgattttactacatt

SEQ ID NO: 103665 - DNA, 15 bp, Homo sapiens
ctgattttactacat

SEQ ID NO: 103666 - DNA, 15 bp, Homo sapiens
actgattttactaca

SEQ ID NO: 103667 - DNA, 15 bp, Homo sapiens
aactgattttactac

SEQ ID NO: 103668 - DNA, 15 bp, Homo sapiens
aaactgattttacta

SEQ ID NO: 103669 - DNA, 15 bp, Homo sapiens
aaaactgattttact

SEQ ID NO: 103670 - DNA, 15 bp, Homo sapiens
taaaactgattttac

SEQ ID NO: 103671 - DNA, 15 bp, Homo sapiens
gtaaaactgatttta

SEQ ID NO: 103672 - DNA, 15 bp, Homo sapiens
agtaaaactgatttt

SEQ ID NO: 103673 - DNA, 15 bp, Homo sapiens
tagtaaaactgattt

SEQ ID NO: 103674 - DNA, 15 bp, Homo sapiens
gtagtaaaactgatt

SEQ ID NO: 103675 - DNA, 15 bp, Homo sapiens
tgtagtaaaactgat

SEQ ID NO: 103676 - DNA, 15 bp, Homo sapiens
ttgtagtaaaactga

SEQ ID NO: 103677 - DNA, 15 bp, Homo sapiens
tttgtagtaaaactg

SEQ ID NO: 103678 - DNA, 15 bp, Homo sapiens
atttgtagtaaaact

SEQ ID NO: 103679 - DNA, 15 bp, Homo sapiens
tatttgtagtaaaac

SEQ ID NO: 103680 - DNA, 15 bp, Homo sapiens
ttatttgtagtaaaa

SEQ ID NO: 103681 - DNA, 15 bp, Homo sapiens
tttatttgtagtaaa

SEQ ID NO: 103682 - DNA, 15 bp, Homo sapiens
gtttatttgtagtaa

SEQ ID NO: 103683 - DNA, 15 bp, Homo sapiens
agtttatttgtagta

SEQ ID NO: 103684 - DNA, 15 bp, Homo sapiens
aagtttatttgtagt

SEQ ID NO: 103685 - DNA, 15 bp, Homo sapiens
caagtttatttgtag

SEQ ID NO: 103686 - DNA, 15 bp, Homo sapiens
gcaagtttatttgta

SEQ ID NO: 103687 - DNA, 15 bp, Homo sapiens
tgcaagtttatttgt

SEQ ID NO: 103688 - DNA, 15 bp, Homo sapiens
atgcaagtttatttg

SEQ ID NO: 103689 - DNA, 15 bp, Homo sapiens
tatgcaagtttattt

SEQ ID NO: 103690 - DNA, 15 bp, Homo sapiens
ttatgcaagtttatt

SEQ ID NO: 103691 - DNA, 15 bp, Homo sapiens
cttatgcaagtttat

SEQ ID NO: 103692 - DNA, 15 bp, Homo sapiens
ccttatgcaagttta

SEQ ID NO: 103693 - DNA, 15 bp, Homo sapiens
accttatgcaagttt

SEQ ID NO: 103694 - DNA, 15 bp, Homo sapiens
aaccttatgcaagtt

SEQ ID NO: 103695 - DNA, 15 bp, Homo sapiens
aaaccttatgcaagt

SEQ ID NO: 103696 - DNA, 15 bp, Homo sapiens
taaaccttatgcaag

SEQ ID NO: 103697 - DNA, 15 bp, Homo sapiens
ataaaccttatgcaa

SEQ ID NO: 103698 - DNA, 15 bp, Homo sapiens
tataaaccttatgca

SEQ ID NO: 103699 - DNA, 15 bp, Homo sapiens
ttataaaccttatgc

SEQ ID NO: 103700 - DNA, 15 bp, Homo sapiens
tttataaaccttatg

SEQ ID NO: 103701 - DNA, 15 bp, Homo sapiens
atttataaaccttat

SEQ ID NO: 103702 - DNA, 15 bp, Homo sapiens
aatttataaacctta

SEQ ID NO: 103703 - DNA, 15 bp, Homo sapiens
aaatttataaacctt

SEQ ID NO: 103704 - DNA, 15 bp, Homo sapiens
taaatttataaacct

SEQ ID NO: 103705 - DNA, 15 bp, Homo sapiens
ataaatttataaacc

SEQ ID NO: 103706 - DNA, 15 bp, Homo sapiens
tataaatttataaac

SEQ ID NO: 103707 - DNA, 15 bp, Homo sapiens
ttataaatttataaa

SEQ ID NO: 103708 - DNA, 15 bp, Homo sapiens
cttataaatttataa

SEQ ID NO: 103709 - DNA, 15 bp, Homo sapiens
acttataaatttata

SEQ ID NO: 103710 - DNA, 15 bp, Homo sapiens
aacttataaatttat

SEQ ID NO: 103711 - DNA, 15 bp, Homo sapiens
aaacttataaattta

SEQ ID NO: 103712 - DNA, 15 bp, Homo sapiens
taaacttataaattt

SEQ ID NO: 103713 - DNA, 15 bp, Homo sapiens
ataaacttataaatt

SEQ ID NO: 103714 - DNA, 15 bp, Homo sapiens
tataaacttataaat

SEQ ID NO: 103715 - DNA, 15 bp, Homo sapiens
ttataaacttataaa

SEQ ID NO: 103716 - DNA, 15 bp, Homo sapiens
tttataaacttataa

SEQ ID NO: 103717 - DNA, 15 bp, Homo sapiens
atttataaacttata

SEQ ID NO: 103718 - DNA, 15 bp, Homo sapiens
gatttataaacttat

SEQ ID NO: 103719 - DNA, 15 bp, Homo sapiens
tgatttataaactta

SEQ ID NO: 103720 - DNA, 15 bp, Homo sapiens
ttgatttataaactt

SEQ ID NO: 103721 - DNA, 15 bp, Homo sapiens
gttgatttataaact

SEQ ID NO: 103722 - DNA, 15 bp, Homo sapiens
agttgatttataaac

SEQ ID NO: 103723 - DNA, 15 bp, Homo sapiens
aagttgatttataaa

SEQ ID NO: 103724 - DNA, 15 bp, Homo sapiens
caagttgatttataa

SEQ ID NO: 103725 - DNA, 15 bp, Homo sapiens
ccaagttgatttata

SEQ ID NO: 103726 - DNA, 15 bp, Homo sapiens
cccaagttgatttat

SEQ ID NO: 103727 - DNA, 15 bp, Homo sapiens
acccaagttgattta

SEQ ID NO: 103728 - DNA, 15 bp, Homo sapiens
tacccaagttgattt

SEQ ID NO: 103729 - DNA, 15 bp, Homo sapiens
ttacccaagttgatt

SEQ ID NO: 103730 - DNA, 15 bp, Homo sapiens
tttacccaagttgat

SEQ ID NO: 103731 - DNA, 15 bp, Homo sapiens
ctttacccaagttga

SEQ ID NO: 103732 - DNA, 15 bp, Homo sapiens
actttacccaagttg

SEQ ID NO: 103733 - DNA, 15 bp, Homo sapiens
cactttacccaagtt

SEQ ID NO: 103734 - DNA, 15 bp, Homo sapiens
acactttacccaagt

SEQ ID NO: 103735 - DNA, 15 bp, Homo sapiens
tacactttacccaag

SEQ ID NO: 103736 - DNA, 15 bp, Homo sapiens
ttacactttacccaa

SEQ ID NO: 103737 - DNA, 15 bp, Homo sapiens
tttacactttaccca

SEQ ID NO: 103738 - DNA, 15 bp, Homo sapiens
atttacactttaccc

SEQ ID NO: 103739 - DNA, 15 bp, Homo sapiens
tatttacactttacc

SEQ ID NO: 103740 - DNA, 15 bp, Homo sapiens
ttatttacactttac

SEQ ID NO: 103741 - DNA, 15 bp, Homo sapiens
tttatttacacttta

SEQ ID NO: 103742 - DNA, 15 bp, Homo sapiens
gtttatttacacttt

SEQ ID NO: 103743 - DNA, 15 bp, Homo sapiens
agtttatttacactt

SEQ ID NO: 103744 - DNA, 15 bp, Homo sapiens
aagtttatttacact

SEQ ID NO: 103745 - DNA, 15 bp, Homo sapiens
caagtttatttacac

SEQ ID NO: 103746 - DNA, 15 bp, Homo sapiens
gcaagtttatttaca

SEQ ID NO: 103747 - DNA, 15 bp, Homo sapiens
tgcaagtttatttac

SEQ ID NO: 103748 - DNA, 15 bp, Homo sapiens
gtgcaagtttattta

SEQ ID NO: 103749 - DNA, 15 bp, Homo sapiens
agtgcaagtttattt

SEQ ID NO: 103750 - DNA, 15 bp, Homo sapiens
gagtgcaagtttatt

SEQ ID NO: 103751 - DNA, 15 bp, Homo sapiens
cgagtgcaagtttat

SEQ ID NO: 103752 - DNA, 15 bp, Homo sapiens
acgagtgcaagttta

SEQ ID NO: 103753 - DNA, 15 bp, Homo sapiens
cacgagtgcaagttt

SEQ ID NO: 103754 - DNA, 15 bp, Homo sapiens
ccacgagtgcaagtt

SEQ ID NO: 103755 - DNA, 15 bp, Homo sapiens
accacgagtgcaagt

SEQ ID NO: 103756 - DNA, 15 bp, Homo sapiens
aaccacgagtgcaag

SEQ ID NO: 103757 - DNA, 15 bp, Homo sapiens
aaaccacgagtgcaa

SEQ ID NO: 103758 - DNA, 15 bp, Homo sapiens
gaaaccacgagtgca

SEQ ID NO: 103759 - DNA, 15 bp, Homo sapiens
agaaaccacgagtgc

SEQ ID NO: 103760 - DNA, 15 bp, Homo sapiens
gagaaaccacgagtg

SEQ ID NO: 103761 - DNA, 15 bp, Homo sapiens
agagaaaccacgagt

SEQ ID NO: 103762 - DNA, 15 bp, Homo sapiens
cagagaaaccacgag

SEQ ID NO: 103763 - DNA, 15 bp, Homo sapiens
tcagagaaaccacga

SEQ ID NO: 103764 - DNA, 15 bp, Homo sapiens
ttcagagaaaccacg

SEQ ID NO: 103765 - DNA, 15 bp, Homo sapiens
cttcagagaaaccac

SEQ ID NO: 103766 - DNA, 15 bp, Homo sapiens
acttcagagaaacca

SEQ ID NO: 103767 - DNA, 15 bp, Homo sapiens
gacttcagagaaacc

SEQ ID NO: 103768 - DNA, 15 bp, Homo sapiens
agacttcagagaaac

SEQ ID NO: 103769 - DNA, 15 bp, Homo sapiens
gagacttcagagaaa

SEQ ID NO: 103770 - DNA, 15 bp, Homo sapiens
ggagacttcagagaa

SEQ ID NO: 103771 - DNA, 15 bp, Homo sapiens
aggagacttcagaga

SEQ ID NO: 103772 - DNA, 15 bp, Homo sapiens
caggagacttcagag

SEQ ID NO: 103773 - DNA, 15 bp, Homo sapiens
tcaggagacttcaga

SEQ ID NO: 103774 - DNA, 15 bp, Homo sapiens
ctcaggagacttcag

SEQ ID NO: 103775 - DNA, 15 bp, Homo sapiens
gctcaggagacttca

SEQ ID NO: 103776 - DNA, 15 bp, Homo sapiens
agctcaggagacttc

SEQ ID NO: 103777 - DNA, 15 bp, Homo sapiens
tagctcaggagactt

SEQ ID NO: 103778 - DNA, 15 bp, Homo sapiens
ttagctcaggagact

SEQ ID NO: 103779 - DNA, 15 bp, Homo sapiens
gttagctcaggagac

SEQ ID NO: 103780 - DNA, 15 bp, Homo sapiens
agttagctcaggaga

SEQ ID NO: 103781 - DNA, 15 bp, Homo sapiens
aagttagctcaggag

SEQ ID NO: 103782 - DNA, 15 bp, Homo sapiens
aaagttagctcagga

SEQ ID NO: 103783 - DNA, 15 bp, Homo sapiens
caaagttagctcagg

SEQ ID NO: 103784 - DNA, 15 bp, Homo sapiens
gcaaagttagctcag

SEQ ID NO: 103785 - DNA, 15 bp, Homo sapiens
tgcaaagttagctca

SEQ ID NO: 103786 - DNA, 15 bp, Homo sapiens
atgcaaagttagctc

SEQ ID NO: 103787 - DNA, 15 bp, Homo sapiens
tatgcaaagttagct

SEQ ID NO: 103788 - DNA, 15 bp, Homo sapiens
ttatgcaaagttagc

SEQ ID NO: 103789 - DNA, 15 bp, Homo sapiens
tttatgcaaagttag

SEQ ID NO: 103790 - DNA, 15 bp, Homo sapiens
ctttatgcaaagtta

SEQ ID NO: 103791 - DNA, 15 bp, Homo sapiens
cctttatgcaaagtt

SEQ ID NO: 103792 - DNA, 15 bp, Homo sapiens
acctttatgcaaagt

SEQ ID NO: 103793 - DNA, 15 bp, Homo sapiens
cacctttatgcaaag

SEQ ID NO: 103794 - DNA, 15 bp, Homo sapiens
acacctttatgcaaa

SEQ ID NO: 103795 - DNA, 15 bp, Homo sapiens
aacacctttatgcaa

SEQ ID NO: 103796 - DNA, 15 bp, Homo sapiens
taacacctttatgca

SEQ ID NO: 103797 - DNA, 15 bp, Homo sapiens
ataacacctttatgc

SEQ ID NO: 103798 - DNA, 15 bp, Homo sapiens
aataacacctttatg

SEQ ID NO: 103799 - DNA, 15 bp, Homo sapiens
gaataacacctttat

SEQ ID NO: 103800 - DNA, 15 bp, Homo sapiens
agaataacaccttta

SEQ ID NO: 103801 - DNA, 15 bp, Homo sapiens
cagaataacaccttt

SEQ ID NO: 103802 - DNA, 15 bp, Homo sapiens
acagaataacacctt

SEQ ID NO: 103803 - DNA, 15 bp, Homo sapiens
tacagaataacacct

SEQ ID NO: 103804 - DNA, 15 bp, Homo sapiens
gtacagaataacacc

SEQ ID NO: 103805 - DNA, 15 bp, Homo sapiens
agtacagaataacac

SEQ ID NO: 103806 - DNA, 15 bp, Homo sapiens
aagtacagaataaca

SEQ ID NO: 103807 - DNA, 15 bp, Homo sapiens
gaagtacagaataac

SEQ ID NO: 103808 - DNA, 15 bp, Homo sapiens
cgaagtacagaataa

SEQ ID NO: 103809 - DNA, 15 bp, Homo sapiens
tcgaagtacagaata

SEQ ID NO: 103810 - DNA, 15 bp, Homo sapiens
ctcgaagtacagaat

SEQ ID NO: 103811 - DNA, 15 bp, Homo sapiens
cctcgaagtacagaa

SEQ ID NO: 103812 - DNA, 15 bp, Homo sapiens
tcctcgaagtacaga

SEQ ID NO: 103813 - DNA, 15 bp, Homo sapiens
ttcctcgaagtacag

SEQ ID NO: 103814 - DNA, 15 bp, Homo sapiens
cttcctcgaagtaca

SEQ ID NO: 103815 - DNA, 15 bp, Homo sapiens
acttcctcgaagtac

SEQ ID NO: 103816 - DNA, 15 bp, Homo sapiens
cacttcctcgaagta

SEQ ID NO: 103817 - DNA, 15 bp, Homo sapiens
tcacttcctcgaagt

SEQ ID NO: 103818 - DNA, 15 bp, Homo sapiens
ttcacttcctcgaag

SEQ ID NO: 103819 - DNA, 15 bp, Homo sapiens
attcacttcctcgaa

SEQ ID NO: 103820 - DNA, 15 bp, Homo sapiens
aattcacttcctcga

SEQ ID NO: 103821 - DNA, 15 bp, Homo sapiens
taattcacttcctcg

SEQ ID NO: 103822 - DNA, 15 bp, Homo sapiens
ataattcacttcctc

SEQ ID NO: 103823 - DNA, 15 bp, Homo sapiens
aataattcacttcct

SEQ ID NO: 103824 - DNA, 15 bp, Homo sapiens
caataattcacttcc

SEQ ID NO: 103825 - DNA, 15 bp, Homo sapiens
ccaataattcacttc

SEQ ID NO: 103826 - DNA, 15 bp, Homo sapiens
cccaataattcactt

SEQ ID NO: 103827 - DNA, 15 bp, Homo sapiens
ccccaataattcact

SEQ ID NO: 103828 - DNA, 15 bp, Homo sapiens
accccaataattcac

SEQ ID NO: 103829 - DNA, 15 bp, Homo sapiens
gaccccaataattca

SEQ ID NO: 103830 - DNA, 15 bp, Homo sapiens
tgaccccaataattc

SEQ ID NO: 103831 - DNA, 15 bp, Homo sapiens
ttgaccccaataatt

SEQ ID NO: 103832 - DNA, 15 bp, Homo sapiens
gttgaccccaataat

SEQ ID NO: 103833 - DNA, 15 bp, Homo sapiens
ggttgaccccaataa

SEQ ID NO: 103834 - DNA, 15 bp, Homo sapiens
tggttgaccccaata

SEQ ID NO: 103835 - DNA, 15 bp, Homo sapiens
gtggttgaccccaat

SEQ ID NO: 103836 - DNA, 15 bp, Homo sapiens
tgtggttgaccccaa

SEQ ID NO: 103837 - DNA, 15 bp, Homo sapiens
atgtggttgacccca

SEQ ID NO: 103838 - DNA, 15 bp, Homo sapiens
aatgtggttgacccc

SEQ ID NO: 103839 - DNA, 15 bp, Homo sapiens
aaatgtggttgaccc

SEQ ID NO: 103840 - DNA, 15 bp, Homo sapiens
aaaatgtggttgacc

SEQ ID NO: 103841 - DNA, 15 bp, Homo sapiens
aaaaatgtggttgac

SEQ ID NO: 103842 - DNA, 15 bp, Homo sapiens
aaaaaatgtggttga

SEQ ID NO: 103843 - DNA, 15 bp, Homo sapiens
aaaaaaatgtggttg

SEQ ID NO: 103844 - DNA, 15 bp, Homo sapiens
aaaaaaaatgtggtt

SEQ ID NO: 103845 - DNA, 15 bp, Homo sapiens
gaaaaaaaatgtggt

SEQ ID NO: 103846 - DNA, 15 bp, Homo sapiens
ggaaaaaaaatgtgg

SEQ ID NO: 103847 - DNA, 15 bp, Homo sapiens
aggaaaaaaaatgtg

SEQ ID NO: 103848 - DNA, 15 bp, Homo sapiens
aaggaaaaaaaatgt

SEQ ID NO: 103849 - DNA, 15 bp, Homo sapiens
gaaggaaaaaaaatg

SEQ ID NO: 103850 - DNA, 15 bp, Homo sapiens
ggaaggaaaaaaaat

SEQ ID NO: 103851 - DNA, 15 bp, Homo sapiens
aggaaggaaaaaaaa

SEQ ID NO: 103852 - DNA, 15 bp, Homo sapiens
taggaaggaaaaaaa

SEQ ID NO: 103853 - DNA, 15 bp, Homo sapiens
gtaggaaggaaaaaa

SEQ ID NO: 103854 - DNA, 15 bp, Homo sapiens
tgtaggaaggaaaaa

SEQ ID NO: 103855 - DNA, 15 bp, Homo sapiens
ctgtaggaaggaaaa

SEQ ID NO: 103856 - DNA, 15 bp, Homo sapiens
actgtaggaaggaaa

SEQ ID NO: 103857 - DNA, 15 bp, Homo sapiens
gactgtaggaaggaa

SEQ ID NO: 103858 - DNA, 15 bp, Homo sapiens
agactgtaggaagga

SEQ ID NO: 103859 - DNA, 15 bp, Homo sapiens
cagactgtaggaagg

SEQ ID NO: 103860 - DNA, 15 bp, Homo sapiens
tcagactgtaggaag

SEQ ID NO: 103861 - DNA, 15 bp, Homo sapiens
atcagactgtaggaa

SEQ ID NO: 103862 - DNA, 15 bp, Homo sapiens
aatcagactgtagga

SEQ ID NO: 103863 - DNA, 15 bp, Homo sapiens
caatcagactgtagg

SEQ ID NO: 103864 - DNA, 15 bp, Homo sapiens
gcaatcagactgtag

SEQ ID NO: 103865 - DNA, 15 bp, Homo sapiens
ggcaatcagactgta

SEQ ID NO: 103866 - DNA, 15 bp, Homo sapiens
gggcaatcagactgt

SEQ ID NO: 103867 - DNA, 15 bp, Homo sapiens
agggcaatcagactg

SEQ ID NO: 103868 - DNA, 15 bp, Homo sapiens
aagggcaatcagact

SEQ ID NO: 103869 - DNA, 15 bp, Homo sapiens
aaagggcaatcagac

SEQ ID NO: 103870 - DNA, 15 bp, Homo sapiens
aaaagggcaatcaga

SEQ ID NO: 103871 - DNA, 15 bp, Homo sapiens
aaaaagggcaatcag

SEQ ID NO: 103872 - DNA, 15 bp, Homo sapiens
taaaaagggcaatca

SEQ ID NO: 103873 - DNA, 15 bp, Homo sapiens
ctaaaaagggcaatc

SEQ ID NO: 103874 - DNA, 15 bp, Homo sapiens
actaaaaagggcaat

SEQ ID NO: 103875 - DNA, 15 bp, Homo sapiens
aactaaaaagggcaa

SEQ ID NO: 103876 - DNA, 15 bp, Homo sapiens
aaactaaaaagggca

SEQ ID NO: 103877 - DNA, 15 bp, Homo sapiens
aaaactaaaaagggc

SEQ ID NO: 103878 - DNA, 15 bp, Homo sapiens
aaaaactaaaaaggg

SEQ ID NO: 103879 - DNA, 15 bp, Homo sapiens
taaaaactaaaaagg

SEQ ID NO: 103880 - DNA, 15 bp, Homo sapiens
ctaaaaactaaaaag

SEQ ID NO: 103881 - DNA, 15 bp, Homo sapiens
cctaaaaactaaaaa

SEQ ID NO: 103882 - DNA, 15 bp, Homo sapiens
tcctaaaaactaaaa

SEQ ID NO: 103883 - DNA, 15 bp, Homo sapiens
atcctaaaaactaaa

SEQ ID NO: 103884 - DNA, 15 bp, Homo sapiens
gatcctaaaaactaa

SEQ ID NO: 103885 - DNA, 15 bp, Homo sapiens
agatcctaaaaacta

SEQ ID NO: 103886 - DNA, 15 bp, Homo sapiens
aagatcctaaaaact

SEQ ID NO: 103887 - DNA, 15 bp, Homo sapiens
aaagatcctaaaaac

SEQ ID NO: 103888 - DNA, 15 bp, Homo sapiens
caaagatcctaaaaa

SEQ ID NO: 103889 - DNA, 15 bp, Homo sapiens
acaaagatcctaaaa

SEQ ID NO: 103890 - DNA, 15 bp, Homo sapiens
cacaaagatcctaaa

SEQ ID NO: 103891 - DNA, 15 bp, Homo sapiens
ccacaaagatcctaa

SEQ ID NO: 103892 - DNA, 15 bp, Homo sapiens
gccacaaagatccta

SEQ ID NO: 103893 - DNA, 15 bp, Homo sapiens
agccacaaagatcct

SEQ ID NO: 103894 - DNA, 15 bp, Homo sapiens
cagccacaaagatcc

SEQ ID NO: 103895 - DNA, 15 bp, Homo sapiens
gcagccacaaagatc

SEQ ID NO: 103896 - DNA, 15 bp, Homo sapiens
tgcagccacaaagat

SEQ ID NO: 103897 - DNA, 15 bp, Homo sapiens
atgcagccacaaaga

SEQ ID NO: 103898 - DNA, 15 bp, Homo sapiens
gatgcagccacaaag

SEQ ID NO: 103899 - DNA, 15 bp, Homo sapiens
tgatgcagccacaaa

SEQ ID NO: 103900 - DNA, 15 bp, Homo sapiens
atgatgcagccacaa

SEQ ID NO: 103901 - DNA, 15 bp, Homo sapiens
aatgatgcagccaca

SEQ ID NO: 103902 - DNA, 15 bp, Homo sapiens
aaatgatgcagccac

SEQ ID NO: 103903 - DNA, 15 bp, Homo sapiens
aaaatgatgcagcca

SEQ ID NO: 103904 - DNA, 15 bp, Homo sapiens
aaaaatgatgcagcc

SEQ ID NO: 103905 - DNA, 15 bp, Homo sapiens
gaaaaatgatgcagc

SEQ ID NO: 103906 - DNA, 15 bp, Homo sapiens
ggaaaaatgatgcag

SEQ ID NO: 103907 - DNA, 15 bp, Homo sapiens
gggaaaaatgatgca

SEQ ID NO: 103908 - DNA, 15 bp, Homo sapiens
ggggaaaaatgatgc

SEQ ID NO: 103909 - DNA, 15 bp, Homo sapiens
aggggaaaaatgatg

SEQ ID NO: 103910 - DNA, 15 bp, Homo sapiens
aaggggaaaaatgat

SEQ ID NO: 103911 - DNA, 15 bp, Homo sapiens
aaaggggaaaaatga

SEQ ID NO: 103912 - DNA, 15 bp, Homo sapiens
aaaaggggaaaaatg

SEQ ID NO: 103913 - DNA, 15 bp, Homo sapiens
caaaaggggaaaaat

SEQ ID NO: 103914 - DNA, 15 bp, Homo sapiens
tcaaaaggggaaaaa

SEQ ID NO: 103915 - DNA, 15 bp, Homo sapiens
ttcaaaaggggaaaa

SEQ ID NO: 103916 - DNA, 15 bp, Homo sapiens
gttcaaaaggggaaa

SEQ ID NO: 103917 - DNA, 15 bp, Homo sapiens
agttcaaaaggggaa

SEQ ID NO: 103918 - DNA, 15 bp, Homo sapiens
cagttcaaaagggga

SEQ ID NO: 103919 - DNA, 15 bp, Homo sapiens
acagttcaaaagggg

SEQ ID NO: 103920 - DNA, 15 bp, Homo sapiens
cacagttcaaaaggg

SEQ ID NO: 103921 - DNA, 15 bp, Homo sapiens
gcacagttcaaaagg

SEQ ID NO: 103922 - DNA, 15 bp, Homo sapiens
tgcacagttcaaaag

SEQ ID NO: 103923 - DNA, 15 bp, Homo sapiens
atgcacagttcaaaa

SEQ ID NO: 103924 - DNA, 15 bp, Homo sapiens
aatgcacagttcaaa

SEQ ID NO: 103925 - DNA, 15 bp, Homo sapiens
aaatgcacagttcaa

SEQ ID NO: 103926 - DNA, 15 bp, Homo sapiens
aaaatgcacagttca

SEQ ID NO: 103927 - DNA, 15 bp, Homo sapiens
gaaaatgcacagttc

SEQ ID NO: 103928 - DNA, 15 bp, Homo sapiens
agaaaatgcacagtt

SEQ ID NO: 103929 - DNA, 15 bp, Homo sapiens
tagaaaatgcacagt

SEQ ID NO: 103930 - DNA, 15 bp, Homo sapiens
ttagaaaatgcacag

SEQ ID NO: 103931 - DNA, 15 bp, Homo sapiens
gttagaaaatgcaca

SEQ ID NO: 103932 - DNA, 15 bp, Homo sapiens
ggttagaaaatgcac

SEQ ID NO: 103933 - DNA, 15 bp, Homo sapiens
gggttagaaaatgca

SEQ ID NO: 103934 - DNA, 15 bp, Homo sapiens
ggggttagaaaatgc

SEQ ID NO: 103935 - DNA, 15 bp, Homo sapiens
tggggttagaaaatg

SEQ ID NO: 103936 - DNA, 15 bp, Homo sapiens
atggggttagaaaat

SEQ ID NO: 103937 - DNA, 15 bp, Homo sapiens
tatggggttagaaaa

SEQ ID NO: 103938 - DNA, 15 bp, Homo sapiens
gtatggggttagaaa

SEQ ID NO: 103939 - DNA, 15 bp, Homo sapiens
agtatggggttagaa

SEQ ID NO: 103940 - DNA, 15 bp, Homo sapiens
aagtatggggttaga

SEQ ID NO: 103941 - DNA, 15 bp, Homo sapiens
taagtatggggttag

SEQ ID NO: 103942 - DNA, 15 bp, Homo sapiens
ttaagtatggggtta

SEQ ID NO: 103943 - DNA, 15 bp, Homo sapiens
tttaagtatggggtt

SEQ ID NO: 103944 - DNA, 15 bp, Homo sapiens
atttaagtatggggt

SEQ ID NO: 103945 - DNA, 15 bp, Homo sapiens
tatttaagtatgggg

SEQ ID NO: 103946 - DNA, 15 bp, Homo sapiens
atatttaagtatggg

SEQ ID NO: 103947 - DNA, 15 bp, Homo sapiens
aatatttaagtatgg

SEQ ID NO: 103948 - DNA, 15 bp, Homo sapiens
gaatatttaagtatg

SEQ ID NO: 103949 - DNA, 15 bp, Homo sapiens
agaatatttaagtat

SEQ ID NO: 103950 - DNA, 15 bp, Homo sapiens
gagaatatttaagta

SEQ ID NO: 103951 - DNA, 15 bp, Homo sapiens
tgagaatatttaagt

SEQ ID NO: 103952 - DNA, 15 bp, Homo sapiens
atgagaatatttaag

SEQ ID NO: 103953 - DNA, 15 bp, Homo sapiens
tatgagaatatttaa

SEQ ID NO: 103954 - DNA, 15 bp, Homo sapiens
ttatgagaatattta

SEQ ID NO: 103955 - DNA, 15 bp, Homo sapiens
gttatgagaatattt

SEQ ID NO: 103956 - DNA, 15 bp, Homo sapiens
ggttatgagaatatt

SEQ ID NO: 103957 - DNA, 15 bp, Homo sapiens
aggttatgagaatat

SEQ ID NO: 103958 - DNA, 15 bp, Homo sapiens
gaggttatgagaata

SEQ ID NO: 103959 - DNA, 15 bp, Homo sapiens
ggaggttatgagaat

SEQ ID NO: 103960 - DNA, 15 bp, Homo sapiens
tggaggttatgagaa

SEQ ID NO: 103961 - DNA, 15 bp, Homo sapiens
ttggaggttatgaga

SEQ ID NO: 103962 - DNA, 15 bp, Homo sapiens
tttggaggttatgag

SEQ ID NO: 103963 - DNA, 15 bp, Homo sapiens
atttggaggttatga

SEQ ID NO: 103964 - DNA, 15 bp, Homo sapiens
aatttggaggttatg

SEQ ID NO: 103965 - DNA, 15 bp, Homo sapiens
taatttggaggttat

SEQ ID NO: 103966 - DNA, 15 bp, Homo sapiens
ataatttggaggtta

SEQ ID NO: 103967 - DNA, 15 bp, Homo sapiens
aataatttggaggtt

SEQ ID NO: 103968 - DNA, 15 bp, Homo sapiens
taataatttggaggt

SEQ ID NO: 103969 - DNA, 15 bp, Homo sapiens
ttaataatttggagg

SEQ ID NO: 103970 - DNA, 15 bp, Homo sapiens
attaataatttggag

SEQ ID NO: 103971 - DNA, 15 bp, Homo sapiens
aattaataatttgga

SEQ ID NO: 103972 - DNA, 15 bp, Homo sapiens
taattaataatttgg

SEQ ID NO: 103973 - DNA, 15 bp, Homo sapiens
ctaattaataatttg

SEQ ID NO: 103974 - DNA, 15 bp, Homo sapiens
tctaattaataattt

SEQ ID NO: 103975 - DNA, 15 bp, Homo sapiens
atctaattaataatt

SEQ ID NO: 103976 - DNA, 15 bp, Homo sapiens
catctaattaataat

SEQ ID NO: 103977 - DNA, 15 bp, Homo sapiens
gcatctaattaataa

SEQ ID NO: 103978 - DNA, 15 bp, Homo sapiens
tgcatctaattaata

SEQ ID NO: 103979 - DNA, 15 bp, Homo sapiens
ttgcatctaattaat

SEQ ID NO: 103980 - DNA, 15 bp, Homo sapiens
gttgcatctaattaa

SEQ ID NO: 103981 - DNA, 15 bp, Homo sapiens
tgttgcatctaatta

SEQ ID NO: 103982 - DNA, 15 bp, Homo sapiens
atgttgcatctaatt

SEQ ID NO: 103983 - DNA, 15 bp, Homo sapiens
aatgttgcatctaat

SEQ ID NO: 103984 - DNA, 15 bp, Homo sapiens
gaatgttgcatctaa

SEQ ID NO: 103985 - DNA, 15 bp, Homo sapiens
tgaatgttgcatcta

SEQ ID NO: 103986 - DNA, 15 bp, Homo sapiens
ctgaatgttgcatct

SEQ ID NO: 103987 - DNA, 15 bp, Homo sapiens
actgaatgttgcatc

SEQ ID NO: 103988 - DNA, 15 bp, Homo sapiens
cactgaatgttgcat

SEQ ID NO: 103989 - DNA, 15 bp, Homo sapiens
ccactgaatgttgca

SEQ ID NO: 103990 - DNA, 15 bp, Homo sapiens
accactgaatgttgc

SEQ ID NO: 103991 - DNA, 15 bp, Homo sapiens
taccactgaatgttg

SEQ ID NO: 103992 - DNA, 15 bp, Homo sapiens
ataccactgaatgtt

SEQ ID NO: 103993 - DNA, 15 bp, Homo sapiens
tataccactgaatgt

SEQ ID NO: 103994 - DNA, 15 bp, Homo sapiens
atataccactgaatg

SEQ ID NO: 103995 - DNA, 15 bp, Homo sapiens
aatataccactgaat

SEQ ID NO: 103996 - DNA, 15 bp, Homo sapiens
taatataccactgaa

SEQ ID NO: 103997 - DNA, 15 bp, Homo sapiens
gtaatataccactga

SEQ ID NO: 103998 - DNA, 15 bp, Homo sapiens
agtaatataccactg

SEQ ID NO: 103999 - DNA, 15 bp, Homo sapiens
cagtaatataccact

SEQ ID NO: 104000 - DNA, 15 bp, Homo sapiens
ccagtaatataccac

SEQ ID NO: 104001 - DNA, 15 bp, Homo sapiens
tccagtaatatacca

SEQ ID NO: 104002 - DNA, 15 bp, Homo sapiens
ctccagtaatatacc

SEQ ID NO: 104003 - DNA, 15 bp, Homo sapiens
actccagtaatatac

SEQ ID NO: 104004 - DNA, 15 bp, Homo sapiens
aactccagtaatata

SEQ ID NO: 104005 - DNA, 15 bp, Homo sapiens
aaactccagtaatat

SEQ ID NO: 104006 - DNA, 15 bp, Homo sapiens
gaaactccagtaata

SEQ ID NO: 104007 - DNA, 15 bp, Homo sapiens
agaaactccagtaat

SEQ ID NO: 104008 - DNA, 15 bp, Homo sapiens
cagaaactccagtaa

SEQ ID NO: 104009 - DNA, 15 bp, Homo sapiens
tcagaaactccagta

SEQ ID NO: 104010 - DNA, 15 bp, Homo sapiens
atcagaaactccagt

SEQ ID NO: 104011 - DNA, 15 bp, Homo sapiens
aatcagaaactccag

SEQ ID NO: 104012 - DNA, 15 bp, Homo sapiens
aaatcagaaactcca

SEQ ID NO: 104013 - DNA, 15 bp, Homo sapiens
gaaatcagaaactcc

SEQ ID NO: 104014 - DNA, 15 bp, Homo sapiens
agaaatcagaaactc

SEQ ID NO: 104015 - DNA, 15 bp, Homo sapiens
cagaaatcagaaact

SEQ ID NO: 104016 - DNA, 15 bp, Homo sapiens
gcagaaatcagaaac

SEQ ID NO: 104017 - DNA, 15 bp, Homo sapiens
ggcagaaatcagaaa

SEQ ID NO: 104018 - DNA, 15 bp, Homo sapiens
gggcagaaatcagaa

SEQ ID NO: 104019 - DNA, 15 bp, Homo sapiens
tgggcagaaatcaga

SEQ ID NO: 104020 - DNA, 15 bp, Homo sapiens
gtgggcagaaatcag

SEQ ID NO: 104021 - DNA, 15 bp, Homo sapiens
agtgggcagaaatca

SEQ ID NO: 104022 - DNA, 15 bp, Homo sapiens
tagtgggcagaaatc

SEQ ID NO: 104023 - DNA, 15 bp, Homo sapiens
atagtgggcagaaat

SEQ ID NO: 104024 - DNA, 15 bp, Homo sapiens
tatagtgggcagaaa

SEQ ID NO: 104025 - DNA, 15 bp, Homo sapiens
ctatagtgggcagaa

SEQ ID NO: 104026 - DNA, 15 bp, Homo sapiens
cctatagtgggcaga

SEQ ID NO: 104027 - DNA, 15 bp, Homo sapiens
tcctatagtgggcag

SEQ ID NO: 104028 - DNA, 15 bp, Homo sapiens
ttcctatagtgggca

SEQ ID NO: 104029 - DNA, 15 bp, Homo sapiens
attcctatagtgggc

SEQ ID NO: 104030 - DNA, 15 bp, Homo sapiens
cattcctatagtggg

SEQ ID NO: 104031 - DNA, 15 bp, Homo sapiens
acattcctatagtgg

SEQ ID NO: 104032 - DNA, 15 bp, Homo sapiens
cacattcctatagtg

SEQ ID NO: 104033 - DNA, 15 bp, Homo sapiens
gcacattcctatagt

SEQ ID NO: 104034 - DNA, 15 bp, Homo sapiens
agcacattcctatag

SEQ ID NO: 104035 - DNA, 15 bp, Homo sapiens
aagcacattcctata

SEQ ID NO: 104036 - DNA, 15 bp, Homo sapiens
gaagcacattcctat

SEQ ID NO: 104037 - DNA, 15 bp, Homo sapiens
ggaagcacattccta

SEQ ID NO: 104038 - DNA, 15 bp, Homo sapiens
aggaagcacattcct

SEQ ID NO: 104039 - DNA, 15 bp, Homo sapiens
caggaagcacattcc

SEQ ID NO: 104040 - DNA, 15 bp, Homo sapiens
tcaggaagcacattc

SEQ ID NO: 104041 - DNA, 15 bp, Homo sapiens
ctcaggaagcacatt

SEQ ID NO: 104042 - DNA, 15 bp, Homo sapiens
tctcaggaagcacat

SEQ ID NO: 104043 - DNA, 15 bp, Homo sapiens
ttctcaggaagcaca

SEQ ID NO: 104044 - DNA, 15 bp, Homo sapiens
cttctcaggaagcac

SEQ ID NO: 104045 - DNA, 15 bp, Homo sapiens
tcttctcaggaagca

SEQ ID NO: 104046 - DNA, 15 bp, Homo sapiens
atcttctcaggaagc

SEQ ID NO: 104047 - DNA, 15 bp, Homo sapiens
aatcttctcaggaag

SEQ ID NO: 104048 - DNA, 15 bp, Homo sapiens
caatcttctcaggaa

SEQ ID NO: 104049 - DNA, 15 bp, Homo sapiens
ccaatcttctcagga

SEQ ID NO: 104050 - DNA, 15 bp, Homo sapiens
cccaatcttctcagg

SEQ ID NO: 104051 - DNA, 15 bp, Homo sapiens
tcccaatcttctcag

SEQ ID NO: 104052 - DNA, 15 bp, Homo sapiens
atcccaatcttctca

SEQ ID NO: 104053 - DNA, 15 bp, Homo sapiens
gatcccaatcttctc

SEQ ID NO: 104054 - DNA, 15 bp, Homo sapiens
cgatcccaatcttct

SEQ ID NO: 104055 - DNA, 15 bp, Homo sapiens
acgatcccaatcttc

SEQ ID NO: 104056 - DNA, 15 bp, Homo sapiens
cacgatcccaatctt

SEQ ID NO: 104057 - DNA, 15 bp, Homo sapiens
tcacgatcccaatct

SEQ ID NO: 104058 - DNA, 15 bp, Homo sapiens
atcacgatcccaatc

SEQ ID NO: 104059 - DNA, 15 bp, Homo sapiens
aatcacgatcccaat

SEQ ID NO: 104060 - DNA, 15 bp, Homo sapiens
taatcacgatcccaa

SEQ ID NO: 104061 - DNA, 15 bp, Homo sapiens
ataatcacgatccca

SEQ ID NO: 104062 - DNA, 15 bp, Homo sapiens
tataatcacgatccc

SEQ ID NO: 104063 - DNA, 15 bp, Homo sapiens
ttataatcacgatcc

SEQ ID NO: 104064 - DNA, 15 bp, Homo sapiens
attataatcacgatc

SEQ ID NO: 104065 - DNA, 15 bp, Homo sapiens
tattataatcacgat

SEQ ID NO: 104066 - DNA, 15 bp, Homo sapiens
ttattataatcacga

SEQ ID NO: 104067 - DNA, 15 bp, Homo sapiens
attattataatcacg

SEQ ID NO: 104068 - DNA, 15 bp, Homo sapiens
tattattataatcac

SEQ ID NO: 104069 - DNA, 15 bp, Homo sapiens
ctattattataatca

SEQ ID NO: 104070 - DNA, 15 bp, Homo sapiens
actattattataatc

SEQ ID NO: 104071 - DNA, 15 bp, Homo sapiens
aactattattataat

SEQ ID NO: 104072 - DNA, 15 bp, Homo sapiens
taactattattataa

SEQ ID NO: 104073 - DNA, 15 bp, Homo sapiens
ttaactattattata

SEQ ID NO: 104074 - DNA, 15 bp, Homo sapiens
gttaactattattat

SEQ ID NO: 104075 - DNA, 15 bp, Homo sapiens
tgttaactattatta

SEQ ID NO: 104076 - DNA, 15 bp, Homo sapiens
ctgttaactattatt

SEQ ID NO: 104077 - DNA, 15 bp, Homo sapiens
cctgttaactattat

SEQ ID NO: 104078 - DNA, 15 bp, Homo sapiens
ccctgttaactatta

SEQ ID NO: 104079 - DNA, 15 bp, Homo sapiens
cccctgttaactatt

SEQ ID NO: 104080 - DNA, 15 bp, Homo sapiens
tcccctgttaactat

SEQ ID NO: 104081 - DNA, 15 bp, Homo sapiens
atcccctgttaacta

SEQ ID NO: 104082 - DNA, 15 bp, Homo sapiens
catcccctgttaact

SEQ ID NO: 104083 - DNA, 15 bp, Homo sapiens
tcatcccctgttaac

SEQ ID NO: 104084 - DNA, 15 bp, Homo sapiens
ctcatcccctgttaa

SEQ ID NO: 104085 - DNA, 15 bp, Homo sapiens
actcatcccctgtta

SEQ ID NO: 104086 - DNA, 15 bp, Homo sapiens
tactcatcccctgtt

SEQ ID NO: 104087 - DNA, 15 bp, Homo sapiens
gtactcatcccctgt

SEQ ID NO: 104088 - DNA, 15 bp, Homo sapiens
agtactcatcccctg

SEQ ID NO: 104089 - DNA, 15 bp, Homo sapiens
aagtactcatcccct

SEQ ID NO: 104090 - DNA, 15 bp, Homo sapiens
aaagtactcatcccc

SEQ ID NO: 104091 - DNA, 15 bp, Homo sapiens
gaaagtactcatccc

SEQ ID NO: 104092 - DNA, 15 bp, Homo sapiens
agaaagtactcatcc

SEQ ID NO: 104093 - DNA, 15 bp, Homo sapiens
tagaaagtactcatc

SEQ ID NO: 104094 - DNA, 15 bp, Homo sapiens
ctagaaagtactcat

SEQ ID NO: 104095 - DNA, 15 bp, Homo sapiens
cctagaaagtactca

SEQ ID NO: 104096 - DNA, 15 bp, Homo sapiens
acctagaaagtactc

SEQ ID NO: 104097 - DNA, 15 bp, Homo sapiens
cacctagaaagtact

SEQ ID NO: 104098 - DNA, 15 bp, Homo sapiens
gcacctagaaagtac

SEQ ID NO: 104099 - DNA, 15 bp, Homo sapiens
ggcacctagaaagta

SEQ ID NO: 104100 - DNA, 15 bp, Homo sapiens
tggcacctagaaagt

SEQ ID NO: 104101 - DNA, 15 bp, Homo sapiens
ctggcacctagaaag

SEQ ID NO: 104102 - DNA, 15 bp, Homo sapiens
cctggcacctagaaa

SEQ ID NO: 104103 - DNA, 15 bp, Homo sapiens
gcctggcacctagaa

SEQ ID NO: 104104 - DNA, 15 bp, Homo sapiens
tgcctggcacctaga

SEQ ID NO: 104105 - DNA, 15 bp, Homo sapiens
gtgcctggcacctag

SEQ ID NO: 104106 - DNA, 15 bp, Homo sapiens
agtgcctggcaccta

SEQ ID NO: 104107 - DNA, 15 bp, Homo sapiens
cagtgcctggcacct

SEQ ID NO: 104108 - DNA, 15 bp, Homo sapiens
acagtgcctggcacc

SEQ ID NO: 104109 - DNA, 15 bp, Homo sapiens
aacagtgcctggcac

SEQ ID NO: 104110 - DNA, 15 bp, Homo sapiens
gaacagtgcctggca

SEQ ID NO: 104111 - DNA, 15 bp, Homo sapiens
agaacagtgcctggc

SEQ ID NO: 104112 - DNA, 15 bp, Homo sapiens
gagaacagtgcctgg

SEQ ID NO: 104113 - DNA, 15 bp, Homo sapiens
agagaacagtgcctg

SEQ ID NO: 104114 - DNA, 15 bp, Homo sapiens
gagagaacagtgcct

SEQ ID NO: 104115 - DNA, 15 bp, Homo sapiens
agagagaacagtgcc

SEQ ID NO: 104116 - DNA, 15 bp, Homo sapiens
cagagagaacagtgc

SEQ ID NO: 104117 - DNA, 15 bp, Homo sapiens
tcagagagaacagtg

SEQ ID NO: 104118 - DNA, 15 bp, Homo sapiens
atcagagagaacagt

SEQ ID NO: 104119 - DNA, 15 bp, Homo sapiens
tatcagagagaacag

SEQ ID NO: 104120 - DNA, 15 bp, Homo sapiens
gtatcagagagaaca

SEQ ID NO: 104121 - DNA, 15 bp, Homo sapiens
agtatcagagagaac

SEQ ID NO: 104122 - DNA, 15 bp, Homo sapiens
aagtatcagagagaa

SEQ ID NO: 104123 - DNA, 15 bp, Homo sapiens
aaagtatcagagaga

SEQ ID NO: 104124 - DNA, 15 bp, Homo sapiens
taaagtatcagagag

SEQ ID NO: 104125 - DNA, 15 bp, Homo sapiens
ataaagtatcagaga

SEQ ID NO: 104126 - DNA, 15 bp, Homo sapiens
aataaagtatcagag

SEQ ID NO: 104127 - DNA, 15 bp, Homo sapiens
aaataaagtatcaga

SEQ ID NO: 104128 - DNA, 15 bp, Homo sapiens
caaataaagtatcag

SEQ ID NO: 104129 - DNA, 15 bp, Homo sapiens
tcaaataaagtatca

SEQ ID NO: 104130 - DNA, 15 bp, Homo sapiens
atcaaataaagtatc

SEQ ID NO: 104131 - DNA, 15 bp, Homo sapiens
catcaaataaagtat

SEQ ID NO: 104132 - DNA, 15 bp, Homo sapiens
acatcaaataaagta

SEQ ID NO: 104133 - DNA, 15 bp, Homo sapiens
tacatcaaataaagt

SEQ ID NO: 104134 - DNA, 15 bp, Homo sapiens
atacatcaaataaag

SEQ ID NO: 104135 - DNA, 15 bp, Homo sapiens
aatacatcaaataaa

SEQ ID NO: 104136 - DNA, 15 bp, Homo sapiens
caatacatcaaataa

SEQ ID NO: 104137 - DNA, 15 bp, Homo sapiens
acaatacatcaaata

SEQ ID NO: 104138 - DNA, 15 bp, Homo sapiens
aacaatacatcaaat

SEQ ID NO: 104139 - DNA, 15 bp, Homo sapiens
caacaatacatcaaa

SEQ ID NO: 104140 - DNA, 15 bp, Homo sapiens
acaacaatacatcaa

SEQ ID NO: 104141 - DNA, 15 bp, Homo sapiens
aacaacaatacatca

SEQ ID NO: 104142 - DNA, 15 bp, Homo sapiens
taacaacaatacatc

SEQ ID NO: 104143 - DNA, 15 bp, Homo sapiens
ataacaacaatacat

SEQ ID NO: 104144 - DNA, 15 bp, Homo sapiens
aataacaacaataca

SEQ ID NO: 104145 - DNA, 15 bp, Homo sapiens
gaataacaacaatac

SEQ ID NO: 104146 - DNA, 15 bp, Homo sapiens
ggaataacaacaata

SEQ ID NO: 104147 - DNA, 15 bp, Homo sapiens
gggaataacaacaat

SEQ ID NO: 104148 - DNA, 15 bp, Homo sapiens
tgggaataacaacaa

SEQ ID NO: 104149 - DNA, 15 bp, Homo sapiens
atgggaataacaaca

SEQ ID NO: 104150 - DNA, 15 bp, Homo sapiens
aatgggaataacaac

SEQ ID NO: 104151 - DNA, 15 bp, Homo sapiens
gaatgggaataacaa

SEQ ID NO: 104152 - DNA, 15 bp, Homo sapiens
agaatgggaataaca

SEQ ID NO: 104153 - DNA, 15 bp, Homo sapiens
aagaatgggaataac

SEQ ID NO: 104154 - DNA, 15 bp, Homo sapiens
aaagaatgggaataa

SEQ ID NO: 104155 - DNA, 15 bp, Homo sapiens
taaagaatgggaata

SEQ ID NO: 104156 - DNA, 15 bp, Homo sapiens
ttaaagaatgggaat

SEQ ID NO: 104157 - DNA, 15 bp, Homo sapiens
tttaaagaatgggaa

SEQ ID NO: 104158 - DNA, 15 bp, Homo sapiens
atttaaagaatggga

SEQ ID NO: 104159 - DNA, 15 bp, Homo sapiens
catttaaagaatggg

SEQ ID NO: 104160 - DNA, 15 bp, Homo sapiens
tcatttaaagaatgg

SEQ ID NO: 104161 - DNA, 15 bp, Homo sapiens
atcatttaaagaatg

SEQ ID NO: 104162 - DNA, 15 bp, Homo sapiens
catcatttaaagaat

SEQ ID NO: 104163 - DNA, 15 bp, Homo sapiens
gcatcatttaaagaa

SEQ ID NO: 104164 - DNA, 15 bp, Homo sapiens
tgcatcatttaaaga

SEQ ID NO: 104165 - DNA, 15 bp, Homo sapiens
gtgcatcatttaaag

SEQ ID NO: 104166 - DNA, 15 bp, Homo sapiens
tgtgcatcatttaaa

SEQ ID NO: 104167 - DNA, 15 bp, Homo sapiens
ctgtgcatcatttaa

SEQ ID NO: 104168 - DNA, 15 bp, Homo sapiens
tctgtgcatcattta

SEQ ID NO: 104169 - DNA, 15 bp, Homo sapiens
ctctgtgcatcattt

SEQ ID NO: 104170 - DNA, 15 bp, Homo sapiens
tctctgtgcatcatt

SEQ ID NO: 104171 - DNA, 15 bp, Homo sapiens
ctctctgtgcatcat

SEQ ID NO: 104172 - DNA, 15 bp, Homo sapiens
cctctctgtgcatca

SEQ ID NO: 104173 - DNA, 15 bp, Homo sapiens
acctctctgtgcatc

SEQ ID NO: 104174 - DNA, 15 bp, Homo sapiens
aacctctctgtgcat

SEQ ID NO: 104175 - DNA, 15 bp, Homo sapiens
taacctctctgtgca

SEQ ID NO: 104176 - DNA, 15 bp, Homo sapiens
ctaacctctctgtgc

SEQ ID NO: 104177 - DNA, 15 bp, Homo sapiens
cctaacctctctgtg

SEQ ID NO: 104178 - DNA, 15 bp, Homo sapiens
acctaacctctctgt

SEQ ID NO: 104179 - DNA, 15 bp, Homo sapiens
tacctaacctctctg

SEQ ID NO: 104180 - DNA, 15 bp, Homo sapiens
ttacctaacctctct

SEQ ID NO: 104181 - DNA, 15 bp, Homo sapiens
cttacctaacctctc

SEQ ID NO: 104182 - DNA, 15 bp, Homo sapiens
acttacctaacctct

SEQ ID NO: 104183 - DNA, 15 bp, Homo sapiens
cacttacctaacctc

SEQ ID NO: 104184 - DNA, 15 bp, Homo sapiens
tcacttacctaacct

SEQ ID NO: 104185 - DNA, 15 bp, Homo sapiens
gtcacttacctaacc

SEQ ID NO: 104186 - DNA, 15 bp, Homo sapiens
agtcacttacctaac

SEQ ID NO: 104187 - DNA, 15 bp, Homo sapiens
aagtcacttacctaa

SEQ ID NO: 104188 - DNA, 15 bp, Homo sapiens
taagtcacttaccta

SEQ ID NO: 104189 - DNA, 15 bp, Homo sapiens
gtaagtcacttacct

SEQ ID NO: 104190 - DNA, 15 bp, Homo sapiens
agtaagtcacttacc

SEQ ID NO: 104191 - DNA, 15 bp, Homo sapiens
tagtaagtcacttac

SEQ ID NO: 104192 - DNA, 15 bp, Homo sapiens
gtagtaagtcactta

SEQ ID NO: 104193 - DNA, 15 bp, Homo sapiens
ggtagtaagtcactt

SEQ ID NO: 104194 - DNA, 15 bp, Homo sapiens
tggtagtaagtcact

SEQ ID NO: 104195 - DNA, 15 bp, Homo sapiens
ttggtagtaagtcac

SEQ ID NO: 104196 - DNA, 15 bp, Homo sapiens
cttggtagtaagtca

SEQ ID NO: 104197 - DNA, 15 bp, Homo sapiens
acttggtagtaagtc

SEQ ID NO: 104198 - DNA, 15 bp, Homo sapiens
cacttggtagtaagt

SEQ ID NO: 104199 - DNA, 15 bp, Homo sapiens
acacttggtagtaag

SEQ ID NO: 104200 - DNA, 15 bp, Homo sapiens
gacacttggtagtaa

SEQ ID NO: 104201 - DNA, 15 bp, Homo sapiens
tgacacttggtagta

SEQ ID NO: 104202 - DNA, 15 bp, Homo sapiens
ctgacacttggtagt

SEQ ID NO: 104203 - DNA, 15 bp, Homo sapiens
cctgacacttggtag

SEQ ID NO: 104204 - DNA, 15 bp, Homo sapiens
ccctgacacttggta

SEQ ID NO: 104205 - DNA, 15 bp, Homo sapiens
gccctgacacttggt

SEQ ID NO: 104206 - DNA, 15 bp, Homo sapiens
ggccctgacacttgg

SEQ ID NO: 104207 - DNA, 15 bp, Homo sapiens
tggccctgacacttg

SEQ ID NO: 104208 - DNA, 15 bp, Homo sapiens
atggccctgacactt

SEQ ID NO: 104209 - DNA, 15 bp, Homo sapiens
aatggccctgacact

SEQ ID NO: 104210 - DNA, 15 bp, Homo sapiens
taatggccctgacac

SEQ ID NO: 104211 - DNA, 15 bp, Homo sapiens
ttaatggccctgaca

SEQ ID NO: 104212 - DNA, 15 bp, Homo sapiens
cttaatggccctgac

SEQ ID NO: 104213 - DNA, 15 bp, Homo sapiens
ccttaatggccctga

SEQ ID NO: 104214 - DNA, 15 bp, Homo sapiens
cccttaatggccctg

SEQ ID NO: 104215 - DNA, 15 bp, Homo sapiens
acccttaatggccct

SEQ ID NO: 104216 - DNA, 15 bp, Homo sapiens
gacccttaatggccc

SEQ ID NO: 104217 - DNA, 15 bp, Homo sapiens
tgacccttaatggcc

SEQ ID NO: 104218 - DNA, 15 bp, Homo sapiens
ctgacccttaatggc

SEQ ID NO: 104219 - DNA, 15 bp, Homo sapiens
cctgacccttaatgg

SEQ ID NO: 104220 - DNA, 15 bp, Homo sapiens
tcctgacccttaatg

SEQ ID NO: 104221 - DNA, 15 bp, Homo sapiens
atcctgacccttaat

SEQ ID NO: 104222 - DNA, 15 bp, Homo sapiens
aatcctgacccttaa

SEQ ID NO: 104223 - DNA, 15 bp, Homo sapiens
gaatcctgaccctta

SEQ ID NO: 104224 - DNA, 15 bp, Homo sapiens
agaatcctgaccctt

SEQ ID NO: 104225 - DNA, 15 bp, Homo sapiens
cagaatcctgaccct

SEQ ID NO: 104226 - DNA, 15 bp, Homo sapiens
tcagaatcctgaccc

SEQ ID NO: 104227 - DNA, 15 bp, Homo sapiens
ttcagaatcctgacc

SEQ ID NO: 104228 - DNA, 15 bp, Homo sapiens
attcagaatcctgac

SEQ ID NO: 104229 - DNA, 15 bp, Homo sapiens
aattcagaatcctga

SEQ ID NO: 104230 - DNA, 15 bp, Homo sapiens
gaattcagaatcctg

SEQ ID NO: 104231 - DNA, 15 bp, Homo sapiens
ggaattcagaatcct

SEQ ID NO: 104232 - DNA, 15 bp, Homo sapiens
aggaattcagaatcc

SEQ ID NO: 104233 - DNA, 15 bp, Homo sapiens
caggaattcagaatc

SEQ ID NO: 104234 - DNA, 15 bp, Homo sapiens
tcaggaattcagaat

SEQ ID NO: 104235 - DNA, 15 bp, Homo sapiens
ttcaggaattcagaa

SEQ ID NO: 104236 - DNA, 15 bp, Homo sapiens
tttcaggaattcaga

SEQ ID NO: 104237 - DNA, 15 bp, Homo sapiens
atttcaggaattcag

SEQ ID NO: 104238 - DNA, 15 bp, Homo sapiens
catttcaggaattca

SEQ ID NO: 104239 - DNA, 15 bp, Homo sapiens
tcatttcaggaattc

SEQ ID NO: 104240 - DNA, 15 bp, Homo sapiens
atcatttcaggaatt

SEQ ID NO: 104241 - DNA, 15 bp, Homo sapiens
catcatttcaggaat

SEQ ID NO: 104242 - DNA, 15 bp, Homo sapiens
tcatcatttcaggaa

SEQ ID NO: 104243 - DNA, 15 bp, Homo sapiens
ttcatcatttcagga

SEQ ID NO: 104244 - DNA, 15 bp, Homo sapiens
tttcatcatttcagg

SEQ ID NO: 104245 - DNA, 15 bp, Homo sapiens
atttcatcatttcag

SEQ ID NO: 104246 - DNA, 15 bp, Homo sapiens
aatttcatcatttca

SEQ ID NO: 104247 - DNA, 15 bp, Homo sapiens
aaatttcatcatttc

SEQ ID NO: 104248 - DNA, 15 bp, Homo sapiens
taaatttcatcattt

SEQ ID NO: 104249 - DNA, 15 bp, Homo sapiens
ctaaatttcatcatt

SEQ ID NO: 104250 - DNA, 15 bp, Homo sapiens
gctaaatttcatcat

SEQ ID NO: 104251 - DNA, 15 bp, Homo sapiens
agctaaatttcatca

SEQ ID NO: 104252 - DNA, 15 bp, Homo sapiens
aagctaaatttcatc

SEQ ID NO: 104253 - DNA, 15 bp, Homo sapiens
caagctaaatttcat

SEQ ID NO: 104254 - DNA, 15 bp, Homo sapiens
tcaagctaaatttca

SEQ ID NO: 104255 - DNA, 15 bp, Homo sapiens
ttcaagctaaatttc

SEQ ID NO: 104256 - DNA, 15 bp, Homo sapiens
cttcaagctaaattt

SEQ ID NO: 104257 - DNA, 15 bp, Homo sapiens
tcttcaagctaaatt

SEQ ID NO: 104258 - DNA, 15 bp, Homo sapiens
ttcttcaagctaaat

SEQ ID NO: 104259 - DNA, 15 bp, Homo sapiens
tttcttcaagctaaa

SEQ ID NO: 104260 - DNA, 15 bp, Homo sapiens
atttcttcaagctaa

SEQ ID NO: 104261 - DNA, 15 bp, Homo sapiens
aatttcttcaagcta

SEQ ID NO: 104262 - DNA, 15 bp, Homo sapiens
caatttcttcaagct

SEQ ID NO: 104263 - DNA, 15 bp, Homo sapiens
ccaatttcttcaagc

SEQ ID NO: 104264 - DNA, 15 bp, Homo sapiens
accaatttcttcaag

SEQ ID NO: 104265 - DNA, 15 bp, Homo sapiens
aaccaatttcttcaa

SEQ ID NO: 104266 - DNA, 15 bp, Homo sapiens
aaaccaatttcttca

SEQ ID NO: 104267 - DNA, 15 bp, Homo sapiens
caaaccaatttcttc

SEQ ID NO: 104268 - DNA, 15 bp, Homo sapiens
tcaaaccaatttctt

SEQ ID NO: 104269 - DNA, 15 bp, Homo sapiens
atcaaaccaatttct

SEQ ID NO: 104270 - DNA, 15 bp, Homo sapiens
aatcaaaccaatttc

SEQ ID NO: 104271 - DNA, 15 bp, Homo sapiens
aaatcaaaccaattt

SEQ ID NO: 104272 - DNA, 15 bp, Homo sapiens
gaaatcaaaccaatt

SEQ ID NO: 104273 - DNA, 15 bp, Homo sapiens
ggaaatcaaaccaat

SEQ ID NO: 104274 - DNA, 15 bp, Homo sapiens
aggaaatcaaaccaa

SEQ ID NO: 104275 - DNA, 15 bp, Homo sapiens
caggaaatcaaacca

SEQ ID NO: 104276 - DNA, 15 bp, Homo sapiens
gcaggaaatcaaacc

SEQ ID NO: 104277 - DNA, 15 bp, Homo sapiens
agcaggaaatcaaac

SEQ ID NO: 104278 - DNA, 15 bp, Homo sapiens
aagcaggaaatcaaa

SEQ ID NO: 104279 - DNA, 15 bp, Homo sapiens
taagcaggaaatcaa

SEQ ID NO: 104280 - DNA, 15 bp, Homo sapiens
ctaagcaggaaatca

SEQ ID NO: 104281 - DNA, 15 bp, Homo sapiens
actaagcaggaaatc

SEQ ID NO: 104282 - DNA, 15 bp, Homo sapiens
aactaagcaggaaat

SEQ ID NO: 104283 - DNA, 15 bp, Homo sapiens
aaactaagcaggaaa

SEQ ID NO: 104284 - DNA, 15 bp, Homo sapiens
aaaactaagcaggaa

SEQ ID NO: 104285 - DNA, 15 bp, Homo sapiens
gaaaactaagcagga

SEQ ID NO: 104286 - DNA, 15 bp, Homo sapiens
tgaaaactaagcagg

SEQ ID NO: 104287 - DNA, 15 bp, Homo sapiens
ttgaaaactaagcag

SEQ ID NO: 104288 - DNA, 15 bp, Homo sapiens
attgaaaactaagca

SEQ ID NO: 104289 - DNA, 15 bp, Homo sapiens
aattgaaaactaagc

SEQ ID NO: 104290 - DNA, 15 bp, Homo sapiens
aaattgaaaactaag

SEQ ID NO: 104291 - DNA, 15 bp, Homo sapiens
gaaattgaaaactaa

SEQ ID NO: 104292 - DNA, 15 bp, Homo sapiens
tgaaattgaaaacta

SEQ ID NO: 104293 - DNA, 15 bp, Homo sapiens
atgaaattgaaaact

SEQ ID NO: 104294 - DNA, 15 bp, Homo sapiens
catgaaattgaaaac

SEQ ID NO: 104295 - DNA, 15 bp, Homo sapiens
ccatgaaattgaaaa

SEQ ID NO: 104296 - DNA, 15 bp, Homo sapiens
accatgaaattgaaa

SEQ ID NO: 104297 - DNA, 15 bp, Homo sapiens
caccatgaaattgaa

SEQ ID NO: 104298 - DNA, 15 bp, Homo sapiens
ccaccatgaaattga

SEQ ID NO: 104299 - DNA, 15 bp, Homo sapiens
accaccatgaaattg

SEQ ID NO: 104300 - DNA, 15 bp, Homo sapiens
gaccaccatgaaatt

SEQ ID NO: 104301 - DNA, 15 bp, Homo sapiens
agaccaccatgaaat

SEQ ID NO: 104302 - DNA, 15 bp, Homo sapiens
aagaccaccatgaaa

SEQ ID NO: 104303 - DNA, 15 bp, Homo sapiens
aaagaccaccatgaa

SEQ ID NO: 104304 - DNA, 15 bp, Homo sapiens
caaagaccaccatga

SEQ ID NO: 104305 - DNA, 15 bp, Homo sapiens
tcaaagaccaccatg

SEQ ID NO: 104306 - DNA, 15 bp, Homo sapiens
atcaaagaccaccat

SEQ ID NO: 104307 - DNA, 15 bp, Homo sapiens
aatcaaagaccacca

SEQ ID NO: 104308 - DNA, 15 bp, Homo sapiens
caatcaaagaccacc

SEQ ID NO: 104309 - DNA, 15 bp, Homo sapiens
acaatcaaagaccac

SEQ ID NO: 104310 - DNA, 15 bp, Homo sapiens
tacaatcaaagacca

SEQ ID NO: 104311 - DNA, 15 bp, Homo sapiens
atacaatcaaagacc

SEQ ID NO: 104312 - DNA, 15 bp, Homo sapiens
aatacaatcaaagac

SEQ ID NO: 104313 - DNA, 15 bp, Homo sapiens
aaatacaatcaaaga

SEQ ID NO: 104314 - DNA, 15 bp, Homo sapiens
aaaatacaatcaaag

SEQ ID NO: 104315 - DNA, 15 bp, Homo sapiens
caaaatacaatcaaa

SEQ ID NO: 104316 - DNA, 15 bp, Homo sapiens
acaaaatacaatcaa

SEQ ID NO: 104317 - DNA, 15 bp, Homo sapiens
cacaaaatacaatca

SEQ ID NO: 104318 - DNA, 15 bp, Homo sapiens
gcacaaaatacaatc

SEQ ID NO: 104319 - DNA, 15 bp, Homo sapiens
agcacaaaatacaat

SEQ ID NO: 104320 - DNA, 15 bp, Homo sapiens
tagcacaaaatacaa

SEQ ID NO: 104321 - DNA, 15 bp, Homo sapiens
atagcacaaaataca

SEQ ID NO: 104322 - DNA, 15 bp, Homo sapiens
tatagcacaaaatac

SEQ ID NO: 104323 - DNA, 15 bp, Homo sapiens
ttatagcacaaaata

SEQ ID NO: 104324 - DNA, 15 bp, Homo sapiens
gttatagcacaaaat

SEQ ID NO: 104325 - DNA, 15 bp, Homo sapiens
tgttatagcacaaaa

SEQ ID NO: 104326 - DNA, 15 bp, Homo sapiens
gtgttatagcacaaa

SEQ ID NO: 104327 - DNA, 15 bp, Homo sapiens
agtgttatagcacaa

SEQ ID NO: 104328 - DNA, 15 bp, Homo sapiens
cagtgttatagcaca

SEQ ID NO: 104329 - DNA, 15 bp, Homo sapiens
gcagtgttatagcac

SEQ ID NO: 104330 - DNA, 15 bp, Homo sapiens
ggcagtgttatagca

SEQ ID NO: 104331 - DNA, 15 bp, Homo sapiens
aggcagtgttatagc

SEQ ID NO: 104332 - DNA, 15 bp, Homo sapiens
aaggcagtgttatag

SEQ ID NO: 104333 - DNA, 15 bp, Homo sapiens
taaggcagtgttata

SEQ ID NO: 104334 - DNA, 15 bp, Homo sapiens
ctaaggcagtgttat

SEQ ID NO: 104335 - DNA, 15 bp, Homo sapiens
gctaaggcagtgtta

SEQ ID NO: 104336 - DNA, 15 bp, Homo sapiens
tgctaaggcagtgtt

SEQ ID NO: 104337 - DNA, 15 bp, Homo sapiens
atgctaaggcagtgt

SEQ ID NO: 104338 - DNA, 15 bp, Homo sapiens
gatgctaaggcagtg

SEQ ID NO: 104339 - DNA, 15 bp, Homo sapiens
ggatgctaaggcagt

SEQ ID NO: 104340 - DNA, 15 bp, Homo sapiens
aggatgctaaggcag

SEQ ID NO: 104341 - DNA, 15 bp, Homo sapiens
taggatgctaaggca

SEQ ID NO: 104342 - DNA, 15 bp, Homo sapiens
ataggatgctaaggc

SEQ ID NO: 104343 - DNA, 15 bp, Homo sapiens
tataggatgctaagg

SEQ ID NO: 104344 - DNA, 15 bp, Homo sapiens
ttataggatgctaag

SEQ ID NO: 104345 - DNA, 15 bp, Homo sapiens
gttataggatgctaa

SEQ ID NO: 104346 - DNA, 15 bp, Homo sapiens
agttataggatgcta

SEQ ID NO: 104347 - DNA, 15 bp, Homo sapiens
tagttataggatgct

SEQ ID NO: 104348 - DNA, 15 bp, Homo sapiens
atagttataggatgc

SEQ ID NO: 104349 - DNA, 15 bp, Homo sapiens
tatagttataggatg

SEQ ID NO: 104350 - DNA, 15 bp, Homo sapiens
ctatagttataggat

SEQ ID NO: 104351 - DNA, 15 bp, Homo sapiens
actatagttatagga

SEQ ID NO: 104352 - DNA, 15 bp, Homo sapiens
aactatagttatagg

SEQ ID NO: 104353 - DNA, 15 bp, Homo sapiens
taactatagttatag

SEQ ID NO: 104354 - DNA, 15 bp, Homo sapiens
gtaactatagttata

SEQ ID NO: 104355 - DNA, 15 bp, Homo sapiens
tgtaactatagttat

SEQ ID NO: 104356 - DNA, 15 bp, Homo sapiens
ctgtaactatagtta

SEQ ID NO: 104357 - DNA, 15 bp, Homo sapiens
actgtaactatagtt

SEQ ID NO: 104358 - DNA, 15 bp, Homo sapiens
cactgtaactatagt

SEQ ID NO: 104359 - DNA, 15 bp, Homo sapiens
acactgtaactatag

SEQ ID NO: 104360 - DNA, 15 bp, Homo sapiens
aacactgtaactata

SEQ ID NO: 104361 - DNA, 15 bp, Homo sapiens
taacactgtaactat

SEQ ID NO: 104362 - DNA, 15 bp, Homo sapiens
ataacactgtaacta

SEQ ID NO: 104363 - DNA, 15 bp, Homo sapiens
tataacactgtaact

SEQ ID NO: 104364 - DNA, 15 bp, Homo sapiens
atataacactgtaac

SEQ ID NO: 104365 - DNA, 15 bp, Homo sapiens
aatataacactgtaa

SEQ ID NO: 104366 - DNA, 15 bp, Homo sapiens
taatataacactgta

SEQ ID NO: 104367 - DNA, 15 bp, Homo sapiens
gtaatataacactgt

SEQ ID NO: 104368 - DNA, 15 bp, Homo sapiens
ggtaatataacactg

SEQ ID NO: 104369 - DNA, 15 bp, Homo sapiens
tggtaatataacact

SEQ ID NO: 104370 - DNA, 15 bp, Homo sapiens
atggtaatataacac

SEQ ID NO: 104371 - DNA, 15 bp, Homo sapiens
aatggtaatataaca

SEQ ID NO: 104372 - DNA, 15 bp, Homo sapiens
aaatggtaatataac

SEQ ID NO: 104373 - DNA, 15 bp, Homo sapiens
aaaatggtaatataa

SEQ ID NO: 104374 - DNA, 15 bp, Homo sapiens
aaaaatggtaatata

SEQ ID NO: 104375 - DNA, 15 bp, Homo sapiens
aaaaaatggtaatat

SEQ ID NO: 104376 - DNA, 15 bp, Homo sapiens
taaaaaatggtaata

SEQ ID NO: 104377 - DNA, 15 bp, Homo sapiens
ataaaaaatggtaat

SEQ ID NO: 104378 - DNA, 15 bp, Homo sapiens
aataaaaaatggtaa

SEQ ID NO: 104379 - DNA, 15 bp, Homo sapiens
caataaaaaatggta

SEQ ID NO: 104380 - DNA, 15 bp, Homo sapiens
acaataaaaaatggt

SEQ ID NO: 104381 - DNA, 15 bp, Homo sapiens
aacaataaaaaatgg

SEQ ID NO: 104382 - DNA, 15 bp, Homo sapiens
taacaataaaaaatg

SEQ ID NO: 104383 - DNA, 15 bp, Homo sapiens
ttaacaataaaaaat

SEQ ID NO: 104384 - DNA, 15 bp, Homo sapiens
attaacaataaaaaa

SEQ ID NO: 104385 - DNA, 15 bp, Homo sapiens
tattaacaataaaaa

SEQ ID NO: 104386 - DNA, 15 bp, Homo sapiens
gtattaacaataaaa

SEQ ID NO: 104387 - DNA, 15 bp, Homo sapiens
tgtattaacaataaa

SEQ ID NO: 104388 - DNA, 15 bp, Homo sapiens
ttgtattaacaataa

SEQ ID NO: 104389 - DNA, 15 bp, Homo sapiens
tttgtattaacaata

SEQ ID NO: 104390 - DNA, 15 bp, Homo sapiens
ctttgtattaacaat

SEQ ID NO: 104391 - DNA, 15 bp, Homo sapiens
gctttgtattaacaa

SEQ ID NO: 104392 - DNA, 15 bp, Homo sapiens
ggctttgtattaaca

SEQ ID NO: 104393 - DNA, 15 bp, Homo sapiens
tggctttgtattaac

SEQ ID NO: 104394 - DNA, 15 bp, Homo sapiens
atggctttgtattaa

SEQ ID NO: 104395 - DNA, 15 bp, Homo sapiens
gatggctttgtatta

SEQ ID NO: 104396 - DNA, 15 bp, Homo sapiens
tgatggctttgtatt

SEQ ID NO: 104397 - DNA, 15 bp, Homo sapiens
atgatggctttgtat

SEQ ID NO: 104398 - DNA, 15 bp, Homo sapiens
catgatggctttgta

SEQ ID NO: 104399 - DNA, 15 bp, Homo sapiens
tcatgatggctttgt

SEQ ID NO: 104400 - DNA, 15 bp, Homo sapiens
ttcatgatggctttg

SEQ ID NO: 104401 - DNA, 15 bp, Homo sapiens
tttcatgatggcttt

SEQ ID NO: 104402 - DNA, 15 bp, Homo sapiens
atttcatgatggctt

SEQ ID NO: 104403 - DNA, 15 bp, Homo sapiens
tatttcatgatggct

SEQ ID NO: 104404 - DNA, 15 bp, Homo sapiens
ttatttcatgatggc

SEQ ID NO: 104405 - DNA, 15 bp, Homo sapiens
attatttcatgatgg

SEQ ID NO: 104406 - DNA, 15 bp, Homo sapiens
aattatttcatgatg

SEQ ID NO: 104407 - DNA, 15 bp, Homo sapiens
gaattatttcatgat

SEQ ID NO: 104408 - DNA, 15 bp, Homo sapiens
tgaattatttcatga

SEQ ID NO: 104409 - DNA, 15 bp, Homo sapiens
ctgaattatttcatg

SEQ ID NO: 104410 - DNA, 15 bp, Homo sapiens
actgaattatttcat

SEQ ID NO: 104411 - DNA, 15 bp, Homo sapiens
aactgaattatttca

SEQ ID NO: 104412 - DNA, 15 bp, Homo sapiens
aaactgaattatttc

SEQ ID NO: 104413 - DNA, 15 bp, Homo sapiens
taaactgaattattt

SEQ ID NO: 104414 - DNA, 15 bp, Homo sapiens
ataaactgaattatt

SEQ ID NO: 104415 - DNA, 15 bp, Homo sapiens
cataaactgaattat

SEQ ID NO: 104416 - DNA, 15 bp, Homo sapiens
acataaactgaatta

SEQ ID NO: 104417 - DNA, 15 bp, Homo sapiens
cacataaactgaatt

SEQ ID NO: 104418 - DNA, 15 bp, Homo sapiens
gcacataaactgaat

SEQ ID NO: 104419 - DNA, 15 bp, Homo sapiens
ggcacataaactgaa

SEQ ID NO: 104420 - DNA, 15 bp, Homo sapiens
tggcacataaactga

SEQ ID NO: 104421 - DNA, 15 bp, Homo sapiens
ctggcacataaactg

SEQ ID NO: 104422 - DNA, 15 bp, Homo sapiens
gctggcacataaact

SEQ ID NO: 104423 - DNA, 15 bp, Homo sapiens
agctggcacataaac

SEQ ID NO: 104424 - DNA, 15 bp, Homo sapiens
aagctggcacataaa

SEQ ID NO: 104425 - DNA, 15 bp, Homo sapiens
aaagctggcacataa

SEQ ID NO: 104426 - DNA, 15 bp, Homo sapiens
aaaagctggcacata

SEQ ID NO: 104427 - DNA, 15 bp, Homo sapiens
aaaaagctggcacat

SEQ ID NO: 104428 - DNA, 15 bp, Homo sapiens
aaaaaagctggcaca

SEQ ID NO: 104429 - DNA, 15 bp, Homo sapiens
aaaaaaagctggcac

SEQ ID NO: 104430 - DNA, 15 bp, Homo sapiens
caaaaaaagctggca

SEQ ID NO: 104431 - DNA, 15 bp, Homo sapiens
acaaaaaaagctggc

SEQ ID NO: 104432 - DNA, 15 bp, Homo sapiens
aacaaaaaaagctgg

SEQ ID NO: 104433 - DNA, 15 bp, Homo sapiens
taacaaaaaaagctg

SEQ ID NO: 104434 - DNA, 15 bp, Homo sapiens
gtaacaaaaaaagct

SEQ ID NO: 104435 - DNA, 15 bp, Homo sapiens
agtaacaaaaaaagc

SEQ ID NO: 104436 - DNA, 15 bp, Homo sapiens
tagtaacaaaaaaag

SEQ ID NO: 104437 - DNA, 15 bp, Homo sapiens
ttagtaacaaaaaaa

SEQ ID NO: 104438 - DNA, 15 bp, Homo sapiens
attagtaacaaaaaa

SEQ ID NO: 104439 - DNA, 15 bp, Homo sapiens
aattagtaacaaaaa

SEQ ID NO: 104440 - DNA, 15 bp, Homo sapiens
gaattagtaacaaaa

SEQ ID NO: 104441 - DNA, 15 bp, Homo sapiens
agaattagtaacaaa

SEQ ID NO: 104442 - DNA, 15 bp, Homo sapiens
aagaattagtaacaa

SEQ ID NO: 104443 - DNA, 15 bp, Homo sapiens
caagaattagtaaca

SEQ ID NO: 104444 - DNA, 15 bp, Homo sapiens
tcaagaattagtaac

SEQ ID NO: 104445 - DNA, 15 bp, Homo sapiens
ttcaagaattagtaa

SEQ ID NO: 104446 - DNA, 15 bp, Homo sapiens
gttcaagaattagta

SEQ ID NO: 104447 - DNA, 15 bp, Homo sapiens
ggttcaagaattagt

SEQ ID NO: 104448 - DNA, 15 bp, Homo sapiens
aggttcaagaattag

SEQ ID NO: 104449 - DNA, 15 bp, Homo sapiens
aaggttcaagaatta

SEQ ID NO: 104450 - DNA, 15 bp, Homo sapiens
caaggttcaagaatt

SEQ ID NO: 104451 - DNA, 15 bp, Homo sapiens
ccaaggttcaagaat

SEQ ID NO: 104452 - DNA, 15 bp, Homo sapiens
gccaaggttcaagaa

SEQ ID NO: 104453 - DNA, 15 bp, Homo sapiens
cgccaaggttcaaga

SEQ ID NO: 104454 - DNA, 15 bp, Homo sapiens
gcgccaaggttcaag

SEQ ID NO: 104455 - DNA, 15 bp, Homo sapiens
agcgccaaggttcaa

SEQ ID NO: 104456 - DNA, 15 bp, Homo sapiens
cagcgccaaggttca

SEQ ID NO: 104457 - DNA, 15 bp, Homo sapiens
acagcgccaaggttc

SEQ ID NO: 104458 - DNA, 15 bp, Homo sapiens
tacagcgccaaggtt

SEQ ID NO: 104459 - DNA, 15 bp, Homo sapiens
gtacagcgccaaggt

SEQ ID NO: 104460 - DNA, 15 bp, Homo sapiens
agtacagcgccaagg

SEQ ID NO: 104461 - DNA, 15 bp, Homo sapiens
aagtacagcgccaag

SEQ ID NO: 104462 - DNA, 15 bp, Homo sapiens
gaagtacagcgccaa

SEQ ID NO: 104463 - DNA, 15 bp, Homo sapiens
agaagtacagcgcca

SEQ ID NO: 104464 - DNA, 15 bp, Homo sapiens
aagaagtacagcgcc

SEQ ID NO: 104465 - DNA, 15 bp, Homo sapiens
gaagaagtacagcgc

SEQ ID NO: 104466 - DNA, 15 bp, Homo sapiens
tgaagaagtacagcg

SEQ ID NO: 104467 - DNA, 15 bp, Homo sapiens
atgaagaagtacagc

SEQ ID NO: 104468 - DNA, 15 bp, Homo sapiens
catgaagaagtacag

SEQ ID NO: 104469 - DNA, 15 bp, Homo sapiens
acatgaagaagtaca

SEQ ID NO: 104470 - DNA, 15 bp, Homo sapiens
cacatgaagaagtac

SEQ ID NO: 104471 - DNA, 15 bp, Homo sapiens
ccacatgaagaagta

SEQ ID NO: 104472 - DNA, 15 bp, Homo sapiens
tccacatgaagaagt

SEQ ID NO: 104473 - DNA, 15 bp, Homo sapiens
atccacatgaagaag

SEQ ID NO: 104474 - DNA, 15 bp, Homo sapiens
catccacatgaagaa

SEQ ID NO: 104475 - DNA, 15 bp, Homo sapiens
gcatccacatgaaga

SEQ ID NO: 104476 - DNA, 15 bp, Homo sapiens
ggcatccacatgaag

SEQ ID NO: 104477 - DNA, 15 bp, Homo sapiens
aggcatccacatgaa

SEQ ID NO: 104478 - DNA, 15 bp, Homo sapiens
caggcatccacatga

SEQ ID NO: 104479 - DNA, 15 bp, Homo sapiens
acaggcatccacatg

SEQ ID NO: 104480 - DNA, 15 bp, Homo sapiens
aacaggcatccacat

SEQ ID NO: 104481 - DNA, 15 bp, Homo sapiens
taacaggcatccaca

SEQ ID NO: 104482 - DNA, 15 bp, Homo sapiens
ttaacaggcatccac

SEQ ID NO: 104483 - DNA, 15 bp, Homo sapiens
cttaacaggcatcca

SEQ ID NO: 104484 - DNA, 15 bp, Homo sapiens
ccttaacaggcatcc

SEQ ID NO: 104485 - DNA, 15 bp, Homo sapiens
tccttaacaggcatc

SEQ ID NO: 104486 - DNA, 15 bp, Homo sapiens
ttccttaacaggcat

SEQ ID NO: 104487 - DNA, 15 bp, Homo sapiens
tttccttaacaggca

SEQ ID NO: 104488 - DNA, 15 bp, Homo sapiens
ctttccttaacaggc

SEQ ID NO: 104489 - DNA, 15 bp, Homo sapiens
tctttccttaacagg

SEQ ID NO: 104490 - DNA, 15 bp, Homo sapiens
atctttccttaacag

SEQ ID NO: 104491 - DNA, 15 bp, Homo sapiens
tatctttccttaaca

SEQ ID NO: 104492 - DNA, 15 bp, Homo sapiens
ttatctttccttaac

SEQ ID NO: 104493 - DNA, 15 bp, Homo sapiens
tttatctttccttaa

SEQ ID NO: 104494 - DNA, 15 bp, Homo sapiens
ctttatctttcctta

SEQ ID NO: 104495 - DNA, 15 bp, Homo sapiens
actttatctttcctt

SEQ ID NO: 104496 - DNA, 15 bp, Homo sapiens
aactttatctttcct

SEQ ID NO: 104497 - DNA, 15 bp, Homo sapiens
taactttatctttcc

SEQ ID NO: 104498 - DNA, 15 bp, Homo sapiens
ctaactttatctttc

SEQ ID NO: 104499 - DNA, 15 bp, Homo sapiens
tctaactttatcttt

SEQ ID NO: 104500 - DNA, 15 bp, Homo sapiens
ttctaactttatctt

SEQ ID NO: 104501 - DNA, 15 bp, Homo sapiens
tttctaactttatct

SEQ ID NO: 104502 - DNA, 15 bp, Homo sapiens
atttctaactttatc

SEQ ID NO: 104503 - DNA, 15 bp, Homo sapiens
gatttctaactttat

SEQ ID NO: 104504 - DNA, 15 bp, Homo sapiens
agatttctaacttta

SEQ ID NO: 104505 - DNA, 15 bp, Homo sapiens
aagatttctaacttt

SEQ ID NO: 104506 - DNA, 15 bp, Homo sapiens
aaagatttctaactt

SEQ ID NO: 104507 - DNA, 15 bp, Homo sapiens
caaagatttctaact

SEQ ID NO: 104508 - DNA, 15 bp, Homo sapiens
tcaaagatttctaac

SEQ ID NO: 104509 - DNA, 15 bp, Homo sapiens
gtcaaagatttctaa

SEQ ID NO: 104510 - DNA, 15 bp, Homo sapiens
ggtcaaagatttcta

SEQ ID NO: 104511 - DNA, 15 bp, Homo sapiens
gggtcaaagatttct

SEQ ID NO: 104512 - DNA, 15 bp, Homo sapiens
agggtcaaagatttc

SEQ ID NO: 104513 - DNA, 15 bp, Homo sapiens
cagggtcaaagattt

SEQ ID NO: 104514 - DNA, 15 bp, Homo sapiens
gcagggtcaaagatt

SEQ ID NO: 104515 - DNA, 15 bp, Homo sapiens
agcagggtcaaagat

SEQ ID NO: 104516 - DNA, 15 bp, Homo sapiens
tagcagggtcaaaga

SEQ ID NO: 104517 - DNA, 15 bp, Homo sapiens
ctagcagggtcaaag

SEQ ID NO: 104518 - DNA, 15 bp, Homo sapiens
cctagcagggtcaaa

SEQ ID NO: 104519 - DNA, 15 bp, Homo sapiens
tcctagcagggtcaa

SEQ ID NO: 104520 - DNA, 15 bp, Homo sapiens
ttcctagcagggtca

SEQ ID NO: 104521 - DNA, 15 bp, Homo sapiens
tttcctagcagggtc

SEQ ID NO: 104522 - DNA, 15 bp, Homo sapiens
atttcctagcagggt

SEQ ID NO: 104523 - DNA, 15 bp, Homo sapiens
aatttcctagcaggg

SEQ ID NO: 104524 - DNA, 15 bp, Homo sapiens
aaatttcctagcagg

SEQ ID NO: 104525 - DNA, 15 bp, Homo sapiens
caaatttcctagcag

SEQ ID NO: 104526 - DNA, 15 bp, Homo sapiens
acaaatttcctagca

SEQ ID NO: 104527 - DNA, 15 bp, Homo sapiens
gacaaatttcctagc

SEQ ID NO: 104528 - DNA, 15 bp, Homo sapiens
agacaaatttcctag

SEQ ID NO: 104529 - DNA, 15 bp, Homo sapiens
aagacaaatttccta

SEQ ID NO: 104530 - DNA, 15 bp, Homo sapiens
aaagacaaatttcct

SEQ ID NO: 104531 - DNA, 15 bp, Homo sapiens
caaagacaaatttcc

SEQ ID NO: 104532 - DNA, 15 bp, Homo sapiens
acaaagacaaatttc

SEQ ID NO: 104533 - DNA, 15 bp, Homo sapiens
aacaaagacaaattt

SEQ ID NO: 104534 - DNA, 15 bp, Homo sapiens
taacaaagacaaatt

SEQ ID NO: 104535 - DNA, 15 bp, Homo sapiens
ataacaaagacaaat

SEQ ID NO: 104536 - DNA, 15 bp, Homo sapiens
tataacaaagacaaa

SEQ ID NO: 104537 - DNA, 15 bp, Homo sapiens
atataacaaagacaa

SEQ ID NO: 104538 - DNA, 15 bp, Homo sapiens
aatataacaaagaca

SEQ ID NO: 104539 - DNA, 15 bp, Homo sapiens
caatataacaaagac

SEQ ID NO: 104540 - DNA, 15 bp, Homo sapiens
ccaatataacaaaga

SEQ ID NO: 104541 - DNA, 15 bp, Homo sapiens
cccaatataacaaag

SEQ ID NO: 104542 - DNA, 15 bp, Homo sapiens
tcccaatataacaaa

SEQ ID NO: 104543 - DNA, 15 bp, Homo sapiens
ctcccaatataacaa

SEQ ID NO: 104544 - DNA, 15 bp, Homo sapiens
gctcccaatataaca

SEQ ID NO: 104545 - DNA, 15 bp, Homo sapiens
agctcccaatataac

SEQ ID NO: 104546 - DNA, 15 bp, Homo sapiens
gagctcccaatataa

SEQ ID NO: 104547 - DNA, 15 bp, Homo sapiens
tgagctcccaatata

SEQ ID NO: 104548 - DNA, 15 bp, Homo sapiens
atgagctcccaatat

SEQ ID NO: 104549 - DNA, 15 bp, Homo sapiens
tatgagctcccaata

SEQ ID NO: 104550 - DNA, 15 bp, Homo sapiens
ttatgagctcccaat

SEQ ID NO: 104551 - DNA, 15 bp, Homo sapiens
tttatgagctcccaa

SEQ ID NO: 104552 - DNA, 15 bp, Homo sapiens
ttttatgagctccca

SEQ ID NO: 104553 - DNA, 15 bp, Homo sapiens
gttttatgagctccc

SEQ ID NO: 104554 - DNA, 15 bp, Homo sapiens
agttttatgagctcc

SEQ ID NO: 104555 - DNA, 15 bp, Homo sapiens
cagttttatgagctc

SEQ ID NO: 104556 - DNA, 15 bp, Homo sapiens
tcagttttatgagct

SEQ ID NO: 104557 - DNA, 15 bp, Homo sapiens
ttcagttttatgagc

SEQ ID NO: 104558 - DNA, 15 bp, Homo sapiens
cttcagttttatgag

SEQ ID NO: 104559 - DNA, 15 bp, Homo sapiens
acttcagttttatga

SEQ ID NO: 104560 - DNA, 15 bp, Homo sapiens
tacttcagttttatg

SEQ ID NO: 104561 - DNA, 15 bp, Homo sapiens
atacttcagttttat

SEQ ID NO: 104562 - DNA, 15 bp, Homo sapiens
aatacttcagtttta

SEQ ID NO: 104563 - DNA, 15 bp, Homo sapiens
gaatacttcagtttt

SEQ ID NO: 104564 - DNA, 15 bp, Homo sapiens
tgaatacttcagttt

SEQ ID NO: 104565 - DNA, 15 bp, Homo sapiens
ttgaatacttcagtt

SEQ ID NO: 104566 - DNA, 15 bp, Homo sapiens
tttgaatacttcagt

SEQ ID NO: 104567 - DNA, 15 bp, Homo sapiens
ttttgaatacttcag

SEQ ID NO: 104568 - DNA, 15 bp, Homo sapiens
cttttgaatacttca

SEQ ID NO: 104569 - DNA, 15 bp, Homo sapiens
acttttgaatacttc

SEQ ID NO: 104570 - DNA, 15 bp, Homo sapiens
aacttttgaatactt

SEQ ID NO: 104571 - DNA, 15 bp, Homo sapiens
taacttttgaatact

SEQ ID NO: 104572 - DNA, 15 bp, Homo sapiens
ctaacttttgaatac

SEQ ID NO: 104573 - DNA, 15 bp, Homo sapiens
tctaacttttgaata

SEQ ID NO: 104574 - DNA, 15 bp, Homo sapiens
ttctaacttttgaat

SEQ ID NO: 104575 - DNA, 15 bp, Homo sapiens
attctaacttttgaa

SEQ ID NO: 104576 - DNA, 15 bp, Homo sapiens
tattctaacttttga

SEQ ID NO: 104577 - DNA, 15 bp, Homo sapiens
gtattctaacttttg

SEQ ID NO: 104578 - DNA, 15 bp, Homo sapiens
tgtattctaactttt

SEQ ID NO: 104579 - DNA, 15 bp, Homo sapiens
atgtattctaacttt

SEQ ID NO: 104580 - DNA, 15 bp, Homo sapiens
tatgtattctaactt

SEQ ID NO: 104581 - DNA, 15 bp, Homo sapiens
gtatgtattctaact

SEQ ID NO: 104582 - DNA, 15 bp, Homo sapiens
tgtatgtattctaac

SEQ ID NO: 104583 - DNA, 15 bp, Homo sapiens
gtgtatgtattctaa

SEQ ID NO: 104584 - DNA, 15 bp, Homo sapiens
tgtgtatgtattcta

SEQ ID NO: 104585 - DNA, 15 bp, Homo sapiens
gtgtgtatgtattct

SEQ ID NO: 104586 - DNA, 15 bp, Homo sapiens
tgtgtgtatgtattc

SEQ ID NO: 104587 - DNA, 15 bp, Homo sapiens
ttgtgtgtatgtatt

SEQ ID NO: 104588 - DNA, 15 bp, Homo sapiens
cttgtgtgtatgtat

SEQ ID NO: 104589 - DNA, 15 bp, Homo sapiens
tcttgtgtgtatgta

SEQ ID NO: 104590 - DNA, 15 bp, Homo sapiens
ttcttgtgtgtatgt

SEQ ID NO: 104591 - DNA, 15 bp, Homo sapiens
tttcttgtgtgtatg

SEQ ID NO: 104592 - DNA, 15 bp, Homo sapiens
ttttcttgtgtgtat

SEQ ID NO: 104593 - DNA, 15 bp, Homo sapiens
tttttcttgtgtgta

SEQ ID NO: 104594 - DNA, 15 bp, Homo sapiens
atttttcttgtgtgt

SEQ ID NO: 104595 - DNA, 15 bp, Homo sapiens
aatttttcttgtgtg

SEQ ID NO: 104596 - DNA, 15 bp, Homo sapiens
taatttttcttgtgt

SEQ ID NO: 104597 - DNA, 15 bp, Homo sapiens
ctaatttttcttgtg

SEQ ID NO: 104598 - DNA, 15 bp, Homo sapiens
actaatttttcttgt

SEQ ID NO: 104599 - DNA, 15 bp, Homo sapiens
tactaatttttcttg

SEQ ID NO: 104600 - DNA, 15 bp, Homo sapiens
ttactaatttttctt

SEQ ID NO: 104601 - DNA, 15 bp, Homo sapiens
gttactaatttttct

SEQ ID NO: 104602 - DNA, 15 bp, Homo sapiens
agttactaatttttc

SEQ ID NO: 104603 - DNA, 15 bp, Homo sapiens
tagttactaattttt

SEQ ID NO: 104604 - DNA, 15 bp, Homo sapiens
ttagttactaatttt

SEQ ID NO: 104605 - DNA, 15 bp, Homo sapiens
attagttactaattt

SEQ ID NO: 104606 - DNA, 15 bp, Homo sapiens
aattagttactaatt

SEQ ID NO: 104607 - DNA, 15 bp, Homo sapiens
aaattagttactaat

SEQ ID NO: 104608 - DNA, 15 bp, Homo sapiens
taaattagttactaa

SEQ ID NO: 104609 - DNA, 15 bp, Homo sapiens
ttaaattagttacta

SEQ ID NO: 104610 - DNA, 15 bp, Homo sapiens
attaaattagttact

SEQ ID NO: 104611 - DNA, 15 bp, Homo sapiens
tattaaattagttac

SEQ ID NO: 104612 - DNA, 15 bp, Homo sapiens
ttattaaattagtta

SEQ ID NO: 104613 - DNA, 15 bp, Homo sapiens
attattaaattagtt

SEQ ID NO: 104614 - DNA, 15 bp, Homo sapiens
cattattaaattagt

SEQ ID NO: 104615 - DNA, 15 bp, Homo sapiens
acattattaaattag

SEQ ID NO: 104616 - DNA, 15 bp, Homo sapiens
aacattattaaatta

SEQ ID NO: 104617 - DNA, 15 bp, Homo sapiens
aaacattattaaatt

SEQ ID NO: 104618 - DNA, 15 bp, Homo sapiens
aaaacattattaaat

SEQ ID NO: 104619 - DNA, 15 bp, Homo sapiens
gaaaacattattaaa

SEQ ID NO: 104620 - DNA, 15 bp, Homo sapiens
agaaaacattattaa

SEQ ID NO: 104621 - DNA, 15 bp, Homo sapiens
aagaaaacattatta

SEQ ID NO: 104622 - DNA, 15 bp, Homo sapiens
aaagaaaacattatt

SEQ ID NO: 104623 - DNA, 15 bp, Homo sapiens
caaagaaaacattat

SEQ ID NO: 104624 - DNA, 15 bp, Homo sapiens
gcaaagaaaacatta

SEQ ID NO: 104625 - DNA, 15 bp, Homo sapiens
tgcaaagaaaacatt

SEQ ID NO: 104626 - DNA, 15 bp, Homo sapiens
gtgcaaagaaaacat

SEQ ID NO: 104627 - DNA, 15 bp, Homo sapiens
tgtgcaaagaaaaca

SEQ ID NO: 104628 - DNA, 15 bp, Homo sapiens
atgtgcaaagaaaac

SEQ ID NO: 104629 - DNA, 15 bp, Homo sapiens
catgtgcaaagaaaa

SEQ ID NO: 104630 - DNA, 15 bp, Homo sapiens
acatgtgcaaagaaa

SEQ ID NO: 104631 - DNA, 15 bp, Homo sapiens
gacatgtgcaaagaa

SEQ ID NO: 104632 - DNA, 15 bp, Homo sapiens
agacatgtgcaaaga

SEQ ID NO: 104633 - DNA, 15 bp, Homo sapiens
gagacatgtgcaaag

SEQ ID NO: 104634 - DNA, 15 bp, Homo sapiens
agagacatgtgcaaa

SEQ ID NO: 104635 - DNA, 15 bp, Homo sapiens
cagagacatgtgcaa

SEQ ID NO: 104636 - DNA, 15 bp, Homo sapiens
acagagacatgtgca

SEQ ID NO: 104637 - DNA, 15 bp, Homo sapiens
aacagagacatgtgc

SEQ ID NO: 104638 - DNA, 15 bp, Homo sapiens
caacagagacatgtg

SEQ ID NO: 104639 - DNA, 15 bp, Homo sapiens
acaacagagacatgt

SEQ ID NO: 104640 - DNA, 15 bp, Homo sapiens
gacaacagagacatg

SEQ ID NO: 104641 - DNA, 15 bp, Homo sapiens
agacaacagagacat

SEQ ID NO: 104642 - DNA, 15 bp, Homo sapiens
aagacaacagagaca

SEQ ID NO: 104643 - DNA, 15 bp, Homo sapiens
aaagacaacagagac

SEQ ID NO: 104644 - DNA, 15 bp, Homo sapiens
aaaagacaacagaga

SEQ ID NO: 104645 - DNA, 15 bp, Homo sapiens
caaaagacaacagag

SEQ ID NO: 104646 - DNA, 15 bp, Homo sapiens
ccaaaagacaacaga

SEQ ID NO: 104647 - DNA, 15 bp, Homo sapiens
accaaaagacaacag

SEQ ID NO: 104648 - DNA, 15 bp, Homo sapiens
gaccaaaagacaaca

SEQ ID NO: 104649 - DNA, 15 bp, Homo sapiens
tgaccaaaagacaac

SEQ ID NO: 104650 - DNA, 15 bp, Homo sapiens
ctgaccaaaagacaa

SEQ ID NO: 104651 - DNA, 15 bp, Homo sapiens
tctgaccaaaagaca

SEQ ID NO: 104652 - DNA, 15 bp, Homo sapiens
ctctgaccaaaagac

SEQ ID NO: 104653 - DNA, 15 bp, Homo sapiens
actctgaccaaaaga

SEQ ID NO: 104654 - DNA, 15 bp, Homo sapiens
cactctgaccaaaag

SEQ ID NO: 104655 - DNA, 15 bp, Homo sapiens
tcactctgaccaaaa

SEQ ID NO: 104656 - DNA, 15 bp, Homo sapiens
ttcactctgaccaaa

SEQ ID NO: 104657 - DNA, 15 bp, Homo sapiens
cttcactctgaccaa

SEQ ID NO: 104658 - DNA, 15 bp, Homo sapiens
gcttcactctgacca

SEQ ID NO: 104659 - DNA, 15 bp, Homo sapiens
agcttcactctgacc

SEQ ID NO: 104660 - DNA, 15 bp, Homo sapiens
tagcttcactctgac

SEQ ID NO: 104661 - DNA, 15 bp, Homo sapiens
ttagcttcactctga

SEQ ID NO: 104662 - DNA, 15 bp, Homo sapiens
tttagcttcactctg

SEQ ID NO: 104663 - DNA, 15 bp, Homo sapiens
atttagcttcactct

SEQ ID NO: 104664 - DNA, 15 bp, Homo sapiens
catttagcttcactc

SEQ ID NO: 104665 - DNA, 15 bp, Homo sapiens
acatttagcttcact

SEQ ID NO: 104666 - DNA, 15 bp, Homo sapiens
cacatttagcttcac

SEQ ID NO: 104667 - DNA, 15 bp, Homo sapiens
acacatttagcttca

SEQ ID NO: 104668 - DNA, 15 bp, Homo sapiens
aacacatttagcttc

SEQ ID NO: 104669 - DNA, 15 bp, Homo sapiens
aaacacatttagctt

SEQ ID NO: 104670 - DNA, 15 bp, Homo sapiens
aaaacacatttagct

SEQ ID NO: 104671 - DNA, 15 bp, Homo sapiens
aaaaacacatttagc

SEQ ID NO: 104672 - DNA, 15 bp, Homo sapiens
gaaaaacacatttag

SEQ ID NO: 104673 - DNA, 15 bp, Homo sapiens
tgaaaaacacattta

SEQ ID NO: 104674 - DNA, 15 bp, Homo sapiens
gtgaaaaacacattt

SEQ ID NO: 104675 - DNA, 15 bp, Homo sapiens
tgtgaaaaacacatt

SEQ ID NO: 104676 - DNA, 15 bp, Homo sapiens
atgtgaaaaacacat

SEQ ID NO: 104677 - DNA, 15 bp, Homo sapiens
tatgtgaaaaacaca

SEQ ID NO: 104678 - DNA, 15 bp, Homo sapiens
ttatgtgaaaaacac

SEQ ID NO: 104679 - DNA, 15 bp, Homo sapiens
attatgtgaaaaaca

SEQ ID NO: 104680 - DNA, 15 bp, Homo sapiens
aattatgtgaaaaac

SEQ ID NO: 104681 - DNA, 15 bp, Homo sapiens
aaattatgtgaaaaa

SEQ ID NO: 104682 - DNA, 15 bp, Homo sapiens
caaattatgtgaaaa

SEQ ID NO: 104683 - DNA, 15 bp, Homo sapiens
acaaattatgtgaaa

SEQ ID NO: 104684 - DNA, 15 bp, Homo sapiens
tacaaattatgtgaa

SEQ ID NO: 104685 - DNA, 15 bp, Homo sapiens
ctacaaattatgtga

SEQ ID NO: 104686 - DNA, 15 bp, Homo sapiens
gctacaaattatgtg

SEQ ID NO: 104687 - DNA, 15 bp, Homo sapiens
ggctacaaattatgt

SEQ ID NO: 104688 - DNA, 15 bp, Homo sapiens
aggctacaaattatg

SEQ ID NO: 104689 - DNA, 15 bp, Homo sapiens
taggctacaaattat

SEQ ID NO: 104690 - DNA, 15 bp, Homo sapiens
ataggctacaaatta

SEQ ID NO: 104691 - DNA, 15 bp, Homo sapiens
tataggctacaaatt

SEQ ID NO: 104692 - DNA, 15 bp, Homo sapiens
atataggctacaaat

SEQ ID NO: 104693 - DNA, 15 bp, Homo sapiens
catataggctacaaa

SEQ ID NO: 104694 - DNA, 15 bp, Homo sapiens
tcatataggctacaa

SEQ ID NO: 104695 - DNA, 15 bp, Homo sapiens
ttcatataggctaca

SEQ ID NO: 104696 - DNA, 15 bp, Homo sapiens
cttcatataggctac

SEQ ID NO: 104697 - DNA, 15 bp, Homo sapiens
acttcatataggcta

SEQ ID NO: 104698 - DNA, 15 bp, Homo sapiens
gacttcatataggct

SEQ ID NO: 104699 - DNA, 15 bp, Homo sapiens
ggacttcatataggc

SEQ ID NO: 104700 - DNA, 15 bp, Homo sapiens
aggacttcatatagg

SEQ ID NO: 104701 - DNA, 15 bp, Homo sapiens
caggacttcatatag

SEQ ID NO: 104702 - DNA, 15 bp, Homo sapiens
ccaggacttcatata

SEQ ID NO: 104703 - DNA, 15 bp, Homo sapiens
tccaggacttcatat

SEQ ID NO: 104704 - DNA, 15 bp, Homo sapiens
gtccaggacttcata

SEQ ID NO: 104705 - DNA, 15 bp, Homo sapiens
tgtccaggacttcat

SEQ ID NO: 104706 - DNA, 15 bp, Homo sapiens
atgtccaggacttca

SEQ ID NO: 104707 - DNA, 15 bp, Homo sapiens
catgtccaggacttc

SEQ ID NO: 104708 - DNA, 15 bp, Homo sapiens
acatgtccaggactt

SEQ ID NO: 104709 - DNA, 15 bp, Homo sapiens
cacatgtccaggact

SEQ ID NO: 104710 - DNA, 15 bp, Homo sapiens
ccacatgtccaggac

SEQ ID NO: 104711 - DNA, 15 bp, Homo sapiens
accacatgtccagga

SEQ ID NO: 104712 - DNA, 15 bp, Homo sapiens
taccacatgtccagg

SEQ ID NO: 104713 - DNA, 15 bp, Homo sapiens
ataccacatgtccag

SEQ ID NO: 104714 - DNA, 15 bp, Homo sapiens
cataccacatgtcca

SEQ ID NO: 104715 - DNA, 15 bp, Homo sapiens
ccataccacatgtcc

SEQ ID NO: 104716 - DNA, 15 bp, Homo sapiens
accataccacatgtc

SEQ ID NO: 104717 - DNA, 15 bp, Homo sapiens
aaccataccacatgt

SEQ ID NO: 104718 - DNA, 15 bp, Homo sapiens
caaccataccacatg

SEQ ID NO: 104719 - DNA, 15 bp, Homo sapiens
ccaaccataccacat

SEQ ID NO: 104720 - DNA, 15 bp, Homo sapiens
tccaaccataccaca

SEQ ID NO: 104721 - DNA, 15 bp, Homo sapiens
ttccaaccataccac

SEQ ID NO: 104722 - DNA, 15 bp, Homo sapiens
cttccaaccatacca

SEQ ID NO: 104723 - DNA, 15 bp, Homo sapiens
ccttccaaccatacc

SEQ ID NO: 104724 - DNA, 15 bp, Homo sapiens
tccttccaaccatac

SEQ ID NO: 104725 - DNA, 15 bp, Homo sapiens
gtccttccaaccata

SEQ ID NO: 104726 - DNA, 15 bp, Homo sapiens
agtccttccaaccat

SEQ ID NO: 104727 - DNA, 15 bp, Homo sapiens
cagtccttccaacca

SEQ ID NO: 104728 - DNA, 15 bp, Homo sapiens
acagtccttccaacc

SEQ ID NO: 104729 - DNA, 15 bp, Homo sapiens
aacagtccttccaac

SEQ ID NO: 104730 - DNA, 15 bp, Homo sapiens
caacagtccttccaa

SEQ ID NO: 104731 - DNA, 15 bp, Homo sapiens
tcaacagtccttcca

SEQ ID NO: 104732 - DNA, 15 bp, Homo sapiens
atcaacagtccttcc

SEQ ID NO: 104733 - DNA, 15 bp, Homo sapiens
catcaacagtccttc

SEQ ID NO: 104734 - DNA, 15 bp, Homo sapiens
tcatcaacagtcctt

SEQ ID NO: 104735 - DNA, 15 bp, Homo sapiens
ctcatcaacagtcct

SEQ ID NO: 104736 - DNA, 15 bp, Homo sapiens
cctcatcaacagtcc

SEQ ID NO: 104737 - DNA, 15 bp, Homo sapiens
acctcatcaacagtc

SEQ ID NO: 104738 - DNA, 15 bp, Homo sapiens
aacctcatcaacagt

SEQ ID NO: 104739 - DNA, 15 bp, Homo sapiens
aaacctcatcaacag

SEQ ID NO: 104740 - DNA, 15 bp, Homo sapiens
taaacctcatcaaca

SEQ ID NO: 104741 - DNA, 15 bp, Homo sapiens
ataaacctcatcaac

SEQ ID NO: 104742 - DNA, 15 bp, Homo sapiens
aataaacctcatcaa

SEQ ID NO: 104743 - DNA, 15 bp, Homo sapiens
caataaacctcatca

SEQ ID NO: 104744 - DNA, 15 bp, Homo sapiens
acaataaacctcatc

SEQ ID NO: 104745 - DNA, 15 bp, Homo sapiens
gacaataaacctcat

SEQ ID NO: 104746 - DNA, 15 bp, Homo sapiens
agacaataaacctca

SEQ ID NO: 104747 - DNA, 15 bp, Homo sapiens
gagacaataaacctc

SEQ ID NO: 104748 - DNA, 15 bp, Homo sapiens
agagacaataaacct

SEQ ID NO: 104749 - DNA, 15 bp, Homo sapiens
gagagacaataaacc

SEQ ID NO: 104750 - DNA, 15 bp, Homo sapiens
agagagacaataaac

SEQ ID NO: 104751 - DNA, 15 bp, Homo sapiens
aagagagacaataaa

SEQ ID NO: 104752 - DNA, 15 bp, Homo sapiens
aaagagagacaataa

SEQ ID NO: 104753 - DNA, 15 bp, Homo sapiens
taaagagagacaata

SEQ ID NO: 104754 - DNA, 15 bp, Homo sapiens
ataaagagagacaat

SEQ ID NO: 104755 - DNA, 15 bp, Homo sapiens
aataaagagagacaa

SEQ ID NO: 104756 - DNA, 15 bp, Homo sapiens
gaataaagagagaca

SEQ ID NO: 104757 - DNA, 15 bp, Homo sapiens
agaataaagagagac

SEQ ID NO: 104758 - DNA, 15 bp, Homo sapiens
aagaataaagagaga

SEQ ID NO: 104759 - DNA, 15 bp, Homo sapiens
aaagaataaagagag

SEQ ID NO: 104760 - DNA, 15 bp, Homo sapiens
aaaagaataaagaga

SEQ ID NO: 104761 - DNA, 15 bp, Homo sapiens
taaaagaataaagag

SEQ ID NO: 104762 - DNA, 15 bp, Homo sapiens
ataaaagaataaaga

SEQ ID NO: 104763 - DNA, 15 bp, Homo sapiens
cataaaagaataaag

SEQ ID NO: 104764 - DNA, 15 bp, Homo sapiens
acataaaagaataaa

SEQ ID NO: 104765 - DNA, 15 bp, Homo sapiens
aacataaaagaataa

SEQ ID NO: 104766 - DNA, 15 bp, Homo sapiens
caacataaaagaata

SEQ ID NO: 104767 - DNA, 15 bp, Homo sapiens
acaacataaaagaat

SEQ ID NO: 104768 - DNA, 15 bp, Homo sapiens
aacaacataaaagaa

SEQ ID NO: 104769 - DNA, 15 bp, Homo sapiens
taacaacataaaaga

SEQ ID NO: 104770 - DNA, 15 bp, Homo sapiens
ctaacaacataaaag

SEQ ID NO: 104771 - DNA, 15 bp, Homo sapiens
actaacaacataaaa

SEQ ID NO: 104772 - DNA, 15 bp, Homo sapiens
cactaacaacataaa

SEQ ID NO: 104773 - DNA, 15 bp, Homo sapiens
acactaacaacataa

SEQ ID NO: 104774 - DNA, 15 bp, Homo sapiens
gacactaacaacata

SEQ ID NO: 104775 - DNA, 15 bp, Homo sapiens
ggacactaacaacat

SEQ ID NO: 104776 - DNA, 15 bp, Homo sapiens
gggacactaacaaca

SEQ ID NO: 104777 - DNA, 15 bp, Homo sapiens
ggggacactaacaac

SEQ ID NO: 104778 - DNA, 15 bp, Homo sapiens
tggggacactaacaa

SEQ ID NO: 104779 - DNA, 15 bp, Homo sapiens
atggggacactaaca

SEQ ID NO: 104780 - DNA, 15 bp, Homo sapiens
tatggggacactaac

SEQ ID NO: 104781 - DNA, 15 bp, Homo sapiens
gtatggggacactaa

SEQ ID NO: 104782 - DNA, 15 bp, Homo sapiens
tgtatggggacacta

SEQ ID NO: 104783 - DNA, 15 bp, Homo sapiens
ttgtatggggacact

SEQ ID NO: 104784 - DNA, 15 bp, Homo sapiens
gttgtatggggacac

SEQ ID NO: 104785 - DNA, 15 bp, Homo sapiens
cgttgtatggggaca

SEQ ID NO: 104786 - DNA, 15 bp, Homo sapiens
ccgttgtatggggac

SEQ ID NO: 104787 - DNA, 15 bp, Homo sapiens
cccgttgtatgggga

SEQ ID NO: 104788 - DNA, 15 bp, Homo sapiens
ccccgttgtatgggg

SEQ ID NO: 104789 - DNA, 15 bp, Homo sapiens
gccccgttgtatggg

SEQ ID NO: 104790 - DNA, 15 bp, Homo sapiens
cgccccgttgtatgg

SEQ ID NO: 104791 - DNA, 15 bp, Homo sapiens
ccgccccgttgtatg

SEQ ID NO: 104792 - DNA, 15 bp, Homo sapiens
cccgccccgttgtat

SEQ ID NO: 104793 - DNA, 15 bp, Homo sapiens
ccccgccccgttgta

SEQ ID NO: 104794 - DNA, 15 bp, Homo sapiens
cccccgccccgttgt

SEQ ID NO: 104795 - DNA, 15 bp, Homo sapiens
ccccccgccccgttg

SEQ ID NO: 104796 - DNA, 15 bp, Homo sapiens
tccccccgccccgtt

SEQ ID NO: 104797 - DNA, 15 bp, Homo sapiens
ctccccccgccccgt

SEQ ID NO: 104798 - DNA, 15 bp, Homo sapiens
actccccccgccccg

SEQ ID NO: 104799 - DNA, 15 bp, Homo sapiens
cactccccccgcccc

SEQ ID NO: 104800 - DNA, 15 bp, Homo sapiens
ccactccccccgccc

SEQ ID NO: 104801 - DNA, 15 bp, Homo sapiens
cccactccccccgcc

SEQ ID NO: 104802 - DNA, 15 bp, Homo sapiens
ccccactccccccgc

SEQ ID NO: 104803 - DNA, 15 bp, Homo sapiens
tccccactccccccg

SEQ ID NO: 104804 - DNA, 15 bp, Homo sapiens
gtccccactcccccc

SEQ ID NO: 104805 - DNA, 15 bp, Homo sapiens
tgtccccactccccc

SEQ ID NO: 104806 - DNA, 15 bp, Homo sapiens
ttgtccccactcccc

SEQ ID NO: 104807 - DNA, 15 bp, Homo sapiens
tttgtccccactccc

SEQ ID NO: 104808 - DNA, 15 bp, Homo sapiens
ttttgtccccactcc

SEQ ID NO: 104809 - DNA, 15 bp, Homo sapiens
attttgtccccactc

SEQ ID NO: 104810 - DNA, 15 bp, Homo sapiens
cattttgtccccact

SEQ ID NO: 104811 - DNA, 15 bp, Homo sapiens
tcattttgtccccac

SEQ ID NO: 104812 - DNA, 15 bp, Homo sapiens
atcattttgtcccca

SEQ ID NO: 104813 - DNA, 15 bp, Homo sapiens
tatcattttgtcccc

SEQ ID NO: 104814 - DNA, 15 bp, Homo sapiens
ttatcattttgtccc

SEQ ID NO: 104815 - DNA, 15 bp, Homo sapiens
gttatcattttgtcc

SEQ ID NO: 104816 - DNA, 15 bp, Homo sapiens
agttatcattttgtc

SEQ ID NO: 104817 - DNA, 15 bp, Homo sapiens
aagttatcattttgt

SEQ ID NO: 104818 - DNA, 15 bp, Homo sapiens
caagttatcattttg

SEQ ID NO: 104819 - DNA, 15 bp, Homo sapiens
gcaagttatcatttt

SEQ ID NO: 104820 - DNA, 15 bp, Homo sapiens
agcaagttatcattt

SEQ ID NO: 104821 - DNA, 15 bp, Homo sapiens
aagcaagttatcatt

SEQ ID NO: 104822 - DNA, 15 bp, Homo sapiens
aaagcaagttatcat

SEQ ID NO: 104823 - DNA, 15 bp, Homo sapiens
taaagcaagttatca

SEQ ID NO: 104824 - DNA, 15 bp, Homo sapiens
ataaagcaagttatc

SEQ ID NO: 104825 - DNA, 15 bp, Homo sapiens
tataaagcaagttat

SEQ ID NO: 104826 - DNA, 15 bp, Homo sapiens
atataaagcaagtta

SEQ ID NO: 104827 - DNA, 15 bp, Homo sapiens
tatataaagcaagtt

SEQ ID NO: 104828 - DNA, 15 bp, Homo sapiens
atatataaagcaagt

SEQ ID NO: 104829 - DNA, 15 bp, Homo sapiens
catatataaagcaag

SEQ ID NO: 104830 - DNA, 15 bp, Homo sapiens
tcatatataaagcaa

SEQ ID NO: 104831 - DNA, 15 bp, Homo sapiens
ttcatatataaagca

SEQ ID NO: 104832 - DNA, 15 bp, Homo sapiens
cttcatatataaagc

SEQ ID NO: 104833 - DNA, 15 bp, Homo sapiens
gcttcatatataaag

SEQ ID NO: 104834 - DNA, 15 bp, Homo sapiens
ggcttcatatataaa

SEQ ID NO: 104835 - DNA, 15 bp, Homo sapiens
aggcttcatatataa

SEQ ID NO: 104836 - DNA, 15 bp, Homo sapiens
aaggcttcatatata

SEQ ID NO: 104837 - DNA, 15 bp, Homo sapiens
caaggcttcatatat

SEQ ID NO: 104838 - DNA, 15 bp, Homo sapiens
ccaaggcttcatata

SEQ ID NO: 104839 - DNA, 15 bp, Homo sapiens
cccaaggcttcatat

SEQ ID NO: 104840 - DNA, 15 bp, Homo sapiens
acccaaggcttcata

SEQ ID NO: 104841 - DNA, 15 bp, Homo sapiens
aacccaaggcttcat

SEQ ID NO: 104842 - DNA, 15 bp, Homo sapiens
aaacccaaggcttca

SEQ ID NO: 104843 - DNA, 15 bp, Homo sapiens
caaacccaaggcttc

SEQ ID NO: 104844 - DNA, 15 bp, Homo sapiens
tcaaacccaaggctt

SEQ ID NO: 104845 - DNA, 15 bp, Homo sapiens
ttcaaacccaaggct

SEQ ID NO: 104846 - DNA, 15 bp, Homo sapiens
attcaaacccaaggc

SEQ ID NO: 104847 - DNA, 15 bp, Homo sapiens
gattcaaacccaagg

SEQ ID NO: 104848 - DNA, 15 bp, Homo sapiens
tgattcaaacccaag

SEQ ID NO: 104849 - DNA, 15 bp, Homo sapiens
atgattcaaacccaa

SEQ ID NO: 104850 - DNA, 15 bp, Homo sapiens
tatgattcaaaccca

SEQ ID NO: 104851 - DNA, 15 bp, Homo sapiens
gtatgattcaaaccc

SEQ ID NO: 104852 - DNA, 15 bp, Homo sapiens
agtatgattcaaacc

SEQ ID NO: 104853 - DNA, 15 bp, Homo sapiens
cagtatgattcaaac

SEQ ID NO: 104854 - DNA, 15 bp, Homo sapiens
acagtatgattcaaa

SEQ ID NO: 104855 - DNA, 15 bp, Homo sapiens
aacagtatgattcaa

SEQ ID NO: 104856 - DNA, 15 bp, Homo sapiens
taacagtatgattca

SEQ ID NO: 104857 - DNA, 15 bp, Homo sapiens
ataacagtatgattc

SEQ ID NO: 104858 - DNA, 15 bp, Homo sapiens
gataacagtatgatt

SEQ ID NO: 104859 - DNA, 15 bp, Homo sapiens
tgataacagtatgat

SEQ ID NO: 104860 - DNA, 15 bp, Homo sapiens
gtgataacagtatga

SEQ ID NO: 104861 - DNA, 15 bp, Homo sapiens
tgtgataacagtatg

SEQ ID NO: 104862 - DNA, 15 bp, Homo sapiens
atgtgataacagtat

SEQ ID NO: 104863 - DNA, 15 bp, Homo sapiens
aatgtgataacagta

SEQ ID NO: 104864 - DNA, 15 bp, Homo sapiens
aaatgtgataacagt

SEQ ID NO: 104865 - DNA, 15 bp, Homo sapiens
gaaatgtgataacag

SEQ ID NO: 104866 - DNA, 15 bp, Homo sapiens
ggaaatgtgataaca

SEQ ID NO: 104867 - DNA, 15 bp, Homo sapiens
aggaaatgtgataac

SEQ ID NO: 104868 - DNA, 15 bp, Homo sapiens
taggaaatgtgataa

SEQ ID NO: 104869 - DNA, 15 bp, Homo sapiens
ataggaaatgtgata

SEQ ID NO: 104870 - DNA, 15 bp, Homo sapiens
cataggaaatgtgat

SEQ ID NO: 104871 - DNA, 15 bp, Homo sapiens
acataggaaatgtga

SEQ ID NO: 104872 - DNA, 15 bp, Homo sapiens
gacataggaaatgtg

SEQ ID NO: 104873 - DNA, 15 bp, Homo sapiens
ggacataggaaatgt

SEQ ID NO: 104874 - DNA, 15 bp, Homo sapiens
gggacataggaaatg

SEQ ID NO: 104875 - DNA, 15 bp, Homo sapiens
agggacataggaaat

SEQ ID NO: 104876 - DNA, 15 bp, Homo sapiens
tagggacataggaaa

SEQ ID NO: 104877 - DNA, 15 bp, Homo sapiens
atagggacataggaa

SEQ ID NO: 104878 - DNA, 15 bp, Homo sapiens
gatagggacatagga

SEQ ID NO: 104879 - DNA, 15 bp, Homo sapiens
ggatagggacatagg

SEQ ID NO: 104880 - DNA, 15 bp, Homo sapiens
aggatagggacatag

SEQ ID NO: 104881 - DNA, 15 bp, Homo sapiens
caggatagggacata

SEQ ID NO: 104882 - DNA, 15 bp, Homo sapiens
acaggatagggacat

SEQ ID NO: 104883 - DNA, 15 bp, Homo sapiens
gacaggatagggaca

SEQ ID NO: 104884 - DNA, 15 bp, Homo sapiens
agacaggatagggac

SEQ ID NO: 104885 - DNA, 15 bp, Homo sapiens
gagacaggataggga

SEQ ID NO: 104886 - DNA, 15 bp, Homo sapiens
ggagacaggataggg

SEQ ID NO: 104887 - DNA, 15 bp, Homo sapiens
aggagacaggatagg

SEQ ID NO: 104888 - DNA, 15 bp, Homo sapiens
caggagacaggatag

SEQ ID NO: 104889 - DNA, 15 bp, Homo sapiens
gcaggagacaggata

SEQ ID NO: 104890 - DNA, 15 bp, Homo sapiens
tgcaggagacaggat

SEQ ID NO: 104891 - DNA, 15 bp, Homo sapiens
ctgcaggagacagga

SEQ ID NO: 104892 - DNA, 15 bp, Homo sapiens
cctgcaggagacagg

SEQ ID NO: 104893 - DNA, 15 bp, Homo sapiens
acctgcaggagacag

SEQ ID NO: 104894 - DNA, 15 bp, Homo sapiens
aacctgcaggagaca

SEQ ID NO: 104895 - DNA, 15 bp, Homo sapiens
aaacctgcaggagac

SEQ ID NO: 104896 - DNA, 15 bp, Homo sapiens
aaaacctgcaggaga

SEQ ID NO: 104897 - DNA, 15 bp, Homo sapiens
gaaaacctgcaggag

SEQ ID NO: 104898 - DNA, 15 bp, Homo sapiens
agaaaacctgcagga

SEQ ID NO: 104899 - DNA, 15 bp, Homo sapiens
aagaaaacctgcagg

SEQ ID NO: 104900 - DNA, 15 bp, Homo sapiens
aaagaaaacctgcag

SEQ ID NO: 104901 - DNA, 15 bp, Homo sapiens
gaaagaaaacctgca

SEQ ID NO: 104902 - DNA, 15 bp, Homo sapiens
agaaagaaaacctgc

SEQ ID NO: 104903 - DNA, 15 bp, Homo sapiens
aagaaagaaaacctg

SEQ ID NO: 104904 - DNA, 15 bp, Homo sapiens
caagaaagaaaacct

SEQ ID NO: 104905 - DNA, 15 bp, Homo sapiens
ccaagaaagaaaacc

SEQ ID NO: 104906 - DNA, 15 bp, Homo sapiens
accaagaaagaaaac

SEQ ID NO: 104907 - DNA, 15 bp, Homo sapiens
aaccaagaaagaaaa

SEQ ID NO: 104908 - DNA, 15 bp, Homo sapiens
aaaccaagaaagaaa

SEQ ID NO: 104909 - DNA, 15 bp, Homo sapiens
aaaaccaagaaagaa

SEQ ID NO: 104910 - DNA, 15 bp, Homo sapiens
gaaaaccaagaaaga

SEQ ID NO: 104911 - DNA, 15 bp, Homo sapiens
agaaaaccaagaaag

SEQ ID NO: 104912 - DNA, 15 bp, Homo sapiens
aagaaaaccaagaaa

SEQ ID NO: 104913 - DNA, 15 bp, Homo sapiens
aaagaaaaccaagaa

SEQ ID NO: 104914 - DNA, 15 bp, Homo sapiens
aaaagaaaaccaaga

SEQ ID NO: 104915 - DNA, 15 bp, Homo sapiens
aaaaagaaaaccaag

SEQ ID NO: 104916 - DNA, 15 bp, Homo sapiens
aaaaaagaaaaccaa

SEQ ID NO: 104917 - DNA, 15 bp, Homo sapiens
caaaaaagaaaacca

SEQ ID NO: 104918 - DNA, 15 bp, Homo sapiens
ccaaaaaagaaaacc

SEQ ID NO: 104919 - DNA, 15 bp, Homo sapiens
accaaaaaagaaaac

SEQ ID NO: 104920 - DNA, 15 bp, Homo sapiens
aaccaaaaaagaaaa

SEQ ID NO: 104921 - DNA, 15 bp, Homo sapiens
aaaccaaaaaagaaa

SEQ ID NO: 104922 - DNA, 15 bp, Homo sapiens
aaaaccaaaaaagaa

SEQ ID NO: 104923 - DNA, 15 bp, Homo sapiens
gaaaaccaaaaaaga

SEQ ID NO: 104924 - DNA, 15 bp, Homo sapiens
agaaaaccaaaaaag

SEQ ID NO: 104925 - DNA, 15 bp, Homo sapiens
aagaaaaccaaaaaa

SEQ ID NO: 104926 - DNA, 15 bp, Homo sapiens
aaagaaaaccaaaaa

SEQ ID NO: 104927 - DNA, 15 bp, Homo sapiens
gaaagaaaaccaaaa

SEQ ID NO: 104928 - DNA, 15 bp, Homo sapiens
agaaagaaaaccaaa

SEQ ID NO: 104929 - DNA, 15 bp, Homo sapiens
aagaaagaaaaccaa

SEQ ID NO: 104930 - DNA, 15 bp, Homo sapiens
gaagaaagaaaacca

SEQ ID NO: 104931 - DNA, 15 bp, Homo sapiens
ggaagaaagaaaacc

SEQ ID NO: 104932 - DNA, 15 bp, Homo sapiens
aggaagaaagaaaac

SEQ ID NO: 104933 - DNA, 15 bp, Homo sapiens
aaggaagaaagaaaa

SEQ ID NO: 104934 - DNA, 15 bp, Homo sapiens
aaaggaagaaagaaa

SEQ ID NO: 104935 - DNA, 15 bp, Homo sapiens
gaaaggaagaaagaa

SEQ ID NO: 104936 - DNA, 15 bp, Homo sapiens
agaaaggaagaaaga

SEQ ID NO: 104937 - DNA, 15 bp, Homo sapiens
aagaaaggaagaaag

SEQ ID NO: 104938 - DNA, 15 bp, Homo sapiens
gaagaaaggaagaaa

SEQ ID NO: 104939 - DNA, 15 bp, Homo sapiens
ggaagaaaggaagaa

SEQ ID NO: 104940 - DNA, 15 bp, Homo sapiens
aggaagaaaggaaga

SEQ ID NO: 104941 - DNA, 15 bp, Homo sapiens
aaggaagaaaggaag

SEQ ID NO: 104942 - DNA, 15 bp, Homo sapiens
aaaggaagaaaggaa

SEQ ID NO: 104943 - DNA, 15 bp, Homo sapiens
gaaaggaagaaagga

SEQ ID NO: 104944 - DNA, 15 bp, Homo sapiens
agaaaggaagaaagg

SEQ ID NO: 104945 - DNA, 15 bp, Homo sapiens
aaagaaaggaagaaa

SEQ ID NO: 104946 - DNA, 15 bp, Homo sapiens
aaaagaaaggaagaa

SEQ ID NO: 104947 - DNA, 15 bp, Homo sapiens
gaaaagaaaggaaga

SEQ ID NO: 104948 - DNA, 15 bp, Homo sapiens
ggaaaagaaaggaag

SEQ ID NO: 104949 - DNA, 15 bp, Homo sapiens
aggaaaagaaaggaa

SEQ ID NO: 104950 - DNA, 15 bp, Homo sapiens
aaggaaaagaaagga

SEQ ID NO: 104951 - DNA, 15 bp, Homo sapiens
aaaggaaaagaaagg

SEQ ID NO: 104952 - DNA, 15 bp, Homo sapiens
gaaaggaaaagaaag

SEQ ID NO: 104953 - DNA, 15 bp, Homo sapiens
agaaaggaaaagaaa

SEQ ID NO: 104954 - DNA, 15 bp, Homo sapiens
aagaaaggaaaagaa

SEQ ID NO: 104955 - DNA, 15 bp, Homo sapiens
aaagaaaggaaaaga

SEQ ID NO: 104956 - DNA, 15 bp, Homo sapiens
gaaagaaaggaaaag

SEQ ID NO: 104957 - DNA, 15 bp, Homo sapiens
ggaaagaaaggaaaa

SEQ ID NO: 104958 - DNA, 15 bp, Homo sapiens
aggaaagaaaggaaa

SEQ ID NO: 104959 - DNA, 15 bp, Homo sapiens
aaggaaagaaaggaa

SEQ ID NO: 104960 - DNA, 15 bp, Homo sapiens
aaaggaaagaaagga

SEQ ID NO: 104961 - DNA, 15 bp, Homo sapiens
gaaaggaaagaaagg

SEQ ID NO: 104962 - DNA, 15 bp, Homo sapiens
agaaaggaaagaaag

SEQ ID NO: 104963 - DNA, 15 bp, Homo sapiens
aagaaaggaaagaaa

SEQ ID NO: 104964 - DNA, 15 bp, Homo sapiens
gaagaaaggaaagaa

SEQ ID NO: 104965 - DNA, 15 bp, Homo sapiens
ggaagaaaggaaaga

SEQ ID NO: 104966 - DNA, 15 bp, Homo sapiens
aggaagaaaggaaag

SEQ ID NO: 104967 - DNA, 15 bp, Homo sapiens
aaggaagaaaggaaa

SEQ ID NO: 104968 - DNA, 15 bp, Homo sapiens
aaaaggaagaaagga

SEQ ID NO: 104969 - DNA, 15 bp, Homo sapiens
aaaaaggaagaaagg

SEQ ID NO: 104970 - DNA, 15 bp, Homo sapiens
aaaaaaggaagaaag

SEQ ID NO: 104971 - DNA, 15 bp, Homo sapiens
gaaaaaaggaagaaa

SEQ ID NO: 104972 - DNA, 15 bp, Homo sapiens
agaaaaaaggaagaa

SEQ ID NO: 104973 - DNA, 15 bp, Homo sapiens
aagaaaaaaggaaga

SEQ ID NO: 104974 - DNA, 15 bp, Homo sapiens
aaagaaaaaaggaag

SEQ ID NO: 104975 - DNA, 15 bp, Homo sapiens
gaaagaaaaaaggaa

SEQ ID NO: 104976 - DNA, 15 bp, Homo sapiens
ggaaagaaaaaagga

SEQ ID NO: 104977 - DNA, 15 bp, Homo sapiens
aggaaagaaaaaagg

SEQ ID NO: 104978 - DNA, 15 bp, Homo sapiens
aaggaaagaaaaaag

SEQ ID NO: 104979 - DNA, 15 bp, Homo sapiens
aaaggaaagaaaaaa

SEQ ID NO: 104980 - DNA, 15 bp, Homo sapiens
aaaaggaaagaaaaa

SEQ ID NO: 104981 - DNA, 15 bp, Homo sapiens
gaaaaggaaagaaaa

SEQ ID NO: 104982 - DNA, 15 bp, Homo sapiens
agaaaaggaaagaaa

SEQ ID NO: 104983 - DNA, 15 bp, Homo sapiens
aagaaaaggaaagaa

SEQ ID NO: 104984 - DNA, 15 bp, Homo sapiens
aaagaaaaggaaaga

SEQ ID NO: 104985 - DNA, 15 bp, Homo sapiens
aaaagaaaaggaaag

SEQ ID NO: 104986 - DNA, 15 bp, Homo sapiens
aaaaagaaaaggaaa

SEQ ID NO: 104987 - DNA, 15 bp, Homo sapiens
aaaaaagaaaaggaa

SEQ ID NO: 104988 - DNA, 15 bp, Homo sapiens
gaaaaaagaaaagga

SEQ ID NO: 104989 - DNA, 15 bp, Homo sapiens
ggaaaaaagaaaagg

SEQ ID NO: 104990 - DNA, 15 bp, Homo sapiens
aggaaaaaagaaaag

SEQ ID NO: 104991 - DNA, 15 bp, Homo sapiens
aaggaaaaaagaaaa

SEQ ID NO: 104992 - DNA, 15 bp, Homo sapiens
aaaggaaaaaagaaa

SEQ ID NO: 104993 - DNA, 15 bp, Homo sapiens
gaaaggaaaaaagaa

SEQ ID NO: 104994 - DNA, 15 bp, Homo sapiens
agaaaggaaaaaaga

SEQ ID NO: 104995 - DNA, 15 bp, Homo sapiens
aagaaaggaaaaaag

SEQ ID NO: 104996 - DNA, 15 bp, Homo sapiens
aaagaaaggaaaaaa

SEQ ID NO: 104997 - DNA, 15 bp, Homo sapiens
gaaagaaaggaaaaa

SEQ ID NO: 104998 - DNA, 15 bp, Homo sapiens
gaaggaaagaaagga

SEQ ID NO: 104999 - DNA, 15 bp, Homo sapiens
tgaaggaaagaaagg

SEQ ID NO: 105000 - DNA, 15 bp, Homo sapiens
atgaaggaaagaaag

SEQ ID NO: 105001 - DNA, 15 bp, Homo sapiens
aatgaaggaaagaaa

SEQ ID NO: 105002 - DNA, 15 bp, Homo sapiens
aaatgaaggaaagaa

SEQ ID NO: 105003 - DNA, 15 bp, Homo sapiens
gaaatgaaggaaaga

SEQ ID NO: 105004 - DNA, 15 bp, Homo sapiens
agaaatgaaggaaag

SEQ ID NO: 105005 - DNA, 15 bp, Homo sapiens
gagaaatgaaggaaa

SEQ ID NO: 105006 - DNA, 15 bp, Homo sapiens
agagaaatgaaggaa

SEQ ID NO: 105007 - DNA, 15 bp, Homo sapiens
gagagaaatgaagga

SEQ ID NO: 105008 - DNA, 15 bp, Homo sapiens
ggagagaaatgaagg

SEQ ID NO: 105009 - DNA, 15 bp, Homo sapiens
aggagagaaatgaag

SEQ ID NO: 105010 - DNA, 15 bp, Homo sapiens
aaggagagaaatgaa

SEQ ID NO: 105011 - DNA, 15 bp, Homo sapiens
aaaggagagaaatga

SEQ ID NO: 105012 - DNA, 15 bp, Homo sapiens
caaaggagagaaatg

SEQ ID NO: 105013 - DNA, 15 bp, Homo sapiens
gcaaaggagagaaat

SEQ ID NO: 105014 - DNA, 15 bp, Homo sapiens
agcaaaggagagaaa

SEQ ID NO: 105015 - DNA, 15 bp, Homo sapiens
gagcaaaggagagaa

SEQ ID NO: 105016 - DNA, 15 bp, Homo sapiens
ggagcaaaggagaga

SEQ ID NO: 105017 - DNA, 15 bp, Homo sapiens
aggagcaaaggagag

SEQ ID NO: 105018 - DNA, 15 bp, Homo sapiens
aaggagcaaaggaga

SEQ ID NO: 105019 - DNA, 15 bp, Homo sapiens
aaaggagcaaaggag

SEQ ID NO: 105020 - DNA, 15 bp, Homo sapiens
taaaggagcaaagga

SEQ ID NO: 105021 - DNA, 15 bp, Homo sapiens
ctaaaggagcaaagg

SEQ ID NO: 105022 - DNA, 15 bp, Homo sapiens
actaaaggagcaaag

SEQ ID NO: 105023 - DNA, 15 bp, Homo sapiens
aactaaaggagcaaa

SEQ ID NO: 105024 - DNA, 15 bp, Homo sapiens
aaactaaaggagcaa

SEQ ID NO: 105025 - DNA, 15 bp, Homo sapiens
caaactaaaggagca

SEQ ID NO: 105026 - DNA, 15 bp, Homo sapiens
acaaactaaaggagc

SEQ ID NO: 105027 - DNA, 15 bp, Homo sapiens
aacaaactaaaggag

SEQ ID NO: 105028 - DNA, 15 bp, Homo sapiens
aaacaaactaaagga

SEQ ID NO: 105029 - DNA, 15 bp, Homo sapiens
gaaacaaactaaagg

SEQ ID NO: 105030 - DNA, 15 bp, Homo sapiens
agaaacaaactaaag

SEQ ID NO: 105031 - DNA, 15 bp, Homo sapiens
aagaaacaaactaaa

SEQ ID NO: 105032 - DNA, 15 bp, Homo sapiens
aaagaaacaaactaa

SEQ ID NO: 105033 - DNA, 15 bp, Homo sapiens
caaagaaacaaacta

SEQ ID NO: 105034 - DNA, 15 bp, Homo sapiens
acaaagaaacaaact

SEQ ID NO: 105035 - DNA, 15 bp, Homo sapiens
aacaaagaaacaaac

SEQ ID NO: 105036 - DNA, 15 bp, Homo sapiens
aaacaaagaaacaaa

SEQ ID NO: 105037 - DNA, 15 bp, Homo sapiens
gaaacaaagaaacaa

SEQ ID NO: 105038 - DNA, 15 bp, Homo sapiens
agaaacaaagaaaca

SEQ ID NO: 105039 - DNA, 15 bp, Homo sapiens
aagaaacaaagaaac

SEQ ID NO: 105040 - DNA, 15 bp, Homo sapiens
aaagaaacaaagaaa

SEQ ID NO: 105041 - DNA, 15 bp, Homo sapiens
caaagaaacaaagaa

SEQ ID NO: 105042 - DNA, 15 bp, Homo sapiens
ccaaagaaacaaaga

SEQ ID NO: 105043 - DNA, 15 bp, Homo sapiens
accaaagaaacaaag

SEQ ID NO: 105044 - DNA, 15 bp, Homo sapiens
aaccaaagaaacaaa

SEQ ID NO: 105045 - DNA, 15 bp, Homo sapiens
aaaccaaagaaacaa

SEQ ID NO: 105046 - DNA, 15 bp, Homo sapiens
caaaccaaagaaaca

SEQ ID NO: 105047 - DNA, 15 bp, Homo sapiens
acaaaccaaagaaac

SEQ ID NO: 105048 - DNA, 15 bp, Homo sapiens
aacaaaccaaagaaa

SEQ ID NO: 105049 - DNA, 15 bp, Homo sapiens
aaacaaaccaaagaa

SEQ ID NO: 105050 - DNA, 15 bp, Homo sapiens
gaaacaaaccaaaga

SEQ ID NO: 105051 - DNA, 15 bp, Homo sapiens
agaaacaaaccaaag

SEQ ID NO: 105052 - DNA, 15 bp, Homo sapiens
aagaaacaaaccaaa

SEQ ID NO: 105053 - DNA, 15 bp, Homo sapiens
aaagaaacaaaccaa

SEQ ID NO: 105054 - DNA, 15 bp, Homo sapiens
caaagaaacaaacca

SEQ ID NO: 105055 - DNA, 15 bp, Homo sapiens
acaaagaaacaaacc

SEQ ID NO: 105056 - DNA, 15 bp, Homo sapiens
taaagaaacaaagaa

SEQ ID NO: 105057 - DNA, 15 bp, Homo sapiens
ctaaagaaacaaaga

SEQ ID NO: 105058 - DNA, 15 bp, Homo sapiens
actaaagaaacaaag

SEQ ID NO: 105059 - DNA, 15 bp, Homo sapiens
aactaaagaaacaaa

SEQ ID NO: 105060 - DNA, 15 bp, Homo sapiens
aaactaaagaaacaa

SEQ ID NO: 105061 - DNA, 15 bp, Homo sapiens
caaactaaagaaaca

SEQ ID NO: 105062 - DNA, 15 bp, Homo sapiens
acaaactaaagaaac

SEQ ID NO: 105063 - DNA, 15 bp, Homo sapiens
aacaaactaaagaaa

SEQ ID NO: 105064 - DNA, 15 bp, Homo sapiens
aaacaaactaaagaa

SEQ ID NO: 105065 - DNA, 15 bp, Homo sapiens
gaaacaaactaaaga

SEQ ID NO: 105066 - DNA, 15 bp, Homo sapiens
acaaagaaacaaaga

SEQ ID NO: 105067 - DNA, 15 bp, Homo sapiens
aacaaagaaacaaag

SEQ ID NO: 105068 - DNA, 15 bp, Homo sapiens
gaaagaaacaaagaa

SEQ ID NO: 105069 - DNA, 15 bp, Homo sapiens
tgaaagaaacaaaga

SEQ ID NO: 105070 - DNA, 15 bp, Homo sapiens
ttgaaagaaacaaag

SEQ ID NO: 105071 - DNA, 15 bp, Homo sapiens
gttgaaagaaacaaa

SEQ ID NO: 105072 - DNA, 15 bp, Homo sapiens
tgttgaaagaaacaa

SEQ ID NO: 105073 - DNA, 15 bp, Homo sapiens
ctgttgaaagaaaca

SEQ ID NO: 105074 - DNA, 15 bp, Homo sapiens
cctgttgaaagaaac

SEQ ID NO: 105075 - DNA, 15 bp, Homo sapiens
acctgttgaaagaaa

SEQ ID NO: 105076 - DNA, 15 bp, Homo sapiens
gacctgttgaaagaa

SEQ ID NO: 105077 - DNA, 15 bp, Homo sapiens
agacctgttgaaaga

SEQ ID NO: 105078 - DNA, 15 bp, Homo sapiens
gagacctgttgaaag

SEQ ID NO: 105079 - DNA, 15 bp, Homo sapiens
tgagacctgttgaaa

SEQ ID NO: 105080 - DNA, 15 bp, Homo sapiens
gtgagacctgttgaa

SEQ ID NO: 105081 - DNA, 15 bp, Homo sapiens
agtgagacctgttga

SEQ ID NO: 105082 - DNA, 15 bp, Homo sapiens
cagtgagacctgttg

SEQ ID NO: 105083 - DNA, 15 bp, Homo sapiens
acagtgagacctgtt

SEQ ID NO: 105084 - DNA, 15 bp, Homo sapiens
gacagtgagacctgt

SEQ ID NO: 105085 - DNA, 15 bp, Homo sapiens
cgacagtgagacctg

SEQ ID NO: 105086 - DNA, 15 bp, Homo sapiens
gcgacagtgagacct

SEQ ID NO: 105087 - DNA, 15 bp, Homo sapiens
ggcgacagtgagacc

SEQ ID NO: 105088 - DNA, 15 bp, Homo sapiens
gggcgacagtgagac

SEQ ID NO: 105089 - DNA, 15 bp, Homo sapiens
tgggcgacagtgaga

SEQ ID NO: 105090 - DNA, 15 bp, Homo sapiens
ctgggcgacagtgag

SEQ ID NO: 105091 - DNA, 15 bp, Homo sapiens
cctgggcgacagtga

SEQ ID NO: 105092 - DNA, 15 bp, Homo sapiens
acctgggcgacagtg

SEQ ID NO: 105093 - DNA, 15 bp, Homo sapiens
aacctgggcgacagt

SEQ ID NO: 105094 - DNA, 15 bp, Homo sapiens
caacctgggcgacag

SEQ ID NO: 105095 - DNA, 15 bp, Homo sapiens
ccaacctgggcgaca

SEQ ID NO: 105096 - DNA, 15 bp, Homo sapiens
tccaacctgggcgac

SEQ ID NO: 105097 - DNA, 15 bp, Homo sapiens
ctccaacctgggcga

SEQ ID NO: 105098 - DNA, 15 bp, Homo sapiens
actccaacctgggcg

SEQ ID NO: 105099 - DNA, 15 bp, Homo sapiens
cactccaacctgggc

SEQ ID NO: 105100 - DNA, 15 bp, Homo sapiens
gcactccaacctggg

SEQ ID NO: 105101 - DNA, 15 bp, Homo sapiens
tgcactccaacctgg

SEQ ID NO: 105102 - DNA, 15 bp, Homo sapiens
ctgcactccaacctg

SEQ ID NO: 105103 - DNA, 15 bp, Homo sapiens
actgcactccaacct

SEQ ID NO: 105104 - DNA, 15 bp, Homo sapiens
cactgcactccaacc

SEQ ID NO: 105105 - DNA, 15 bp, Homo sapiens
ccactgcactccaac

SEQ ID NO: 105106 - DNA, 15 bp, Homo sapiens
accactgcactccaa

SEQ ID NO: 105107 - DNA, 15 bp, Homo sapiens
ccaccactgcactcc

SEQ ID NO: 105108 - DNA, 15 bp, Homo sapiens
cccaccactgcactc

SEQ ID NO: 105109 - DNA, 15 bp, Homo sapiens
tcccaccactgcact

SEQ ID NO: 105110 - DNA, 15 bp, Homo sapiens
atcccaccactgcac

SEQ ID NO: 105111 - DNA, 15 bp, Homo sapiens
gatcccaccactgca

SEQ ID NO: 105112 - DNA, 15 bp, Homo sapiens
agatcccaccactgc

SEQ ID NO: 105113 - DNA, 15 bp, Homo sapiens
gagatcccaccactg

SEQ ID NO: 105114 - DNA, 15 bp, Homo sapiens
tgagatcccaccact

SEQ ID NO: 105115 - DNA, 15 bp, Homo sapiens
ctgagatcccaccac

SEQ ID NO: 105116 - DNA, 15 bp, Homo sapiens
gctgagatcccacca

SEQ ID NO: 105117 - DNA, 15 bp, Homo sapiens
agctgagatcccacc

SEQ ID NO: 105118 - DNA, 15 bp, Homo sapiens
gagctgagatcccac

SEQ ID NO: 105119 - DNA, 15 bp, Homo sapiens
tgagctgagatccca

SEQ ID NO: 105120 - DNA, 15 bp, Homo sapiens
gtgagctgagatccc

SEQ ID NO: 105121 - DNA, 15 bp, Homo sapiens
agtgagctgagatcc

SEQ ID NO: 105122 - DNA, 15 bp, Homo sapiens
cagtgagctgagatc

SEQ ID NO: 105123 - DNA, 15 bp, Homo sapiens
gcagtgagctgagat

SEQ ID NO: 105124 - DNA, 15 bp, Homo sapiens
tgcagtgagctgaga

SEQ ID NO: 105125 - DNA, 15 bp, Homo sapiens
ttgcagtgagctgag

SEQ ID NO: 105126 - DNA, 15 bp, Homo sapiens
gttgcagtgagctga

SEQ ID NO: 105127 - DNA, 15 bp, Homo sapiens
ggttgcagtgagctg

SEQ ID NO: 105128 - DNA, 15 bp, Homo sapiens
aggttgcagtgagct

SEQ ID NO: 105129 - DNA, 15 bp, Homo sapiens
ggaggttgcagtgag

SEQ ID NO: 105130 - DNA, 15 bp, Homo sapiens
tggaggttgcagtga

SEQ ID NO: 105131 - DNA, 15 bp, Homo sapiens
gtggaggttgcagtg

SEQ ID NO: 105132 - DNA, 15 bp, Homo sapiens
ggtggaggttgcagt

SEQ ID NO: 105133 - DNA, 15 bp, Homo sapiens
aggtggaggttgcag

SEQ ID NO: 105134 - DNA, 15 bp, Homo sapiens
gaggtggaggttgca

SEQ ID NO: 105135 - DNA, 15 bp, Homo sapiens
agaggtggaggttgc

SEQ ID NO: 105136 - DNA, 15 bp, Homo sapiens
gagaggtggaggttg

SEQ ID NO: 105137 - DNA, 15 bp, Homo sapiens
cgagaggtggaggtt

SEQ ID NO: 105138 - DNA, 15 bp, Homo sapiens
ccgagaggtggaggt

SEQ ID NO: 105139 - DNA, 15 bp, Homo sapiens
cccgagaggtggagg

SEQ ID NO: 105140 - DNA, 15 bp, Homo sapiens
acccgagaggtggag

SEQ ID NO: 105141 - DNA, 15 bp, Homo sapiens
aacccgagaggtgga

SEQ ID NO: 105142 - DNA, 15 bp, Homo sapiens
gaacccgagaggtgg

SEQ ID NO: 105143 - DNA, 15 bp, Homo sapiens
tgaacccgagaggtg

SEQ ID NO: 105144 - DNA, 15 bp, Homo sapiens
ttgaacccgagaggt

SEQ ID NO: 105145 - DNA, 15 bp, Homo sapiens
cttgaacccgagagg

SEQ ID NO: 105146 - DNA, 15 bp, Homo sapiens
gcttgaacccgagag

SEQ ID NO: 105147 - DNA, 15 bp, Homo sapiens
ggcttgaacccgaga

SEQ ID NO: 105148 - DNA, 15 bp, Homo sapiens
tggcttgaacccgag

SEQ ID NO: 105149 - DNA, 15 bp, Homo sapiens
ctggcttgaacccga

SEQ ID NO: 105150 - DNA, 15 bp, Homo sapiens
actggcttgaacccg

SEQ ID NO: 105151 - DNA, 15 bp, Homo sapiens
gactggcttgaaccc

SEQ ID NO: 105152 - DNA, 15 bp, Homo sapiens
agactggcttgaacc

SEQ ID NO: 105153 - DNA, 15 bp, Homo sapiens
gagactggcttgaac

SEQ ID NO: 105154 - DNA, 15 bp, Homo sapiens
tgagactggcttgaa

SEQ ID NO: 105155 - DNA, 15 bp, Homo sapiens
atgagactggcttga

SEQ ID NO: 105156 - DNA, 15 bp, Homo sapiens
catgagactggcttg

SEQ ID NO: 105157 - DNA, 15 bp, Homo sapiens
gcatgagactggctt

SEQ ID NO: 105158 - DNA, 15 bp, Homo sapiens
agcatgagactggct

SEQ ID NO: 105159 - DNA, 15 bp, Homo sapiens
aagcatgagactggc

SEQ ID NO: 105160 - DNA, 15 bp, Homo sapiens
gaagcatgagactgg

SEQ ID NO: 105161 - DNA, 15 bp, Homo sapiens
tgaagcatgagactg

SEQ ID NO: 105162 - DNA, 15 bp, Homo sapiens
ctgaagcatgagact

SEQ ID NO: 105163 - DNA, 15 bp, Homo sapiens
gctgaagcatgagac

SEQ ID NO: 105164 - DNA, 15 bp, Homo sapiens
ggctgaagcatgaga

SEQ ID NO: 105165 - DNA, 15 bp, Homo sapiens
aggctgaagcatgag

SEQ ID NO: 105166 - DNA, 15 bp, Homo sapiens
aaggctgaagcatga

SEQ ID NO: 105167 - DNA, 15 bp, Homo sapiens
gaaggctgaagcatg

SEQ ID NO: 105168 - DNA, 15 bp, Homo sapiens
ggaaggctgaagcat

SEQ ID NO: 105169 - DNA, 15 bp, Homo sapiens
cggaaggctgaagca

SEQ ID NO: 105170 - DNA, 15 bp, Homo sapiens
ccggaaggctgaagc

SEQ ID NO: 105171 - DNA, 15 bp, Homo sapiens
cccggaaggctgaag

SEQ ID NO: 105172 - DNA, 15 bp, Homo sapiens
acccggaaggctgaa

SEQ ID NO: 105173 - DNA, 15 bp, Homo sapiens
tacccggaaggctga

SEQ ID NO: 105174 - DNA, 15 bp, Homo sapiens
ctacccggaaggctg

SEQ ID NO: 105175 - DNA, 15 bp, Homo sapiens
gctacccggaaggct

SEQ ID NO: 105176 - DNA, 15 bp, Homo sapiens
agctacccggaaggc

SEQ ID NO: 105177 - DNA, 15 bp, Homo sapiens
cagctacccggaagg

SEQ ID NO: 105178 - DNA, 15 bp, Homo sapiens
tcagctacccggaag

SEQ ID NO: 105179 - DNA, 15 bp, Homo sapiens
ctcagctacccggaa

SEQ ID NO: 105180 - DNA, 15 bp, Homo sapiens
tctcagctacccgga

SEQ ID NO: 105181 - DNA, 15 bp, Homo sapiens
atctcagctacccgg

SEQ ID NO: 105182 - DNA, 15 bp, Homo sapiens
aatctcagctacccg

SEQ ID NO: 105183 - DNA, 15 bp, Homo sapiens
taatctcagctaccc

SEQ ID NO: 105184 - DNA, 15 bp, Homo sapiens
gtaatctcagctacc

SEQ ID NO: 105185 - DNA, 15 bp, Homo sapiens
tgtaatctcagctac

SEQ ID NO: 105186 - DNA, 15 bp, Homo sapiens
ctgtaatctcagcta

SEQ ID NO: 105187 - DNA, 15 bp, Homo sapiens
cctgtaatctcagct

SEQ ID NO: 105188 - DNA, 15 bp, Homo sapiens
gcctgtaatctcagc

SEQ ID NO: 105189 - DNA, 15 bp, Homo sapiens
tgcctgtaatctcag

SEQ ID NO: 105190 - DNA, 15 bp, Homo sapiens
atgcctgtaatctca

SEQ ID NO: 105191 - DNA, 15 bp, Homo sapiens
catgcctgtaatctc

SEQ ID NO: 105192 - DNA, 15 bp, Homo sapiens
acatgcctgtaatct

SEQ ID NO: 105193 - DNA, 15 bp, Homo sapiens
cacatgcctgtaatc

SEQ ID NO: 105194 - DNA, 15 bp, Homo sapiens
gcacatgcctgtaat

SEQ ID NO: 105195 - DNA, 15 bp, Homo sapiens
ggcacatgcctgtaa

SEQ ID NO: 105196 - DNA, 15 bp, Homo sapiens
tggcacatgcctgta

SEQ ID NO: 105197 - DNA, 15 bp, Homo sapiens
gtggcacatgcctgt

SEQ ID NO: 105198 - DNA, 15 bp, Homo sapiens
ggtggcacatgcctg

SEQ ID NO: 105199 - DNA, 15 bp, Homo sapiens
tggtggcacatgcct

SEQ ID NO: 105200 - DNA, 15 bp, Homo sapiens
atggtggcacatgcc

SEQ ID NO: 105201 - DNA, 15 bp, Homo sapiens
aatggtggcacatgc

SEQ ID NO: 105202 - DNA, 15 bp, Homo sapiens
gaatggtggcacatg

SEQ ID NO: 105203 - DNA, 15 bp, Homo sapiens
ggaatggtggcacat

SEQ ID NO: 105204 - DNA, 15 bp, Homo sapiens
aggaatggtggcaca

SEQ ID NO: 105205 - DNA, 15 bp, Homo sapiens
caggaatggtggcac

SEQ ID NO: 105206 - DNA, 15 bp, Homo sapiens
ccaggaatggtggca

SEQ ID NO: 105207 - DNA, 15 bp, Homo sapiens
gccaggaatggtggc

SEQ ID NO: 105208 - DNA, 15 bp, Homo sapiens
agccaggaatggtgg

SEQ ID NO: 105209 - DNA, 15 bp, Homo sapiens
tagccaggaatggtg

SEQ ID NO: 105210 - DNA, 15 bp, Homo sapiens
atagccaggaatggt

SEQ ID NO: 105211 - DNA, 15 bp, Homo sapiens
aatagccaggaatgg

SEQ ID NO: 105212 - DNA, 15 bp, Homo sapiens
aaatagccaggaatg

SEQ ID NO: 105213 - DNA, 15 bp, Homo sapiens
aaaatagccaggaat

SEQ ID NO: 105214 - DNA, 15 bp, Homo sapiens
aaaaatagccaggaa

SEQ ID NO: 105215 - DNA, 15 bp, Homo sapiens
aaaaaatagccagga

SEQ ID NO: 105216 - DNA, 15 bp, Homo sapiens
caaaaaatagccagg

SEQ ID NO: 105217 - DNA, 15 bp, Homo sapiens
gcaaaaaatagccag

SEQ ID NO: 105218 - DNA, 15 bp, Homo sapiens
tgcaaaaaatagcca

SEQ ID NO: 105219 - DNA, 15 bp, Homo sapiens
atgcaaaaaatagcc

SEQ ID NO: 105220 - DNA, 15 bp, Homo sapiens
aatgcaaaaaatagc

SEQ ID NO: 105221 - DNA, 15 bp, Homo sapiens
aaatgcaaaaaatag

SEQ ID NO: 105222 - DNA, 15 bp, Homo sapiens
aaaatgcaaaaaata

SEQ ID NO: 105223 - DNA, 15 bp, Homo sapiens
tctctactaaaaatg

SEQ ID NO: 105224 - DNA, 15 bp, Homo sapiens
atctctactaaaaat

SEQ ID NO: 105225 - DNA, 15 bp, Homo sapiens
catctctactaaaaa

SEQ ID NO: 105226 - DNA, 15 bp, Homo sapiens
tcatctctactaaaa

SEQ ID NO: 105227 - DNA, 15 bp, Homo sapiens
ctcatctctactaaa

SEQ ID NO: 105228 - DNA, 15 bp, Homo sapiens
cctcatctctactaa

SEQ ID NO: 105229 - DNA, 15 bp, Homo sapiens
acctcatctctacta

SEQ ID NO: 105230 - DNA, 15 bp, Homo sapiens
aacctcatctctact

SEQ ID NO: 105231 - DNA, 15 bp, Homo sapiens
aaacctcatctctac

SEQ ID NO: 105232 - DNA, 15 bp, Homo sapiens
gaaacctcatctcta

SEQ ID NO: 105233 - DNA, 15 bp, Homo sapiens
cgaaacctcatctct

SEQ ID NO: 105234 - DNA, 15 bp, Homo sapiens
gcgaaacctcatctc

SEQ ID NO: 105235 - DNA, 15 bp, Homo sapiens
ggcgaaacctcatct

SEQ ID NO: 105236 - DNA, 15 bp, Homo sapiens
tggcgaaacctcatc

SEQ ID NO: 105237 - DNA, 15 bp, Homo sapiens
atggcgaaacctcat

SEQ ID NO: 105238 - DNA, 15 bp, Homo sapiens
catggcgaaacctca

SEQ ID NO: 105239 - DNA, 15 bp, Homo sapiens
acatggcgaaacctc

SEQ ID NO: 105240 - DNA, 15 bp, Homo sapiens
aacatggcgaaacct

SEQ ID NO: 105241 - DNA, 15 bp, Homo sapiens
caacatggcgaaacc

SEQ ID NO: 105242 - DNA, 15 bp, Homo sapiens
ccaacatggcgaaac

SEQ ID NO: 105243 - DNA, 15 bp, Homo sapiens
gccaacatggcgaaa

SEQ ID NO: 105244 - DNA, 15 bp, Homo sapiens
ggccaacatggcgaa

SEQ ID NO: 105245 - DNA, 15 bp, Homo sapiens
tggccaacatggcga

SEQ ID NO: 105246 - DNA, 15 bp, Homo sapiens
ctggccaacatggcg

SEQ ID NO: 105247 - DNA, 15 bp, Homo sapiens
cctggccaacatggc

SEQ ID NO: 105248 - DNA, 15 bp, Homo sapiens
gcctggccaacatgg

SEQ ID NO: 105249 - DNA, 15 bp, Homo sapiens
agcctggccaacatg

SEQ ID NO: 105250 - DNA, 15 bp, Homo sapiens
tcagcctggccaaca

SEQ ID NO: 105251 - DNA, 15 bp, Homo sapiens
atcagcctggccaac

SEQ ID NO: 105252 - DNA, 15 bp, Homo sapiens
gatcagcctggccaa

SEQ ID NO: 105253 - DNA, 15 bp, Homo sapiens
agatcagcctggcca

SEQ ID NO: 105254 - DNA, 15 bp, Homo sapiens
gagatcagcctggcc

SEQ ID NO: 105255 - DNA, 15 bp, Homo sapiens
tgagatcagcctggc

SEQ ID NO: 105256 - DNA, 15 bp, Homo sapiens
ttgagatcagcctgg

SEQ ID NO: 105257 - DNA, 15 bp, Homo sapiens
cttgagatcagcctg

SEQ ID NO: 105258 - DNA, 15 bp, Homo sapiens
acttgagatcagcct

SEQ ID NO: 105259 - DNA, 15 bp, Homo sapiens
aacttgagatcagcc

SEQ ID NO: 105260 - DNA, 15 bp, Homo sapiens
taacttgagatcagc

SEQ ID NO: 105261 - DNA, 15 bp, Homo sapiens
ataacttgagatcag

SEQ ID NO: 105262 - DNA, 15 bp, Homo sapiens
gataacttgagatca

SEQ ID NO: 105263 - DNA, 15 bp, Homo sapiens
agataacttgagatc

SEQ ID NO: 105264 - DNA, 15 bp, Homo sapiens
cagataacttgagat

SEQ ID NO: 105265 - DNA, 15 bp, Homo sapiens
gcagataacttgaga

SEQ ID NO: 105266 - DNA, 15 bp, Homo sapiens
ggcagataacttgag

SEQ ID NO: 105267 - DNA, 15 bp, Homo sapiens
aggcagataacttga

SEQ ID NO: 105268 - DNA, 15 bp, Homo sapiens
caggcagataacttg

SEQ ID NO: 105269 - DNA, 15 bp, Homo sapiens
gcaggcagataactt

SEQ ID NO: 105270 - DNA, 15 bp, Homo sapiens
ggcaggcagataact

SEQ ID NO: 105271 - DNA, 15 bp, Homo sapiens
aggcaggcagataac

SEQ ID NO: 105272 - DNA, 15 bp, Homo sapiens
gaggcaggcagataa

SEQ ID NO: 105273 - DNA, 15 bp, Homo sapiens
tgaggcaggcagata

SEQ ID NO: 105274 - DNA, 15 bp, Homo sapiens
ctgaggcaggcagat

SEQ ID NO: 105275 - DNA, 15 bp, Homo sapiens
gctgaggcaggcaga

SEQ ID NO: 105276 - DNA, 15 bp, Homo sapiens
ggctgaggcaggcag

SEQ ID NO: 105277 - DNA, 15 bp, Homo sapiens
gggctgaggcaggca

SEQ ID NO: 105278 - DNA, 15 bp, Homo sapiens
agggctgaggcaggc

SEQ ID NO: 105279 - DNA, 15 bp, Homo sapiens
gagggctgaggcagg

SEQ ID NO: 105280 - DNA, 15 bp, Homo sapiens
ggagggctgaggcag

SEQ ID NO: 105281 - DNA, 15 bp, Homo sapiens
tggagggctgaggca

SEQ ID NO: 105282 - DNA, 15 bp, Homo sapiens
ttggagggctgaggc

SEQ ID NO: 105283 - DNA, 15 bp, Homo sapiens
tttggagggctgagg

SEQ ID NO: 105284 - DNA, 15 bp, Homo sapiens
ctttggagggctgag

SEQ ID NO: 105285 - DNA, 15 bp, Homo sapiens
actttggagggctga

SEQ ID NO: 105286 - DNA, 15 bp, Homo sapiens
cactttggagggctg

SEQ ID NO: 105287 - DNA, 15 bp, Homo sapiens
gcactttggagggct

SEQ ID NO: 105288 - DNA, 15 bp, Homo sapiens
agcactttggagggc

SEQ ID NO: 105289 - DNA, 15 bp, Homo sapiens
cagcactttggaggg

SEQ ID NO: 105290 - DNA, 15 bp, Homo sapiens
ccagcactttggagg

SEQ ID NO: 105291 - DNA, 15 bp, Homo sapiens
tccagcactttggag

SEQ ID NO: 105292 - DNA, 15 bp, Homo sapiens
ttccagcactttgga

SEQ ID NO: 105293 - DNA, 15 bp, Homo sapiens
attccagcactttgg

SEQ ID NO: 105294 - DNA, 15 bp, Homo sapiens
aattccagcactttg

SEQ ID NO: 105295 - DNA, 15 bp, Homo sapiens
taattccagcacttt

SEQ ID NO: 105296 - DNA, 15 bp, Homo sapiens
gtaattccagcactt

SEQ ID NO: 105297 - DNA, 15 bp, Homo sapiens
tgtaattccagcact

SEQ ID NO: 105298 - DNA, 15 bp, Homo sapiens
ctgtaattccagcac

SEQ ID NO: 105299 - DNA, 15 bp, Homo sapiens
cctgtaattccagca

SEQ ID NO: 105300 - DNA, 15 bp, Homo sapiens
gcctgtaattccagc

SEQ ID NO: 105301 - DNA, 15 bp, Homo sapiens
tgcctgtaattccag

SEQ ID NO: 105302 - DNA, 15 bp, Homo sapiens
atgcctgtaattcca

SEQ ID NO: 105303 - DNA, 15 bp, Homo sapiens
catgcctgtaattcc

SEQ ID NO: 105304 - DNA, 15 bp, Homo sapiens
tcatgcctgtaattc

SEQ ID NO: 105305 - DNA, 15 bp, Homo sapiens
tctcatgcctgtaat

SEQ ID NO: 105306 - DNA, 15 bp, Homo sapiens
gtctcatgcctgtaa

SEQ ID NO: 105307 - DNA, 15 bp, Homo sapiens
tgtctcatgcctgta

SEQ ID NO: 105308 - DNA, 15 bp, Homo sapiens
gtgtctcatgcctgt

SEQ ID NO: 105309 - DNA, 15 bp, Homo sapiens
ggtgtctcatgcctg

SEQ ID NO: 105310 - DNA, 15 bp, Homo sapiens
cggtgtctcatgcct

SEQ ID NO: 105311 - DNA, 15 bp, Homo sapiens
ccggtgtctcatgcc

SEQ ID NO: 105312 - DNA, 15 bp, Homo sapiens
cccggtgtctcatgc

SEQ ID NO: 105313 - DNA, 15 bp, Homo sapiens
acccggtgtctcatg

SEQ ID NO: 105314 - DNA, 15 bp, Homo sapiens
gacccggtgtctcat

SEQ ID NO: 105315 - DNA, 15 bp, Homo sapiens
ggacccggtgtctca

SEQ ID NO: 105316 - DNA, 15 bp, Homo sapiens
tggacccggtgtctc

SEQ ID NO: 105317 - DNA, 15 bp, Homo sapiens
ctggacccggtgtct

SEQ ID NO: 105318 - DNA, 15 bp, Homo sapiens
gctggacccggtgtc

SEQ ID NO: 105319 - DNA, 15 bp, Homo sapiens
agctggacccggtgt

SEQ ID NO: 105320 - DNA, 15 bp, Homo sapiens
aagctggacccggtg

SEQ ID NO: 105321 - DNA, 15 bp, Homo sapiens
gaagctggacccggt

SEQ ID NO: 105322 - DNA, 15 bp, Homo sapiens
ggaagctggacccgg

SEQ ID NO: 105323 - DNA, 15 bp, Homo sapiens
tggaagctggacccg

SEQ ID NO: 105324 - DNA, 15 bp, Homo sapiens
ctggaagctggaccc

SEQ ID NO: 105325 - DNA, 15 bp, Homo sapiens
gctggaagctggacc

SEQ ID NO: 105326 - DNA, 15 bp, Homo sapiens
tgctggaagctggac

SEQ ID NO: 105327 - DNA, 15 bp, Homo sapiens
ctgctggaagctgga

SEQ ID NO: 105328 - DNA, 15 bp, Homo sapiens
cctgctggaagctgg

SEQ ID NO: 105329 - DNA, 15 bp, Homo sapiens
acctgctggaagctg

SEQ ID NO: 105330 - DNA, 15 bp, Homo sapiens
aacctgctggaagct

SEQ ID NO: 105331 - DNA, 15 bp, Homo sapiens
aaacctgctggaagc

SEQ ID NO: 105332 - DNA, 15 bp, Homo sapiens
aaaacctgctggaag

SEQ ID NO: 105333 - DNA, 15 bp, Homo sapiens
gaaaacctgctggaa

SEQ ID NO: 105334 - DNA, 15 bp, Homo sapiens
agaaaacctgctgga

SEQ ID NO: 105335 - DNA, 15 bp, Homo sapiens
aagaaaacctgctgg

SEQ ID NO: 105336 - DNA, 15 bp, Homo sapiens
aaagaaaacctgctg

SEQ ID NO: 105337 - DNA, 15 bp, Homo sapiens
taaagaaaacctgct

SEQ ID NO: 105338 - DNA, 15 bp, Homo sapiens
ctaaagaaaacctgc

SEQ ID NO: 105339 - DNA, 15 bp, Homo sapiens
cctaaagaaaacctg

SEQ ID NO: 105340 - DNA, 15 bp, Homo sapiens
tcctaaagaaaacct

SEQ ID NO: 105341 - DNA, 15 bp, Homo sapiens
ctcctaaagaaaacc

SEQ ID NO: 105342 - DNA, 15 bp, Homo sapiens
cctcctaaagaaaac

SEQ ID NO: 105343 - DNA, 15 bp, Homo sapiens
ccctcctaaagaaaa

SEQ ID NO: 105344 - DNA, 15 bp, Homo sapiens
tccctcctaaagaaa

SEQ ID NO: 105345 - DNA, 15 bp, Homo sapiens
atccctcctaaagaa

SEQ ID NO: 105346 - DNA, 15 bp, Homo sapiens
tatccctcctaaaga

SEQ ID NO: 105347 - DNA, 15 bp, Homo sapiens
atatccctcctaaag

SEQ ID NO: 105348 - DNA, 15 bp, Homo sapiens
aatatccctcctaaa

SEQ ID NO: 105349 - DNA, 15 bp, Homo sapiens
aaatatccctcctaa

SEQ ID NO: 105350 - DNA, 15 bp, Homo sapiens
aaaatatccctccta

SEQ ID NO: 105351 - DNA, 15 bp, Homo sapiens
taaaatatccctcct

SEQ ID NO: 105352 - DNA, 15 bp, Homo sapiens
gtaaaatatccctcc

SEQ ID NO: 105353 - DNA, 15 bp, Homo sapiens
tgtaaaatatccctc

SEQ ID NO: 105354 - DNA, 15 bp, Homo sapiens
ttgtaaaatatccct

SEQ ID NO: 105355 - DNA, 15 bp, Homo sapiens
attgtaaaatatccc

SEQ ID NO: 105356 - DNA, 15 bp, Homo sapiens
cattgtaaaatatcc

SEQ ID NO: 105357 - DNA, 15 bp, Homo sapiens
gcattgtaaaatatc

SEQ ID NO: 105358 - DNA, 15 bp, Homo sapiens
agcattgtaaaatat

SEQ ID NO: 105359 - DNA, 15 bp, Homo sapiens
cagcattgtaaaata

SEQ ID NO: 105360 - DNA, 15 bp, Homo sapiens
acagcattgtaaaat

SEQ ID NO: 105361 - DNA, 15 bp, Homo sapiens
tacagcattgtaaaa

SEQ ID NO: 105362 - DNA, 15 bp, Homo sapiens
ttacagcattgtaaa

SEQ ID NO: 105363 - DNA, 15 bp, Homo sapiens
cttacagcattgtaa

SEQ ID NO: 105364 - DNA, 15 bp, Homo sapiens
acttacagcattgta

SEQ ID NO: 105365 - DNA, 15 bp, Homo sapiens
aacttacagcattgt

SEQ ID NO: 105366 - DNA, 15 bp, Homo sapiens
aaacttacagcattg

SEQ ID NO: 105367 - DNA, 15 bp, Homo sapiens
aaaacttacagcatt

SEQ ID NO: 105368 - DNA, 15 bp, Homo sapiens
aaaaacttacagcat

SEQ ID NO: 105369 - DNA, 15 bp, Homo sapiens
gaaaaacttacagca

SEQ ID NO: 105370 - DNA, 15 bp, Homo sapiens
ggaaaaacttacagc

SEQ ID NO: 105371 - DNA, 15 bp, Homo sapiens
aggaaaaacttacag

SEQ ID NO: 105372 - DNA, 15 bp, Homo sapiens
taggaaaaacttaca

SEQ ID NO: 105373 - DNA, 15 bp, Homo sapiens
ttaggaaaaacttac

SEQ ID NO: 105374 - DNA, 15 bp, Homo sapiens
gttaggaaaaactta

SEQ ID NO: 105375 - DNA, 15 bp, Homo sapiens
cgttaggaaaaactt

SEQ ID NO: 105376 - DNA, 15 bp, Homo sapiens
tcgttaggaaaaact

SEQ ID NO: 105377 - DNA, 15 bp, Homo sapiens
ctcgttaggaaaaac

SEQ ID NO: 105378 - DNA, 15 bp, Homo sapiens
tctcgttaggaaaaa

SEQ ID NO: 105379 - DNA, 15 bp, Homo sapiens
ttctcgttaggaaaa

SEQ ID NO: 105380 - DNA, 15 bp, Homo sapiens
attctcgttaggaaa

SEQ ID NO: 105381 - DNA, 15 bp, Homo sapiens
aattctcgttaggaa

SEQ ID NO: 105382 - DNA, 15 bp, Homo sapiens
taattctcgttagga

SEQ ID NO: 105383 - DNA, 15 bp, Homo sapiens
ataattctcgttagg

SEQ ID NO: 105384 - DNA, 15 bp, Homo sapiens
gataattctcgttag

SEQ ID NO: 105385 - DNA, 15 bp, Homo sapiens
tgataattctcgtta

SEQ ID NO: 105386 - DNA, 15 bp, Homo sapiens
atgataattctcgtt

SEQ ID NO: 105387 - DNA, 15 bp, Homo sapiens
tatgataattctcgt

SEQ ID NO: 105388 - DNA, 15 bp, Homo sapiens
ctatgataattctcg

SEQ ID NO: 105389 - DNA, 15 bp, Homo sapiens
gctatgataattctc

SEQ ID NO: 105390 - DNA, 15 bp, Homo sapiens
tgctatgataattct

SEQ ID NO: 105391 - DNA, 15 bp, Homo sapiens
gtgctatgataattc

SEQ ID NO: 105392 - DNA, 15 bp, Homo sapiens
agtgctatgataatt

SEQ ID NO: 105393 - DNA, 15 bp, Homo sapiens
tagtgctatgataat

SEQ ID NO: 105394 - DNA, 15 bp, Homo sapiens
gtagtgctatgataa

SEQ ID NO: 105395 - DNA, 15 bp, Homo sapiens
tgtagtgctatgata

SEQ ID NO: 105396 - DNA, 15 bp, Homo sapiens
atgtagtgctatgat

SEQ ID NO: 105397 - DNA, 15 bp, Homo sapiens
catgtagtgctatga

SEQ ID NO: 105398 - DNA, 15 bp, Homo sapiens
acatgtagtgctatg

SEQ ID NO: 105399 - DNA, 15 bp, Homo sapiens
aacatgtagtgctat

SEQ ID NO: 105400 - DNA, 15 bp, Homo sapiens
gaacatgtagtgcta

SEQ ID NO: 105401 - DNA, 15 bp, Homo sapiens
agaacatgtagtgct

SEQ ID NO: 105402 - DNA, 15 bp, Homo sapiens
cagaacatgtagtgc

SEQ ID NO: 105403 - DNA, 15 bp, Homo sapiens
acagaacatgtagtg

SEQ ID NO: 105404 - DNA, 15 bp, Homo sapiens
gacagaacatgtagt

SEQ ID NO: 105405 - DNA, 15 bp, Homo sapiens
agacagaacatgtag

SEQ ID NO: 105406 - DNA, 15 bp, Homo sapiens
aagacagaacatgta

SEQ ID NO: 105407 - DNA, 15 bp, Homo sapiens
gaagacagaacatgt

SEQ ID NO: 105408 - DNA, 15 bp, Homo sapiens
tgaagacagaacatg

SEQ ID NO: 105409 - DNA, 15 bp, Homo sapiens
ctgaagacagaacat

SEQ ID NO: 105410 - DNA, 15 bp, Homo sapiens
actgaagacagaaca

SEQ ID NO: 105411 - DNA, 15 bp, Homo sapiens
tactgaagacagaac

SEQ ID NO: 105412 - DNA, 15 bp, Homo sapiens
ttactgaagacagaa

SEQ ID NO: 105413 - DNA, 15 bp, Homo sapiens
cttactgaagacaga

SEQ ID NO: 105414 - DNA, 15 bp, Homo sapiens
acttactgaagacag

SEQ ID NO: 105415 - DNA, 15 bp, Homo sapiens
cacttactgaagaca

SEQ ID NO: 105416 - DNA, 15 bp, Homo sapiens
tcacttactgaagac

SEQ ID NO: 105417 - DNA, 15 bp, Homo sapiens
atcacttactgaaga

SEQ ID NO: 105418 - DNA, 15 bp, Homo sapiens
tatcacttactgaag

SEQ ID NO: 105419 - DNA, 15 bp, Homo sapiens
gtatcacttactgaa

SEQ ID NO: 105420 - DNA, 15 bp, Homo sapiens
tgtatcacttactga

SEQ ID NO: 105421 - DNA, 15 bp, Homo sapiens
ttgtatcacttactg

SEQ ID NO: 105422 - DNA, 15 bp, Homo sapiens
cttgtatcacttact

SEQ ID NO: 105423 - DNA, 15 bp, Homo sapiens
gcttgtatcacttac

SEQ ID NO: 105424 - DNA, 15 bp, Homo sapiens
agcttgtatcactta

SEQ ID NO: 105425 - DNA, 15 bp, Homo sapiens
aagcttgtatcactt

SEQ ID NO: 105426 - DNA, 15 bp, Homo sapiens
taagcttgtatcact

SEQ ID NO: 105427 - DNA, 15 bp, Homo sapiens
gtaagcttgtatcac

SEQ ID NO: 105428 - DNA, 15 bp, Homo sapiens
agtaagcttgtatca

SEQ ID NO: 105429 - DNA, 15 bp, Homo sapiens
cagtaagcttgtatc

SEQ ID NO: 105430 - DNA, 15 bp, Homo sapiens
tcagtaagcttgtat

SEQ ID NO: 105431 - DNA, 15 bp, Homo sapiens
atcagtaagcttgta

SEQ ID NO: 105432 - DNA, 15 bp, Homo sapiens
catcagtaagcttgt

SEQ ID NO: 105433 - DNA, 15 bp, Homo sapiens
tcatcagtaagcttg

SEQ ID NO: 105434 - DNA, 15 bp, Homo sapiens
atcatcagtaagctt

SEQ ID NO: 105435 - DNA, 15 bp, Homo sapiens
catcatcagtaagct

SEQ ID NO: 105436 - DNA, 15 bp, Homo sapiens
acatcatcagtaagc

SEQ ID NO: 105437 - DNA, 15 bp, Homo sapiens
aacatcatcagtaag

SEQ ID NO: 105438 - DNA, 15 bp, Homo sapiens
caacatcatcagtaa

SEQ ID NO: 105439 - DNA, 15 bp, Homo sapiens
acaacatcatcagta

SEQ ID NO: 105440 - DNA, 15 bp, Homo sapiens
tacaacatcatcagt

SEQ ID NO: 105441 - DNA, 15 bp, Homo sapiens
ctacaacatcatcag

SEQ ID NO: 105442 - DNA, 15 bp, Homo sapiens
actacaacatcatca

SEQ ID NO: 105443 - DNA, 15 bp, Homo sapiens
aactacaacatcatc

SEQ ID NO: 105444 - DNA, 15 bp, Homo sapiens
taactacaacatcat

SEQ ID NO: 105445 - DNA, 15 bp, Homo sapiens
ataactacaacatca

SEQ ID NO: 105446 - DNA, 15 bp, Homo sapiens
cataactacaacatc

SEQ ID NO: 105447 - DNA, 15 bp, Homo sapiens
acataactacaacat

SEQ ID NO: 105448 - DNA, 15 bp, Homo sapiens
aacataactacaaca

SEQ ID NO: 105449 - DNA, 15 bp, Homo sapiens
gaacataactacaac

SEQ ID NO: 105450 - DNA, 15 bp, Homo sapiens
tgaacataactacaa

SEQ ID NO: 105451 - DNA, 15 bp, Homo sapiens
atgaacataactaca

SEQ ID NO: 105452 - DNA, 15 bp, Homo sapiens
aatgaacataactac

SEQ ID NO: 105453 - DNA, 15 bp, Homo sapiens
caatgaacataacta

SEQ ID NO: 105454 - DNA, 15 bp, Homo sapiens
ccaatgaacataact

SEQ ID NO: 105455 - DNA, 15 bp, Homo sapiens
accaatgaacataac

SEQ ID NO: 105456 - DNA, 15 bp, Homo sapiens
caccaatgaacataa

SEQ ID NO: 105457 - DNA, 15 bp, Homo sapiens
ccaccaatgaacata

SEQ ID NO: 105458 - DNA, 15 bp, Homo sapiens
accaccaatgaacat

SEQ ID NO: 105459 - DNA, 15 bp, Homo sapiens
gaccaccaatgaaca

SEQ ID NO: 105460 - DNA, 15 bp, Homo sapiens
cgaccaccaatgaac

SEQ ID NO: 105461 - DNA, 15 bp, Homo sapiens
ccgaccaccaatgaa

SEQ ID NO: 105462 - DNA, 15 bp, Homo sapiens
cccgaccaccaatga

SEQ ID NO: 105463 - DNA, 15 bp, Homo sapiens
acccgaccaccaatg

SEQ ID NO: 105464 - DNA, 15 bp, Homo sapiens
cacccgaccaccaat

SEQ ID NO: 105465 - DNA, 15 bp, Homo sapiens
acacccgaccaccaa

SEQ ID NO: 105466 - DNA, 15 bp, Homo sapiens
tacacccgaccacca

SEQ ID NO: 105467 - DNA, 15 bp, Homo sapiens
gtacacccgaccacc

SEQ ID NO: 105468 - DNA, 15 bp, Homo sapiens
tgtacacccgaccac

SEQ ID NO: 105469 - DNA, 15 bp, Homo sapiens
atgtacacccgacca

SEQ ID NO: 105470 - DNA, 15 bp, Homo sapiens
aatgtacacccgacc

SEQ ID NO: 105471 - DNA, 15 bp, Homo sapiens
caatgtacacccgac

SEQ ID NO: 105472 - DNA, 15 bp, Homo sapiens
tcaatgtacacccga

SEQ ID NO: 105473 - DNA, 15 bp, Homo sapiens
ttcaatgtacacccg

SEQ ID NO: 105474 - DNA, 15 bp, Homo sapiens
tttcaatgtacaccc

SEQ ID NO: 105475 - DNA, 15 bp, Homo sapiens
gtttcaatgtacacc

SEQ ID NO: 105476 - DNA, 15 bp, Homo sapiens
agtttcaatgtacac

SEQ ID NO: 105477 - DNA, 15 bp, Homo sapiens
aagtttcaatgtaca

SEQ ID NO: 105478 - DNA, 15 bp, Homo sapiens
aaagtttcaatgtac

SEQ ID NO: 105479 - DNA, 15 bp, Homo sapiens
taaagtttcaatgta

SEQ ID NO: 105480 - DNA, 15 bp, Homo sapiens
ttaaagtttcaatgt

SEQ ID NO: 105481 - DNA, 15 bp, Homo sapiens
gttaaagtttcaatg

SEQ ID NO: 105482 - DNA, 15 bp, Homo sapiens
tgttaaagtttcaat

SEQ ID NO: 105483 - DNA, 15 bp, Homo sapiens
gtgttaaagtttcaa

SEQ ID NO: 105484 - DNA, 15 bp, Homo sapiens
tgtgttaaagtttca

SEQ ID NO: 105485 - DNA, 15 bp, Homo sapiens
atgtgttaaagtttc

SEQ ID NO: 105486 - DNA, 15 bp, Homo sapiens
tatgtgttaaagttt

SEQ ID NO: 105487 - DNA, 15 bp, Homo sapiens
ttatgtgttaaagtt

SEQ ID NO: 105488 - DNA, 15 bp, Homo sapiens
attatgtgttaaagt

SEQ ID NO: 105489 - DNA, 15 bp, Homo sapiens
tattatgtgttaaag

SEQ ID NO: 105490 - DNA, 15 bp, Homo sapiens
ctattatgtgttaaa

SEQ ID NO: 105491 - DNA, 15 bp, Homo sapiens
gctattatgtgttaa

SEQ ID NO: 105492 - DNA, 15 bp, Homo sapiens
ggctattatgtgtta

SEQ ID NO: 105493 - DNA, 15 bp, Homo sapiens
aggctattatgtgtt

SEQ ID NO: 105494 - DNA, 15 bp, Homo sapiens
gaggctattatgtgt

SEQ ID NO: 105495 - DNA, 15 bp, Homo sapiens
agaggctattatgtg

SEQ ID NO: 105496 - DNA, 15 bp, Homo sapiens
gagaggctattatgt

SEQ ID NO: 105497 - DNA, 15 bp, Homo sapiens
ggagaggctattatg

SEQ ID NO: 105498 - DNA, 15 bp, Homo sapiens
aggagaggctattat

SEQ ID NO: 105499 - DNA, 15 bp, Homo sapiens
caggagaggctatta

SEQ ID NO: 105500 - DNA, 15 bp, Homo sapiens
acaggagaggctatt

SEQ ID NO: 105501 - DNA, 15 bp, Homo sapiens
cacaggagaggctat

SEQ ID NO: 105502 - DNA, 15 bp, Homo sapiens
tcacaggagaggcta

SEQ ID NO: 105503 - DNA, 15 bp, Homo sapiens
ctcacaggagaggct

SEQ ID NO: 105504 - DNA, 15 bp, Homo sapiens
gctcacaggagaggc

SEQ ID NO: 105505 - DNA, 15 bp, Homo sapiens
tgctcacaggagagg

SEQ ID NO: 105506 - DNA, 15 bp, Homo sapiens
ctgctcacaggagag

SEQ ID NO: 105507 - DNA, 15 bp, Homo sapiens
actgctcacaggaga

SEQ ID NO: 105508 - DNA, 15 bp, Homo sapiens
cactgctcacaggag

SEQ ID NO: 105509 - DNA, 15 bp, Homo sapiens
ccactgctcacagga

SEQ ID NO: 105510 - DNA, 15 bp, Homo sapiens
accactgctcacagg

SEQ ID NO: 105511 - DNA, 15 bp, Homo sapiens
aaccactgctcacag

SEQ ID NO: 105512 - DNA, 15 bp, Homo sapiens
gaaccactgctcaca

SEQ ID NO: 105513 - DNA, 15 bp, Homo sapiens
ggaaccactgctcac

SEQ ID NO: 105514 - DNA, 15 bp, Homo sapiens
aggaaccactgctca

SEQ ID NO: 105515 - DNA, 15 bp, Homo sapiens
caggaaccactgctc

SEQ ID NO: 105516 - DNA, 15 bp, Homo sapiens
acaggaaccactgct

SEQ ID NO: 105517 - DNA, 15 bp, Homo sapiens
aacaggaaccactgc

SEQ ID NO: 105518 - DNA, 15 bp, Homo sapiens
caacaggaaccactg

SEQ ID NO: 105519 - DNA, 15 bp, Homo sapiens
ccaacaggaaccact

SEQ ID NO: 105520 - DNA, 15 bp, Homo sapiens
accaacaggaaccac

SEQ ID NO: 105521 - DNA, 15 bp, Homo sapiens
taccaacaggaacca

SEQ ID NO: 105522 - DNA, 15 bp, Homo sapiens
ttaccaacaggaacc

SEQ ID NO: 105523 - DNA, 15 bp, Homo sapiens
cttaccaacaggaac

SEQ ID NO: 105524 - DNA, 15 bp, Homo sapiens
tcttaccaacaggaa

SEQ ID NO: 105525 - DNA, 15 bp, Homo sapiens
atcttaccaacagga

SEQ ID NO: 105526 - DNA, 15 bp, Homo sapiens
tatcttaccaacagg

SEQ ID NO: 105527 - DNA, 15 bp, Homo sapiens
gtatcttaccaacag

SEQ ID NO: 105528 - DNA, 15 bp, Homo sapiens
agtatcttaccaaca

SEQ ID NO: 105529 - DNA, 15 bp, Homo sapiens
aagtatcttaccaac

SEQ ID NO: 105530 - DNA, 15 bp, Homo sapiens
aaagtatcttaccaa

SEQ ID NO: 105531 - DNA, 15 bp, Homo sapiens
taaagtatcttacca

SEQ ID NO: 105532 - DNA, 15 bp, Homo sapiens
gtaaagtatcttacc

SEQ ID NO: 105533 - DNA, 15 bp, Homo sapiens
agtaaagtatcttac

SEQ ID NO: 105534 - DNA, 15 bp, Homo sapiens
tagtaaagtatctta

SEQ ID NO: 105535 - DNA, 15 bp, Homo sapiens
ttagtaaagtatctt

SEQ ID NO: 105536 - DNA, 15 bp, Homo sapiens
cttagtaaagtatct

SEQ ID NO: 105537 - DNA, 15 bp, Homo sapiens
ccttagtaaagtatc

SEQ ID NO: 105538 - DNA, 15 bp, Homo sapiens
cccttagtaaagtat

SEQ ID NO: 105539 - DNA, 15 bp, Homo sapiens
tcccttagtaaagta

SEQ ID NO: 105540 - DNA, 15 bp, Homo sapiens
ttcccttagtaaagt

SEQ ID NO: 105541 - DNA, 15 bp, Homo sapiens
cttcccttagtaaag

SEQ ID NO: 105542 - DNA, 15 bp, Homo sapiens
ccttcccttagtaaa

SEQ ID NO: 105543 - DNA, 15 bp, Homo sapiens
tccttcccttagtaa

SEQ ID NO: 105544 - DNA, 15 bp, Homo sapiens
ttccttcccttagta

SEQ ID NO: 105545 - DNA, 15 bp, Homo sapiens
attccttcccttagt

SEQ ID NO: 105546 - DNA, 15 bp, Homo sapiens
cattccttcccttag

SEQ ID NO: 105547 - DNA, 15 bp, Homo sapiens
acattccttccctta

SEQ ID NO: 105548 - DNA, 15 bp, Homo sapiens
cacattccttccctt

SEQ ID NO: 105549 - DNA, 15 bp, Homo sapiens
tcacattccttccct

SEQ ID NO: 105550 - DNA, 15 bp, Homo sapiens
ctcacattccttccc

SEQ ID NO: 105551 - DNA, 15 bp, Homo sapiens
cctcacattccttcc

SEQ ID NO: 105552 - DNA, 15 bp, Homo sapiens
acctcacattccttc

SEQ ID NO: 105553 - DNA, 15 bp, Homo sapiens
cacctcacattcctt

SEQ ID NO: 105554 - DNA, 15 bp, Homo sapiens
acacctcacattcct

SEQ ID NO: 105555 - DNA, 15 bp, Homo sapiens
gacacctcacattcc

SEQ ID NO: 105556 - DNA, 15 bp, Homo sapiens
cgacacctcacattc

SEQ ID NO: 105557 - DNA, 15 bp, Homo sapiens
gcgacacctcacatt

SEQ ID NO: 105558 - DNA, 15 bp, Homo sapiens
agcgacacctcacat

SEQ ID NO: 105559 - DNA, 15 bp, Homo sapiens
cagcgacacctcaca

SEQ ID NO: 105560 - DNA, 15 bp, Homo sapiens
ccagcgacacctcac

SEQ ID NO: 105561 - DNA, 15 bp, Homo sapiens
cccagcgacacctca

SEQ ID NO: 105562 - DNA, 15 bp, Homo sapiens
ccccagcgacacctc

SEQ ID NO: 105563 - DNA, 15 bp, Homo sapiens
tccccagcgacacct

SEQ ID NO: 105564 - DNA, 15 bp, Homo sapiens
ctccccagcgacacc

SEQ ID NO: 105565 - DNA, 15 bp, Homo sapiens
tctccccagcgacac

SEQ ID NO: 105566 - DNA, 15 bp, Homo sapiens
ctctccccagcgaca

SEQ ID NO: 105567 - DNA, 15 bp, Homo sapiens
actctccccagcgac

SEQ ID NO: 105568 - DNA, 15 bp, Homo sapiens
aactctccccagcga

SEQ ID NO: 105569 - DNA, 15 bp, Homo sapiens
aaactctccccagcg

SEQ ID NO: 105570 - DNA, 15 bp, Homo sapiens
taaactctccccagc

SEQ ID NO: 105571 - DNA, 15 bp, Homo sapiens
gtaaactctccccag

SEQ ID NO: 105572 - DNA, 15 bp, Homo sapiens
ggtaaactctcccca

SEQ ID NO: 105573 - DNA, 15 bp, Homo sapiens
gggtaaactctcccc

SEQ ID NO: 105574 - DNA, 15 bp, Homo sapiens
tgggtaaactctccc

SEQ ID NO: 105575 - DNA, 15 bp, Homo sapiens
ttgggtaaactctcc

SEQ ID NO: 105576 - DNA, 15 bp, Homo sapiens
tttgggtaaactctc

SEQ ID NO: 105577 - DNA, 15 bp, Homo sapiens
atttgggtaaactct

SEQ ID NO: 105578 - DNA, 15 bp, Homo sapiens
tatttgggtaaactc

SEQ ID NO: 105579 - DNA, 15 bp, Homo sapiens
ttatttgggtaaact

SEQ ID NO: 105580 - DNA, 15 bp, Homo sapiens
cttatttgggtaaac

SEQ ID NO: 105581 - DNA, 15 bp, Homo sapiens
ccttatttgggtaaa

SEQ ID NO: 105582 - DNA, 15 bp, Homo sapiens
tccttatttgggtaa

SEQ ID NO: 105583 - DNA, 15 bp, Homo sapiens
atccttatttgggta

SEQ ID NO: 105584 - DNA, 15 bp, Homo sapiens
catccttatttgggt

SEQ ID NO: 105585 - DNA, 15 bp, Homo sapiens
ccatccttatttggg

SEQ ID NO: 105586 - DNA, 15 bp, Homo sapiens
tccatccttatttgg

SEQ ID NO: 105587 - DNA, 15 bp, Homo sapiens
gtccatccttatttg

SEQ ID NO: 105588 - DNA, 15 bp, Homo sapiens
agtccatccttattt

SEQ ID NO: 105589 - DNA, 15 bp, Homo sapiens
aagtccatccttatt

SEQ ID NO: 105590 - DNA, 15 bp, Homo sapiens
aaagtccatccttat

SEQ ID NO: 105591 - DNA, 15 bp, Homo sapiens
gaaagtccatcctta

SEQ ID NO: 105592 - DNA, 15 bp, Homo sapiens
agaaagtccatcctt

SEQ ID NO: 105593 - DNA, 15 bp, Homo sapiens
cagaaagtccatcct

SEQ ID NO: 105594 - DNA, 15 bp, Homo sapiens
acagaaagtccatcc

SEQ ID NO: 105595 - DNA, 15 bp, Homo sapiens
gacagaaagtccatc

SEQ ID NO: 105596 - DNA, 15 bp, Homo sapiens
agacagaaagtccat

SEQ ID NO: 105597 - DNA, 15 bp, Homo sapiens
aagacagaaagtcca

SEQ ID NO: 105598 - DNA, 15 bp, Homo sapiens
aaagacagaaagtcc

SEQ ID NO: 105599 - DNA, 15 bp, Homo sapiens
caaagacagaaagtc

SEQ ID NO: 105600 - DNA, 15 bp, Homo sapiens
acaaagacagaaagt

SEQ ID NO: 105601 - DNA, 15 bp, Homo sapiens
aacaaagacagaaag

SEQ ID NO: 105602 - DNA, 15 bp, Homo sapiens
aaacaaagacagaaa

SEQ ID NO: 105603 - DNA, 15 bp, Homo sapiens
gaaacaaagacagaa

SEQ ID NO: 105604 - DNA, 15 bp, Homo sapiens
tgaaacaaagacaga

SEQ ID NO: 105605 - DNA, 15 bp, Homo sapiens
atgaaacaaagacag

SEQ ID NO: 105606 - DNA, 15 bp, Homo sapiens
gatgaaacaaagaca

SEQ ID NO: 105607 - DNA, 15 bp, Homo sapiens
tgatgaaacaaagac

SEQ ID NO: 105608 - DNA, 15 bp, Homo sapiens
ctgatgaaacaaaga

SEQ ID NO: 105609 - DNA, 15 bp, Homo sapiens
actgatgaaacaaag

SEQ ID NO: 105610 - DNA, 15 bp, Homo sapiens
gactgatgaaacaaa

SEQ ID NO: 105611 - DNA, 15 bp, Homo sapiens
ggactgatgaaacaa

SEQ ID NO: 105612 - DNA, 15 bp, Homo sapiens
aggactgatgaaaca

SEQ ID NO: 105613 - DNA, 15 bp, Homo sapiens
caggactgatgaaac

SEQ ID NO: 105614 - DNA, 15 bp, Homo sapiens
ccaggactgatgaaa

SEQ ID NO: 105615 - DNA, 15 bp, Homo sapiens
accaggactgatgaa

SEQ ID NO: 105616 - DNA, 15 bp, Homo sapiens
taccaggactgatga

SEQ ID NO: 105617 - DNA, 15 bp, Homo sapiens
ttaccaggactgatg

SEQ ID NO: 105618 - DNA, 15 bp, Homo sapiens
attaccaggactgat

SEQ ID NO: 105619 - DNA, 15 bp, Homo sapiens
tattaccaggactga

SEQ ID NO: 105620 - DNA, 15 bp, Homo sapiens
ctattaccaggactg

SEQ ID NO: 105621 - DNA, 15 bp, Homo sapiens
tctattaccaggact

SEQ ID NO: 105622 - DNA, 15 bp, Homo sapiens
ttctattaccaggac

SEQ ID NO: 105623 - DNA, 15 bp, Homo sapiens
attctattaccagga

SEQ ID NO: 105624 - DNA, 15 bp, Homo sapiens
cattctattaccagg

SEQ ID NO: 105625 - DNA, 15 bp, Homo sapiens
acattctattaccag

SEQ ID NO: 105626 - DNA, 15 bp, Homo sapiens
aacattctattacca

SEQ ID NO: 105627 - DNA, 15 bp, Homo sapiens
aaacattctattacc

SEQ ID NO: 105628 - DNA, 15 bp, Homo sapiens
caaacattctattac

SEQ ID NO: 105629 - DNA, 15 bp, Homo sapiens
tcaaacattctatta

SEQ ID NO: 105630 - DNA, 15 bp, Homo sapiens
ttcaaacattctatt

SEQ ID NO: 105631 - DNA, 15 bp, Homo sapiens
attcaaacattctat

SEQ ID NO: 105632 - DNA, 15 bp, Homo sapiens
tattcaaacattcta

SEQ ID NO: 105633 - DNA, 15 bp, Homo sapiens
ctattcaaacattct

SEQ ID NO: 105634 - DNA, 15 bp, Homo sapiens
tctattcaaacattc

SEQ ID NO: 105635 - DNA, 15 bp, Homo sapiens
atctattcaaacatt

SEQ ID NO: 105636 - DNA, 15 bp, Homo sapiens
tatctattcaaacat

SEQ ID NO: 105637 - DNA, 15 bp, Homo sapiens
ctatctattcaaaca

SEQ ID NO: 105638 - DNA, 15 bp, Homo sapiens
gctatctattcaaac

SEQ ID NO: 105639 - DNA, 15 bp, Homo sapiens
agctatctattcaaa

SEQ ID NO: 105640 - DNA, 15 bp, Homo sapiens
gagctatctattcaa

SEQ ID NO: 105641 - DNA, 15 bp, Homo sapiens
agagctatctattca

SEQ ID NO: 105642 - DNA, 15 bp, Homo sapiens
tagagctatctattc

SEQ ID NO: 105643 - DNA, 15 bp, Homo sapiens
ctagagctatctatt

SEQ ID NO: 105644 - DNA, 15 bp, Homo sapiens
cctagagctatctat

SEQ ID NO: 105645 - DNA, 15 bp, Homo sapiens
gcctagagctatcta

SEQ ID NO: 105646 - DNA, 15 bp, Homo sapiens
tgcctagagctatct

SEQ ID NO: 105647 - DNA, 15 bp, Homo sapiens
atgcctagagctatc

SEQ ID NO: 105648 - DNA, 15 bp, Homo sapiens
aatgcctagagctat

SEQ ID NO: 105649 - DNA, 15 bp, Homo sapiens
taatgcctagagcta

SEQ ID NO: 105650 - DNA, 15 bp, Homo sapiens
gtaatgcctagagct

SEQ ID NO: 105651 - DNA, 15 bp, Homo sapiens
tgtaatgcctagagc

SEQ ID NO: 105652 - DNA, 15 bp, Homo sapiens
atgtaatgcctagag

SEQ ID NO: 105653 - DNA, 15 bp, Homo sapiens
tatgtaatgcctaga

SEQ ID NO: 105654 - DNA, 15 bp, Homo sapiens
gtatgtaatgcctag

SEQ ID NO: 105655 - DNA, 15 bp, Homo sapiens
agtatgtaatgccta

SEQ ID NO: 105656 - DNA, 15 bp, Homo sapiens
aagtatgtaatgcct

SEQ ID NO: 105657 - DNA, 15 bp, Homo sapiens
aaagtatgtaatgcc

SEQ ID NO: 105658 - DNA, 15 bp, Homo sapiens
gaaagtatgtaatgc

SEQ ID NO: 105659 - DNA, 15 bp, Homo sapiens
tgaaagtatgtaatg

SEQ ID NO: 105660 - DNA, 15 bp, Homo sapiens
atgaaagtatgtaat

SEQ ID NO: 105661 - DNA, 15 bp, Homo sapiens
tatgaaagtatgtaa

SEQ ID NO: 105662 - DNA, 15 bp, Homo sapiens
ttatgaaagtatgta

SEQ ID NO: 105663 - DNA, 15 bp, Homo sapiens
tttatgaaagtatgt

SEQ ID NO: 105664 - DNA, 15 bp, Homo sapiens
atttatgaaagtatg

SEQ ID NO: 105665 - DNA, 15 bp, Homo sapiens
tatttatgaaagtat

SEQ ID NO: 105666 - DNA, 15 bp, Homo sapiens
atatttatgaaagta

SEQ ID NO: 105667 - DNA, 15 bp, Homo sapiens
catatttatgaaagt

SEQ ID NO: 105668 - DNA, 15 bp, Homo sapiens
tcatatttatgaaag

SEQ ID NO: 105669 - DNA, 15 bp, Homo sapiens
atcatatttatgaaa

SEQ ID NO: 105670 - DNA, 15 bp, Homo sapiens
aatcatatttatgaa

SEQ ID NO: 105671 - DNA, 15 bp, Homo sapiens
taatcatatttatga

SEQ ID NO: 105672 - DNA, 15 bp, Homo sapiens
ataatcatatttatg

SEQ ID NO: 105673 - DNA, 15 bp, Homo sapiens
aataatcatatttat

SEQ ID NO: 105674 - DNA, 15 bp, Homo sapiens
caataatcatattta

SEQ ID NO: 105675 - DNA, 15 bp, Homo sapiens
acaataatcatattt

SEQ ID NO: 105676 - DNA, 15 bp, Homo sapiens
tacaataatcatatt

SEQ ID NO: 105677 - DNA, 15 bp, Homo sapiens
ttacaataatcatat

SEQ ID NO: 105678 - DNA, 15 bp, Homo sapiens
attacaataatcata

SEQ ID NO: 105679 - DNA, 15 bp, Homo sapiens
aattacaataatcat

SEQ ID NO: 105680 - DNA, 15 bp, Homo sapiens
taattacaataatca

SEQ ID NO: 105681 - DNA, 15 bp, Homo sapiens
gtaattacaataatc

SEQ ID NO: 105682 - DNA, 15 bp, Homo sapiens
ggtaattacaataat

SEQ ID NO: 105683 - DNA, 15 bp, Homo sapiens
aggtaattacaataa

SEQ ID NO: 105684 - DNA, 15 bp, Homo sapiens
gaggtaattacaata

SEQ ID NO: 105685 - DNA, 15 bp, Homo sapiens
agaggtaattacaat

SEQ ID NO: 105686 - DNA, 15 bp, Homo sapiens
aagaggtaattacaa

SEQ ID NO: 105687 - DNA, 15 bp, Homo sapiens
aaagaggtaattaca

SEQ ID NO: 105688 - DNA, 15 bp, Homo sapiens
caaagaggtaattac

SEQ ID NO: 105689 - DNA, 15 bp, Homo sapiens
ccaaagaggtaatta

SEQ ID NO: 105690 - DNA, 15 bp, Homo sapiens
gccaaagaggtaatt

SEQ ID NO: 105691 - DNA, 15 bp, Homo sapiens
ggccaaagaggtaat

SEQ ID NO: 105692 - DNA, 15 bp, Homo sapiens
gggccaaagaggtaa

SEQ ID NO: 105693 - DNA, 15 bp, Homo sapiens
tgggccaaagaggta

SEQ ID NO: 105694 - DNA, 15 bp, Homo sapiens
ctgggccaaagaggt

SEQ ID NO: 105695 - DNA, 15 bp, Homo sapiens
actgggccaaagagg

SEQ ID NO: 105696 - DNA, 15 bp, Homo sapiens
aactgggccaaagag

SEQ ID NO: 105697 - DNA, 15 bp, Homo sapiens
caactgggccaaaga

SEQ ID NO: 105698 - DNA, 15 bp, Homo sapiens
gcaactgggccaaag

SEQ ID NO: 105699 - DNA, 15 bp, Homo sapiens
agcaactgggccaaa

SEQ ID NO: 105700 - DNA, 15 bp, Homo sapiens
tagcaactgggccaa

SEQ ID NO: 105701 - DNA, 15 bp, Homo sapiens
ctagcaactgggcca

SEQ ID NO: 105702 - DNA, 15 bp, Homo sapiens
actagcaactgggcc

SEQ ID NO: 105703 - DNA, 15 bp, Homo sapiens
tactagcaactgggc

SEQ ID NO: 105704 - DNA, 15 bp, Homo sapiens
ttactagcaactggg

SEQ ID NO: 105705 - DNA, 15 bp, Homo sapiens
tttactagcaactgg

SEQ ID NO: 105706 - DNA, 15 bp, Homo sapiens
atttactagcaactg

SEQ ID NO: 105707 - DNA, 15 bp, Homo sapiens
aatttactagcaact

SEQ ID NO: 105708 - DNA, 15 bp, Homo sapiens
taatttactagcaac

SEQ ID NO: 105709 - DNA, 15 bp, Homo sapiens
ctaatttactagcaa

SEQ ID NO: 105710 - DNA, 15 bp, Homo sapiens
cctaatttactagca

SEQ ID NO: 105711 - DNA, 15 bp, Homo sapiens
ccctaatttactagc

SEQ ID NO: 105712 - DNA, 15 bp, Homo sapiens
tccctaatttactag

SEQ ID NO: 105713 - DNA, 15 bp, Homo sapiens
gtccctaatttacta

SEQ ID NO: 105714 - DNA, 15 bp, Homo sapiens
ggtccctaatttact

SEQ ID NO: 105715 - DNA, 15 bp, Homo sapiens
gggtccctaatttac

SEQ ID NO: 105716 - DNA, 15 bp, Homo sapiens
ggggtccctaattta

SEQ ID NO: 105717 - DNA, 15 bp, Homo sapiens
aggggtccctaattt

SEQ ID NO: 105718 - DNA, 15 bp, Homo sapiens
aaggggtccctaatt

SEQ ID NO: 105719 - DNA, 15 bp, Homo sapiens
taaggggtccctaat

SEQ ID NO: 105720 - DNA, 15 bp, Homo sapiens
ttaaggggtccctaa

SEQ ID NO: 105721 - DNA, 15 bp, Homo sapiens
attaaggggtcccta

SEQ ID NO: 105722 - DNA, 15 bp, Homo sapiens
cattaaggggtccct

SEQ ID NO: 105723 - DNA, 15 bp, Homo sapiens
tcattaaggggtccc

SEQ ID NO: 105724 - DNA, 15 bp, Homo sapiens
atcattaaggggtcc

SEQ ID NO: 105725 - DNA, 15 bp, Homo sapiens
aatcattaaggggtc

SEQ ID NO: 105726 - DNA, 15 bp, Homo sapiens
aaatcattaaggggt

SEQ ID NO: 105727 - DNA, 15 bp, Homo sapiens
taaatcattaagggg

SEQ ID NO: 105728 - DNA, 15 bp, Homo sapiens
ataaatcattaaggg

SEQ ID NO: 105729 - DNA, 15 bp, Homo sapiens
aataaatcattaagg

SEQ ID NO: 105730 - DNA, 15 bp, Homo sapiens
aaataaatcattaag

SEQ ID NO: 105731 - DNA, 15 bp, Homo sapiens
gaaataaatcattaa

SEQ ID NO: 105732 - DNA, 15 bp, Homo sapiens
ggaaataaatcatta

SEQ ID NO: 105733 - DNA, 15 bp, Homo sapiens
aggaaataaatcatt

SEQ ID NO: 105734 - DNA, 15 bp, Homo sapiens
caggaaataaatcat

SEQ ID NO: 105735 - DNA, 15 bp, Homo sapiens
acaggaaataaatca

SEQ ID NO: 105736 - DNA, 15 bp, Homo sapiens
aacaggaaataaatc

SEQ ID NO: 105737 - DNA, 15 bp, Homo sapiens
aaacaggaaataaat

SEQ ID NO: 105738 - DNA, 15 bp, Homo sapiens
taaacaggaaataaa

SEQ ID NO: 105739 - DNA, 15 bp, Homo sapiens
ataaacaggaaataa

SEQ ID NO: 105740 - DNA, 15 bp, Homo sapiens
aataaacaggaaata

SEQ ID NO: 105741 - DNA, 15 bp, Homo sapiens
gaataaacaggaaat

SEQ ID NO: 105742 - DNA, 15 bp, Homo sapiens
tgaataaacaggaaa

SEQ ID NO: 105743 - DNA, 15 bp, Homo sapiens
gtgaataaacaggaa

SEQ ID NO: 105744 - DNA, 15 bp, Homo sapiens
ggtgaataaacagga

SEQ ID NO: 105745 - DNA, 15 bp, Homo sapiens
gggtgaataaacagg

SEQ ID NO: 105746 - DNA, 15 bp, Homo sapiens
agggtgaataaacag

SEQ ID NO: 105747 - DNA, 15 bp, Homo sapiens
cagggtgaataaaca

SEQ ID NO: 105748 - DNA, 15 bp, Homo sapiens
tcagggtgaataaac

SEQ ID NO: 105749 - DNA, 15 bp, Homo sapiens
atcagggtgaataaa

SEQ ID NO: 105750 - DNA, 15 bp, Homo sapiens
catcagggtgaataa

SEQ ID NO: 105751 - DNA, 15 bp, Homo sapiens
tcatcagggtgaata

SEQ ID NO: 105752 - DNA, 15 bp, Homo sapiens
ttcatcagggtgaat

SEQ ID NO: 105753 - DNA, 15 bp, Homo sapiens
cttcatcagggtgaa

SEQ ID NO: 105754 - DNA, 15 bp, Homo sapiens
tcttcatcagggtga

SEQ ID NO: 105755 - DNA, 15 bp, Homo sapiens
ttcttcatcagggtg

SEQ ID NO: 105756 - DNA, 15 bp, Homo sapiens
gttcttcatcagggt

SEQ ID NO: 105757 - DNA, 15 bp, Homo sapiens
agttcttcatcaggg

SEQ ID NO: 105758 - DNA, 15 bp, Homo sapiens
aagttcttcatcagg

SEQ ID NO: 105759 - DNA, 15 bp, Homo sapiens
caagttcttcatcag

SEQ ID NO: 105760 - DNA, 15 bp, Homo sapiens
acaagttcttcatca

SEQ ID NO: 105761 - DNA, 15 bp, Homo sapiens
tacaagttcttcatc

SEQ ID NO: 105762 - DNA, 15 bp, Homo sapiens
atacaagttcttcat

SEQ ID NO: 105763 - DNA, 15 bp, Homo sapiens
gatacaagttcttca

SEQ ID NO: 105764 - DNA, 15 bp, Homo sapiens
agatacaagttcttc

SEQ ID NO: 105765 - DNA, 15 bp, Homo sapiens
gagatacaagttctt

SEQ ID NO: 105766 - DNA, 15 bp, Homo sapiens
agagatacaagttct

SEQ ID NO: 105767 - DNA, 15 bp, Homo sapiens
aagagatacaagttc

SEQ ID NO: 105768 - DNA, 15 bp, Homo sapiens
aaagagatacaagtt

SEQ ID NO: 105769 - DNA, 15 bp, Homo sapiens
aaaagagatacaagt

SEQ ID NO: 105770 - DNA, 15 bp, Homo sapiens
taaaagagatacaag

SEQ ID NO: 105771 - DNA, 15 bp, Homo sapiens
ttaaaagagatacaa

SEQ ID NO: 105772 - DNA, 15 bp, Homo sapiens
tttaaaagagataca

SEQ ID NO: 105773 - DNA, 15 bp, Homo sapiens
gtttaaaagagatac

SEQ ID NO: 105774 - DNA, 15 bp, Homo sapiens
agtttaaaagagata

SEQ ID NO: 105775 - DNA, 15 bp, Homo sapiens
cagtttaaaagagat

SEQ ID NO: 105776 - DNA, 15 bp, Homo sapiens
acagtttaaaagaga

SEQ ID NO: 105777 - DNA, 15 bp, Homo sapiens
tacagtttaaaagag

SEQ ID NO: 105778 - DNA, 15 bp, Homo sapiens
gtacagtttaaaaga

SEQ ID NO: 105779 - DNA, 15 bp, Homo sapiens
agtacagtttaaaag

SEQ ID NO: 105780 - DNA, 15 bp, Homo sapiens
aagtacagtttaaaa

SEQ ID NO: 105781 - DNA, 15 bp, Homo sapiens
aaagtacagtttaaa

SEQ ID NO: 105782 - DNA, 15 bp, Homo sapiens
taaagtacagtttaa

SEQ ID NO: 105783 - DNA, 15 bp, Homo sapiens
ataaagtacagttta

SEQ ID NO: 105784 - DNA, 15 bp, Homo sapiens
gataaagtacagttt

SEQ ID NO: 105785 - DNA, 15 bp, Homo sapiens
cgataaagtacagtt

SEQ ID NO: 105786 - DNA, 15 bp, Homo sapiens
gcgataaagtacagt

SEQ ID NO: 105787 - DNA, 15 bp, Homo sapiens
ggcgataaagtacag

SEQ ID NO: 105788 - DNA, 15 bp, Homo sapiens
aggcgataaagtaca

SEQ ID NO: 105789 - DNA, 15 bp, Homo sapiens
aaggcgataaagtac

SEQ ID NO: 105790 - DNA, 15 bp, Homo sapiens
aaaggcgataaagta

SEQ ID NO: 105791 - DNA, 15 bp, Homo sapiens
gaaaggcgataaagt

SEQ ID NO: 105792 - DNA, 15 bp, Homo sapiens
agaaaggcgataaag

SEQ ID NO: 105793 - DNA, 15 bp, Homo sapiens
gagaaaggcgataaa

SEQ ID NO: 105794 - DNA, 15 bp, Homo sapiens
tgagaaaggcgataa

SEQ ID NO: 105795 - DNA, 15 bp, Homo sapiens
ttgagaaaggcgata

SEQ ID NO: 105796 - DNA, 15 bp, Homo sapiens
tttgagaaaggcgat

SEQ ID NO: 105797 - DNA, 15 bp, Homo sapiens
atttgagaaaggcga

SEQ ID NO: 105798 - DNA, 15 bp, Homo sapiens
aatttgagaaaggcg

SEQ ID NO: 105799 - DNA, 15 bp, Homo sapiens
gaatttgagaaaggc

SEQ ID NO: 105800 - DNA, 15 bp, Homo sapiens
ggaatttgagaaagg

SEQ ID NO: 105801 - DNA, 15 bp, Homo sapiens
tggaatttgagaaag

SEQ ID NO: 105802 - DNA, 15 bp, Homo sapiens
ttggaatttgagaaa

SEQ ID NO: 105803 - DNA, 15 bp, Homo sapiens
cttggaatttgagaa

SEQ ID NO: 105804 - DNA, 15 bp, Homo sapiens
tcttggaatttgaga

SEQ ID NO: 105805 - DNA, 15 bp, Homo sapiens
atcttggaatttgag

SEQ ID NO: 105806 - DNA, 15 bp, Homo sapiens
aatcttggaatttga

SEQ ID NO: 105807 - DNA, 15 bp, Homo sapiens
gaatcttggaatttg

SEQ ID NO: 105808 - DNA, 15 bp, Homo sapiens
agaatcttggaattt

SEQ ID NO: 105809 - DNA, 15 bp, Homo sapiens
gagaatcttggaatt

SEQ ID NO: 105810 - DNA, 15 bp, Homo sapiens
tgagaatcttggaat

SEQ ID NO: 105811 - DNA, 15 bp, Homo sapiens
atgagaatcttggaa

SEQ ID NO: 105812 - DNA, 15 bp, Homo sapiens
gatgagaatcttgga

SEQ ID NO: 105813 - DNA, 15 bp, Homo sapiens
tgatgagaatcttgg

SEQ ID NO: 105814 - DNA, 15 bp, Homo sapiens
gtgatgagaatcttg

SEQ ID NO: 105815 - DNA, 15 bp, Homo sapiens
tgtgatgagaatctt

SEQ ID NO: 105816 - DNA, 15 bp, Homo sapiens
atgtgatgagaatct

SEQ ID NO: 105817 - DNA, 15 bp, Homo sapiens
aatgtgatgagaatc

SEQ ID NO: 105818 - DNA, 15 bp, Homo sapiens
aaatgtgatgagaat

SEQ ID NO: 105819 - DNA, 15 bp, Homo sapiens
aaaatgtgatgagaa

SEQ ID NO: 105820 - DNA, 15 bp, Homo sapiens
aaaaatgtgatgaga

SEQ ID NO: 105821 - DNA, 15 bp, Homo sapiens
aaaaaatgtgatgag

SEQ ID NO: 105822 - DNA, 15 bp, Homo sapiens
aaaaaaatgtgatga

SEQ ID NO: 105823 - DNA, 15 bp, Homo sapiens
aaaaaaaatgtgatg

SEQ ID NO: 105824 - DNA, 15 bp, Homo sapiens
gaaaaaaaatgtgat

SEQ ID NO: 105825 - DNA, 15 bp, Homo sapiens
agaaaaaaaatgtga

SEQ ID NO: 105826 - DNA, 15 bp, Homo sapiens
aagaaaaaaaatgtg

SEQ ID NO: 105827 - DNA, 15 bp, Homo sapiens
gaagaaaaaaaatgt

SEQ ID NO: 105828 - DNA, 15 bp, Homo sapiens
ggaagaaaaaaaatg

SEQ ID NO: 105829 - DNA, 15 bp, Homo sapiens
gggaagaaaaaaaat

SEQ ID NO: 105830 - DNA, 15 bp, Homo sapiens
tgggaagaaaaaaaa

SEQ ID NO: 105831 - DNA, 15 bp, Homo sapiens
ttgggaagaaaaaaa

SEQ ID NO: 105832 - DNA, 15 bp, Homo sapiens
tttgggaagaaaaaa

SEQ ID NO: 105833 - DNA, 15 bp, Homo sapiens
gtttgggaagaaaaa

SEQ ID NO: 105834 - DNA, 15 bp, Homo sapiens
agtttgggaagaaaa

SEQ ID NO: 105835 - DNA, 15 bp, Homo sapiens
gagtttgggaagaaa

SEQ ID NO: 105836 - DNA, 15 bp, Homo sapiens
agagtttgggaagaa

SEQ ID NO: 105837 - DNA, 15 bp, Homo sapiens
tagagtttgggaaga

SEQ ID NO: 105838 - DNA, 15 bp, Homo sapiens
ttagagtttgggaag

SEQ ID NO: 105839 - DNA, 15 bp, Homo sapiens
tttagagtttgggaa

SEQ ID NO: 105840 - DNA, 15 bp, Homo sapiens
atttagagtttggga

SEQ ID NO: 105841 - DNA, 15 bp, Homo sapiens
tatttagagtttggg

SEQ ID NO: 105842 - DNA, 15 bp, Homo sapiens
ttatttagagtttgg

SEQ ID NO: 105843 - DNA, 15 bp, Homo sapiens
gttatttagagtttg

SEQ ID NO: 105844 - DNA, 15 bp, Homo sapiens
ggttatttagagttt

SEQ ID NO: 105845 - DNA, 15 bp, Homo sapiens
aggttatttagagtt

SEQ ID NO: 105846 - DNA, 15 bp, Homo sapiens
aaggttatttagagt

SEQ ID NO: 105847 - DNA, 15 bp, Homo sapiens
aaaggttatttagag

SEQ ID NO: 105848 - DNA, 15 bp, Homo sapiens
aaaaggttatttaga

SEQ ID NO: 105849 - DNA, 15 bp, Homo sapiens
taaaaggttatttag

SEQ ID NO: 105850 - DNA, 15 bp, Homo sapiens
ttaaaaggttattta

SEQ ID NO: 105851 - DNA, 15 bp, Homo sapiens
attaaaaggttattt

SEQ ID NO: 105852 - DNA, 15 bp, Homo sapiens
tattaaaaggttatt

SEQ ID NO: 105853 - DNA, 15 bp, Homo sapiens
atattaaaaggttat

SEQ ID NO: 105854 - DNA, 15 bp, Homo sapiens
aatattaaaaggtta

SEQ ID NO: 105855 - DNA, 15 bp, Homo sapiens
taatattaaaaggtt

SEQ ID NO: 105856 - DNA, 15 bp, Homo sapiens
ttaatattaaaaggt

SEQ ID NO: 105857 - DNA, 15 bp, Homo sapiens
cttaatattaaaagg

SEQ ID NO: 105858 - DNA, 15 bp, Homo sapiens
acttaatattaaaag

SEQ ID NO: 105859 - DNA, 15 bp, Homo sapiens
tacttaatattaaaa

SEQ ID NO: 105860 - DNA, 15 bp, Homo sapiens
atacttaatattaaa

SEQ ID NO: 105861 - DNA, 15 bp, Homo sapiens
gatacttaatattaa

SEQ ID NO: 105862 - DNA, 15 bp, Homo sapiens
agatacttaatatta

SEQ ID NO: 105863 - DNA, 15 bp, Homo sapiens
aagatacttaatatt

SEQ ID NO: 105864 - DNA, 15 bp, Homo sapiens
aaagatacttaatat

SEQ ID NO: 105865 - DNA, 15 bp, Homo sapiens
caaagatacttaata

SEQ ID NO: 105866 - DNA, 15 bp, Homo sapiens
acaaagatacttaat

SEQ ID NO: 105867 - DNA, 15 bp, Homo sapiens
cacaaagatacttaa

SEQ ID NO: 105868 - DNA, 15 bp, Homo sapiens
ccacaaagatactta

SEQ ID NO: 105869 - DNA, 15 bp, Homo sapiens
tccacaaagatactt

SEQ ID NO: 105870 - DNA, 15 bp, Homo sapiens
ttccacaaagatact

SEQ ID NO: 105871 - DNA, 15 bp, Homo sapiens
tttccacaaagatac

SEQ ID NO: 105872 - DNA, 15 bp, Homo sapiens
gtttccacaaagata

SEQ ID NO: 105873 - DNA, 15 bp, Homo sapiens
tgtttccacaaagat

SEQ ID NO: 105874 - DNA, 15 bp, Homo sapiens
atgtttccacaaaga

SEQ ID NO: 105875 - DNA, 15 bp, Homo sapiens
aatgtttccacaaag

SEQ ID NO: 105876 - DNA, 15 bp, Homo sapiens
caatgtttccacaaa

SEQ ID NO: 105877 - DNA, 15 bp, Homo sapiens
acaatgtttccacaa

SEQ ID NO: 105878 - DNA, 15 bp, Homo sapiens
aacaatgtttccaca

SEQ ID NO: 105879 - DNA, 15 bp, Homo sapiens
aaacaatgtttccac

SEQ ID NO: 105880 - DNA, 15 bp, Homo sapiens
aaaacaatgtttcca

SEQ ID NO: 105881 - DNA, 15 bp, Homo sapiens
gaaaacaatgtttcc

SEQ ID NO: 105882 - DNA, 15 bp, Homo sapiens
agaaaacaatgtttc

SEQ ID NO: 105883 - DNA, 15 bp, Homo sapiens
aagaaaacaatgttt

SEQ ID NO: 105884 - DNA, 15 bp, Homo sapiens
aaagaaaacaatgtt

SEQ ID NO: 105885 - DNA, 15 bp, Homo sapiens
aaaagaaaacaatgt

SEQ ID NO: 105886 - DNA, 15 bp, Homo sapiens
aaaaagaaaacaatg

SEQ ID NO: 105887 - DNA, 15 bp, Homo sapiens
gaaaaagaaaacaat

SEQ ID NO: 105888 - DNA, 15 bp, Homo sapiens
agaaaaagaaaacaa

SEQ ID NO: 105889 - DNA, 15 bp, Homo sapiens
tagaaaaagaaaaca

SEQ ID NO: 105890 - DNA, 15 bp, Homo sapiens
atagaaaaagaaaac

SEQ ID NO: 105891 - DNA, 15 bp, Homo sapiens
gatagaaaaagaaaa

SEQ ID NO: 105892 - DNA, 15 bp, Homo sapiens
ggatagaaaaagaaa

SEQ ID NO: 105893 - DNA, 15 bp, Homo sapiens
gggatagaaaaagaa

SEQ ID NO: 105894 - DNA, 15 bp, Homo sapiens
tgggatagaaaaaga

SEQ ID NO: 105895 - DNA, 15 bp, Homo sapiens
ttgggatagaaaaag

SEQ ID NO: 105896 - DNA, 15 bp, Homo sapiens
attgggatagaaaaa

SEQ ID NO: 105897 - DNA, 15 bp, Homo sapiens
aattgggatagaaaa

SEQ ID NO: 105898 - DNA, 15 bp, Homo sapiens
aaattgggatagaaa

SEQ ID NO: 105899 - DNA, 15 bp, Homo sapiens
aaaattgggatagaa

SEQ ID NO: 105900 - DNA, 15 bp, Homo sapiens
aaaaattgggataga

SEQ ID NO: 105901 - DNA, 15 bp, Homo sapiens
taaaaattgggatag

SEQ ID NO: 105902 - DNA, 15 bp, Homo sapiens
ttaaaaattgggata

SEQ ID NO: 105903 - DNA, 15 bp, Homo sapiens
tttaaaaattgggat

SEQ ID NO: 105904 - DNA, 15 bp, Homo sapiens
ctttaaaaattggga

SEQ ID NO: 105905 - DNA, 15 bp, Homo sapiens
gctttaaaaattggg

SEQ ID NO: 105906 - DNA, 15 bp, Homo sapiens
agctttaaaaattgg

SEQ ID NO: 105907 - DNA, 15 bp, Homo sapiens
aagctttaaaaattg

SEQ ID NO: 105908 - DNA, 15 bp, Homo sapiens
aaagctttaaaaatt

SEQ ID NO: 105909 - DNA, 15 bp, Homo sapiens
aaaagctttaaaaat

SEQ ID NO: 105910 - DNA, 15 bp, Homo sapiens
aaaaagctttaaaaa

SEQ ID NO: 105911 - DNA, 15 bp, Homo sapiens
aaaaaagctttaaaa

SEQ ID NO: 105912 - DNA, 15 bp, Homo sapiens
taaaaaagctttaaa

SEQ ID NO: 105913 - DNA, 15 bp, Homo sapiens
ttaaaaaagctttaa

SEQ ID NO: 105914 - DNA, 15 bp, Homo sapiens
tttaaaaaagcttta

SEQ ID NO: 105915 - DNA, 15 bp, Homo sapiens
ttttaaaaaagcttt

SEQ ID NO: 105916 - DNA, 15 bp, Homo sapiens
tttttaaaaaagctt

SEQ ID NO: 105917 - DNA, 15 bp, Homo sapiens
ttttttaaaaaagct

SEQ ID NO: 105918 - DNA, 15 bp, Homo sapiens
tttttttaaaaaagc

SEQ ID NO: 105919 - DNA, 15 bp, Homo sapiens
ttttttttaaaaaag

SEQ ID NO: 105920 - DNA, 15 bp, Homo sapiens
cttttttttaaaaaa

SEQ ID NO: 105921 - DNA, 15 bp, Homo sapiens
tcttttttttaaaaa

SEQ ID NO: 105922 - DNA, 15 bp, Homo sapiens
ctcttttttttaaaa

SEQ ID NO: 105923 - DNA, 15 bp, Homo sapiens
actcttttttttaaa

SEQ ID NO: 105924 - DNA, 15 bp, Homo sapiens
cactcttttttttaa

SEQ ID NO: 105925 - DNA, 15 bp, Homo sapiens
gcactctttttttta

SEQ ID NO: 105926 - DNA, 15 bp, Homo sapiens
agcactctttttttt

SEQ ID NO: 105927 - DNA, 15 bp, Homo sapiens
aagcactcttttttt

SEQ ID NO: 105928 - DNA, 15 bp, Homo sapiens
aaagcactctttttt

SEQ ID NO: 105929 - DNA, 15 bp, Homo sapiens
aaaagcactcttttt

SEQ ID NO: 105930 - DNA, 15 bp, Homo sapiens
caaaagcactctttt

SEQ ID NO: 105931 - DNA, 15 bp, Homo sapiens
acaaaagcactcttt

SEQ ID NO: 105932 - DNA, 15 bp, Homo sapiens
aacaaaagcactctt

SEQ ID NO: 105933 - DNA, 15 bp, Homo sapiens
caacaaaagcactct

SEQ ID NO: 105934 - DNA, 15 bp, Homo sapiens
ccaacaaaagcactc

SEQ ID NO: 105935 - DNA, 15 bp, Homo sapiens
cccaacaaaagcact

SEQ ID NO: 105936 - DNA, 15 bp, Homo sapiens
tcccaacaaaagcac

SEQ ID NO: 105937 - DNA, 15 bp, Homo sapiens
atcccaacaaaagca

SEQ ID NO: 105938 - DNA, 15 bp, Homo sapiens
catcccaacaaaagc

SEQ ID NO: 105939 - DNA, 15 bp, Homo sapiens
acatcccaacaaaag

SEQ ID NO: 105940 - DNA, 15 bp, Homo sapiens
tacatcccaacaaaa

SEQ ID NO: 105941 - DNA, 15 bp, Homo sapiens
gtacatcccaacaaa

SEQ ID NO: 105942 - DNA, 15 bp, Homo sapiens
tgtacatcccaacaa

SEQ ID NO: 105943 - DNA, 15 bp, Homo sapiens
atgtacatcccaaca

SEQ ID NO: 105944 - DNA, 15 bp, Homo sapiens
aatgtacatcccaac

SEQ ID NO: 105945 - DNA, 15 bp, Homo sapiens
aaatgtacatcccaa

SEQ ID NO: 105946 - DNA, 15 bp, Homo sapiens
aaaatgtacatccca

SEQ ID NO: 105947 - DNA, 15 bp, Homo sapiens
gaaaatgtacatccc

SEQ ID NO: 105948 - DNA, 15 bp, Homo sapiens
ggaaaatgtacatcc

SEQ ID NO: 105949 - DNA, 15 bp, Homo sapiens
tggaaaatgtacatc

SEQ ID NO: 105950 - DNA, 15 bp, Homo sapiens
ttggaaaatgtacat

SEQ ID NO: 105951 - DNA, 15 bp, Homo sapiens
tttggaaaatgtaca

SEQ ID NO: 105952 - DNA, 15 bp, Homo sapiens
atttggaaaatgtac

SEQ ID NO: 105953 - DNA, 15 bp, Homo sapiens
catttggaaaatgta

SEQ ID NO: 105954 - DNA, 15 bp, Homo sapiens
gcatttggaaaatgt

SEQ ID NO: 105955 - DNA, 15 bp, Homo sapiens
tgcatttggaaaatg

SEQ ID NO: 105956 - DNA, 15 bp, Homo sapiens
ttgcatttggaaaat

SEQ ID NO: 105957 - DNA, 15 bp, Homo sapiens
tttgcatttggaaaa

SEQ ID NO: 105958 - DNA, 15 bp, Homo sapiens
ttttgcatttggaaa

SEQ ID NO: 105959 - DNA, 15 bp, Homo sapiens
tttttgcatttggaa

SEQ ID NO: 105960 - DNA, 15 bp, Homo sapiens
gtttttgcatttgga

SEQ ID NO: 105961 - DNA, 15 bp, Homo sapiens
tgtttttgcatttgg

SEQ ID NO: 105962 - DNA, 15 bp, Homo sapiens
atgtttttgcatttg

SEQ ID NO: 105963 - DNA, 15 bp, Homo sapiens
aatgtttttgcattt

SEQ ID NO: 105964 - DNA, 15 bp, Homo sapiens
aaatgtttttgcatt

SEQ ID NO: 105965 - DNA, 15 bp, Homo sapiens
taaatgtttttgcat

SEQ ID NO: 105966 - DNA, 15 bp, Homo sapiens
ataaatgtttttgca

SEQ ID NO: 105967 - DNA, 15 bp, Homo sapiens
cataaatgtttttgc

SEQ ID NO: 105968 - DNA, 15 bp, Homo sapiens
tcataaatgtttttg

SEQ ID NO: 105969 - DNA, 15 bp, Homo sapiens
atcataaatgttttt

SEQ ID NO: 105970 - DNA, 15 bp, Homo sapiens
aatcataaatgtttt

SEQ ID NO: 105971 - DNA, 15 bp, Homo sapiens
gaatcataaatgttt

SEQ ID NO: 105972 - DNA, 15 bp, Homo sapiens
agaatcataaatgtt

SEQ ID NO: 105973 - DNA, 15 bp, Homo sapiens
cagaatcataaatgt

SEQ ID NO: 105974 - DNA, 15 bp, Homo sapiens
acagaatcataaatg

SEQ ID NO: 105975 - DNA, 15 bp, Homo sapiens
cacagaatcataaat

SEQ ID NO: 105976 - DNA, 15 bp, Homo sapiens
acacagaatcataaa

SEQ ID NO: 105977 - DNA, 15 bp, Homo sapiens
gacacagaatcataa

SEQ ID NO: 105978 - DNA, 15 bp, Homo sapiens
agacacagaatcata

SEQ ID NO: 105979 - DNA, 15 bp, Homo sapiens
gagacacagaatcat

SEQ ID NO: 105980 - DNA, 15 bp, Homo sapiens
agagacacagaatca

SEQ ID NO: 105981 - DNA, 15 bp, Homo sapiens
aagagacacagaatc

SEQ ID NO: 105982 - DNA, 15 bp, Homo sapiens
taagagacacagaat

SEQ ID NO: 105983 - DNA, 15 bp, Homo sapiens
ataagagacacagaa

SEQ ID NO: 105984 - DNA, 15 bp, Homo sapiens
tataagagacacaga

SEQ ID NO: 105985 - DNA, 15 bp, Homo sapiens
ttataagagacacag

SEQ ID NO: 105986 - DNA, 15 bp, Homo sapiens
tttataagagacaca

SEQ ID NO: 105987 - DNA, 15 bp, Homo sapiens
ttttataagagacac

SEQ ID NO: 105988 - DNA, 15 bp, Homo sapiens
attttataagagaca

SEQ ID NO: 105989 - DNA, 15 bp, Homo sapiens
tattttataagagac

SEQ ID NO: 105990 - DNA, 15 bp, Homo sapiens
atattttataagaga

SEQ ID NO: 105991 - DNA, 15 bp, Homo sapiens
catattttataagag

SEQ ID NO: 105992 - DNA, 15 bp, Homo sapiens
tcatattttataaga

SEQ ID NO: 105993 - DNA, 15 bp, Homo sapiens
gtcatattttataag

SEQ ID NO: 105994 - DNA, 15 bp, Homo sapiens
tgtcatattttataa

SEQ ID NO: 105995 - DNA, 15 bp, Homo sapiens
gtgtcatattttata

SEQ ID NO: 105996 - DNA, 15 bp, Homo sapiens
agtgtcatattttat

SEQ ID NO: 105997 - DNA, 15 bp, Homo sapiens
gagtgtcatatttta

SEQ ID NO: 105998 - DNA, 15 bp, Homo sapiens
agagtgtcatatttt

SEQ ID NO: 105999 - DNA, 15 bp, Homo sapiens
gagagtgtcatattt

SEQ ID NO: 106000 - DNA, 15 bp, Homo sapiens
agagagtgtcatatt

SEQ ID NO: 106001 - DNA, 15 bp, Homo sapiens
tagagagtgtcatat

SEQ ID NO: 106002 - DNA, 15 bp, Homo sapiens
gtagagagtgtcata

SEQ ID NO: 106003 - DNA, 15 bp, Homo sapiens
agtagagagtgtcat

SEQ ID NO: 106004 - DNA, 15 bp, Homo sapiens
aagtagagagtgtca

SEQ ID NO: 106005 - DNA, 15 bp, Homo sapiens
aaagtagagagtgtc

SEQ ID NO: 106006 - DNA, 15 bp, Homo sapiens
aaaagtagagagtgt

SEQ ID NO: 106007 - DNA, 15 bp, Homo sapiens
gaaaagtagagagtg

SEQ ID NO: 106008 - DNA, 15 bp, Homo sapiens
agaaaagtagagagt

SEQ ID NO: 106009 - DNA, 15 bp, Homo sapiens
gagaaaagtagagag

SEQ ID NO: 106010 - DNA, 15 bp, Homo sapiens
agagaaaagtagaga

SEQ ID NO: 106011 - DNA, 15 bp, Homo sapiens
gagagaaaagtagag

SEQ ID NO: 106012 - DNA, 15 bp, Homo sapiens
tgagagaaaagtaga

SEQ ID NO: 106013 - DNA, 15 bp, Homo sapiens
atgagagaaaagtag

SEQ ID NO: 106014 - DNA, 15 bp, Homo sapiens
aatgagagaaaagta

SEQ ID NO: 106015 - DNA, 15 bp, Homo sapiens
aaatgagagaaaagt

SEQ ID NO: 106016 - DNA, 15 bp, Homo sapiens
taaatgagagaaaag

SEQ ID NO: 106017 - DNA, 15 bp, Homo sapiens
ataaatgagagaaaa

SEQ ID NO: 106018 - DNA, 15 bp, Homo sapiens
aataaatgagagaaa

SEQ ID NO: 106019 - DNA, 15 bp, Homo sapiens
aaataaatgagagaa

SEQ ID NO: 106020 - DNA, 15 bp, Homo sapiens
taaataaatgagaga

SEQ ID NO: 106021 - DNA, 15 bp, Homo sapiens
ctaaataaatgagag

SEQ ID NO: 106022 - DNA, 15 bp, Homo sapiens
actaaataaatgaga

SEQ ID NO: 106023 - DNA, 15 bp, Homo sapiens
cactaaataaatgag

SEQ ID NO: 106024 - DNA, 15 bp, Homo sapiens
gcactaaataaatga

SEQ ID NO: 106025 - DNA, 15 bp, Homo sapiens
ggcactaaataaatg

SEQ ID NO: 106026 - DNA, 15 bp, Homo sapiens
tggcactaaataaat

SEQ ID NO: 106027 - DNA, 15 bp, Homo sapiens
gtggcactaaataaa

SEQ ID NO: 106028 - DNA, 15 bp, Homo sapiens
ggtggcactaaataa

SEQ ID NO: 106029 - DNA, 15 bp, Homo sapiens
aggtggcactaaata

SEQ ID NO: 106030 - DNA, 15 bp, Homo sapiens
taggtggcactaaat

SEQ ID NO: 106031 - DNA, 15 bp, Homo sapiens
ataggtggcactaaa

SEQ ID NO: 106032 - DNA, 15 bp, Homo sapiens
cataggtggcactaa

SEQ ID NO: 106033 - DNA, 15 bp, Homo sapiens
acataggtggcacta

SEQ ID NO: 106034 - DNA, 15 bp, Homo sapiens
cacataggtggcact

SEQ ID NO: 106035 - DNA, 15 bp, Homo sapiens
acacataggtggcac

SEQ ID NO: 106036 - DNA, 15 bp, Homo sapiens
cacacataggtggca

SEQ ID NO: 106037 - DNA, 15 bp, Homo sapiens
acacacataggtggc

SEQ ID NO: 106038 - DNA, 15 bp, Homo sapiens
tacacacataggtgg

SEQ ID NO: 106039 - DNA, 15 bp, Homo sapiens
ttacacacataggtg

SEQ ID NO: 106040 - DNA, 15 bp, Homo sapiens
attacacacataggt

SEQ ID NO: 106041 - DNA, 15 bp, Homo sapiens
aattacacacatagg

SEQ ID NO: 106042 - DNA, 15 bp, Homo sapiens
aaattacacacatag

SEQ ID NO: 106043 - DNA, 15 bp, Homo sapiens
gaaattacacacata

SEQ ID NO: 106044 - DNA, 15 bp, Homo sapiens
tgaaattacacacat

SEQ ID NO: 106045 - DNA, 15 bp, Homo sapiens
atgaaattacacaca

SEQ ID NO: 106046 - DNA, 15 bp, Homo sapiens
aatgaaattacacac

SEQ ID NO: 106047 - DNA, 15 bp, Homo sapiens
taatgaaattacaca

SEQ ID NO: 106048 - DNA, 15 bp, Homo sapiens
gtaatgaaattacac

SEQ ID NO: 106049 - DNA, 15 bp, Homo sapiens
ggtaatgaaattaca

SEQ ID NO: 106050 - DNA, 15 bp, Homo sapiens
gggtaatgaaattac

SEQ ID NO: 106051 - DNA, 15 bp, Homo sapiens
tgggtaatgaaatta

SEQ ID NO: 106052 - DNA, 15 bp, Homo sapiens
gtgggtaatgaaatt

SEQ ID NO: 106053 - DNA, 15 bp, Homo sapiens
tgtgggtaatgaaat

SEQ ID NO: 106054 - DNA, 15 bp, Homo sapiens
ctgtgggtaatgaaa

SEQ ID NO: 106055 - DNA, 15 bp, Homo sapiens
gctgtgggtaatgaa

SEQ ID NO: 106056 - DNA, 15 bp, Homo sapiens
tgctgtgggtaatga

SEQ ID NO: 106057 - DNA, 15 bp, Homo sapiens
ctgctgtgggtaatg

SEQ ID NO: 106058 - DNA, 15 bp, Homo sapiens
actgctgtgggtaat

SEQ ID NO: 106059 - DNA, 15 bp, Homo sapiens
gactgctgtgggtaa

SEQ ID NO: 106060 - DNA, 15 bp, Homo sapiens
agactgctgtgggta

SEQ ID NO: 106061 - DNA, 15 bp, Homo sapiens
aagactgctgtgggt

SEQ ID NO: 106062 - DNA, 15 bp, Homo sapiens
taagactgctgtggg

SEQ ID NO: 106063 - DNA, 15 bp, Homo sapiens
ctaagactgctgtgg

SEQ ID NO: 106064 - DNA, 15 bp, Homo sapiens
cctaagactgctgtg

SEQ ID NO: 106065 - DNA, 15 bp, Homo sapiens
tcctaagactgctgt

SEQ ID NO: 106066 - DNA, 15 bp, Homo sapiens
ctcctaagactgctg

SEQ ID NO: 106067 - DNA, 15 bp, Homo sapiens
cctcctaagactgct

SEQ ID NO: 106068 - DNA, 15 bp, Homo sapiens
gcctcctaagactgc

SEQ ID NO: 106069 - DNA, 15 bp, Homo sapiens
agcctcctaagactg

SEQ ID NO: 106070 - DNA, 15 bp, Homo sapiens
cagcctcctaagact

SEQ ID NO: 106071 - DNA, 15 bp, Homo sapiens
ccagcctcctaagac

SEQ ID NO: 106072 - DNA, 15 bp, Homo sapiens
accagcctcctaaga

SEQ ID NO: 106073 - DNA, 15 bp, Homo sapiens
gaccagcctcctaag

SEQ ID NO: 106074 - DNA, 15 bp, Homo sapiens
cgaccagcctcctaa

SEQ ID NO: 106075 - DNA, 15 bp, Homo sapiens
tcgaccagcctccta

SEQ ID NO: 106076 - DNA, 15 bp, Homo sapiens
ctcgaccagcctcct

SEQ ID NO: 106077 - DNA, 15 bp, Homo sapiens
actcgaccagcctcc

SEQ ID NO: 106078 - DNA, 15 bp, Homo sapiens
aactcgaccagcctc

SEQ ID NO: 106079 - DNA, 15 bp, Homo sapiens
gaactcgaccagcct

SEQ ID NO: 106080 - DNA, 15 bp, Homo sapiens
ggaactcgaccagcc

SEQ ID NO: 106081 - DNA, 15 bp, Homo sapiens
aggaactcgaccagc

SEQ ID NO: 106082 - DNA, 15 bp, Homo sapiens
aaggaactcgaccag

SEQ ID NO: 106083 - DNA, 15 bp, Homo sapiens
taaggaactcgacca

SEQ ID NO: 106084 - DNA, 15 bp, Homo sapiens
ataaggaactcgacc

SEQ ID NO: 106085 - DNA, 15 bp, Homo sapiens
aataaggaactcgac

SEQ ID NO: 106086 - DNA, 15 bp, Homo sapiens
aaataaggaactcga

SEQ ID NO: 106087 - DNA, 15 bp, Homo sapiens
caaataaggaactcg

SEQ ID NO: 106088 - DNA, 15 bp, Homo sapiens
gcaaataaggaactc

SEQ ID NO: 106089 - DNA, 15 bp, Homo sapiens
tgcaaataaggaact

SEQ ID NO: 106090 - DNA, 15 bp, Homo sapiens
ctgcaaataaggaac

SEQ ID NO: 106091 - DNA, 15 bp, Homo sapiens
tctgcaaataaggaa

SEQ ID NO: 106092 - DNA, 15 bp, Homo sapiens
atctgcaaataagga

SEQ ID NO: 106093 - DNA, 15 bp, Homo sapiens
catctgcaaataagg

SEQ ID NO: 106094 - DNA, 15 bp, Homo sapiens
tcatctgcaaataag

SEQ ID NO: 106095 - DNA, 15 bp, Homo sapiens
ctcatctgcaaataa

SEQ ID NO: 106096 - DNA, 15 bp, Homo sapiens
cctcatctgcaaata

SEQ ID NO: 106097 - DNA, 15 bp, Homo sapiens
tcctcatctgcaaat

SEQ ID NO: 106098 - DNA, 15 bp, Homo sapiens
ttcctcatctgcaaa

SEQ ID NO: 106099 - DNA, 15 bp, Homo sapiens
attcctcatctgcaa

SEQ ID NO: 106100 - DNA, 15 bp, Homo sapiens
gattcctcatctgca

SEQ ID NO: 106101 - DNA, 15 bp, Homo sapiens
agattcctcatctgc

SEQ ID NO: 106102 - DNA, 15 bp, Homo sapiens
cagattcctcatctg

SEQ ID NO: 106103 - DNA, 15 bp, Homo sapiens
tcagattcctcatct

SEQ ID NO: 106104 - DNA, 15 bp, Homo sapiens
ctcagattcctcatc

SEQ ID NO: 106105 - DNA, 15 bp, Homo sapiens
cctcagattcctcat

SEQ ID NO: 106106 - DNA, 15 bp, Homo sapiens
acctcagattcctca

SEQ ID NO: 106107 - DNA, 15 bp, Homo sapiens
gacctcagattcctc

SEQ ID NO: 106108 - DNA, 15 bp, Homo sapiens
ggacctcagattcct

SEQ ID NO: 106109 - DNA, 15 bp, Homo sapiens
tggacctcagattcc

SEQ ID NO: 106110 - DNA, 15 bp, Homo sapiens
ctggacctcagattc

SEQ ID NO: 106111 - DNA, 15 bp, Homo sapiens
tctggacctcagatt

SEQ ID NO: 106112 - DNA, 15 bp, Homo sapiens
ctctggacctcagat

SEQ ID NO: 106113 - DNA, 15 bp, Homo sapiens
tctctggacctcaga

SEQ ID NO: 106114 - DNA, 15 bp, Homo sapiens
atctctggacctcag

SEQ ID NO: 106115 - DNA, 15 bp, Homo sapiens
gatctctggacctca

SEQ ID NO: 106116 - DNA, 15 bp, Homo sapiens
tgatctctggacctc

SEQ ID NO: 106117 - DNA, 15 bp, Homo sapiens
gtgatctctggacct

SEQ ID NO: 106118 - DNA, 15 bp, Homo sapiens
agtgatctctggacc

SEQ ID NO: 106119 - DNA, 15 bp, Homo sapiens
aagtgatctctggac

SEQ ID NO: 106120 - DNA, 15 bp, Homo sapiens
gaagtgatctctgga

SEQ ID NO: 106121 - DNA, 15 bp, Homo sapiens
agaagtgatctctgg

SEQ ID NO: 106122 - DNA, 15 bp, Homo sapiens
aagaagtgatctctg

SEQ ID NO: 106123 - DNA, 15 bp, Homo sapiens
caagaagtgatctct

SEQ ID NO: 106124 - DNA, 15 bp, Homo sapiens
ccaagaagtgatctc

SEQ ID NO: 106125 - DNA, 15 bp, Homo sapiens
accaagaagtgatct

SEQ ID NO: 106126 - DNA, 15 bp, Homo sapiens
caccaagaagtgatc

SEQ ID NO: 106127 - DNA, 15 bp, Homo sapiens
tcaccaagaagtgat

SEQ ID NO: 106128 - DNA, 15 bp, Homo sapiens
ctcaccaagaagtga

SEQ ID NO: 106129 - DNA, 15 bp, Homo sapiens
tctcaccaagaagtg

SEQ ID NO: 106130 - DNA, 15 bp, Homo sapiens
ctctcaccaagaagt

SEQ ID NO: 106131 - DNA, 15 bp, Homo sapiens
actctcaccaagaag

SEQ ID NO: 106132 - DNA, 15 bp, Homo sapiens
gactctcaccaagaa

SEQ ID NO: 106133 - DNA, 15 bp, Homo sapiens
agactctcaccaaga

SEQ ID NO: 106134 - DNA, 15 bp, Homo sapiens
gagactctcaccaag

SEQ ID NO: 106135 - DNA, 15 bp, Homo sapiens
tgagactctcaccaa

SEQ ID NO: 106136 - DNA, 15 bp, Homo sapiens
gtgagactctcacca

SEQ ID NO: 106137 - DNA, 15 bp, Homo sapiens
tgtgagactctcacc

SEQ ID NO: 106138 - DNA, 15 bp, Homo sapiens
ctgtgagactctcac

SEQ ID NO: 106139 - DNA, 15 bp, Homo sapiens
gctgtgagactctca

SEQ ID NO: 106140 - DNA, 15 bp, Homo sapiens
agctgtgagactctc

SEQ ID NO: 106141 - DNA, 15 bp, Homo sapiens
tagctgtgagactct

SEQ ID NO: 106142 - DNA, 15 bp, Homo sapiens
atagctgtgagactc

SEQ ID NO: 106143 - DNA, 15 bp, Homo sapiens
aatagctgtgagact

SEQ ID NO: 106144 - DNA, 15 bp, Homo sapiens
taatagctgtgagac

SEQ ID NO: 106145 - DNA, 15 bp, Homo sapiens
ttaatagctgtgaga

SEQ ID NO: 106146 - DNA, 15 bp, Homo sapiens
cttaatagctgtgag

SEQ ID NO: 106147 - DNA, 15 bp, Homo sapiens
acttaatagctgtga

SEQ ID NO: 106148 - DNA, 15 bp, Homo sapiens
tacttaatagctgtg

SEQ ID NO: 106149 - DNA, 15 bp, Homo sapiens
atacttaatagctgt

SEQ ID NO: 106150 - DNA, 15 bp, Homo sapiens
aatacttaatagctg

SEQ ID NO: 106151 - DNA, 15 bp, Homo sapiens
taatacttaatagct

SEQ ID NO: 106152 - DNA, 15 bp, Homo sapiens
ctaatacttaatagc

SEQ ID NO: 106153 - DNA, 15 bp, Homo sapiens
tctaatacttaatag

SEQ ID NO: 106154 - DNA, 15 bp, Homo sapiens
ctctaatacttaata

SEQ ID NO: 106155 - DNA, 15 bp, Homo sapiens
gctctaatacttaat

SEQ ID NO: 106156 - DNA, 15 bp, Homo sapiens
ggctctaatacttaa

SEQ ID NO: 106157 - DNA, 15 bp, Homo sapiens
tggctctaatactta

SEQ ID NO: 106158 - DNA, 15 bp, Homo sapiens
ttggctctaatactt

SEQ ID NO: 106159 - DNA, 15 bp, Homo sapiens
cttggctctaatact

SEQ ID NO: 106160 - DNA, 15 bp, Homo sapiens
tcttggctctaatac

SEQ ID NO: 106161 - DNA, 15 bp, Homo sapiens
atcttggctctaata

SEQ ID NO: 106162 - DNA, 15 bp, Homo sapiens
aatcttggctctaat

SEQ ID NO: 106163 - DNA, 15 bp, Homo sapiens
aaatcttggctctaa

SEQ ID NO: 106164 - DNA, 15 bp, Homo sapiens
aaaatcttggctcta

SEQ ID NO: 106165 - DNA, 15 bp, Homo sapiens
caaaatcttggctct

SEQ ID NO: 106166 - DNA, 15 bp, Homo sapiens
tcaaaatcttggctc

SEQ ID NO: 106167 - DNA, 15 bp, Homo sapiens
ttcaaaatcttggct

SEQ ID NO: 106168 - DNA, 15 bp, Homo sapiens
gttcaaaatcttggc

SEQ ID NO: 106169 - DNA, 15 bp, Homo sapiens
cgttcaaaatcttgg

SEQ ID NO: 106170 - DNA, 15 bp, Homo sapiens
acgttcaaaatcttg

SEQ ID NO: 106171 - DNA, 15 bp, Homo sapiens
tacgttcaaaatctt

SEQ ID NO: 106172 - DNA, 15 bp, Homo sapiens
ctacgttcaaaatct

SEQ ID NO: 106173 - DNA, 15 bp, Homo sapiens
cctacgttcaaaatc

SEQ ID NO: 106174 - DNA, 15 bp, Homo sapiens
acctacgttcaaaat

SEQ ID NO: 106175 - DNA, 15 bp, Homo sapiens
gacctacgttcaaaa

SEQ ID NO: 106176 - DNA, 15 bp, Homo sapiens
agacctacgttcaaa

SEQ ID NO: 106177 - DNA, 15 bp, Homo sapiens
cagacctacgttcaa

SEQ ID NO: 106178 - DNA, 15 bp, Homo sapiens
tcagacctacgttca

SEQ ID NO: 106179 - DNA, 15 bp, Homo sapiens
atcagacctacgttc

SEQ ID NO: 106180 - DNA, 15 bp, Homo sapiens
aatcagacctacgtt

SEQ ID NO: 106181 - DNA, 15 bp, Homo sapiens
gaatcagacctacgt

SEQ ID NO: 106182 - DNA, 15 bp, Homo sapiens
tgaatcagacctacg

SEQ ID NO: 106183 - DNA, 15 bp, Homo sapiens
gtgaatcagacctac

SEQ ID NO: 106184 - DNA, 15 bp, Homo sapiens
tgtgaatcagaccta

SEQ ID NO: 106185 - DNA, 15 bp, Homo sapiens
ctgtgaatcagacct

SEQ ID NO: 106186 - DNA, 15 bp, Homo sapiens
gctgtgaatcagacc

SEQ ID NO: 106187 - DNA, 15 bp, Homo sapiens
tgctgtgaatcagac

SEQ ID NO: 106188 - DNA, 15 bp, Homo sapiens
ttgctgtgaatcaga

SEQ ID NO: 106189 - DNA, 15 bp, Homo sapiens
tttgctgtgaatcag

SEQ ID NO: 106190 - DNA, 15 bp, Homo sapiens
ttttgctgtgaatca

SEQ ID NO: 106191 - DNA, 15 bp, Homo sapiens
gttttgctgtgaatc

SEQ ID NO: 106192 - DNA, 15 bp, Homo sapiens
ggttttgctgtgaat

SEQ ID NO: 106193 - DNA, 15 bp, Homo sapiens
cggttttgctgtgaa

SEQ ID NO: 106194 - DNA, 15 bp, Homo sapiens
acggttttgctgtga

SEQ ID NO: 106195 - DNA, 15 bp, Homo sapiens
aacggttttgctgtg

SEQ ID NO: 106196 - DNA, 15 bp, Homo sapiens
taacggttttgctgt

SEQ ID NO: 106197 - DNA, 15 bp, Homo sapiens
ttaacggttttgctg

SEQ ID NO: 106198 - DNA, 15 bp, Homo sapiens
gttaacggttttgct

SEQ ID NO: 106199 - DNA, 15 bp, Homo sapiens
ggttaacggttttgc

SEQ ID NO: 106200 - DNA, 15 bp, Homo sapiens
tggttaacggttttg

SEQ ID NO: 106201 - DNA, 15 bp, Homo sapiens
gtggttaacggtttt

SEQ ID NO: 106202 - DNA, 15 bp, Homo sapiens
agtggttaacggttt

SEQ ID NO: 106203 - DNA, 15 bp, Homo sapiens
tagtggttaacggtt

SEQ ID NO: 106204 - DNA, 15 bp, Homo sapiens
ttagtggttaacggt

SEQ ID NO: 106205 - DNA, 15 bp, Homo sapiens
cttagtggttaacgg

SEQ ID NO: 106206 - DNA, 15 bp, Homo sapiens
acttagtggttaacg

SEQ ID NO: 106207 - DNA, 15 bp, Homo sapiens
tacttagtggttaac

SEQ ID NO: 106208 - DNA, 15 bp, Homo sapiens
gtacttagtggttaa

SEQ ID NO: 106209 - DNA, 15 bp, Homo sapiens
tgtacttagtggtta

SEQ ID NO: 106210 - DNA, 15 bp, Homo sapiens
gtgtacttagtggtt

SEQ ID NO: 106211 - DNA, 15 bp, Homo sapiens
agtgtacttagtggt

SEQ ID NO: 106212 - DNA, 15 bp, Homo sapiens
cagtgtacttagtgg

SEQ ID NO: 106213 - DNA, 15 bp, Homo sapiens
tcagtgtacttagtg

SEQ ID NO: 106214 - DNA, 15 bp, Homo sapiens
gtcagtgtacttagt

SEQ ID NO: 106215 - DNA, 15 bp, Homo sapiens
agtcagtgtacttag

SEQ ID NO: 106216 - DNA, 15 bp, Homo sapiens
gagtcagtgtactta

SEQ ID NO: 106217 - DNA, 15 bp, Homo sapiens
ggagtcagtgtactt

SEQ ID NO: 106218 - DNA, 15 bp, Homo sapiens
tggagtcagtgtact

SEQ ID NO: 106219 - DNA, 15 bp, Homo sapiens
ctggagtcagtgtac

SEQ ID NO: 106220 - DNA, 15 bp, Homo sapiens
actggagtcagtgta

SEQ ID NO: 106221 - DNA, 15 bp, Homo sapiens
tactggagtcagtgt

SEQ ID NO: 106222 - DNA, 15 bp, Homo sapiens
ttactggagtcagtg

SEQ ID NO: 106223 - DNA, 15 bp, Homo sapiens
cttactggagtcagt

SEQ ID NO: 106224 - DNA, 15 bp, Homo sapiens
tcttactggagtcag

SEQ ID NO: 106225 - DNA, 15 bp, Homo sapiens
ctcttactggagtca

SEQ ID NO: 106226 - DNA, 15 bp, Homo sapiens
gctcttactggagtc

SEQ ID NO: 106227 - DNA, 15 bp, Homo sapiens
ggctcttactggagt

SEQ ID NO: 106228 - DNA, 15 bp, Homo sapiens
gggctcttactggag

SEQ ID NO: 106229 - DNA, 15 bp, Homo sapiens
agggctcttactgga

SEQ ID NO: 106230 - DNA, 15 bp, Homo sapiens
tagggctcttactgg

SEQ ID NO: 106231 - DNA, 15 bp, Homo sapiens
ctagggctcttactg

SEQ ID NO: 106232 - DNA, 15 bp, Homo sapiens
actagggctcttact

SEQ ID NO: 106233 - DNA, 15 bp, Homo sapiens
gactagggctcttac

SEQ ID NO: 106234 - DNA, 15 bp, Homo sapiens
ggactagggctctta

SEQ ID NO: 106235 - DNA, 15 bp, Homo sapiens
aggactagggctctt

SEQ ID NO: 106236 - DNA, 15 bp, Homo sapiens
gaggactagggctct

SEQ ID NO: 106237 - DNA, 15 bp, Homo sapiens
tgaggactagggctc

SEQ ID NO: 106238 - DNA, 15 bp, Homo sapiens
gtgaggactagggct

SEQ ID NO: 106239 - DNA, 15 bp, Homo sapiens
ggtgaggactagggc

SEQ ID NO: 106240 - DNA, 15 bp, Homo sapiens
gggtgaggactaggg

SEQ ID NO: 106241 - DNA, 15 bp, Homo sapiens
tgggtgaggactagg

SEQ ID NO: 106242 - DNA, 15 bp, Homo sapiens
ttgggtgaggactag

SEQ ID NO: 106243 - DNA, 15 bp, Homo sapiens
attgggtgaggacta

SEQ ID NO: 106244 - DNA, 15 bp, Homo sapiens
tattgggtgaggact

SEQ ID NO: 106245 - DNA, 15 bp, Homo sapiens
gtattgggtgaggac

SEQ ID NO: 106246 - DNA, 15 bp, Homo sapiens
tgtattgggtgagga

SEQ ID NO: 106247 - DNA, 15 bp, Homo sapiens
gtgtattgggtgagg

SEQ ID NO: 106248 - DNA, 15 bp, Homo sapiens
agtgtattgggtgag

SEQ ID NO: 106249 - DNA, 15 bp, Homo sapiens
aagtgtattgggtga

SEQ ID NO: 106250 - DNA, 15 bp, Homo sapiens
aaagtgtattgggtg

SEQ ID NO: 106251 - DNA, 15 bp, Homo sapiens
taaagtgtattgggt

SEQ ID NO: 106252 - DNA, 15 bp, Homo sapiens
ttaaagtgtattggg

SEQ ID NO: 106253 - DNA, 15 bp, Homo sapiens
attaaagtgtattgg

SEQ ID NO: 106254 - DNA, 15 bp, Homo sapiens
aattaaagtgtattg

SEQ ID NO: 106255 - DNA, 15 bp, Homo sapiens
gaattaaagtgtatt

SEQ ID NO: 106256 - DNA, 15 bp, Homo sapiens
ggaattaaagtgtat

SEQ ID NO: 106257 - DNA, 15 bp, Homo sapiens
gggaattaaagtgta

SEQ ID NO: 106258 - DNA, 15 bp, Homo sapiens
ggggaattaaagtgt

SEQ ID NO: 106259 - DNA, 15 bp, Homo sapiens
aggggaattaaagtg

SEQ ID NO: 106260 - DNA, 15 bp, Homo sapiens
caggggaattaaagt

SEQ ID NO: 106261 - DNA, 15 bp, Homo sapiens
acaggggaattaaag

SEQ ID NO: 106262 - DNA, 15 bp, Homo sapiens
cacaggggaattaaa

SEQ ID NO: 106263 - DNA, 15 bp, Homo sapiens
gcacaggggaattaa

SEQ ID NO: 106264 - DNA, 15 bp, Homo sapiens
tgcacaggggaatta

SEQ ID NO: 106265 - DNA, 15 bp, Homo sapiens
atgcacaggggaatt

SEQ ID NO: 106266 - DNA, 15 bp, Homo sapiens
aatgcacaggggaat

SEQ ID NO: 106267 - DNA, 15 bp, Homo sapiens
gaatgcacaggggaa

SEQ ID NO: 106268 - DNA, 15 bp, Homo sapiens
tgaatgcacagggga

SEQ ID NO: 106269 - DNA, 15 bp, Homo sapiens
atgaatgcacagggg

SEQ ID NO: 106270 - DNA, 15 bp, Homo sapiens
aatgaatgcacaggg

SEQ ID NO: 106271 - DNA, 15 bp, Homo sapiens
gaatgaatgcacagg

SEQ ID NO: 106272 - DNA, 15 bp, Homo sapiens
tgaatgaatgcacag

SEQ ID NO: 106273 - DNA, 15 bp, Homo sapiens
ttgaatgaatgcaca

SEQ ID NO: 106274 - DNA, 15 bp, Homo sapiens
tttgaatgaatgcac

SEQ ID NO: 106275 - DNA, 15 bp, Homo sapiens
atttgaatgaatgca

SEQ ID NO: 106276 - DNA, 15 bp, Homo sapiens
aatttgaatgaatgc

SEQ ID NO: 106277 - DNA, 15 bp, Homo sapiens
gaatttgaatgaatg

SEQ ID NO: 106278 - DNA, 15 bp, Homo sapiens
tgaatttgaatgaat

SEQ ID NO: 106279 - DNA, 15 bp, Homo sapiens
atgaatttgaatgaa

SEQ ID NO: 106280 - DNA, 15 bp, Homo sapiens
aatgaatttgaatga

SEQ ID NO: 106281 - DNA, 15 bp, Homo sapiens
caatgaatttgaatg

SEQ ID NO: 106282 - DNA, 15 bp, Homo sapiens
tcaatgaatttgaat

SEQ ID NO: 106283 - DNA, 15 bp, Homo sapiens
ttcaatgaatttgaa

SEQ ID NO: 106284 - DNA, 15 bp, Homo sapiens
attcaatgaatttga

SEQ ID NO: 106285 - DNA, 15 bp, Homo sapiens
aattcaatgaatttg

SEQ ID NO: 106286 - DNA, 15 bp, Homo sapiens
aaattcaatgaattt

SEQ ID NO: 106287 - DNA, 15 bp, Homo sapiens
caaattcaatgaatt

SEQ ID NO: 106288 - DNA, 15 bp, Homo sapiens
gcaaattcaatgaat

SEQ ID NO: 106289 - DNA, 15 bp, Homo sapiens
agcaaattcaatgaa

SEQ ID NO: 106290 - DNA, 15 bp, Homo sapiens
cagcaaattcaatga

SEQ ID NO: 106291 - DNA, 15 bp, Homo sapiens
gcagcaaattcaatg

SEQ ID NO: 106292 - DNA, 15 bp, Homo sapiens
ggcagcaaattcaat

SEQ ID NO: 106293 - DNA, 15 bp, Homo sapiens
aggcagcaaattcaa

SEQ ID NO: 106294 - DNA, 15 bp, Homo sapiens
aaggcagcaaattca

SEQ ID NO: 106295 - DNA, 15 bp, Homo sapiens
aaaggcagcaaattc

SEQ ID NO: 106296 - DNA, 15 bp, Homo sapiens
caaaggcagcaaatt

SEQ ID NO: 106297 - DNA, 15 bp, Homo sapiens
ccaaaggcagcaaat

SEQ ID NO: 106298 - DNA, 15 bp, Homo sapiens
tccaaaggcagcaaa

SEQ ID NO: 106299 - DNA, 15 bp, Homo sapiens
ttccaaaggcagcaa

SEQ ID NO: 106300 - DNA, 15 bp, Homo sapiens
tttccaaaggcagca

SEQ ID NO: 106301 - DNA, 15 bp, Homo sapiens
gtttccaaaggcagc

SEQ ID NO: 106302 - DNA, 15 bp, Homo sapiens
ggtttccaaaggcag

SEQ ID NO: 106303 - DNA, 15 bp, Homo sapiens
aggtttccaaaggca

SEQ ID NO: 106304 - DNA, 15 bp, Homo sapiens
gaggtttccaaaggc

SEQ ID NO: 106305 - DNA, 15 bp, Homo sapiens
agaggtttccaaagg

SEQ ID NO: 106306 - DNA, 15 bp, Homo sapiens
gagaggtttccaaag

SEQ ID NO: 106307 - DNA, 15 bp, Homo sapiens
tgagaggtttccaaa

SEQ ID NO: 106308 - DNA, 15 bp, Homo sapiens
ctgagaggtttccaa

SEQ ID NO: 106309 - DNA, 15 bp, Homo sapiens
cctgagaggtttcca

SEQ ID NO: 106310 - DNA, 15 bp, Homo sapiens
tcctgagaggtttcc

SEQ ID NO: 106311 - DNA, 15 bp, Homo sapiens
ttcctgagaggtttc

SEQ ID NO: 106312 - DNA, 15 bp, Homo sapiens
gttcctgagaggttt

SEQ ID NO: 106313 - DNA, 15 bp, Homo sapiens
ggttcctgagaggtt

SEQ ID NO: 106314 - DNA, 15 bp, Homo sapiens
aggttcctgagaggt

SEQ ID NO: 106315 - DNA, 15 bp, Homo sapiens
gaggttcctgagagg

SEQ ID NO: 106316 - DNA, 15 bp, Homo sapiens
ggaggttcctgagag

SEQ ID NO: 106317 - DNA, 15 bp, Homo sapiens
aggaggttcctgaga

SEQ ID NO: 106318 - DNA, 15 bp, Homo sapiens
gaggaggttcctgag

SEQ ID NO: 106319 - DNA, 15 bp, Homo sapiens
tgaggaggttcctga

SEQ ID NO: 106320 - DNA, 15 bp, Homo sapiens
ttgaggaggttcctg

SEQ ID NO: 106321 - DNA, 15 bp, Homo sapiens
gttgaggaggttcct

SEQ ID NO: 106322 - DNA, 15 bp, Homo sapiens
ggttgaggaggttcc

SEQ ID NO: 106323 - DNA, 15 bp, Homo sapiens
aggttgaggaggttc

SEQ ID NO: 106324 - DNA, 15 bp, Homo sapiens
gaggttgaggaggtt

SEQ ID NO: 106325 - DNA, 15 bp, Homo sapiens
agaggttgaggaggt

SEQ ID NO: 106326 - DNA, 15 bp, Homo sapiens
gagaggttgaggagg

SEQ ID NO: 106327 - DNA, 15 bp, Homo sapiens
agagaggttgaggag

SEQ ID NO: 106328 - DNA, 15 bp, Homo sapiens
aagagaggttgagga

SEQ ID NO: 106329 - DNA, 15 bp, Homo sapiens
gaagagaggttgagg

SEQ ID NO: 106330 - DNA, 15 bp, Homo sapiens
agaagagaggttgag

SEQ ID NO: 106331 - DNA, 15 bp, Homo sapiens
gagaagagaggttga

SEQ ID NO: 106332 - DNA, 15 bp, Homo sapiens
agagaagagaggttg

SEQ ID NO: 106333 - DNA, 15 bp, Homo sapiens
tagagaagagaggtt

SEQ ID NO: 106334 - DNA, 15 bp, Homo sapiens
gtagagaagagaggt

SEQ ID NO: 106335 - DNA, 15 bp, Homo sapiens
tgtagagaagagagg

SEQ ID NO: 106336 - DNA, 15 bp, Homo sapiens
ctgtagagaagagag

SEQ ID NO: 106337 - DNA, 15 bp, Homo sapiens
tctgtagagaagaga

SEQ ID NO: 106338 - DNA, 15 bp, Homo sapiens
gtctgtagagaagag

SEQ ID NO: 106339 - DNA, 15 bp, Homo sapiens
tgtctgtagagaaga

SEQ ID NO: 106340 - DNA, 15 bp, Homo sapiens
atgtctgtagagaag

SEQ ID NO: 106341 - DNA, 15 bp, Homo sapiens
gatgtctgtagagaa

SEQ ID NO: 106342 - DNA, 15 bp, Homo sapiens
tgatgtctgtagaga

SEQ ID NO: 106343 - DNA, 15 bp, Homo sapiens
ctgatgtctgtagag

SEQ ID NO: 106344 - DNA, 15 bp, Homo sapiens
gctgatgtctgtaga

SEQ ID NO: 106345 - DNA, 15 bp, Homo sapiens
agctgatgtctgtag

SEQ ID NO: 106346 - DNA, 15 bp, Homo sapiens
aagctgatgtctgta

SEQ ID NO: 106347 - DNA, 15 bp, Homo sapiens
aaagctgatgtctgt

SEQ ID NO: 106348 - DNA, 15 bp, Homo sapiens
caaagctgatgtctg

SEQ ID NO: 106349 - DNA, 15 bp, Homo sapiens
gcaaagctgatgtct

SEQ ID NO: 106350 - DNA, 15 bp, Homo sapiens
ggcaaagctgatgtc

SEQ ID NO: 106351 - DNA, 15 bp, Homo sapiens
aggcaaagctgatgt

SEQ ID NO: 106352 - DNA, 15 bp, Homo sapiens
caggcaaagctgatg

SEQ ID NO: 106353 - DNA, 15 bp, Homo sapiens
tcaggcaaagctgat

SEQ ID NO: 106354 - DNA, 15 bp, Homo sapiens
atcaggcaaagctga

SEQ ID NO: 106355 - DNA, 15 bp, Homo sapiens
tatcaggcaaagctg

SEQ ID NO: 106356 - DNA, 15 bp, Homo sapiens
ctatcaggcaaagct

SEQ ID NO: 106357 - DNA, 15 bp, Homo sapiens
cctatcaggcaaagc

SEQ ID NO: 106358 - DNA, 15 bp, Homo sapiens
acctatcaggcaaag

SEQ ID NO: 106359 - DNA, 15 bp, Homo sapiens
tacctatcaggcaaa

SEQ ID NO: 106360 - DNA, 15 bp, Homo sapiens
ctacctatcaggcaa

SEQ ID NO: 106361 - DNA, 15 bp, Homo sapiens
cctacctatcaggca

SEQ ID NO: 106362 - DNA, 15 bp, Homo sapiens
ccctacctatcaggc

SEQ ID NO: 106363 - DNA, 15 bp, Homo sapiens
tccctacctatcagg

SEQ ID NO: 106364 - DNA, 15 bp, Homo sapiens
atccctacctatcag

SEQ ID NO: 106365 - DNA, 15 bp, Homo sapiens
gatccctacctatca

SEQ ID NO: 106366 - DNA, 15 bp, Homo sapiens
tgatccctacctatc

SEQ ID NO: 106367 - DNA, 15 bp, Homo sapiens
atgatccctacctat

SEQ ID NO: 106368 - DNA, 15 bp, Homo sapiens
tatgatccctaccta

SEQ ID NO: 106369 - DNA, 15 bp, Homo sapiens
ctatgatccctacct

SEQ ID NO: 106370 - DNA, 15 bp, Homo sapiens
gctatgatccctacc

SEQ ID NO: 106371 - DNA, 15 bp, Homo sapiens
tgctatgatccctac

SEQ ID NO: 106372 - DNA, 15 bp, Homo sapiens
ttgctatgatcccta

SEQ ID NO: 106373 - DNA, 15 bp, Homo sapiens
tttgctatgatccct

SEQ ID NO: 106374 - DNA, 15 bp, Homo sapiens
ttttgctatgatccc

SEQ ID NO: 106375 - DNA, 15 bp, Homo sapiens
gttttgctatgatcc

SEQ ID NO: 106376 - DNA, 15 bp, Homo sapiens
tgttttgctatgatc

SEQ ID NO: 106377 - DNA, 15 bp, Homo sapiens
gtgttttgctatgat

SEQ ID NO: 106378 - DNA, 15 bp, Homo sapiens
tgtgttttgctatga

SEQ ID NO: 106379 - DNA, 15 bp, Homo sapiens
ctgtgttttgctatg

SEQ ID NO: 106380 - DNA, 15 bp, Homo sapiens
actgtgttttgctat

SEQ ID NO: 106381 - DNA, 15 bp, Homo sapiens
aactgtgttttgcta

SEQ ID NO: 106382 - DNA, 15 bp, Homo sapiens
aaactgtgttttgct

SEQ ID NO: 106383 - DNA, 15 bp, Homo sapiens
aaaactgtgttttgc

SEQ ID NO: 106384 - DNA, 15 bp, Homo sapiens
gaaaactgtgttttg

SEQ ID NO: 106385 - DNA, 15 bp, Homo sapiens
ggaaaactgtgtttt

SEQ ID NO: 106386 - DNA, 15 bp, Homo sapiens
tggaaaactgtgttt

SEQ ID NO: 106387 - DNA, 15 bp, Homo sapiens
ttggaaaactgtgtt

SEQ ID NO: 106388 - DNA, 15 bp, Homo sapiens
cttggaaaactgtgt

SEQ ID NO: 106389 - DNA, 15 bp, Homo sapiens
ccttggaaaactgtg

SEQ ID NO: 106390 - DNA, 15 bp, Homo sapiens
accttggaaaactgt

SEQ ID NO: 106391 - DNA, 15 bp, Homo sapiens
caccttggaaaactg

SEQ ID NO: 106392 - DNA, 15 bp, Homo sapiens
ccaccttggaaaact

SEQ ID NO: 106393 - DNA, 15 bp, Homo sapiens
accaccttggaaaac

SEQ ID NO: 106394 - DNA, 15 bp, Homo sapiens
caccaccttggaaaa

SEQ ID NO: 106395 - DNA, 15 bp, Homo sapiens
tcaccaccttggaaa

SEQ ID NO: 106396 - DNA, 15 bp, Homo sapiens
atcaccaccttggaa

SEQ ID NO: 106397 - DNA, 15 bp, Homo sapiens
tatcaccaccttgga

SEQ ID NO: 106398 - DNA, 15 bp, Homo sapiens
ctatcaccaccttgg

SEQ ID NO: 106399 - DNA, 15 bp, Homo sapiens
cctatcaccaccttg

SEQ ID NO: 106400 - DNA, 15 bp, Homo sapiens
acctatcaccacctt

SEQ ID NO: 106401 - DNA, 15 bp, Homo sapiens
cacctatcaccacct

SEQ ID NO: 106402 - DNA, 15 bp, Homo sapiens
ccacctatcaccacc

SEQ ID NO: 106403 - DNA, 15 bp, Homo sapiens
tccacctatcaccac

SEQ ID NO: 106404 - DNA, 15 bp, Homo sapiens
ctccacctatcacca

SEQ ID NO: 106405 - DNA, 15 bp, Homo sapiens
actccacctatcacc

SEQ ID NO: 106406 - DNA, 15 bp, Homo sapiens
cactccacctatcac

SEQ ID NO: 106407 - DNA, 15 bp, Homo sapiens
tcactccacctatca

SEQ ID NO: 106408 - DNA, 15 bp, Homo sapiens
atcactccacctatc

SEQ ID NO: 106409 - DNA, 15 bp, Homo sapiens
tatcactccacctat

SEQ ID NO: 106410 - DNA, 15 bp, Homo sapiens
ctatcactccaccta

SEQ ID NO: 106411 - DNA, 15 bp, Homo sapiens
actatcactccacct

SEQ ID NO: 106412 - DNA, 15 bp, Homo sapiens
cactatcactccacc

SEQ ID NO: 106413 - DNA, 15 bp, Homo sapiens
gcactatcactccac

SEQ ID NO: 106414 - DNA, 15 bp, Homo sapiens
agcactatcactcca

SEQ ID NO: 106415 - DNA, 15 bp, Homo sapiens
gagcactatcactcc

SEQ ID NO: 106416 - DNA, 15 bp, Homo sapiens
agagcactatcactc

SEQ ID NO: 106417 - DNA, 15 bp, Homo sapiens
cagagcactatcact

SEQ ID NO: 106418 - DNA, 15 bp, Homo sapiens
ccagagcactatcac

SEQ ID NO: 106419 - DNA, 15 bp, Homo sapiens
tccagagcactatca

SEQ ID NO: 106420 - DNA, 15 bp, Homo sapiens
ctccagagcactatc

SEQ ID NO: 106421 - DNA, 15 bp, Homo sapiens
tctccagagcactat

SEQ ID NO: 106422 - DNA, 15 bp, Homo sapiens
atctccagagcacta

SEQ ID NO: 106423 - DNA, 15 bp, Homo sapiens
catctccagagcact

SEQ ID NO: 106424 - DNA, 15 bp, Homo sapiens
ccatctccagagcac

SEQ ID NO: 106425 - DNA, 15 bp, Homo sapiens
gccatctccagagca

SEQ ID NO: 106426 - DNA, 15 bp, Homo sapiens
ggccatctccagagc

SEQ ID NO: 106427 - DNA, 15 bp, Homo sapiens
tggccatctccagag

SEQ ID NO: 106428 - DNA, 15 bp, Homo sapiens
ttggccatctccaga

SEQ ID NO: 106429 - DNA, 15 bp, Homo sapiens
tttggccatctccag

SEQ ID NO: 106430 - DNA, 15 bp, Homo sapiens
ctttggccatctcca

SEQ ID NO: 106431 - DNA, 15 bp, Homo sapiens
tctttggccatctcc

SEQ ID NO: 106432 - DNA, 15 bp, Homo sapiens
ttctttggccatctc

SEQ ID NO: 106433 - DNA, 15 bp, Homo sapiens
cttctttggccatct

SEQ ID NO: 106434 - DNA, 15 bp, Homo sapiens
ccttctttggccatc

SEQ ID NO: 106435 - DNA, 15 bp, Homo sapiens
tccttctttggccat

SEQ ID NO: 106436 - DNA, 15 bp, Homo sapiens
ttccttctttggcca

SEQ ID NO: 106437 - DNA, 15 bp, Homo sapiens
cttccttctttggcc

SEQ ID NO: 106438 - DNA, 15 bp, Homo sapiens
ccttccttctttggc

SEQ ID NO: 106439 - DNA, 15 bp, Homo sapiens
accttccttctttgg

SEQ ID NO: 106440 - DNA, 15 bp, Homo sapiens
taccttccttctttg

SEQ ID NO: 106441 - DNA, 15 bp, Homo sapiens
ataccttccttcttt

SEQ ID NO: 106442 - DNA, 15 bp, Homo sapiens
cataccttccttctt

SEQ ID NO: 106443 - DNA, 15 bp, Homo sapiens
tcataccttccttct

SEQ ID NO: 106444 - DNA, 15 bp, Homo sapiens
ctcataccttccttc

SEQ ID NO: 106445 - DNA, 15 bp, Homo sapiens
actcataccttcctt

SEQ ID NO: 106446 - DNA, 15 bp, Homo sapiens
cactcataccttcct

SEQ ID NO: 106447 - DNA, 15 bp, Homo sapiens
acactcataccttcc

SEQ ID NO: 106448 - DNA, 15 bp, Homo sapiens
tacactcataccttc

SEQ ID NO: 106449 - DNA, 15 bp, Homo sapiens
atacactcatacctt

SEQ ID NO: 106450 - DNA, 15 bp, Homo sapiens
gatacactcatacct

SEQ ID NO: 106451 - DNA, 15 bp, Homo sapiens
agatacactcatacc

SEQ ID NO: 106452 - DNA, 15 bp, Homo sapiens
cagatacactcatac

SEQ ID NO: 106453 - DNA, 15 bp, Homo sapiens
acagatacactcata

SEQ ID NO: 106454 - DNA, 15 bp, Homo sapiens
cacagatacactcat

SEQ ID NO: 106455 - DNA, 15 bp, Homo sapiens
ccacagatacactca

SEQ ID NO: 106456 - DNA, 15 bp, Homo sapiens
cccacagatacactc

SEQ ID NO: 106457 - DNA, 15 bp, Homo sapiens
acccacagatacact

SEQ ID NO: 106458 - DNA, 15 bp, Homo sapiens
cacccacagatacac

SEQ ID NO: 106459 - DNA, 15 bp, Homo sapiens
ccacccacagataca

SEQ ID NO: 106460 - DNA, 15 bp, Homo sapiens
cccacccacagatac

SEQ ID NO: 106461 - DNA, 15 bp, Homo sapiens
acccacccacagata

SEQ ID NO: 106462 - DNA, 15 bp, Homo sapiens
cacccacccacagat

SEQ ID NO: 106463 - DNA, 15 bp, Homo sapiens
tcacccacccacaga

SEQ ID NO: 106464 - DNA, 15 bp, Homo sapiens
ctcacccacccacag

SEQ ID NO: 106465 - DNA, 15 bp, Homo sapiens
actcacccacccaca

SEQ ID NO: 106466 - DNA, 15 bp, Homo sapiens
cactcacccacccac

SEQ ID NO: 106467 - DNA, 15 bp, Homo sapiens
ccactcacccaccca

SEQ ID NO: 106468 - DNA, 15 bp, Homo sapiens
accactcacccaccc

SEQ ID NO: 106469 - DNA, 15 bp, Homo sapiens
caccactcacccacc

SEQ ID NO: 106470 - DNA, 15 bp, Homo sapiens
ccaccactcacccac

SEQ ID NO: 106471 - DNA, 15 bp, Homo sapiens
tccaccactcaccca

SEQ ID NO: 106472 - DNA, 15 bp, Homo sapiens
atccaccactcaccc

SEQ ID NO: 106473 - DNA, 15 bp, Homo sapiens
tatccaccactcacc

SEQ ID NO: 106474 - DNA, 15 bp, Homo sapiens
ttatccaccactcac

SEQ ID NO: 106475 - DNA, 15 bp, Homo sapiens
cttatccaccactca

SEQ ID NO: 106476 - DNA, 15 bp, Homo sapiens
ccttatccaccactc

SEQ ID NO: 106477 - DNA, 15 bp, Homo sapiens
cccttatccaccact

SEQ ID NO: 106478 - DNA, 15 bp, Homo sapiens
ccccttatccaccac

SEQ ID NO: 106479 - DNA, 15 bp, Homo sapiens
tccccttatccacca

SEQ ID NO: 106480 - DNA, 15 bp, Homo sapiens
ttccccttatccacc

SEQ ID NO: 106481 - DNA, 15 bp, Homo sapiens
cttccccttatccac

SEQ ID NO: 106482 - DNA, 15 bp, Homo sapiens
ccttccccttatcca

SEQ ID NO: 106483 - DNA, 15 bp, Homo sapiens
tccttccccttatcc

SEQ ID NO: 106484 - DNA, 15 bp, Homo sapiens
gtccttccccttatc

SEQ ID NO: 106485 - DNA, 15 bp, Homo sapiens
tgtccttccccttat

SEQ ID NO: 106486 - DNA, 15 bp, Homo sapiens
ctgtccttcccctta

SEQ ID NO: 106487 - DNA, 15 bp, Homo sapiens
tctgtccttcccctt

SEQ ID NO: 106488 - DNA, 15 bp, Homo sapiens
ctctgtccttcccct

SEQ ID NO: 106489 - DNA, 15 bp, Homo sapiens
gctctgtccttcccc

SEQ ID NO: 106490 - DNA, 15 bp, Homo sapiens
ggctctgtccttccc

SEQ ID NO: 106491 - DNA, 15 bp, Homo sapiens
tggctctgtccttcc

SEQ ID NO: 106492 - DNA, 15 bp, Homo sapiens
ttggctctgtccttc

SEQ ID NO: 106493 - DNA, 15 bp, Homo sapiens
tttggctctgtcctt

SEQ ID NO: 106494 - DNA, 15 bp, Homo sapiens
ttttggctctgtcct

SEQ ID NO: 106495 - DNA, 15 bp, Homo sapiens
cttttggctctgtcc

SEQ ID NO: 106496 - DNA, 15 bp, Homo sapiens
gcttttggctctgtc

SEQ ID NO: 106497 - DNA, 15 bp, Homo sapiens
cgcttttggctctgt

SEQ ID NO: 106498 - DNA, 15 bp, Homo sapiens
tcgcttttggctctg

SEQ ID NO: 106499 - DNA, 15 bp, Homo sapiens
gtcgcttttggctct

SEQ ID NO: 106500 - DNA, 15 bp, Homo sapiens
cgtcgcttttggctc

SEQ ID NO: 106501 - DNA, 15 bp, Homo sapiens
ccgtcgcttttggct

SEQ ID NO: 106502 - DNA, 15 bp, Homo sapiens
gccgtcgcttttggc

SEQ ID NO: 106503 - DNA, 15 bp, Homo sapiens
agccgtcgcttttgg

SEQ ID NO: 106504 - DNA, 15 bp, Homo sapiens
tagccgtcgcttttg

SEQ ID NO: 106505 - DNA, 15 bp, Homo sapiens
atagccgtcgctttt

SEQ ID NO: 106506 - DNA, 15 bp, Homo sapiens
aatagccgtcgcttt

SEQ ID NO: 106507 - DNA, 15 bp, Homo sapiens
caatagccgtcgctt

SEQ ID NO: 106508 - DNA, 15 bp, Homo sapiens
ccaatagccgtcgct

SEQ ID NO: 106509 - DNA, 15 bp, Homo sapiens
tccaatagccgtcgc

SEQ ID NO: 106510 - DNA, 15 bp, Homo sapiens
ttccaatagccgtcg

SEQ ID NO: 106511 - DNA, 15 bp, Homo sapiens
tttccaatagccgtc

SEQ ID NO: 106512 - DNA, 15 bp, Homo sapiens
ttttccaatagccgt

SEQ ID NO: 106513 - DNA, 15 bp, Homo sapiens
tttttccaatagccg

SEQ ID NO: 106514 - DNA, 15 bp, Homo sapiens
gtttttccaatagcc

SEQ ID NO: 106515 - DNA, 15 bp, Homo sapiens
agtttttccaatagc

SEQ ID NO: 106516 - DNA, 15 bp, Homo sapiens
tagtttttccaatag

SEQ ID NO: 106517 - DNA, 15 bp, Homo sapiens
atagtttttccaata

SEQ ID NO: 106518 - DNA, 15 bp, Homo sapiens
catagtttttccaat

SEQ ID NO: 106519 - DNA, 15 bp, Homo sapiens
tcatagtttttccaa

SEQ ID NO: 106520 - DNA, 15 bp, Homo sapiens
atcatagtttttcca

SEQ ID NO: 106521 - DNA, 15 bp, Homo sapiens
catcatagtttttcc

SEQ ID NO: 106522 - DNA, 15 bp, Homo sapiens
tcatcatagtttttc

SEQ ID NO: 106523 - DNA, 15 bp, Homo sapiens
ctcatcatagttttt

SEQ ID NO: 106524 - DNA, 15 bp, Homo sapiens
tctcatcatagtttt

SEQ ID NO: 106525 - DNA, 15 bp, Homo sapiens
ttctcatcatagttt

SEQ ID NO: 106526 - DNA, 15 bp, Homo sapiens
tttctcatcatagtt

SEQ ID NO: 106527 - DNA, 15 bp, Homo sapiens
gtttctcatcatagt

SEQ ID NO: 106528 - DNA, 15 bp, Homo sapiens
tgtttctcatcatag

SEQ ID NO: 106529 - DNA, 15 bp, Homo sapiens
ctgtttctcatcata

SEQ ID NO: 106530 - DNA, 15 bp, Homo sapiens
cctgtttctcatcat

SEQ ID NO: 106531 - DNA, 15 bp, Homo sapiens
tcctgtttctcatca

SEQ ID NO: 106532 - DNA, 15 bp, Homo sapiens
ttcctgtttctcatc

SEQ ID NO: 106533 - DNA, 15 bp, Homo sapiens
cttcctgtttctcat

SEQ ID NO: 106534 - DNA, 15 bp, Homo sapiens
tcttcctgtttctca

SEQ ID NO: 106535 - DNA, 15 bp, Homo sapiens
atcttcctgtttctc

SEQ ID NO: 106536 - DNA, 15 bp, Homo sapiens
catcttcctgtttct

SEQ ID NO: 106537 - DNA, 15 bp, Homo sapiens
ccatcttcctgtttc

SEQ ID NO: 106538 - DNA, 15 bp, Homo sapiens
tccatcttcctgttt

SEQ ID NO: 106539 - DNA, 15 bp, Homo sapiens
ttccatcttcctgtt

SEQ ID NO: 106540 - DNA, 15 bp, Homo sapiens
gttccatcttcctgt

SEQ ID NO: 106541 - DNA, 15 bp, Homo sapiens
ggttccatcttcctg

SEQ ID NO: 106542 - DNA, 15 bp, Homo sapiens
aggttccatcttcct

SEQ ID NO: 106543 - DNA, 15 bp, Homo sapiens
aaggttccatcttcc

SEQ ID NO: 106544 - DNA, 15 bp, Homo sapiens
caaggttccatcttc

SEQ ID NO: 106545 - DNA, 15 bp, Homo sapiens
acaaggttccatctt

SEQ ID NO: 106546 - DNA, 15 bp, Homo sapiens
aacaaggttccatct

SEQ ID NO: 106547 - DNA, 15 bp, Homo sapiens
caacaaggttccatc

SEQ ID NO: 106548 - DNA, 15 bp, Homo sapiens
ccaacaaggttccat

SEQ ID NO: 106549 - DNA, 15 bp, Homo sapiens
tccaacaaggttcca

SEQ ID NO: 106550 - DNA, 15 bp, Homo sapiens
ttccaacaaggttcc

SEQ ID NO: 106551 - DNA, 15 bp, Homo sapiens
attccaacaaggttc

SEQ ID NO: 106552 - DNA, 15 bp, Homo sapiens
aattccaacaaggtt

SEQ ID NO: 106553 - DNA, 15 bp, Homo sapiens
taattccaacaaggt

SEQ ID NO: 106554 - DNA, 15 bp, Homo sapiens
ctaattccaacaagg

SEQ ID NO: 106555 - DNA, 15 bp, Homo sapiens
actaattccaacaag

SEQ ID NO: 106556 - DNA, 15 bp, Homo sapiens
cactaattccaacaa

SEQ ID NO: 106557 - DNA, 15 bp, Homo sapiens
tcactaattccaaca

SEQ ID NO: 106558 - DNA, 15 bp, Homo sapiens
ttcactaattccaac

SEQ ID NO: 106559 - DNA, 15 bp, Homo sapiens
tttcactaattccaa

SEQ ID NO: 106560 - DNA, 15 bp, Homo sapiens
ctttcactaattcca

SEQ ID NO: 106561 - DNA, 15 bp, Homo sapiens
tctttcactaattcc

SEQ ID NO: 106562 - DNA, 15 bp, Homo sapiens
gtctttcactaattc

SEQ ID NO: 106563 - DNA, 15 bp, Homo sapiens
ggtctttcactaatt

SEQ ID NO: 106564 - DNA, 15 bp, Homo sapiens
aggtctttcactaat

SEQ ID NO: 106565 - DNA, 15 bp, Homo sapiens
aaggtctttcactaa

SEQ ID NO: 106566 - DNA, 15 bp, Homo sapiens
taaggtctttcacta

SEQ ID NO: 106567 - DNA, 15 bp, Homo sapiens
ctaaggtctttcact

SEQ ID NO: 106568 - DNA, 15 bp, Homo sapiens
tctaaggtctttcac

SEQ ID NO: 106569 - DNA, 15 bp, Homo sapiens
ttctaaggtctttca

SEQ ID NO: 106570 - DNA, 15 bp, Homo sapiens
attctaaggtctttc

SEQ ID NO: 106571 - DNA, 15 bp, Homo sapiens
aattctaaggtcttt

SEQ ID NO: 106572 - DNA, 15 bp, Homo sapiens
gaattctaaggtctt

SEQ ID NO: 106573 - DNA, 15 bp, Homo sapiens
tgaattctaaggtct

SEQ ID NO: 106574 - DNA, 15 bp, Homo sapiens
gtgaattctaaggtc

SEQ ID NO: 106575 - DNA, 15 bp, Homo sapiens
tgtgaattctaaggt

SEQ ID NO: 106576 - DNA, 15 bp, Homo sapiens
ctgtgaattctaagg

SEQ ID NO: 106577 - DNA, 15 bp, Homo sapiens
cctgtgaattctaag

SEQ ID NO: 106578 - DNA, 15 bp, Homo sapiens
tcctgtgaattctaa

SEQ ID NO: 106579 - DNA, 15 bp, Homo sapiens
ctcctgtgaattcta

SEQ ID NO: 106580 - DNA, 15 bp, Homo sapiens
cctcctgtgaattct

SEQ ID NO: 106581 - DNA, 15 bp, Homo sapiens
acctcctgtgaattc

SEQ ID NO: 106582 - DNA, 15 bp, Homo sapiens
tacctcctgtgaatt

SEQ ID NO: 106583 - DNA, 15 bp, Homo sapiens
atacctcctgtgaat

SEQ ID NO: 106584 - DNA, 15 bp, Homo sapiens
aatacctcctgtgaa

SEQ ID NO: 106585 - DNA, 15 bp, Homo sapiens
aaatacctcctgtga

SEQ ID NO: 106586 - DNA, 15 bp, Homo sapiens
caaatacctcctgtg

SEQ ID NO: 106587 - DNA, 15 bp, Homo sapiens
acaaatacctcctgt

SEQ ID NO: 106588 - DNA, 15 bp, Homo sapiens
gacaaatacctcctg

SEQ ID NO: 106589 - DNA, 15 bp, Homo sapiens
ggacaaatacctcct

SEQ ID NO: 106590 - DNA, 15 bp, Homo sapiens
aggacaaatacctcc

SEQ ID NO: 106591 - DNA, 15 bp, Homo sapiens
aaggacaaatacctc

SEQ ID NO: 106592 - DNA, 15 bp, Homo sapiens
gaaggacaaatacct

SEQ ID NO: 106593 - DNA, 15 bp, Homo sapiens
tgaaggacaaatacc

SEQ ID NO: 106594 - DNA, 15 bp, Homo sapiens
gtgaaggacaaatac

SEQ ID NO: 106595 - DNA, 15 bp, Homo sapiens
cgtgaaggacaaata

SEQ ID NO: 106596 - DNA, 15 bp, Homo sapiens
gcgtgaaggacaaat

SEQ ID NO: 106597 - DNA, 15 bp, Homo sapiens
cgcgtgaaggacaaa

SEQ ID NO: 106598 - DNA, 15 bp, Homo sapiens
tcgcgtgaaggacaa

SEQ ID NO: 106599 - DNA, 15 bp, Homo sapiens
ctcgcgtgaaggaca

SEQ ID NO: 106600 - DNA, 15 bp, Homo sapiens
actcgcgtgaaggac

SEQ ID NO: 106601 - DNA, 15 bp, Homo sapiens
cactcgcgtgaagga

SEQ ID NO: 106602 - DNA, 15 bp, Homo sapiens
acactcgcgtgaagg

SEQ ID NO: 106603 - DNA, 15 bp, Homo sapiens
tacactcgcgtgaag

SEQ ID NO: 106604 - DNA, 15 bp, Homo sapiens
ctacactcgcgtgaa

SEQ ID NO: 106605 - DNA, 15 bp, Homo sapiens
tctacactcgcgtga

SEQ ID NO: 106606 - DNA, 15 bp, Homo sapiens
gtctacactcgcgtg

SEQ ID NO: 106607 - DNA, 15 bp, Homo sapiens
ggtctacactcgcgt

SEQ ID NO: 106608 - DNA, 15 bp, Homo sapiens
tggtctacactcgcg

SEQ ID NO: 106609 - DNA, 15 bp, Homo sapiens
ttggtctacactcgc

SEQ ID NO: 106610 - DNA, 15 bp, Homo sapiens
tttggtctacactcg

SEQ ID NO: 106611 - DNA, 15 bp, Homo sapiens
gtttggtctacactc

SEQ ID NO: 106612 - DNA, 15 bp, Homo sapiens
cgtttggtctacact

SEQ ID NO: 106613 - DNA, 15 bp, Homo sapiens
acgtttggtctacac

SEQ ID NO: 106614 - DNA, 15 bp, Homo sapiens
tacgtttggtctaca

SEQ ID NO: 106615 - DNA, 15 bp, Homo sapiens
ttacgtttggtctac

SEQ ID NO: 106616 - DNA, 15 bp, Homo sapiens
gttacgtttggtcta

SEQ ID NO: 106617 - DNA, 15 bp, Homo sapiens
ggttacgtttggtct

SEQ ID NO: 106618 - DNA, 15 bp, Homo sapiens
aggttacgtttggtc

SEQ ID NO: 106619 - DNA, 15 bp, Homo sapiens
taggttacgtttggt

SEQ ID NO: 106620 - DNA, 15 bp, Homo sapiens
ataggttacgtttgg

SEQ ID NO: 106621 - DNA, 15 bp, Homo sapiens
cataggttacgtttg

SEQ ID NO: 106622 - DNA, 15 bp, Homo sapiens
tcataggttacgttt

SEQ ID NO: 106623 - DNA, 15 bp, Homo sapiens
ctcataggttacgtt

SEQ ID NO: 106624 - DNA, 15 bp, Homo sapiens
actcataggttacgt

SEQ ID NO: 106625 - DNA, 15 bp, Homo sapiens
aactcataggttacg

SEQ ID NO: 106626 - DNA, 15 bp, Homo sapiens
aaactcataggttac

SEQ ID NO: 106627 - DNA, 15 bp, Homo sapiens
gaaactcataggtta

SEQ ID NO: 106628 - DNA, 15 bp, Homo sapiens
agaaactcataggtt

SEQ ID NO: 106629 - DNA, 15 bp, Homo sapiens
aagaaactcataggt

SEQ ID NO: 106630 - DNA, 15 bp, Homo sapiens
aaagaaactcatagg

SEQ ID NO: 106631 - DNA, 15 bp, Homo sapiens
aaaagaaactcatag

SEQ ID NO: 106632 - DNA, 15 bp, Homo sapiens
taaaagaaactcata

SEQ ID NO: 106633 - DNA, 15 bp, Homo sapiens
ataaaagaaactcat

SEQ ID NO: 106634 - DNA, 15 bp, Homo sapiens
aataaaagaaactca

SEQ ID NO: 106635 - DNA, 15 bp, Homo sapiens
gaataaaagaaactc

SEQ ID NO: 106636 - DNA, 15 bp, Homo sapiens
ggaataaaagaaact

SEQ ID NO: 106637 - DNA, 15 bp, Homo sapiens
tggaataaaagaaac

SEQ ID NO: 106638 - DNA, 15 bp, Homo sapiens
gtggaataaaagaaa

SEQ ID NO: 106639 - DNA, 15 bp, Homo sapiens
agtggaataaaagaa

SEQ ID NO: 106640 - DNA, 15 bp, Homo sapiens
aagtggaataaaaga

SEQ ID NO: 106641 - DNA, 15 bp, Homo sapiens
taagtggaataaaag

SEQ ID NO: 106642 - DNA, 15 bp, Homo sapiens
ataagtggaataaaa

SEQ ID NO: 106643 - DNA, 15 bp, Homo sapiens
aataagtggaataaa

SEQ ID NO: 106644 - DNA, 15 bp, Homo sapiens
taataagtggaataa

SEQ ID NO: 106645 - DNA, 15 bp, Homo sapiens
ttaataagtggaata

SEQ ID NO: 106646 - DNA, 15 bp, Homo sapiens
tttaataagtggaat

SEQ ID NO: 106647 - DNA, 15 bp, Homo sapiens
ctttaataagtggaa

SEQ ID NO: 106648 - DNA, 15 bp, Homo sapiens
gctttaataagtgga

SEQ ID NO: 106649 - DNA, 15 bp, Homo sapiens
tgctttaataagtgg

SEQ ID NO: 106650 - DNA, 15 bp, Homo sapiens
ctgctttaataagtg

SEQ ID NO: 106651 - DNA, 15 bp, Homo sapiens
gctgctttaataagt

SEQ ID NO: 106652 - DNA, 15 bp, Homo sapiens
tgctgctttaataag

SEQ ID NO: 106653 - DNA, 15 bp, Homo sapiens
ttgctgctttaataa

SEQ ID NO: 106654 - DNA, 15 bp, Homo sapiens
gttgctgctttaata

SEQ ID NO: 106655 - DNA, 15 bp, Homo sapiens
ggttgctgctttaat

SEQ ID NO: 106656 - DNA, 15 bp, Homo sapiens
tggttgctgctttaa

SEQ ID NO: 106657 - DNA, 15 bp, Homo sapiens
ttggttgctgcttta

SEQ ID NO: 106658 - DNA, 15 bp, Homo sapiens
tttggttgctgcttt

SEQ ID NO: 106659 - DNA, 15 bp, Homo sapiens
ctttggttgctgctt

SEQ ID NO: 106660 - DNA, 15 bp, Homo sapiens
cctttggttgctgct

SEQ ID NO: 106661 - DNA, 15 bp, Homo sapiens
acctttggttgctgc

SEQ ID NO: 106662 - DNA, 15 bp, Homo sapiens
tacctttggttgctg

SEQ ID NO: 106663 - DNA, 15 bp, Homo sapiens
atacctttggttgct

SEQ ID NO: 106664 - DNA, 15 bp, Homo sapiens
aatacctttggttgc

SEQ ID NO: 106665 - DNA, 15 bp, Homo sapiens
taatacctttggttg

SEQ ID NO: 106666 - DNA, 15 bp, Homo sapiens
ataatacctttggtt

SEQ ID NO: 106667 - DNA, 15 bp, Homo sapiens
tataatacctttggt

SEQ ID NO: 106668 - DNA, 15 bp, Homo sapiens
atataatacctttgg

SEQ ID NO: 106669 - DNA, 15 bp, Homo sapiens
tatataatacctttg

SEQ ID NO: 106670 - DNA, 15 bp, Homo sapiens
gtatataataccttt

SEQ ID NO: 106671 - DNA, 15 bp, Homo sapiens
ggtatataatacctt

SEQ ID NO: 106672 - DNA, 15 bp, Homo sapiens
aggtatataatacct

SEQ ID NO: 106673 - DNA, 15 bp, Homo sapiens
aaggtatataatacc

SEQ ID NO: 106674 - DNA, 15 bp, Homo sapiens
gaaggtatataatac

SEQ ID NO: 106675 - DNA, 15 bp, Homo sapiens
agaaggtatataata

SEQ ID NO: 106676 - DNA, 15 bp, Homo sapiens
cagaaggtatataat

SEQ ID NO: 106677 - DNA, 15 bp, Homo sapiens
acagaaggtatataa

SEQ ID NO: 106678 - DNA, 15 bp, Homo sapiens
tacagaaggtatata

SEQ ID NO: 106679 - DNA, 15 bp, Homo sapiens
atacagaaggtatat

SEQ ID NO: 106680 - DNA, 15 bp, Homo sapiens
aatacagaaggtata

SEQ ID NO: 106681 - DNA, 15 bp, Homo sapiens
gaatacagaaggtat

SEQ ID NO: 106682 - DNA, 15 bp, Homo sapiens
tgaatacagaaggta

SEQ ID NO: 106683 - DNA, 15 bp, Homo sapiens
gtgaatacagaaggt

SEQ ID NO: 106684 - DNA, 15 bp, Homo sapiens
agtgaatacagaagg

SEQ ID NO: 106685 - DNA, 15 bp, Homo sapiens
aagtgaatacagaag

SEQ ID NO: 106686 - DNA, 15 bp, Homo sapiens
taagtgaatacagaa

SEQ ID NO: 106687 - DNA, 15 bp, Homo sapiens
ttaagtgaatacaga

SEQ ID NO: 106688 - DNA, 15 bp, Homo sapiens
tttaagtgaatacag

SEQ ID NO: 106689 - DNA, 15 bp, Homo sapiens
ttttaagtgaataca

SEQ ID NO: 106690 - DNA, 15 bp, Homo sapiens
attttaagtgaatac

SEQ ID NO: 106691 - DNA, 15 bp, Homo sapiens
cattttaagtgaata

SEQ ID NO: 106692 - DNA, 15 bp, Homo sapiens
tcattttaagtgaat

SEQ ID NO: 106693 - DNA, 15 bp, Homo sapiens
gtcattttaagtgaa

SEQ ID NO: 106694 - DNA, 15 bp, Homo sapiens
agtcattttaagtga

SEQ ID NO: 106695 - DNA, 15 bp, Homo sapiens
cagtcattttaagtg

SEQ ID NO: 106696 - DNA, 15 bp, Homo sapiens
tcagtcattttaagt

SEQ ID NO: 106697 - DNA, 15 bp, Homo sapiens
atcagtcattttaag

SEQ ID NO: 106698 - DNA, 15 bp, Homo sapiens
aatcagtcattttaa

SEQ ID NO: 106699 - DNA, 15 bp, Homo sapiens
aaatcagtcatttta

SEQ ID NO: 106700 - DNA, 15 bp, Homo sapiens
aaaatcagtcatttt

SEQ ID NO: 106701 - DNA, 15 bp, Homo sapiens
caaaatcagtcattt

SEQ ID NO: 106702 - DNA, 15 bp, Homo sapiens
tcaaaatcagtcatt

SEQ ID NO: 106703 - DNA, 15 bp, Homo sapiens
ttcaaaatcagtcat

SEQ ID NO: 106704 - DNA, 15 bp, Homo sapiens
tttcaaaatcagtca

SEQ ID NO: 106705 - DNA, 15 bp, Homo sapiens
ttttcaaaatcagtc

SEQ ID NO: 106706 - DNA, 15 bp, Homo sapiens
tttttcaaaatcagt

SEQ ID NO: 106707 - DNA, 15 bp, Homo sapiens
ctttttcaaaatcag

SEQ ID NO: 106708 - DNA, 15 bp, Homo sapiens
actttttcaaaatca

SEQ ID NO: 106709 - DNA, 15 bp, Homo sapiens
gactttttcaaaatc

SEQ ID NO: 106710 - DNA, 15 bp, Homo sapiens
tgactttttcaaaat

SEQ ID NO: 106711 - DNA, 15 bp, Homo sapiens
atgactttttcaaaa

SEQ ID NO: 106712 - DNA, 15 bp, Homo sapiens
catgactttttcaaa

SEQ ID NO: 106713 - DNA, 15 bp, Homo sapiens
gcatgactttttcaa

SEQ ID NO: 106714 - DNA, 15 bp, Homo sapiens
tgcatgactttttca

SEQ ID NO: 106715 - DNA, 15 bp, Homo sapiens
ttgcatgactttttc

SEQ ID NO: 106716 - DNA, 15 bp, Homo sapiens
tttgcatgacttttt

SEQ ID NO: 106717 - DNA, 15 bp, Homo sapiens
gtttgcatgactttt

SEQ ID NO: 106718 - DNA, 15 bp, Homo sapiens
tgtttgcatgacttt

SEQ ID NO: 106719 - DNA, 15 bp, Homo sapiens
atgtttgcatgactt

SEQ ID NO: 106720 - DNA, 15 bp, Homo sapiens
gatgtttgcatgact

SEQ ID NO: 106721 - DNA, 15 bp, Homo sapiens
ggatgtttgcatgac

SEQ ID NO: 106722 - DNA, 15 bp, Homo sapiens
tggatgtttgcatga

SEQ ID NO: 106723 - DNA, 15 bp, Homo sapiens
atggatgtttgcatg

SEQ ID NO: 106724 - DNA, 15 bp, Homo sapiens
aatggatgtttgcat

SEQ ID NO: 106725 - DNA, 15 bp, Homo sapiens
aaatggatgtttgca

SEQ ID NO: 106726 - DNA, 15 bp, Homo sapiens
taaatggatgtttgc

SEQ ID NO: 106727 - DNA, 15 bp, Homo sapiens
gtaaatggatgtttg

SEQ ID NO: 106728 - DNA, 15 bp, Homo sapiens
tgtaaatggatgttt

SEQ ID NO: 106729 - DNA, 15 bp, Homo sapiens
ctgtaaatggatgtt

SEQ ID NO: 106730 - DNA, 15 bp, Homo sapiens
tctgtaaatggatgt

SEQ ID NO: 106731 - DNA, 15 bp, Homo sapiens
atctgtaaatggatg

SEQ ID NO: 106732 - DNA, 15 bp, Homo sapiens
tatctgtaaatggat

SEQ ID NO: 106733 - DNA, 15 bp, Homo sapiens
ttatctgtaaatgga

SEQ ID NO: 106734 - DNA, 15 bp, Homo sapiens
cttatctgtaaatgg

SEQ ID NO: 106735 - DNA, 15 bp, Homo sapiens
gcttatctgtaaatg

SEQ ID NO: 106736 - DNA, 15 bp, Homo sapiens
ggcttatctgtaaat

SEQ ID NO: 106737 - DNA, 15 bp, Homo sapiens
aggcttatctgtaaa

SEQ ID NO: 106738 - DNA, 15 bp, Homo sapiens
gaggcttatctgtaa

SEQ ID NO: 106739 - DNA, 15 bp, Homo sapiens
tgaggcttatctgta

SEQ ID NO: 106740 - DNA, 15 bp, Homo sapiens
atgaggcttatctgt

SEQ ID NO: 106741 - DNA, 15 bp, Homo sapiens
aatgaggcttatctg

SEQ ID NO: 106742 - DNA, 15 bp, Homo sapiens
taatgaggcttatct

SEQ ID NO: 106743 - DNA, 15 bp, Homo sapiens
ttaatgaggcttatc

SEQ ID NO: 106744 - DNA, 15 bp, Homo sapiens
gttaatgaggcttat

SEQ ID NO: 106745 - DNA, 15 bp, Homo sapiens
agttaatgaggctta

SEQ ID NO: 106746 - DNA, 15 bp, Homo sapiens
gagttaatgaggctt

SEQ ID NO: 106747 - DNA, 15 bp, Homo sapiens
tgagttaatgaggct

SEQ ID NO: 106748 - DNA, 15 bp, Homo sapiens
ttgagttaatgaggc

SEQ ID NO: 106749 - DNA, 15 bp, Homo sapiens
tttgagttaatgagg

SEQ ID NO: 106750 - DNA, 15 bp, Homo sapiens
ctttgagttaatgag

SEQ ID NO: 106751 - DNA, 15 bp, Homo sapiens
cctttgagttaatga

SEQ ID NO: 106752 - DNA, 15 bp, Homo sapiens
gcctttgagttaatg

SEQ ID NO: 106753 - DNA, 15 bp, Homo sapiens
tgcctttgagttaat

SEQ ID NO: 106754 - DNA, 15 bp, Homo sapiens
ctgcctttgagttaa

SEQ ID NO: 106755 - DNA, 15 bp, Homo sapiens
actgcctttgagtta

SEQ ID NO: 106756 - DNA, 15 bp, Homo sapiens
cactgcctttgagtt

SEQ ID NO: 106757 - DNA, 15 bp, Homo sapiens
ccactgcctttgagt

SEQ ID NO: 106758 - DNA, 15 bp, Homo sapiens
gccactgcctttgag

SEQ ID NO: 106759 - DNA, 15 bp, Homo sapiens
ggccactgcctttga

SEQ ID NO: 106760 - DNA, 15 bp, Homo sapiens
gggccactgcctttg

SEQ ID NO: 106761 - DNA, 15 bp, Homo sapiens
agggccactgccttt

SEQ ID NO: 106762 - DNA, 15 bp, Homo sapiens
cagggccactgcctt

SEQ ID NO: 106763 - DNA, 15 bp, Homo sapiens
acagggccactgcct

SEQ ID NO: 106764 - DNA, 15 bp, Homo sapiens
aacagggccactgcc

SEQ ID NO: 106765 - DNA, 15 bp, Homo sapiens
caacagggccactgc

SEQ ID NO: 106766 - DNA, 15 bp, Homo sapiens
ccaacagggccactg

SEQ ID NO: 106767 - DNA, 15 bp, Homo sapiens
cccaacagggccact

SEQ ID NO: 106768 - DNA, 15 bp, Homo sapiens
gcccaacagggccac

SEQ ID NO: 106769 - DNA, 15 bp, Homo sapiens
agcccaacagggcca

SEQ ID NO: 106770 - DNA, 15 bp, Homo sapiens
gagcccaacagggcc

SEQ ID NO: 106771 - DNA, 15 bp, Homo sapiens
agagcccaacagggc

SEQ ID NO: 106772 - DNA, 15 bp, Homo sapiens
cagagcccaacaggg

SEQ ID NO: 106773 - DNA, 15 bp, Homo sapiens
tcagagcccaacagg

SEQ ID NO: 106774 - DNA, 15 bp, Homo sapiens
atcagagcccaacag

SEQ ID NO: 106775 - DNA, 15 bp, Homo sapiens
catcagagcccaaca

SEQ ID NO: 106776 - DNA, 15 bp, Homo sapiens
tcatcagagcccaac

SEQ ID NO: 106777 - DNA, 15 bp, Homo sapiens
atcatcagagcccaa

SEQ ID NO: 106778 - DNA, 15 bp, Homo sapiens
aatcatcagagccca

SEQ ID NO: 106779 - DNA, 15 bp, Homo sapiens
taatcatcagagccc

SEQ ID NO: 106780 - DNA, 15 bp, Homo sapiens
gtaatcatcagagcc

SEQ ID NO: 106781 - DNA, 15 bp, Homo sapiens
agtaatcatcagagc

SEQ ID NO: 106782 - DNA, 15 bp, Homo sapiens
gagtaatcatcagag

SEQ ID NO: 106783 - DNA, 15 bp, Homo sapiens
tgagtaatcatcaga

SEQ ID NO: 106784 - DNA, 15 bp, Homo sapiens
ttgagtaatcatcag

SEQ ID NO: 106785 - DNA, 15 bp, Homo sapiens
tttgagtaatcatca

SEQ ID NO: 106786 - DNA, 15 bp, Homo sapiens
gtttgagtaatcatc

SEQ ID NO: 106787 - DNA, 15 bp, Homo sapiens
ggtttgagtaatcat

SEQ ID NO: 106788 - DNA, 15 bp, Homo sapiens
tggtttgagtaatca

SEQ ID NO: 106789 - DNA, 15 bp, Homo sapiens
atggtttgagtaatc

SEQ ID NO: 106790 - DNA, 15 bp, Homo sapiens
aatggtttgagtaat

SEQ ID NO: 106791 - DNA, 15 bp, Homo sapiens
aaatggtttgagtaa

SEQ ID NO: 106792 - DNA, 15 bp, Homo sapiens
gaaatggtttgagta

SEQ ID NO: 106793 - DNA, 15 bp, Homo sapiens
agaaatggtttgagt

SEQ ID NO: 106794 - DNA, 15 bp, Homo sapiens
cagaaatggtttgag

SEQ ID NO: 106795 - DNA, 15 bp, Homo sapiens
tcagaaatggtttga

SEQ ID NO: 106796 - DNA, 15 bp, Homo sapiens
gtcagaaatggtttg

SEQ ID NO: 106797 - DNA, 15 bp, Homo sapiens
tgtcagaaatggttt

SEQ ID NO: 106798 - DNA, 15 bp, Homo sapiens
gtgtcagaaatggtt

SEQ ID NO: 106799 - DNA, 15 bp, Homo sapiens
agtgtcagaaatggt

SEQ ID NO: 106800 - DNA, 15 bp, Homo sapiens
gagtgtcagaaatgg

SEQ ID NO: 106801 - DNA, 15 bp, Homo sapiens
agagtgtcagaaatg

SEQ ID NO: 106802 - DNA, 15 bp, Homo sapiens
cagagtgtcagaaat

SEQ ID NO: 106803 - DNA, 15 bp, Homo sapiens
tcagagtgtcagaaa

SEQ ID NO: 106804 - DNA, 15 bp, Homo sapiens
gtcagagtgtcagaa

SEQ ID NO: 106805 - DNA, 15 bp, Homo sapiens
tgtcagagtgtcaga

SEQ ID NO: 106806 - DNA, 15 bp, Homo sapiens
gtgtcagagtgtcag

SEQ ID NO: 106807 - DNA, 15 bp, Homo sapiens
agtgtcagagtgtca

SEQ ID NO: 106808 - DNA, 15 bp, Homo sapiens
tagtgtcagagtgtc

SEQ ID NO: 106809 - DNA, 15 bp, Homo sapiens
gtagtgtcagagtgt

SEQ ID NO: 106810 - DNA, 15 bp, Homo sapiens
tgtagtgtcagagtg

SEQ ID NO: 106811 - DNA, 15 bp, Homo sapiens
atgtagtgtcagagt

SEQ ID NO: 106812 - DNA, 15 bp, Homo sapiens
gatgtagtgtcagag

SEQ ID NO: 106813 - DNA, 15 bp, Homo sapiens
ggatgtagtgtcaga

SEQ ID NO: 106814 - DNA, 15 bp, Homo sapiens
cggatgtagtgtcag

SEQ ID NO: 106815 - DNA, 15 bp, Homo sapiens
ccggatgtagtgtca

SEQ ID NO: 106816 - DNA, 15 bp, Homo sapiens
tccggatgtagtgtc

SEQ ID NO: 106817 - DNA, 15 bp, Homo sapiens
ttccggatgtagtgt

SEQ ID NO: 106818 - DNA, 15 bp, Homo sapiens
tttccggatgtagtg

SEQ ID NO: 106819 - DNA, 15 bp, Homo sapiens
atttccggatgtagt

SEQ ID NO: 106820 - DNA, 15 bp, Homo sapiens
gatttccggatgtag

SEQ ID NO: 106821 - DNA, 15 bp, Homo sapiens
tgatttccggatgta

SEQ ID NO: 106822 - DNA, 15 bp, Homo sapiens
atgatttccggatgt

SEQ ID NO: 106823 - DNA, 15 bp, Homo sapiens
gatgatttccggatg

SEQ ID NO: 106824 - DNA, 15 bp, Homo sapiens
ggatgatttccggat

SEQ ID NO: 106825 - DNA, 15 bp, Homo sapiens
cggatgatttccgga

SEQ ID NO: 106826 - DNA, 15 bp, Homo sapiens
ccggatgatttccgg

SEQ ID NO: 106827 - DNA, 15 bp, Homo sapiens
tccggatgatttccg

SEQ ID NO: 106828 - DNA, 15 bp, Homo sapiens
ttccggatgatttcc

SEQ ID NO: 106829 - DNA, 15 bp, Homo sapiens
tttccggatgatttc

SEQ ID NO: 106830 - DNA, 15 bp, Homo sapiens
atttccggatgattt

SEQ ID NO: 106831 - DNA, 15 bp, Homo sapiens
catttccggatgatt

SEQ ID NO: 106832 - DNA, 15 bp, Homo sapiens
gcatttccggatgat

SEQ ID NO: 106833 - DNA, 15 bp, Homo sapiens
tgcatttccggatga

SEQ ID NO: 106834 - DNA, 15 bp, Homo sapiens
atgcatttccggatg

SEQ ID NO: 106835 - DNA, 15 bp, Homo sapiens
aatgcatttccggat

SEQ ID NO: 106836 - DNA, 15 bp, Homo sapiens
gaatgcatttccgga

SEQ ID NO: 106837 - DNA, 15 bp, Homo sapiens
tgaatgcatttccgg

SEQ ID NO: 106838 - DNA, 15 bp, Homo sapiens
ctgaatgcatttccg

SEQ ID NO: 106839 - DNA, 15 bp, Homo sapiens
tctgaatgcatttcc

SEQ ID NO: 106840 - DNA, 15 bp, Homo sapiens
ctctgaatgcatttc

SEQ ID NO: 106841 - DNA, 15 bp, Homo sapiens
gctctgaatgcattt

SEQ ID NO: 106842 - DNA, 15 bp, Homo sapiens
ggctctgaatgcatt

SEQ ID NO: 106843 - DNA, 15 bp, Homo sapiens
aggctctgaatgcat

SEQ ID NO: 106844 - DNA, 15 bp, Homo sapiens
caggctctgaatgca

SEQ ID NO: 106845 - DNA, 15 bp, Homo sapiens
gcaggctctgaatgc

SEQ ID NO: 106846 - DNA, 15 bp, Homo sapiens
tgcaggctctgaatg

SEQ ID NO: 106847 - DNA, 15 bp, Homo sapiens
ttgcaggctctgaat

SEQ ID NO: 106848 - DNA, 15 bp, Homo sapiens
tttgcaggctctgaa

SEQ ID NO: 106849 - DNA, 15 bp, Homo sapiens
ttttgcaggctctga

SEQ ID NO: 106850 - DNA, 15 bp, Homo sapiens
cttttgcaggctctg

SEQ ID NO: 106851 - DNA, 15 bp, Homo sapiens
gcttttgcaggctct

SEQ ID NO: 106852 - DNA, 15 bp, Homo sapiens
agcttttgcaggctc

SEQ ID NO: 106853 - DNA, 15 bp, Homo sapiens
aagcttttgcaggct

SEQ ID NO: 106854 - DNA, 15 bp, Homo sapiens
aaagcttttgcaggc

SEQ ID NO: 106855 - DNA, 15 bp, Homo sapiens
aaaagcttttgcagg

SEQ ID NO: 106856 - DNA, 15 bp, Homo sapiens
aaaaagcttttgcag

SEQ ID NO: 106857 - DNA, 15 bp, Homo sapiens
aaaaaagcttttgca

SEQ ID NO: 106858 - DNA, 15 bp, Homo sapiens
aaaaaaagcttttgc

SEQ ID NO: 106859 - DNA, 15 bp, Homo sapiens
aaaaaaaagcttttg

SEQ ID NO: 106860 - DNA, 15 bp, Homo sapiens
aaaaaaaaagctttt

SEQ ID NO: 106861 - DNA, 15 bp, Homo sapiens
aaaaaaaaaagcttt

SEQ ID NO: 106862 - DNA, 15 bp, Homo sapiens
aaaaaaaaaaagctt

SEQ ID NO: 106863 - DNA, 15 bp, Homo sapiens
aaaaaaaaaaaagct

SEQ ID NO: 106864 - DNA, 15 bp, Homo sapiens
aaaaaaaaaaaaagc

SEQ ID NO: 106865 - DNA, 15 bp, Homo sapiens
aaaaaaaaaaaaaag

SEQ ID NO: 106866 - DNA, 15 bp, Homo sapiens
aaaaaaaaaaaaaaa

SEQ ID NO: 106867 - DNA, 15 bp, Homo sapiens
caaaaaaaaaaaaaa

SEQ ID NO: 106868 - DNA, 15 bp, Homo sapiens
tcaaaaaaaaaaaaa

SEQ ID NO: 106869 - DNA, 15 bp, Homo sapiens
ttcaaaaaaaaaaaa

SEQ ID NO: 106870 - DNA, 15 bp, Homo sapiens
attcaaaaaaaaaaa

SEQ ID NO: 106871 - DNA, 15 bp, Homo sapiens
tattcaaaaaaaaaa

SEQ ID NO: 106872 - DNA, 15 bp, Homo sapiens
ctattcaaaaaaaaa

SEQ ID NO: 106873 - DNA, 15 bp, Homo sapiens
gctattcaaaaaaaa

SEQ ID NO: 106874 - DNA, 15 bp, Homo sapiens
agctattcaaaaaaa

SEQ ID NO: 106875 - DNA, 15 bp, Homo sapiens
tagctattcaaaaaa

SEQ ID NO: 106876 - DNA, 15 bp, Homo sapiens
gtagctattcaaaaa

SEQ ID NO: 106877 - DNA, 15 bp, Homo sapiens
tgtagctattcaaaa

SEQ ID NO: 106878 - DNA, 15 bp, Homo sapiens
ctgtagctattcaaa

SEQ ID NO: 106879 - DNA, 15 bp, Homo sapiens
gctgtagctattcaa

SEQ ID NO: 106880 - DNA, 15 bp, Homo sapiens
tgctgtagctattca

SEQ ID NO: 106881 - DNA, 15 bp, Homo sapiens
gtgctgtagctattc

SEQ ID NO: 106882 - DNA, 15 bp, Homo sapiens
agtgctgtagctatt

SEQ ID NO: 106883 - DNA, 15 bp, Homo sapiens
aagtgctgtagctat

SEQ ID NO: 106884 - DNA, 15 bp, Homo sapiens
caagtgctgtagcta

SEQ ID NO: 106885 - DNA, 15 bp, Homo sapiens
gcaagtgctgtagct

SEQ ID NO: 106886 - DNA, 15 bp, Homo sapiens
tgcaagtgctgtagc

SEQ ID NO: 106887 - DNA, 15 bp, Homo sapiens
ctgcaagtgctgtag

SEQ ID NO: 106888 - DNA, 15 bp, Homo sapiens
tctgcaagtgctgta

SEQ ID NO: 106889 - DNA, 15 bp, Homo sapiens
atctgcaagtgctgt

SEQ ID NO: 106890 - DNA, 15 bp, Homo sapiens
gatctgcaagtgctg

SEQ ID NO: 106891 - DNA, 15 bp, Homo sapiens
agatctgcaagtgct

SEQ ID NO: 106892 - DNA, 15 bp, Homo sapiens
aagatctgcaagtgc

SEQ ID NO: 106893 - DNA, 15 bp, Homo sapiens
gaagatctgcaagtg

SEQ ID NO: 106894 - DNA, 15 bp, Homo sapiens
ggaagatctgcaagt

SEQ ID NO: 106895 - DNA, 15 bp, Homo sapiens
aggaagatctgcaag

SEQ ID NO: 106896 - DNA, 15 bp, Homo sapiens
gaggaagatctgcaa

SEQ ID NO: 106897 - DNA, 15 bp, Homo sapiens
ggaggaagatctgca

SEQ ID NO: 106898 - DNA, 15 bp, Homo sapiens
aggaggaagatctgc

SEQ ID NO: 106899 - DNA, 15 bp, Homo sapiens
aaggaggaagatctg

SEQ ID NO: 106900 - DNA, 15 bp, Homo sapiens
aaaggaggaagatct

SEQ ID NO: 106901 - DNA, 15 bp, Homo sapiens
caaaggaggaagatc

SEQ ID NO: 106902 - DNA, 15 bp, Homo sapiens
tcaaaggaggaagat

SEQ ID NO: 106903 - DNA, 15 bp, Homo sapiens
ctcaaaggaggaaga

SEQ ID NO: 106904 - DNA, 15 bp, Homo sapiens
tctcaaaggaggaag

SEQ ID NO: 106905 - DNA, 15 bp, Homo sapiens
ctctcaaaggaggaa

SEQ ID NO: 106906 - DNA, 15 bp, Homo sapiens
tctctcaaaggagga

SEQ ID NO: 106907 - DNA, 15 bp, Homo sapiens
ttctctcaaaggagg

SEQ ID NO: 106908 - DNA, 15 bp, Homo sapiens
attctctcaaaggag

SEQ ID NO: 106909 - DNA, 15 bp, Homo sapiens
tattctctcaaagga

SEQ ID NO: 106910 - DNA, 15 bp, Homo sapiens
atattctctcaaagg

SEQ ID NO: 106911 - DNA, 15 bp, Homo sapiens
aatattctctcaaag

SEQ ID NO: 106912 - DNA, 15 bp, Homo sapiens
aaatattctctcaaa

SEQ ID NO: 106913 - DNA, 15 bp, Homo sapiens
caaatattctctcaa

SEQ ID NO: 106914 - DNA, 15 bp, Homo sapiens
tcaaatattctctca

SEQ ID NO: 106915 - DNA, 15 bp, Homo sapiens
atcaaatattctctc

SEQ ID NO: 106916 - DNA, 15 bp, Homo sapiens
aatcaaatattctct

SEQ ID NO: 106917 - DNA, 15 bp, Homo sapiens
aaatcaaatattctc

SEQ ID NO: 106918 - DNA, 15 bp, Homo sapiens
aaaatcaaatattct

SEQ ID NO: 106919 - DNA, 15 bp, Homo sapiens
taaaatcaaatattc

SEQ ID NO: 106920 - DNA, 15 bp, Homo sapiens
ctaaaatcaaatatt

SEQ ID NO: 106921 - DNA, 15 bp, Homo sapiens
cctaaaatcaaatat

SEQ ID NO: 106922 - DNA, 15 bp, Homo sapiens
tcctaaaatcaaata

SEQ ID NO: 106923 - DNA, 15 bp, Homo sapiens
ttcctaaaatcaaat

SEQ ID NO: 106924 - DNA, 15 bp, Homo sapiens
tttcctaaaatcaaa

SEQ ID NO: 106925 - DNA, 15 bp, Homo sapiens
atttcctaaaatcaa

SEQ ID NO: 106926 - DNA, 15 bp, Homo sapiens
tatttcctaaaatca

SEQ ID NO: 106927 - DNA, 15 bp, Homo sapiens
ttatttcctaaaatc

SEQ ID NO: 106928 - DNA, 15 bp, Homo sapiens
cttatttcctaaaat

SEQ ID NO: 106929 - DNA, 15 bp, Homo sapiens
gcttatttcctaaaa

SEQ ID NO: 106930 - DNA, 15 bp, Homo sapiens
tgcttatttcctaaa

SEQ ID NO: 106931 - DNA, 15 bp, Homo sapiens
ttgcttatttcctaa

SEQ ID NO: 106932 - DNA, 15 bp, Homo sapiens
tttgcttatttccta

SEQ ID NO: 106933 - DNA, 15 bp, Homo sapiens
atttgcttatttcct

SEQ ID NO: 106934 - DNA, 15 bp, Homo sapiens
catttgcttatttcc

SEQ ID NO: 106935 - DNA, 15 bp, Homo sapiens
acatttgcttatttc

SEQ ID NO: 106936 - DNA, 15 bp, Homo sapiens
tacatttgcttattt

SEQ ID NO: 106937 - DNA, 15 bp, Homo sapiens
ctacatttgcttatt

SEQ ID NO: 106938 - DNA, 15 bp, Homo sapiens
tctacatttgcttat

SEQ ID NO: 106939 - DNA, 15 bp, Homo sapiens
atctacatttgctta

SEQ ID NO: 106940 - DNA, 15 bp, Homo sapiens
tatctacatttgctt

SEQ ID NO: 106941 - DNA, 15 bp, Homo sapiens
ttatctacatttgct

SEQ ID NO: 106942 - DNA, 15 bp, Homo sapiens
cttatctacatttgc

SEQ ID NO: 106943 - DNA, 15 bp, Homo sapiens
acttatctacatttg

SEQ ID NO: 106944 - DNA, 15 bp, Homo sapiens
tacttatctacattt

SEQ ID NO: 106945 - DNA, 15 bp, Homo sapiens
atacttatctacatt

SEQ ID NO: 106946 - DNA, 15 bp, Homo sapiens
catacttatctacat

SEQ ID NO: 106947 - DNA, 15 bp, Homo sapiens
tcatacttatctaca

SEQ ID NO: 106948 - DNA, 15 bp, Homo sapiens
atcatacttatctac

SEQ ID NO: 106949 - DNA, 15 bp, Homo sapiens
aatcatacttatcta

SEQ ID NO: 106950 - DNA, 15 bp, Homo sapiens
gaatcatacttatct

SEQ ID NO: 106951 - DNA, 15 bp, Homo sapiens
tgaatcatacttatc

SEQ ID NO: 106952 - DNA, 15 bp, Homo sapiens
ttgaatcatacttat

SEQ ID NO: 106953 - DNA, 15 bp, Homo sapiens
gttgaatcatactta

SEQ ID NO: 106954 - DNA, 15 bp, Homo sapiens
agttgaatcatactt

SEQ ID NO: 106955 - DNA, 15 bp, Homo sapiens
cagttgaatcatact

SEQ ID NO: 106956 - DNA, 15 bp, Homo sapiens
ccagttgaatcatac

SEQ ID NO: 106957 - DNA, 15 bp, Homo sapiens
cccagttgaatcata

SEQ ID NO: 106958 - DNA, 15 bp, Homo sapiens
gcccagttgaatcat

SEQ ID NO: 106959 - DNA, 15 bp, Homo sapiens
tgcccagttgaatca

SEQ ID NO: 106960 - DNA, 15 bp, Homo sapiens
ttgcccagttgaatc

SEQ ID NO: 106961 - DNA, 15 bp, Homo sapiens
attgcccagttgaat

SEQ ID NO: 106962 - DNA, 15 bp, Homo sapiens
tattgcccagttgaa

SEQ ID NO: 106963 - DNA, 15 bp, Homo sapiens
ttattgcccagttga

SEQ ID NO: 106964 - DNA, 15 bp, Homo sapiens
gttattgcccagttg

SEQ ID NO: 106965 - DNA, 15 bp, Homo sapiens
agttattgcccagtt

SEQ ID NO: 106966 - DNA, 15 bp, Homo sapiens
aagttattgcccagt

SEQ ID NO: 106967 - DNA, 15 bp, Homo sapiens
aaagttattgcccag

SEQ ID NO: 106968 - DNA, 15 bp, Homo sapiens
aaaagttattgccca

SEQ ID NO: 106969 - DNA, 15 bp, Homo sapiens
taaaagttattgccc

SEQ ID NO: 106970 - DNA, 15 bp, Homo sapiens
ctaaaagttattgcc

SEQ ID NO: 106971 - DNA, 15 bp, Homo sapiens
cctaaaagttattgc

SEQ ID NO: 106972 - DNA, 15 bp, Homo sapiens
gcctaaaagttattg

SEQ ID NO: 106973 - DNA, 15 bp, Homo sapiens
tgcctaaaagttatt

SEQ ID NO: 106974 - DNA, 15 bp, Homo sapiens
ttgcctaaaagttat

SEQ ID NO: 106975 - DNA, 15 bp, Homo sapiens
tttgcctaaaagtta

SEQ ID NO: 106976 - DNA, 15 bp, Homo sapiens
ctttgcctaaaagtt

SEQ ID NO: 106977 - DNA, 15 bp, Homo sapiens
tctttgcctaaaagt

SEQ ID NO: 106978 - DNA, 15 bp, Homo sapiens
ctctttgcctaaaag

SEQ ID NO: 106979 - DNA, 15 bp, Homo sapiens
tctctttgcctaaaa

SEQ ID NO: 106980 - DNA, 15 bp, Homo sapiens
ttctctttgcctaaa

SEQ ID NO: 106981 - DNA, 15 bp, Homo sapiens
tttctctttgcctaa

SEQ ID NO: 106982 - DNA, 15 bp, Homo sapiens
ttttctctttgccta

SEQ ID NO: 106983 - DNA, 15 bp, Homo sapiens
tttttctctttgcct

SEQ ID NO: 106984 - DNA, 15 bp, Homo sapiens
ttttttctctttgcc

SEQ ID NO: 106985 - DNA, 15 bp, Homo sapiens
tttttttctctttgc

SEQ ID NO: 106986 - DNA, 15 bp, Homo sapiens
gtttttttctctttg

SEQ ID NO: 106987 - DNA, 15 bp, Homo sapiens
tgtttttttctcttt

SEQ ID NO: 106988 - DNA, 15 bp, Homo sapiens
ttgtttttttctctt

SEQ ID NO: 106989 - DNA, 15 bp, Homo sapiens
tttgtttttttctct

SEQ ID NO: 106990 - DNA, 15 bp, Homo sapiens
ttttgtttttttctc

SEQ ID NO: 106991 - DNA, 15 bp, Homo sapiens
attttgtttttttct

SEQ ID NO: 106992 - DNA, 15 bp, Homo sapiens
tattttgtttttttc

SEQ ID NO: 106993 - DNA, 15 bp, Homo sapiens
atattttgttttttt

SEQ ID NO: 106994 - DNA, 15 bp, Homo sapiens
tatattttgtttttt

SEQ ID NO: 106995 - DNA, 15 bp, Homo sapiens
ctatattttgttttt

SEQ ID NO: 106996 - DNA, 15 bp, Homo sapiens
gctatattttgtttt

SEQ ID NO: 106997 - DNA, 15 bp, Homo sapiens
tgctatattttgttt

SEQ ID NO: 106998 - DNA, 15 bp, Homo sapiens
ttgctatattttgtt

SEQ ID NO: 106999 - DNA, 15 bp, Homo sapiens
attgctatattttgt

SEQ ID NO: 107000 - DNA, 15 bp, Homo sapiens
cattgctatattttg

SEQ ID NO: 107001 - DNA, 15 bp, Homo sapiens
acattgctatatttt

SEQ ID NO: 107002 - DNA, 15 bp, Homo sapiens
tacattgctatattt

SEQ ID NO: 107003 - DNA, 15 bp, Homo sapiens
ctacattgctatatt

SEQ ID NO: 107004 - DNA, 15 bp, Homo sapiens
actacattgctatat

SEQ ID NO: 107005 - DNA, 15 bp, Homo sapiens
tactacattgctata

SEQ ID NO: 107006 - DNA, 15 bp, Homo sapiens
ttactacattgctat

SEQ ID NO: 107007 - DNA, 15 bp, Homo sapiens
attactacattgcta

SEQ ID NO: 107008 - DNA, 15 bp, Homo sapiens
tattactacattgct

SEQ ID NO: 107009 - DNA, 15 bp, Homo sapiens
ttattactacattgc

SEQ ID NO: 107010 - DNA, 15 bp, Homo sapiens
cttattactacattg

SEQ ID NO: 107011 - DNA, 15 bp, Homo sapiens
ccttattactacatt

SEQ ID NO: 107012 - DNA, 15 bp, Homo sapiens
gccttattactacat

SEQ ID NO: 107013 - DNA, 15 bp, Homo sapiens
agccttattactaca

SEQ ID NO: 107014 - DNA, 15 bp, Homo sapiens
cagccttattactac

SEQ ID NO: 107015 - DNA, 15 bp, Homo sapiens
tcagccttattacta

SEQ ID NO: 107016 - DNA, 15 bp, Homo sapiens
atcagccttattact

SEQ ID NO: 107017 - DNA, 15 bp, Homo sapiens
tatcagccttattac

SEQ ID NO: 107018 - DNA, 15 bp, Homo sapiens
atatcagccttatta

SEQ ID NO: 107019 - DNA, 15 bp, Homo sapiens
aatatcagccttatt

SEQ ID NO: 107020 - DNA, 15 bp, Homo sapiens
taatatcagccttat

SEQ ID NO: 107021 - DNA, 15 bp, Homo sapiens
ataatatcagcctta

SEQ ID NO: 107022 - DNA, 15 bp, Homo sapiens
tataatatcagcctt

SEQ ID NO: 107023 - DNA, 15 bp, Homo sapiens
ctataatatcagcct

SEQ ID NO: 107024 - DNA, 15 bp, Homo sapiens
actataatatcagcc

SEQ ID NO: 107025 - DNA, 15 bp, Homo sapiens
cactataatatcagc

SEQ ID NO: 107026 - DNA, 15 bp, Homo sapiens
gcactataatatcag

SEQ ID NO: 107027 - DNA, 15 bp, Homo sapiens
agcactataatatca

SEQ ID NO: 107028 - DNA, 15 bp, Homo sapiens
aagcactataatatc

SEQ ID NO: 107029 - DNA, 15 bp, Homo sapiens
aaagcactataatat

SEQ ID NO: 107030 - DNA, 15 bp, Homo sapiens
aaaagcactataata

SEQ ID NO: 107031 - DNA, 15 bp, Homo sapiens
taaaagcactataat

SEQ ID NO: 107032 - DNA, 15 bp, Homo sapiens
ataaaagcactataa

SEQ ID NO: 107033 - DNA, 15 bp, Homo sapiens
cataaaagcactata

SEQ ID NO: 107034 - DNA, 15 bp, Homo sapiens
tcataaaagcactat

SEQ ID NO: 107035 - DNA, 15 bp, Homo sapiens
atcataaaagcacta

SEQ ID NO: 107036 - DNA, 15 bp, Homo sapiens
catcataaaagcact

SEQ ID NO: 107037 - DNA, 15 bp, Homo sapiens
tcatcataaaagcac

SEQ ID NO: 107038 - DNA, 15 bp, Homo sapiens
ctcatcataaaagca

SEQ ID NO: 107039 - DNA, 15 bp, Homo sapiens
actcatcataaaagc

SEQ ID NO: 107040 - DNA, 15 bp, Homo sapiens
gactcatcataaaag

SEQ ID NO: 107041 - DNA, 15 bp, Homo sapiens
agactcatcataaaa

SEQ ID NO: 107042 - DNA, 15 bp, Homo sapiens
cagactcatcataaa

SEQ ID NO: 107043 - DNA, 15 bp, Homo sapiens
tcagactcatcataa

SEQ ID NO: 107044 - DNA, 15 bp, Homo sapiens
ttcagactcatcata

SEQ ID NO: 107045 - DNA, 15 bp, Homo sapiens
tttcagactcatcat

SEQ ID NO: 107046 - DNA, 15 bp, Homo sapiens
ttttcagactcatca

SEQ ID NO: 107047 - DNA, 15 bp, Homo sapiens
gttttcagactcatc

SEQ ID NO: 107048 - DNA, 15 bp, Homo sapiens
tgttttcagactcat

SEQ ID NO: 107049 - DNA, 15 bp, Homo sapiens
ctgttttcagactca

SEQ ID NO: 107050 - DNA, 15 bp, Homo sapiens
actgttttcagactc

SEQ ID NO: 107051 - DNA, 15 bp, Homo sapiens
gactgttttcagact

SEQ ID NO: 107052 - DNA, 15 bp, Homo sapiens
agactgttttcagac

SEQ ID NO: 107053 - DNA, 15 bp, Homo sapiens
gagactgttttcaga

SEQ ID NO: 107054 - DNA, 15 bp, Homo sapiens
ggagactgttttcag

SEQ ID NO: 107055 - DNA, 15 bp, Homo sapiens
tggagactgttttca

SEQ ID NO: 107056 - DNA, 15 bp, Homo sapiens
ttggagactgttttc

SEQ ID NO: 107057 - DNA, 15 bp, Homo sapiens
gttggagactgtttt

SEQ ID NO: 107058 - DNA, 15 bp, Homo sapiens
tgttggagactgttt

SEQ ID NO: 107059 - DNA, 15 bp, Homo sapiens
atgttggagactgtt

SEQ ID NO: 107060 - DNA, 15 bp, Homo sapiens
aatgttggagactgt

SEQ ID NO: 107061 - DNA, 15 bp, Homo sapiens
aaatgttggagactg

SEQ ID NO: 107062 - DNA, 15 bp, Homo sapiens
caaatgttggagact

SEQ ID NO: 107063 - DNA, 15 bp, Homo sapiens
acaaatgttggagac

SEQ ID NO: 107064 - DNA, 15 bp, Homo sapiens
tacaaatgttggaga

SEQ ID NO: 107065 - DNA, 15 bp, Homo sapiens
ttacaaatgttggag

SEQ ID NO: 107066 - DNA, 15 bp, Homo sapiens
tttacaaatgttgga

SEQ ID NO: 107067 - DNA, 15 bp, Homo sapiens
atttacaaatgttgg

SEQ ID NO: 107068 - DNA, 15 bp, Homo sapiens
catttacaaatgttg

SEQ ID NO: 107069 - DNA, 15 bp, Homo sapiens
acatttacaaatgtt

SEQ ID NO: 107070 - DNA, 15 bp, Homo sapiens
aacatttacaaatgt

SEQ ID NO: 107071 - DNA, 15 bp, Homo sapiens
aaacatttacaaatg

SEQ ID NO: 107072 - DNA, 15 bp, Homo sapiens
aaaacatttacaaat

SEQ ID NO: 107073 - DNA, 15 bp, Homo sapiens
taaaacatttacaaa

SEQ ID NO: 107074 - DNA, 15 bp, Homo sapiens
ttaaaacatttacaa

SEQ ID NO: 107075 - DNA, 15 bp, Homo sapiens
tttaaaacatttaca

SEQ ID NO: 107076 - DNA, 15 bp, Homo sapiens
atttaaaacatttac

SEQ ID NO: 107077 - DNA, 15 bp, Homo sapiens
gatttaaaacattta

SEQ ID NO: 107078 - DNA, 15 bp, Homo sapiens
cgatttaaaacattt

SEQ ID NO: 107079 - DNA, 15 bp, Homo sapiens
ccgatttaaaacatt

SEQ ID NO: 107080 - DNA, 15 bp, Homo sapiens
cccgatttaaaacat

SEQ ID NO: 107081 - DNA, 15 bp, Homo sapiens
acccgatttaaaaca

SEQ ID NO: 107082 - DNA, 15 bp, Homo sapiens
gacccgatttaaaac

SEQ ID NO: 107083 - DNA, 15 bp, Homo sapiens
agacccgatttaaaa

SEQ ID NO: 107084 - DNA, 15 bp, Homo sapiens
cagacccgatttaaa

SEQ ID NO: 107085 - DNA, 15 bp, Homo sapiens
acagacccgatttaa

SEQ ID NO: 107086 - DNA, 15 bp, Homo sapiens
gacagacccgattta

SEQ ID NO: 107087 - DNA, 15 bp, Homo sapiens
agacagacccgattt

SEQ ID NO: 107088 - DNA, 15 bp, Homo sapiens
tagacagacccgatt

SEQ ID NO: 107089 - DNA, 15 bp, Homo sapiens
gtagacagacccgat

SEQ ID NO: 107090 - DNA, 15 bp, Homo sapiens
agtagacagacccga

SEQ ID NO: 107091 - DNA, 15 bp, Homo sapiens
tagtagacagacccg

SEQ ID NO: 107092 - DNA, 15 bp, Homo sapiens
gtagtagacagaccc

SEQ ID NO: 107093 - DNA, 15 bp, Homo sapiens
tgtagtagacagacc

SEQ ID NO: 107094 - DNA, 15 bp, Homo sapiens
ctgtagtagacagac

SEQ ID NO: 107095 - DNA, 15 bp, Homo sapiens
actgtagtagacaga

SEQ ID NO: 107096 - DNA, 15 bp, Homo sapiens
tactgtagtagacag

SEQ ID NO: 107097 - DNA, 15 bp, Homo sapiens
ctactgtagtagaca

SEQ ID NO: 107098 - DNA, 15 bp, Homo sapiens
gctactgtagtagac

SEQ ID NO: 107099 - DNA, 15 bp, Homo sapiens
ggctactgtagtaga

SEQ ID NO: 107100 - DNA, 15 bp, Homo sapiens
gggctactgtagtag

SEQ ID NO: 107101 - DNA, 15 bp, Homo sapiens
agggctactgtagta

SEQ ID NO: 107102 - DNA, 15 bp, Homo sapiens
aagggctactgtagt

SEQ ID NO: 107103 - DNA, 15 bp, Homo sapiens
taagggctactgtag

SEQ ID NO: 107104 - DNA, 15 bp, Homo sapiens
ttaagggctactgta

SEQ ID NO: 107105 - DNA, 15 bp, Homo sapiens
cttaagggctactgt

SEQ ID NO: 107106 - DNA, 15 bp, Homo sapiens
gcttaagggctactg

SEQ ID NO: 107107 - DNA, 15 bp, Homo sapiens
ggcttaagggctact

SEQ ID NO: 107108 - DNA, 15 bp, Homo sapiens
tggcttaagggctac

SEQ ID NO: 107109 - DNA, 15 bp, Homo sapiens
atggcttaagggcta

SEQ ID NO: 107110 - DNA, 15 bp, Homo sapiens
tatggcttaagggct

SEQ ID NO: 107111 - DNA, 15 bp, Homo sapiens
atatggcttaagggc

SEQ ID NO: 107112 - DNA, 15 bp, Homo sapiens
catatggcttaaggg

SEQ ID NO: 107113 - DNA, 15 bp, Homo sapiens
acatatggcttaagg

SEQ ID NO: 107114 - DNA, 15 bp, Homo sapiens
tacatatggcttaag

SEQ ID NO: 107115 - DNA, 15 bp, Homo sapiens
ctacatatggcttaa

SEQ ID NO: 107116 - DNA, 15 bp, Homo sapiens
gctacatatggctta

SEQ ID NO: 107117 - DNA, 15 bp, Homo sapiens
agctacatatggctt

SEQ ID NO: 107118 - DNA, 15 bp, Homo sapiens
tagctacatatggct

SEQ ID NO: 107119 - DNA, 15 bp, Homo sapiens
atagctacatatggc

SEQ ID NO: 107120 - DNA, 15 bp, Homo sapiens
aatagctacatatgg

SEQ ID NO: 107121 - DNA, 15 bp, Homo sapiens
caatagctacatatg

SEQ ID NO: 107122 - DNA, 15 bp, Homo sapiens
tcaatagctacatat

SEQ ID NO: 107123 - DNA, 15 bp, Homo sapiens
ctcaatagctacata

SEQ ID NO: 107124 - DNA, 15 bp, Homo sapiens
gctcaatagctacat

SEQ ID NO: 107125 - DNA, 15 bp, Homo sapiens
tgctcaatagctaca

SEQ ID NO: 107126 - DNA, 15 bp, Homo sapiens
gtgctcaatagctac

SEQ ID NO: 107127 - DNA, 15 bp, Homo sapiens
agtgctcaatagcta

SEQ ID NO: 107128 - DNA, 15 bp, Homo sapiens
aagtgctcaatagct

SEQ ID NO: 107129 - DNA, 15 bp, Homo sapiens
caagtgctcaatagc

SEQ ID NO: 107130 - DNA, 15 bp, Homo sapiens
tcaagtgctcaatag

SEQ ID NO: 107131 - DNA, 15 bp, Homo sapiens
gtcaagtgctcaata

SEQ ID NO: 107132 - DNA, 15 bp, Homo sapiens
tgtcaagtgctcaat

SEQ ID NO: 107133 - DNA, 15 bp, Homo sapiens
atgtcaagtgctcaa

SEQ ID NO: 107134 - DNA, 15 bp, Homo sapiens
catgtcaagtgctca

SEQ ID NO: 107135 - DNA, 15 bp, Homo sapiens
acatgtcaagtgctc

SEQ ID NO: 107136 - DNA, 15 bp, Homo sapiens
aacatgtcaagtgct

SEQ ID NO: 107137 - DNA, 15 bp, Homo sapiens
caacatgtcaagtgc

SEQ ID NO: 107138 - DNA, 15 bp, Homo sapiens
gcaacatgtcaagtg

SEQ ID NO: 107139 - DNA, 15 bp, Homo sapiens
tgcaacatgtcaagt

SEQ ID NO: 107140 - DNA, 15 bp, Homo sapiens
ttgcaacatgtcaag

SEQ ID NO: 107141 - DNA, 15 bp, Homo sapiens
cttgcaacatgtcaa

SEQ ID NO: 107142 - DNA, 15 bp, Homo sapiens
tcttgcaacatgtca

SEQ ID NO: 107143 - DNA, 15 bp, Homo sapiens
ctcttgcaacatgtc

SEQ ID NO: 107144 - DNA, 15 bp, Homo sapiens
actcttgcaacatgt

SEQ ID NO: 107145 - DNA, 15 bp, Homo sapiens
cactcttgcaacatg

SEQ ID NO: 107146 - DNA, 15 bp, Homo sapiens
tcactcttgcaacat

SEQ ID NO: 107147 - DNA, 15 bp, Homo sapiens
ttcactcttgcaaca

SEQ ID NO: 107148 - DNA, 15 bp, Homo sapiens
attcactcttgcaac

SEQ ID NO: 107149 - DNA, 15 bp, Homo sapiens
aattcactcttgcaa

SEQ ID NO: 107150 - DNA, 15 bp, Homo sapiens
caattcactcttgca

SEQ ID NO: 107151 - DNA, 15 bp, Homo sapiens
ccaattcactcttgc

SEQ ID NO: 107152 - DNA, 15 bp, Homo sapiens
tccaattcactcttg

SEQ ID NO: 107153 - DNA, 15 bp, Homo sapiens
ctccaattcactctt

SEQ ID NO: 107154 - DNA, 15 bp, Homo sapiens
tctccaattcactct

SEQ ID NO: 107155 - DNA, 15 bp, Homo sapiens
gtctccaattcactc

SEQ ID NO: 107156 - DNA, 15 bp, Homo sapiens
agtctccaattcact

SEQ ID NO: 107157 - DNA, 15 bp, Homo sapiens
cagtctccaattcac

SEQ ID NO: 107158 - DNA, 15 bp, Homo sapiens
tcagtctccaattca

SEQ ID NO: 107159 - DNA, 15 bp, Homo sapiens
atcagtctccaattc

SEQ ID NO: 107160 - DNA, 15 bp, Homo sapiens
aatcagtctccaatt

SEQ ID NO: 107161 - DNA, 15 bp, Homo sapiens
aaatcagtctccaat

SEQ ID NO: 107162 - DNA, 15 bp, Homo sapiens
aaaatcagtctccaa

SEQ ID NO: 107163 - DNA, 15 bp, Homo sapiens
taaaatcagtctcca

SEQ ID NO: 107164 - DNA, 15 bp, Homo sapiens
ttaaaatcagtctcc

SEQ ID NO: 107165 - DNA, 15 bp, Homo sapiens
attaaaatcagtctc

SEQ ID NO: 107166 - DNA, 15 bp, Homo sapiens
aattaaaatcagtct

SEQ ID NO: 107167 - DNA, 15 bp, Homo sapiens
aaattaaaatcagtc

SEQ ID NO: 107168 - DNA, 15 bp, Homo sapiens
aaaattaaaatcagt

SEQ ID NO: 107169 - DNA, 15 bp, Homo sapiens
taaaattaaaatcag

SEQ ID NO: 107170 - DNA, 15 bp, Homo sapiens
ataaaattaaaatca

SEQ ID NO: 107171 - DNA, 15 bp, Homo sapiens
aataaaattaaaatc

SEQ ID NO: 107172 - DNA, 15 bp, Homo sapiens
aaataaaattaaaat

SEQ ID NO: 107173 - DNA, 15 bp, Homo sapiens
taaataaaattaaaa

SEQ ID NO: 107174 - DNA, 15 bp, Homo sapiens
ttaaataaaattaaa

SEQ ID NO: 107175 - DNA, 15 bp, Homo sapiens
attaaataaaattaa

SEQ ID NO: 107176 - DNA, 15 bp, Homo sapiens
aattaaataaaatta

SEQ ID NO: 107177 - DNA, 15 bp, Homo sapiens
aaattaaataaaatt

SEQ ID NO: 107178 - DNA, 15 bp, Homo sapiens
aaaattaaataaaat

SEQ ID NO: 107179 - DNA, 15 bp, Homo sapiens
taaaattaaataaaa

SEQ ID NO: 107180 - DNA, 15 bp, Homo sapiens
ttaaaattaaataaa

SEQ ID NO: 107181 - DNA, 15 bp, Homo sapiens
attaaaattaaataa

SEQ ID NO: 107182 - DNA, 15 bp, Homo sapiens
cattaaaattaaata

SEQ ID NO: 107183 - DNA, 15 bp, Homo sapiens
acattaaaattaaat

SEQ ID NO: 107184 - DNA, 15 bp, Homo sapiens
tacattaaaattaaa

SEQ ID NO: 107185 - DNA, 15 bp, Homo sapiens
ttacattaaaattaa

SEQ ID NO: 107186 - DNA, 15 bp, Homo sapiens
cttacattaaaatta

SEQ ID NO: 107187 - DNA, 15 bp, Homo sapiens
acttacattaaaatt

SEQ ID NO: 107188 - DNA, 15 bp, Homo sapiens
tacttacattaaaat

SEQ ID NO: 107189 - DNA, 15 bp, Homo sapiens
ctacttacattaaaa

SEQ ID NO: 107190 - DNA, 15 bp, Homo sapiens
actacttacattaaa

SEQ ID NO: 107191 - DNA, 15 bp, Homo sapiens
gactacttacattaa

SEQ ID NO: 107192 - DNA, 15 bp, Homo sapiens
cgactacttacatta

SEQ ID NO: 107193 - DNA, 15 bp, Homo sapiens
gcgactacttacatt

SEQ ID NO: 107194 - DNA, 15 bp, Homo sapiens
tgcgactacttacat

SEQ ID NO: 107195 - DNA, 15 bp, Homo sapiens
gtgcgactacttaca

SEQ ID NO: 107196 - DNA, 15 bp, Homo sapiens
tgtgcgactacttac

SEQ ID NO: 107197 - DNA, 15 bp, Homo sapiens
atgtgcgactactta

SEQ ID NO: 107198 - DNA, 15 bp, Homo sapiens
catgtgcgactactt

SEQ ID NO: 107199 - DNA, 15 bp, Homo sapiens
tcatgtgcgactact

SEQ ID NO: 107200 - DNA, 15 bp, Homo sapiens
gtcatgtgcgactac

SEQ ID NO: 107201 - DNA, 15 bp, Homo sapiens
ggtcatgtgcgacta

SEQ ID NO: 107202 - DNA, 15 bp, Homo sapiens
gggtcatgtgcgact

SEQ ID NO: 107203 - DNA, 15 bp, Homo sapiens
cgggtcatgtgcgac

SEQ ID NO: 107204 - DNA, 15 bp, Homo sapiens
acgggtcatgtgcga

SEQ ID NO: 107205 - DNA, 15 bp, Homo sapiens
cacgggtcatgtgcg

SEQ ID NO: 107206 - DNA, 15 bp, Homo sapiens
ccacgggtcatgtgc

SEQ ID NO: 107207 - DNA, 15 bp, Homo sapiens
gccacgggtcatgtg

SEQ ID NO: 107208 - DNA, 15 bp, Homo sapiens
agccacgggtcatgt

SEQ ID NO: 107209 - DNA, 15 bp, Homo sapiens
tagccacgggtcatg

SEQ ID NO: 107210 - DNA, 15 bp, Homo sapiens
gtagccacgggtcat

SEQ ID NO: 107211 - DNA, 15 bp, Homo sapiens
agtagccacgggtca

SEQ ID NO: 107212 - DNA, 15 bp, Homo sapiens
tagtagccacgggtc

SEQ ID NO: 107213 - DNA, 15 bp, Homo sapiens
atagtagccacgggt

SEQ ID NO: 107214 - DNA, 15 bp, Homo sapiens
catagtagccacggg

SEQ ID NO: 107215 - DNA, 15 bp, Homo sapiens
ccatagtagccacgg

SEQ ID NO: 107216 - DNA, 15 bp, Homo sapiens
accatagtagccacg

SEQ ID NO: 107217 - DNA, 15 bp, Homo sapiens
taccatagtagccac

SEQ ID NO: 107218 - DNA, 15 bp, Homo sapiens
ctaccatagtagcca

SEQ ID NO: 107219 - DNA, 15 bp, Homo sapiens
tctaccatagtagcc

SEQ ID NO: 107220 - DNA, 15 bp, Homo sapiens
atctaccatagtagc

SEQ ID NO: 107221 - DNA, 15 bp, Homo sapiens
catctaccatagtag

SEQ ID NO: 107222 - DNA, 15 bp, Homo sapiens
ccatctaccatagta

SEQ ID NO: 107223 - DNA, 15 bp, Homo sapiens
gccatctaccatagt

SEQ ID NO: 107224 - DNA, 15 bp, Homo sapiens
tgccatctaccatag

SEQ ID NO: 107225 - DNA, 15 bp, Homo sapiens
atgccatctaccata

SEQ ID NO: 107226 - DNA, 15 bp, Homo sapiens
tatgccatctaccat

SEQ ID NO: 107227 - DNA, 15 bp, Homo sapiens
ctatgccatctacca

SEQ ID NO: 107228 - DNA, 15 bp, Homo sapiens
actatgccatctacc

SEQ ID NO: 107229 - DNA, 15 bp, Homo sapiens
aactatgccatctac

SEQ ID NO: 107230 - DNA, 15 bp, Homo sapiens
aaactatgccatcta

SEQ ID NO: 107231 - DNA, 15 bp, Homo sapiens
aaaactatgccatct

SEQ ID NO: 107232 - DNA, 15 bp, Homo sapiens
taaaactatgccatc

SEQ ID NO: 107233 - DNA, 15 bp, Homo sapiens
ctaaaactatgccat

SEQ ID NO: 107234 - DNA, 15 bp, Homo sapiens
tctaaaactatgcca

SEQ ID NO: 107235 - DNA, 15 bp, Homo sapiens
gtctaaaactatgcc

SEQ ID NO: 107236 - DNA, 15 bp, Homo sapiens
tgtctaaaactatgc

SEQ ID NO: 107237 - DNA, 15 bp, Homo sapiens
ttgtctaaaactatg

SEQ ID NO: 107238 - DNA, 15 bp, Homo sapiens
cttgtctaaaactat

SEQ ID NO: 107239 - DNA, 15 bp, Homo sapiens
ccttgtctaaaacta

SEQ ID NO: 107240 - DNA, 15 bp, Homo sapiens
cccttgtctaaaact

SEQ ID NO: 107241 - DNA, 15 bp, Homo sapiens
gcccttgtctaaaac

SEQ ID NO: 107242 - DNA, 15 bp, Homo sapiens
tgcccttgtctaaaa

SEQ ID NO: 107243 - DNA, 15 bp, Homo sapiens
ctgcccttgtctaaa

SEQ ID NO: 107244 - DNA, 15 bp, Homo sapiens
actgcccttgtctaa

SEQ ID NO: 107245 - DNA, 15 bp, Homo sapiens
tactgcccttgtcta

SEQ ID NO: 107246 - DNA, 15 bp, Homo sapiens
ctactgcccttgtct

SEQ ID NO: 107247 - DNA, 15 bp, Homo sapiens
actactgcccttgtc

SEQ ID NO: 107248 - DNA, 15 bp, Homo sapiens
gactactgcccttgt

SEQ ID NO: 107249 - DNA, 15 bp, Homo sapiens
agactactgcccttg

SEQ ID NO: 107250 - DNA, 15 bp, Homo sapiens
aagactactgccctt

SEQ ID NO: 107251 - DNA, 15 bp, Homo sapiens
caagactactgccct

SEQ ID NO: 107252 - DNA, 15 bp, Homo sapiens
ccaagactactgccc

SEQ ID NO: 107253 - DNA, 15 bp, Homo sapiens
cccaagactactgcc

SEQ ID NO: 107254 - DNA, 15 bp, Homo sapiens
acccaagactactgc

SEQ ID NO: 107255 - DNA, 15 bp, Homo sapiens
tacccaagactactg

SEQ ID NO: 107256 - DNA, 15 bp, Homo sapiens
ctacccaagactact

SEQ ID NO: 107257 - DNA, 15 bp, Homo sapiens
tctacccaagactac

SEQ ID NO: 107258 - DNA, 15 bp, Homo sapiens
atctacccaagacta

SEQ ID NO: 107259 - DNA, 15 bp, Homo sapiens
tatctacccaagact

SEQ ID NO: 107260 - DNA, 15 bp, Homo sapiens
gtatctacccaagac

SEQ ID NO: 107261 - DNA, 15 bp, Homo sapiens
agtatctacccaaga

SEQ ID NO: 107262 - DNA, 15 bp, Homo sapiens
aagtatctacccaag

SEQ ID NO: 107263 - DNA, 15 bp, Homo sapiens
caagtatctacccaa

SEQ ID NO: 107264 - DNA, 15 bp, Homo sapiens
tcaagtatctaccca

SEQ ID NO: 107265 - DNA, 15 bp, Homo sapiens
atcaagtatctaccc

SEQ ID NO: 107266 - DNA, 15 bp, Homo sapiens
aatcaagtatctacc

SEQ ID NO: 107267 - DNA, 15 bp, Homo sapiens
aaatcaagtatctac

SEQ ID NO: 107268 - DNA, 15 bp, Homo sapiens
taaatcaagtatcta

SEQ ID NO: 107269 - DNA, 15 bp, Homo sapiens
gtaaatcaagtatct

SEQ ID NO: 107270 - DNA, 15 bp, Homo sapiens
agtaaatcaagtatc

SEQ ID NO: 107271 - DNA, 15 bp, Homo sapiens
aagtaaatcaagtat

SEQ ID NO: 107272 - DNA, 15 bp, Homo sapiens
taagtaaatcaagta

SEQ ID NO: 107273 - DNA, 15 bp, Homo sapiens
ctaagtaaatcaagt

SEQ ID NO: 107274 - DNA, 15 bp, Homo sapiens
tctaagtaaatcaag

SEQ ID NO: 107275 - DNA, 15 bp, Homo sapiens
ttctaagtaaatcaa

SEQ ID NO: 107276 - DNA, 15 bp, Homo sapiens
gttctaagtaaatca

SEQ ID NO: 107277 - DNA, 15 bp, Homo sapiens
tgttctaagtaaatc

SEQ ID NO: 107278 - DNA, 15 bp, Homo sapiens
atgttctaagtaaat

SEQ ID NO: 107279 - DNA, 15 bp, Homo sapiens
aatgttctaagtaaa

SEQ ID NO: 107280 - DNA, 15 bp, Homo sapiens
aaatgttctaagtaa

SEQ ID NO: 107281 - DNA, 15 bp, Homo sapiens
gaaatgttctaagta

SEQ ID NO: 107282 - DNA, 15 bp, Homo sapiens
agaaatgttctaagt

SEQ ID NO: 107283 - DNA, 15 bp, Homo sapiens
aagaaatgttctaag

SEQ ID NO: 107284 - DNA, 15 bp, Homo sapiens
aaagaaatgttctaa

SEQ ID NO: 107285 - DNA, 15 bp, Homo sapiens
taaagaaatgttcta

SEQ ID NO: 107286 - DNA, 15 bp, Homo sapiens
gtaaagaaatgttct

SEQ ID NO: 107287 - DNA, 15 bp, Homo sapiens
ggtaaagaaatgttc

SEQ ID NO: 107288 - DNA, 15 bp, Homo sapiens
aggtaaagaaatgtt

SEQ ID NO: 107289 - DNA, 15 bp, Homo sapiens
taggtaaagaaatgt

SEQ ID NO: 107290 - DNA, 15 bp, Homo sapiens
ctaggtaaagaaatg

SEQ ID NO: 107291 - DNA, 15 bp, Homo sapiens
gctaggtaaagaaat

SEQ ID NO: 107292 - DNA, 15 bp, Homo sapiens
agctaggtaaagaaa

SEQ ID NO: 107293 - DNA, 15 bp, Homo sapiens
cagctaggtaaagaa

SEQ ID NO: 107294 - DNA, 15 bp, Homo sapiens
acagctaggtaaaga

SEQ ID NO: 107295 - DNA, 15 bp, Homo sapiens
tacagctaggtaaag

SEQ ID NO: 107296 - DNA, 15 bp, Homo sapiens
ttacagctaggtaaa

SEQ ID NO: 107297 - DNA, 15 bp, Homo sapiens
gttacagctaggtaa

SEQ ID NO: 107298 - DNA, 15 bp, Homo sapiens
tgttacagctaggta

SEQ ID NO: 107299 - DNA, 15 bp, Homo sapiens
ttgttacagctaggt

SEQ ID NO: 107300 - DNA, 15 bp, Homo sapiens
cttgttacagctagg

SEQ ID NO: 107301 - DNA, 15 bp, Homo sapiens
ccttgttacagctag

SEQ ID NO: 107302 - DNA, 15 bp, Homo sapiens
accttgttacagcta

SEQ ID NO: 107303 - DNA, 15 bp, Homo sapiens
aaccttgttacagct

SEQ ID NO: 107304 - DNA, 15 bp, Homo sapiens
gaaccttgttacagc

SEQ ID NO: 107305 - DNA, 15 bp, Homo sapiens
agaaccttgttacag

SEQ ID NO: 107306 - DNA, 15 bp, Homo sapiens
tagaaccttgttaca

SEQ ID NO: 107307 - DNA, 15 bp, Homo sapiens
ttagaaccttgttac

SEQ ID NO: 107308 - DNA, 15 bp, Homo sapiens
attagaaccttgtta

SEQ ID NO: 107309 - DNA, 15 bp, Homo sapiens
tattagaaccttgtt

SEQ ID NO: 107310 - DNA, 15 bp, Homo sapiens
ctattagaaccttgt

SEQ ID NO: 107311 - DNA, 15 bp, Homo sapiens
gctattagaaccttg

SEQ ID NO: 107312 - DNA, 15 bp, Homo sapiens
agctattagaacctt

SEQ ID NO: 107313 - DNA, 15 bp, Homo sapiens
cagctattagaacct

SEQ ID NO: 107314 - DNA, 15 bp, Homo sapiens
tcagctattagaacc

SEQ ID NO: 107315 - DNA, 15 bp, Homo sapiens
atcagctattagaac

SEQ ID NO: 107316 - DNA, 15 bp, Homo sapiens
aatcagctattagaa

SEQ ID NO: 107317 - DNA, 15 bp, Homo sapiens
taatcagctattaga

SEQ ID NO: 107318 - DNA, 15 bp, Homo sapiens
ttaatcagctattag

SEQ ID NO: 107319 - DNA, 15 bp, Homo sapiens
tttaatcagctatta

SEQ ID NO: 107320 - DNA, 15 bp, Homo sapiens
ctttaatcagctatt

SEQ ID NO: 107321 - DNA, 15 bp, Homo sapiens
cctttaatcagctat

SEQ ID NO: 107322 - DNA, 15 bp, Homo sapiens
tcctttaatcagcta

SEQ ID NO: 107323 - DNA, 15 bp, Homo sapiens
gtcctttaatcagct

SEQ ID NO: 107324 - DNA, 15 bp, Homo sapiens
tgtcctttaatcagc

SEQ ID NO: 107325 - DNA, 15 bp, Homo sapiens
ttgtcctttaatcag

SEQ ID NO: 107326 - DNA, 15 bp, Homo sapiens
gttgtcctttaatca

SEQ ID NO: 107327 - DNA, 15 bp, Homo sapiens
tgttgtcctttaatc

SEQ ID NO: 107328 - DNA, 15 bp, Homo sapiens
atgttgtcctttaat

SEQ ID NO: 107329 - DNA, 15 bp, Homo sapiens
aatgttgtcctttaa

SEQ ID NO: 107330 - DNA, 15 bp, Homo sapiens
aaatgttgtccttta

SEQ ID NO: 107331 - DNA, 15 bp, Homo sapiens
aaaatgttgtccttt

SEQ ID NO: 107332 - DNA, 15 bp, Homo sapiens
aaaaatgttgtcctt

SEQ ID NO: 107333 - DNA, 15 bp, Homo sapiens
taaaaatgttgtcct

SEQ ID NO: 107334 - DNA, 15 bp, Homo sapiens
ctaaaaatgttgtcc

SEQ ID NO: 107335 - DNA, 15 bp, Homo sapiens
gctaaaaatgttgtc

SEQ ID NO: 107336 - DNA, 15 bp, Homo sapiens
tgctaaaaatgttgt

SEQ ID NO: 107337 - DNA, 15 bp, Homo sapiens
atgctaaaaatgttg

SEQ ID NO: 107338 - DNA, 15 bp, Homo sapiens
catgctaaaaatgtt

SEQ ID NO: 107339 - DNA, 15 bp, Homo sapiens
acatgctaaaaatgt

SEQ ID NO: 107340 - DNA, 15 bp, Homo sapiens
tacatgctaaaaatg

SEQ ID NO: 107341 - DNA, 15 bp, Homo sapiens
ttacatgctaaaaat

SEQ ID NO: 107342 - DNA, 15 bp, Homo sapiens
attacatgctaaaaa

SEQ ID NO: 107343 - DNA, 15 bp, Homo sapiens
tattacatgctaaaa

SEQ ID NO: 107344 - DNA, 15 bp, Homo sapiens
atattacatgctaaa

SEQ ID NO: 107345 - DNA, 15 bp, Homo sapiens
tatattacatgctaa

SEQ ID NO: 107346 - DNA, 15 bp, Homo sapiens
gtatattacatgcta

SEQ ID NO: 107347 - DNA, 15 bp, Homo sapiens
tgtatattacatgct

SEQ ID NO: 107348 - DNA, 15 bp, Homo sapiens
ctgtatattacatgc

SEQ ID NO: 107349 - DNA, 15 bp, Homo sapiens
actgtatattacatg

SEQ ID NO: 107350 - DNA, 15 bp, Homo sapiens
tactgtatattacat

SEQ ID NO: 107351 - DNA, 15 bp, Homo sapiens
ttactgtatattaca

SEQ ID NO: 107352 - DNA, 15 bp, Homo sapiens
cttactgtatattac

SEQ ID NO: 107353 - DNA, 15 bp, Homo sapiens
ccttactgtatatta

SEQ ID NO: 107354 - DNA, 15 bp, Homo sapiens
tccttactgtatatt

SEQ ID NO: 107355 - DNA, 15 bp, Homo sapiens
ttccttactgtatat

SEQ ID NO: 107356 - DNA, 15 bp, Homo sapiens
gttccttactgtata

SEQ ID NO: 107357 - DNA, 15 bp, Homo sapiens
agttccttactgtat

SEQ ID NO: 107358 - DNA, 15 bp, Homo sapiens
tagttccttactgta

SEQ ID NO: 107359 - DNA, 15 bp, Homo sapiens
ttagttccttactgt

SEQ ID NO: 107360 - DNA, 15 bp, Homo sapiens
attagttccttactg

SEQ ID NO: 107361 - DNA, 15 bp, Homo sapiens
cattagttccttact

SEQ ID NO: 107362 - DNA, 15 bp, Homo sapiens
acattagttccttac

SEQ ID NO: 107363 - DNA, 15 bp, Homo sapiens
aacattagttcctta

SEQ ID NO: 107364 - DNA, 15 bp, Homo sapiens
taacattagttcctt

SEQ ID NO: 107365 - DNA, 15 bp, Homo sapiens
ttaacattagttcct

SEQ ID NO: 107366 - DNA, 15 bp, Homo sapiens
attaacattagttcc

SEQ ID NO: 107367 - DNA, 15 bp, Homo sapiens
aattaacattagttc

SEQ ID NO: 107368 - DNA, 15 bp, Homo sapiens
taattaacattagtt

SEQ ID NO: 107369 - DNA, 15 bp, Homo sapiens
gtaattaacattagt

SEQ ID NO: 107370 - DNA, 15 bp, Homo sapiens
agtaattaacattag

SEQ ID NO: 107371 - DNA, 15 bp, Homo sapiens
cagtaattaacatta

SEQ ID NO: 107372 - DNA, 15 bp, Homo sapiens
gcagtaattaacatt

SEQ ID NO: 107373 - DNA, 15 bp, Homo sapiens
ggcagtaattaacat

SEQ ID NO: 107374 - DNA, 15 bp, Homo sapiens
tggcagtaattaaca

SEQ ID NO: 107375 - DNA, 15 bp, Homo sapiens
ttggcagtaattaac

SEQ ID NO: 107376 - DNA, 15 bp, Homo sapiens
cttggcagtaattaa

SEQ ID NO: 107377 - DNA, 15 bp, Homo sapiens
tcttggcagtaatta

SEQ ID NO: 107378 - DNA, 15 bp, Homo sapiens
atcttggcagtaatt

SEQ ID NO: 107379 - DNA, 15 bp, Homo sapiens
catcttggcagtaat

SEQ ID NO: 107380 - DNA, 15 bp, Homo sapiens
acatcttggcagtaa

SEQ ID NO: 107381 - DNA, 15 bp, Homo sapiens
tacatcttggcagta

SEQ ID NO: 107382 - DNA, 15 bp, Homo sapiens
atacatcttggcagt

SEQ ID NO: 107383 - DNA, 15 bp, Homo sapiens
tatacatcttggcag

SEQ ID NO: 107384 - DNA, 15 bp, Homo sapiens
ttatacatcttggca

SEQ ID NO: 107385 - DNA, 15 bp, Homo sapiens
tttatacatcttggc

SEQ ID NO: 107386 - DNA, 15 bp, Homo sapiens
gtttatacatcttgg

SEQ ID NO: 107387 - DNA, 15 bp, Homo sapiens
tgtttatacatcttg

SEQ ID NO: 107388 - DNA, 15 bp, Homo sapiens
atgtttatacatctt

SEQ ID NO: 107389 - DNA, 15 bp, Homo sapiens
aatgtttatacatct

SEQ ID NO: 107390 - DNA, 15 bp, Homo sapiens
taatgtttatacatc

SEQ ID NO: 107391 - DNA, 15 bp, Homo sapiens
ataatgtttatacat

SEQ ID NO: 107392 - DNA, 15 bp, Homo sapiens
cataatgtttataca

SEQ ID NO: 107393 - DNA, 15 bp, Homo sapiens
tcataatgtttatac

SEQ ID NO: 107394 - DNA, 15 bp, Homo sapiens
ttcataatgtttata

SEQ ID NO: 107395 - DNA, 15 bp, Homo sapiens
tttcataatgtttat

SEQ ID NO: 107396 - DNA, 15 bp, Homo sapiens
gtttcataatgttta

SEQ ID NO: 107397 - DNA, 15 bp, Homo sapiens
ggtttcataatgttt

SEQ ID NO: 107398 - DNA, 15 bp, Homo sapiens
aggtttcataatgtt

SEQ ID NO: 107399 - DNA, 15 bp, Homo sapiens
aaggtttcataatgt

SEQ ID NO: 107400 - DNA, 15 bp, Homo sapiens
taaggtttcataatg

SEQ ID NO: 107401 - DNA, 15 bp, Homo sapiens
ttaaggtttcataat

SEQ ID NO: 107402 - DNA, 15 bp, Homo sapiens
tttaaggtttcataa

SEQ ID NO: 107403 - DNA, 15 bp, Homo sapiens
gtttaaggtttcata

SEQ ID NO: 107404 - DNA, 15 bp, Homo sapiens
tgtttaaggtttcat

SEQ ID NO: 107405 - DNA, 15 bp, Homo sapiens
ttgtttaaggtttca

SEQ ID NO: 107406 - DNA, 15 bp, Homo sapiens
cttgtttaaggtttc

SEQ ID NO: 107407 - DNA, 15 bp, Homo sapiens
ccttgtttaaggttt

SEQ ID NO: 107408 - DNA, 15 bp, Homo sapiens
tccttgtttaaggtt

SEQ ID NO: 107409 - DNA, 15 bp, Homo sapiens
atccttgtttaaggt

SEQ ID NO: 107410 - DNA, 15 bp, Homo sapiens
catccttgtttaagg

SEQ ID NO: 107411 - DNA, 15 bp, Homo sapiens
tcatccttgtttaag

SEQ ID NO: 107412 - DNA, 15 bp, Homo sapiens
ttcatccttgtttaa

SEQ ID NO: 107413 - DNA, 15 bp, Homo sapiens
gttcatccttgttta

SEQ ID NO: 107414 - DNA, 15 bp, Homo sapiens
tgttcatccttgttt

SEQ ID NO: 107415 - DNA, 15 bp, Homo sapiens
gtgttcatccttgtt

SEQ ID NO: 107416 - DNA, 15 bp, Homo sapiens
tgtgttcatccttgt

SEQ ID NO: 107417 - DNA, 15 bp, Homo sapiens
ctgtgttcatccttg

SEQ ID NO: 107418 - DNA, 15 bp, Homo sapiens
tctgtgttcatcctt

SEQ ID NO: 107419 - DNA, 15 bp, Homo sapiens
ttctgtgttcatcct

SEQ ID NO: 107420 - DNA, 15 bp, Homo sapiens
cttctgtgttcatcc

SEQ ID NO: 107421 - DNA, 15 bp, Homo sapiens
gcttctgtgttcatc

SEQ ID NO: 107422 - DNA, 15 bp, Homo sapiens
tgcttctgtgttcat

SEQ ID NO: 107423 - DNA, 15 bp, Homo sapiens
ctgcttctgtgttca

SEQ ID NO: 107424 - DNA, 15 bp, Homo sapiens
actgcttctgtgttc

SEQ ID NO: 107425 - DNA, 15 bp, Homo sapiens
cactgcttctgtgtt

SEQ ID NO: 107426 - DNA, 15 bp, Homo sapiens
ccactgcttctgtgt

SEQ ID NO: 107427 - DNA, 15 bp, Homo sapiens
gccactgcttctgtg

SEQ ID NO: 107428 - DNA, 15 bp, Homo sapiens
ggccactgcttctgt

SEQ ID NO: 107429 - DNA, 15 bp, Homo sapiens
gggccactgcttctg

SEQ ID NO: 107430 - DNA, 15 bp, Homo sapiens
agggccactgcttct

SEQ ID NO: 107431 - DNA, 15 bp, Homo sapiens
aagggccactgcttc

SEQ ID NO: 107432 - DNA, 15 bp, Homo sapiens
gaagggccactgctt

SEQ ID NO: 107433 - DNA, 15 bp, Homo sapiens
agaagggccactgct

SEQ ID NO: 107434 - DNA, 15 bp, Homo sapiens
aagaagggccactgc

SEQ ID NO: 107435 - DNA, 15 bp, Homo sapiens
aaagaagggccactg

SEQ ID NO: 107436 - DNA, 15 bp, Homo sapiens
caaagaagggccact

SEQ ID NO: 107437 - DNA, 15 bp, Homo sapiens
acaaagaagggccac

SEQ ID NO: 107438 - DNA, 15 bp, Homo sapiens
tacaaagaagggcca

SEQ ID NO: 107439 - DNA, 15 bp, Homo sapiens
ttacaaagaagggcc

SEQ ID NO: 107440 - DNA, 15 bp, Homo sapiens
tttacaaagaagggc

SEQ ID NO: 107441 - DNA, 15 bp, Homo sapiens
atttacaaagaaggg

SEQ ID NO: 107442 - DNA, 15 bp, Homo sapiens
tatttacaaagaagg

SEQ ID NO: 107443 - DNA, 15 bp, Homo sapiens
ttatttacaaagaag

SEQ ID NO: 107444 - DNA, 15 bp, Homo sapiens
cttatttacaaagaa

SEQ ID NO: 107445 - DNA, 15 bp, Homo sapiens
ccttatttacaaaga

SEQ ID NO: 107446 - DNA, 15 bp, Homo sapiens
cccttatttacaaag

SEQ ID NO: 107447 - DNA, 15 bp, Homo sapiens
ccccttatttacaaa

SEQ ID NO: 107448 - DNA, 15 bp, Homo sapiens
accccttatttacaa

SEQ ID NO: 107449 - DNA, 15 bp, Homo sapiens
gaccccttatttaca

SEQ ID NO: 107450 - DNA, 15 bp, Homo sapiens
tgaccccttatttac

SEQ ID NO: 107451 - DNA, 15 bp, Homo sapiens
ctgaccccttattta

SEQ ID NO: 107452 - DNA, 15 bp, Homo sapiens
actgaccccttattt

SEQ ID NO: 107453 - DNA, 15 bp, Homo sapiens
aactgaccccttatt

SEQ ID NO: 107454 - DNA, 15 bp, Homo sapiens
taactgaccccttat

SEQ ID NO: 107455 - DNA, 15 bp, Homo sapiens
gtaactgacccctta

SEQ ID NO: 107456 - DNA, 15 bp, Homo sapiens
agtaactgacccctt

SEQ ID NO: 107457 - DNA, 15 bp, Homo sapiens
aagtaactgacccct

SEQ ID NO: 107458 - DNA, 15 bp, Homo sapiens
gaagtaactgacccc

SEQ ID NO: 107459 - DNA, 15 bp, Homo sapiens
ggaagtaactgaccc

SEQ ID NO: 107460 - DNA, 15 bp, Homo sapiens
aggaagtaactgacc

SEQ ID NO: 107461 - DNA, 15 bp, Homo sapiens
taggaagtaactgac

SEQ ID NO: 107462 - DNA, 15 bp, Homo sapiens
ttaggaagtaactga

SEQ ID NO: 107463 - DNA, 15 bp, Homo sapiens
attaggaagtaactg

SEQ ID NO: 107464 - DNA, 15 bp, Homo sapiens
tattaggaagtaact

SEQ ID NO: 107465 - DNA, 15 bp, Homo sapiens
ctattaggaagtaac

SEQ ID NO: 107466 - DNA, 15 bp, Homo sapiens
cctattaggaagtaa

SEQ ID NO: 107467 - DNA, 15 bp, Homo sapiens
acctattaggaagta

SEQ ID NO: 107468 - DNA, 15 bp, Homo sapiens
cacctattaggaagt

SEQ ID NO: 107469 - DNA, 15 bp, Homo sapiens
acacctattaggaag

SEQ ID NO: 107470 - DNA, 15 bp, Homo sapiens
gacacctattaggaa

SEQ ID NO: 107471 - DNA, 15 bp, Homo sapiens
agacacctattagga

SEQ ID NO: 107472 - DNA, 15 bp, Homo sapiens
aagacacctattagg

SEQ ID NO: 107473 - DNA, 15 bp, Homo sapiens
taagacacctattag

SEQ ID NO: 107474 - DNA, 15 bp, Homo sapiens
ctaagacacctatta

SEQ ID NO: 107475 - DNA, 15 bp, Homo sapiens
actaagacacctatt

SEQ ID NO: 107476 - DNA, 15 bp, Homo sapiens
aactaagacacctat

SEQ ID NO: 107477 - DNA, 15 bp, Homo sapiens
aaactaagacaccta

SEQ ID NO: 107478 - DNA, 15 bp, Homo sapiens
aaaactaagacacct

SEQ ID NO: 107479 - DNA, 15 bp, Homo sapiens
taaaactaagacacc

SEQ ID NO: 107480 - DNA, 15 bp, Homo sapiens
ctaaaactaagacac

SEQ ID NO: 107481 - DNA, 15 bp, Homo sapiens
actaaaactaagaca

SEQ ID NO: 107482 - DNA, 15 bp, Homo sapiens
aactaaaactaagac

SEQ ID NO: 107483 - DNA, 15 bp, Homo sapiens
taactaaaactaaga

SEQ ID NO: 107484 - DNA, 15 bp, Homo sapiens
ttaactaaaactaag

SEQ ID NO: 107485 - DNA, 15 bp, Homo sapiens
attaactaaaactaa

SEQ ID NO: 107486 - DNA, 15 bp, Homo sapiens
tattaactaaaacta

SEQ ID NO: 107487 - DNA, 15 bp, Homo sapiens
ttattaactaaaact

SEQ ID NO: 107488 - DNA, 15 bp, Homo sapiens
attattaactaaaac

SEQ ID NO: 107489 - DNA, 15 bp, Homo sapiens
gattattaactaaaa

SEQ ID NO: 107490 - DNA, 15 bp, Homo sapiens
agattattaactaaa

SEQ ID NO: 107491 - DNA, 15 bp, Homo sapiens
tagattattaactaa

SEQ ID NO: 107492 - DNA, 15 bp, Homo sapiens
ttagattattaacta

SEQ ID NO: 107493 - DNA, 15 bp, Homo sapiens
attagattattaact

SEQ ID NO: 107494 - DNA, 15 bp, Homo sapiens
tattagattattaac

SEQ ID NO: 107495 - DNA, 15 bp, Homo sapiens
ctattagattattaa

SEQ ID NO: 107496 - DNA, 15 bp, Homo sapiens
gctattagattatta

SEQ ID NO: 107497 - DNA, 15 bp, Homo sapiens
tgctattagattatt

SEQ ID NO: 107498 - DNA, 15 bp, Homo sapiens
gtgctattagattat

SEQ ID NO: 107499 - DNA, 15 bp, Homo sapiens
ggtgctattagatta

SEQ ID NO: 107500 - DNA, 15 bp, Homo sapiens
gggtgctattagatt

SEQ ID NO: 107501 - DNA, 15 bp, Homo sapiens
ggggtgctattagat

SEQ ID NO: 107502 - DNA, 15 bp, Homo sapiens
gggggtgctattaga

SEQ ID NO: 107503 - DNA, 15 bp, Homo sapiens
tgggggtgctattag

SEQ ID NO: 107504 - DNA, 15 bp, Homo sapiens
ttgggggtgctatta

SEQ ID NO: 107505 - DNA, 15 bp, Homo sapiens
tttgggggtgctatt

SEQ ID NO: 107506 - DNA, 15 bp, Homo sapiens
ttttgggggtgctat

SEQ ID NO: 107507 - DNA, 15 bp, Homo sapiens
tttttgggggtgcta

SEQ ID NO: 107508 - DNA, 15 bp, Homo sapiens
ctttttgggggtgct

SEQ ID NO: 107509 - DNA, 15 bp, Homo sapiens
gctttttgggggtgc

SEQ ID NO: 107510 - DNA, 15 bp, Homo sapiens
tgctttttgggggtg

SEQ ID NO: 107511 - DNA, 15 bp, Homo sapiens
ttgctttttgggggt

SEQ ID NO: 107512 - DNA, 15 bp, Homo sapiens
tttgctttttggggg

SEQ ID NO: 107513 - DNA, 15 bp, Homo sapiens
gtttgctttttgggg

SEQ ID NO: 107514 - DNA, 15 bp, Homo sapiens
agtttgctttttggg

SEQ ID NO: 107515 - DNA, 15 bp, Homo sapiens
cagtttgctttttgg

SEQ ID NO: 107516 - DNA, 15 bp, Homo sapiens
acagtttgctttttg

SEQ ID NO: 107517 - DNA, 15 bp, Homo sapiens
aacagtttgcttttt

SEQ ID NO: 107518 - DNA, 15 bp, Homo sapiens
taacagtttgctttt

SEQ ID NO: 107519 - DNA, 15 bp, Homo sapiens
ttaacagtttgcttt

SEQ ID NO: 107520 - DNA, 15 bp, Homo sapiens
attaacagtttgctt

SEQ ID NO: 107521 - DNA, 15 bp, Homo sapiens
aattaacagtttgct

SEQ ID NO: 107522 - DNA, 15 bp, Homo sapiens
aaattaacagtttgc

SEQ ID NO: 107523 - DNA, 15 bp, Homo sapiens
caaattaacagtttg

SEQ ID NO: 107524 - DNA, 15 bp, Homo sapiens
acaaattaacagttt

SEQ ID NO: 107525 - DNA, 15 bp, Homo sapiens
aacaaattaacagtt

SEQ ID NO: 107526 - DNA, 15 bp, Homo sapiens
taacaaattaacagt

SEQ ID NO: 107527 - DNA, 15 bp, Homo sapiens
ataacaaattaacag

SEQ ID NO: 107528 - DNA, 15 bp, Homo sapiens
aataacaaattaaca

SEQ ID NO: 107529 - DNA, 15 bp, Homo sapiens
taataacaaattaac

SEQ ID NO: 107530 - DNA, 15 bp, Homo sapiens
ctaataacaaattaa

SEQ ID NO: 107531 - DNA, 15 bp, Homo sapiens
gctaataacaaatta

SEQ ID NO: 107532 - DNA, 15 bp, Homo sapiens
ggctaataacaaatt

SEQ ID NO: 107533 - DNA, 15 bp, Homo sapiens
tggctaataacaaat

SEQ ID NO: 107534 - DNA, 15 bp, Homo sapiens
atggctaataacaaa

SEQ ID NO: 107535 - DNA, 15 bp, Homo sapiens
gatggctaataacaa

SEQ ID NO: 107536 - DNA, 15 bp, Homo sapiens
ggatggctaataaca

SEQ ID NO: 107537 - DNA, 15 bp, Homo sapiens
aggatggctaataac

SEQ ID NO: 107538 - DNA, 15 bp, Homo sapiens
caggatggctaataa

SEQ ID NO: 107539 - DNA, 15 bp, Homo sapiens
acaggatggctaata

SEQ ID NO: 107540 - DNA, 15 bp, Homo sapiens
tacaggatggctaat

SEQ ID NO: 107541 - DNA, 15 bp, Homo sapiens
ttacaggatggctaa

SEQ ID NO: 107542 - DNA, 15 bp, Homo sapiens
tttacaggatggcta

SEQ ID NO: 107543 - DNA, 15 bp, Homo sapiens
ctttacaggatggct

SEQ ID NO: 107544 - DNA, 15 bp, Homo sapiens
tctttacaggatggc

SEQ ID NO: 107545 - DNA, 15 bp, Homo sapiens
gtctttacaggatgg

SEQ ID NO: 107546 - DNA, 15 bp, Homo sapiens
tgtctttacaggatg

SEQ ID NO: 107547 - DNA, 15 bp, Homo sapiens
ttgtctttacaggat

SEQ ID NO: 107548 - DNA, 15 bp, Homo sapiens
cttgtctttacagga

SEQ ID NO: 107549 - DNA, 15 bp, Homo sapiens
ccttgtctttacagg

SEQ ID NO: 107550 - DNA, 15 bp, Homo sapiens
cccttgtctttacag

SEQ ID NO: 107551 - DNA, 15 bp, Homo sapiens
tcccttgtctttaca

SEQ ID NO: 107552 - DNA, 15 bp, Homo sapiens
ctcccttgtctttac

SEQ ID NO: 107553 - DNA, 15 bp, Homo sapiens
tctcccttgtcttta

SEQ ID NO: 107554 - DNA, 15 bp, Homo sapiens
ttctcccttgtcttt

SEQ ID NO: 107555 - DNA, 15 bp, Homo sapiens
tttctcccttgtctt

SEQ ID NO: 107556 - DNA, 15 bp, Homo sapiens
atttctcccttgtct

SEQ ID NO: 107557 - DNA, 15 bp, Homo sapiens
gatttctcccttgtc

SEQ ID NO: 107558 - DNA, 15 bp, Homo sapiens
cgatttctcccttgt

SEQ ID NO: 107559 - DNA, 15 bp, Homo sapiens
ccgatttctcccttg

SEQ ID NO: 107560 - DNA, 15 bp, Homo sapiens
cccgatttctccctt

SEQ ID NO: 107561 - DNA, 15 bp, Homo sapiens
ccccgatttctccct

SEQ ID NO: 107562 - DNA, 15 bp, Homo sapiens
gccccgatttctccc

SEQ ID NO: 107563 - DNA, 15 bp, Homo sapiens
ggccccgatttctcc

SEQ ID NO: 107564 - DNA, 15 bp, Homo sapiens
tggccccgatttctc

SEQ ID NO: 107565 - DNA, 15 bp, Homo sapiens
ctggccccgatttct

SEQ ID NO: 107566 - DNA, 15 bp, Homo sapiens
cctggccccgatttc

SEQ ID NO: 107567 - DNA, 15 bp, Homo sapiens
tcctggccccgattt

SEQ ID NO: 107568 - DNA, 15 bp, Homo sapiens
ctcctggccccgatt

SEQ ID NO: 107569 - DNA, 15 bp, Homo sapiens
tctcctggccccgat

SEQ ID NO: 107570 - DNA, 15 bp, Homo sapiens
ctctcctggccccga

SEQ ID NO: 107571 - DNA, 15 bp, Homo sapiens
actctcctggccccg

SEQ ID NO: 107572 - DNA, 15 bp, Homo sapiens
gactctcctggcccc

SEQ ID NO: 107573 - DNA, 15 bp, Homo sapiens
ggactctcctggccc

SEQ ID NO: 107574 - DNA, 15 bp, Homo sapiens
aggactctcctggcc

SEQ ID NO: 107575 - DNA, 15 bp, Homo sapiens
gaggactctcctggc

SEQ ID NO: 107576 - DNA, 15 bp, Homo sapiens
agaggactctcctgg

SEQ ID NO: 107577 - DNA, 15 bp, Homo sapiens
aagaggactctcctg

SEQ ID NO: 107578 - DNA, 15 bp, Homo sapiens
aaagaggactctcct

SEQ ID NO: 107579 - DNA, 15 bp, Homo sapiens
gaaagaggactctcc

SEQ ID NO: 107580 - DNA, 15 bp, Homo sapiens
ggaaagaggactctc

SEQ ID NO: 107581 - DNA, 15 bp, Homo sapiens
gggaaagaggactct

SEQ ID NO: 107582 - DNA, 15 bp, Homo sapiens
tgggaaagaggactc

SEQ ID NO: 107583 - DNA, 15 bp, Homo sapiens
atgggaaagaggact

SEQ ID NO: 107584 - DNA, 15 bp, Homo sapiens
aatgggaaagaggac

SEQ ID NO: 107585 - DNA, 15 bp, Homo sapiens
gaatgggaaagagga

SEQ ID NO: 107586 - DNA, 15 bp, Homo sapiens
agaatgggaaagagg

SEQ ID NO: 107587 - DNA, 15 bp, Homo sapiens
gagaatgggaaagag

SEQ ID NO: 107588 - DNA, 15 bp, Homo sapiens
ggagaatgggaaaga

SEQ ID NO: 107589 - DNA, 15 bp, Homo sapiens
tggagaatgggaaag

SEQ ID NO: 107590 - DNA, 15 bp, Homo sapiens
atggagaatgggaaa

SEQ ID NO: 107591 - DNA, 15 bp, Homo sapiens
tatggagaatgggaa

SEQ ID NO: 107592 - DNA, 15 bp, Homo sapiens
ttatggagaatggga

SEQ ID NO: 107593 - DNA, 15 bp, Homo sapiens
attatggagaatggg

SEQ ID NO: 107594 - DNA, 15 bp, Homo sapiens
aattatggagaatgg

SEQ ID NO: 107595 - DNA, 15 bp, Homo sapiens
aaattatggagaatg

SEQ ID NO: 107596 - DNA, 15 bp, Homo sapiens
aaaattatggagaat

SEQ ID NO: 107597 - DNA, 15 bp, Homo sapiens
aaaaattatggagaa

SEQ ID NO: 107598 - DNA, 15 bp, Homo sapiens
taaaaattatggaga

SEQ ID NO: 107599 - DNA, 15 bp, Homo sapiens
gtaaaaattatggag

SEQ ID NO: 107600 - DNA, 15 bp, Homo sapiens
cgtaaaaattatgga

SEQ ID NO: 107601 - DNA, 15 bp, Homo sapiens
tcgtaaaaattatgg

SEQ ID NO: 107602 - DNA, 15 bp, Homo sapiens
gtcgtaaaaattatg

SEQ ID NO: 107603 - DNA, 15 bp, Homo sapiens
ggtcgtaaaaattat

SEQ ID NO: 107604 - DNA, 15 bp, Homo sapiens
aggtcgtaaaaatta

SEQ ID NO: 107605 - DNA, 15 bp, Homo sapiens
taggtcgtaaaaatt

SEQ ID NO: 107606 - DNA, 15 bp, Homo sapiens
ataggtcgtaaaaat

SEQ ID NO: 107607 - DNA, 15 bp, Homo sapiens
tataggtcgtaaaaa

SEQ ID NO: 107608 - DNA, 15 bp, Homo sapiens
ctataggtcgtaaaa

SEQ ID NO: 107609 - DNA, 15 bp, Homo sapiens
tctataggtcgtaaa

SEQ ID NO: 107610 - DNA, 15 bp, Homo sapiens
ttctataggtcgtaa

SEQ ID NO: 107611 - DNA, 15 bp, Homo sapiens
tttctataggtcgta

SEQ ID NO: 107612 - DNA, 15 bp, Homo sapiens
atttctataggtcgt

SEQ ID NO: 107613 - DNA, 15 bp, Homo sapiens
tatttctataggtcg

SEQ ID NO: 107614 - DNA, 15 bp, Homo sapiens
ttatttctataggtc

SEQ ID NO: 107615 - DNA, 15 bp, Homo sapiens
cttatttctataggt

SEQ ID NO: 107616 - DNA, 15 bp, Homo sapiens
tcttatttctatagg

SEQ ID NO: 107617 - DNA, 15 bp, Homo sapiens
ctcttatttctatag

SEQ ID NO: 107618 - DNA, 15 bp, Homo sapiens
gctcttatttctata

SEQ ID NO: 107619 - DNA, 15 bp, Homo sapiens
ggctcttatttctat

SEQ ID NO: 107620 - DNA, 15 bp, Homo sapiens
aggctcttatttcta

SEQ ID NO: 107621 - DNA, 15 bp, Homo sapiens
taggctcttatttct

SEQ ID NO: 107622 - DNA, 15 bp, Homo sapiens
ttaggctcttatttc

SEQ ID NO: 107623 - DNA, 15 bp, Homo sapiens
cttaggctcttattt

SEQ ID NO: 107624 - DNA, 15 bp, Homo sapiens
tcttaggctcttatt

SEQ ID NO: 107625 - DNA, 15 bp, Homo sapiens
ctcttaggctcttat

SEQ ID NO: 107626 - DNA, 15 bp, Homo sapiens
actcttaggctctta

SEQ ID NO: 107627 - DNA, 15 bp, Homo sapiens
cactcttaggctctt

SEQ ID NO: 107628 - DNA, 15 bp, Homo sapiens
tcactcttaggctct

SEQ ID NO: 107629 - DNA, 15 bp, Homo sapiens
gtcactcttaggctc

SEQ ID NO: 107630 - DNA, 15 bp, Homo sapiens
ggtcactcttaggct

SEQ ID NO: 107631 - DNA, 15 bp, Homo sapiens
tggtcactcttaggc

SEQ ID NO: 107632 - DNA, 15 bp, Homo sapiens
ctggtcactcttagg

SEQ ID NO: 107633 - DNA, 15 bp, Homo sapiens
actggtcactcttag

SEQ ID NO: 107634 - DNA, 15 bp, Homo sapiens
aactggtcactctta

SEQ ID NO: 107635 - DNA, 15 bp, Homo sapiens
gaactggtcactctt

SEQ ID NO: 107636 - DNA, 15 bp, Homo sapiens
ggaactggtcactct

SEQ ID NO: 107637 - DNA, 15 bp, Homo sapiens
aggaactggtcactc

SEQ ID NO: 107638 - DNA, 15 bp, Homo sapiens
caggaactggtcact

SEQ ID NO: 107639 - DNA, 15 bp, Homo sapiens
gcaggaactggtcac

SEQ ID NO: 107640 - DNA, 15 bp, Homo sapiens
tgcaggaactggtca

SEQ ID NO: 107641 - DNA, 15 bp, Homo sapiens
ttgcaggaactggtc

SEQ ID NO: 107642 - DNA, 15 bp, Homo sapiens
gttgcaggaactggt

SEQ ID NO: 107643 - DNA, 15 bp, Homo sapiens
ggttgcaggaactgg

SEQ ID NO: 107644 - DNA, 15 bp, Homo sapiens
aggttgcaggaactg

SEQ ID NO: 107645 - DNA, 15 bp, Homo sapiens
taggttgcaggaact

SEQ ID NO: 107646 - DNA, 15 bp, Homo sapiens
ttaggttgcaggaac

SEQ ID NO: 107647 - DNA, 15 bp, Homo sapiens
gttaggttgcaggaa

SEQ ID NO: 107648 - DNA, 15 bp, Homo sapiens
agttaggttgcagga

SEQ ID NO: 107649 - DNA, 15 bp, Homo sapiens
gagttaggttgcagg

SEQ ID NO: 107650 - DNA, 15 bp, Homo sapiens
tgagttaggttgcag

SEQ ID NO: 107651 - DNA, 15 bp, Homo sapiens
ttgagttaggttgca

SEQ ID NO: 107652 - DNA, 15 bp, Homo sapiens
tttgagttaggttgc

SEQ ID NO: 107653 - DNA, 15 bp, Homo sapiens
ttttgagttaggttg

SEQ ID NO: 107654 - DNA, 15 bp, Homo sapiens
attttgagttaggtt

SEQ ID NO: 107655 - DNA, 15 bp, Homo sapiens
aattttgagttaggt

SEQ ID NO: 107656 - DNA, 15 bp, Homo sapiens
taattttgagttagg

SEQ ID NO: 107657 - DNA, 15 bp, Homo sapiens
ctaattttgagttag

SEQ ID NO: 107658 - DNA, 15 bp, Homo sapiens
cctaattttgagtta

SEQ ID NO: 107659 - DNA, 15 bp, Homo sapiens
gcctaattttgagtt

SEQ ID NO: 107660 - DNA, 15 bp, Homo sapiens
ggcctaattttgagt

SEQ ID NO: 107661 - DNA, 15 bp, Homo sapiens
aggcctaattttgag

SEQ ID NO: 107662 - DNA, 15 bp, Homo sapiens
gaggcctaattttga

SEQ ID NO: 107663 - DNA, 15 bp, Homo sapiens
agaggcctaattttg

SEQ ID NO: 107664 - DNA, 15 bp, Homo sapiens
gagaggcctaatttt

SEQ ID NO: 107665 - DNA, 15 bp, Homo sapiens
agagaggcctaattt

SEQ ID NO: 107666 - DNA, 15 bp, Homo sapiens
cagagaggcctaatt

SEQ ID NO: 107667 - DNA, 15 bp, Homo sapiens
acagagaggcctaat

SEQ ID NO: 107668 - DNA, 15 bp, Homo sapiens
aacagagaggcctaa

SEQ ID NO: 107669 - DNA, 15 bp, Homo sapiens
caacagagaggccta

SEQ ID NO: 107670 - DNA, 15 bp, Homo sapiens
tcaacagagaggcct

SEQ ID NO: 107671 - DNA, 15 bp, Homo sapiens
ttcaacagagaggcc

SEQ ID NO: 107672 - DNA, 15 bp, Homo sapiens
cttcaacagagaggc

SEQ ID NO: 107673 - DNA, 15 bp, Homo sapiens
acttcaacagagagg

SEQ ID NO: 107674 - DNA, 15 bp, Homo sapiens
tacttcaacagagag

SEQ ID NO: 107675 - DNA, 15 bp, Homo sapiens
ttacttcaacagaga

SEQ ID NO: 107676 - DNA, 15 bp, Homo sapiens
attacttcaacagag

SEQ ID NO: 107677 - DNA, 15 bp, Homo sapiens
tattacttcaacaga

SEQ ID NO: 107678 - DNA, 15 bp, Homo sapiens
ctattacttcaacag

SEQ ID NO: 107679 - DNA, 15 bp, Homo sapiens
actattacttcaaca

SEQ ID NO: 107680 - DNA, 15 bp, Homo sapiens
cactattacttcaac

SEQ ID NO: 107681 - DNA, 15 bp, Homo sapiens
tcactattacttcaa

SEQ ID NO: 107682 - DNA, 15 bp, Homo sapiens
ctcactattacttca

SEQ ID NO: 107683 - DNA, 15 bp, Homo sapiens
cctcactattacttc

SEQ ID NO: 107684 - DNA, 15 bp, Homo sapiens
gcctcactattactt

SEQ ID NO: 107685 - DNA, 15 bp, Homo sapiens
tgcctcactattact

SEQ ID NO: 107686 - DNA, 15 bp, Homo sapiens
ttgcctcactattac

SEQ ID NO: 107687 - DNA, 15 bp, Homo sapiens
tttgcctcactatta

SEQ ID NO: 107688 - DNA, 15 bp, Homo sapiens
gtttgcctcactatt

SEQ ID NO: 107689 - DNA, 15 bp, Homo sapiens
tgtttgcctcactat

SEQ ID NO: 107690 - DNA, 15 bp, Homo sapiens
ttgtttgcctcacta

SEQ ID NO: 107691 - DNA, 15 bp, Homo sapiens
attgtttgcctcact

SEQ ID NO: 107692 - DNA, 15 bp, Homo sapiens
gattgtttgcctcac

SEQ ID NO: 107693 - DNA, 15 bp, Homo sapiens
ggattgtttgcctca

SEQ ID NO: 107694 - DNA, 15 bp, Homo sapiens
gggattgtttgcctc

SEQ ID NO: 107695 - DNA, 15 bp, Homo sapiens
agggattgtttgcct

SEQ ID NO: 107696 - DNA, 15 bp, Homo sapiens
aagggattgtttgcc

SEQ ID NO: 107697 - DNA, 15 bp, Homo sapiens
caagggattgtttgc

SEQ ID NO: 107698 - DNA, 15 bp, Homo sapiens
tcaagggattgtttg

SEQ ID NO: 107699 - DNA, 15 bp, Homo sapiens
ttcaagggattgttt

SEQ ID NO: 107700 - DNA, 15 bp, Homo sapiens
cttcaagggattgtt

SEQ ID NO: 107701 - DNA, 15 bp, Homo sapiens
gcttcaagggattgt

SEQ ID NO: 107702 - DNA, 15 bp, Homo sapiens
tgcttcaagggattg

SEQ ID NO: 107703 - DNA, 15 bp, Homo sapiens
gtgcttcaagggatt

SEQ ID NO: 107704 - DNA, 15 bp, Homo sapiens
agtgcttcaagggat

SEQ ID NO: 107705 - DNA, 15 bp, Homo sapiens
cagtgcttcaaggga

SEQ ID NO: 107706 - DNA, 15 bp, Homo sapiens
ccagtgcttcaaggg

SEQ ID NO: 107707 - DNA, 15 bp, Homo sapiens
cccagtgcttcaagg

SEQ ID NO: 107708 - DNA, 15 bp, Homo sapiens
ccccagtgcttcaag

SEQ ID NO: 107709 - DNA, 15 bp, Homo sapiens
gccccagtgcttcaa

SEQ ID NO: 107710 - DNA, 15 bp, Homo sapiens
tgccccagtgcttca

SEQ ID NO: 107711 - DNA, 15 bp, Homo sapiens
atgccccagtgcttc

SEQ ID NO: 107712 - DNA, 15 bp, Homo sapiens
catgccccagtgctt

SEQ ID NO: 107713 - DNA, 15 bp, Homo sapiens
gcatgccccagtgct

SEQ ID NO: 107714 - DNA, 15 bp, Homo sapiens
tgcatgccccagtgc

SEQ ID NO: 107715 - DNA, 15 bp, Homo sapiens
gtgcatgccccagtg

SEQ ID NO: 107716 - DNA, 15 bp, Homo sapiens
ggtgcatgccccagt

SEQ ID NO: 107717 - DNA, 15 bp, Homo sapiens
gggtgcatgccccag

SEQ ID NO: 107718 - DNA, 15 bp, Homo sapiens
agggtgcatgcccca

SEQ ID NO: 107719 - DNA, 15 bp, Homo sapiens
aagggtgcatgcccc

SEQ ID NO: 107720 - DNA, 15 bp, Homo sapiens
taagggtgcatgccc

SEQ ID NO: 107721 - DNA, 15 bp, Homo sapiens
ataagggtgcatgcc

SEQ ID NO: 107722 - DNA, 15 bp, Homo sapiens
cataagggtgcatgc

SEQ ID NO: 107723 - DNA, 15 bp, Homo sapiens
tcataagggtgcatg

SEQ ID NO: 107724 - DNA, 15 bp, Homo sapiens
ttcataagggtgcat

SEQ ID NO: 107725 - DNA, 15 bp, Homo sapiens
tttcataagggtgca

SEQ ID NO: 107726 - DNA, 15 bp, Homo sapiens
atttcataagggtgc

SEQ ID NO: 107727 - DNA, 15 bp, Homo sapiens
gatttcataagggtg

SEQ ID NO: 107728 - DNA, 15 bp, Homo sapiens
agatttcataagggt

SEQ ID NO: 107729 - DNA, 15 bp, Homo sapiens
tagatttcataaggg

SEQ ID NO: 107730 - DNA, 15 bp, Homo sapiens
ttagatttcataagg

SEQ ID NO: 107731 - DNA, 15 bp, Homo sapiens
attagatttcataag

SEQ ID NO: 107732 - DNA, 15 bp, Homo sapiens
tattagatttcataa

SEQ ID NO: 107733 - DNA, 15 bp, Homo sapiens
ttattagatttcata

SEQ ID NO: 107734 - DNA, 15 bp, Homo sapiens
attattagatttcat

SEQ ID NO: 107735 - DNA, 15 bp, Homo sapiens
aattattagatttca

SEQ ID NO: 107736 - DNA, 15 bp, Homo sapiens
gaattattagatttc

SEQ ID NO: 107737 - DNA, 15 bp, Homo sapiens
agaattattagattt

SEQ ID NO: 107738 - DNA, 15 bp, Homo sapiens
tagaattattagatt

SEQ ID NO: 107739 - DNA, 15 bp, Homo sapiens
ttagaattattagat

SEQ ID NO: 107740 - DNA, 15 bp, Homo sapiens
tttagaattattaga

SEQ ID NO: 107741 - DNA, 15 bp, Homo sapiens
ttttagaattattag

SEQ ID NO: 107742 - DNA, 15 bp, Homo sapiens
attttagaattatta

SEQ ID NO: 107743 - DNA, 15 bp, Homo sapiens
tattttagaattatt

SEQ ID NO: 107744 - DNA, 15 bp, Homo sapiens
atattttagaattat

SEQ ID NO: 107745 - DNA, 15 bp, Homo sapiens
gatattttagaatta

SEQ ID NO: 107746 - DNA, 15 bp, Homo sapiens
tgatattttagaatt

SEQ ID NO: 107747 - DNA, 15 bp, Homo sapiens
atgatattttagaat

SEQ ID NO: 107748 - DNA, 15 bp, Homo sapiens
aatgatattttagaa

SEQ ID NO: 107749 - DNA, 15 bp, Homo sapiens
caatgatattttaga

SEQ ID NO: 107750 - DNA, 15 bp, Homo sapiens
ccaatgatattttag

SEQ ID NO: 107751 - DNA, 15 bp, Homo sapiens
gccaatgatatttta

SEQ ID NO: 107752 - DNA, 15 bp, Homo sapiens
tgccaatgatatttt

SEQ ID NO: 107753 - DNA, 15 bp, Homo sapiens
ctgccaatgatattt

SEQ ID NO: 107754 - DNA, 15 bp, Homo sapiens
actgccaatgatatt

SEQ ID NO: 107755 - DNA, 15 bp, Homo sapiens
tactgccaatgatat

SEQ ID NO: 107756 - DNA, 15 bp, Homo sapiens
atactgccaatgata

SEQ ID NO: 107757 - DNA, 15 bp, Homo sapiens
aatactgccaatgat

SEQ ID NO: 107758 - DNA, 15 bp, Homo sapiens
taatactgccaatga

SEQ ID NO: 107759 - DNA, 15 bp, Homo sapiens
ttaatactgccaatg

SEQ ID NO: 107760 - DNA, 15 bp, Homo sapiens
cttaatactgccaat

SEQ ID NO: 107761 - DNA, 15 bp, Homo sapiens
gcttaatactgccaa

SEQ ID NO: 107762 - DNA, 15 bp, Homo sapiens
agcttaatactgcca

SEQ ID NO: 107763 - DNA, 15 bp, Homo sapiens
tagcttaatactgcc

SEQ ID NO: 107764 - DNA, 15 bp, Homo sapiens
ctagcttaatactgc

SEQ ID NO: 107765 - DNA, 15 bp, Homo sapiens
tctagcttaatactg

SEQ ID NO: 107766 - DNA, 15 bp, Homo sapiens
ctctagcttaatact

SEQ ID NO: 107767 - DNA, 15 bp, Homo sapiens
actctagcttaatac

SEQ ID NO: 107768 - DNA, 15 bp, Homo sapiens
aactctagcttaata

SEQ ID NO: 107769 - DNA, 15 bp, Homo sapiens
gaactctagcttaat

SEQ ID NO: 107770 - DNA, 15 bp, Homo sapiens
agaactctagcttaa

SEQ ID NO: 107771 - DNA, 15 bp, Homo sapiens
gagaactctagctta

SEQ ID NO: 107772 - DNA, 15 bp, Homo sapiens
tgagaactctagctt

SEQ ID NO: 107773 - DNA, 15 bp, Homo sapiens
ttgagaactctagct

SEQ ID NO: 107774 - DNA, 15 bp, Homo sapiens
tttgagaactctagc

SEQ ID NO: 107775 - DNA, 15 bp, Homo sapiens
ttttgagaactctag

SEQ ID NO: 107776 - DNA, 15 bp, Homo sapiens
attttgagaactcta

SEQ ID NO: 107777 - DNA, 15 bp, Homo sapiens
tattttgagaactct

SEQ ID NO: 107778 - DNA, 15 bp, Homo sapiens
atattttgagaactc

SEQ ID NO: 107779 - DNA, 15 bp, Homo sapiens
catattttgagaact

SEQ ID NO: 107780 - DNA, 15 bp, Homo sapiens
gcatattttgagaac

SEQ ID NO: 107781 - DNA, 15 bp, Homo sapiens
agcatattttgagaa

SEQ ID NO: 107782 - DNA, 15 bp, Homo sapiens
cagcatattttgaga

SEQ ID NO: 107783 - DNA, 15 bp, Homo sapiens
acagcatattttgag

SEQ ID NO: 107784 - DNA, 15 bp, Homo sapiens
tacagcatattttga

SEQ ID NO: 107785 - DNA, 15 bp, Homo sapiens
ctacagcatattttg

SEQ ID NO: 107786 - DNA, 15 bp, Homo sapiens
tctacagcatatttt

SEQ ID NO: 107787 - DNA, 15 bp, Homo sapiens
ttctacagcatattt

SEQ ID NO: 107788 - DNA, 15 bp, Homo sapiens
tttctacagcatatt

SEQ ID NO: 107789 - DNA, 15 bp, Homo sapiens
ttttctacagcatat

SEQ ID NO: 107790 - DNA, 15 bp, Homo sapiens
attttctacagcata

SEQ ID NO: 107791 - DNA, 15 bp, Homo sapiens
tattttctacagcat

SEQ ID NO: 107792 - DNA, 15 bp, Homo sapiens
atattttctacagca

SEQ ID NO: 107793 - DNA, 15 bp, Homo sapiens
aatattttctacagc

SEQ ID NO: 107794 - DNA, 15 bp, Homo sapiens
caatattttctacag

SEQ ID NO: 107795 - DNA, 15 bp, Homo sapiens
ccaatattttctaca

SEQ ID NO: 107796 - DNA, 15 bp, Homo sapiens
accaatattttctac

SEQ ID NO: 107797 - DNA, 15 bp, Homo sapiens
gaccaatattttcta

SEQ ID NO: 107798 - DNA, 15 bp, Homo sapiens
tgaccaatattttct

SEQ ID NO: 107799 - DNA, 15 bp, Homo sapiens
atgaccaatattttc

SEQ ID NO: 107800 - DNA, 15 bp, Homo sapiens
aatgaccaatatttt

SEQ ID NO: 107801 - DNA, 15 bp, Homo sapiens
aaatgaccaatattt

SEQ ID NO: 107802 - DNA, 15 bp, Homo sapiens
taaatgaccaatatt

SEQ ID NO: 107803 - DNA, 15 bp, Homo sapiens
ttaaatgaccaatat

SEQ ID NO: 107804 - DNA, 15 bp, Homo sapiens
tttaaatgaccaata

SEQ ID NO: 107805 - DNA, 15 bp, Homo sapiens
atttaaatgaccaat

SEQ ID NO: 107806 - DNA, 15 bp, Homo sapiens
tatttaaatgaccaa

SEQ ID NO: 107807 - DNA, 15 bp, Homo sapiens
atatttaaatgacca

SEQ ID NO: 107808 - DNA, 15 bp, Homo sapiens
tatatttaaatgacc

SEQ ID NO: 107809 - DNA, 15 bp, Homo sapiens
ctatatttaaatgac

SEQ ID NO: 107810 - DNA, 15 bp, Homo sapiens
gctatatttaaatga

SEQ ID NO: 107811 - DNA, 15 bp, Homo sapiens
agctatatttaaatg

SEQ ID NO: 107812 - DNA, 15 bp, Homo sapiens
cagctatatttaaat

SEQ ID NO: 107813 - DNA, 15 bp, Homo sapiens
tcagctatatttaaa

SEQ ID NO: 107814 - DNA, 15 bp, Homo sapiens
ctcagctatatttaa

SEQ ID NO: 107815 - DNA, 15 bp, Homo sapiens
actcagctatattta

SEQ ID NO: 107816 - DNA, 15 bp, Homo sapiens
tactcagctatattt

SEQ ID NO: 107817 - DNA, 15 bp, Homo sapiens
ttactcagctatatt

SEQ ID NO: 107818 - DNA, 15 bp, Homo sapiens
tttactcagctatat

SEQ ID NO: 107819 - DNA, 15 bp, Homo sapiens
ttttactcagctata

SEQ ID NO: 107820 - DNA, 15 bp, Homo sapiens
tttttactcagctat

SEQ ID NO: 107821 - DNA, 15 bp, Homo sapiens
atttttactcagcta

SEQ ID NO: 107822 - DNA, 15 bp, Homo sapiens
tatttttactcagct

SEQ ID NO: 107823 - DNA, 15 bp, Homo sapiens
ttatttttactcagc

SEQ ID NO: 107824 - DNA, 15 bp, Homo sapiens
cttatttttactcag

SEQ ID NO: 107825 - DNA, 15 bp, Homo sapiens
gcttatttttactca

SEQ ID NO: 107826 - DNA, 15 bp, Homo sapiens
tgcttatttttactc

SEQ ID NO: 107827 - DNA, 15 bp, Homo sapiens
ttgcttatttttact

SEQ ID NO: 107828 - DNA, 15 bp, Homo sapiens
cttgcttatttttac

SEQ ID NO: 107829 - DNA, 15 bp, Homo sapiens
tcttgcttattttta

SEQ ID NO: 107830 - DNA, 15 bp, Homo sapiens
atcttgcttattttt

SEQ ID NO: 107831 - DNA, 15 bp, Homo sapiens
gatcttgcttatttt

SEQ ID NO: 107832 - DNA, 15 bp, Homo sapiens
tgatcttgcttattt

SEQ ID NO: 107833 - DNA, 15 bp, Homo sapiens
ttgatcttgcttatt

SEQ ID NO: 107834 - DNA, 15 bp, Homo sapiens
tttgatcttgcttat

SEQ ID NO: 107835 - DNA, 15 bp, Homo sapiens
ttttgatcttgctta

SEQ ID NO: 107836 - DNA, 15 bp, Homo sapiens
attttgatcttgctt

SEQ ID NO: 107837 - DNA, 15 bp, Homo sapiens
cattttgatcttgct

SEQ ID NO: 107838 - DNA, 15 bp, Homo sapiens
tcattttgatcttgc

SEQ ID NO: 107839 - DNA, 15 bp, Homo sapiens
atcattttgatcttg

SEQ ID NO: 107840 - DNA, 15 bp, Homo sapiens
tatcattttgatctt

SEQ ID NO: 107841 - DNA, 15 bp, Homo sapiens
ttatcattttgatct

SEQ ID NO: 107842 - DNA, 15 bp, Homo sapiens
cttatcattttgatc

SEQ ID NO: 107843 - DNA, 15 bp, Homo sapiens
tcttatcattttgat

SEQ ID NO: 107844 - DNA, 15 bp, Homo sapiens
ttcttatcattttga

SEQ ID NO: 107845 - DNA, 15 bp, Homo sapiens
tttcttatcattttg

SEQ ID NO: 107846 - DNA, 15 bp, Homo sapiens
ttttcttatcatttt

SEQ ID NO: 107847 - DNA, 15 bp, Homo sapiens
attttcttatcattt

SEQ ID NO: 107848 - DNA, 15 bp, Homo sapiens
cattttcttatcatt

SEQ ID NO: 107849 - DNA, 15 bp, Homo sapiens
acattttcttatcat

SEQ ID NO: 107850 - DNA, 15 bp, Homo sapiens
aacattttcttatca

SEQ ID NO: 107851 - DNA, 15 bp, Homo sapiens
caacattttcttatc

SEQ ID NO: 107852 - DNA, 15 bp, Homo sapiens
tcaacattttcttat

SEQ ID NO: 107853 - DNA, 15 bp, Homo sapiens
atcaacattttctta

SEQ ID NO: 107854 - DNA, 15 bp, Homo sapiens
aatcaacattttctt

SEQ ID NO: 107855 - DNA, 15 bp, Homo sapiens
aaatcaacattttct

SEQ ID NO: 107856 - DNA, 15 bp, Homo sapiens
gaaatcaacattttc

SEQ ID NO: 107857 - DNA, 15 bp, Homo sapiens
agaaatcaacatttt

SEQ ID NO: 107858 - DNA, 15 bp, Homo sapiens
gagaaatcaacattt

SEQ ID NO: 107859 - DNA, 15 bp, Homo sapiens
ggagaaatcaacatt

SEQ ID NO: 107860 - DNA, 15 bp, Homo sapiens
gggagaaatcaacat

SEQ ID NO: 107861 - DNA, 15 bp, Homo sapiens
ggggagaaatcaaca

SEQ ID NO: 107862 - DNA, 15 bp, Homo sapiens
aggggagaaatcaac

SEQ ID NO: 107863 - DNA, 15 bp, Homo sapiens
aaggggagaaatcaa

SEQ ID NO: 107864 - DNA, 15 bp, Homo sapiens
aaaggggagaaatca

SEQ ID NO: 107865 - DNA, 15 bp, Homo sapiens
aaaaggggagaaatc

SEQ ID NO: 107866 - DNA, 15 bp, Homo sapiens
caaaaggggagaaat

SEQ ID NO: 107867 - DNA, 15 bp, Homo sapiens
tcaaaaggggagaaa

SEQ ID NO: 107868 - DNA, 15 bp, Homo sapiens
ttcaaaaggggagaa

SEQ ID NO: 107869 - DNA, 15 bp, Homo sapiens
gttcaaaaggggaga

SEQ ID NO: 107870 - DNA, 15 bp, Homo sapiens
ggttcaaaaggggag

SEQ ID NO: 107871 - DNA, 15 bp, Homo sapiens
tggttcaaaagggga

SEQ ID NO: 107872 - DNA, 15 bp, Homo sapiens
ctggttcaaaagggg

SEQ ID NO: 107873 - DNA, 15 bp, Homo sapiens
actggttcaaaaggg

SEQ ID NO: 107874 - DNA, 15 bp, Homo sapiens
tactggttcaaaagg

SEQ ID NO: 107875 - DNA, 15 bp, Homo sapiens
ttactggttcaaaag

SEQ ID NO: 107876 - DNA, 15 bp, Homo sapiens
gttactggttcaaaa

SEQ ID NO: 107877 - DNA, 15 bp, Homo sapiens
agttactggttcaaa

SEQ ID NO: 107878 - DNA, 15 bp, Homo sapiens
tagttactggttcaa

SEQ ID NO: 107879 - DNA, 15 bp, Homo sapiens
ttagttactggttca

SEQ ID NO: 107880 - DNA, 15 bp, Homo sapiens
gttagttactggttc

SEQ ID NO: 107881 - DNA, 15 bp, Homo sapiens
agttagttactggtt

SEQ ID NO: 107882 - DNA, 15 bp, Homo sapiens
tagttagttactggt

SEQ ID NO: 107883 - DNA, 15 bp, Homo sapiens
atagttagttactgg

SEQ ID NO: 107884 - DNA, 15 bp, Homo sapiens
tatagttagttactg

SEQ ID NO: 107885 - DNA, 15 bp, Homo sapiens
ttatagttagttact

SEQ ID NO: 107886 - DNA, 15 bp, Homo sapiens
cttatagttagttac

SEQ ID NO: 107887 - DNA, 15 bp, Homo sapiens
ccttatagttagtta

SEQ ID NO: 107888 - DNA, 15 bp, Homo sapiens
cccttatagttagtt

SEQ ID NO: 107889 - DNA, 15 bp, Homo sapiens
acccttatagttagt

SEQ ID NO: 107890 - DNA, 15 bp, Homo sapiens
tacccttatagttag

SEQ ID NO: 107891 - DNA, 15 bp, Homo sapiens
atacccttatagtta

SEQ ID NO: 107892 - DNA, 15 bp, Homo sapiens
tatacccttatagtt

SEQ ID NO: 107893 - DNA, 15 bp, Homo sapiens
atatacccttatagt

SEQ ID NO: 107894 - DNA, 15 bp, Homo sapiens
tatatacccttatag

SEQ ID NO: 107895 - DNA, 15 bp, Homo sapiens
gtatatacccttata

SEQ ID NO: 107896 - DNA, 15 bp, Homo sapiens
ggtatatacccttat

SEQ ID NO: 107897 - DNA, 15 bp, Homo sapiens
gggtatataccctta

SEQ ID NO: 107898 - DNA, 15 bp, Homo sapiens
tgggtatataccctt

SEQ ID NO: 107899 - DNA, 15 bp, Homo sapiens
atgggtatataccct

SEQ ID NO: 107900 - DNA, 15 bp, Homo sapiens
catgggtatataccc

SEQ ID NO: 107901 - DNA, 15 bp, Homo sapiens
gcatgggtatatacc

SEQ ID NO: 107902 - DNA, 15 bp, Homo sapiens
agcatgggtatatac

SEQ ID NO: 107903 - DNA, 15 bp, Homo sapiens
aagcatgggtatata

SEQ ID NO: 107904 - DNA, 15 bp, Homo sapiens
taagcatgggtatat

SEQ ID NO: 107905 - DNA, 15 bp, Homo sapiens
ttaagcatgggtata

SEQ ID NO: 107906 - DNA, 15 bp, Homo sapiens
gttaagcatgggtat

SEQ ID NO: 107907 - DNA, 15 bp, Homo sapiens
agttaagcatgggta

SEQ ID NO: 107908 - DNA, 15 bp, Homo sapiens
aagttaagcatgggt

SEQ ID NO: 107909 - DNA, 15 bp, Homo sapiens
taagttaagcatggg

SEQ ID NO: 107910 - DNA, 15 bp, Homo sapiens
ttaagttaagcatgg

SEQ ID NO: 107911 - DNA, 15 bp, Homo sapiens
tttaagttaagcatg

SEQ ID NO: 107912 - DNA, 15 bp, Homo sapiens
ttttaagttaagcat

SEQ ID NO: 107913 - DNA, 15 bp, Homo sapiens
tttttaagttaagca

SEQ ID NO: 107914 - DNA, 15 bp, Homo sapiens
atttttaagttaagc

SEQ ID NO: 107915 - DNA, 15 bp, Homo sapiens
tatttttaagttaag

SEQ ID NO: 107916 - DNA, 15 bp, Homo sapiens
ttatttttaagttaa

SEQ ID NO: 107917 - DNA, 15 bp, Homo sapiens
attatttttaagtta

SEQ ID NO: 107918 - DNA, 15 bp, Homo sapiens
aattatttttaagtt

SEQ ID NO: 107919 - DNA, 15 bp, Homo sapiens
taattatttttaagt

SEQ ID NO: 107920 - DNA, 15 bp, Homo sapiens
ataattatttttaag

SEQ ID NO: 107921 - DNA, 15 bp, Homo sapiens
aataattatttttaa

SEQ ID NO: 107922 - DNA, 15 bp, Homo sapiens
aaataattattttta

SEQ ID NO: 107923 - DNA, 15 bp, Homo sapiens
taaataattattttt

SEQ ID NO: 107924 - DNA, 15 bp, Homo sapiens
ctaaataattatttt

SEQ ID NO: 107925 - DNA, 15 bp, Homo sapiens
gctaaataattattt

SEQ ID NO: 107926 - DNA, 15 bp, Homo sapiens
ggctaaataattatt

SEQ ID NO: 107927 - DNA, 15 bp, Homo sapiens
tggctaaataattat

SEQ ID NO: 107928 - DNA, 15 bp, Homo sapiens
gtggctaaataatta

SEQ ID NO: 107929 - DNA, 15 bp, Homo sapiens
ggtggctaaataatt

SEQ ID NO: 107930 - DNA, 15 bp, Homo sapiens
aggtggctaaataat

SEQ ID NO: 107931 - DNA, 15 bp, Homo sapiens
aaggtggctaaataa

SEQ ID NO: 107932 - DNA, 15 bp, Homo sapiens
caaggtggctaaata

SEQ ID NO: 107933 - DNA, 15 bp, Homo sapiens
ccaaggtggctaaat

SEQ ID NO: 107934 - DNA, 15 bp, Homo sapiens
cccaaggtggctaaa

SEQ ID NO: 107935 - DNA, 15 bp, Homo sapiens
acccaaggtggctaa

SEQ ID NO: 107936 - DNA, 15 bp, Homo sapiens
tacccaaggtggcta

SEQ ID NO: 107937 - DNA, 15 bp, Homo sapiens
atacccaaggtggct

SEQ ID NO: 107938 - DNA, 15 bp, Homo sapiens
tatacccaaggtggc

SEQ ID NO: 107939 - DNA, 15 bp, Homo sapiens
ctatacccaaggtgg

SEQ ID NO: 107940 - DNA, 15 bp, Homo sapiens
gctatacccaaggtg

SEQ ID NO: 107941 - DNA, 15 bp, Homo sapiens
tgctatacccaaggt

SEQ ID NO: 107942 - DNA, 15 bp, Homo sapiens
gtgctatacccaagg

SEQ ID NO: 107943 - DNA, 15 bp, Homo sapiens
tgtgctatacccaag

SEQ ID NO: 107944 - DNA, 15 bp, Homo sapiens
ttgtgctatacccaa

SEQ ID NO: 107945 - DNA, 15 bp, Homo sapiens
gttgtgctataccca

SEQ ID NO: 107946 - DNA, 15 bp, Homo sapiens
tgttgtgctataccc

SEQ ID NO: 107947 - DNA, 15 bp, Homo sapiens
atgttgtgctatacc

SEQ ID NO: 107948 - DNA, 15 bp, Homo sapiens
tatgttgtgctatac

SEQ ID NO: 107949 - DNA, 15 bp, Homo sapiens
atatgttgtgctata

SEQ ID NO: 107950 - DNA, 15 bp, Homo sapiens
catatgttgtgctat

SEQ ID NO: 107951 - DNA, 15 bp, Homo sapiens
ccatatgttgtgcta

SEQ ID NO: 107952 - DNA, 15 bp, Homo sapiens
tccatatgttgtgct

SEQ ID NO: 107953 - DNA, 15 bp, Homo sapiens
atccatatgttgtgc

SEQ ID NO: 107954 - DNA, 15 bp, Homo sapiens
catccatatgttgtg

SEQ ID NO: 107955 - DNA, 15 bp, Homo sapiens
gcatccatatgttgt

SEQ ID NO: 107956 - DNA, 15 bp, Homo sapiens
ggcatccatatgttg

SEQ ID NO: 107957 - DNA, 15 bp, Homo sapiens
tggcatccatatgtt

SEQ ID NO: 107958 - DNA, 15 bp, Homo sapiens
atggcatccatatgt

SEQ ID NO: 107959 - DNA, 15 bp, Homo sapiens
aatggcatccatatg

SEQ ID NO: 107960 - DNA, 15 bp, Homo sapiens
taatggcatccatat

SEQ ID NO: 107961 - DNA, 15 bp, Homo sapiens
ataatggcatccata

SEQ ID NO: 107962 - DNA, 15 bp, Homo sapiens
tataatggcatccat

SEQ ID NO: 107963 - DNA, 15 bp, Homo sapiens
ctataatggcatcca

SEQ ID NO: 107964 - DNA, 15 bp, Homo sapiens
actataatggcatcc

SEQ ID NO: 107965 - DNA, 15 bp, Homo sapiens
gactataatggcatc

SEQ ID NO: 107966 - DNA, 15 bp, Homo sapiens
ggactataatggcat

SEQ ID NO: 107967 - DNA, 15 bp, Homo sapiens
tggactataatggca

SEQ ID NO: 107968 - DNA, 15 bp, Homo sapiens
gtggactataatggc

SEQ ID NO: 107969 - DNA, 15 bp, Homo sapiens
ggtggactataatgg

SEQ ID NO: 107970 - DNA, 15 bp, Homo sapiens
aggtggactataatg

SEQ ID NO: 107971 - DNA, 15 bp, Homo sapiens
aaggtggactataat

SEQ ID NO: 107972 - DNA, 15 bp, Homo sapiens
caaggtggactataa

SEQ ID NO: 107973 - DNA, 15 bp, Homo sapiens
tcaaggtggactata

SEQ ID NO: 107974 - DNA, 15 bp, Homo sapiens
atcaaggtggactat

SEQ ID NO: 107975 - DNA, 15 bp, Homo sapiens
gatcaaggtggacta

SEQ ID NO: 107976 - DNA, 15 bp, Homo sapiens
agatcaaggtggact

SEQ ID NO: 107977 - DNA, 15 bp, Homo sapiens
aagatcaaggtggac

SEQ ID NO: 107978 - DNA, 15 bp, Homo sapiens
taagatcaaggtgga

SEQ ID NO: 107979 - DNA, 15 bp, Homo sapiens
gtaagatcaaggtgg

SEQ ID NO: 107980 - DNA, 15 bp, Homo sapiens
tgtaagatcaaggtg

SEQ ID NO: 107981 - DNA, 15 bp, Homo sapiens
ttgtaagatcaaggt

SEQ ID NO: 107982 - DNA, 15 bp, Homo sapiens
cttgtaagatcaagg

SEQ ID NO: 107983 - DNA, 15 bp, Homo sapiens
ccttgtaagatcaag

SEQ ID NO: 107984 - DNA, 15 bp, Homo sapiens
tccttgtaagatcaa

SEQ ID NO: 107985 - DNA, 15 bp, Homo sapiens
ttccttgtaagatca

SEQ ID NO: 107986 - DNA, 15 bp, Homo sapiens
cttccttgtaagatc

SEQ ID NO: 107987 - DNA, 15 bp, Homo sapiens
gcttccttgtaagat

SEQ ID NO: 107988 - DNA, 15 bp, Homo sapiens
agcttccttgtaaga

SEQ ID NO: 107989 - DNA, 15 bp, Homo sapiens
aagcttccttgtaag

SEQ ID NO: 107990 - DNA, 15 bp, Homo sapiens
aaagcttccttgtaa

SEQ ID NO: 107991 - DNA, 15 bp, Homo sapiens
gaaagcttccttgta

SEQ ID NO: 107992 - DNA, 15 bp, Homo sapiens
agaaagcttccttgt

SEQ ID NO: 107993 - DNA, 15 bp, Homo sapiens
aagaaagcttccttg

SEQ ID NO: 107994 - DNA, 15 bp, Homo sapiens
aaagaaagcttcctt

SEQ ID NO: 107995 - DNA, 15 bp, Homo sapiens
aaaagaaagcttcct

SEQ ID NO: 107996 - DNA, 15 bp, Homo sapiens
taaaagaaagcttcc

SEQ ID NO: 107997 - DNA, 15 bp, Homo sapiens
ctaaaagaaagcttc

SEQ ID NO: 107998 - DNA, 15 bp, Homo sapiens
gctaaaagaaagctt

SEQ ID NO: 107999 - DNA, 15 bp, Homo sapiens
cgctaaaagaaagct

SEQ ID NO: 108000 - DNA, 15 bp, Homo sapiens
acgctaaaagaaagc

SEQ ID NO: 108001 - DNA, 15 bp, Homo sapiens
tacgctaaaagaaag

SEQ ID NO: 108002 - DNA, 15 bp, Homo sapiens
ctacgctaaaagaaa

SEQ ID NO: 108003 - DNA, 15 bp, Homo sapiens
gctacgctaaaagaa

SEQ ID NO: 108004 - DNA, 15 bp, Homo sapiens
agctacgctaaaaga

SEQ ID NO: 108005 - DNA, 15 bp, Homo sapiens
aagctacgctaaaag

SEQ ID NO: 108006 - DNA, 15 bp, Homo sapiens
aaagctacgctaaaa

SEQ ID NO: 108007 - DNA, 15 bp, Homo sapiens
taaagctacgctaaa

SEQ ID NO: 108008 - DNA, 15 bp, Homo sapiens
gtaaagctacgctaa

SEQ ID NO: 108009 - DNA, 15 bp, Homo sapiens
agtaaagctacgcta

SEQ ID NO: 108010 - DNA, 15 bp, Homo sapiens
aagtaaagctacgct

SEQ ID NO: 108011 - DNA, 15 bp, Homo sapiens
aaagtaaagctacgc

SEQ ID NO: 108012 - DNA, 15 bp, Homo sapiens
aaaagtaaagctacg

SEQ ID NO: 108013 - DNA, 15 bp, Homo sapiens
taaaagtaaagctac

SEQ ID NO: 108014 - DNA, 15 bp, Homo sapiens
ataaaagtaaagcta

SEQ ID NO: 108015 - DNA, 15 bp, Homo sapiens
aataaaagtaaagct

SEQ ID NO: 108016 - DNA, 15 bp, Homo sapiens
aaataaaagtaaagc

SEQ ID NO: 108017 - DNA, 15 bp, Homo sapiens
taaataaaagtaaag

SEQ ID NO: 108018 - DNA, 15 bp, Homo sapiens
ttaaataaaagtaaa

SEQ ID NO: 108019 - DNA, 15 bp, Homo sapiens
cttaaataaaagtaa

SEQ ID NO: 108020 - DNA, 15 bp, Homo sapiens
gcttaaataaaagta

SEQ ID NO: 108021 - DNA, 15 bp, Homo sapiens
tgcttaaataaaagt

SEQ ID NO: 108022 - DNA, 15 bp, Homo sapiens
atgcttaaataaaag

SEQ ID NO: 108023 - DNA, 15 bp, Homo sapiens
aatgcttaaataaaa

SEQ ID NO: 108024 - DNA, 15 bp, Homo sapiens
taatgcttaaataaa

SEQ ID NO: 108025 - DNA, 15 bp, Homo sapiens
ataatgcttaaataa

SEQ ID NO: 108026 - DNA, 15 bp, Homo sapiens
aataatgcttaaata

SEQ ID NO: 108027 - DNA, 15 bp, Homo sapiens
caataatgcttaaat

SEQ ID NO: 108028 - DNA, 15 bp, Homo sapiens
tcaataatgcttaaa

SEQ ID NO: 108029 - DNA, 15 bp, Homo sapiens
ttcaataatgcttaa

SEQ ID NO: 108030 - DNA, 15 bp, Homo sapiens
cttcaataatgctta

SEQ ID NO: 108031 - DNA, 15 bp, Homo sapiens
tcttcaataatgctt

SEQ ID NO: 108032 - DNA, 15 bp, Homo sapiens
ttcttcaataatgct

SEQ ID NO: 108033 - DNA, 15 bp, Homo sapiens
cttcttcaataatgc

SEQ ID NO: 108034 - DNA, 15 bp, Homo sapiens
gcttcttcaataatg

SEQ ID NO: 108035 - DNA, 15 bp, Homo sapiens
agcttcttcaataat

SEQ ID NO: 108036 - DNA, 15 bp, Homo sapiens
aagcttcttcaataa

SEQ ID NO: 108037 - DNA, 15 bp, Homo sapiens
caagcttcttcaata

SEQ ID NO: 108038 - DNA, 15 bp, Homo sapiens
ccaagcttcttcaat

SEQ ID NO: 108039 - DNA, 15 bp, Homo sapiens
accaagcttcttcaa

SEQ ID NO: 108040 - DNA, 15 bp, Homo sapiens
taccaagcttcttca

SEQ ID NO: 108041 - DNA, 15 bp, Homo sapiens
ataccaagcttcttc

SEQ ID NO: 108042 - DNA, 15 bp, Homo sapiens
gataccaagcttctt

SEQ ID NO: 108043 - DNA, 15 bp, Homo sapiens
agataccaagcttct

SEQ ID NO: 108044 - DNA, 15 bp, Homo sapiens
gagataccaagcttc

SEQ ID NO: 108045 - DNA, 15 bp, Homo sapiens
agagataccaagctt

SEQ ID NO: 108046 - DNA, 15 bp, Homo sapiens
cagagataccaagct

SEQ ID NO: 108047 - DNA, 15 bp, Homo sapiens
acagagataccaagc

SEQ ID NO: 108048 - DNA, 15 bp, Homo sapiens
aacagagataccaag

SEQ ID NO: 108049 - DNA, 15 bp, Homo sapiens
aaacagagataccaa

SEQ ID NO: 108050 - DNA, 15 bp, Homo sapiens
taaacagagatacca

SEQ ID NO: 108051 - DNA, 15 bp, Homo sapiens
ttaaacagagatacc

SEQ ID NO: 108052 - DNA, 15 bp, Homo sapiens
cttaaacagagatac

SEQ ID NO: 108053 - DNA, 15 bp, Homo sapiens
acttaaacagagata

SEQ ID NO: 108054 - DNA, 15 bp, Homo sapiens
aacttaaacagagat

SEQ ID NO: 108055 - DNA, 15 bp, Homo sapiens
caacttaaacagaga

SEQ ID NO: 108056 - DNA, 15 bp, Homo sapiens
gcaacttaaacagag

SEQ ID NO: 108057 - DNA, 15 bp, Homo sapiens
agcaacttaaacaga

SEQ ID NO: 108058 - DNA, 15 bp, Homo sapiens
aagcaacttaaacag

SEQ ID NO: 108059 - DNA, 15 bp, Homo sapiens
gaagcaacttaaaca

SEQ ID NO: 108060 - DNA, 15 bp, Homo sapiens
agaagcaacttaaac

SEQ ID NO: 108061 - DNA, 15 bp, Homo sapiens
cagaagcaacttaaa

SEQ ID NO: 108062 - DNA, 15 bp, Homo sapiens
acagaagcaacttaa

SEQ ID NO: 108063 - DNA, 15 bp, Homo sapiens
tacagaagcaactta

SEQ ID NO: 108064 - DNA, 15 bp, Homo sapiens
atacagaagcaactt

SEQ ID NO: 108065 - DNA, 15 bp, Homo sapiens
gatacagaagcaact

SEQ ID NO: 108066 - DNA, 15 bp, Homo sapiens
tgatacagaagcaac

SEQ ID NO: 108067 - DNA, 15 bp, Homo sapiens
ctgatacagaagcaa

SEQ ID NO: 108068 - DNA, 15 bp, Homo sapiens
actgatacagaagca

SEQ ID NO: 108069 - DNA, 15 bp, Homo sapiens
cactgatacagaagc

SEQ ID NO: 108070 - DNA, 15 bp, Homo sapiens
acactgatacagaag

SEQ ID NO: 108071 - DNA, 15 bp, Homo sapiens
aacactgatacagaa

SEQ ID NO: 108072 - DNA, 15 bp, Homo sapiens
aaacactgatacaga

SEQ ID NO: 108073 - DNA, 15 bp, Homo sapiens
aaaacactgatacag

SEQ ID NO: 108074 - DNA, 15 bp, Homo sapiens
gaaaacactgataca

SEQ ID NO: 108075 - DNA, 15 bp, Homo sapiens
ggaaaacactgatac

SEQ ID NO: 108076 - DNA, 15 bp, Homo sapiens
tggaaaacactgata

SEQ ID NO: 108077 - DNA, 15 bp, Homo sapiens
ctggaaaacactgat

SEQ ID NO: 108078 - DNA, 15 bp, Homo sapiens
cctggaaaacactga

SEQ ID NO: 108079 - DNA, 15 bp, Homo sapiens
ccctggaaaacactg

SEQ ID NO: 108080 - DNA, 15 bp, Homo sapiens
gccctggaaaacact

SEQ ID NO: 108081 - DNA, 15 bp, Homo sapiens
ggccctggaaaacac

SEQ ID NO: 108082 - DNA, 15 bp, Homo sapiens
gggccctggaaaaca

SEQ ID NO: 108083 - DNA, 15 bp, Homo sapiens
agggccctggaaaac

SEQ ID NO: 108084 - DNA, 15 bp, Homo sapiens
cagggccctggaaaa

SEQ ID NO: 108085 - DNA, 15 bp, Homo sapiens
acagggccctggaaa

SEQ ID NO: 108086 - DNA, 15 bp, Homo sapiens
gacagggccctggaa

SEQ ID NO: 108087 - DNA, 15 bp, Homo sapiens
agacagggccctgga

SEQ ID NO: 108088 - DNA, 15 bp, Homo sapiens
gagacagggccctgg

SEQ ID NO: 108089 - DNA, 15 bp, Homo sapiens
tgagacagggccctg

SEQ ID NO: 108090 - DNA, 15 bp, Homo sapiens
ctgagacagggccct

SEQ ID NO: 108091 - DNA, 15 bp, Homo sapiens
gctgagacagggccc

SEQ ID NO: 108092 - DNA, 15 bp, Homo sapiens
agctgagacagggcc

SEQ ID NO: 108093 - DNA, 15 bp, Homo sapiens
aagctgagacagggc

SEQ ID NO: 108094 - DNA, 15 bp, Homo sapiens
gaagctgagacaggg

SEQ ID NO: 108095 - DNA, 15 bp, Homo sapiens
ggaagctgagacagg

SEQ ID NO: 108096 - DNA, 15 bp, Homo sapiens
tggaagctgagacag

SEQ ID NO: 108097 - DNA, 15 bp, Homo sapiens
atggaagctgagaca

SEQ ID NO: 108098 - DNA, 15 bp, Homo sapiens
tatggaagctgagac

SEQ ID NO: 108099 - DNA, 15 bp, Homo sapiens
ctatggaagctgaga

SEQ ID NO: 108100 - DNA, 15 bp, Homo sapiens
actatggaagctgag

SEQ ID NO: 108101 - DNA, 15 bp, Homo sapiens
aactatggaagctga

SEQ ID NO: 108102 - DNA, 15 bp, Homo sapiens
aaactatggaagctg

SEQ ID NO: 108103 - DNA, 15 bp, Homo sapiens
aaaactatggaagct

SEQ ID NO: 108104 - DNA, 15 bp, Homo sapiens
gaaaactatggaagc

SEQ ID NO: 108105 - DNA, 15 bp, Homo sapiens
ggaaaactatggaag

SEQ ID NO: 108106 - DNA, 15 bp, Homo sapiens
aggaaaactatggaa

SEQ ID NO: 108107 - DNA, 15 bp, Homo sapiens
aaggaaaactatgga

SEQ ID NO: 108108 - DNA, 15 bp, Homo sapiens
taaggaaaactatgg

SEQ ID NO: 108109 - DNA, 15 bp, Homo sapiens
ttaaggaaaactatg

SEQ ID NO: 108110 - DNA, 15 bp, Homo sapiens
cttaaggaaaactat

SEQ ID NO: 108111 - DNA, 15 bp, Homo sapiens
tcttaaggaaaacta

SEQ ID NO: 108112 - DNA, 15 bp, Homo sapiens
ctcttaaggaaaact

SEQ ID NO: 108113 - DNA, 15 bp, Homo sapiens
gctcttaaggaaaac

SEQ ID NO: 108114 - DNA, 15 bp, Homo sapiens
tgctcttaaggaaaa

SEQ ID NO: 108115 - DNA, 15 bp, Homo sapiens
ctgctcttaaggaaa

SEQ ID NO: 108116 - DNA, 15 bp, Homo sapiens
gctgctcttaaggaa

SEQ ID NO: 108117 - DNA, 15 bp, Homo sapiens
agctgctcttaagga

SEQ ID NO: 108118 - DNA, 15 bp, Homo sapiens
tagctgctcttaagg

SEQ ID NO: 108119 - DNA, 15 bp, Homo sapiens
ttagctgctcttaag

SEQ ID NO: 108120 - DNA, 15 bp, Homo sapiens
attagctgctcttaa

SEQ ID NO: 108121 - DNA, 15 bp, Homo sapiens
aattagctgctctta

SEQ ID NO: 108122 - DNA, 15 bp, Homo sapiens
taattagctgctctt

SEQ ID NO: 108123 - DNA, 15 bp, Homo sapiens
ttaattagctgctct

SEQ ID NO: 108124 - DNA, 15 bp, Homo sapiens
attaattagctgctc

SEQ ID NO: 108125 - DNA, 15 bp, Homo sapiens
cattaattagctgct

SEQ ID NO: 108126 - DNA, 15 bp, Homo sapiens
gcattaattagctgc

SEQ ID NO: 108127 - DNA, 15 bp, Homo sapiens
agcattaattagctg

SEQ ID NO: 108128 - DNA, 15 bp, Homo sapiens
aagcattaattagct

SEQ ID NO: 108129 - DNA, 15 bp, Homo sapiens
gaagcattaattagc

SEQ ID NO: 108130 - DNA, 15 bp, Homo sapiens
tgaagcattaattag

SEQ ID NO: 108131 - DNA, 15 bp, Homo sapiens
gtgaagcattaatta

SEQ ID NO: 108132 - DNA, 15 bp, Homo sapiens
agtgaagcattaatt

SEQ ID NO: 108133 - DNA, 15 bp, Homo sapiens
gagtgaagcattaat

SEQ ID NO: 108134 - DNA, 15 bp, Homo sapiens
ggagtgaagcattaa

SEQ ID NO: 108135 - DNA, 15 bp, Homo sapiens
tggagtgaagcatta

SEQ ID NO: 108136 - DNA, 15 bp, Homo sapiens
atggagtgaagcatt

SEQ ID NO: 108137 - DNA, 15 bp, Homo sapiens
tatggagtgaagcat

SEQ ID NO: 108138 - DNA, 15 bp, Homo sapiens
atatggagtgaagca

SEQ ID NO: 108139 - DNA, 15 bp, Homo sapiens
catatggagtgaagc

SEQ ID NO: 108140 - DNA, 15 bp, Homo sapiens
gcatatggagtgaag

SEQ ID NO: 108141 - DNA, 15 bp, Homo sapiens
agcatatggagtgaa

SEQ ID NO: 108142 - DNA, 15 bp, Homo sapiens
aagcatatggagtga

SEQ ID NO: 108143 - DNA, 15 bp, Homo sapiens
aaagcatatggagtg

SEQ ID NO: 108144 - DNA, 15 bp, Homo sapiens
taaagcatatggagt

SEQ ID NO: 108145 - DNA, 15 bp, Homo sapiens
ttaaagcatatggag

SEQ ID NO: 108146 - DNA, 15 bp, Homo sapiens
attaaagcatatgga

SEQ ID NO: 108147 - DNA, 15 bp, Homo sapiens
aattaaagcatatgg

SEQ ID NO: 108148 - DNA, 15 bp, Homo sapiens
aaattaaagcatatg

SEQ ID NO: 108149 - DNA, 15 bp, Homo sapiens
caaattaaagcatat

SEQ ID NO: 108150 - DNA, 15 bp, Homo sapiens
tcaaattaaagcata

SEQ ID NO: 108151 - DNA, 15 bp, Homo sapiens
atcaaattaaagcat

SEQ ID NO: 108152 - DNA, 15 bp, Homo sapiens
tatcaaattaaagca

SEQ ID NO: 108153 - DNA, 15 bp, Homo sapiens
atatcaaattaaagc

SEQ ID NO: 108154 - DNA, 15 bp, Homo sapiens
aatatcaaattaaag

SEQ ID NO: 108155 - DNA, 15 bp, Homo sapiens
aaatatcaaattaaa

SEQ ID NO: 108156 - DNA, 15 bp, Homo sapiens
aaaatatcaaattaa

SEQ ID NO: 108157 - DNA, 15 bp, Homo sapiens
caaaatatcaaatta

SEQ ID NO: 108158 - DNA, 15 bp, Homo sapiens
ccaaaatatcaaatt

SEQ ID NO: 108159 - DNA, 15 bp, Homo sapiens
cccaaaatatcaaat

SEQ ID NO: 108160 - DNA, 15 bp, Homo sapiens
tcccaaaatatcaaa

SEQ ID NO: 108161 - DNA, 15 bp, Homo sapiens
ttcccaaaatatcaa

SEQ ID NO: 108162 - DNA, 15 bp, Homo sapiens
cttcccaaaatatca

SEQ ID NO: 108163 - DNA, 15 bp, Homo sapiens
acttcccaaaatatc

SEQ ID NO: 108164 - DNA, 15 bp, Homo sapiens
aacttcccaaaatat

SEQ ID NO: 108165 - DNA, 15 bp, Homo sapiens
aaacttcccaaaata

SEQ ID NO: 108166 - DNA, 15 bp, Homo sapiens
gaaacttcccaaaat

SEQ ID NO: 108167 - DNA, 15 bp, Homo sapiens
tgaaacttcccaaaa

SEQ ID NO: 108168 - DNA, 15 bp, Homo sapiens
atgaaacttcccaaa

SEQ ID NO: 108169 - DNA, 15 bp, Homo sapiens
aatgaaacttcccaa

SEQ ID NO: 108170 - DNA, 15 bp, Homo sapiens
aaatgaaacttccca

SEQ ID NO: 108171 - DNA, 15 bp, Homo sapiens
aaaatgaaacttccc

SEQ ID NO: 108172 - DNA, 15 bp, Homo sapiens
aaaaatgaaacttcc

SEQ ID NO: 108173 - DNA, 15 bp, Homo sapiens
aaaaaatgaaacttc

SEQ ID NO: 108174 - DNA, 15 bp, Homo sapiens
taaaaaatgaaactt

SEQ ID NO: 108175 - DNA, 15 bp, Homo sapiens
ttaaaaaatgaaact

SEQ ID NO: 108176 - DNA, 15 bp, Homo sapiens
tttaaaaaatgaaac

SEQ ID NO: 108177 - DNA, 15 bp, Homo sapiens
ttttaaaaaatgaaa

SEQ ID NO: 108178 - DNA, 15 bp, Homo sapiens
attttaaaaaatgaa

SEQ ID NO: 108179 - DNA, 15 bp, Homo sapiens
tattttaaaaaatga

SEQ ID NO: 108180 - DNA, 15 bp, Homo sapiens
ttattttaaaaaatg

SEQ ID NO: 108181 - DNA, 15 bp, Homo sapiens
attattttaaaaaat

SEQ ID NO: 108182 - DNA, 15 bp, Homo sapiens
gattattttaaaaaa

SEQ ID NO: 108183 - DNA, 15 bp, Homo sapiens
agattattttaaaaa

SEQ ID NO: 108184 - DNA, 15 bp, Homo sapiens
aagattattttaaaa

SEQ ID NO: 108185 - DNA, 15 bp, Homo sapiens
aaagattattttaaa

SEQ ID NO: 108186 - DNA, 15 bp, Homo sapiens
aaaagattattttaa

SEQ ID NO: 108187 - DNA, 15 bp, Homo sapiens
aaaaagattatttta

SEQ ID NO: 108188 - DNA, 15 bp, Homo sapiens
taaaaagattatttt

SEQ ID NO: 108189 - DNA, 15 bp, Homo sapiens
ataaaaagattattt

SEQ ID NO: 108190 - DNA, 15 bp, Homo sapiens
tataaaaagattatt

SEQ ID NO: 108191 - DNA, 15 bp, Homo sapiens
atataaaaagattat

SEQ ID NO: 108192 - DNA, 15 bp, Homo sapiens
gatataaaaagatta

SEQ ID NO: 108193 - DNA, 15 bp, Homo sapiens
tgatataaaaagatt

SEQ ID NO: 108194 - DNA, 15 bp, Homo sapiens
atgatataaaaagat

SEQ ID NO: 108195 - DNA, 15 bp, Homo sapiens
tatgatataaaaaga

SEQ ID NO: 108196 - DNA, 15 bp, Homo sapiens
ctatgatataaaaag

SEQ ID NO: 108197 - DNA, 15 bp, Homo sapiens
cctatgatataaaaa

SEQ ID NO: 108198 - DNA, 15 bp, Homo sapiens
gcctatgatataaaa

SEQ ID NO: 108199 - DNA, 15 bp, Homo sapiens
ggcctatgatataaa

SEQ ID NO: 108200 - DNA, 15 bp, Homo sapiens
aggcctatgatataa

SEQ ID NO: 108201 - DNA, 15 bp, Homo sapiens
aaggcctatgatata

SEQ ID NO: 108202 - DNA, 15 bp, Homo sapiens
aaaggcctatgatat

SEQ ID NO: 108203 - DNA, 15 bp, Homo sapiens
caaaggcctatgata

SEQ ID NO: 108204 - DNA, 15 bp, Homo sapiens
tcaaaggcctatgat

SEQ ID NO: 108205 - DNA, 15 bp, Homo sapiens
ttcaaaggcctatga

SEQ ID NO: 108206 - DNA, 15 bp, Homo sapiens
cttcaaaggcctatg

SEQ ID NO: 108207 - DNA, 15 bp, Homo sapiens
tcttcaaaggcctat

SEQ ID NO: 108208 - DNA, 15 bp, Homo sapiens
gtcttcaaaggccta

SEQ ID NO: 108209 - DNA, 15 bp, Homo sapiens
tgtcttcaaaggcct

SEQ ID NO: 108210 - DNA, 15 bp, Homo sapiens
atgtcttcaaaggcc

SEQ ID NO: 108211 - DNA, 15 bp, Homo sapiens
tatgtcttcaaaggc

SEQ ID NO: 108212 - DNA, 15 bp, Homo sapiens
atatgtcttcaaagg

SEQ ID NO: 108213 - DNA, 15 bp, Homo sapiens
aatatgtcttcaaag

SEQ ID NO: 108214 - DNA, 15 bp, Homo sapiens
aaatatgtcttcaaa

SEQ ID NO: 108215 - DNA, 15 bp, Homo sapiens
caaatatgtcttcaa

SEQ ID NO: 108216 - DNA, 15 bp, Homo sapiens
acaaatatgtcttca

SEQ ID NO: 108217 - DNA, 15 bp, Homo sapiens
aacaaatatgtcttc

SEQ ID NO: 108218 - DNA, 15 bp, Homo sapiens
aaacaaatatgtctt

SEQ ID NO: 108219 - DNA, 15 bp, Homo sapiens
taaacaaatatgtct

SEQ ID NO: 108220 - DNA, 15 bp, Homo sapiens
gtaaacaaatatgtc

SEQ ID NO: 108221 - DNA, 15 bp, Homo sapiens
tgtaaacaaatatgt

SEQ ID NO: 108222 - DNA, 15 bp, Homo sapiens
ttgtaaacaaatatg

SEQ ID NO: 108223 - DNA, 15 bp, Homo sapiens
tttgtaaacaaatat

SEQ ID NO: 108224 - DNA, 15 bp, Homo sapiens
ctttgtaaacaaata

SEQ ID NO: 108225 - DNA, 15 bp, Homo sapiens
tctttgtaaacaaat

SEQ ID NO: 108226 - DNA, 15 bp, Homo sapiens
gtctttgtaaacaaa

SEQ ID NO: 108227 - DNA, 15 bp, Homo sapiens
tgtctttgtaaacaa

SEQ ID NO: 108228 - DNA, 15 bp, Homo sapiens
atgtctttgtaaaca

SEQ ID NO: 108229 - DNA, 15 bp, Homo sapiens
gatgtctttgtaaac

SEQ ID NO: 108230 - DNA, 15 bp, Homo sapiens
agatgtctttgtaaa

SEQ ID NO: 108231 - DNA, 15 bp, Homo sapiens
cagatgtctttgtaa

SEQ ID NO: 108232 - DNA, 15 bp, Homo sapiens
gcagatgtctttgta

SEQ ID NO: 108233 - DNA, 15 bp, Homo sapiens
tgcagatgtctttgt

SEQ ID NO: 108234 - DNA, 15 bp, Homo sapiens
atgcagatgtctttg

SEQ ID NO: 108235 - DNA, 15 bp, Homo sapiens
aatgcagatgtcttt

SEQ ID NO: 108236 - DNA, 15 bp, Homo sapiens
caatgcagatgtctt

SEQ ID NO: 108237 - DNA, 15 bp, Homo sapiens
tcaatgcagatgtct

SEQ ID NO: 108238 - DNA, 15 bp, Homo sapiens
ttcaatgcagatgtc

SEQ ID NO: 108239 - DNA, 15 bp, Homo sapiens
gttcaatgcagatgt

SEQ ID NO: 108240 - DNA, 15 bp, Homo sapiens
ggttcaatgcagatg

SEQ ID NO: 108241 - DNA, 15 bp, Homo sapiens
tggttcaatgcagat

SEQ ID NO: 108242 - DNA, 15 bp, Homo sapiens
atggttcaatgcaga

SEQ ID NO: 108243 - DNA, 15 bp, Homo sapiens
aatggttcaatgcag

SEQ ID NO: 108244 - DNA, 15 bp, Homo sapiens
aaatggttcaatgca

SEQ ID NO: 108245 - DNA, 15 bp, Homo sapiens
caaatggttcaatgc

SEQ ID NO: 108246 - DNA, 15 bp, Homo sapiens
acaaatggttcaatg

SEQ ID NO: 108247 - DNA, 15 bp, Homo sapiens
aacaaatggttcaat

SEQ ID NO: 108248 - DNA, 15 bp, Homo sapiens
aaacaaatggttcaa

SEQ ID NO: 108249 - DNA, 15 bp, Homo sapiens
aaaacaaatggttca

SEQ ID NO: 108250 - DNA, 15 bp, Homo sapiens
aaaaacaaatggttc

SEQ ID NO: 108251 - DNA, 15 bp, Homo sapiens
taaaaacaaatggtt

SEQ ID NO: 108252 - DNA, 15 bp, Homo sapiens
ttaaaaacaaatggt

SEQ ID NO: 108253 - DNA, 15 bp, Homo sapiens
tttaaaaacaaatgg

SEQ ID NO: 108254 - DNA, 15 bp, Homo sapiens
ttttaaaaacaaatg

SEQ ID NO: 108255 - DNA, 15 bp, Homo sapiens
tttttaaaaacaaat

SEQ ID NO: 108256 - DNA, 15 bp, Homo sapiens
gtttttaaaaacaaa

SEQ ID NO: 108257 - DNA, 15 bp, Homo sapiens
tgtttttaaaaacaa

SEQ ID NO: 108258 - DNA, 15 bp, Homo sapiens
atgtttttaaaaaca

SEQ ID NO: 108259 - DNA, 15 bp, Homo sapiens
catgtttttaaaaac

SEQ ID NO: 108260 - DNA, 15 bp, Homo sapiens
acatgtttttaaaaa

SEQ ID NO: 108261 - DNA, 15 bp, Homo sapiens
tacatgtttttaaaa

SEQ ID NO: 108262 - DNA, 15 bp, Homo sapiens
atacatgtttttaaa

SEQ ID NO: 108263 - DNA, 15 bp, Homo sapiens
gatacatgtttttaa

SEQ ID NO: 108264 - DNA, 15 bp, Homo sapiens
cgatacatgttttta

SEQ ID NO: 108265 - DNA, 15 bp, Homo sapiens
ccgatacatgttttt

SEQ ID NO: 108266 - DNA, 15 bp, Homo sapiens
cccgatacatgtttt

SEQ ID NO: 108267 - DNA, 15 bp, Homo sapiens
gcccgatacatgttt

SEQ ID NO: 108268 - DNA, 15 bp, Homo sapiens
tgcccgatacatgtt

SEQ ID NO: 108269 - DNA, 15 bp, Homo sapiens
atgcccgatacatgt

SEQ ID NO: 108270 - DNA, 15 bp, Homo sapiens
catgcccgatacatg

SEQ ID NO: 108271 - DNA, 15 bp, Homo sapiens
acatgcccgatacat

SEQ ID NO: 108272 - DNA, 15 bp, Homo sapiens
gacatgcccgataca

SEQ ID NO: 108273 - DNA, 15 bp, Homo sapiens
ggacatgcccgatac

SEQ ID NO: 108274 - DNA, 15 bp, Homo sapiens
aggacatgcccgata

SEQ ID NO: 108275 - DNA, 15 bp, Homo sapiens
taggacatgcccgat

SEQ ID NO: 108276 - DNA, 15 bp, Homo sapiens
ataggacatgcccga

SEQ ID NO: 108277 - DNA, 15 bp, Homo sapiens
tataggacatgcccg

SEQ ID NO: 108278 - DNA, 15 bp, Homo sapiens
atataggacatgccc

SEQ ID NO: 108279 - DNA, 15 bp, Homo sapiens
tatataggacatgcc

SEQ ID NO: 108280 - DNA, 15 bp, Homo sapiens
gtatataggacatgc

SEQ ID NO: 108281 - DNA, 15 bp, Homo sapiens
ggtatataggacatg

SEQ ID NO: 108282 - DNA, 15 bp, Homo sapiens
tggtatataggacat

SEQ ID NO: 108283 - DNA, 15 bp, Homo sapiens
ctggtatataggaca

SEQ ID NO: 108284 - DNA, 15 bp, Homo sapiens
tctggtatataggac

SEQ ID NO: 108285 - DNA, 15 bp, Homo sapiens
ttctggtatatagga

SEQ ID NO: 108286 - DNA, 15 bp, Homo sapiens
tttctggtatatagg

SEQ ID NO: 108287 - DNA, 15 bp, Homo sapiens
gtttctggtatatag

SEQ ID NO: 108288 - DNA, 15 bp, Homo sapiens
agtttctggtatata

SEQ ID NO: 108289 - DNA, 15 bp, Homo sapiens
tagtttctggtatat

SEQ ID NO: 108290 - DNA, 15 bp, Homo sapiens
atagtttctggtata

SEQ ID NO: 108291 - DNA, 15 bp, Homo sapiens
catagtttctggtat

SEQ ID NO: 108292 - DNA, 15 bp, Homo sapiens
gcatagtttctggta

SEQ ID NO: 108293 - DNA, 15 bp, Homo sapiens
ggcatagtttctggt

SEQ ID NO: 108294 - DNA, 15 bp, Homo sapiens
tggcatagtttctgg

SEQ ID NO: 108295 - DNA, 15 bp, Homo sapiens
atggcatagtttctg

SEQ ID NO: 108296 - DNA, 15 bp, Homo sapiens
aatggcatagtttct

SEQ ID NO: 108297 - DNA, 15 bp, Homo sapiens
aaatggcatagtttc

SEQ ID NO: 108298 - DNA, 15 bp, Homo sapiens
taaatggcatagttt

SEQ ID NO: 108299 - DNA, 15 bp, Homo sapiens
gtaaatggcatagtt

SEQ ID NO: 108300 - DNA, 15 bp, Homo sapiens
agtaaatggcatagt

SEQ ID NO: 108301 - DNA, 15 bp, Homo sapiens
cagtaaatggcatag

SEQ ID NO: 108302 - DNA, 15 bp, Homo sapiens
tcagtaaatggcata

SEQ ID NO: 108303 - DNA, 15 bp, Homo sapiens
ctcagtaaatggcat

SEQ ID NO: 108304 - DNA, 15 bp, Homo sapiens
cctcagtaaatggca

SEQ ID NO: 108305 - DNA, 15 bp, Homo sapiens
tcctcagtaaatggc

SEQ ID NO: 108306 - DNA, 15 bp, Homo sapiens
gtcctcagtaaatgg

SEQ ID NO: 108307 - DNA, 15 bp, Homo sapiens
tgtcctcagtaaatg

SEQ ID NO: 108308 - DNA, 15 bp, Homo sapiens
gtgtcctcagtaaat

SEQ ID NO: 108309 - DNA, 15 bp, Homo sapiens
ggtgtcctcagtaaa

SEQ ID NO: 108310 - DNA, 15 bp, Homo sapiens
cggtgtcctcagtaa

SEQ ID NO: 108311 - DNA, 15 bp, Homo sapiens
tcggtgtcctcagta

SEQ ID NO: 108312 - DNA, 15 bp, Homo sapiens
ttcggtgtcctcagt

SEQ ID NO: 108313 - DNA, 15 bp, Homo sapiens
cttcggtgtcctcag

SEQ ID NO: 108314 - DNA, 15 bp, Homo sapiens
acttcggtgtcctca

SEQ ID NO: 108315 - DNA, 15 bp, Homo sapiens
aacttcggtgtcctc

SEQ ID NO: 108316 - DNA, 15 bp, Homo sapiens
taacttcggtgtcct

SEQ ID NO: 108317 - DNA, 15 bp, Homo sapiens
ctaacttcggtgtcc

SEQ ID NO: 108318 - DNA, 15 bp, Homo sapiens
tctaacttcggtgtc

SEQ ID NO: 108319 - DNA, 15 bp, Homo sapiens
ctctaacttcggtgt

SEQ ID NO: 108320 - DNA, 15 bp, Homo sapiens
tctctaacttcggtg

SEQ ID NO: 108321 - DNA, 15 bp, Homo sapiens
ttctctaacttcggt

SEQ ID NO: 108322 - DNA, 15 bp, Homo sapiens
attctctaacttcgg

SEQ ID NO: 108323 - DNA, 15 bp, Homo sapiens
cattctctaacttcg

SEQ ID NO: 108324 - DNA, 15 bp, Homo sapiens
ccattctctaacttc

SEQ ID NO: 108325 - DNA, 15 bp, Homo sapiens
accattctctaactt

SEQ ID NO: 108326 - DNA, 15 bp, Homo sapiens
gaccattctctaact

SEQ ID NO: 108327 - DNA, 15 bp, Homo sapiens
agaccattctctaac

SEQ ID NO: 108328 - DNA, 15 bp, Homo sapiens
aagaccattctctaa

SEQ ID NO: 108329 - DNA, 15 bp, Homo sapiens
taagaccattctcta

SEQ ID NO: 108330 - DNA, 15 bp, Homo sapiens
ttaagaccattctct

SEQ ID NO: 108331 - DNA, 15 bp, Homo sapiens
attaagaccattctc

SEQ ID NO: 108332 - DNA, 15 bp, Homo sapiens
gattaagaccattct

SEQ ID NO: 108333 - DNA, 15 bp, Homo sapiens
ggattaagaccattc

SEQ ID NO: 108334 - DNA, 15 bp, Homo sapiens
cggattaagaccatt

SEQ ID NO: 108335 - DNA, 15 bp, Homo sapiens
tcggattaagaccat

SEQ ID NO: 108336 - DNA, 15 bp, Homo sapiens
ttcggattaagacca

SEQ ID NO: 108337 - DNA, 15 bp, Homo sapiens
gttcggattaagacc

SEQ ID NO: 108338 - DNA, 15 bp, Homo sapiens
agttcggattaagac

SEQ ID NO: 108339 - DNA, 15 bp, Homo sapiens
tagttcggattaaga

SEQ ID NO: 108340 - DNA, 15 bp, Homo sapiens
ctagttcggattaag

SEQ ID NO: 108341 - DNA, 15 bp, Homo sapiens
actagttcggattaa

SEQ ID NO: 108342 - DNA, 15 bp, Homo sapiens
aactagttcggatta

SEQ ID NO: 108343 - DNA, 15 bp, Homo sapiens
taactagttcggatt

SEQ ID NO: 108344 - DNA, 15 bp, Homo sapiens
ataactagttcggat

SEQ ID NO: 108345 - DNA, 15 bp, Homo sapiens
aataactagttcgga

SEQ ID NO: 108346 - DNA, 15 bp, Homo sapiens
caataactagttcgg

SEQ ID NO: 108347 - DNA, 15 bp, Homo sapiens
acaataactagttcg

SEQ ID NO: 108348 - DNA, 15 bp, Homo sapiens
gacaataactagttc

SEQ ID NO: 108349 - DNA, 15 bp, Homo sapiens
agacaataactagtt

SEQ ID NO: 108350 - DNA, 15 bp, Homo sapiens
gagacaataactagt

SEQ ID NO: 108351 - DNA, 15 bp, Homo sapiens
tgagacaataactag

SEQ ID NO: 108352 - DNA, 15 bp, Homo sapiens
gtgagacaataacta

SEQ ID NO: 108353 - DNA, 15 bp, Homo sapiens
agtgagacaataact

SEQ ID NO: 108354 - DNA, 15 bp, Homo sapiens
tagtgagacaataac

SEQ ID NO: 108355 - DNA, 15 bp, Homo sapiens
atagtgagacaataa

SEQ ID NO: 108356 - DNA, 15 bp, Homo sapiens
gatagtgagacaata

SEQ ID NO: 108357 - DNA, 15 bp, Homo sapiens
ggatagtgagacaat

SEQ ID NO: 108358 - DNA, 15 bp, Homo sapiens
tggatagtgagacaa

SEQ ID NO: 108359 - DNA, 15 bp, Homo sapiens
ttggatagtgagaca

SEQ ID NO: 108360 - DNA, 15 bp, Homo sapiens
attggatagtgagac

SEQ ID NO: 108361 - DNA, 15 bp, Homo sapiens
tattggatagtgaga

SEQ ID NO: 108362 - DNA, 15 bp, Homo sapiens
atattggatagtgag

SEQ ID NO: 108363 - DNA, 15 bp, Homo sapiens
catattggatagtga

SEQ ID NO: 108364 - DNA, 15 bp, Homo sapiens
ccatattggatagtg

SEQ ID NO: 108365 - DNA, 15 bp, Homo sapiens
tccatattggatagt

SEQ ID NO: 108366 - DNA, 15 bp, Homo sapiens
atccatattggatag

SEQ ID NO: 108367 - DNA, 15 bp, Homo sapiens
tatccatattggata

SEQ ID NO: 108368 - DNA, 15 bp, Homo sapiens
atatccatattggat

SEQ ID NO: 108369 - DNA, 15 bp, Homo sapiens
gatatccatattgga

SEQ ID NO: 108370 - DNA, 15 bp, Homo sapiens
tgatatccatattgg

SEQ ID NO: 108371 - DNA, 15 bp, Homo sapiens
ttgatatccatattg

SEQ ID NO: 108372 - DNA, 15 bp, Homo sapiens
tttgatatccatatt

SEQ ID NO: 108373 - DNA, 15 bp, Homo sapiens
gtttgatatccatat

SEQ ID NO: 108374 - DNA, 15 bp, Homo sapiens
tgtttgatatccata

SEQ ID NO: 108375 - DNA, 15 bp, Homo sapiens
atgtttgatatccat

SEQ ID NO: 108376 - DNA, 15 bp, Homo sapiens
aatgtttgatatcca

SEQ ID NO: 108377 - DNA, 15 bp, Homo sapiens
gaatgtttgatatcc

SEQ ID NO: 108378 - DNA, 15 bp, Homo sapiens
tgaatgtttgatatc

SEQ ID NO: 108379 - DNA, 15 bp, Homo sapiens
ctgaatgtttgatat

SEQ ID NO: 108380 - DNA, 15 bp, Homo sapiens
gctgaatgtttgata

SEQ ID NO: 108381 - DNA, 15 bp, Homo sapiens
cgctgaatgtttgat

SEQ ID NO: 108382 - DNA, 15 bp, Homo sapiens
acgctgaatgtttga

SEQ ID NO: 108383 - DNA, 15 bp, Homo sapiens
gacgctgaatgtttg

SEQ ID NO: 108384 - DNA, 15 bp, Homo sapiens
tgacgctgaatgttt

SEQ ID NO: 108385 - DNA, 15 bp, Homo sapiens
atgacgctgaatgtt

SEQ ID NO: 108386 - DNA, 15 bp, Homo sapiens
catgacgctgaatgt

SEQ ID NO: 108387 - DNA, 15 bp, Homo sapiens
tcatgacgctgaatg

SEQ ID NO: 108388 - DNA, 15 bp, Homo sapiens
ctcatgacgctgaat

SEQ ID NO: 108389 - DNA, 15 bp, Homo sapiens
cctcatgacgctgaa

SEQ ID NO: 108390 - DNA, 15 bp, Homo sapiens
tcctcatgacgctga

SEQ ID NO: 108391 - DNA, 15 bp, Homo sapiens
atcctcatgacgctg

SEQ ID NO: 108392 - DNA, 15 bp, Homo sapiens
aatcctcatgacgct

SEQ ID NO: 108393 - DNA, 15 bp, Homo sapiens
aaatcctcatgacgc

SEQ ID NO: 108394 - DNA, 15 bp, Homo sapiens
taaatcctcatgacg

SEQ ID NO: 108395 - DNA, 15 bp, Homo sapiens
gtaaatcctcatgac

SEQ ID NO: 108396 - DNA, 15 bp, Homo sapiens
agtaaatcctcatga

SEQ ID NO: 108397 - DNA, 15 bp, Homo sapiens
tagtaaatcctcatg

SEQ ID NO: 108398 - DNA, 15 bp, Homo sapiens
gtagtaaatcctcat

SEQ ID NO: 108399 - DNA, 15 bp, Homo sapiens
agtagtaaatcctca

SEQ ID NO: 108400 - DNA, 15 bp, Homo sapiens
cagtagtaaatcctc

SEQ ID NO: 108401 - DNA, 15 bp, Homo sapiens
acagtagtaaatcct

SEQ ID NO: 108402 - DNA, 15 bp, Homo sapiens
cacagtagtaaatcc

SEQ ID NO: 108403 - DNA, 15 bp, Homo sapiens
acacagtagtaaatc

SEQ ID NO: 108404 - DNA, 15 bp, Homo sapiens
aacacagtagtaaat

SEQ ID NO: 108405 - DNA, 15 bp, Homo sapiens
aaacacagtagtaaa

SEQ ID NO: 108406 - DNA, 15 bp, Homo sapiens
aaaacacagtagtaa

SEQ ID NO: 108407 - DNA, 15 bp, Homo sapiens
gaaaacacagtagta

SEQ ID NO: 108408 - DNA, 15 bp, Homo sapiens
agaaaacacagtagt

SEQ ID NO: 108409 - DNA, 15 bp, Homo sapiens
gagaaaacacagtag

SEQ ID NO: 108410 - DNA, 15 bp, Homo sapiens
ggagaaaacacagta

SEQ ID NO: 108411 - DNA, 15 bp, Homo sapiens
gggagaaaacacagt

SEQ ID NO: 108412 - DNA, 15 bp, Homo sapiens
tgggagaaaacacag

SEQ ID NO: 108413 - DNA, 15 bp, Homo sapiens
ttgggagaaaacaca

SEQ ID NO: 108414 - DNA, 15 bp, Homo sapiens
cttgggagaaaacac

SEQ ID NO: 108415 - DNA, 15 bp, Homo sapiens
tcttgggagaaaaca

SEQ ID NO: 108416 - DNA, 15 bp, Homo sapiens
ctcttgggagaaaac

SEQ ID NO: 108417 - DNA, 15 bp, Homo sapiens
actcttgggagaaaa

SEQ ID NO: 108418 - DNA, 15 bp, Homo sapiens
aactcttgggagaaa

SEQ ID NO: 108419 - DNA, 15 bp, Homo sapiens
aaactcttgggagaa

SEQ ID NO: 108420 - DNA, 15 bp, Homo sapiens
aaaactcttgggaga

SEQ ID NO: 108421 - DNA, 15 bp, Homo sapiens
taaaactcttgggag

SEQ ID NO: 108422 - DNA, 15 bp, Homo sapiens
ataaaactcttggga

SEQ ID NO: 108423 - DNA, 15 bp, Homo sapiens
tataaaactcttggg

SEQ ID NO: 108424 - DNA, 15 bp, Homo sapiens
ttataaaactcttgg

SEQ ID NO: 108425 - DNA, 15 bp, Homo sapiens
attataaaactcttg

SEQ ID NO: 108426 - DNA, 15 bp, Homo sapiens
aattataaaactctt

SEQ ID NO: 108427 - DNA, 15 bp, Homo sapiens
aaattataaaactct

SEQ ID NO: 108428 - DNA, 15 bp, Homo sapiens
aaaattataaaactc

SEQ ID NO: 108429 - DNA, 15 bp, Homo sapiens
taaaattataaaact

SEQ ID NO: 108430 - DNA, 15 bp, Homo sapiens
ctaaaattataaaac

SEQ ID NO: 108431 - DNA, 15 bp, Homo sapiens
gctaaaattataaaa

SEQ ID NO: 108432 - DNA, 15 bp, Homo sapiens
agctaaaattataaa

SEQ ID NO: 108433 - DNA, 15 bp, Homo sapiens
gagctaaaattataa

SEQ ID NO: 108434 - DNA, 15 bp, Homo sapiens
agagctaaaattata

SEQ ID NO: 108435 - DNA, 15 bp, Homo sapiens
aagagctaaaattat

SEQ ID NO: 108436 - DNA, 15 bp, Homo sapiens
taagagctaaaatta

SEQ ID NO: 108437 - DNA, 15 bp, Homo sapiens
ataagagctaaaatt

SEQ ID NO: 108438 - DNA, 15 bp, Homo sapiens
tataagagctaaaat

SEQ ID NO: 108439 - DNA, 15 bp, Homo sapiens
atataagagctaaaa

SEQ ID NO: 108440 - DNA, 15 bp, Homo sapiens
aatataagagctaaa

SEQ ID NO: 108441 - DNA, 15 bp, Homo sapiens
aaatataagagctaa

SEQ ID NO: 108442 - DNA, 15 bp, Homo sapiens
taaatataagagcta

SEQ ID NO: 108443 - DNA, 15 bp, Homo sapiens
ctaaatataagagct

SEQ ID NO: 108444 - DNA, 15 bp, Homo sapiens
cctaaatataagagc

SEQ ID NO: 108445 - DNA, 15 bp, Homo sapiens
acctaaatataagag

SEQ ID NO: 108446 - DNA, 15 bp, Homo sapiens
gacctaaatataaga

SEQ ID NO: 108447 - DNA, 15 bp, Homo sapiens
agacctaaatataag

SEQ ID NO: 108448 - DNA, 15 bp, Homo sapiens
aagacctaaatataa

SEQ ID NO: 108449 - DNA, 15 bp, Homo sapiens
aaagacctaaatata

SEQ ID NO: 108450 - DNA, 15 bp, Homo sapiens
caaagacctaaatat

SEQ ID NO: 108451 - DNA, 15 bp, Homo sapiens
tcaaagacctaaata

SEQ ID NO: 108452 - DNA, 15 bp, Homo sapiens
atcaaagacctaaat

SEQ ID NO: 108453 - DNA, 15 bp, Homo sapiens
catcaaagacctaaa

SEQ ID NO: 108454 - DNA, 15 bp, Homo sapiens
gcatcaaagacctaa

SEQ ID NO: 108455 - DNA, 15 bp, Homo sapiens
tgcatcaaagaccta

SEQ ID NO: 108456 - DNA, 15 bp, Homo sapiens
atgcatcaaagacct

SEQ ID NO: 108457 - DNA, 15 bp, Homo sapiens
tatgcatcaaagacc

SEQ ID NO: 108458 - DNA, 15 bp, Homo sapiens
atatgcatcaaagac

SEQ ID NO: 108459 - DNA, 15 bp, Homo sapiens
aatatgcatcaaaga

SEQ ID NO: 108460 - DNA, 15 bp, Homo sapiens
gaatatgcatcaaag

SEQ ID NO: 108461 - DNA, 15 bp, Homo sapiens
tgaatatgcatcaaa

SEQ ID NO: 108462 - DNA, 15 bp, Homo sapiens
atgaatatgcatcaa

SEQ ID NO: 108463 - DNA, 15 bp, Homo sapiens
aatgaatatgcatca

SEQ ID NO: 108464 - DNA, 15 bp, Homo sapiens
caatgaatatgcatc

SEQ ID NO: 108465 - DNA, 15 bp, Homo sapiens
tcaatgaatatgcat

SEQ ID NO: 108466 - DNA, 15 bp, Homo sapiens
atcaatgaatatgca

SEQ ID NO: 108467 - DNA, 15 bp, Homo sapiens
aatcaatgaatatgc

SEQ ID NO: 108468 - DNA, 15 bp, Homo sapiens
aaatcaatgaatatg

SEQ ID NO: 108469 - DNA, 15 bp, Homo sapiens
aaaatcaatgaatat

SEQ ID NO: 108470 - DNA, 15 bp, Homo sapiens
aaaaatcaatgaata

SEQ ID NO: 108471 - DNA, 15 bp, Homo sapiens
aaaaaatcaatgaat

SEQ ID NO: 108472 - DNA, 15 bp, Homo sapiens
aaaaaaatcaatgaa

SEQ ID NO: 108473 - DNA, 15 bp, Homo sapiens
aaaaaaaatcaatga

SEQ ID NO: 108474 - DNA, 15 bp, Homo sapiens
aaaaaaaaatcaatg

SEQ ID NO: 108475 - DNA, 15 bp, Homo sapiens
caaaaaaaaatcaat

SEQ ID NO: 108476 - DNA, 15 bp, Homo sapiens
acaaaaaaaaatcaa

SEQ ID NO: 108477 - DNA, 15 bp, Homo sapiens
tacaaaaaaaaatca

SEQ ID NO: 108478 - DNA, 15 bp, Homo sapiens
atacaaaaaaaaatc

SEQ ID NO: 108479 - DNA, 15 bp, Homo sapiens
catacaaaaaaaaat

SEQ ID NO: 108480 - DNA, 15 bp, Homo sapiens
gcatacaaaaaaaaa

SEQ ID NO: 108481 - DNA, 15 bp, Homo sapiens
tgcatacaaaaaaaa

SEQ ID NO: 108482 - DNA, 15 bp, Homo sapiens
ctgcatacaaaaaaa

SEQ ID NO: 108483 - DNA, 15 bp, Homo sapiens
actgcatacaaaaaa

SEQ ID NO: 108484 - DNA, 15 bp, Homo sapiens
tactgcatacaaaaa

SEQ ID NO: 108485 - DNA, 15 bp, Homo sapiens
atactgcatacaaaa

SEQ ID NO: 108486 - DNA, 15 bp, Homo sapiens
catactgcatacaaa

SEQ ID NO: 108487 - DNA, 15 bp, Homo sapiens
tcatactgcatacaa

SEQ ID NO: 108488 - DNA, 15 bp, Homo sapiens
ctcatactgcataca

SEQ ID NO: 108489 - DNA, 15 bp, Homo sapiens
cctcatactgcatac

SEQ ID NO: 108490 - DNA, 15 bp, Homo sapiens
acctcatactgcata

SEQ ID NO: 108491 - DNA, 15 bp, Homo sapiens
tacctcatactgcat

SEQ ID NO: 108492 - DNA, 15 bp, Homo sapiens
ttacctcatactgca

SEQ ID NO: 108493 - DNA, 15 bp, Homo sapiens
tttacctcatactgc

SEQ ID NO: 108494 - DNA, 15 bp, Homo sapiens
ctttacctcatactg

SEQ ID NO: 108495 - DNA, 15 bp, Homo sapiens
cctttacctcatact

SEQ ID NO: 108496 - DNA, 15 bp, Homo sapiens
acctttacctcatac

SEQ ID NO: 108497 - DNA, 15 bp, Homo sapiens
aacctttacctcata

SEQ ID NO: 108498 - DNA, 15 bp, Homo sapiens
caacctttacctcat

SEQ ID NO: 108499 - DNA, 15 bp, Homo sapiens
tcaacctttacctca

SEQ ID NO: 108500 - DNA, 15 bp, Homo sapiens
ttcaacctttacctc

SEQ ID NO: 108501 - DNA, 15 bp, Homo sapiens
tttcaacctttacct

SEQ ID NO: 108502 - DNA, 15 bp, Homo sapiens
gtttcaacctttacc

SEQ ID NO: 108503 - DNA, 15 bp, Homo sapiens
cgtttcaacctttac

SEQ ID NO: 108504 - DNA, 15 bp, Homo sapiens
acgtttcaaccttta

SEQ ID NO: 108505 - DNA, 15 bp, Homo sapiens
tacgtttcaaccttt

SEQ ID NO: 108506 - DNA, 15 bp, Homo sapiens
atacgtttcaacctt

SEQ ID NO: 108507 - DNA, 15 bp, Homo sapiens
aatacgtttcaacct

SEQ ID NO: 108508 - DNA, 15 bp, Homo sapiens
gaatacgtttcaacc

SEQ ID NO: 108509 - DNA, 15 bp, Homo sapiens
agaatacgtttcaac

SEQ ID NO: 108510 - DNA, 15 bp, Homo sapiens
aagaatacgtttcaa

SEQ ID NO: 108511 - DNA, 15 bp, Homo sapiens
aaagaatacgtttca

SEQ ID NO: 108512 - DNA, 15 bp, Homo sapiens
aaaagaatacgtttc

SEQ ID NO: 108513 - DNA, 15 bp, Homo sapiens
aaaaagaatacgttt

SEQ ID NO: 108514 - DNA, 15 bp, Homo sapiens
caaaaagaatacgtt

SEQ ID NO: 108515 - DNA, 15 bp, Homo sapiens
gcaaaaagaatacgt

SEQ ID NO: 108516 - DNA, 15 bp, Homo sapiens
tgcaaaaagaatacg

SEQ ID NO: 108517 - DNA, 15 bp, Homo sapiens
atgcaaaaagaatac

SEQ ID NO: 108518 - DNA, 15 bp, Homo sapiens
catgcaaaaagaata

SEQ ID NO: 108519 - DNA, 15 bp, Homo sapiens
acatgcaaaaagaat

SEQ ID NO: 108520 - DNA, 15 bp, Homo sapiens
cacatgcaaaaagaa

SEQ ID NO: 108521 - DNA, 15 bp, Homo sapiens
ccacatgcaaaaaga

SEQ ID NO: 108522 - DNA, 15 bp, Homo sapiens
cccacatgcaaaaag

SEQ ID NO: 108523 - DNA, 15 bp, Homo sapiens
acccacatgcaaaaa

SEQ ID NO: 108524 - DNA, 15 bp, Homo sapiens
cacccacatgcaaaa

SEQ ID NO: 108525 - DNA, 15 bp, Homo sapiens
acacccacatgcaaa

SEQ ID NO: 108526 - DNA, 15 bp, Homo sapiens
gacacccacatgcaa

SEQ ID NO: 108527 - DNA, 15 bp, Homo sapiens
ggacacccacatgca

SEQ ID NO: 108528 - DNA, 15 bp, Homo sapiens
tggacacccacatgc

SEQ ID NO: 108529 - DNA, 15 bp, Homo sapiens
gtggacacccacatg

SEQ ID NO: 108530 - DNA, 15 bp, Homo sapiens
agtggacacccacat

SEQ ID NO: 108531 - DNA, 15 bp, Homo sapiens
aagtggacacccaca

SEQ ID NO: 108532 - DNA, 15 bp, Homo sapiens
caagtggacacccac

SEQ ID NO: 108533 - DNA, 15 bp, Homo sapiens
acaagtggacaccca

SEQ ID NO: 108534 - DNA, 15 bp, Homo sapiens
gacaagtggacaccc

SEQ ID NO: 108535 - DNA, 15 bp, Homo sapiens
ggacaagtggacacc

SEQ ID NO: 108536 - DNA, 15 bp, Homo sapiens
gggacaagtggacac

SEQ ID NO: 108537 - DNA, 15 bp, Homo sapiens
tgggacaagtggaca

SEQ ID NO: 108538 - DNA, 15 bp, Homo sapiens
ctgggacaagtggac

SEQ ID NO: 108539 - DNA, 15 bp, Homo sapiens
gctgggacaagtgga

SEQ ID NO: 108540 - DNA, 15 bp, Homo sapiens
agctgggacaagtgg

SEQ ID NO: 108541 - DNA, 15 bp, Homo sapiens
aagctgggacaagtg

SEQ ID NO: 108542 - DNA, 15 bp, Homo sapiens
gaagctgggacaagt

SEQ ID NO: 108543 - DNA, 15 bp, Homo sapiens
tgaagctgggacaag

SEQ ID NO: 108544 - DNA, 15 bp, Homo sapiens
atgaagctgggacaa

SEQ ID NO: 108545 - DNA, 15 bp, Homo sapiens
aatgaagctgggaca

SEQ ID NO: 108546 - DNA, 15 bp, Homo sapiens
aaatgaagctgggac

SEQ ID NO: 108547 - DNA, 15 bp, Homo sapiens
aaaatgaagctggga

SEQ ID NO: 108548 - DNA, 15 bp, Homo sapiens
aaaaatgaagctggg

SEQ ID NO: 108549 - DNA, 15 bp, Homo sapiens
aaaaaatgaagctgg

SEQ ID NO: 108550 - DNA, 15 bp, Homo sapiens
caaaaaatgaagctg

SEQ ID NO: 108551 - DNA, 15 bp, Homo sapiens
tcaaaaaatgaagct

SEQ ID NO: 108552 - DNA, 15 bp, Homo sapiens
ttcaaaaaatgaagc

SEQ ID NO: 108553 - DNA, 15 bp, Homo sapiens
tttcaaaaaatgaag

SEQ ID NO: 108554 - DNA, 15 bp, Homo sapiens
ttttcaaaaaatgaa

SEQ ID NO: 108555 - DNA, 15 bp, Homo sapiens
gttttcaaaaaatga

SEQ ID NO: 108556 - DNA, 15 bp, Homo sapiens
tgttttcaaaaaatg

SEQ ID NO: 108557 - DNA, 15 bp, Homo sapiens
gtgttttcaaaaaat

SEQ ID NO: 108558 - DNA, 15 bp, Homo sapiens
agtgttttcaaaaaa

SEQ ID NO: 108559 - DNA, 15 bp, Homo sapiens
tagtgttttcaaaaa

SEQ ID NO: 108560 - DNA, 15 bp, Homo sapiens
atagtgttttcaaaa

SEQ ID NO: 108561 - DNA, 15 bp, Homo sapiens
tatagtgttttcaaa

SEQ ID NO: 108562 - DNA, 15 bp, Homo sapiens
gtatagtgttttcaa

SEQ ID NO: 108563 - DNA, 15 bp, Homo sapiens
agtatagtgttttca

SEQ ID NO: 108564 - DNA, 15 bp, Homo sapiens
aagtatagtgttttc

SEQ ID NO: 108565 - DNA, 15 bp, Homo sapiens
aaagtatagtgtttt

SEQ ID NO: 108566 - DNA, 15 bp, Homo sapiens
gaaagtatagtgttt

SEQ ID NO: 108567 - DNA, 15 bp, Homo sapiens
ggaaagtatagtgtt

SEQ ID NO: 108568 - DNA, 15 bp, Homo sapiens
gggaaagtatagtgt

SEQ ID NO: 108569 - DNA, 15 bp, Homo sapiens
ggggaaagtatagtg

SEQ ID NO: 108570 - DNA, 15 bp, Homo sapiens
tggggaaagtatagt

SEQ ID NO: 108571 - DNA, 15 bp, Homo sapiens
atggggaaagtatag

SEQ ID NO: 108572 - DNA, 15 bp, Homo sapiens
aatggggaaagtata

SEQ ID NO: 108573 - DNA, 15 bp, Homo sapiens
caatggggaaagtat

SEQ ID NO: 108574 - DNA, 15 bp, Homo sapiens
tcaatggggaaagta

SEQ ID NO: 108575 - DNA, 15 bp, Homo sapiens
ttcaatggggaaagt

SEQ ID NO: 108576 - DNA, 15 bp, Homo sapiens
attcaatggggaaag

SEQ ID NO: 108577 - DNA, 15 bp, Homo sapiens
aattcaatggggaaa

SEQ ID NO: 108578 - DNA, 15 bp, Homo sapiens
caattcaatggggaa

SEQ ID NO: 108579 - DNA, 15 bp, Homo sapiens
acaattcaatgggga

SEQ ID NO: 108580 - DNA, 15 bp, Homo sapiens
gacaattcaatgggg

SEQ ID NO: 108581 - DNA, 15 bp, Homo sapiens
agacaattcaatggg

SEQ ID NO: 108582 - DNA, 15 bp, Homo sapiens
aagacaattcaatgg

SEQ ID NO: 108583 - DNA, 15 bp, Homo sapiens
caagacaattcaatg

SEQ ID NO: 108584 - DNA, 15 bp, Homo sapiens
ccaagacaattcaat

SEQ ID NO: 108585 - DNA, 15 bp, Homo sapiens
gccaagacaattcaa

SEQ ID NO: 108586 - DNA, 15 bp, Homo sapiens
agccaagacaattca

SEQ ID NO: 108587 - DNA, 15 bp, Homo sapiens
aagccaagacaattc

SEQ ID NO: 108588 - DNA, 15 bp, Homo sapiens
gaagccaagacaatt

SEQ ID NO: 108589 - DNA, 15 bp, Homo sapiens
agaagccaagacaat

SEQ ID NO: 108590 - DNA, 15 bp, Homo sapiens
aagaagccaagacaa

SEQ ID NO: 108591 - DNA, 15 bp, Homo sapiens
aaagaagccaagaca

SEQ ID NO: 108592 - DNA, 15 bp, Homo sapiens
caaagaagccaagac

SEQ ID NO: 108593 - DNA, 15 bp, Homo sapiens
acaaagaagccaaga

SEQ ID NO: 108594 - DNA, 15 bp, Homo sapiens
aacaaagaagccaag

SEQ ID NO: 108595 - DNA, 15 bp, Homo sapiens
caacaaagaagccaa

SEQ ID NO: 108596 - DNA, 15 bp, Homo sapiens
tcaacaaagaagcca

SEQ ID NO: 108597 - DNA, 15 bp, Homo sapiens
gtcaacaaagaagcc

SEQ ID NO: 108598 - DNA, 15 bp, Homo sapiens
tgtcaacaaagaagc

SEQ ID NO: 108599 - DNA, 15 bp, Homo sapiens
ttgtcaacaaagaag

SEQ ID NO: 108600 - DNA, 15 bp, Homo sapiens
tttgtcaacaaagaa

SEQ ID NO: 108601 - DNA, 15 bp, Homo sapiens
ctttgtcaacaaaga

SEQ ID NO: 108602 - DNA, 15 bp, Homo sapiens
cctttgtcaacaaag

SEQ ID NO: 108603 - DNA, 15 bp, Homo sapiens
tcctttgtcaacaaa

SEQ ID NO: 108604 - DNA, 15 bp, Homo sapiens
atcctttgtcaacaa

SEQ ID NO: 108605 - DNA, 15 bp, Homo sapiens
aatcctttgtcaaca

SEQ ID NO: 108606 - DNA, 15 bp, Homo sapiens
aaatcctttgtcaac

SEQ ID NO: 108607 - DNA, 15 bp, Homo sapiens
taaatcctttgtcaa

SEQ ID NO: 108608 - DNA, 15 bp, Homo sapiens
ataaatcctttgtca

SEQ ID NO: 108609 - DNA, 15 bp, Homo sapiens
aataaatcctttgtc

SEQ ID NO: 108610 - DNA, 15 bp, Homo sapiens
taataaatcctttgt

SEQ ID NO: 108611 - DNA, 15 bp, Homo sapiens
ataataaatcctttg

SEQ ID NO: 108612 - DNA, 15 bp, Homo sapiens
aataataaatccttt

SEQ ID NO: 108613 - DNA, 15 bp, Homo sapiens
aaataataaatcctt

SEQ ID NO: 108614 - DNA, 15 bp, Homo sapiens
gaaataataaatcct

SEQ ID NO: 108615 - DNA, 15 bp, Homo sapiens
agaaataataaatcc

SEQ ID NO: 108616 - DNA, 15 bp, Homo sapiens
cagaaataataaatc

SEQ ID NO: 108617 - DNA, 15 bp, Homo sapiens
gcagaaataataaat

SEQ ID NO: 108618 - DNA, 15 bp, Homo sapiens
ggcagaaataataaa

SEQ ID NO: 108619 - DNA, 15 bp, Homo sapiens
tggcagaaataataa

SEQ ID NO: 108620 - DNA, 15 bp, Homo sapiens
gtggcagaaataata

SEQ ID NO: 108621 - DNA, 15 bp, Homo sapiens
tgtggcagaaataat

SEQ ID NO: 108622 - DNA, 15 bp, Homo sapiens
ttgtggcagaaataa

SEQ ID NO: 108623 - DNA, 15 bp, Homo sapiens
gttgtggcagaaata

SEQ ID NO: 108624 - DNA, 15 bp, Homo sapiens
ggttgtggcagaaat

SEQ ID NO: 108625 - DNA, 15 bp, Homo sapiens
gggttgtggcagaaa

SEQ ID NO: 108626 - DNA, 15 bp, Homo sapiens
tgggttgtggcagaa

SEQ ID NO: 108627 - DNA, 15 bp, Homo sapiens
ctgggttgtggcaga

SEQ ID NO: 108628 - DNA, 15 bp, Homo sapiens
gctgggttgtggcag

SEQ ID NO: 108629 - DNA, 15 bp, Homo sapiens
agctgggttgtggca

SEQ ID NO: 108630 - DNA, 15 bp, Homo sapiens
cagctgggttgtggc

SEQ ID NO: 108631 - DNA, 15 bp, Homo sapiens
acagctgggttgtgg

SEQ ID NO: 108632 - DNA, 15 bp, Homo sapiens
aacagctgggttgtg

SEQ ID NO: 108633 - DNA, 15 bp, Homo sapiens
aaacagctgggttgt

SEQ ID NO: 108634 - DNA, 15 bp, Homo sapiens
gaaacagctgggttg

SEQ ID NO: 108635 - DNA, 15 bp, Homo sapiens
agaaacagctgggtt

SEQ ID NO: 108636 - DNA, 15 bp, Homo sapiens
gagaaacagctgggt

SEQ ID NO: 108637 - DNA, 15 bp, Homo sapiens
tgagaaacagctggg

SEQ ID NO: 108638 - DNA, 15 bp, Homo sapiens
gtgagaaacagctgg

SEQ ID NO: 108639 - DNA, 15 bp, Homo sapiens
agtgagaaacagctg

SEQ ID NO: 108640 - DNA, 15 bp, Homo sapiens
cagtgagaaacagct

SEQ ID NO: 108641 - DNA, 15 bp, Homo sapiens
acagtgagaaacagc

SEQ ID NO: 108642 - DNA, 15 bp, Homo sapiens
gacagtgagaaacag

SEQ ID NO: 108643 - DNA, 15 bp, Homo sapiens
agacagtgagaaaca

SEQ ID NO: 108644 - DNA, 15 bp, Homo sapiens
tagacagtgagaaac

SEQ ID NO: 108645 - DNA, 15 bp, Homo sapiens
ttagacagtgagaaa

SEQ ID NO: 108646 - DNA, 15 bp, Homo sapiens
tttagacagtgagaa

SEQ ID NO: 108647 - DNA, 15 bp, Homo sapiens
gtttagacagtgaga

SEQ ID NO: 108648 - DNA, 15 bp, Homo sapiens
ggtttagacagtgag

SEQ ID NO: 108649 - DNA, 15 bp, Homo sapiens
aggtttagacagtga

SEQ ID NO: 108650 - DNA, 15 bp, Homo sapiens
aaggtttagacagtg

SEQ ID NO: 108651 - DNA, 15 bp, Homo sapiens
aaaggtttagacagt

SEQ ID NO: 108652 - DNA, 15 bp, Homo sapiens
taaaggtttagacag

SEQ ID NO: 108653 - DNA, 15 bp, Homo sapiens
ataaaggtttagaca

SEQ ID NO: 108654 - DNA, 15 bp, Homo sapiens
cataaaggtttagac

SEQ ID NO: 108655 - DNA, 15 bp, Homo sapiens
gcataaaggtttaga

SEQ ID NO: 108656 - DNA, 15 bp, Homo sapiens
ggcataaaggtttag

SEQ ID NO: 108657 - DNA, 15 bp, Homo sapiens
aggcataaaggttta

SEQ ID NO: 108658 - DNA, 15 bp, Homo sapiens
caggcataaaggttt

SEQ ID NO: 108659 - DNA, 15 bp, Homo sapiens
gcaggcataaaggtt

SEQ ID NO: 108660 - DNA, 15 bp, Homo sapiens
agcaggcataaaggt

SEQ ID NO: 108661 - DNA, 15 bp, Homo sapiens
cagcaggcataaagg

SEQ ID NO: 108662 - DNA, 15 bp, Homo sapiens
gcagcaggcataaag

SEQ ID NO: 108663 - DNA, 15 bp, Homo sapiens
ggcagcaggcataaa

SEQ ID NO: 108664 - DNA, 15 bp, Homo sapiens
gggcagcaggcataa

SEQ ID NO: 108665 - DNA, 15 bp, Homo sapiens
ggggcagcaggcata

SEQ ID NO: 108666 - DNA, 15 bp, Homo sapiens
cggggcagcaggcat

SEQ ID NO: 108667 - DNA, 15 bp, Homo sapiens
acggggcagcaggca

SEQ ID NO: 108668 - DNA, 15 bp, Homo sapiens
tacggggcagcaggc

SEQ ID NO: 108669 - DNA, 15 bp, Homo sapiens
ctacggggcagcagg

SEQ ID NO: 108670 - DNA, 15 bp, Homo sapiens
cctacggggcagcag

SEQ ID NO: 108671 - DNA, 15 bp, Homo sapiens
gcctacggggcagca

SEQ ID NO: 108672 - DNA, 15 bp, Homo sapiens
agcctacggggcagc

SEQ ID NO: 108673 - DNA, 15 bp, Homo sapiens
aagcctacggggcag

SEQ ID NO: 108674 - DNA, 15 bp, Homo sapiens
taagcctacggggca

SEQ ID NO: 108675 - DNA, 15 bp, Homo sapiens
ctaagcctacggggc

SEQ ID NO: 108676 - DNA, 15 bp, Homo sapiens
actaagcctacgggg

SEQ ID NO: 108677 - DNA, 15 bp, Homo sapiens
cactaagcctacggg

SEQ ID NO: 108678 - DNA, 15 bp, Homo sapiens
ccactaagcctacgg

SEQ ID NO: 108679 - DNA, 15 bp, Homo sapiens
tccactaagcctacg

SEQ ID NO: 108680 - DNA, 15 bp, Homo sapiens
ttccactaagcctac

SEQ ID NO: 108681 - DNA, 15 bp, Homo sapiens
attccactaagccta

SEQ ID NO: 108682 - DNA, 15 bp, Homo sapiens
cattccactaagcct

SEQ ID NO: 108683 - DNA, 15 bp, Homo sapiens
gcattccactaagcc

SEQ ID NO: 108684 - DNA, 15 bp, Homo sapiens
ggcattccactaagc

SEQ ID NO: 108685 - DNA, 15 bp, Homo sapiens
aggcattccactaag

SEQ ID NO: 108686 - DNA, 15 bp, Homo sapiens
gaggcattccactaa

SEQ ID NO: 108687 - DNA, 15 bp, Homo sapiens
agaggcattccacta

SEQ ID NO: 108688 - DNA, 15 bp, Homo sapiens
gagaggcattccact

SEQ ID NO: 108689 - DNA, 15 bp, Homo sapiens
ggagaggcattccac

SEQ ID NO: 108690 - DNA, 15 bp, Homo sapiens
tggagaggcattcca

SEQ ID NO: 108691 - DNA, 15 bp, Homo sapiens
atggagaggcattcc

SEQ ID NO: 108692 - DNA, 15 bp, Homo sapiens
gatggagaggcattc

SEQ ID NO: 108693 - DNA, 15 bp, Homo sapiens
ggatggagaggcatt

SEQ ID NO: 108694 - DNA, 15 bp, Homo sapiens
aggatggagaggcat

SEQ ID NO: 108695 - DNA, 15 bp, Homo sapiens
gaggatggagaggca

SEQ ID NO: 108696 - DNA, 15 bp, Homo sapiens
ggaggatggagaggc

SEQ ID NO: 108697 - DNA, 15 bp, Homo sapiens
tggaggatggagagg

SEQ ID NO: 108698 - DNA, 15 bp, Homo sapiens
gtggaggatggagag

SEQ ID NO: 108699 - DNA, 15 bp, Homo sapiens
agtggaggatggaga

SEQ ID NO: 108700 - DNA, 15 bp, Homo sapiens
gagtggaggatggag

SEQ ID NO: 108701 - DNA, 15 bp, Homo sapiens
agagtggaggatgga

SEQ ID NO: 108702 - DNA, 15 bp, Homo sapiens
gagagtggaggatgg

SEQ ID NO: 108703 - DNA, 15 bp, Homo sapiens
agagagtggaggatg

SEQ ID NO: 108704 - DNA, 15 bp, Homo sapiens
aagagagtggaggat

SEQ ID NO: 108705 - DNA, 15 bp, Homo sapiens
aaagagagtggagga

SEQ ID NO: 108706 - DNA, 15 bp, Homo sapiens
aaaagagagtggagg

SEQ ID NO: 108707 - DNA, 15 bp, Homo sapiens
caaaagagagtggag

SEQ ID NO: 108708 - DNA, 15 bp, Homo sapiens
acaaaagagagtgga

SEQ ID NO: 108709 - DNA, 15 bp, Homo sapiens
aacaaaagagagtgg

SEQ ID NO: 108710 - DNA, 15 bp, Homo sapiens
aaacaaaagagagtg

SEQ ID NO: 108711 - DNA, 15 bp, Homo sapiens
taaacaaaagagagt

SEQ ID NO: 108712 - DNA, 15 bp, Homo sapiens
ctaaacaaaagagag

SEQ ID NO: 108713 - DNA, 15 bp, Homo sapiens
gctaaacaaaagaga

SEQ ID NO: 108714 - DNA, 15 bp, Homo sapiens
agctaaacaaaagag

SEQ ID NO: 108715 - DNA, 15 bp, Homo sapiens
tagctaaacaaaaga

SEQ ID NO: 108716 - DNA, 15 bp, Homo sapiens
ctagctaaacaaaag

SEQ ID NO: 108717 - DNA, 15 bp, Homo sapiens
actagctaaacaaaa

SEQ ID NO: 108718 - DNA, 15 bp, Homo sapiens
tactagctaaacaaa

SEQ ID NO: 108719 - DNA, 15 bp, Homo sapiens
gtactagctaaacaa

SEQ ID NO: 108720 - DNA, 15 bp, Homo sapiens
agtactagctaaaca

SEQ ID NO: 108721 - DNA, 15 bp, Homo sapiens
aagtactagctaaac

SEQ ID NO: 108722 - DNA, 15 bp, Homo sapiens
gaagtactagctaaa

SEQ ID NO: 108723 - DNA, 15 bp, Homo sapiens
ggaagtactagctaa

SEQ ID NO: 108724 - DNA, 15 bp, Homo sapiens
aggaagtactagcta

SEQ ID NO: 108725 - DNA, 15 bp, Homo sapiens
aaggaagtactagct

SEQ ID NO: 108726 - DNA, 15 bp, Homo sapiens
taaggaagtactagc

SEQ ID NO: 108727 - DNA, 15 bp, Homo sapiens
ataaggaagtactag

SEQ ID NO: 108728 - DNA, 15 bp, Homo sapiens
gataaggaagtacta

SEQ ID NO: 108729 - DNA, 15 bp, Homo sapiens
ggataaggaagtact

SEQ ID NO: 108730 - DNA, 15 bp, Homo sapiens
aggataaggaagtac

SEQ ID NO: 108731 - DNA, 15 bp, Homo sapiens
aaggataaggaagta

SEQ ID NO: 108732 - DNA, 15 bp, Homo sapiens
aaaggataaggaagt

SEQ ID NO: 108733 - DNA, 15 bp, Homo sapiens
taaaggataaggaag

SEQ ID NO: 108734 - DNA, 15 bp, Homo sapiens
ttaaaggataaggaa

SEQ ID NO: 108735 - DNA, 15 bp, Homo sapiens
cttaaaggataagga

SEQ ID NO: 108736 - DNA, 15 bp, Homo sapiens
ccttaaaggataagg

SEQ ID NO: 108737 - DNA, 15 bp, Homo sapiens
cccttaaaggataag

SEQ ID NO: 108738 - DNA, 15 bp, Homo sapiens
ccccttaaaggataa

SEQ ID NO: 108739 - DNA, 15 bp, Homo sapiens
accccttaaaggata

SEQ ID NO: 108740 - DNA, 15 bp, Homo sapiens
gaccccttaaaggat

SEQ ID NO: 108741 - DNA, 15 bp, Homo sapiens
tgaccccttaaagga

SEQ ID NO: 108742 - DNA, 15 bp, Homo sapiens
ctgaccccttaaagg

SEQ ID NO: 108743 - DNA, 15 bp, Homo sapiens
actgaccccttaaag

SEQ ID NO: 108744 - DNA, 15 bp, Homo sapiens
tactgaccccttaaa

SEQ ID NO: 108745 - DNA, 15 bp, Homo sapiens
ctactgaccccttaa

SEQ ID NO: 108746 - DNA, 15 bp, Homo sapiens
cctactgacccctta

SEQ ID NO: 108747 - DNA, 15 bp, Homo sapiens
tcctactgacccctt

SEQ ID NO: 108748 - DNA, 15 bp, Homo sapiens
ttcctactgacccct

SEQ ID NO: 108749 - DNA, 15 bp, Homo sapiens
gttcctactgacccc

SEQ ID NO: 108750 - DNA, 15 bp, Homo sapiens
ggttcctactgaccc

SEQ ID NO: 108751 - DNA, 15 bp, Homo sapiens
aggttcctactgacc

SEQ ID NO: 108752 - DNA, 15 bp, Homo sapiens
gaggttcctactgac

SEQ ID NO: 108753 - DNA, 15 bp, Homo sapiens
tgaggttcctactga

SEQ ID NO: 108754 - DNA, 15 bp, Homo sapiens
gtgaggttcctactg

SEQ ID NO: 108755 - DNA, 15 bp, Homo sapiens
ggtgaggttcctact

SEQ ID NO: 108756 - DNA, 15 bp, Homo sapiens
aggtgaggttcctac

SEQ ID NO: 108757 - DNA, 15 bp, Homo sapiens
aaggtgaggttccta

SEQ ID NO: 108758 - DNA, 15 bp, Homo sapiens
gaaggtgaggttcct

SEQ ID NO: 108759 - DNA, 15 bp, Homo sapiens
agaaggtgaggttcc

SEQ ID NO: 108760 - DNA, 15 bp, Homo sapiens
aagaaggtgaggttc

SEQ ID NO: 108761 - DNA, 15 bp, Homo sapiens
gaagaaggtgaggtt

SEQ ID NO: 108762 - DNA, 15 bp, Homo sapiens
tgaagaaggtgaggt

SEQ ID NO: 108763 - DNA, 15 bp, Homo sapiens
ctgaagaaggtgagg

SEQ ID NO: 108764 - DNA, 15 bp, Homo sapiens
actgaagaaggtgag

SEQ ID NO: 108765 - DNA, 15 bp, Homo sapiens
tactgaagaaggtga

SEQ ID NO: 108766 - DNA, 15 bp, Homo sapiens
atactgaagaaggtg

SEQ ID NO: 108767 - DNA, 15 bp, Homo sapiens
catactgaagaaggt

SEQ ID NO: 108768 - DNA, 15 bp, Homo sapiens
acatactgaagaagg

SEQ ID NO: 108769 - DNA, 15 bp, Homo sapiens
aacatactgaagaag

SEQ ID NO: 108770 - DNA, 15 bp, Homo sapiens
aaacatactgaagaa

SEQ ID NO: 108771 - DNA, 15 bp, Homo sapiens
aaaacatactgaaga

SEQ ID NO: 108772 - DNA, 15 bp, Homo sapiens
gaaaacatactgaag

SEQ ID NO: 108773 - DNA, 15 bp, Homo sapiens
ggaaaacatactgaa

SEQ ID NO: 108774 - DNA, 15 bp, Homo sapiens
aggaaaacatactga

SEQ ID NO: 108775 - DNA, 15 bp, Homo sapiens
aaggaaaacatactg

SEQ ID NO: 108776 - DNA, 15 bp, Homo sapiens
aaaggaaaacatact

SEQ ID NO: 108777 - DNA, 15 bp, Homo sapiens
caaaggaaaacatac

SEQ ID NO: 108778 - DNA, 15 bp, Homo sapiens
acaaaggaaaacata

SEQ ID NO: 108779 - DNA, 15 bp, Homo sapiens
gacaaaggaaaacat

SEQ ID NO: 108780 - DNA, 15 bp, Homo sapiens
agacaaaggaaaaca

SEQ ID NO: 108781 - DNA, 15 bp, Homo sapiens
aagacaaaggaaaac

SEQ ID NO: 108782 - DNA, 15 bp, Homo sapiens
taagacaaaggaaaa

SEQ ID NO: 108783 - DNA, 15 bp, Homo sapiens
ataagacaaaggaaa

SEQ ID NO: 108784 - DNA, 15 bp, Homo sapiens
gataagacaaaggaa

SEQ ID NO: 108785 - DNA, 15 bp, Homo sapiens
tgataagacaaagga

SEQ ID NO: 108786 - DNA, 15 bp, Homo sapiens
ttgataagacaaagg

SEQ ID NO: 108787 - DNA, 15 bp, Homo sapiens
gttgataagacaaag

SEQ ID NO: 108788 - DNA, 15 bp, Homo sapiens
ggttgataagacaaa

SEQ ID NO: 108789 - DNA, 15 bp, Homo sapiens
aggttgataagacaa

SEQ ID NO: 108790 - DNA, 15 bp, Homo sapiens
taggttgataagaca

SEQ ID NO: 108791 - DNA, 15 bp, Homo sapiens
gtaggttgataagac

SEQ ID NO: 108792 - DNA, 15 bp, Homo sapiens
ggtaggttgataaga

SEQ ID NO: 108793 - DNA, 15 bp, Homo sapiens
tggtaggttgataag

SEQ ID NO: 108794 - DNA, 15 bp, Homo sapiens
gtggtaggttgataa

SEQ ID NO: 108795 - DNA, 15 bp, Homo sapiens
ggtggtaggttgata

SEQ ID NO: 108796 - DNA, 15 bp, Homo sapiens
tggtggtaggttgat

SEQ ID NO: 108797 - DNA, 15 bp, Homo sapiens
atggtggtaggttga

SEQ ID NO: 108798 - DNA, 15 bp, Homo sapiens
gatggtggtaggttg

SEQ ID NO: 108799 - DNA, 15 bp, Homo sapiens
tgatggtggtaggtt

SEQ ID NO: 108800 - DNA, 15 bp, Homo sapiens
gtgatggtggtaggt

SEQ ID NO: 108801 - DNA, 15 bp, Homo sapiens
ggtgatggtggtagg

SEQ ID NO: 108802 - DNA, 15 bp, Homo sapiens
gggtgatggtggtag

SEQ ID NO: 108803 - DNA, 15 bp, Homo sapiens
tgggtgatggtggta

SEQ ID NO: 108804 - DNA, 15 bp, Homo sapiens
gtgggtgatggtggt

SEQ ID NO: 108805 - DNA, 15 bp, Homo sapiens
tgtgggtgatggtgg

SEQ ID NO: 108806 - DNA, 15 bp, Homo sapiens
gtgtgggtgatggtg

SEQ ID NO: 108807 - DNA, 15 bp, Homo sapiens
tgtgtgggtgatggt

SEQ ID NO: 108808 - DNA, 15 bp, Homo sapiens
gtgtgtgggtgatgg

SEQ ID NO: 108809 - DNA, 15 bp, Homo sapiens
tgtgtgtgggtgatg

SEQ ID NO: 108810 - DNA, 15 bp, Homo sapiens
atgtgtgtgggtgat

SEQ ID NO: 108811 - DNA, 15 bp, Homo sapiens
tatgtgtgtgggtga

SEQ ID NO: 108812 - DNA, 15 bp, Homo sapiens
gtatgtgtgtgggtg

SEQ ID NO: 108813 - DNA, 15 bp, Homo sapiens
ggtatgtgtgtgggt

SEQ ID NO: 108814 - DNA, 15 bp, Homo sapiens
aggtatgtgtgtggg

SEQ ID NO: 108815 - DNA, 15 bp, Homo sapiens
aaggtatgtgtgtgg

SEQ ID NO: 108816 - DNA, 15 bp, Homo sapiens
aaaggtatgtgtgtg

SEQ ID NO: 108817 - DNA, 15 bp, Homo sapiens
aaaaggtatgtgtgt

SEQ ID NO: 108818 - DNA, 15 bp, Homo sapiens
gaaaaggtatgtgtg

SEQ ID NO: 108819 - DNA, 15 bp, Homo sapiens
ggaaaaggtatgtgt

SEQ ID NO: 108820 - DNA, 15 bp, Homo sapiens
gggaaaaggtatgtg

SEQ ID NO: 108821 - DNA, 15 bp, Homo sapiens
agggaaaaggtatgt

SEQ ID NO: 108822 - DNA, 15 bp, Homo sapiens
tagggaaaaggtatg

SEQ ID NO: 108823 - DNA, 15 bp, Homo sapiens
ttagggaaaaggtat

SEQ ID NO: 108824 - DNA, 15 bp, Homo sapiens
cttagggaaaaggta

SEQ ID NO: 108825 - DNA, 15 bp, Homo sapiens
ccttagggaaaaggt

SEQ ID NO: 108826 - DNA, 15 bp, Homo sapiens
gccttagggaaaagg

SEQ ID NO: 108827 - DNA, 15 bp, Homo sapiens
agccttagggaaaag

SEQ ID NO: 108828 - DNA, 15 bp, Homo sapiens
cagccttagggaaaa

SEQ ID NO: 108829 - DNA, 15 bp, Homo sapiens
ccagccttagggaaa

SEQ ID NO: 108830 - DNA, 15 bp, Homo sapiens
cccagccttagggaa

SEQ ID NO: 108831 - DNA, 15 bp, Homo sapiens
tcccagccttaggga

SEQ ID NO: 108832 - DNA, 15 bp, Homo sapiens
atcccagccttaggg

SEQ ID NO: 108833 - DNA, 15 bp, Homo sapiens
tatcccagccttagg

SEQ ID NO: 108834 - DNA, 15 bp, Homo sapiens
ctatcccagccttag

SEQ ID NO: 108835 - DNA, 15 bp, Homo sapiens
cctatcccagcctta

SEQ ID NO: 108836 - DNA, 15 bp, Homo sapiens
tcctatcccagcctt

SEQ ID NO: 108837 - DNA, 15 bp, Homo sapiens
ttcctatcccagcct

SEQ ID NO: 108838 - DNA, 15 bp, Homo sapiens
gttcctatcccagcc

SEQ ID NO: 108839 - DNA, 15 bp, Homo sapiens
ggttcctatcccagc

SEQ ID NO: 108840 - DNA, 15 bp, Homo sapiens
aggttcctatcccag

SEQ ID NO: 108841 - DNA, 15 bp, Homo sapiens
gaggttcctatccca

SEQ ID NO: 108842 - DNA, 15 bp, Homo sapiens
agaggttcctatccc

SEQ ID NO: 108843 - DNA, 15 bp, Homo sapiens
aagaggttcctatcc

SEQ ID NO: 108844 - DNA, 15 bp, Homo sapiens
taagaggttcctatc

SEQ ID NO: 108845 - DNA, 15 bp, Homo sapiens
ctaagaggttcctat

SEQ ID NO: 108846 - DNA, 15 bp, Homo sapiens
cctaagaggttccta

SEQ ID NO: 108847 - DNA, 15 bp, Homo sapiens
gcctaagaggttcct

SEQ ID NO: 108848 - DNA, 15 bp, Homo sapiens
tgcctaagaggttcc

SEQ ID NO: 108849 - DNA, 15 bp, Homo sapiens
ttgcctaagaggttc

SEQ ID NO: 108850 - DNA, 15 bp, Homo sapiens
attgcctaagaggtt

SEQ ID NO: 108851 - DNA, 15 bp, Homo sapiens
cattgcctaagaggt

SEQ ID NO: 108852 - DNA, 15 bp, Homo sapiens
tcattgcctaagagg

SEQ ID NO: 108853 - DNA, 15 bp, Homo sapiens
atcattgcctaagag

SEQ ID NO: 108854 - DNA, 15 bp, Homo sapiens
gatcattgcctaaga

SEQ ID NO: 108855 - DNA, 15 bp, Homo sapiens
agatcattgcctaag

SEQ ID NO: 108856 - DNA, 15 bp, Homo sapiens
tagatcattgcctaa

SEQ ID NO: 108857 - DNA, 15 bp, Homo sapiens
atagatcattgccta

SEQ ID NO: 108858 - DNA, 15 bp, Homo sapiens
aatagatcattgcct

SEQ ID NO: 108859 - DNA, 15 bp, Homo sapiens
aaatagatcattgcc

SEQ ID NO: 108860 - DNA, 15 bp, Homo sapiens
caaatagatcattgc

SEQ ID NO: 108861 - DNA, 15 bp, Homo sapiens
tcaaatagatcattg

SEQ ID NO: 108862 - DNA, 15 bp, Homo sapiens
atcaaatagatcatt

SEQ ID NO: 108863 - DNA, 15 bp, Homo sapiens
tatcaaatagatcat

SEQ ID NO: 108864 - DNA, 15 bp, Homo sapiens
ttatcaaatagatca

SEQ ID NO: 108865 - DNA, 15 bp, Homo sapiens
cttatcaaatagatc

SEQ ID NO: 108866 - DNA, 15 bp, Homo sapiens
acttatcaaatagat

SEQ ID NO: 108867 - DNA, 15 bp, Homo sapiens
tacttatcaaataga

SEQ ID NO: 108868 - DNA, 15 bp, Homo sapiens
gtacttatcaaatag

SEQ ID NO: 108869 - DNA, 15 bp, Homo sapiens
agtacttatcaaata

SEQ ID NO: 108870 - DNA, 15 bp, Homo sapiens
gagtacttatcaaat

SEQ ID NO: 108871 - DNA, 15 bp, Homo sapiens
tgagtacttatcaaa

SEQ ID NO: 108872 - DNA, 15 bp, Homo sapiens
gtgagtacttatcaa

SEQ ID NO: 108873 - DNA, 15 bp, Homo sapiens
agtgagtacttatca

SEQ ID NO: 108874 - DNA, 15 bp, Homo sapiens
cagtgagtacttatc

SEQ ID NO: 108875 - DNA, 15 bp, Homo sapiens
tcagtgagtacttat

SEQ ID NO: 108876 - DNA, 15 bp, Homo sapiens
ctcagtgagtactta

SEQ ID NO: 108877 - DNA, 15 bp, Homo sapiens
actcagtgagtactt

SEQ ID NO: 108878 - DNA, 15 bp, Homo sapiens
aactcagtgagtact

SEQ ID NO: 108879 - DNA, 15 bp, Homo sapiens
gaactcagtgagtac

SEQ ID NO: 108880 - DNA, 15 bp, Homo sapiens
tgaactcagtgagta

SEQ ID NO: 108881 - DNA, 15 bp, Homo sapiens
atgaactcagtgagt

SEQ ID NO: 108882 - DNA, 15 bp, Homo sapiens
tatgaactcagtgag

SEQ ID NO: 108883 - DNA, 15 bp, Homo sapiens
gtatgaactcagtga

SEQ ID NO: 108884 - DNA, 15 bp, Homo sapiens
agtatgaactcagtg

SEQ ID NO: 108885 - DNA, 15 bp, Homo sapiens
tagtatgaactcagt

SEQ ID NO: 108886 - DNA, 15 bp, Homo sapiens
ctagtatgaactcag

SEQ ID NO: 108887 - DNA, 15 bp, Homo sapiens
tctagtatgaactca

SEQ ID NO: 108888 - DNA, 15 bp, Homo sapiens
gtctagtatgaactc

SEQ ID NO: 108889 - DNA, 15 bp, Homo sapiens
tgtctagtatgaact

SEQ ID NO: 108890 - DNA, 15 bp, Homo sapiens
gtgtctagtatgaac

SEQ ID NO: 108891 - DNA, 15 bp, Homo sapiens
agtgtctagtatgaa

SEQ ID NO: 108892 - DNA, 15 bp, Homo sapiens
gagtgtctagtatga

SEQ ID NO: 108893 - DNA, 15 bp, Homo sapiens
agagtgtctagtatg

SEQ ID NO: 108894 - DNA, 15 bp, Homo sapiens
cagagtgtctagtat

SEQ ID NO: 108895 - DNA, 15 bp, Homo sapiens
gcagagtgtctagta

SEQ ID NO: 108896 - DNA, 15 bp, Homo sapiens
tgcagagtgtctagt

SEQ ID NO: 108897 - DNA, 15 bp, Homo sapiens
ctgcagagtgtctag

SEQ ID NO: 108898 - DNA, 15 bp, Homo sapiens
actgcagagtgtcta

SEQ ID NO: 108899 - DNA, 15 bp, Homo sapiens
tactgcagagtgtct

SEQ ID NO: 108900 - DNA, 15 bp, Homo sapiens
atactgcagagtgtc

SEQ ID NO: 108901 - DNA, 15 bp, Homo sapiens
tatactgcagagtgt

SEQ ID NO: 108902 - DNA, 15 bp, Homo sapiens
atatactgcagagtg

SEQ ID NO: 108903 - DNA, 15 bp, Homo sapiens
gatatactgcagagt

SEQ ID NO: 108904 - DNA, 15 bp, Homo sapiens
ggatatactgcagag

SEQ ID NO: 108905 - DNA, 15 bp, Homo sapiens
cggatatactgcaga

SEQ ID NO: 108906 - DNA, 15 bp, Homo sapiens
acggatatactgcag

SEQ ID NO: 108907 - DNA, 15 bp, Homo sapiens
tacggatatactgca

SEQ ID NO: 108908 - DNA, 15 bp, Homo sapiens
ttacggatatactgc

SEQ ID NO: 108909 - DNA, 15 bp, Homo sapiens
tttacggatatactg

SEQ ID NO: 108910 - DNA, 15 bp, Homo sapiens
atttacggatatact

SEQ ID NO: 108911 - DNA, 15 bp, Homo sapiens
catttacggatatac

SEQ ID NO: 108912 - DNA, 15 bp, Homo sapiens
tcatttacggatata

SEQ ID NO: 108913 - DNA, 15 bp, Homo sapiens
ttcatttacggatat

SEQ ID NO: 108914 - DNA, 15 bp, Homo sapiens
cttcatttacggata

SEQ ID NO: 108915 - DNA, 15 bp, Homo sapiens
acttcatttacggat

SEQ ID NO: 108916 - DNA, 15 bp, Homo sapiens
tacttcatttacgga

SEQ ID NO: 108917 - DNA, 15 bp, Homo sapiens
ttacttcatttacgg

SEQ ID NO: 108918 - DNA, 15 bp, Homo sapiens
tttacttcatttacg

SEQ ID NO: 108919 - DNA, 15 bp, Homo sapiens
ttttacttcatttac

SEQ ID NO: 108920 - DNA, 15 bp, Homo sapiens
gttttacttcattta

SEQ ID NO: 108921 - DNA, 15 bp, Homo sapiens
ggttttacttcattt

SEQ ID NO: 108922 - DNA, 15 bp, Homo sapiens
aggttttacttcatt

SEQ ID NO: 108923 - DNA, 15 bp, Homo sapiens
caggttttacttcat

SEQ ID NO: 108924 - DNA, 15 bp, Homo sapiens
tcaggttttacttca

SEQ ID NO: 108925 - DNA, 15 bp, Homo sapiens
gtcaggttttacttc

SEQ ID NO: 108926 - DNA, 15 bp, Homo sapiens
tgtcaggttttactt

SEQ ID NO: 108927 - DNA, 15 bp, Homo sapiens
gtgtcaggttttact

SEQ ID NO: 108928 - DNA, 15 bp, Homo sapiens
ggtgtcaggttttac

SEQ ID NO: 108929 - DNA, 15 bp, Homo sapiens
tggtgtcaggtttta

SEQ ID NO: 108930 - DNA, 15 bp, Homo sapiens
gtggtgtcaggtttt

SEQ ID NO: 108931 - DNA, 15 bp, Homo sapiens
ggtggtgtcaggttt

SEQ ID NO: 108932 - DNA, 15 bp, Homo sapiens
gggtggtgtcaggtt

SEQ ID NO: 108933 - DNA, 15 bp, Homo sapiens
agggtggtgtcaggt

SEQ ID NO: 108934 - DNA, 15 bp, Homo sapiens
gagggtggtgtcagg

SEQ ID NO: 108935 - DNA, 15 bp, Homo sapiens
tgagggtggtgtcag

SEQ ID NO: 108936 - DNA, 15 bp, Homo sapiens
ctgagggtggtgtca

SEQ ID NO: 108937 - DNA, 15 bp, Homo sapiens
tctgagggtggtgtc

SEQ ID NO: 108938 - DNA, 15 bp, Homo sapiens
ttctgagggtggtgt

SEQ ID NO: 108939 - DNA, 15 bp, Homo sapiens
tttctgagggtggtg

SEQ ID NO: 108940 - DNA, 15 bp, Homo sapiens
ttttctgagggtggt

SEQ ID NO: 108941 - DNA, 15 bp, Homo sapiens
gttttctgagggtgg

SEQ ID NO: 108942 - DNA, 15 bp, Homo sapiens
agttttctgagggtg

SEQ ID NO: 108943 - DNA, 15 bp, Homo sapiens
aagttttctgagggt

SEQ ID NO: 108944 - DNA, 15 bp, Homo sapiens
taagttttctgaggg

SEQ ID NO: 108945 - DNA, 15 bp, Homo sapiens
gtaagttttctgagg

SEQ ID NO: 108946 - DNA, 15 bp, Homo sapiens
agtaagttttctgag

SEQ ID NO: 108947 - DNA, 15 bp, Homo sapiens
cagtaagttttctga

SEQ ID NO: 108948 - DNA, 15 bp, Homo sapiens
acagtaagttttctg

SEQ ID NO: 108949 - DNA, 15 bp, Homo sapiens
aacagtaagttttct

SEQ ID NO: 108950 - DNA, 15 bp, Homo sapiens
taacagtaagttttc

SEQ ID NO: 108951 - DNA, 15 bp, Homo sapiens
ctaacagtaagtttt

SEQ ID NO: 108952 - DNA, 15 bp, Homo sapiens
actaacagtaagttt

SEQ ID NO: 108953 - DNA, 15 bp, Homo sapiens
cactaacagtaagtt

SEQ ID NO: 108954 - DNA, 15 bp, Homo sapiens
tcactaacagtaagt

SEQ ID NO: 108955 - DNA, 15 bp, Homo sapiens
ctcactaacagtaag

SEQ ID NO: 108956 - DNA, 15 bp, Homo sapiens
tctcactaacagtaa

SEQ ID NO: 108957 - DNA, 15 bp, Homo sapiens
ttctcactaacagta

SEQ ID NO: 108958 - DNA, 15 bp, Homo sapiens
tttctcactaacagt

SEQ ID NO: 108959 - DNA, 15 bp, Homo sapiens
ttttctcactaacag

SEQ ID NO: 108960 - DNA, 15 bp, Homo sapiens
attttctcactaaca

SEQ ID NO: 108961 - DNA, 15 bp, Homo sapiens
cattttctcactaac

SEQ ID NO: 108962 - DNA, 15 bp, Homo sapiens
ccattttctcactaa

SEQ ID NO: 108963 - DNA, 15 bp, Homo sapiens
cccattttctcacta

SEQ ID NO: 108964 - DNA, 15 bp, Homo sapiens
gcccattttctcact

SEQ ID NO: 108965 - DNA, 15 bp, Homo sapiens
agcccattttctcac

SEQ ID NO: 108966 - DNA, 15 bp, Homo sapiens
tagcccattttctca

SEQ ID NO: 108967 - DNA, 15 bp, Homo sapiens
atagcccattttctc

SEQ ID NO: 108968 - DNA, 15 bp, Homo sapiens
tatagcccattttct

SEQ ID NO: 108969 - DNA, 15 bp, Homo sapiens
ttatagcccattttc

SEQ ID NO: 108970 - DNA, 15 bp, Homo sapiens
attatagcccatttt

SEQ ID NO: 108971 - DNA, 15 bp, Homo sapiens
tattatagcccattt

SEQ ID NO: 108972 - DNA, 15 bp, Homo sapiens
ttattatagcccatt

SEQ ID NO: 108973 - DNA, 15 bp, Homo sapiens
attattatagcccat

SEQ ID NO: 108974 - DNA, 15 bp, Homo sapiens
tattattatagccca

SEQ ID NO: 108975 - DNA, 15 bp, Homo sapiens
ctattattatagccc

SEQ ID NO: 108976 - DNA, 15 bp, Homo sapiens
tctattattatagcc

SEQ ID NO: 108977 - DNA, 15 bp, Homo sapiens
ctctattattatagc

SEQ ID NO: 108978 - DNA, 15 bp, Homo sapiens
actctattattatag

SEQ ID NO: 108979 - DNA, 15 bp, Homo sapiens
cactctattattata

SEQ ID NO: 108980 - DNA, 15 bp, Homo sapiens
ccactctattattat

SEQ ID NO: 108981 - DNA, 15 bp, Homo sapiens
cccactctattatta

SEQ ID NO: 108982 - DNA, 15 bp, Homo sapiens
ccccactctattatt

SEQ ID NO: 108983 - DNA, 15 bp, Homo sapiens
accccactctattat

SEQ ID NO: 108984 - DNA, 15 bp, Homo sapiens
taccccactctatta

SEQ ID NO: 108985 - DNA, 15 bp, Homo sapiens
ttaccccactctatt

SEQ ID NO: 108986 - DNA, 15 bp, Homo sapiens
cttaccccactctat

SEQ ID NO: 108987 - DNA, 15 bp, Homo sapiens
acttaccccactcta

SEQ ID NO: 108988 - DNA, 15 bp, Homo sapiens
aacttaccccactct

SEQ ID NO: 108989 - DNA, 15 bp, Homo sapiens
aaacttaccccactc

SEQ ID NO: 108990 - DNA, 15 bp, Homo sapiens
taaacttaccccact

SEQ ID NO: 108991 - DNA, 15 bp, Homo sapiens
ataaacttaccccac

SEQ ID NO: 108992 - DNA, 15 bp, Homo sapiens
aataaacttacccca

SEQ ID NO: 108993 - DNA, 15 bp, Homo sapiens
caataaacttacccc

SEQ ID NO: 108994 - DNA, 15 bp, Homo sapiens
acaataaacttaccc

SEQ ID NO: 108995 - DNA, 15 bp, Homo sapiens
tacaataaacttacc

SEQ ID NO: 108996 - DNA, 15 bp, Homo sapiens
ctacaataaacttac

SEQ ID NO: 108997 - DNA, 15 bp, Homo sapiens
cctacaataaactta

SEQ ID NO: 108998 - DNA, 15 bp, Homo sapiens
ccctacaataaactt

SEQ ID NO: 108999 - DNA, 15 bp, Homo sapiens
tccctacaataaact

SEQ ID NO: 109000 - DNA, 15 bp, Homo sapiens
atccctacaataaac

SEQ ID NO: 109001 - DNA, 15 bp, Homo sapiens
tatccctacaataaa

SEQ ID NO: 109002 - DNA, 15 bp, Homo sapiens
ttatccctacaataa

SEQ ID NO: 109003 - DNA, 15 bp, Homo sapiens
cttatccctacaata

SEQ ID NO: 109004 - DNA, 15 bp, Homo sapiens
gcttatccctacaat

SEQ ID NO: 109005 - DNA, 15 bp, Homo sapiens
tgcttatccctacaa

SEQ ID NO: 109006 - DNA, 15 bp, Homo sapiens
atgcttatccctaca

SEQ ID NO: 109007 - DNA, 15 bp, Homo sapiens
tatgcttatccctac

SEQ ID NO: 109008 - DNA, 15 bp, Homo sapiens
ctatgcttatcccta

SEQ ID NO: 109009 - DNA, 15 bp, Homo sapiens
cctatgcttatccct

SEQ ID NO: 109010 - DNA, 15 bp, Homo sapiens
tcctatgcttatccc

SEQ ID NO: 109011 - DNA, 15 bp, Homo sapiens
atcctatgcttatcc

SEQ ID NO: 109012 - DNA, 15 bp, Homo sapiens
catcctatgcttatc

SEQ ID NO: 109013 - DNA, 15 bp, Homo sapiens
gcatcctatgcttat

SEQ ID NO: 109014 - DNA, 15 bp, Homo sapiens
agcatcctatgctta

SEQ ID NO: 109015 - DNA, 15 bp, Homo sapiens
tagcatcctatgctt

SEQ ID NO: 109016 - DNA, 15 bp, Homo sapiens
atagcatcctatgct

SEQ ID NO: 109017 - DNA, 15 bp, Homo sapiens
catagcatcctatgc

SEQ ID NO: 109018 - DNA, 15 bp, Homo sapiens
tcatagcatcctatg

SEQ ID NO: 109019 - DNA, 15 bp, Homo sapiens
ctcatagcatcctat

SEQ ID NO: 109020 - DNA, 15 bp, Homo sapiens
tctcatagcatccta

SEQ ID NO: 109021 - DNA, 15 bp, Homo sapiens
ttctcatagcatcct

SEQ ID NO: 109022 - DNA, 15 bp, Homo sapiens
attctcatagcatcc

SEQ ID NO: 109023 - DNA, 15 bp, Homo sapiens
cattctcatagcatc

SEQ ID NO: 109024 - DNA, 15 bp, Homo sapiens
gcattctcatagcat

SEQ ID NO: 109025 - DNA, 15 bp, Homo sapiens
tgcattctcatagca

SEQ ID NO: 109026 - DNA, 15 bp, Homo sapiens
ctgcattctcatagc

SEQ ID NO: 109027 - DNA, 15 bp, Homo sapiens
tctgcattctcatag

SEQ ID NO: 109028 - DNA, 15 bp, Homo sapiens
ctctgcattctcata

SEQ ID NO: 109029 - DNA, 15 bp, Homo sapiens
cctctgcattctcat

SEQ ID NO: 109030 - DNA, 15 bp, Homo sapiens
tcctctgcattctca

SEQ ID NO: 109031 - DNA, 15 bp, Homo sapiens
gtcctctgcattctc

SEQ ID NO: 109032 - DNA, 15 bp, Homo sapiens
tgtcctctgcattct

SEQ ID NO: 109033 - DNA, 15 bp, Homo sapiens
ctgtcctctgcattc

SEQ ID NO: 109034 - DNA, 15 bp, Homo sapiens
cctgtcctctgcatt

SEQ ID NO: 109035 - DNA, 15 bp, Homo sapiens
tcctgtcctctgcat

SEQ ID NO: 109036 - DNA, 15 bp, Homo sapiens
ttcctgtcctctgca

SEQ ID NO: 109037 - DNA, 15 bp, Homo sapiens
attcctgtcctctgc

SEQ ID NO: 109038 - DNA, 15 bp, Homo sapiens
aattcctgtcctctg

SEQ ID NO: 109039 - DNA, 15 bp, Homo sapiens
aaattcctgtcctct

SEQ ID NO: 109040 - DNA, 15 bp, Homo sapiens
taaattcctgtcctc

SEQ ID NO: 109041 - DNA, 15 bp, Homo sapiens
ttaaattcctgtcct

SEQ ID NO: 109042 - DNA, 15 bp, Homo sapiens
gttaaattcctgtcc

SEQ ID NO: 109043 - DNA, 15 bp, Homo sapiens
ggttaaattcctgtc

SEQ ID NO: 109044 - DNA, 15 bp, Homo sapiens
aggttaaattcctgt

SEQ ID NO: 109045 - DNA, 15 bp, Homo sapiens
taggttaaattcctg

SEQ ID NO: 109046 - DNA, 15 bp, Homo sapiens
ctaggttaaattcct

SEQ ID NO: 109047 - DNA, 15 bp, Homo sapiens
tctaggttaaattcc

SEQ ID NO: 109048 - DNA, 15 bp, Homo sapiens
gtctaggttaaattc

SEQ ID NO: 109049 - DNA, 15 bp, Homo sapiens
agtctaggttaaatt

SEQ ID NO: 109050 - DNA, 15 bp, Homo sapiens
aagtctaggttaaat

SEQ ID NO: 109051 - DNA, 15 bp, Homo sapiens
gaagtctaggttaaa

SEQ ID NO: 109052 - DNA, 15 bp, Homo sapiens
agaagtctaggttaa

SEQ ID NO: 109053 - DNA, 15 bp, Homo sapiens
gagaagtctaggtta

SEQ ID NO: 109054 - DNA, 15 bp, Homo sapiens
tgagaagtctaggtt

SEQ ID NO: 109055 - DNA, 15 bp, Homo sapiens
ctgagaagtctaggt

SEQ ID NO: 109056 - DNA, 15 bp, Homo sapiens
actgagaagtctagg

SEQ ID NO: 109057 - DNA, 15 bp, Homo sapiens
aactgagaagtctag

SEQ ID NO: 109058 - DNA, 15 bp, Homo sapiens
gaactgagaagtcta

SEQ ID NO: 109059 - DNA, 15 bp, Homo sapiens
agaactgagaagtct

SEQ ID NO: 109060 - DNA, 15 bp, Homo sapiens
gagaactgagaagtc

SEQ ID NO: 109061 - DNA, 15 bp, Homo sapiens
ggagaactgagaagt

SEQ ID NO: 109062 - DNA, 15 bp, Homo sapiens
gggagaactgagaag

SEQ ID NO: 109063 - DNA, 15 bp, Homo sapiens
cgggagaactgagaa

SEQ ID NO: 109064 - DNA, 15 bp, Homo sapiens
acgggagaactgaga

SEQ ID NO: 109065 - DNA, 15 bp, Homo sapiens
aacgggagaactgag

SEQ ID NO: 109066 - DNA, 15 bp, Homo sapiens
caacgggagaactga

SEQ ID NO: 109067 - DNA, 15 bp, Homo sapiens
tcaacgggagaactg

SEQ ID NO: 109068 - DNA, 15 bp, Homo sapiens
ttcaacgggagaact

SEQ ID NO: 109069 - DNA, 15 bp, Homo sapiens
cttcaacgggagaac

SEQ ID NO: 109070 - DNA, 15 bp, Homo sapiens
acttcaacgggagaa

SEQ ID NO: 109071 - DNA, 15 bp, Homo sapiens
aacttcaacgggaga

SEQ ID NO: 109072 - DNA, 15 bp, Homo sapiens
caacttcaacgggag

SEQ ID NO: 109073 - DNA, 15 bp, Homo sapiens
tcaacttcaacggga

SEQ ID NO: 109074 - DNA, 15 bp, Homo sapiens
gtcaacttcaacggg

SEQ ID NO: 109075 - DNA, 15 bp, Homo sapiens
tgtcaacttcaacgg

SEQ ID NO: 109076 - DNA, 15 bp, Homo sapiens
atgtcaacttcaacg

SEQ ID NO: 109077 - DNA, 15 bp, Homo sapiens
gatgtcaacttcaac

SEQ ID NO: 109078 - DNA, 15 bp, Homo sapiens
agatgtcaacttcaa

SEQ ID NO: 109079 - DNA, 15 bp, Homo sapiens
cagatgtcaacttca

SEQ ID NO: 109080 - DNA, 15 bp, Homo sapiens
tcagatgtcaacttc

SEQ ID NO: 109081 - DNA, 15 bp, Homo sapiens
ttcagatgtcaactt

SEQ ID NO: 109082 - DNA, 15 bp, Homo sapiens
gttcagatgtcaact

SEQ ID NO: 109083 - DNA, 15 bp, Homo sapiens
agttcagatgtcaac

SEQ ID NO: 109084 - DNA, 15 bp, Homo sapiens
cagttcagatgtcaa

SEQ ID NO: 109085 - DNA, 15 bp, Homo sapiens
tcagttcagatgtca

SEQ ID NO: 109086 - DNA, 15 bp, Homo sapiens
ttcagttcagatgtc

SEQ ID NO: 109087 - DNA, 15 bp, Homo sapiens
tttcagttcagatgt

SEQ ID NO: 109088 - DNA, 15 bp, Homo sapiens
atttcagttcagatg

SEQ ID NO: 109089 - DNA, 15 bp, Homo sapiens
gatttcagttcagat

SEQ ID NO: 109090 - DNA, 15 bp, Homo sapiens
agatttcagttcaga

SEQ ID NO: 109091 - DNA, 15 bp, Homo sapiens
cagatttcagttcag

SEQ ID NO: 109092 - DNA, 15 bp, Homo sapiens
ccagatttcagttca

SEQ ID NO: 109093 - DNA, 15 bp, Homo sapiens
tccagatttcagttc

SEQ ID NO: 109094 - DNA, 15 bp, Homo sapiens
ttccagatttcagtt

SEQ ID NO: 109095 - DNA, 15 bp, Homo sapiens
cttccagatttcagt

SEQ ID NO: 109096 - DNA, 15 bp, Homo sapiens
tcttccagatttcag

SEQ ID NO: 109097 - DNA, 15 bp, Homo sapiens
gtcttccagatttca

SEQ ID NO: 109098 - DNA, 15 bp, Homo sapiens
ggtcttccagatttc

SEQ ID NO: 109099 - DNA, 15 bp, Homo sapiens
tggtcttccagattt

SEQ ID NO: 109100 - DNA, 15 bp, Homo sapiens
ctggtcttccagatt

SEQ ID NO: 109101 - DNA, 15 bp, Homo sapiens
actggtcttccagat

SEQ ID NO: 109102 - DNA, 15 bp, Homo sapiens
tactggtcttccaga

SEQ ID NO: 109103 - DNA, 15 bp, Homo sapiens
ttactggtcttccag

SEQ ID NO: 109104 - DNA, 15 bp, Homo sapiens
cttactggtcttcca

SEQ ID NO: 109105 - DNA, 15 bp, Homo sapiens
tcttactggtcttcc

SEQ ID NO: 109106 - DNA, 15 bp, Homo sapiens
ctcttactggtcttc

SEQ ID NO: 109107 - DNA, 15 bp, Homo sapiens
tctcttactggtctt

SEQ ID NO: 109108 - DNA, 15 bp, Homo sapiens
atctcttactggtct

SEQ ID NO: 109109 - DNA, 15 bp, Homo sapiens
tatctcttactggtc

SEQ ID NO: 109110 - DNA, 15 bp, Homo sapiens
ctatctcttactggt

SEQ ID NO: 109111 - DNA, 15 bp, Homo sapiens
gctatctcttactgg

SEQ ID NO: 109112 - DNA, 15 bp, Homo sapiens
agctatctcttactg

SEQ ID NO: 109113 - DNA, 15 bp, Homo sapiens
tagctatctcttact

SEQ ID NO: 109114 - DNA, 15 bp, Homo sapiens
atagctatctcttac

SEQ ID NO: 109115 - DNA, 15 bp, Homo sapiens
catagctatctctta

SEQ ID NO: 109116 - DNA, 15 bp, Homo sapiens
acatagctatctctt

SEQ ID NO: 109117 - DNA, 15 bp, Homo sapiens
tacatagctatctct

SEQ ID NO: 109118 - DNA, 15 bp, Homo sapiens
ttacatagctatctc

SEQ ID NO: 109119 - DNA, 15 bp, Homo sapiens
tttacatagctatct

SEQ ID NO: 109120 - DNA, 15 bp, Homo sapiens
ttttacatagctatc

SEQ ID NO: 109121 - DNA, 15 bp, Homo sapiens
tttttacatagctat

SEQ ID NO: 109122 - DNA, 15 bp, Homo sapiens
ctttttacatagcta

SEQ ID NO: 109123 - DNA, 15 bp, Homo sapiens
tctttttacatagct

SEQ ID NO: 109124 - DNA, 15 bp, Homo sapiens
ctctttttacatagc

SEQ ID NO: 109125 - DNA, 15 bp, Homo sapiens
cctctttttacatag

SEQ ID NO: 109126 - DNA, 15 bp, Homo sapiens
ccctctttttacata

SEQ ID NO: 109127 - DNA, 15 bp, Homo sapiens
cccctctttttacat

SEQ ID NO: 109128 - DNA, 15 bp, Homo sapiens
tcccctctttttaca

SEQ ID NO: 109129 - DNA, 15 bp, Homo sapiens
ttcccctctttttac

SEQ ID NO: 109130 - DNA, 15 bp, Homo sapiens
cttcccctcttttta

SEQ ID NO: 109131 - DNA, 15 bp, Homo sapiens
ccttcccctcttttt

SEQ ID NO: 109132 - DNA, 15 bp, Homo sapiens
tccttcccctctttt

SEQ ID NO: 109133 - DNA, 15 bp, Homo sapiens
gtccttcccctcttt

SEQ ID NO: 109134 - DNA, 15 bp, Homo sapiens
tgtccttcccctctt

SEQ ID NO: 109135 - DNA, 15 bp, Homo sapiens
ttgtccttcccctct

SEQ ID NO: 109136 - DNA, 15 bp, Homo sapiens
attgtccttcccctc

SEQ ID NO: 109137 - DNA, 15 bp, Homo sapiens
tattgtccttcccct

SEQ ID NO: 109138 - DNA, 15 bp, Homo sapiens
ctattgtccttcccc

SEQ ID NO: 109139 - DNA, 15 bp, Homo sapiens
cctattgtccttccc

SEQ ID NO: 109140 - DNA, 15 bp, Homo sapiens
tcctattgtccttcc

SEQ ID NO: 109141 - DNA, 15 bp, Homo sapiens
ttcctattgtccttc

SEQ ID NO: 109142 - DNA, 15 bp, Homo sapiens
tttcctattgtcctt

SEQ ID NO: 109143 - DNA, 15 bp, Homo sapiens
ctttcctattgtcct

SEQ ID NO: 109144 - DNA, 15 bp, Homo sapiens
tctttcctattgtcc

SEQ ID NO: 109145 - DNA, 15 bp, Homo sapiens
ttctttcctattgtc

SEQ ID NO: 109146 - DNA, 15 bp, Homo sapiens
cttctttcctattgt

SEQ ID NO: 109147 - DNA, 15 bp, Homo sapiens
ccttctttcctattg

SEQ ID NO: 109148 - DNA, 15 bp, Homo sapiens
tccttctttcctatt

SEQ ID NO: 109149 - DNA, 15 bp, Homo sapiens
ttccttctttcctat

SEQ ID NO: 109150 - DNA, 15 bp, Homo sapiens
attccttctttccta

SEQ ID NO: 109151 - DNA, 15 bp, Homo sapiens
cattccttctttcct

SEQ ID NO: 109152 - DNA, 15 bp, Homo sapiens
ccattccttctttcc

SEQ ID NO: 109153 - DNA, 15 bp, Homo sapiens
tccattccttctttc

SEQ ID NO: 109154 - DNA, 15 bp, Homo sapiens
ctccattccttcttt

SEQ ID NO: 109155 - DNA, 15 bp, Homo sapiens
tctccattccttctt

SEQ ID NO: 109156 - DNA, 15 bp, Homo sapiens
ctctccattccttct

SEQ ID NO: 109157 - DNA, 15 bp, Homo sapiens
tctctccattccttc

SEQ ID NO: 109158 - DNA, 15 bp, Homo sapiens
ctctctccattcctt

SEQ ID NO: 109159 - DNA, 15 bp, Homo sapiens
cctctctccattcct

SEQ ID NO: 109160 - DNA, 15 bp, Homo sapiens
gcctctctccattcc

SEQ ID NO: 109161 - DNA, 15 bp, Homo sapiens
ggcctctctccattc

SEQ ID NO: 109162 - DNA, 15 bp, Homo sapiens
gggcctctctccatt

SEQ ID NO: 109163 - DNA, 15 bp, Homo sapiens
tgggcctctctccat

SEQ ID NO: 109164 - DNA, 15 bp, Homo sapiens
ctgggcctctctcca

SEQ ID NO: 109165 - DNA, 15 bp, Homo sapiens
tctgggcctctctcc

SEQ ID NO: 109166 - DNA, 15 bp, Homo sapiens
ttctgggcctctctc

SEQ ID NO: 109167 - DNA, 15 bp, Homo sapiens
tttctgggcctctct

SEQ ID NO: 109168 - DNA, 15 bp, Homo sapiens
gtttctgggcctctc

SEQ ID NO: 109169 - DNA, 15 bp, Homo sapiens
agtttctgggcctct

SEQ ID NO: 109170 - DNA, 15 bp, Homo sapiens
tagtttctgggcctc

SEQ ID NO: 109171 - DNA, 15 bp, Homo sapiens
gtagtttctgggcct

SEQ ID NO: 109172 - DNA, 15 bp, Homo sapiens
tgtagtttctgggcc

SEQ ID NO: 109173 - DNA, 15 bp, Homo sapiens
ctgtagtttctgggc

SEQ ID NO: 109174 - DNA, 15 bp, Homo sapiens
tctgtagtttctggg

SEQ ID NO: 109175 - DNA, 15 bp, Homo sapiens
ctctgtagtttctgg

SEQ ID NO: 109176 - DNA, 15 bp, Homo sapiens
actctgtagtttctg

SEQ ID NO: 109177 - DNA, 15 bp, Homo sapiens
tactctgtagtttct

SEQ ID NO: 109178 - DNA, 15 bp, Homo sapiens
atactctgtagtttc

SEQ ID NO: 109179 - DNA, 15 bp, Homo sapiens
catactctgtagttt

SEQ ID NO: 109180 - DNA, 15 bp, Homo sapiens
ccatactctgtagtt

SEQ ID NO: 109181 - DNA, 15 bp, Homo sapiens
gccatactctgtagt

SEQ ID NO: 109182 - DNA, 15 bp, Homo sapiens
tgccatactctgtag

SEQ ID NO: 109183 - DNA, 15 bp, Homo sapiens
gtgccatactctgta

SEQ ID NO: 109184 - DNA, 15 bp, Homo sapiens
tgtgccatactctgt

SEQ ID NO: 109185 - DNA, 15 bp, Homo sapiens
ttgtgccatactctg

SEQ ID NO: 109186 - DNA, 15 bp, Homo sapiens
cttgtgccatactct

SEQ ID NO: 109187 - DNA, 15 bp, Homo sapiens
acttgtgccatactc

SEQ ID NO: 109188 - DNA, 15 bp, Homo sapiens
tacttgtgccatact

SEQ ID NO: 109189 - DNA, 15 bp, Homo sapiens
ctacttgtgccatac

SEQ ID NO: 109190 - DNA, 15 bp, Homo sapiens
actacttgtgccata

SEQ ID NO: 109191 - DNA, 15 bp, Homo sapiens
aactacttgtgccat

SEQ ID NO: 109192 - DNA, 15 bp, Homo sapiens
aaactacttgtgcca

SEQ ID NO: 109193 - DNA, 15 bp, Homo sapiens
taaactacttgtgcc

SEQ ID NO: 109194 - DNA, 15 bp, Homo sapiens
ctaaactacttgtgc

SEQ ID NO: 109195 - DNA, 15 bp, Homo sapiens
gctaaactacttgtg

SEQ ID NO: 109196 - DNA, 15 bp, Homo sapiens
tgctaaactacttgt

SEQ ID NO: 109197 - DNA, 15 bp, Homo sapiens
atgctaaactacttg

SEQ ID NO: 109198 - DNA, 15 bp, Homo sapiens
aatgctaaactactt

SEQ ID NO: 109199 - DNA, 15 bp, Homo sapiens
caatgctaaactact

SEQ ID NO: 109200 - DNA, 15 bp, Homo sapiens
acaatgctaaactac

SEQ ID NO: 109201 - DNA, 15 bp, Homo sapiens
aacaatgctaaacta

SEQ ID NO: 109202 - DNA, 15 bp, Homo sapiens
caacaatgctaaact

SEQ ID NO: 109203 - DNA, 15 bp, Homo sapiens
ccaacaatgctaaac

SEQ ID NO: 109204 - DNA, 15 bp, Homo sapiens
cccaacaatgctaaa

SEQ ID NO: 109205 - DNA, 15 bp, Homo sapiens
acccaacaatgctaa

SEQ ID NO: 109206 - DNA, 15 bp, Homo sapiens
gacccaacaatgcta

SEQ ID NO: 109207 - DNA, 15 bp, Homo sapiens
tgacccaacaatgct

SEQ ID NO: 109208 - DNA, 15 bp, Homo sapiens
gtgacccaacaatgc

SEQ ID NO: 109209 - DNA, 15 bp, Homo sapiens
tgtgacccaacaatg

SEQ ID NO: 109210 - DNA, 15 bp, Homo sapiens
ttgtgacccaacaat

SEQ ID NO: 109211 - DNA, 15 bp, Homo sapiens
tttgtgacccaacaa

SEQ ID NO: 109212 - DNA, 15 bp, Homo sapiens
atttgtgacccaaca

SEQ ID NO: 109213 - DNA, 15 bp, Homo sapiens
aatttgtgacccaac

SEQ ID NO: 109214 - DNA, 15 bp, Homo sapiens
gaatttgtgacccaa

SEQ ID NO: 109215 - DNA, 15 bp, Homo sapiens
agaatttgtgaccca

SEQ ID NO: 109216 - DNA, 15 bp, Homo sapiens
tagaatttgtgaccc

SEQ ID NO: 109217 - DNA, 15 bp, Homo sapiens
ttagaatttgtgacc

SEQ ID NO: 109218 - DNA, 15 bp, Homo sapiens
cttagaatttgtgac

SEQ ID NO: 109219 - DNA, 15 bp, Homo sapiens
ccttagaatttgtga

SEQ ID NO: 109220 - DNA, 15 bp, Homo sapiens
tccttagaatttgtg

SEQ ID NO: 109221 - DNA, 15 bp, Homo sapiens
atccttagaatttgt

SEQ ID NO: 109222 - DNA, 15 bp, Homo sapiens
tatccttagaatttg

SEQ ID NO: 109223 - DNA, 15 bp, Homo sapiens
atatccttagaattt

SEQ ID NO: 109224 - DNA, 15 bp, Homo sapiens
catatccttagaatt

SEQ ID NO: 109225 - DNA, 15 bp, Homo sapiens
tcatatccttagaat

SEQ ID NO: 109226 - DNA, 15 bp, Homo sapiens
ttcatatccttagaa

SEQ ID NO: 109227 - DNA, 15 bp, Homo sapiens
tttcatatccttaga

SEQ ID NO: 109228 - DNA, 15 bp, Homo sapiens
ctttcatatccttag

SEQ ID NO: 109229 - DNA, 15 bp, Homo sapiens
tctttcatatcctta

SEQ ID NO: 109230 - DNA, 15 bp, Homo sapiens
atctttcatatcctt

SEQ ID NO: 109231 - DNA, 15 bp, Homo sapiens
tatctttcatatcct

SEQ ID NO: 109232 - DNA, 15 bp, Homo sapiens
ttatctttcatatcc

SEQ ID NO: 109233 - DNA, 15 bp, Homo sapiens
tttatctttcatatc

SEQ ID NO: 109234 - DNA, 15 bp, Homo sapiens
ctttatctttcatat

SEQ ID NO: 109235 - DNA, 15 bp, Homo sapiens
actttatctttcata

SEQ ID NO: 109236 - DNA, 15 bp, Homo sapiens
aactttatctttcat

SEQ ID NO: 109237 - DNA, 15 bp, Homo sapiens
caactttatctttca

SEQ ID NO: 109238 - DNA, 15 bp, Homo sapiens
tcaactttatctttc

SEQ ID NO: 109239 - DNA, 15 bp, Homo sapiens
ttcaactttatcttt

SEQ ID NO: 109240 - DNA, 15 bp, Homo sapiens
cttcaactttatctt

SEQ ID NO: 109241 - DNA, 15 bp, Homo sapiens
tcttcaactttatct

SEQ ID NO: 109242 - DNA, 15 bp, Homo sapiens
ttcttcaactttatc

SEQ ID NO: 109243 - DNA, 15 bp, Homo sapiens
cttcttcaactttat

SEQ ID NO: 109244 - DNA, 15 bp, Homo sapiens
acttcttcaacttta

SEQ ID NO: 109245 - DNA, 15 bp, Homo sapiens
cacttcttcaacttt

SEQ ID NO: 109246 - DNA, 15 bp, Homo sapiens
ccacttcttcaactt

SEQ ID NO: 109247 - DNA, 15 bp, Homo sapiens
accacttcttcaact

SEQ ID NO: 109248 - DNA, 15 bp, Homo sapiens
caccacttcttcaac

SEQ ID NO: 109249 - DNA, 15 bp, Homo sapiens
ccaccacttcttcaa

SEQ ID NO: 109250 - DNA, 15 bp, Homo sapiens
cccaccacttcttca

SEQ ID NO: 109251 - DNA, 15 bp, Homo sapiens
ccccaccacttcttc

SEQ ID NO: 109252 - DNA, 15 bp, Homo sapiens
gccccaccacttctt

SEQ ID NO: 109253 - DNA, 15 bp, Homo sapiens
agccccaccacttct

SEQ ID NO: 109254 - DNA, 15 bp, Homo sapiens
cagccccaccacttc

SEQ ID NO: 109255 - DNA, 15 bp, Homo sapiens
ccagccccaccactt

SEQ ID NO: 109256 - DNA, 15 bp, Homo sapiens
cccagccccaccact

SEQ ID NO: 109257 - DNA, 15 bp, Homo sapiens
ccccagccccaccac

SEQ ID NO: 109258 - DNA, 15 bp, Homo sapiens
tccccagccccacca

SEQ ID NO: 109259 - DNA, 15 bp, Homo sapiens
ctccccagccccacc

SEQ ID NO: 109260 - DNA, 15 bp, Homo sapiens
cctccccagccccac

SEQ ID NO: 109261 - DNA, 15 bp, Homo sapiens
tcctccccagcccca

SEQ ID NO: 109262 - DNA, 15 bp, Homo sapiens
gtcctccccagcccc

SEQ ID NO: 109263 - DNA, 15 bp, Homo sapiens
tgtcctccccagccc

SEQ ID NO: 109264 - DNA, 15 bp, Homo sapiens
ctgtcctccccagcc

SEQ ID NO: 109265 - DNA, 15 bp, Homo sapiens
gctgtcctccccagc

SEQ ID NO: 109266 - DNA, 15 bp, Homo sapiens
agctgtcctccccag

SEQ ID NO: 109267 - DNA, 15 bp, Homo sapiens
gagctgtcctcccca

SEQ ID NO: 109268 - DNA, 15 bp, Homo sapiens
ggagctgtcctcccc

SEQ ID NO: 109269 - DNA, 15 bp, Homo sapiens
aggagctgtcctccc

SEQ ID NO: 109270 - DNA, 15 bp, Homo sapiens
caggagctgtcctcc

SEQ ID NO: 109271 - DNA, 15 bp, Homo sapiens
acaggagctgtcctc

SEQ ID NO: 109272 - DNA, 15 bp, Homo sapiens
tacaggagctgtcct

SEQ ID NO: 109273 - DNA, 15 bp, Homo sapiens
ctacaggagctgtcc

SEQ ID NO: 109274 - DNA, 15 bp, Homo sapiens
tctacaggagctgtc

SEQ ID NO: 109275 - DNA, 15 bp, Homo sapiens
ctctacaggagctgt

SEQ ID NO: 109276 - DNA, 15 bp, Homo sapiens
gctctacaggagctg

SEQ ID NO: 109277 - DNA, 15 bp, Homo sapiens
ggctctacaggagct

SEQ ID NO: 109278 - DNA, 15 bp, Homo sapiens
aggctctacaggagc

SEQ ID NO: 109279 - DNA, 15 bp, Homo sapiens
aaggctctacaggag

SEQ ID NO: 109280 - DNA, 15 bp, Homo sapiens
aaaggctctacagga

SEQ ID NO: 109281 - DNA, 15 bp, Homo sapiens
aaaaggctctacagg

SEQ ID NO: 109282 - DNA, 15 bp, Homo sapiens
taaaaggctctacag

SEQ ID NO: 109283 - DNA, 15 bp, Homo sapiens
gtaaaaggctctaca

SEQ ID NO: 109284 - DNA, 15 bp, Homo sapiens
tgtaaaaggctctac

SEQ ID NO: 109285 - DNA, 15 bp, Homo sapiens
ctgtaaaaggctcta

SEQ ID NO: 109286 - DNA, 15 bp, Homo sapiens
gctgtaaaaggctct

SEQ ID NO: 109287 - DNA, 15 bp, Homo sapiens
cgctgtaaaaggctc

SEQ ID NO: 109288 - DNA, 15 bp, Homo sapiens
ccgctgtaaaaggct

SEQ ID NO: 109289 - DNA, 15 bp, Homo sapiens
cccgctgtaaaaggc

SEQ ID NO: 109290 - DNA, 15 bp, Homo sapiens
tcccgctgtaaaagg

SEQ ID NO: 109291 - DNA, 15 bp, Homo sapiens
ctcccgctgtaaaag

SEQ ID NO: 109292 - DNA, 15 bp, Homo sapiens
tctcccgctgtaaaa

SEQ ID NO: 109293 - DNA, 15 bp, Homo sapiens
ttctcccgctgtaaa

SEQ ID NO: 109294 - DNA, 15 bp, Homo sapiens
cttctcccgctgtaa

SEQ ID NO: 109295 - DNA, 15 bp, Homo sapiens
ccttctcccgctgta

SEQ ID NO: 109296 - DNA, 15 bp, Homo sapiens
tccttctcccgctgt

SEQ ID NO: 109297 - DNA, 15 bp, Homo sapiens
ctccttctcccgctg

SEQ ID NO: 109298 - DNA, 15 bp, Homo sapiens
actccttctcccgct

SEQ ID NO: 109299 - DNA, 15 bp, Homo sapiens
aactccttctcccgc

SEQ ID NO: 109300 - DNA, 15 bp, Homo sapiens
aaactccttctcccg

SEQ ID NO: 109301 - DNA, 15 bp, Homo sapiens
caaactccttctccc

SEQ ID NO: 109302 - DNA, 15 bp, Homo sapiens
ccaaactccttctcc

SEQ ID NO: 109303 - DNA, 15 bp, Homo sapiens
gccaaactccttctc

SEQ ID NO: 109304 - DNA, 15 bp, Homo sapiens
agccaaactccttct

SEQ ID NO: 109305 - DNA, 15 bp, Homo sapiens
tagccaaactccttc

SEQ ID NO: 109306 - DNA, 15 bp, Homo sapiens
atagccaaactcctt

SEQ ID NO: 109307 - DNA, 15 bp, Homo sapiens
catagccaaactcct

SEQ ID NO: 109308 - DNA, 15 bp, Homo sapiens
ccatagccaaactcc

SEQ ID NO: 109309 - DNA, 15 bp, Homo sapiens
accatagccaaactc

SEQ ID NO: 109310 - DNA, 15 bp, Homo sapiens
gaccatagccaaact

SEQ ID NO: 109311 - DNA, 15 bp, Homo sapiens
ggaccatagccaaac

SEQ ID NO: 109312 - DNA, 15 bp, Homo sapiens
aggaccatagccaaa

SEQ ID NO: 109313 - DNA, 15 bp, Homo sapiens
caggaccatagccaa

SEQ ID NO: 109314 - DNA, 15 bp, Homo sapiens
gcaggaccatagcca

SEQ ID NO: 109315 - DNA, 15 bp, Homo sapiens
tgcaggaccatagcc

SEQ ID NO: 109316 - DNA, 15 bp, Homo sapiens
ctgcaggaccatagc

SEQ ID NO: 109317 - DNA, 15 bp, Homo sapiens
cctgcaggaccatag

SEQ ID NO: 109318 - DNA, 15 bp, Homo sapiens
gcctgcaggaccata

SEQ ID NO: 109319 - DNA, 15 bp, Homo sapiens
tgcctgcaggaccat

SEQ ID NO: 109320 - DNA, 15 bp, Homo sapiens
ctgcctgcaggacca

SEQ ID NO: 109321 - DNA, 15 bp, Homo sapiens
cctgcctgcaggacc

SEQ ID NO: 109322 - DNA, 15 bp, Homo sapiens
ccctgcctgcaggac

SEQ ID NO: 109323 - DNA, 15 bp, Homo sapiens
tccctgcctgcagga

SEQ ID NO: 109324 - DNA, 15 bp, Homo sapiens
ctccctgcctgcagg

SEQ ID NO: 109325 - DNA, 15 bp, Homo sapiens
tctccctgcctgcag

SEQ ID NO: 109326 - DNA, 15 bp, Homo sapiens
ttctccctgcctgca

SEQ ID NO: 109327 - DNA, 15 bp, Homo sapiens
tttctccctgcctgc

SEQ ID NO: 109328 - DNA, 15 bp, Homo sapiens
gtttctccctgcctg

SEQ ID NO: 109329 - DNA, 15 bp, Homo sapiens
ggtttctccctgcct

SEQ ID NO: 109330 - DNA, 15 bp, Homo sapiens
tggtttctccctgcc

SEQ ID NO: 109331 - DNA, 15 bp, Homo sapiens
gtggtttctccctgc

SEQ ID NO: 109332 - DNA, 15 bp, Homo sapiens
agtggtttctccctg

SEQ ID NO: 109333 - DNA, 15 bp, Homo sapiens
cagtggtttctccct

SEQ ID NO: 109334 - DNA, 15 bp, Homo sapiens
tcagtggtttctccc

SEQ ID NO: 109335 - DNA, 15 bp, Homo sapiens
ttcagtggtttctcc

SEQ ID NO: 109336 - DNA, 15 bp, Homo sapiens
cttcagtggtttctc

SEQ ID NO: 109337 - DNA, 15 bp, Homo sapiens
ccttcagtggtttct

SEQ ID NO: 109338 - DNA, 15 bp, Homo sapiens
cccttcagtggtttc

SEQ ID NO: 109339 - DNA, 15 bp, Homo sapiens
ccccttcagtggttt

SEQ ID NO: 109340 - DNA, 15 bp, Homo sapiens
tccccttcagtggtt

SEQ ID NO: 109341 - DNA, 15 bp, Homo sapiens
ctccccttcagtggt

SEQ ID NO: 109342 - DNA, 15 bp, Homo sapiens
tctccccttcagtgg

SEQ ID NO: 109343 - DNA, 15 bp, Homo sapiens
ttctccccttcagtg

SEQ ID NO: 109344 - DNA, 15 bp, Homo sapiens
tttctccccttcagt

SEQ ID NO: 109345 - DNA, 15 bp, Homo sapiens
gtttctccccttcag

SEQ ID NO: 109346 - DNA, 15 bp, Homo sapiens
tgtttctccccttca

SEQ ID NO: 109347 - DNA, 15 bp, Homo sapiens
atgtttctccccttc

SEQ ID NO: 109348 - DNA, 15 bp, Homo sapiens
tatgtttctcccctt

SEQ ID NO: 109349 - DNA, 15 bp, Homo sapiens
gtatgtttctcccct

SEQ ID NO: 109350 - DNA, 15 bp, Homo sapiens
tgtatgtttctcccc

SEQ ID NO: 109351 - DNA, 15 bp, Homo sapiens
ctgtatgtttctccc

SEQ ID NO: 109352 - DNA, 15 bp, Homo sapiens
tctgtatgtttctcc

SEQ ID NO: 109353 - DNA, 15 bp, Homo sapiens
ttctgtatgtttctc

SEQ ID NO: 109354 - DNA, 15 bp, Homo sapiens
attctgtatgtttct

SEQ ID NO: 109355 - DNA, 15 bp, Homo sapiens
tattctgtatgtttc

SEQ ID NO: 109356 - DNA, 15 bp, Homo sapiens
ttattctgtatgttt

SEQ ID NO: 109357 - DNA, 15 bp, Homo sapiens
tttattctgtatgtt

SEQ ID NO: 109358 - DNA, 15 bp, Homo sapiens
atttattctgtatgt

SEQ ID NO: 109359 - DNA, 15 bp, Homo sapiens
aatttattctgtatg

SEQ ID NO: 109360 - DNA, 15 bp, Homo sapiens
aaatttattctgtat

SEQ ID NO: 109361 - DNA, 15 bp, Homo sapiens
caaatttattctgta

SEQ ID NO: 109362 - DNA, 15 bp, Homo sapiens
tcaaatttattctgt

SEQ ID NO: 109363 - DNA, 15 bp, Homo sapiens
ctcaaatttattctg

SEQ ID NO: 109364 - DNA, 15 bp, Homo sapiens
actcaaatttattct

SEQ ID NO: 109365 - DNA, 15 bp, Homo sapiens
tactcaaatttattc

SEQ ID NO: 109366 - DNA, 15 bp, Homo sapiens
ttactcaaatttatt

SEQ ID NO: 109367 - DNA, 15 bp, Homo sapiens
cttactcaaatttat

SEQ ID NO: 109368 - DNA, 15 bp, Homo sapiens
tcttactcaaattta

SEQ ID NO: 109369 - DNA, 15 bp, Homo sapiens
ttcttactcaaattt

SEQ ID NO: 109370 - DNA, 15 bp, Homo sapiens
cttcttactcaaatt

SEQ ID NO: 109371 - DNA, 15 bp, Homo sapiens
gcttcttactcaaat

SEQ ID NO: 109372 - DNA, 15 bp, Homo sapiens
agcttcttactcaaa

SEQ ID NO: 109373 - DNA, 15 bp, Homo sapiens
aagcttcttactcaa

SEQ ID NO: 109374 - DNA, 15 bp, Homo sapiens
taagcttcttactca

SEQ ID NO: 109375 - DNA, 15 bp, Homo sapiens
ttaagcttcttactc

SEQ ID NO: 109376 - DNA, 15 bp, Homo sapiens
tttaagcttcttact

SEQ ID NO: 109377 - DNA, 15 bp, Homo sapiens
atttaagcttcttac

SEQ ID NO: 109378 - DNA, 15 bp, Homo sapiens
gatttaagcttctta

SEQ ID NO: 109379 - DNA, 15 bp, Homo sapiens
agatttaagcttctt

SEQ ID NO: 109380 - DNA, 15 bp, Homo sapiens
gagatttaagcttct

SEQ ID NO: 109381 - DNA, 15 bp, Homo sapiens
ggagatttaagcttc

SEQ ID NO: 109382 - DNA, 15 bp, Homo sapiens
gggagatttaagctt

SEQ ID NO: 109383 - DNA, 15 bp, Homo sapiens
ggggagatttaagct

SEQ ID NO: 109384 - DNA, 15 bp, Homo sapiens
tggggagatttaagc

SEQ ID NO: 109385 - DNA, 15 bp, Homo sapiens
ttggggagatttaag

SEQ ID NO: 109386 - DNA, 15 bp, Homo sapiens
cttggggagatttaa

SEQ ID NO: 109387 - DNA, 15 bp, Homo sapiens
gcttggggagattta

SEQ ID NO: 109388 - DNA, 15 bp, Homo sapiens
ggcttggggagattt

SEQ ID NO: 109389 - DNA, 15 bp, Homo sapiens
gggcttggggagatt

SEQ ID NO: 109390 - DNA, 15 bp, Homo sapiens
agggcttggggagat

SEQ ID NO: 109391 - DNA, 15 bp, Homo sapiens
aagggcttggggaga

SEQ ID NO: 109392 - DNA, 15 bp, Homo sapiens
aaagggcttggggag

SEQ ID NO: 109393 - DNA, 15 bp, Homo sapiens
aaaagggcttgggga

SEQ ID NO: 109394 - DNA, 15 bp, Homo sapiens
taaaagggcttgggg

SEQ ID NO: 109395 - DNA, 15 bp, Homo sapiens
ttaaaagggcttggg

SEQ ID NO: 109396 - DNA, 15 bp, Homo sapiens
tttaaaagggcttgg

SEQ ID NO: 109397 - DNA, 15 bp, Homo sapiens
ttttaaaagggcttg

SEQ ID NO: 109398 - DNA, 15 bp, Homo sapiens
attttaaaagggctt

SEQ ID NO: 109399 - DNA, 15 bp, Homo sapiens
tattttaaaagggct

SEQ ID NO: 109400 - DNA, 15 bp, Homo sapiens
ttattttaaaagggc

SEQ ID NO: 109401 - DNA, 15 bp, Homo sapiens
tttattttaaaaggg

SEQ ID NO: 109402 - DNA, 15 bp, Homo sapiens
atttattttaaaagg

SEQ ID NO: 109403 - DNA, 15 bp, Homo sapiens
aatttattttaaaag

SEQ ID NO: 109404 - DNA, 15 bp, Homo sapiens
taatttattttaaaa

SEQ ID NO: 109405 - DNA, 15 bp, Homo sapiens
ttaatttattttaaa

SEQ ID NO: 109406 - DNA, 15 bp, Homo sapiens
cttaatttattttaa

SEQ ID NO: 109407 - DNA, 15 bp, Homo sapiens
tcttaatttatttta

SEQ ID NO: 109408 - DNA, 15 bp, Homo sapiens
atcttaatttatttt

SEQ ID NO: 109409 - DNA, 15 bp, Homo sapiens
tatcttaatttattt

SEQ ID NO: 109410 - DNA, 15 bp, Homo sapiens
atatcttaatttatt

SEQ ID NO: 109411 - DNA, 15 bp, Homo sapiens
tatatcttaatttat

SEQ ID NO: 109412 - DNA, 15 bp, Homo sapiens
ttatatcttaattta

SEQ ID NO: 109413 - DNA, 15 bp, Homo sapiens
tttatatcttaattt

SEQ ID NO: 109414 - DNA, 15 bp, Homo sapiens
ctttatatcttaatt

SEQ ID NO: 109415 - DNA, 15 bp, Homo sapiens
gctttatatcttaat

SEQ ID NO: 109416 - DNA, 15 bp, Homo sapiens
ggctttatatcttaa

SEQ ID NO: 109417 - DNA, 15 bp, Homo sapiens
aggctttatatctta

SEQ ID NO: 109418 - DNA, 15 bp, Homo sapiens
aaggctttatatctt

SEQ ID NO: 109419 - DNA, 15 bp, Homo sapiens
aaaggctttatatct

SEQ ID NO: 109420 - DNA, 15 bp, Homo sapiens
caaaggctttatatc

SEQ ID NO: 109421 - DNA, 15 bp, Homo sapiens
ccaaaggctttatat

SEQ ID NO: 109422 - DNA, 15 bp, Homo sapiens
cccaaaggctttata

SEQ ID NO: 109423 - DNA, 15 bp, Homo sapiens
acccaaaggctttat

SEQ ID NO: 109424 - DNA, 15 bp, Homo sapiens
aacccaaaggcttta

SEQ ID NO: 109425 - DNA, 15 bp, Homo sapiens
aaacccaaaggcttt

SEQ ID NO: 109426 - DNA, 15 bp, Homo sapiens
gaaacccaaaggctt

SEQ ID NO: 109427 - DNA, 15 bp, Homo sapiens
agaaacccaaaggct

SEQ ID NO: 109428 - DNA, 15 bp, Homo sapiens
aagaaacccaaaggc

SEQ ID NO: 109429 - DNA, 15 bp, Homo sapiens
aaagaaacccaaagg

SEQ ID NO: 109430 - DNA, 15 bp, Homo sapiens
taaagaaacccaaag

SEQ ID NO: 109431 - DNA, 15 bp, Homo sapiens
ataaagaaacccaaa

SEQ ID NO: 109432 - DNA, 15 bp, Homo sapiens
cataaagaaacccaa

SEQ ID NO: 109433 - DNA, 15 bp, Homo sapiens
gcataaagaaaccca

SEQ ID NO: 109434 - DNA, 15 bp, Homo sapiens
agcataaagaaaccc

SEQ ID NO: 109435 - DNA, 15 bp, Homo sapiens
aagcataaagaaacc

SEQ ID NO: 109436 - DNA, 15 bp, Homo sapiens
aaagcataaagaaac

SEQ ID NO: 109437 - DNA, 15 bp, Homo sapiens
caaagcataaagaaa

SEQ ID NO: 109438 - DNA, 15 bp, Homo sapiens
acaaagcataaagaa

SEQ ID NO: 109439 - DNA, 15 bp, Homo sapiens
gacaaagcataaaga

SEQ ID NO: 109440 - DNA, 15 bp, Homo sapiens
ggacaaagcataaag

SEQ ID NO: 109441 - DNA, 15 bp, Homo sapiens
aggacaaagcataaa

SEQ ID NO: 109442 - DNA, 15 bp, Homo sapiens
taggacaaagcataa

SEQ ID NO: 109443 - DNA, 15 bp, Homo sapiens
ataggacaaagcata

SEQ ID NO: 109444 - DNA, 15 bp, Homo sapiens
aataggacaaagcat

SEQ ID NO: 109445 - DNA, 15 bp, Homo sapiens
gaataggacaaagca

SEQ ID NO: 109446 - DNA, 15 bp, Homo sapiens
agaataggacaaagc

SEQ ID NO: 109447 - DNA, 15 bp, Homo sapiens
aagaataggacaaag

SEQ ID NO: 109448 - DNA, 15 bp, Homo sapiens
gaagaataggacaaa

SEQ ID NO: 109449 - DNA, 15 bp, Homo sapiens
agaagaataggacaa

SEQ ID NO: 109450 - DNA, 15 bp, Homo sapiens
tagaagaataggaca

SEQ ID NO: 109451 - DNA, 15 bp, Homo sapiens
ttagaagaataggac

SEQ ID NO: 109452 - DNA, 15 bp, Homo sapiens
attagaagaatagga

SEQ ID NO: 109453 - DNA, 15 bp, Homo sapiens
aattagaagaatagg

SEQ ID NO: 109454 - DNA, 15 bp, Homo sapiens
caattagaagaatag

SEQ ID NO: 109455 - DNA, 15 bp, Homo sapiens
acaattagaagaata

SEQ ID NO: 109456 - DNA, 15 bp, Homo sapiens
gacaattagaagaat

SEQ ID NO: 109457 - DNA, 15 bp, Homo sapiens
ggacaattagaagaa

SEQ ID NO: 109458 - DNA, 15 bp, Homo sapiens
tggacaattagaaga

SEQ ID NO: 109459 - DNA, 15 bp, Homo sapiens
ttggacaattagaag

SEQ ID NO: 109460 - DNA, 15 bp, Homo sapiens
tttggacaattagaa

SEQ ID NO: 109461 - DNA, 15 bp, Homo sapiens
ttttggacaattaga

SEQ ID NO: 109462 - DNA, 15 bp, Homo sapiens
gttttggacaattag

SEQ ID NO: 109463 - DNA, 15 bp, Homo sapiens
tgttttggacaatta

SEQ ID NO: 109464 - DNA, 15 bp, Homo sapiens
ttgttttggacaatt

SEQ ID NO: 109465 - DNA, 15 bp, Homo sapiens
tttgttttggacaat

SEQ ID NO: 109466 - DNA, 15 bp, Homo sapiens
ttttgttttggacaa

SEQ ID NO: 109467 - DNA, 15 bp, Homo sapiens
gttttgttttggaca

SEQ ID NO: 109468 - DNA, 15 bp, Homo sapiens
tgttttgttttggac

SEQ ID NO: 109469 - DNA, 15 bp, Homo sapiens
ttgttttgttttgga

SEQ ID NO: 109470 - DNA, 15 bp, Homo sapiens
tttgttttgttttgg

SEQ ID NO: 109471 - DNA, 15 bp, Homo sapiens
ttttgttttgttttg

SEQ ID NO: 109472 - DNA, 15 bp, Homo sapiens
tttttgttttgtttt

SEQ ID NO: 109473 - DNA, 15 bp, Homo sapiens
gtttttgttttgttt

SEQ ID NO: 109474 - DNA, 15 bp, Homo sapiens
ggtttttgttttgtt

SEQ ID NO: 109475 - DNA, 15 bp, Homo sapiens
aggtttttgttttgt

SEQ ID NO: 109476 - DNA, 15 bp, Homo sapiens
aaggtttttgttttg

SEQ ID NO: 109477 - DNA, 15 bp, Homo sapiens
gaaggtttttgtttt

SEQ ID NO: 109478 - DNA, 15 bp, Homo sapiens
ggaaggtttttgttt

SEQ ID NO: 109479 - DNA, 15 bp, Homo sapiens
aggaaggtttttgtt

SEQ ID NO: 109480 - DNA, 15 bp, Homo sapiens
aaggaaggtttttgt

SEQ ID NO: 109481 - DNA, 15 bp, Homo sapiens
aaaggaaggtttttg

SEQ ID NO: 109482 - DNA, 15 bp, Homo sapiens
aaaaggaaggttttt

SEQ ID NO: 109483 - DNA, 15 bp, Homo sapiens
gaaaaggaaggtttt

SEQ ID NO: 109484 - DNA, 15 bp, Homo sapiens
agaaaaggaaggttt

SEQ ID NO: 109485 - DNA, 15 bp, Homo sapiens
cagaaaaggaaggtt

SEQ ID NO: 109486 - DNA, 15 bp, Homo sapiens
acagaaaaggaaggt

SEQ ID NO: 109487 - DNA, 15 bp, Homo sapiens
tacagaaaaggaagg

SEQ ID NO: 109488 - DNA, 15 bp, Homo sapiens
gtacagaaaaggaag

SEQ ID NO: 109489 - DNA, 15 bp, Homo sapiens
ggtacagaaaaggaa

SEQ ID NO: 109490 - DNA, 15 bp, Homo sapiens
aggtacagaaaagga

SEQ ID NO: 109491 - DNA, 15 bp, Homo sapiens
taggtacagaaaagg

SEQ ID NO: 109492 - DNA, 15 bp, Homo sapiens
ataggtacagaaaag

SEQ ID NO: 109493 - DNA, 15 bp, Homo sapiens
aataggtacagaaaa

SEQ ID NO: 109494 - DNA, 15 bp, Homo sapiens
taataggtacagaaa

SEQ ID NO: 109495 - DNA, 15 bp, Homo sapiens
ttaataggtacagaa

SEQ ID NO: 109496 - DNA, 15 bp, Homo sapiens
tttaataggtacaga

SEQ ID NO: 109497 - DNA, 15 bp, Homo sapiens
ttttaataggtacag

SEQ ID NO: 109498 - DNA, 15 bp, Homo sapiens
cttttaataggtaca

SEQ ID NO: 109499 - DNA, 15 bp, Homo sapiens
ccttttaataggtac

SEQ ID NO: 109500 - DNA, 15 bp, Homo sapiens
accttttaataggta

SEQ ID NO: 109501 - DNA, 15 bp, Homo sapiens
aaccttttaataggt

SEQ ID NO: 109502 - DNA, 15 bp, Homo sapiens
taaccttttaatagg

SEQ ID NO: 109503 - DNA, 15 bp, Homo sapiens
ttaaccttttaatag

SEQ ID NO: 109504 - DNA, 15 bp, Homo sapiens
attaaccttttaata

SEQ ID NO: 109505 - DNA, 15 bp, Homo sapiens
aattaaccttttaat

SEQ ID NO: 109506 - DNA, 15 bp, Homo sapiens
aaattaaccttttaa

SEQ ID NO: 109507 - DNA, 15 bp, Homo sapiens
aaaattaacctttta

SEQ ID NO: 109508 - DNA, 15 bp, Homo sapiens
taaaattaacctttt

SEQ ID NO: 109509 - DNA, 15 bp, Homo sapiens
ataaaattaaccttt

SEQ ID NO: 109510 - DNA, 15 bp, Homo sapiens
tataaaattaacctt

SEQ ID NO: 109511 - DNA, 15 bp, Homo sapiens
ttataaaattaacct

SEQ ID NO: 109512 - DNA, 15 bp, Homo sapiens
tttataaaattaacc

SEQ ID NO: 109513 - DNA, 15 bp, Homo sapiens
ctttataaaattaac

SEQ ID NO: 109514 - DNA, 15 bp, Homo sapiens
actttataaaattaa

SEQ ID NO: 109515 - DNA, 15 bp, Homo sapiens
aactttataaaatta

SEQ ID NO: 109516 - DNA, 15 bp, Homo sapiens
taactttataaaatt

SEQ ID NO: 109517 - DNA, 15 bp, Homo sapiens
gtaactttataaaat

SEQ ID NO: 109518 - DNA, 15 bp, Homo sapiens
tgtaactttataaaa

SEQ ID NO: 109519 - DNA, 15 bp, Homo sapiens
ctgtaactttataaa

SEQ ID NO: 109520 - DNA, 15 bp, Homo sapiens
tctgtaactttataa

SEQ ID NO: 109521 - DNA, 15 bp, Homo sapiens
gtctgtaactttata

SEQ ID NO: 109522 - DNA, 15 bp, Homo sapiens
tgtctgtaactttat

SEQ ID NO: 109523 - DNA, 15 bp, Homo sapiens
ctgtctgtaacttta

SEQ ID NO: 109524 - DNA, 15 bp, Homo sapiens
gctgtctgtaacttt

SEQ ID NO: 109525 - DNA, 15 bp, Homo sapiens
tgctgtctgtaactt

SEQ ID NO: 109526 - DNA, 15 bp, Homo sapiens
atgctgtctgtaact

SEQ ID NO: 109527 - DNA, 15 bp, Homo sapiens
catgctgtctgtaac

SEQ ID NO: 109528 - DNA, 15 bp, Homo sapiens
gcatgctgtctgtaa

SEQ ID NO: 109529 - DNA, 15 bp, Homo sapiens
agcatgctgtctgta

SEQ ID NO: 109530 - DNA, 15 bp, Homo sapiens
cagcatgctgtctgt

SEQ ID NO: 109531 - DNA, 15 bp, Homo sapiens
tcagcatgctgtctg

SEQ ID NO: 109532 - DNA, 15 bp, Homo sapiens
atcagcatgctgtct

SEQ ID NO: 109533 - DNA, 15 bp, Homo sapiens
aatcagcatgctgtc

SEQ ID NO: 109534 - DNA, 15 bp, Homo sapiens
taatcagcatgctgt

SEQ ID NO: 109535 - DNA, 15 bp, Homo sapiens
ttaatcagcatgctg

SEQ ID NO: 109536 - DNA, 15 bp, Homo sapiens
tttaatcagcatgct

SEQ ID NO: 109537 - DNA, 15 bp, Homo sapiens
ctttaatcagcatgc

SEQ ID NO: 109538 - DNA, 15 bp, Homo sapiens
tctttaatcagcatg

SEQ ID NO: 109539 - DNA, 15 bp, Homo sapiens
ttctttaatcagcat

SEQ ID NO: 109540 - DNA, 15 bp, Homo sapiens
attctttaatcagca

SEQ ID NO: 109541 - DNA, 15 bp, Homo sapiens
aattctttaatcagc

SEQ ID NO: 109542 - DNA, 15 bp, Homo sapiens
gaattctttaatcag

SEQ ID NO: 109543 - DNA, 15 bp, Homo sapiens
agaattctttaatca

SEQ ID NO: 109544 - DNA, 15 bp, Homo sapiens
aagaattctttaatc

SEQ ID NO: 109545 - DNA, 15 bp, Homo sapiens
caagaattctttaat

SEQ ID NO: 109546 - DNA, 15 bp, Homo sapiens
tcaagaattctttaa

SEQ ID NO: 109547 - DNA, 15 bp, Homo sapiens
atcaagaattcttta

SEQ ID NO: 109548 - DNA, 15 bp, Homo sapiens
tatcaagaattcttt

SEQ ID NO: 109549 - DNA, 15 bp, Homo sapiens
ttatcaagaattctt

SEQ ID NO: 109550 - DNA, 15 bp, Homo sapiens
attatcaagaattct

SEQ ID NO: 109551 - DNA, 15 bp, Homo sapiens
aattatcaagaattc

SEQ ID NO: 109552 - DNA, 15 bp, Homo sapiens
taattatcaagaatt

SEQ ID NO: 109553 - DNA, 15 bp, Homo sapiens
ctaattatcaagaat

SEQ ID NO: 109554 - DNA, 15 bp, Homo sapiens
gctaattatcaagaa

SEQ ID NO: 109555 - DNA, 15 bp, Homo sapiens
agctaattatcaaga

SEQ ID NO: 109556 - DNA, 15 bp, Homo sapiens
tagctaattatcaag

SEQ ID NO: 109557 - DNA, 15 bp, Homo sapiens
atagctaattatcaa

SEQ ID NO: 109558 - DNA, 15 bp, Homo sapiens
aatagctaattatca

SEQ ID NO: 109559 - DNA, 15 bp, Homo sapiens
aaatagctaattatc

SEQ ID NO: 109560 - DNA, 15 bp, Homo sapiens
aaaatagctaattat

SEQ ID NO: 109561 - DNA, 15 bp, Homo sapiens
caaaatagctaatta

SEQ ID NO: 109562 - DNA, 15 bp, Homo sapiens
acaaaatagctaatt

SEQ ID NO: 109563 - DNA, 15 bp, Homo sapiens
gacaaaatagctaat

SEQ ID NO: 109564 - DNA, 15 bp, Homo sapiens
agacaaaatagctaa

SEQ ID NO: 109565 - DNA, 15 bp, Homo sapiens
cagacaaaatagcta

SEQ ID NO: 109566 - DNA, 15 bp, Homo sapiens
acagacaaaatagct

SEQ ID NO: 109567 - DNA, 15 bp, Homo sapiens
gacagacaaaatagc

SEQ ID NO: 109568 - DNA, 15 bp, Homo sapiens
agacagacaaaatag

SEQ ID NO: 109569 - DNA, 15 bp, Homo sapiens
aagacagacaaaata

SEQ ID NO: 109570 - DNA, 15 bp, Homo sapiens
aaagacagacaaaat

SEQ ID NO: 109571 - DNA, 15 bp, Homo sapiens
caaagacagacaaaa

SEQ ID NO: 109572 - DNA, 15 bp, Homo sapiens
acaaagacagacaaa

SEQ ID NO: 109573 - DNA, 15 bp, Homo sapiens
cacaaagacagacaa

SEQ ID NO: 109574 - DNA, 15 bp, Homo sapiens
acacaaagacagaca

SEQ ID NO: 109575 - DNA, 15 bp, Homo sapiens
tacacaaagacagac

SEQ ID NO: 109576 - DNA, 15 bp, Homo sapiens
ctacacaaagacaga

SEQ ID NO: 109577 - DNA, 15 bp, Homo sapiens
tctacacaaagacag

SEQ ID NO: 109578 - DNA, 15 bp, Homo sapiens
atctacacaaagaca

SEQ ID NO: 109579 - DNA, 15 bp, Homo sapiens
aatctacacaaagac

SEQ ID NO: 109580 - DNA, 15 bp, Homo sapiens
taatctacacaaaga

SEQ ID NO: 109581 - DNA, 15 bp, Homo sapiens
gtaatctacacaaag

SEQ ID NO: 109582 - DNA, 15 bp, Homo sapiens
agtaatctacacaaa

SEQ ID NO: 109583 - DNA, 15 bp, Homo sapiens
tagtaatctacacaa

SEQ ID NO: 109584 - DNA, 15 bp, Homo sapiens
ttagtaatctacaca

SEQ ID NO: 109585 - DNA, 15 bp, Homo sapiens
gttagtaatctacac

SEQ ID NO: 109586 - DNA, 15 bp, Homo sapiens
tgttagtaatctaca

SEQ ID NO: 109587 - DNA, 15 bp, Homo sapiens
ttgttagtaatctac

SEQ ID NO: 109588 - DNA, 15 bp, Homo sapiens
attgttagtaatcta

SEQ ID NO: 109589 - DNA, 15 bp, Homo sapiens
aattgttagtaatct

SEQ ID NO: 109590 - DNA, 15 bp, Homo sapiens
caattgttagtaatc

SEQ ID NO: 109591 - DNA, 15 bp, Homo sapiens
acaattgttagtaat

SEQ ID NO: 109592 - DNA, 15 bp, Homo sapiens
cacaattgttagtaa

SEQ ID NO: 109593 - DNA, 15 bp, Homo sapiens
acacaattgttagta

SEQ ID NO: 109594 - DNA, 15 bp, Homo sapiens
gacacaattgttagt

SEQ ID NO: 109595 - DNA, 15 bp, Homo sapiens
tgacacaattgttag

SEQ ID NO: 109596 - DNA, 15 bp, Homo sapiens
atgacacaattgtta

SEQ ID NO: 109597 - DNA, 15 bp, Homo sapiens
gatgacacaattgtt

SEQ ID NO: 109598 - DNA, 15 bp, Homo sapiens
tgatgacacaattgt

SEQ ID NO: 109599 - DNA, 15 bp, Homo sapiens
ctgatgacacaattg

SEQ ID NO: 109600 - DNA, 15 bp, Homo sapiens
tctgatgacacaatt

SEQ ID NO: 109601 - DNA, 15 bp, Homo sapiens
atctgatgacacaat

SEQ ID NO: 109602 - DNA, 15 bp, Homo sapiens
aatctgatgacacaa

SEQ ID NO: 109603 - DNA, 15 bp, Homo sapiens
aaatctgatgacaca

SEQ ID NO: 109604 - DNA, 15 bp, Homo sapiens
taaatctgatgacac

SEQ ID NO: 109605 - DNA, 15 bp, Homo sapiens
ttaaatctgatgaca

SEQ ID NO: 109606 - DNA, 15 bp, Homo sapiens
tttaaatctgatgac

SEQ ID NO: 109607 - DNA, 15 bp, Homo sapiens
ttttaaatctgatga

SEQ ID NO: 109608 - DNA, 15 bp, Homo sapiens
cttttaaatctgatg

SEQ ID NO: 109609 - DNA, 15 bp, Homo sapiens
tcttttaaatctgat

SEQ ID NO: 109610 - DNA, 15 bp, Homo sapiens
atcttttaaatctga

SEQ ID NO: 109611 - DNA, 15 bp, Homo sapiens
gatcttttaaatctg

SEQ ID NO: 109612 - DNA, 15 bp, Homo sapiens
agatcttttaaatct

SEQ ID NO: 109613 - DNA, 15 bp, Homo sapiens
tagatcttttaaatc

SEQ ID NO: 109614 - DNA, 15 bp, Homo sapiens
ttagatcttttaaat

SEQ ID NO: 109615 - DNA, 15 bp, Homo sapiens
tttagatcttttaaa

SEQ ID NO: 109616 - DNA, 15 bp, Homo sapiens
gtttagatcttttaa

SEQ ID NO: 109617 - DNA, 15 bp, Homo sapiens
ggtttagatctttta

SEQ ID NO: 109618 - DNA, 15 bp, Homo sapiens
aggtttagatctttt

SEQ ID NO: 109619 - DNA, 15 bp, Homo sapiens
gaggtttagatcttt

SEQ ID NO: 109620 - DNA, 15 bp, Homo sapiens
agaggtttagatctt

SEQ ID NO: 109621 - DNA, 15 bp, Homo sapiens
cagaggtttagatct

SEQ ID NO: 109622 - DNA, 15 bp, Homo sapiens
ccagaggtttagatc

SEQ ID NO: 109623 - DNA, 15 bp, Homo sapiens
tccagaggtttagat

SEQ ID NO: 109624 - DNA, 15 bp, Homo sapiens
gtccagaggtttaga

SEQ ID NO: 109625 - DNA, 15 bp, Homo sapiens
agtccagaggtttag

SEQ ID NO: 109626 - DNA, 15 bp, Homo sapiens
aagtccagaggttta

SEQ ID NO: 109627 - DNA, 15 bp, Homo sapiens
aaagtccagaggttt

SEQ ID NO: 109628 - DNA, 15 bp, Homo sapiens
taaagtccagaggtt

SEQ ID NO: 109629 - DNA, 15 bp, Homo sapiens
ataaagtccagaggt

SEQ ID NO: 109630 - DNA, 15 bp, Homo sapiens
tataaagtccagagg

SEQ ID NO: 109631 - DNA, 15 bp, Homo sapiens
atataaagtccagag

SEQ ID NO: 109632 - DNA, 15 bp, Homo sapiens
tatataaagtccaga

SEQ ID NO: 109633 - DNA, 15 bp, Homo sapiens
atatataaagtccag

SEQ ID NO: 109634 - DNA, 15 bp, Homo sapiens
aatatataaagtcca

SEQ ID NO: 109635 - DNA, 15 bp, Homo sapiens
aaatatataaagtcc

SEQ ID NO: 109636 - DNA, 15 bp, Homo sapiens
aaaatatataaagtc

SEQ ID NO: 109637 - DNA, 15 bp, Homo sapiens
aaaaatatataaagt

SEQ ID NO: 109638 - DNA, 15 bp, Homo sapiens
aaaaaatatataaag

SEQ ID NO: 109639 - DNA, 15 bp, Homo sapiens
gaaaaaatatataaa

SEQ ID NO: 109640 - DNA, 15 bp, Homo sapiens
agaaaaaatatataa

SEQ ID NO: 109641 - DNA, 15 bp, Homo sapiens
tagaaaaaatatata

SEQ ID NO: 109642 - DNA, 15 bp, Homo sapiens
gtagaaaaaatatat

SEQ ID NO: 109643 - DNA, 15 bp, Homo sapiens
tgtagaaaaaatata

SEQ ID NO: 109644 - DNA, 15 bp, Homo sapiens
ttgtagaaaaaatat

SEQ ID NO: 109645 - DNA, 15 bp, Homo sapiens
cttgtagaaaaaata

SEQ ID NO: 109646 - DNA, 15 bp, Homo sapiens
acttgtagaaaaaat

SEQ ID NO: 109647 - DNA, 15 bp, Homo sapiens
tacttgtagaaaaaa

SEQ ID NO: 109648 - DNA, 15 bp, Homo sapiens
gtacttgtagaaaaa

SEQ ID NO: 109649 - DNA, 15 bp, Homo sapiens
agtacttgtagaaaa

SEQ ID NO: 109650 - DNA, 15 bp, Homo sapiens
cagtacttgtagaaa

SEQ ID NO: 109651 - DNA, 15 bp, Homo sapiens
acagtacttgtagaa

SEQ ID NO: 109652 - DNA, 15 bp, Homo sapiens
cacagtacttgtaga

SEQ ID NO: 109653 - DNA, 15 bp, Homo sapiens
tcacagtacttgtag

SEQ ID NO: 109654 - DNA, 15 bp, Homo sapiens
ctcacagtacttgta

SEQ ID NO: 109655 - DNA, 15 bp, Homo sapiens
tctcacagtacttgt

SEQ ID NO: 109656 - DNA, 15 bp, Homo sapiens
atctcacagtacttg

SEQ ID NO: 109657 - DNA, 15 bp, Homo sapiens
aatctcacagtactt

SEQ ID NO: 109658 - DNA, 15 bp, Homo sapiens
caatctcacagtact

SEQ ID NO: 109659 - DNA, 15 bp, Homo sapiens
tcaatctcacagtac

SEQ ID NO: 109660 - DNA, 15 bp, Homo sapiens
ctcaatctcacagta

SEQ ID NO: 109661 - DNA, 15 bp, Homo sapiens
tctcaatctcacagt

SEQ ID NO: 109662 - DNA, 15 bp, Homo sapiens
ttctcaatctcacag

SEQ ID NO: 109663 - DNA, 15 bp, Homo sapiens
gttctcaatctcaca

SEQ ID NO: 109664 - DNA, 15 bp, Homo sapiens
agttctcaatctcac

SEQ ID NO: 109665 - DNA, 15 bp, Homo sapiens
aagttctcaatctca

SEQ ID NO: 109666 - DNA, 15 bp, Homo sapiens
taagttctcaatctc

SEQ ID NO: 109667 - DNA, 15 bp, Homo sapiens
ttaagttctcaatct

SEQ ID NO: 109668 - DNA, 15 bp, Homo sapiens
attaagttctcaatc

SEQ ID NO: 109669 - DNA, 15 bp, Homo sapiens
aattaagttctcaat

SEQ ID NO: 109670 - DNA, 15 bp, Homo sapiens
gaattaagttctcaa

SEQ ID NO: 109671 - DNA, 15 bp, Homo sapiens
tgaattaagttctca

SEQ ID NO: 109672 - DNA, 15 bp, Homo sapiens
ttgaattaagttctc

SEQ ID NO: 109673 - DNA, 15 bp, Homo sapiens
gttgaattaagttct

SEQ ID NO: 109674 - DNA, 15 bp, Homo sapiens
agttgaattaagttc

SEQ ID NO: 109675 - DNA, 15 bp, Homo sapiens
gagttgaattaagtt

SEQ ID NO: 109676 - DNA, 15 bp, Homo sapiens
agagttgaattaagt

SEQ ID NO: 109677 - DNA, 15 bp, Homo sapiens
tagagttgaattaag

SEQ ID NO: 109678 - DNA, 15 bp, Homo sapiens
ctagagttgaattaa

SEQ ID NO: 109679 - DNA, 15 bp, Homo sapiens
actagagttgaatta

SEQ ID NO: 109680 - DNA, 15 bp, Homo sapiens
tactagagttgaatt

SEQ ID NO: 109681 - DNA, 15 bp, Homo sapiens
ttactagagttgaat

SEQ ID NO: 109682 - DNA, 15 bp, Homo sapiens
gttactagagttgaa

SEQ ID NO: 109683 - DNA, 15 bp, Homo sapiens
agttactagagttga

SEQ ID NO: 109684 - DNA, 15 bp, Homo sapiens
cagttactagagttg

SEQ ID NO: 109685 - DNA, 15 bp, Homo sapiens
ccagttactagagtt

SEQ ID NO: 109686 - DNA, 15 bp, Homo sapiens
tccagttactagagt

SEQ ID NO: 109687 - DNA, 15 bp, Homo sapiens
gtccagttactagag

SEQ ID NO: 109688 - DNA, 15 bp, Homo sapiens
agtccagttactaga

SEQ ID NO: 109689 - DNA, 15 bp, Homo sapiens
aagtccagttactag

SEQ ID NO: 109690 - DNA, 15 bp, Homo sapiens
aaagtccagttacta

SEQ ID NO: 109691 - DNA, 15 bp, Homo sapiens
aaaagtccagttact

SEQ ID NO: 109692 - DNA, 15 bp, Homo sapiens
aaaaagtccagttac

SEQ ID NO: 109693 - DNA, 15 bp, Homo sapiens
taaaaagtccagtta

SEQ ID NO: 109694 - DNA, 15 bp, Homo sapiens
ctaaaaagtccagtt

SEQ ID NO: 109695 - DNA, 15 bp, Homo sapiens
actaaaaagtccagt

SEQ ID NO: 109696 - DNA, 15 bp, Homo sapiens
cactaaaaagtccag

SEQ ID NO: 109697 - DNA, 15 bp, Homo sapiens
acactaaaaagtcca

SEQ ID NO: 109698 - DNA, 15 bp, Homo sapiens
aacactaaaaagtcc

SEQ ID NO: 109699 - DNA, 15 bp, Homo sapiens
caacactaaaaagtc

SEQ ID NO: 109700 - DNA, 15 bp, Homo sapiens
acaacactaaaaagt

SEQ ID NO: 109701 - DNA, 15 bp, Homo sapiens
aacaacactaaaaag

SEQ ID NO: 109702 - DNA, 15 bp, Homo sapiens
aaacaacactaaaaa

SEQ ID NO: 109703 - DNA, 15 bp, Homo sapiens
caaacaacactaaaa

SEQ ID NO: 109704 - DNA, 15 bp, Homo sapiens
gcaaacaacactaaa

SEQ ID NO: 109705 - DNA, 15 bp, Homo sapiens
tgcaaacaacactaa

SEQ ID NO: 109706 - DNA, 15 bp, Homo sapiens
ctgcaaacaacacta

SEQ ID NO: 109707 - DNA, 15 bp, Homo sapiens
gctgcaaacaacact

SEQ ID NO: 109708 - DNA, 15 bp, Homo sapiens
tgctgcaaacaacac

SEQ ID NO: 109709 - DNA, 15 bp, Homo sapiens
atgctgcaaacaaca

SEQ ID NO: 109710 - DNA, 15 bp, Homo sapiens
tatgctgcaaacaac

SEQ ID NO: 109711 - DNA, 15 bp, Homo sapiens
atatgctgcaaacaa

SEQ ID NO: 109712 - DNA, 15 bp, Homo sapiens
catatgctgcaaaca

SEQ ID NO: 109713 - DNA, 15 bp, Homo sapiens
tcatatgctgcaaac

SEQ ID NO: 109714 - DNA, 15 bp, Homo sapiens
atcatatgctgcaaa

SEQ ID NO: 109715 - DNA, 15 bp, Homo sapiens
aatcatatgctgcaa

SEQ ID NO: 109716 - DNA, 15 bp, Homo sapiens
caatcatatgctgca

SEQ ID NO: 109717 - DNA, 15 bp, Homo sapiens
acaatcatatgctgc

SEQ ID NO: 109718 - DNA, 15 bp, Homo sapiens
aacaatcatatgctg

SEQ ID NO: 109719 - DNA, 15 bp, Homo sapiens
taacaatcatatgct

SEQ ID NO: 109720 - DNA, 15 bp, Homo sapiens
ttaacaatcatatgc

SEQ ID NO: 109721 - DNA, 15 bp, Homo sapiens
tttaacaatcatatg

SEQ ID NO: 109722 - DNA, 15 bp, Homo sapiens
ctttaacaatcatat

SEQ ID NO: 109723 - DNA, 15 bp, Homo sapiens
tctttaacaatcata

SEQ ID NO: 109724 - DNA, 15 bp, Homo sapiens
ttctttaacaatcat

SEQ ID NO: 109725 - DNA, 15 bp, Homo sapiens
tttctttaacaatca

SEQ ID NO: 109726 - DNA, 15 bp, Homo sapiens
ctttctttaacaatc

SEQ ID NO: 109727 - DNA, 15 bp, Homo sapiens
actttctttaacaat

SEQ ID NO: 109728 - DNA, 15 bp, Homo sapiens
aactttctttaacaa

SEQ ID NO: 109729 - DNA, 15 bp, Homo sapiens
aaactttctttaaca

SEQ ID NO: 109730 - DNA, 15 bp, Homo sapiens
taaactttctttaac

SEQ ID NO: 109731 - DNA, 15 bp, Homo sapiens
ctaaactttctttaa

SEQ ID NO: 109732 - DNA, 15 bp, Homo sapiens
actaaactttcttta

SEQ ID NO: 109733 - DNA, 15 bp, Homo sapiens
tactaaactttcttt

SEQ ID NO: 109734 - DNA, 15 bp, Homo sapiens
atactaaactttctt

SEQ ID NO: 109735 - DNA, 15 bp, Homo sapiens
tatactaaactttct

SEQ ID NO: 109736 - DNA, 15 bp, Homo sapiens
atatactaaactttc

SEQ ID NO: 109737 - DNA, 15 bp, Homo sapiens
aatatactaaacttt

SEQ ID NO: 109738 - DNA, 15 bp, Homo sapiens
aaatatactaaactt

SEQ ID NO: 109739 - DNA, 15 bp, Homo sapiens
caaatatactaaact

SEQ ID NO: 109740 - DNA, 15 bp, Homo sapiens
acaaatatactaaac

SEQ ID NO: 109741 - DNA, 15 bp, Homo sapiens
cacaaatatactaaa

SEQ ID NO: 109742 - DNA, 15 bp, Homo sapiens
acacaaatatactaa

SEQ ID NO: 109743 - DNA, 15 bp, Homo sapiens
cacacaaatatacta

SEQ ID NO: 109744 - DNA, 15 bp, Homo sapiens
acacacaaatatact

SEQ ID NO: 109745 - DNA, 15 bp, Homo sapiens
cacacacaaatatac

SEQ ID NO: 109746 - DNA, 15 bp, Homo sapiens
gcacacacaaatata

SEQ ID NO: 109747 - DNA, 15 bp, Homo sapiens
cgcacacacaaatat

SEQ ID NO: 109748 - DNA, 15 bp, Homo sapiens
acgcacacacaaata

SEQ ID NO: 109749 - DNA, 15 bp, Homo sapiens
tacgcacacacaaat

SEQ ID NO: 109750 - DNA, 15 bp, Homo sapiens
atacgcacacacaaa

SEQ ID NO: 109751 - DNA, 15 bp, Homo sapiens
tatacgcacacacaa

SEQ ID NO: 109752 - DNA, 15 bp, Homo sapiens
atatacgcacacaca

SEQ ID NO: 109753 - DNA, 15 bp, Homo sapiens
tatatacgcacacac

SEQ ID NO: 109754 - DNA, 15 bp, Homo sapiens
atatatacgcacaca

SEQ ID NO: 109755 - DNA, 15 bp, Homo sapiens
tatatatacgcacac

SEQ ID NO: 109756 - DNA, 15 bp, Homo sapiens
atatatatacgcaca

SEQ ID NO: 109757 - DNA, 15 bp, Homo sapiens
tatatatatacgcac

SEQ ID NO: 109758 - DNA, 15 bp, Homo sapiens
atatatatatacgca

SEQ ID NO: 109759 - DNA, 15 bp, Homo sapiens
tatatatatatacgc

SEQ ID NO: 109760 - DNA, 15 bp, Homo sapiens
atatatatatatacg

SEQ ID NO: 109761 - DNA, 15 bp, Homo sapiens
tatatatatatatac

SEQ ID NO: 109762 - DNA, 15 bp, Homo sapiens
atatatatatatata

SEQ ID NO: 109763 - DNA, 15 bp, Homo sapiens
tatatatatatatat

SEQ ID NO: 109764 - DNA, 15 bp, Homo sapiens
ctatatatatatata

SEQ ID NO: 109765 - DNA, 15 bp, Homo sapiens
tctatatatatatat

SEQ ID NO: 109766 - DNA, 15 bp, Homo sapiens
atctatatatatata

SEQ ID NO: 109767 - DNA, 15 bp, Homo sapiens
tatctatatatatat

SEQ ID NO: 109768 - DNA, 15 bp, Homo sapiens
ctatctatatatata

SEQ ID NO: 109769 - DNA, 15 bp, Homo sapiens
tctatctatatatat

SEQ ID NO: 109770 - DNA, 15 bp, Homo sapiens
atctatctatatata

SEQ ID NO: 109771 - DNA, 15 bp, Homo sapiens
tatctatctatatat

SEQ ID NO: 109772 - DNA, 15 bp, Homo sapiens
ctatctatctatata

SEQ ID NO: 109773 - DNA, 15 bp, Homo sapiens
tctatctatctatat

SEQ ID NO: 109774 - DNA, 15 bp, Homo sapiens
atctatctatctata

SEQ ID NO: 109775 - DNA, 15 bp, Homo sapiens
tatctatctatctat

SEQ ID NO: 109776 - DNA, 15 bp, Homo sapiens
ctatctatctatcta

SEQ ID NO: 109777 - DNA, 15 bp, Homo sapiens
tctatctatctatct

SEQ ID NO: 109778 - DNA, 15 bp, Homo sapiens
atctatctatctatc

SEQ ID NO: 109779 - DNA, 15 bp, Homo sapiens
aatctatctatctat

SEQ ID NO: 109780 - DNA, 15 bp, Homo sapiens
aaatctatctatcta

SEQ ID NO: 109781 - DNA, 15 bp, Homo sapiens
caaatctatctatct

SEQ ID NO: 109782 - DNA, 15 bp, Homo sapiens
tcaaatctatctatc

SEQ ID NO: 109783 - DNA, 15 bp, Homo sapiens
ctcaaatctatctat

SEQ ID NO: 109784 - DNA, 15 bp, Homo sapiens
cctcaaatctatcta

SEQ ID NO: 109785 - DNA, 15 bp, Homo sapiens
acctcaaatctatct

SEQ ID NO: 109786 - DNA, 15 bp, Homo sapiens
aacctcaaatctatc

SEQ ID NO: 109787 - DNA, 15 bp, Homo sapiens
taacctcaaatctat

SEQ ID NO: 109788 - DNA, 15 bp, Homo sapiens
ataacctcaaatcta

SEQ ID NO: 109789 - DNA, 15 bp, Homo sapiens
tataacctcaaatct

SEQ ID NO: 109790 - DNA, 15 bp, Homo sapiens
atataacctcaaatc

SEQ ID NO: 109791 - DNA, 15 bp, Homo sapiens
aatataacctcaaat

SEQ ID NO: 109792 - DNA, 15 bp, Homo sapiens
aaatataacctcaaa

SEQ ID NO: 109793 - DNA, 15 bp, Homo sapiens
taaatataacctcaa

SEQ ID NO: 109794 - DNA, 15 bp, Homo sapiens
ttaaatataacctca

SEQ ID NO: 109795 - DNA, 15 bp, Homo sapiens
attaaatataacctc

SEQ ID NO: 109796 - DNA, 15 bp, Homo sapiens
gattaaatataacct

SEQ ID NO: 109797 - DNA, 15 bp, Homo sapiens
tgattaaatataacc

SEQ ID NO: 109798 - DNA, 15 bp, Homo sapiens
atgattaaatataac

SEQ ID NO: 109799 - DNA, 15 bp, Homo sapiens
aatgattaaatataa

SEQ ID NO: 109800 - DNA, 15 bp, Homo sapiens
caatgattaaatata

SEQ ID NO: 109801 - DNA, 15 bp, Homo sapiens
tcaatgattaaatat

SEQ ID NO: 109802 - DNA, 15 bp, Homo sapiens
gtcaatgattaaata

SEQ ID NO: 109803 - DNA, 15 bp, Homo sapiens
agtcaatgattaaat

SEQ ID NO: 109804 - DNA, 15 bp, Homo sapiens
tagtcaatgattaaa

SEQ ID NO: 109805 - DNA, 15 bp, Homo sapiens
atagtcaatgattaa

SEQ ID NO: 109806 - DNA, 15 bp, Homo sapiens
aatagtcaatgatta

SEQ ID NO: 109807 - DNA, 15 bp, Homo sapiens
caatagtcaatgatt

SEQ ID NO: 109808 - DNA, 15 bp, Homo sapiens
ccaatagtcaatgat

SEQ ID NO: 109809 - DNA, 15 bp, Homo sapiens
accaatagtcaatga

SEQ ID NO: 109810 - DNA, 15 bp, Homo sapiens
taccaatagtcaatg

SEQ ID NO: 109811 - DNA, 15 bp, Homo sapiens
ataccaatagtcaat

SEQ ID NO: 109812 - DNA, 15 bp, Homo sapiens
aataccaatagtcaa

SEQ ID NO: 109813 - DNA, 15 bp, Homo sapiens
gaataccaatagtca

SEQ ID NO: 109814 - DNA, 15 bp, Homo sapiens
agaataccaatagtc

SEQ ID NO: 109815 - DNA, 15 bp, Homo sapiens
tagaataccaatagt

SEQ ID NO: 109816 - DNA, 15 bp, Homo sapiens
ttagaataccaatag

SEQ ID NO: 109817 - DNA, 15 bp, Homo sapiens
cttagaataccaata

SEQ ID NO: 109818 - DNA, 15 bp, Homo sapiens
tcttagaataccaat

SEQ ID NO: 109819 - DNA, 15 bp, Homo sapiens
atcttagaataccaa

SEQ ID NO: 109820 - DNA, 15 bp, Homo sapiens
aatcttagaatacca

SEQ ID NO: 109821 - DNA, 15 bp, Homo sapiens
aaatcttagaatacc

SEQ ID NO: 109822 - DNA, 15 bp, Homo sapiens
aaaatcttagaatac

SEQ ID NO: 109823 - DNA, 15 bp, Homo sapiens
taaaatcttagaata

SEQ ID NO: 109824 - DNA, 15 bp, Homo sapiens
ttaaaatcttagaat

SEQ ID NO: 109825 - DNA, 15 bp, Homo sapiens
cttaaaatcttagaa

SEQ ID NO: 109826 - DNA, 15 bp, Homo sapiens
ccttaaaatcttaga

SEQ ID NO: 109827 - DNA, 15 bp, Homo sapiens
tccttaaaatcttag

SEQ ID NO: 109828 - DNA, 15 bp, Homo sapiens
ctccttaaaatctta

SEQ ID NO: 109829 - DNA, 15 bp, Homo sapiens
tctccttaaaatctt

SEQ ID NO: 109830 - DNA, 15 bp, Homo sapiens
ctctccttaaaatct

SEQ ID NO: 109831 - DNA, 15 bp, Homo sapiens
tctctccttaaaatc

SEQ ID NO: 109832 - DNA, 15 bp, Homo sapiens
ttctctccttaaaat

SEQ ID NO: 109833 - DNA, 15 bp, Homo sapiens
tttctctccttaaaa

SEQ ID NO: 109834 - DNA, 15 bp, Homo sapiens
ctttctctccttaaa

SEQ ID NO: 109835 - DNA, 15 bp, Homo sapiens
cctttctctccttaa

SEQ ID NO: 109836 - DNA, 15 bp, Homo sapiens
acctttctctcctta

SEQ ID NO: 109837 - DNA, 15 bp, Homo sapiens
tacctttctctcctt

SEQ ID NO: 109838 - DNA, 15 bp, Homo sapiens
ctacctttctctcct

SEQ ID NO: 109839 - DNA, 15 bp, Homo sapiens
cctacctttctctcc

SEQ ID NO: 109840 - DNA, 15 bp, Homo sapiens
acctacctttctctc

SEQ ID NO: 109841 - DNA, 15 bp, Homo sapiens
aacctacctttctct

SEQ ID NO: 109842 - DNA, 15 bp, Homo sapiens
taacctacctttctc

SEQ ID NO: 109843 - DNA, 15 bp, Homo sapiens
gtaacctacctttct

SEQ ID NO: 109844 - DNA, 15 bp, Homo sapiens
tgtaacctacctttc

SEQ ID NO: 109845 - DNA, 15 bp, Homo sapiens
ttgtaacctaccttt

SEQ ID NO: 109846 - DNA, 15 bp, Homo sapiens
attgtaacctacctt

SEQ ID NO: 109847 - DNA, 15 bp, Homo sapiens
tattgtaacctacct

SEQ ID NO: 109848 - DNA, 15 bp, Homo sapiens
atattgtaacctacc

SEQ ID NO: 109849 - DNA, 15 bp, Homo sapiens
tatattgtaacctac

SEQ ID NO: 109850 - DNA, 15 bp, Homo sapiens
atatattgtaaccta

SEQ ID NO: 109851 - DNA, 15 bp, Homo sapiens
catatattgtaacct

SEQ ID NO: 109852 - DNA, 15 bp, Homo sapiens
ccatatattgtaacc

SEQ ID NO: 109853 - DNA, 15 bp, Homo sapiens
gccatatattgtaac

SEQ ID NO: 109854 - DNA, 15 bp, Homo sapiens
agccatatattgtaa

SEQ ID NO: 109855 - DNA, 15 bp, Homo sapiens
cagccatatattgta

SEQ ID NO: 109856 - DNA, 15 bp, Homo sapiens
tcagccatatattgt

SEQ ID NO: 109857 - DNA, 15 bp, Homo sapiens
atcagccatatattg

SEQ ID NO: 109858 - DNA, 15 bp, Homo sapiens
tatcagccatatatt

SEQ ID NO: 109859 - DNA, 15 bp, Homo sapiens
atatcagccatatat

SEQ ID NO: 109860 - DNA, 15 bp, Homo sapiens
tatatcagccatata

SEQ ID NO: 109861 - DNA, 15 bp, Homo sapiens
atatatcagccatat

SEQ ID NO: 109862 - DNA, 15 bp, Homo sapiens
catatatcagccata

SEQ ID NO: 109863 - DNA, 15 bp, Homo sapiens
ccatatatcagccat

SEQ ID NO: 109864 - DNA, 15 bp, Homo sapiens
accatatatcagcca

SEQ ID NO: 109865 - DNA, 15 bp, Homo sapiens
aaccatatatcagcc

SEQ ID NO: 109866 - DNA, 15 bp, Homo sapiens
gaaccatatatcagc

SEQ ID NO: 109867 - DNA, 15 bp, Homo sapiens
agaaccatatatcag

SEQ ID NO: 109868 - DNA, 15 bp, Homo sapiens
cagaaccatatatca

SEQ ID NO: 109869 - DNA, 15 bp, Homo sapiens
ccagaaccatatatc

SEQ ID NO: 109870 - DNA, 15 bp, Homo sapiens
tccagaaccatatat

SEQ ID NO: 109871 - DNA, 15 bp, Homo sapiens
ttccagaaccatata

SEQ ID NO: 109872 - DNA, 15 bp, Homo sapiens
gttccagaaccatat

SEQ ID NO: 109873 - DNA, 15 bp, Homo sapiens
tgttccagaaccata

SEQ ID NO: 109874 - DNA, 15 bp, Homo sapiens
ttgttccagaaccat

SEQ ID NO: 109875 - DNA, 15 bp, Homo sapiens
attgttccagaacca

SEQ ID NO: 109876 - DNA, 15 bp, Homo sapiens
aattgttccagaacc

SEQ ID NO: 109877 - DNA, 15 bp, Homo sapiens
aaattgttccagaac

SEQ ID NO: 109878 - DNA, 15 bp, Homo sapiens
aaaattgttccagaa

SEQ ID NO: 109879 - DNA, 15 bp, Homo sapiens
gaaaattgttccaga

SEQ ID NO: 109880 - DNA, 15 bp, Homo sapiens
agaaaattgttccag

SEQ ID NO: 109881 - DNA, 15 bp, Homo sapiens
aagaaaattgttcca

SEQ ID NO: 109882 - DNA, 15 bp, Homo sapiens
taagaaaattgttcc

SEQ ID NO: 109883 - DNA, 15 bp, Homo sapiens
ctaagaaaattgttc

SEQ ID NO: 109884 - DNA, 15 bp, Homo sapiens
actaagaaaattgtt

SEQ ID NO: 109885 - DNA, 15 bp, Homo sapiens
aactaagaaaattgt

SEQ ID NO: 109886 - DNA, 15 bp, Homo sapiens
aaactaagaaaattg

SEQ ID NO: 109887 - DNA, 15 bp, Homo sapiens
aaaactaagaaaatt

SEQ ID NO: 109888 - DNA, 15 bp, Homo sapiens
gaaaactaagaaaat

SEQ ID NO: 109889 - DNA, 15 bp, Homo sapiens
tgaaaactaagaaaa

SEQ ID NO: 109890 - DNA, 15 bp, Homo sapiens
ctgaaaactaagaaa

SEQ ID NO: 109891 - DNA, 15 bp, Homo sapiens
actgaaaactaagaa

SEQ ID NO: 109892 - DNA, 15 bp, Homo sapiens
tactgaaaactaaga

SEQ ID NO: 109893 - DNA, 15 bp, Homo sapiens
ttactgaaaactaag

SEQ ID NO: 109894 - DNA, 15 bp, Homo sapiens
attactgaaaactaa

SEQ ID NO: 109895 - DNA, 15 bp, Homo sapiens
aattactgaaaacta

SEQ ID NO: 109896 - DNA, 15 bp, Homo sapiens
gaattactgaaaact

SEQ ID NO: 109897 - DNA, 15 bp, Homo sapiens
agaattactgaaaac

SEQ ID NO: 109898 - DNA, 15 bp, Homo sapiens
tagaattactgaaaa

SEQ ID NO: 109899 - DNA, 15 bp, Homo sapiens
gtagaattactgaaa

SEQ ID NO: 109900 - DNA, 15 bp, Homo sapiens
ggtagaattactgaa

SEQ ID NO: 109901 - DNA, 15 bp, Homo sapiens
aggtagaattactga

SEQ ID NO: 109902 - DNA, 15 bp, Homo sapiens
taggtagaattactg

SEQ ID NO: 109903 - DNA, 15 bp, Homo sapiens
ttaggtagaattact

SEQ ID NO: 109904 - DNA, 15 bp, Homo sapiens
tttaggtagaattac

SEQ ID NO: 109905 - DNA, 15 bp, Homo sapiens
ttttaggtagaatta

SEQ ID NO: 109906 - DNA, 15 bp, Homo sapiens
attttaggtagaatt

SEQ ID NO: 109907 - DNA, 15 bp, Homo sapiens
cattttaggtagaat

SEQ ID NO: 109908 - DNA, 15 bp, Homo sapiens
acattttaggtagaa

SEQ ID NO: 109909 - DNA, 15 bp, Homo sapiens
tacattttaggtaga

SEQ ID NO: 109910 - DNA, 15 bp, Homo sapiens
gtacattttaggtag

SEQ ID NO: 109911 - DNA, 15 bp, Homo sapiens
cgtacattttaggta

SEQ ID NO: 109912 - DNA, 15 bp, Homo sapiens
acgtacattttaggt

SEQ ID NO: 109913 - DNA, 15 bp, Homo sapiens
gacgtacattttagg

SEQ ID NO: 109914 - DNA, 15 bp, Homo sapiens
ggacgtacattttag

SEQ ID NO: 109915 - DNA, 15 bp, Homo sapiens
tggacgtacatttta

SEQ ID NO: 109916 - DNA, 15 bp, Homo sapiens
ctggacgtacatttt

SEQ ID NO: 109917 - DNA, 15 bp, Homo sapiens
gctggacgtacattt

SEQ ID NO: 109918 - DNA, 15 bp, Homo sapiens
agctggacgtacatt

SEQ ID NO: 109919 - DNA, 15 bp, Homo sapiens
aagctggacgtacat

SEQ ID NO: 109920 - DNA, 15 bp, Homo sapiens
aaagctggacgtaca

SEQ ID NO: 109921 - DNA, 15 bp, Homo sapiens
caaagctggacgtac

SEQ ID NO: 109922 - DNA, 15 bp, Homo sapiens
gcaaagctggacgta

SEQ ID NO: 109923 - DNA, 15 bp, Homo sapiens
tgcaaagctggacgt

SEQ ID NO: 109924 - DNA, 15 bp, Homo sapiens
gtgcaaagctggacg

SEQ ID NO: 109925 - DNA, 15 bp, Homo sapiens
agtgcaaagctggac

SEQ ID NO: 109926 - DNA, 15 bp, Homo sapiens
gagtgcaaagctgga

SEQ ID NO: 109927 - DNA, 15 bp, Homo sapiens
tgagtgcaaagctgg

SEQ ID NO: 109928 - DNA, 15 bp, Homo sapiens
gtgagtgcaaagctg

SEQ ID NO: 109929 - DNA, 15 bp, Homo sapiens
agtgagtgcaaagct

SEQ ID NO: 109930 - DNA, 15 bp, Homo sapiens
tagtgagtgcaaagc

SEQ ID NO: 109931 - DNA, 15 bp, Homo sapiens
gtagtgagtgcaaag

SEQ ID NO: 109932 - DNA, 15 bp, Homo sapiens
ggtagtgagtgcaaa

SEQ ID NO: 109933 - DNA, 15 bp, Homo sapiens
tggtagtgagtgcaa

SEQ ID NO: 109934 - DNA, 15 bp, Homo sapiens
gtggtagtgagtgca

SEQ ID NO: 109935 - DNA, 15 bp, Homo sapiens
tgtggtagtgagtgc

SEQ ID NO: 109936 - DNA, 15 bp, Homo sapiens
atgtggtagtgagtg

SEQ ID NO: 109937 - DNA, 15 bp, Homo sapiens
aatgtggtagtgagt

SEQ ID NO: 109938 - DNA, 15 bp, Homo sapiens
caatgtggtagtgag

SEQ ID NO: 109939 - DNA, 15 bp, Homo sapiens
acaatgtggtagtga

SEQ ID NO: 109940 - DNA, 15 bp, Homo sapiens
tacaatgtggtagtg

SEQ ID NO: 109941 - DNA, 15 bp, Homo sapiens
ttacaatgtggtagt

SEQ ID NO: 109942 - DNA, 15 bp, Homo sapiens
attacaatgtggtag

SEQ ID NO: 109943 - DNA, 15 bp, Homo sapiens
aattacaatgtggta

SEQ ID NO: 109944 - DNA, 15 bp, Homo sapiens
aaattacaatgtggt

SEQ ID NO: 109945 - DNA, 15 bp, Homo sapiens
gaaattacaatgtgg

SEQ ID NO: 109946 - DNA, 15 bp, Homo sapiens
ggaaattacaatgtg

SEQ ID NO: 109947 - DNA, 15 bp, Homo sapiens
tggaaattacaatgt

SEQ ID NO: 109948 - DNA, 15 bp, Homo sapiens
ctggaaattacaatg

SEQ ID NO: 109949 - DNA, 15 bp, Homo sapiens
actggaaattacaat

SEQ ID NO: 109950 - DNA, 15 bp, Homo sapiens
tactggaaattacaa

SEQ ID NO: 109951 - DNA, 15 bp, Homo sapiens
atactggaaattaca

SEQ ID NO: 109952 - DNA, 15 bp, Homo sapiens
tatactggaaattac

SEQ ID NO: 109953 - DNA, 15 bp, Homo sapiens
gtatactggaaatta

SEQ ID NO: 109954 - DNA, 15 bp, Homo sapiens
agtatactggaaatt

SEQ ID NO: 109955 - DNA, 15 bp, Homo sapiens
aagtatactggaaat

SEQ ID NO: 109956 - DNA, 15 bp, Homo sapiens
caagtatactggaaa

SEQ ID NO: 109957 - DNA, 15 bp, Homo sapiens
acaagtatactggaa

SEQ ID NO: 109958 - DNA, 15 bp, Homo sapiens
gacaagtatactgga

SEQ ID NO: 109959 - DNA, 15 bp, Homo sapiens
agacaagtatactgg

SEQ ID NO: 109960 - DNA, 15 bp, Homo sapiens
tagacaagtatactg

SEQ ID NO: 109961 - DNA, 15 bp, Homo sapiens
atagacaagtatact

SEQ ID NO: 109962 - DNA, 15 bp, Homo sapiens
aatagacaagtatac

SEQ ID NO: 109963 - DNA, 15 bp, Homo sapiens
aaatagacaagtata

SEQ ID NO: 109964 - DNA, 15 bp, Homo sapiens
aaaatagacaagtat

SEQ ID NO: 109965 - DNA, 15 bp, Homo sapiens
aaaaatagacaagta

SEQ ID NO: 109966 - DNA, 15 bp, Homo sapiens
gaaaaatagacaagt

SEQ ID NO: 109967 - DNA, 15 bp, Homo sapiens
cgaaaaatagacaag

SEQ ID NO: 109968 - DNA, 15 bp, Homo sapiens
tcgaaaaatagacaa

SEQ ID NO: 109969 - DNA, 15 bp, Homo sapiens
ctcgaaaaatagaca

SEQ ID NO: 109970 - DNA, 15 bp, Homo sapiens
tctcgaaaaatagac

SEQ ID NO: 109971 - DNA, 15 bp, Homo sapiens
atctcgaaaaataga

SEQ ID NO: 109972 - DNA, 15 bp, Homo sapiens
catctcgaaaaatag

SEQ ID NO: 109973 - DNA, 15 bp, Homo sapiens
acatctcgaaaaata

SEQ ID NO: 109974 - DNA, 15 bp, Homo sapiens
aacatctcgaaaaat

SEQ ID NO: 109975 - DNA, 15 bp, Homo sapiens
caacatctcgaaaaa

SEQ ID NO: 109976 - DNA, 15 bp, Homo sapiens
tcaacatctcgaaaa

SEQ ID NO: 109977 - DNA, 15 bp, Homo sapiens
ttcaacatctcgaaa

SEQ ID NO: 109978 - DNA, 15 bp, Homo sapiens
tttcaacatctcgaa

SEQ ID NO: 109979 - DNA, 15 bp, Homo sapiens
atttcaacatctcga

SEQ ID NO: 109980 - DNA, 15 bp, Homo sapiens
gatttcaacatctcg

SEQ ID NO: 109981 - DNA, 15 bp, Homo sapiens
agatttcaacatctc

SEQ ID NO: 109982 - DNA, 15 bp, Homo sapiens
cagatttcaacatct

SEQ ID NO: 109983 - DNA, 15 bp, Homo sapiens
acagatttcaacatc

SEQ ID NO: 109984 - DNA, 15 bp, Homo sapiens
cacagatttcaacat

SEQ ID NO: 109985 - DNA, 15 bp, Homo sapiens
ccacagatttcaaca

SEQ ID NO: 109986 - DNA, 15 bp, Homo sapiens
tccacagatttcaac

SEQ ID NO: 109987 - DNA, 15 bp, Homo sapiens
ctccacagatttcaa

SEQ ID NO: 109988 - DNA, 15 bp, Homo sapiens
tctccacagatttca

SEQ ID NO: 109989 - DNA, 15 bp, Homo sapiens
ttctccacagatttc

SEQ ID NO: 109990 - DNA, 15 bp, Homo sapiens
attctccacagattt

SEQ ID NO: 109991 - DNA, 15 bp, Homo sapiens
aattctccacagatt

SEQ ID NO: 109992 - DNA, 15 bp, Homo sapiens
aaattctccacagat

SEQ ID NO: 109993 - DNA, 15 bp, Homo sapiens
aaaattctccacaga

SEQ ID NO: 109994 - DNA, 15 bp, Homo sapiens
aaaaattctccacag

SEQ ID NO: 109995 - DNA, 15 bp, Homo sapiens
aaaaaattctccaca

SEQ ID NO: 109996 - DNA, 15 bp, Homo sapiens
gaaaaaattctccac

SEQ ID NO: 109997 - DNA, 15 bp, Homo sapiens
agaaaaaattctcca

SEQ ID NO: 109998 - DNA, 15 bp, Homo sapiens
gagaaaaaattctcc

SEQ ID NO: 109999 - DNA, 15 bp, Homo sapiens
tgagaaaaaattctc

SEQ ID NO: 110000 - DNA, 15 bp, Homo sapiens
atgagaaaaaattct

SEQ ID NO: 110001 - DNA, 15 bp, Homo sapiens
catgagaaaaaattc

SEQ ID NO: 110002 - DNA, 15 bp, Homo sapiens
acatgagaaaaaatt

SEQ ID NO: 110003 - DNA, 15 bp, Homo sapiens
aacatgagaaaaaat

SEQ ID NO: 110004 - DNA, 15 bp, Homo sapiens
aaacatgagaaaaaa

SEQ ID NO: 110005 - DNA, 15 bp, Homo sapiens
taaacatgagaaaaa

SEQ ID NO: 110006 - DNA, 15 bp, Homo sapiens
ctaaacatgagaaaa

SEQ ID NO: 110007 - DNA, 15 bp, Homo sapiens
actaaacatgagaaa

SEQ ID NO: 110008 - DNA, 15 bp, Homo sapiens
cactaaacatgagaa

SEQ ID NO: 110009 - DNA, 15 bp, Homo sapiens
acactaaacatgaga

SEQ ID NO: 110010 - DNA, 15 bp, Homo sapiens
aacactaaacatgag

SEQ ID NO: 110011 - DNA, 15 bp, Homo sapiens
aaacactaaacatga

SEQ ID NO: 110012 - DNA, 15 bp, Homo sapiens
aaaacactaaacatg

SEQ ID NO: 110013 - DNA, 15 bp, Homo sapiens
taaaacactaaacat

SEQ ID NO: 110014 - DNA, 15 bp, Homo sapiens
ctaaaacactaaaca

SEQ ID NO: 110015 - DNA, 15 bp, Homo sapiens
gctaaaacactaaac

SEQ ID NO: 110016 - DNA, 15 bp, Homo sapiens
agctaaaacactaaa

SEQ ID NO: 110017 - DNA, 15 bp, Homo sapiens
tagctaaaacactaa

SEQ ID NO: 110018 - DNA, 15 bp, Homo sapiens
atagctaaaacacta

SEQ ID NO: 110019 - DNA, 15 bp, Homo sapiens
catagctaaaacact

SEQ ID NO: 110020 - DNA, 15 bp, Homo sapiens
acatagctaaaacac

SEQ ID NO: 110021 - DNA, 15 bp, Homo sapiens
aacatagctaaaaca

SEQ ID NO: 110022 - DNA, 15 bp, Homo sapiens
aaacatagctaaaac

SEQ ID NO: 110023 - DNA, 15 bp, Homo sapiens
taaacatagctaaaa

SEQ ID NO: 110024 - DNA, 15 bp, Homo sapiens
ataaacatagctaaa

SEQ ID NO: 110025 - DNA, 15 bp, Homo sapiens
gataaacatagctaa

SEQ ID NO: 110026 - DNA, 15 bp, Homo sapiens
agataaacatagcta

SEQ ID NO: 110027 - DNA, 15 bp, Homo sapiens
gagataaacatagct

SEQ ID NO: 110028 - DNA, 15 bp, Homo sapiens
agagataaacatagc

SEQ ID NO: 110029 - DNA, 15 bp, Homo sapiens
tagagataaacatag

SEQ ID NO: 110030 - DNA, 15 bp, Homo sapiens
ctagagataaacata

SEQ ID NO: 110031 - DNA, 15 bp, Homo sapiens
cctagagataaacat

SEQ ID NO: 110032 - DNA, 15 bp, Homo sapiens
ccctagagataaaca

SEQ ID NO: 110033 - DNA, 15 bp, Homo sapiens
accctagagataaac

SEQ ID NO: 110034 - DNA, 15 bp, Homo sapiens
taccctagagataaa

SEQ ID NO: 110035 - DNA, 15 bp, Homo sapiens
ataccctagagataa

SEQ ID NO: 110036 - DNA, 15 bp, Homo sapiens
tataccctagagata

SEQ ID NO: 110037 - DNA, 15 bp, Homo sapiens
ctataccctagagat

SEQ ID NO: 110038 - DNA, 15 bp, Homo sapiens
gctataccctagaga

SEQ ID NO: 110039 - DNA, 15 bp, Homo sapiens
tgctataccctagag

SEQ ID NO: 110040 - DNA, 15 bp, Homo sapiens
gtgctataccctaga

SEQ ID NO: 110041 - DNA, 15 bp, Homo sapiens
tgtgctataccctag

SEQ ID NO: 110042 - DNA, 15 bp, Homo sapiens
atgtgctatacccta

SEQ ID NO: 110043 - DNA, 15 bp, Homo sapiens
tatgtgctataccct

SEQ ID NO: 110044 - DNA, 15 bp, Homo sapiens
gtatgtgctataccc

SEQ ID NO: 110045 - DNA, 15 bp, Homo sapiens
tgtatgtgctatacc

SEQ ID NO: 110046 - DNA, 15 bp, Homo sapiens
ttgtatgtgctatac

SEQ ID NO: 110047 - DNA, 15 bp, Homo sapiens
cttgtatgtgctata

SEQ ID NO: 110048 - DNA, 15 bp, Homo sapiens
ccttgtatgtgctat

SEQ ID NO: 110049 - DNA, 15 bp, Homo sapiens
accttgtatgtgcta

SEQ ID NO: 110050 - DNA, 15 bp, Homo sapiens
caccttgtatgtgct

SEQ ID NO: 110051 - DNA, 15 bp, Homo sapiens
ccaccttgtatgtgc

SEQ ID NO: 110052 - DNA, 15 bp, Homo sapiens
gccaccttgtatgtg

SEQ ID NO: 110053 - DNA, 15 bp, Homo sapiens
tgccaccttgtatgt

SEQ ID NO: 110054 - DNA, 15 bp, Homo sapiens
ttgccaccttgtatg

SEQ ID NO: 110055 - DNA, 15 bp, Homo sapiens
attgccaccttgtat

SEQ ID NO: 110056 - DNA, 15 bp, Homo sapiens
tattgccaccttgta

SEQ ID NO: 110057 - DNA, 15 bp, Homo sapiens
atattgccaccttgt

SEQ ID NO: 110058 - DNA, 15 bp, Homo sapiens
tatattgccaccttg

SEQ ID NO: 110059 - DNA, 15 bp, Homo sapiens
ctatattgccacctt

SEQ ID NO: 110060 - DNA, 15 bp, Homo sapiens
tctatattgccacct

SEQ ID NO: 110061 - DNA, 15 bp, Homo sapiens
atctatattgccacc

SEQ ID NO: 110062 - DNA, 15 bp, Homo sapiens
catctatattgccac

SEQ ID NO: 110063 - DNA, 15 bp, Homo sapiens
acatctatattgcca

SEQ ID NO: 110064 - DNA, 15 bp, Homo sapiens
cacatctatattgcc

SEQ ID NO: 110065 - DNA, 15 bp, Homo sapiens
gcacatctatattgc

SEQ ID NO: 110066 - DNA, 15 bp, Homo sapiens
agcacatctatattg

SEQ ID NO: 110067 - DNA, 15 bp, Homo sapiens
aagcacatctatatt

SEQ ID NO: 110068 - DNA, 15 bp, Homo sapiens
taagcacatctatat

SEQ ID NO: 110069 - DNA, 15 bp, Homo sapiens
ttaagcacatctata

SEQ ID NO: 110070 - DNA, 15 bp, Homo sapiens
attaagcacatctat

SEQ ID NO: 110071 - DNA, 15 bp, Homo sapiens
cattaagcacatcta

SEQ ID NO: 110072 - DNA, 15 bp, Homo sapiens
tcattaagcacatct

SEQ ID NO: 110073 - DNA, 15 bp, Homo sapiens
ttcattaagcacatc

SEQ ID NO: 110074 - DNA, 15 bp, Homo sapiens
attcattaagcacat

SEQ ID NO: 110075 - DNA, 15 bp, Homo sapiens
tattcattaagcaca

SEQ ID NO: 110076 - DNA, 15 bp, Homo sapiens
ttattcattaagcac

SEQ ID NO: 110077 - DNA, 15 bp, Homo sapiens
tttattcattaagca

SEQ ID NO: 110078 - DNA, 15 bp, Homo sapiens
ttttattcattaagc

SEQ ID NO: 110079 - DNA, 15 bp, Homo sapiens
attttattcattaag

SEQ ID NO: 110080 - DNA, 15 bp, Homo sapiens
cattttattcattaa

SEQ ID NO: 110081 - DNA, 15 bp, Homo sapiens
tcattttattcatta

SEQ ID NO: 110082 - DNA, 15 bp, Homo sapiens
atcattttattcatt

SEQ ID NO: 110083 - DNA, 15 bp, Homo sapiens
gatcattttattcat

SEQ ID NO: 110084 - DNA, 15 bp, Homo sapiens
agatcattttattca

SEQ ID NO: 110085 - DNA, 15 bp, Homo sapiens
aagatcattttattc

SEQ ID NO: 110086 - DNA, 15 bp, Homo sapiens
gaagatcattttatt

SEQ ID NO: 110087 - DNA, 15 bp, Homo sapiens
tgaagatcattttat

SEQ ID NO: 110088 - DNA, 15 bp, Homo sapiens
ttgaagatcatttta

SEQ ID NO: 110089 - DNA, 15 bp, Homo sapiens
tttgaagatcatttt

SEQ ID NO: 110090 - DNA, 15 bp, Homo sapiens
ttttgaagatcattt

SEQ ID NO: 110091 - DNA, 15 bp, Homo sapiens
tttttgaagatcatt

SEQ ID NO: 110092 - DNA, 15 bp, Homo sapiens
gtttttgaagatcat

SEQ ID NO: 110093 - DNA, 15 bp, Homo sapiens
agtttttgaagatca

SEQ ID NO: 110094 - DNA, 15 bp, Homo sapiens
cagtttttgaagatc

SEQ ID NO: 110095 - DNA, 15 bp, Homo sapiens
tcagtttttgaagat

SEQ ID NO: 110096 - DNA, 15 bp, Homo sapiens
gtcagtttttgaaga

SEQ ID NO: 110097 - DNA, 15 bp, Homo sapiens
ggtcagtttttgaag

SEQ ID NO: 110098 - DNA, 15 bp, Homo sapiens
aggtcagtttttgaa

SEQ ID NO: 110099 - DNA, 15 bp, Homo sapiens
aaggtcagtttttga

SEQ ID NO: 110100 - DNA, 15 bp, Homo sapiens
gaaggtcagtttttg

SEQ ID NO: 110101 - DNA, 15 bp, Homo sapiens
tgaaggtcagttttt

SEQ ID NO: 110102 - DNA, 15 bp, Homo sapiens
atgaaggtcagtttt

SEQ ID NO: 110103 - DNA, 15 bp, Homo sapiens
aatgaaggtcagttt

SEQ ID NO: 110104 - DNA, 15 bp, Homo sapiens
aaatgaaggtcagtt

SEQ ID NO: 110105 - DNA, 15 bp, Homo sapiens
caaatgaaggtcagt

SEQ ID NO: 110106 - DNA, 15 bp, Homo sapiens
tcaaatgaaggtcag

SEQ ID NO: 110107 - DNA, 15 bp, Homo sapiens
ttcaaatgaaggtca

SEQ ID NO: 110108 - DNA, 15 bp, Homo sapiens
cttcaaatgaaggtc

SEQ ID NO: 110109 - DNA, 15 bp, Homo sapiens
acttcaaatgaaggt

SEQ ID NO: 110110 - DNA, 15 bp, Homo sapiens
aacttcaaatgaagg

SEQ ID NO: 110111 - DNA, 15 bp, Homo sapiens
gaacttcaaatgaag

SEQ ID NO: 110112 - DNA, 15 bp, Homo sapiens
agaacttcaaatgaa

SEQ ID NO: 110113 - DNA, 15 bp, Homo sapiens
tagaacttcaaatga

SEQ ID NO: 110114 - DNA, 15 bp, Homo sapiens
atagaacttcaaatg

SEQ ID NO: 110115 - DNA, 15 bp, Homo sapiens
aatagaacttcaaat

SEQ ID NO: 110116 - DNA, 15 bp, Homo sapiens
aaatagaacttcaaa

SEQ ID NO: 110117 - DNA, 15 bp, Homo sapiens
aaaatagaacttcaa

SEQ ID NO: 110118 - DNA, 15 bp, Homo sapiens
taaaatagaacttca

SEQ ID NO: 110119 - DNA, 15 bp, Homo sapiens
ataaaatagaacttc

SEQ ID NO: 110120 - DNA, 15 bp, Homo sapiens
aataaaatagaactt

SEQ ID NO: 110121 - DNA, 15 bp, Homo sapiens
gaataaaatagaact

SEQ ID NO: 110122 - DNA, 15 bp, Homo sapiens
tgaataaaatagaac

SEQ ID NO: 110123 - DNA, 15 bp, Homo sapiens
atgaataaaatagaa

SEQ ID NO: 110124 - DNA, 15 bp, Homo sapiens
tatgaataaaataga

SEQ ID NO: 110125 - DNA, 15 bp, Homo sapiens
ttatgaataaaatag

SEQ ID NO: 110126 - DNA, 15 bp, Homo sapiens
tttatgaataaaata

SEQ ID NO: 110127 - DNA, 15 bp, Homo sapiens
gtttatgaataaaat

SEQ ID NO: 110128 - DNA, 15 bp, Homo sapiens
tgtttatgaataaaa

SEQ ID NO: 110129 - DNA, 15 bp, Homo sapiens
gtgtttatgaataaa

SEQ ID NO: 110130 - DNA, 15 bp, Homo sapiens
tgtgtttatgaataa

SEQ ID NO: 110131 - DNA, 15 bp, Homo sapiens
atgtgtttatgaata

SEQ ID NO: 110132 - DNA, 15 bp, Homo sapiens
tatgtgtttatgaat

SEQ ID NO: 110133 - DNA, 15 bp, Homo sapiens
ttatgtgtttatgaa

SEQ ID NO: 110134 - DNA, 15 bp, Homo sapiens
tttatgtgtttatga

SEQ ID NO: 110135 - DNA, 15 bp, Homo sapiens
ttttatgtgtttatg

SEQ ID NO: 110136 - DNA, 15 bp, Homo sapiens
gttttatgtgtttat

SEQ ID NO: 110137 - DNA, 15 bp, Homo sapiens
cgttttatgtgttta

SEQ ID NO: 110138 - DNA, 15 bp, Homo sapiens
acgttttatgtgttt

SEQ ID NO: 110139 - DNA, 15 bp, Homo sapiens
aacgttttatgtgtt

SEQ ID NO: 110140 - DNA, 15 bp, Homo sapiens
aaacgttttatgtgt

SEQ ID NO: 110141 - DNA, 15 bp, Homo sapiens
caaacgttttatgtg

SEQ ID NO: 110142 - DNA, 15 bp, Homo sapiens
ccaaacgttttatgt

SEQ ID NO: 110143 - DNA, 15 bp, Homo sapiens
accaaacgttttatg

SEQ ID NO: 110144 - DNA, 15 bp, Homo sapiens
taccaaacgttttat

SEQ ID NO: 110145 - DNA, 15 bp, Homo sapiens
ataccaaacgtttta

SEQ ID NO: 110146 - DNA, 15 bp, Homo sapiens
gataccaaacgtttt

SEQ ID NO: 110147 - DNA, 15 bp, Homo sapiens
tgataccaaacgttt

SEQ ID NO: 110148 - DNA, 15 bp, Homo sapiens
gtgataccaaacgtt

SEQ ID NO: 110149 - DNA, 15 bp, Homo sapiens
agtgataccaaacgt

SEQ ID NO: 110150 - DNA, 15 bp, Homo sapiens
cagtgataccaaacg

SEQ ID NO: 110151 - DNA, 15 bp, Homo sapiens
acagtgataccaaac

SEQ ID NO: 110152 - DNA, 15 bp, Homo sapiens
tacagtgataccaaa

SEQ ID NO: 110153 - DNA, 15 bp, Homo sapiens
ttacagtgataccaa

SEQ ID NO: 110154 - DNA, 15 bp, Homo sapiens
tttacagtgatacca

SEQ ID NO: 110155 - DNA, 15 bp, Homo sapiens
ttttacagtgatacc

SEQ ID NO: 110156 - DNA, 15 bp, Homo sapiens
attttacagtgatac

SEQ ID NO: 110157 - DNA, 15 bp, Homo sapiens
aattttacagtgata

SEQ ID NO: 110158 - DNA, 15 bp, Homo sapiens
aaattttacagtgat

SEQ ID NO: 110159 - DNA, 15 bp, Homo sapiens
taaattttacagtga

SEQ ID NO: 110160 - DNA, 15 bp, Homo sapiens
ttaaattttacagtg

SEQ ID NO: 110161 - DNA, 15 bp, Homo sapiens
gttaaattttacagt

SEQ ID NO: 110162 - DNA, 15 bp, Homo sapiens
agttaaattttacag

SEQ ID NO: 110163 - DNA, 15 bp, Homo sapiens
tagttaaattttaca

SEQ ID NO: 110164 - DNA, 15 bp, Homo sapiens
ttagttaaattttac

SEQ ID NO: 110165 - DNA, 15 bp, Homo sapiens
tttagttaaatttta

SEQ ID NO: 110166 - DNA, 15 bp, Homo sapiens
ttttagttaaatttt

SEQ ID NO: 110167 - DNA, 15 bp, Homo sapiens
tttttagttaaattt

SEQ ID NO: 110168 - DNA, 15 bp, Homo sapiens
gtttttagttaaatt

SEQ ID NO: 110169 - DNA, 15 bp, Homo sapiens
tgtttttagttaaat

SEQ ID NO: 110170 - DNA, 15 bp, Homo sapiens
ttgtttttagttaaa

SEQ ID NO: 110171 - DNA, 15 bp, Homo sapiens
tttgtttttagttaa

SEQ ID NO: 110172 - DNA, 15 bp, Homo sapiens
ttttgtttttagtta

SEQ ID NO: 110173 - DNA, 15 bp, Homo sapiens
tttttgtttttagtt

SEQ ID NO: 110174 - DNA, 15 bp, Homo sapiens
gtttttgtttttagt

SEQ ID NO: 110175 - DNA, 15 bp, Homo sapiens
agtttttgtttttag

SEQ ID NO: 110176 - DNA, 15 bp, Homo sapiens
tagtttttgttttta

SEQ ID NO: 110177 - DNA, 15 bp, Homo sapiens
atagtttttgttttt

SEQ ID NO: 110178 - DNA, 15 bp, Homo sapiens
gatagtttttgtttt

SEQ ID NO: 110179 - DNA, 15 bp, Homo sapiens
agatagtttttgttt

SEQ ID NO: 110180 - DNA, 15 bp, Homo sapiens
aagatagtttttgtt

SEQ ID NO: 110181 - DNA, 15 bp, Homo sapiens
aaagatagtttttgt

SEQ ID NO: 110182 - DNA, 15 bp, Homo sapiens
taaagatagtttttg

SEQ ID NO: 110183 - DNA, 15 bp, Homo sapiens
ttaaagatagttttt

SEQ ID NO: 110184 - DNA, 15 bp, Homo sapiens
cttaaagatagtttt

SEQ ID NO: 110185 - DNA, 15 bp, Homo sapiens
gcttaaagatagttt

SEQ ID NO: 110186 - DNA, 15 bp, Homo sapiens
agcttaaagatagtt

SEQ ID NO: 110187 - DNA, 15 bp, Homo sapiens
gagcttaaagatagt

SEQ ID NO: 110188 - DNA, 15 bp, Homo sapiens
tgagcttaaagatag

SEQ ID NO: 110189 - DNA, 15 bp, Homo sapiens
gtgagcttaaagata

SEQ ID NO: 110190 - DNA, 15 bp, Homo sapiens
tgtgagcttaaagat

SEQ ID NO: 110191 - DNA, 15 bp, Homo sapiens
ttgtgagcttaaaga

SEQ ID NO: 110192 - DNA, 15 bp, Homo sapiens
cttgtgagcttaaag

SEQ ID NO: 110193 - DNA, 15 bp, Homo sapiens
acttgtgagcttaaa

SEQ ID NO: 110194 - DNA, 15 bp, Homo sapiens
aacttgtgagcttaa

SEQ ID NO: 110195 - DNA, 15 bp, Homo sapiens
taacttgtgagctta

SEQ ID NO: 110196 - DNA, 15 bp, Homo sapiens
ttaacttgtgagctt

SEQ ID NO: 110197 - DNA, 15 bp, Homo sapiens
attaacttgtgagct

SEQ ID NO: 110198 - DNA, 15 bp, Homo sapiens
aattaacttgtgagc

SEQ ID NO: 110199 - DNA, 15 bp, Homo sapiens
aaattaacttgtgag

SEQ ID NO: 110200 - DNA, 15 bp, Homo sapiens
taaattaacttgtga

SEQ ID NO: 110201 - DNA, 15 bp, Homo sapiens
ttaaattaacttgtg

SEQ ID NO: 110202 - DNA, 15 bp, Homo sapiens
gttaaattaacttgt

SEQ ID NO: 110203 - DNA, 15 bp, Homo sapiens
cgttaaattaacttg

SEQ ID NO: 110204 - DNA, 15 bp, Homo sapiens
acgttaaattaactt

SEQ ID NO: 110205 - DNA, 15 bp, Homo sapiens
aacgttaaattaact

SEQ ID NO: 110206 - DNA, 15 bp, Homo sapiens
aaacgttaaattaac

SEQ ID NO: 110207 - DNA, 15 bp, Homo sapiens
aaaacgttaaattaa

SEQ ID NO: 110208 - DNA, 15 bp, Homo sapiens
aaaaacgttaaatta

SEQ ID NO: 110209 - DNA, 15 bp, Homo sapiens
aaaaaacgttaaatt

SEQ ID NO: 110210 - DNA, 15 bp, Homo sapiens
gaaaaaacgttaaat

SEQ ID NO: 110211 - DNA, 15 bp, Homo sapiens
agaaaaaacgttaaa

SEQ ID NO: 110212 - DNA, 15 bp, Homo sapiens
aagaaaaaacgttaa

SEQ ID NO: 110213 - DNA, 15 bp, Homo sapiens
taagaaaaaacgtta

SEQ ID NO: 110214 - DNA, 15 bp, Homo sapiens
gtaagaaaaaacgtt

SEQ ID NO: 110215 - DNA, 15 bp, Homo sapiens
tgtaagaaaaaacgt

SEQ ID NO: 110216 - DNA, 15 bp, Homo sapiens
gtgtaagaaaaaacg

SEQ ID NO: 110217 - DNA, 15 bp, Homo sapiens
tgtgtaagaaaaaac

SEQ ID NO: 110218 - DNA, 15 bp, Homo sapiens
ctgtgtaagaaaaaa

SEQ ID NO: 110219 - DNA, 15 bp, Homo sapiens
cctgtgtaagaaaaa

SEQ ID NO: 110220 - DNA, 15 bp, Homo sapiens
gcctgtgtaagaaaa

SEQ ID NO: 110221 - DNA, 15 bp, Homo sapiens
tgcctgtgtaagaaa

SEQ ID NO: 110222 - DNA, 15 bp, Homo sapiens
atgcctgtgtaagaa

SEQ ID NO: 110223 - DNA, 15 bp, Homo sapiens
aatgcctgtgtaaga

SEQ ID NO: 110224 - DNA, 15 bp, Homo sapiens
aaatgcctgtgtaag

SEQ ID NO: 110225 - DNA, 15 bp, Homo sapiens
caaatgcctgtgtaa

SEQ ID NO: 110226 - DNA, 15 bp, Homo sapiens
acaaatgcctgtgta

SEQ ID NO: 110227 - DNA, 15 bp, Homo sapiens
tacaaatgcctgtgt

SEQ ID NO: 110228 - DNA, 15 bp, Homo sapiens
ttacaaatgcctgtg

SEQ ID NO: 110229 - DNA, 15 bp, Homo sapiens
tttacaaatgcctgt

SEQ ID NO: 110230 - DNA, 15 bp, Homo sapiens
ctttacaaatgcctg

SEQ ID NO: 110231 - DNA, 15 bp, Homo sapiens
cctttacaaatgcct

SEQ ID NO: 110232 - DNA, 15 bp, Homo sapiens
tcctttacaaatgcc

SEQ ID NO: 110233 - DNA, 15 bp, Homo sapiens
atcctttacaaatgc

SEQ ID NO: 110234 - DNA, 15 bp, Homo sapiens
catcctttacaaatg

SEQ ID NO: 110235 - DNA, 15 bp, Homo sapiens
acatcctttacaaat

SEQ ID NO: 110236 - DNA, 15 bp, Homo sapiens
aacatcctttacaaa

SEQ ID NO: 110237 - DNA, 15 bp, Homo sapiens
gaacatcctttacaa

SEQ ID NO: 110238 - DNA, 15 bp, Homo sapiens
tgaacatcctttaca

SEQ ID NO: 110239 - DNA, 15 bp, Homo sapiens
atgaacatcctttac

SEQ ID NO: 110240 - DNA, 15 bp, Homo sapiens
catgaacatccttta

SEQ ID NO: 110241 - DNA, 15 bp, Homo sapiens
tcatgaacatccttt

SEQ ID NO: 110242 - DNA, 15 bp, Homo sapiens
ttcatgaacatcctt

SEQ ID NO: 110243 - DNA, 15 bp, Homo sapiens
cttcatgaacatcct

SEQ ID NO: 110244 - DNA, 15 bp, Homo sapiens
tcttcatgaacatcc

SEQ ID NO: 110245 - DNA, 15 bp, Homo sapiens
atcttcatgaacatc

SEQ ID NO: 110246 - DNA, 15 bp, Homo sapiens
aatcttcatgaacat

SEQ ID NO: 110247 - DNA, 15 bp, Homo sapiens
gaatcttcatgaaca

SEQ ID NO: 110248 - DNA, 15 bp, Homo sapiens
tgaatcttcatgaac

SEQ ID NO: 110249 - DNA, 15 bp, Homo sapiens
ttgaatcttcatgaa

SEQ ID NO: 110250 - DNA, 15 bp, Homo sapiens
attgaatcttcatga

SEQ ID NO: 110251 - DNA, 15 bp, Homo sapiens
tattgaatcttcatg

SEQ ID NO: 110252 - DNA, 15 bp, Homo sapiens
ttattgaatcttcat

SEQ ID NO: 110253 - DNA, 15 bp, Homo sapiens
gttattgaatcttca

SEQ ID NO: 110254 - DNA, 15 bp, Homo sapiens
tgttattgaatcttc

SEQ ID NO: 110255 - DNA, 15 bp, Homo sapiens
ctgttattgaatctt

SEQ ID NO: 110256 - DNA, 15 bp, Homo sapiens
actgttattgaatct

SEQ ID NO: 110257 - DNA, 15 bp, Homo sapiens
aactgttattgaatc

SEQ ID NO: 110258 - DNA, 15 bp, Homo sapiens
caactgttattgaat

SEQ ID NO: 110259 - DNA, 15 bp, Homo sapiens
gcaactgttattgaa

SEQ ID NO: 110260 - DNA, 15 bp, Homo sapiens
tgcaactgttattga

SEQ ID NO: 110261 - DNA, 15 bp, Homo sapiens
atgcaactgttattg

SEQ ID NO: 110262 - DNA, 15 bp, Homo sapiens
aatgcaactgttatt

SEQ ID NO: 110263 - DNA, 15 bp, Homo sapiens
aaatgcaactgttat

SEQ ID NO: 110264 - DNA, 15 bp, Homo sapiens
caaatgcaactgtta

SEQ ID NO: 110265 - DNA, 15 bp, Homo sapiens
tcaaatgcaactgtt

SEQ ID NO: 110266 - DNA, 15 bp, Homo sapiens
ttcaaatgcaactgt

SEQ ID NO: 110267 - DNA, 15 bp, Homo sapiens
tttcaaatgcaactg

SEQ ID NO: 110268 - DNA, 15 bp, Homo sapiens
ttttcaaatgcaact

SEQ ID NO: 110269 - DNA, 15 bp, Homo sapiens
gttttcaaatgcaac

SEQ ID NO: 110270 - DNA, 15 bp, Homo sapiens
tgttttcaaatgcaa

SEQ ID NO: 110271 - DNA, 15 bp, Homo sapiens
ttgttttcaaatgca

SEQ ID NO: 110272 - DNA, 15 bp, Homo sapiens
cttgttttcaaatgc

SEQ ID NO: 110273 - DNA, 15 bp, Homo sapiens
acttgttttcaaatg

SEQ ID NO: 110274 - DNA, 15 bp, Homo sapiens
tacttgttttcaaat

SEQ ID NO: 110275 - DNA, 15 bp, Homo sapiens
ttacttgttttcaaa

SEQ ID NO: 110276 - DNA, 15 bp, Homo sapiens
cttacttgttttcaa

SEQ ID NO: 110277 - DNA, 15 bp, Homo sapiens
acttacttgttttca

SEQ ID NO: 110278 - DNA, 15 bp, Homo sapiens
cacttacttgttttc

SEQ ID NO: 110279 - DNA, 15 bp, Homo sapiens
acacttacttgtttt

SEQ ID NO: 110280 - DNA, 15 bp, Homo sapiens
gacacttacttgttt

SEQ ID NO: 110281 - DNA, 15 bp, Homo sapiens
agacacttacttgtt

SEQ ID NO: 110282 - DNA, 15 bp, Homo sapiens
gagacacttacttgt

SEQ ID NO: 110283 - DNA, 15 bp, Homo sapiens
cgagacacttacttg

SEQ ID NO: 110284 - DNA, 15 bp, Homo sapiens
acgagacacttactt

SEQ ID NO: 110285 - DNA, 15 bp, Homo sapiens
aacgagacacttact

SEQ ID NO: 110286 - DNA, 15 bp, Homo sapiens
taacgagacacttac

SEQ ID NO: 110287 - DNA, 15 bp, Homo sapiens
ataacgagacactta

SEQ ID NO: 110288 - DNA, 15 bp, Homo sapiens
tataacgagacactt

SEQ ID NO: 110289 - DNA, 15 bp, Homo sapiens
atataacgagacact

SEQ ID NO: 110290 - DNA, 15 bp, Homo sapiens
tatataacgagacac

SEQ ID NO: 110291 - DNA, 15 bp, Homo sapiens
ttatataacgagaca

SEQ ID NO: 110292 - DNA, 15 bp, Homo sapiens
attatataacgagac

SEQ ID NO: 110293 - DNA, 15 bp, Homo sapiens
aattatataacgaga

SEQ ID NO: 110294 - DNA, 15 bp, Homo sapiens
aaattatataacgag

SEQ ID NO: 110295 - DNA, 15 bp, Homo sapiens
aaaattatataacga

SEQ ID NO: 110296 - DNA, 15 bp, Homo sapiens
taaaattatataacg

SEQ ID NO: 110297 - DNA, 15 bp, Homo sapiens
ttaaaattatataac

SEQ ID NO: 110298 - DNA, 15 bp, Homo sapiens
attaaaattatataa

SEQ ID NO: 110299 - DNA, 15 bp, Homo sapiens
cattaaaattatata

SEQ ID NO: 110300 - DNA, 15 bp, Homo sapiens
tcattaaaattatat

SEQ ID NO: 110301 - DNA, 15 bp, Homo sapiens
atcattaaaattata

SEQ ID NO: 110302 - DNA, 15 bp, Homo sapiens
catcattaaaattat

SEQ ID NO: 110303 - DNA, 15 bp, Homo sapiens
tcatcattaaaatta

SEQ ID NO: 110304 - DNA, 15 bp, Homo sapiens
ctcatcattaaaatt

SEQ ID NO: 110305 - DNA, 15 bp, Homo sapiens
cctcatcattaaaat

SEQ ID NO: 110306 - DNA, 15 bp, Homo sapiens
acctcatcattaaaa

SEQ ID NO: 110307 - DNA, 15 bp, Homo sapiens
aacctcatcattaaa

SEQ ID NO: 110308 - DNA, 15 bp, Homo sapiens
gaacctcatcattaa

SEQ ID NO: 110309 - DNA, 15 bp, Homo sapiens
agaacctcatcatta

SEQ ID NO: 110310 - DNA, 15 bp, Homo sapiens
aagaacctcatcatt

SEQ ID NO: 110311 - DNA, 15 bp, Homo sapiens
aaagaacctcatcat

SEQ ID NO: 110312 - DNA, 15 bp, Homo sapiens
taaagaacctcatca

SEQ ID NO: 110313 - DNA, 15 bp, Homo sapiens
ttaaagaacctcatc

SEQ ID NO: 110314 - DNA, 15 bp, Homo sapiens
attaaagaacctcat

SEQ ID NO: 110315 - DNA, 15 bp, Homo sapiens
tattaaagaacctca

SEQ ID NO: 110316 - DNA, 15 bp, Homo sapiens
atattaaagaacctc

SEQ ID NO: 110317 - DNA, 15 bp, Homo sapiens
aatattaaagaacct

SEQ ID NO: 110318 - DNA, 15 bp, Homo sapiens
aaatattaaagaacc

SEQ ID NO: 110319 - DNA, 15 bp, Homo sapiens
aaaatattaaagaac

SEQ ID NO: 110320 - DNA, 15 bp, Homo sapiens
taaaatattaaagaa

SEQ ID NO: 110321 - DNA, 15 bp, Homo sapiens
ataaaatattaaaga

SEQ ID NO: 110322 - DNA, 15 bp, Homo sapiens
cataaaatattaaag

SEQ ID NO: 110323 - DNA, 15 bp, Homo sapiens
gcataaaatattaaa

SEQ ID NO: 110324 - DNA, 15 bp, Homo sapiens
agcataaaatattaa

SEQ ID NO: 110325 - DNA, 15 bp, Homo sapiens
tagcataaaatatta

SEQ ID NO: 110326 - DNA, 15 bp, Homo sapiens
ttagcataaaatatt

SEQ ID NO: 110327 - DNA, 15 bp, Homo sapiens
attagcataaaatat

SEQ ID NO: 110328 - DNA, 15 bp, Homo sapiens
aattagcataaaata

SEQ ID NO: 110329 - DNA, 15 bp, Homo sapiens
gaattagcataaaat

SEQ ID NO: 110330 - DNA, 15 bp, Homo sapiens
agaattagcataaaa

SEQ ID NO: 110331 - DNA, 15 bp, Homo sapiens
tagaattagcataaa

SEQ ID NO: 110332 - DNA, 15 bp, Homo sapiens
atagaattagcataa

SEQ ID NO: 110333 - DNA, 15 bp, Homo sapiens
aatagaattagcata

SEQ ID NO: 110334 - DNA, 15 bp, Homo sapiens
gaatagaattagcat

SEQ ID NO: 110335 - DNA, 15 bp, Homo sapiens
agaatagaattagca

SEQ ID NO: 110336 - DNA, 15 bp, Homo sapiens
aagaatagaattagc

SEQ ID NO: 110337 - DNA, 15 bp, Homo sapiens
gaagaatagaattag

SEQ ID NO: 110338 - DNA, 15 bp, Homo sapiens
tgaagaatagaatta

SEQ ID NO: 110339 - DNA, 15 bp, Homo sapiens
atgaagaatagaatt

SEQ ID NO: 110340 - DNA, 15 bp, Homo sapiens
aatgaagaatagaat

SEQ ID NO: 110341 - DNA, 15 bp, Homo sapiens
aaatgaagaatagaa

SEQ ID NO: 110342 - DNA, 15 bp, Homo sapiens
aaaatgaagaataga

SEQ ID NO: 110343 - DNA, 15 bp, Homo sapiens
aaaaatgaagaatag

SEQ ID NO: 110344 - DNA, 15 bp, Homo sapiens
aaaaaatgaagaata

SEQ ID NO: 110345 - DNA, 15 bp, Homo sapiens
taaaaaatgaagaat

SEQ ID NO: 110346 - DNA, 15 bp, Homo sapiens
ttaaaaaatgaagaa

SEQ ID NO: 110347 - DNA, 15 bp, Homo sapiens
tttaaaaaatgaaga

SEQ ID NO: 110348 - DNA, 15 bp, Homo sapiens
ttttaaaaaatgaag

SEQ ID NO: 110349 - DNA, 15 bp, Homo sapiens
tttttaaaaaatgaa

SEQ ID NO: 110350 - DNA, 15 bp, Homo sapiens
atttttaaaaaatga

SEQ ID NO: 110351 - DNA, 15 bp, Homo sapiens
aatttttaaaaaatg

SEQ ID NO: 110352 - DNA, 15 bp, Homo sapiens
gaatttttaaaaaat

SEQ ID NO: 110353 - DNA, 15 bp, Homo sapiens
tgaatttttaaaaaa

SEQ ID NO: 110354 - DNA, 15 bp, Homo sapiens
ttgaatttttaaaaa

SEQ ID NO: 110355 - DNA, 15 bp, Homo sapiens
cttgaatttttaaaa

SEQ ID NO: 110356 - DNA, 15 bp, Homo sapiens
acttgaatttttaaa

SEQ ID NO: 110357 - DNA, 15 bp, Homo sapiens
gacttgaatttttaa

SEQ ID NO: 110358 - DNA, 15 bp, Homo sapiens
ggacttgaattttta

SEQ ID NO: 110359 - DNA, 15 bp, Homo sapiens
tggacttgaattttt

SEQ ID NO: 110360 - DNA, 15 bp, Homo sapiens
ctggacttgaatttt

SEQ ID NO: 110361 - DNA, 15 bp, Homo sapiens
actggacttgaattt

SEQ ID NO: 110362 - DNA, 15 bp, Homo sapiens
aactggacttgaatt

SEQ ID NO: 110363 - DNA, 15 bp, Homo sapiens
aaactggacttgaat

SEQ ID NO: 110364 - DNA, 15 bp, Homo sapiens
caaactggacttgaa

SEQ ID NO: 110365 - DNA, 15 bp, Homo sapiens
tcaaactggacttga

SEQ ID NO: 110366 - DNA, 15 bp, Homo sapiens
ctcaaactggacttg

SEQ ID NO: 110367 - DNA, 15 bp, Homo sapiens
actcaaactggactt

SEQ ID NO: 110368 - DNA, 15 bp, Homo sapiens
cactcaaactggact

SEQ ID NO: 110369 - DNA, 15 bp, Homo sapiens
gcactcaaactggac

SEQ ID NO: 110370 - DNA, 15 bp, Homo sapiens
agcactcaaactgga

SEQ ID NO: 110371 - DNA, 15 bp, Homo sapiens
aagcactcaaactgg

SEQ ID NO: 110372 - DNA, 15 bp, Homo sapiens
aaagcactcaaactg

SEQ ID NO: 110373 - DNA, 15 bp, Homo sapiens
aaaagcactcaaact

SEQ ID NO: 110374 - DNA, 15 bp, Homo sapiens
gaaaagcactcaaac

SEQ ID NO: 110375 - DNA, 15 bp, Homo sapiens
tgaaaagcactcaaa

SEQ ID NO: 110376 - DNA, 15 bp, Homo sapiens
ctgaaaagcactcaa

SEQ ID NO: 110377 - DNA, 15 bp, Homo sapiens
cctgaaaagcactca

SEQ ID NO: 110378 - DNA, 15 bp, Homo sapiens
tcctgaaaagcactc

SEQ ID NO: 110379 - DNA, 15 bp, Homo sapiens
ttcctgaaaagcact

SEQ ID NO: 110380 - DNA, 15 bp, Homo sapiens
attcctgaaaagcac

SEQ ID NO: 110381 - DNA, 15 bp, Homo sapiens
cattcctgaaaagca

SEQ ID NO: 110382 - DNA, 15 bp, Homo sapiens
ccattcctgaaaagc

SEQ ID NO: 110383 - DNA, 15 bp, Homo sapiens
tccattcctgaaaag

SEQ ID NO: 110384 - DNA, 15 bp, Homo sapiens
atccattcctgaaaa

SEQ ID NO: 110385 - DNA, 15 bp, Homo sapiens
gatccattcctgaaa

SEQ ID NO: 110386 - DNA, 15 bp, Homo sapiens
agatccattcctgaa

SEQ ID NO: 110387 - DNA, 15 bp, Homo sapiens
aagatccattcctga

SEQ ID NO: 110388 - DNA, 15 bp, Homo sapiens
gaagatccattcctg

SEQ ID NO: 110389 - DNA, 15 bp, Homo sapiens
tgaagatccattcct

SEQ ID NO: 110390 - DNA, 15 bp, Homo sapiens
atgaagatccattcc

SEQ ID NO: 110391 - DNA, 15 bp, Homo sapiens
catgaagatccattc

SEQ ID NO: 110392 - DNA, 15 bp, Homo sapiens
acatgaagatccatt

SEQ ID NO: 110393 - DNA, 15 bp, Homo sapiens
aacatgaagatccat

SEQ ID NO: 110394 - DNA, 15 bp, Homo sapiens
taacatgaagatcca

SEQ ID NO: 110395 - DNA, 15 bp, Homo sapiens
gtaacatgaagatcc

SEQ ID NO: 110396 - DNA, 15 bp, Homo sapiens
agtaacatgaagatc

SEQ ID NO: 110397 - DNA, 15 bp, Homo sapiens
cagtaacatgaagat

SEQ ID NO: 110398 - DNA, 15 bp, Homo sapiens
tcagtaacatgaaga

SEQ ID NO: 110399 - DNA, 15 bp, Homo sapiens
gtcagtaacatgaag

SEQ ID NO: 110400 - DNA, 15 bp, Homo sapiens
agtcagtaacatgaa

SEQ ID NO: 110401 - DNA, 15 bp, Homo sapiens
cagtcagtaacatga

SEQ ID NO: 110402 - DNA, 15 bp, Homo sapiens
tcagtcagtaacatg

SEQ ID NO: 110403 - DNA, 15 bp, Homo sapiens
ctcagtcagtaacat

SEQ ID NO: 110404 - DNA, 15 bp, Homo sapiens
tctcagtcagtaaca

SEQ ID NO: 110405 - DNA, 15 bp, Homo sapiens
ttctcagtcagtaac

SEQ ID NO: 110406 - DNA, 15 bp, Homo sapiens
cttctcagtcagtaa

SEQ ID NO: 110407 - DNA, 15 bp, Homo sapiens
acttctcagtcagta

SEQ ID NO: 110408 - DNA, 15 bp, Homo sapiens
aacttctcagtcagt

SEQ ID NO: 110409 - DNA, 15 bp, Homo sapiens
aaacttctcagtcag

SEQ ID NO: 110410 - DNA, 15 bp, Homo sapiens
gaaacttctcagtca

SEQ ID NO: 110411 - DNA, 15 bp, Homo sapiens
agaaacttctcagtc

SEQ ID NO: 110412 - DNA, 15 bp, Homo sapiens
cagaaacttctcagt

SEQ ID NO: 110413 - DNA, 15 bp, Homo sapiens
tcagaaacttctcag

SEQ ID NO: 110414 - DNA, 15 bp, Homo sapiens
ttcagaaacttctca

SEQ ID NO: 110415 - DNA, 15 bp, Homo sapiens
gttcagaaacttctc

SEQ ID NO: 110416 - DNA, 15 bp, Homo sapiens
tgttcagaaacttct

SEQ ID NO: 110417 - DNA, 15 bp, Homo sapiens
ttgttcagaaacttc

SEQ ID NO: 110418 - DNA, 15 bp, Homo sapiens
gttgttcagaaactt

SEQ ID NO: 110419 - DNA, 15 bp, Homo sapiens
agttgttcagaaact

SEQ ID NO: 110420 - DNA, 15 bp, Homo sapiens
gagttgttcagaaac

SEQ ID NO: 110421 - DNA, 15 bp, Homo sapiens
tgagttgttcagaaa

SEQ ID NO: 110422 - DNA, 15 bp, Homo sapiens
ctgagttgttcagaa

SEQ ID NO: 110423 - DNA, 15 bp, Homo sapiens
actgagttgttcaga

SEQ ID NO: 110424 - DNA, 15 bp, Homo sapiens
tactgagttgttcag

SEQ ID NO: 110425 - DNA, 15 bp, Homo sapiens
atactgagttgttca

SEQ ID NO: 110426 - DNA, 15 bp, Homo sapiens
aatactgagttgttc

SEQ ID NO: 110427 - DNA, 15 bp, Homo sapiens
taatactgagttgtt

SEQ ID NO: 110428 - DNA, 15 bp, Homo sapiens
ttaatactgagttgt

SEQ ID NO: 110429 - DNA, 15 bp, Homo sapiens
tttaatactgagttg

SEQ ID NO: 110430 - DNA, 15 bp, Homo sapiens
gtttaatactgagtt

SEQ ID NO: 110431 - DNA, 15 bp, Homo sapiens
agtttaatactgagt

SEQ ID NO: 110432 - DNA, 15 bp, Homo sapiens
tagtttaatactgag

SEQ ID NO: 110433 - DNA, 15 bp, Homo sapiens
ttagtttaatactga

SEQ ID NO: 110434 - DNA, 15 bp, Homo sapiens
attagtttaatactg

SEQ ID NO: 110435 - DNA, 15 bp, Homo sapiens
cattagtttaatact

SEQ ID NO: 110436 - DNA, 15 bp, Homo sapiens
ccattagtttaatac

SEQ ID NO: 110437 - DNA, 15 bp, Homo sapiens
tccattagtttaata

SEQ ID NO: 110438 - DNA, 15 bp, Homo sapiens
ttccattagtttaat

SEQ ID NO: 110439 - DNA, 15 bp, Homo sapiens
attccattagtttaa

SEQ ID NO: 110440 - DNA, 15 bp, Homo sapiens
cattccattagttta

SEQ ID NO: 110441 - DNA, 15 bp, Homo sapiens
tcattccattagttt

SEQ ID NO: 110442 - DNA, 15 bp, Homo sapiens
gtcattccattagtt

SEQ ID NO: 110443 - DNA, 15 bp, Homo sapiens
agtcattccattagt

SEQ ID NO: 110444 - DNA, 15 bp, Homo sapiens
cagtcattccattag

SEQ ID NO: 110445 - DNA, 15 bp, Homo sapiens
acagtcattccatta

SEQ ID NO: 110446 - DNA, 15 bp, Homo sapiens
aacagtcattccatt

SEQ ID NO: 110447 - DNA, 15 bp, Homo sapiens
aaacagtcattccat

SEQ ID NO: 110448 - DNA, 15 bp, Homo sapiens
gaaacagtcattcca

SEQ ID NO: 110449 - DNA, 15 bp, Homo sapiens
agaaacagtcattcc

SEQ ID NO: 110450 - DNA, 15 bp, Homo sapiens
cagaaacagtcattc

SEQ ID NO: 110451 - DNA, 15 bp, Homo sapiens
gcagaaacagtcatt

SEQ ID NO: 110452 - DNA, 15 bp, Homo sapiens
agcagaaacagtcat

SEQ ID NO: 110453 - DNA, 15 bp, Homo sapiens
tagcagaaacagtca

SEQ ID NO: 110454 - DNA, 15 bp, Homo sapiens
ttagcagaaacagtc

SEQ ID NO: 110455 - DNA, 15 bp, Homo sapiens
attagcagaaacagt

SEQ ID NO: 110456 - DNA, 15 bp, Homo sapiens
cattagcagaaacag

SEQ ID NO: 110457 - DNA, 15 bp, Homo sapiens
acattagcagaaaca

SEQ ID NO: 110458 - DNA, 15 bp, Homo sapiens
gacattagcagaaac

SEQ ID NO: 110459 - DNA, 15 bp, Homo sapiens
ggacattagcagaaa

SEQ ID NO: 110460 - DNA, 15 bp, Homo sapiens
aggacattagcagaa

SEQ ID NO: 110461 - DNA, 15 bp, Homo sapiens
caggacattagcaga

SEQ ID NO: 110462 - DNA, 15 bp, Homo sapiens
ccaggacattagcag

SEQ ID NO: 110463 - DNA, 15 bp, Homo sapiens
tccaggacattagca

SEQ ID NO: 110464 - DNA, 15 bp, Homo sapiens
ctccaggacattagc

SEQ ID NO: 110465 - DNA, 15 bp, Homo sapiens
cctccaggacattag

SEQ ID NO: 110466 - DNA, 15 bp, Homo sapiens
acctccaggacatta

SEQ ID NO: 110467 - DNA, 15 bp, Homo sapiens
gacctccaggacatt

SEQ ID NO: 110468 - DNA, 15 bp, Homo sapiens
ggacctccaggacat

SEQ ID NO: 110469 - DNA, 15 bp, Homo sapiens
gggacctccaggaca

SEQ ID NO: 110470 - DNA, 15 bp, Homo sapiens
agggacctccaggac

SEQ ID NO: 110471 - DNA, 15 bp, Homo sapiens
aagggacctccagga

SEQ ID NO: 110472 - DNA, 15 bp, Homo sapiens
taagggacctccagg

SEQ ID NO: 110473 - DNA, 15 bp, Homo sapiens
ataagggacctccag

SEQ ID NO: 110474 - DNA, 15 bp, Homo sapiens
aataagggacctcca

SEQ ID NO: 110475 - DNA, 15 bp, Homo sapiens
caataagggacctcc

SEQ ID NO: 110476 - DNA, 15 bp, Homo sapiens
acaataagggacctc

SEQ ID NO: 110477 - DNA, 15 bp, Homo sapiens
tacaataagggacct

SEQ ID NO: 110478 - DNA, 15 bp, Homo sapiens
atacaataagggacc

SEQ ID NO: 110479 - DNA, 15 bp, Homo sapiens
catacaataagggac

SEQ ID NO: 110480 - DNA, 15 bp, Homo sapiens
ccatacaataaggga

SEQ ID NO: 110481 - DNA, 15 bp, Homo sapiens
accatacaataaggg

SEQ ID NO: 110482 - DNA, 15 bp, Homo sapiens
taccatacaataagg

SEQ ID NO: 110483 - DNA, 15 bp, Homo sapiens
ataccatacaataag

SEQ ID NO: 110484 - DNA, 15 bp, Homo sapiens
aataccatacaataa

SEQ ID NO: 110485 - DNA, 15 bp, Homo sapiens
caataccatacaata

SEQ ID NO: 110486 - DNA, 15 bp, Homo sapiens
tcaataccatacaat

SEQ ID NO: 110487 - DNA, 15 bp, Homo sapiens
atcaataccatacaa

SEQ ID NO: 110488 - DNA, 15 bp, Homo sapiens
gatcaataccataca

SEQ ID NO: 110489 - DNA, 15 bp, Homo sapiens
ggatcaataccatac

SEQ ID NO: 110490 - DNA, 15 bp, Homo sapiens
aggatcaataccata

SEQ ID NO: 110491 - DNA, 15 bp, Homo sapiens
aaggatcaataccat

SEQ ID NO: 110492 - DNA, 15 bp, Homo sapiens
taaggatcaatacca

SEQ ID NO: 110493 - DNA, 15 bp, Homo sapiens
gtaaggatcaatacc

SEQ ID NO: 110494 - DNA, 15 bp, Homo sapiens
cgtaaggatcaatac

SEQ ID NO: 110495 - DNA, 15 bp, Homo sapiens
acgtaaggatcaata

SEQ ID NO: 110496 - DNA, 15 bp, Homo sapiens
gacgtaaggatcaat

SEQ ID NO: 110497 - DNA, 15 bp, Homo sapiens
agacgtaaggatcaa

SEQ ID NO: 110498 - DNA, 15 bp, Homo sapiens
aagacgtaaggatca

SEQ ID NO: 110499 - DNA, 15 bp, Homo sapiens
taagacgtaaggatc

SEQ ID NO: 110500 - DNA, 15 bp, Homo sapiens
ttaagacgtaaggat

SEQ ID NO: 110501 - DNA, 15 bp, Homo sapiens
attaagacgtaagga

SEQ ID NO: 110502 - DNA, 15 bp, Homo sapiens
aattaagacgtaagg

SEQ ID NO: 110503 - DNA, 15 bp, Homo sapiens
gaattaagacgtaag

SEQ ID NO: 110504 - DNA, 15 bp, Homo sapiens
ggaattaagacgtaa

SEQ ID NO: 110505 - DNA, 15 bp, Homo sapiens
gggaattaagacgta

SEQ ID NO: 110506 - DNA, 15 bp, Homo sapiens
agggaattaagacgt

SEQ ID NO: 110507 - DNA, 15 bp, Homo sapiens
aagggaattaagacg

SEQ ID NO: 110508 - DNA, 15 bp, Homo sapiens
caagggaattaagac

SEQ ID NO: 110509 - DNA, 15 bp, Homo sapiens
tcaagggaattaaga

SEQ ID NO: 110510 - DNA, 15 bp, Homo sapiens
ttcaagggaattaag

SEQ ID NO: 110511 - DNA, 15 bp, Homo sapiens
attcaagggaattaa

SEQ ID NO: 110512 - DNA, 15 bp, Homo sapiens
cattcaagggaatta

SEQ ID NO: 110513 - DNA, 15 bp, Homo sapiens
acattcaagggaatt

SEQ ID NO: 110514 - DNA, 15 bp, Homo sapiens
cacattcaagggaat

SEQ ID NO: 110515 - DNA, 15 bp, Homo sapiens
tcacattcaagggaa

SEQ ID NO: 110516 - DNA, 15 bp, Homo sapiens
ttcacattcaaggga

SEQ ID NO: 110517 - DNA, 15 bp, Homo sapiens
cttcacattcaaggg

SEQ ID NO: 110518 - DNA, 15 bp, Homo sapiens
tcttcacattcaagg

SEQ ID NO: 110519 - DNA, 15 bp, Homo sapiens
ttcttcacattcaag

SEQ ID NO: 110520 - DNA, 15 bp, Homo sapiens
tttcttcacattcaa

SEQ ID NO: 110521 - DNA, 15 bp, Homo sapiens
ctttcttcacattca

SEQ ID NO: 110522 - DNA, 15 bp, Homo sapiens
tctttcttcacattc

SEQ ID NO: 110523 - DNA, 15 bp, Homo sapiens
ttctttcttcacatt

SEQ ID NO: 110524 - DNA, 15 bp, Homo sapiens
tttctttcttcacat

SEQ ID NO: 110525 - DNA, 15 bp, Homo sapiens
gtttctttcttcaca

SEQ ID NO: 110526 - DNA, 15 bp, Homo sapiens
ggtttctttcttcac

SEQ ID NO: 110527 - DNA, 15 bp, Homo sapiens
tggtttctttcttca

SEQ ID NO: 110528 - DNA, 15 bp, Homo sapiens
ctggtttctttcttc

SEQ ID NO: 110529 - DNA, 15 bp, Homo sapiens
tctggtttctttctt

SEQ ID NO: 110530 - DNA, 15 bp, Homo sapiens
ctctggtttctttct

SEQ ID NO: 110531 - DNA, 15 bp, Homo sapiens
tctctggtttctttc

SEQ ID NO: 110532 - DNA, 15 bp, Homo sapiens
ctctctggtttcttt

SEQ ID NO: 110533 - DNA, 15 bp, Homo sapiens
actctctggtttctt

SEQ ID NO: 110534 - DNA, 15 bp, Homo sapiens
gactctctggtttct

SEQ ID NO: 110535 - DNA, 15 bp, Homo sapiens
agactctctggtttc

SEQ ID NO: 110536 - DNA, 15 bp, Homo sapiens
aagactctctggttt

SEQ ID NO: 110537 - DNA, 15 bp, Homo sapiens
caagactctctggtt

SEQ ID NO: 110538 - DNA, 15 bp, Homo sapiens
acaagactctctggt

SEQ ID NO: 110539 - DNA, 15 bp, Homo sapiens
cacaagactctctgg

SEQ ID NO: 110540 - DNA, 15 bp, Homo sapiens
acacaagactctctg

SEQ ID NO: 110541 - DNA, 15 bp, Homo sapiens
tacacaagactctct

SEQ ID NO: 110542 - DNA, 15 bp, Homo sapiens
atacacaagactctc

SEQ ID NO: 110543 - DNA, 15 bp, Homo sapiens
aatacacaagactct

SEQ ID NO: 110544 - DNA, 15 bp, Homo sapiens
taatacacaagactc

SEQ ID NO: 110545 - DNA, 15 bp, Homo sapiens
ctaatacacaagact

SEQ ID NO: 110546 - DNA, 15 bp, Homo sapiens
actaatacacaagac

SEQ ID NO: 110547 - DNA, 15 bp, Homo sapiens
tactaatacacaaga

SEQ ID NO: 110548 - DNA, 15 bp, Homo sapiens
ttactaatacacaag

SEQ ID NO: 110549 - DNA, 15 bp, Homo sapiens
gttactaatacacaa

SEQ ID NO: 110550 - DNA, 15 bp, Homo sapiens
agttactaatacaca

SEQ ID NO: 110551 - DNA, 15 bp, Homo sapiens
cagttactaatacac

SEQ ID NO: 110552 - DNA, 15 bp, Homo sapiens
ccagttactaataca

SEQ ID NO: 110553 - DNA, 15 bp, Homo sapiens
tccagttactaatac

SEQ ID NO: 110554 - DNA, 15 bp, Homo sapiens
ttccagttactaata

SEQ ID NO: 110555 - DNA, 15 bp, Homo sapiens
cttccagttactaat

SEQ ID NO: 110556 - DNA, 15 bp, Homo sapiens
acttccagttactaa

SEQ ID NO: 110557 - DNA, 15 bp, Homo sapiens
aacttccagttacta

SEQ ID NO: 110558 - DNA, 15 bp, Homo sapiens
gaacttccagttact

SEQ ID NO: 110559 - DNA, 15 bp, Homo sapiens
cgaacttccagttac

SEQ ID NO: 110560 - DNA, 15 bp, Homo sapiens
gcgaacttccagtta

SEQ ID NO: 110561 - DNA, 15 bp, Homo sapiens
tgcgaacttccagtt

SEQ ID NO: 110562 - DNA, 15 bp, Homo sapiens
atgcgaacttccagt

SEQ ID NO: 110563 - DNA, 15 bp, Homo sapiens
tatgcgaacttccag

SEQ ID NO: 110564 - DNA, 15 bp, Homo sapiens
ctatgcgaacttcca

SEQ ID NO: 110565 - DNA, 15 bp, Homo sapiens
cctatgcgaacttcc

SEQ ID NO: 110566 - DNA, 15 bp, Homo sapiens
tcctatgcgaacttc

SEQ ID NO: 110567 - DNA, 15 bp, Homo sapiens
ctcctatgcgaactt

SEQ ID NO: 110568 - DNA, 15 bp, Homo sapiens
actcctatgcgaact

SEQ ID NO: 110569 - DNA, 15 bp, Homo sapiens
tactcctatgcgaac

SEQ ID NO: 110570 - DNA, 15 bp, Homo sapiens
atactcctatgcgaa

SEQ ID NO: 110571 - DNA, 15 bp, Homo sapiens
aatactcctatgcga

SEQ ID NO: 110572 - DNA, 15 bp, Homo sapiens
aaatactcctatgcg

SEQ ID NO: 110573 - DNA, 15 bp, Homo sapiens
caaatactcctatgc

SEQ ID NO: 110574 - DNA, 15 bp, Homo sapiens
acaaatactcctatg

SEQ ID NO: 110575 - DNA, 15 bp, Homo sapiens
tacaaatactcctat

SEQ ID NO: 110576 - DNA, 15 bp, Homo sapiens
ttacaaatactccta

SEQ ID NO: 110577 - DNA, 15 bp, Homo sapiens
tttacaaatactcct

SEQ ID NO: 110578 - DNA, 15 bp, Homo sapiens
atttacaaatactcc

SEQ ID NO: 110579 - DNA, 15 bp, Homo sapiens
aatttacaaatactc

SEQ ID NO: 110580 - DNA, 15 bp, Homo sapiens
aaatttacaaatact

SEQ ID NO: 110581 - DNA, 15 bp, Homo sapiens
aaaatttacaaatac

SEQ ID NO: 110582 - DNA, 15 bp, Homo sapiens
taaaatttacaaata

SEQ ID NO: 110583 - DNA, 15 bp, Homo sapiens
ttaaaatttacaaat

SEQ ID NO: 110584 - DNA, 15 bp, Homo sapiens
tttaaaatttacaaa

SEQ ID NO: 110585 - DNA, 15 bp, Homo sapiens
ttttaaaatttacaa

SEQ ID NO: 110586 - DNA, 15 bp, Homo sapiens
tttttaaaatttaca

SEQ ID NO: 110587 - DNA, 15 bp, Homo sapiens
ctttttaaaatttac

SEQ ID NO: 110588 - DNA, 15 bp, Homo sapiens
tctttttaaaattta

SEQ ID NO: 110589 - DNA, 15 bp, Homo sapiens
atctttttaaaattt

SEQ ID NO: 110590 - DNA, 15 bp, Homo sapiens
tatctttttaaaatt

SEQ ID NO: 110591 - DNA, 15 bp, Homo sapiens
ctatctttttaaaat

SEQ ID NO: 110592 - DNA, 15 bp, Homo sapiens
actatctttttaaaa

SEQ ID NO: 110593 - DNA, 15 bp, Homo sapiens
tactatctttttaaa

SEQ ID NO: 110594 - DNA, 15 bp, Homo sapiens
ttactatctttttaa

SEQ ID NO: 110595 - DNA, 15 bp, Homo sapiens
attactatcttttta

SEQ ID NO: 110596 - DNA, 15 bp, Homo sapiens
cattactatcttttt

SEQ ID NO: 110597 - DNA, 15 bp, Homo sapiens
tcattactatctttt

SEQ ID NO: 110598 - DNA, 15 bp, Homo sapiens
ttcattactatcttt

SEQ ID NO: 110599 - DNA, 15 bp, Homo sapiens
tttcattactatctt

SEQ ID NO: 110600 - DNA, 15 bp, Homo sapiens
ttttcattactatct

SEQ ID NO: 110601 - DNA, 15 bp, Homo sapiens
cttttcattactatc

SEQ ID NO: 110602 - DNA, 15 bp, Homo sapiens
tcttttcattactat

SEQ ID NO: 110603 - DNA, 15 bp, Homo sapiens
atcttttcattacta

SEQ ID NO: 110604 - DNA, 15 bp, Homo sapiens
aatcttttcattact

SEQ ID NO: 110605 - DNA, 15 bp, Homo sapiens
gaatcttttcattac

SEQ ID NO: 110606 - DNA, 15 bp, Homo sapiens
tgaatcttttcatta

SEQ ID NO: 110607 - DNA, 15 bp, Homo sapiens
atgaatcttttcatt

SEQ ID NO: 110608 - DNA, 15 bp, Homo sapiens
catgaatcttttcat

SEQ ID NO: 110609 - DNA, 15 bp, Homo sapiens
ccatgaatcttttca

SEQ ID NO: 110610 - DNA, 15 bp, Homo sapiens
cccatgaatcttttc

SEQ ID NO: 110611 - DNA, 15 bp, Homo sapiens
acccatgaatctttt

SEQ ID NO: 110612 - DNA, 15 bp, Homo sapiens
tacccatgaatcttt

SEQ ID NO: 110613 - DNA, 15 bp, Homo sapiens
atacccatgaatctt

SEQ ID NO: 110614 - DNA, 15 bp, Homo sapiens
aatacccatgaatct

SEQ ID NO: 110615 - DNA, 15 bp, Homo sapiens
caatacccatgaatc

SEQ ID NO: 110616 - DNA, 15 bp, Homo sapiens
gcaatacccatgaat

SEQ ID NO: 110617 - DNA, 15 bp, Homo sapiens
agcaatacccatgaa

SEQ ID NO: 110618 - DNA, 15 bp, Homo sapiens
tagcaatacccatga

SEQ ID NO: 110619 - DNA, 15 bp, Homo sapiens
ttagcaatacccatg

SEQ ID NO: 110620 - DNA, 15 bp, Homo sapiens
tttagcaatacccat

SEQ ID NO: 110621 - DNA, 15 bp, Homo sapiens
ttttagcaataccca

SEQ ID NO: 110622 - DNA, 15 bp, Homo sapiens
tttttagcaataccc

SEQ ID NO: 110623 - DNA, 15 bp, Homo sapiens
ctttttagcaatacc

SEQ ID NO: 110624 - DNA, 15 bp, Homo sapiens
actttttagcaatac

SEQ ID NO: 110625 - DNA, 15 bp, Homo sapiens
aactttttagcaata

SEQ ID NO: 110626 - DNA, 15 bp, Homo sapiens
caactttttagcaat

SEQ ID NO: 110627 - DNA, 15 bp, Homo sapiens
acaactttttagcaa

SEQ ID NO: 110628 - DNA, 15 bp, Homo sapiens
tacaactttttagca

SEQ ID NO: 110629 - DNA, 15 bp, Homo sapiens
atacaactttttagc

SEQ ID NO: 110630 - DNA, 15 bp, Homo sapiens
catacaactttttag

SEQ ID NO: 110631 - DNA, 15 bp, Homo sapiens
acatacaacttttta

SEQ ID NO: 110632 - DNA, 15 bp, Homo sapiens
cacatacaacttttt

SEQ ID NO: 110633 - DNA, 15 bp, Homo sapiens
tcacatacaactttt

SEQ ID NO: 110634 - DNA, 15 bp, Homo sapiens
ctcacatacaacttt

SEQ ID NO: 110635 - DNA, 15 bp, Homo sapiens
actcacatacaactt

SEQ ID NO: 110636 - DNA, 15 bp, Homo sapiens
aactcacatacaact

SEQ ID NO: 110637 - DNA, 15 bp, Homo sapiens
gaactcacatacaac

SEQ ID NO: 110638 - DNA, 15 bp, Homo sapiens
agaactcacatacaa

SEQ ID NO: 110639 - DNA, 15 bp, Homo sapiens
aagaactcacataca

SEQ ID NO: 110640 - DNA, 15 bp, Homo sapiens
aaagaactcacatac

SEQ ID NO: 110641 - DNA, 15 bp, Homo sapiens
taaagaactcacata

SEQ ID NO: 110642 - DNA, 15 bp, Homo sapiens
ttaaagaactcacat

SEQ ID NO: 110643 - DNA, 15 bp, Homo sapiens
gttaaagaactcaca

SEQ ID NO: 110644 - DNA, 15 bp, Homo sapiens
tgttaaagaactcac

SEQ ID NO: 110645 - DNA, 15 bp, Homo sapiens
atgttaaagaactca

SEQ ID NO: 110646 - DNA, 15 bp, Homo sapiens
aatgttaaagaactc

SEQ ID NO: 110647 - DNA, 15 bp, Homo sapiens
taatgttaaagaact

SEQ ID NO: 110648 - DNA, 15 bp, Homo sapiens
ttaatgttaaagaac

SEQ ID NO: 110649 - DNA, 15 bp, Homo sapiens
tttaatgttaaagaa

SEQ ID NO: 110650 - DNA, 15 bp, Homo sapiens
atttaatgttaaaga

SEQ ID NO: 110651 - DNA, 15 bp, Homo sapiens
gatttaatgttaaag

SEQ ID NO: 110652 - DNA, 15 bp, Homo sapiens
agatttaatgttaaa

SEQ ID NO: 110653 - DNA, 15 bp, Homo sapiens
tagatttaatgttaa

SEQ ID NO: 110654 - DNA, 15 bp, Homo sapiens
ttagatttaatgtta

SEQ ID NO: 110655 - DNA, 15 bp, Homo sapiens
tttagatttaatgtt

SEQ ID NO: 110656 - DNA, 15 bp, Homo sapiens
ttttagatttaatgt

SEQ ID NO: 110657 - DNA, 15 bp, Homo sapiens
gttttagatttaatg

SEQ ID NO: 110658 - DNA, 15 bp, Homo sapiens
agttttagatttaat

SEQ ID NO: 110659 - DNA, 15 bp, Homo sapiens
cagttttagatttaa

SEQ ID NO: 110660 - DNA, 15 bp, Homo sapiens
tcagttttagattta

SEQ ID NO: 110661 - DNA, 15 bp, Homo sapiens
atcagttttagattt

SEQ ID NO: 110662 - DNA, 15 bp, Homo sapiens
catcagttttagatt

SEQ ID NO: 110663 - DNA, 15 bp, Homo sapiens
ccatcagttttagat

SEQ ID NO: 110664 - DNA, 15 bp, Homo sapiens
accatcagttttaga

SEQ ID NO: 110665 - DNA, 15 bp, Homo sapiens
aaccatcagttttag

SEQ ID NO: 110666 - DNA, 15 bp, Homo sapiens
aaaccatcagtttta

SEQ ID NO: 110667 - DNA, 15 bp, Homo sapiens
aaaaccatcagtttt

SEQ ID NO: 110668 - DNA, 15 bp, Homo sapiens
taaaaccatcagttt

SEQ ID NO: 110669 - DNA, 15 bp, Homo sapiens
ctaaaaccatcagtt

SEQ ID NO: 110670 - DNA, 15 bp, Homo sapiens
actaaaaccatcagt

SEQ ID NO: 110671 - DNA, 15 bp, Homo sapiens
aactaaaaccatcag

SEQ ID NO: 110672 - DNA, 15 bp, Homo sapiens
caactaaaaccatca

SEQ ID NO: 110673 - DNA, 15 bp, Homo sapiens
acaactaaaaccatc

SEQ ID NO: 110674 - DNA, 15 bp, Homo sapiens
gacaactaaaaccat

SEQ ID NO: 110675 - DNA, 15 bp, Homo sapiens
agacaactaaaacca

SEQ ID NO: 110676 - DNA, 15 bp, Homo sapiens
tagacaactaaaacc

SEQ ID NO: 110677 - DNA, 15 bp, Homo sapiens
ctagacaactaaaac

SEQ ID NO: 110678 - DNA, 15 bp, Homo sapiens
actagacaactaaaa

SEQ ID NO: 110679 - DNA, 15 bp, Homo sapiens
tactagacaactaaa

SEQ ID NO: 110680 - DNA, 15 bp, Homo sapiens
atactagacaactaa

SEQ ID NO: 110681 - DNA, 15 bp, Homo sapiens
tatactagacaacta

SEQ ID NO: 110682 - DNA, 15 bp, Homo sapiens
atatactagacaact

SEQ ID NO: 110683 - DNA, 15 bp, Homo sapiens
aatatactagacaac

SEQ ID NO: 110684 - DNA, 15 bp, Homo sapiens
aaatatactagacaa

SEQ ID NO: 110685 - DNA, 15 bp, Homo sapiens
aaaatatactagaca

SEQ ID NO: 110686 - DNA, 15 bp, Homo sapiens
taaaatatactagac

SEQ ID NO: 110687 - DNA, 15 bp, Homo sapiens
ataaaatatactaga

SEQ ID NO: 110688 - DNA, 15 bp, Homo sapiens
cataaaatatactag

SEQ ID NO: 110689 - DNA, 15 bp, Homo sapiens
ccataaaatatacta

SEQ ID NO: 110690 - DNA, 15 bp, Homo sapiens
tccataaaatatact

SEQ ID NO: 110691 - DNA, 15 bp, Homo sapiens
ttccataaaatatac

SEQ ID NO: 110692 - DNA, 15 bp, Homo sapiens
tttccataaaatata

SEQ ID NO: 110693 - DNA, 15 bp, Homo sapiens
gtttccataaaatat

SEQ ID NO: 110694 - DNA, 15 bp, Homo sapiens
tgtttccataaaata

SEQ ID NO: 110695 - DNA, 15 bp, Homo sapiens
ctgtttccataaaat

SEQ ID NO: 110696 - DNA, 15 bp, Homo sapiens
actgtttccataaaa

SEQ ID NO: 110697 - DNA, 15 bp, Homo sapiens
gactgtttccataaa

SEQ ID NO: 110698 - DNA, 15 bp, Homo sapiens
tgactgtttccataa

SEQ ID NO: 110699 - DNA, 15 bp, Homo sapiens
atgactgtttccata

SEQ ID NO: 110700 - DNA, 15 bp, Homo sapiens
catgactgtttccat

SEQ ID NO: 110701 - DNA, 15 bp, Homo sapiens
acatgactgtttcca

SEQ ID NO: 110702 - DNA, 15 bp, Homo sapiens
aacatgactgtttcc

SEQ ID NO: 110703 - DNA, 15 bp, Homo sapiens
aaacatgactgtttc

SEQ ID NO: 110704 - DNA, 15 bp, Homo sapiens
taaacatgactgttt

SEQ ID NO: 110705 - DNA, 15 bp, Homo sapiens
gtaaacatgactgtt

SEQ ID NO: 110706 - DNA, 15 bp, Homo sapiens
ggtaaacatgactgt

SEQ ID NO: 110707 - DNA, 15 bp, Homo sapiens
aggtaaacatgactg

SEQ ID NO: 110708 - DNA, 15 bp, Homo sapiens
taggtaaacatgact

SEQ ID NO: 110709 - DNA, 15 bp, Homo sapiens
ataggtaaacatgac

SEQ ID NO: 110710 - DNA, 15 bp, Homo sapiens
aataggtaaacatga

SEQ ID NO: 110711 - DNA, 15 bp, Homo sapiens
taataggtaaacatg

SEQ ID NO: 110712 - DNA, 15 bp, Homo sapiens
ataataggtaaacat

SEQ ID NO: 110713 - DNA, 15 bp, Homo sapiens
gataataggtaaaca

SEQ ID NO: 110714 - DNA, 15 bp, Homo sapiens
agataataggtaaac

SEQ ID NO: 110715 - DNA, 15 bp, Homo sapiens
cagataataggtaaa

SEQ ID NO: 110716 - DNA, 15 bp, Homo sapiens
tcagataataggtaa

SEQ ID NO: 110717 - DNA, 15 bp, Homo sapiens
atcagataataggta

SEQ ID NO: 110718 - DNA, 15 bp, Homo sapiens
aatcagataataggt

SEQ ID NO: 110719 - DNA, 15 bp, Homo sapiens
aaatcagataatagg

SEQ ID NO: 110720 - DNA, 15 bp, Homo sapiens
aaaatcagataatag

SEQ ID NO: 110721 - DNA, 15 bp, Homo sapiens
aaaaatcagataata

SEQ ID NO: 110722 - DNA, 15 bp, Homo sapiens
aaaaaatcagataat

SEQ ID NO: 110723 - DNA, 15 bp, Homo sapiens
aaaaaaatcagataa

SEQ ID NO: 110724 - DNA, 15 bp, Homo sapiens
aaaaaaaatcagata

SEQ ID NO: 110725 - DNA, 15 bp, Homo sapiens
taaaaaaaatcagat

SEQ ID NO: 110726 - DNA, 15 bp, Homo sapiens
ttaaaaaaaatcaga

SEQ ID NO: 110727 - DNA, 15 bp, Homo sapiens
attaaaaaaaatcag

SEQ ID NO: 110728 - DNA, 15 bp, Homo sapiens
cattaaaaaaaatca

SEQ ID NO: 110729 - DNA, 15 bp, Homo sapiens
acattaaaaaaaatc

SEQ ID NO: 110730 - DNA, 15 bp, Homo sapiens
aacattaaaaaaaat

SEQ ID NO: 110731 - DNA, 15 bp, Homo sapiens
aaacattaaaaaaaa

SEQ ID NO: 110732 - DNA, 15 bp, Homo sapiens
gaaacattaaaaaaa

SEQ ID NO: 110733 - DNA, 15 bp, Homo sapiens
tgaaacattaaaaaa

SEQ ID NO: 110734 - DNA, 15 bp, Homo sapiens
atgaaacattaaaaa

SEQ ID NO: 110735 - DNA, 15 bp, Homo sapiens
tatgaaacattaaaa

SEQ ID NO: 110736 - DNA, 15 bp, Homo sapiens
atatgaaacattaaa

SEQ ID NO: 110737 - DNA, 15 bp, Homo sapiens
catatgaaacattaa

SEQ ID NO: 110738 - DNA, 15 bp, Homo sapiens
acatatgaaacatta

SEQ ID NO: 110739 - DNA, 15 bp, Homo sapiens
aacatatgaaacatt

SEQ ID NO: 110740 - DNA, 15 bp, Homo sapiens
gaacatatgaaacat

SEQ ID NO: 110741 - DNA, 15 bp, Homo sapiens
tgaacatatgaaaca

SEQ ID NO: 110742 - DNA, 15 bp, Homo sapiens
ctgaacatatgaaac

SEQ ID NO: 110743 - DNA, 15 bp, Homo sapiens
gctgaacatatgaaa

SEQ ID NO: 110744 - DNA, 15 bp, Homo sapiens
tgctgaacatatgaa

SEQ ID NO: 110745 - DNA, 15 bp, Homo sapiens
ttgctgaacatatga

SEQ ID NO: 110746 - DNA, 15 bp, Homo sapiens
attgctgaacatatg

SEQ ID NO: 110747 - DNA, 15 bp, Homo sapiens
tattgctgaacatat

SEQ ID NO: 110748 - DNA, 15 bp, Homo sapiens
ctattgctgaacata

SEQ ID NO: 110749 - DNA, 15 bp, Homo sapiens
gctattgctgaacat

SEQ ID NO: 110750 - DNA, 15 bp, Homo sapiens
tgctattgctgaaca

SEQ ID NO: 110751 - DNA, 15 bp, Homo sapiens
ctgctattgctgaac

SEQ ID NO: 110752 - DNA, 15 bp, Homo sapiens
actgctattgctgaa

SEQ ID NO: 110753 - DNA, 15 bp, Homo sapiens
tactgctattgctga

SEQ ID NO: 110754 - DNA, 15 bp, Homo sapiens
ctactgctattgctg

SEQ ID NO: 110755 - DNA, 15 bp, Homo sapiens
gctactgctattgct

SEQ ID NO: 110756 - DNA, 15 bp, Homo sapiens
agctactgctattgc

SEQ ID NO: 110757 - DNA, 15 bp, Homo sapiens
cagctactgctattg

SEQ ID NO: 110758 - DNA, 15 bp, Homo sapiens
tcagctactgctatt

SEQ ID NO: 110759 - DNA, 15 bp, Homo sapiens
atcagctactgctat

SEQ ID NO: 110760 - DNA, 15 bp, Homo sapiens
gatcagctactgcta

SEQ ID NO: 110761 - DNA, 15 bp, Homo sapiens
agatcagctactgct

SEQ ID NO: 110762 - DNA, 15 bp, Homo sapiens
aagatcagctactgc

SEQ ID NO: 110763 - DNA, 15 bp, Homo sapiens
aaagatcagctactg

SEQ ID NO: 110764 - DNA, 15 bp, Homo sapiens
aaaagatcagctact

SEQ ID NO: 110765 - DNA, 15 bp, Homo sapiens
gaaaagatcagctac

SEQ ID NO: 110766 - DNA, 15 bp, Homo sapiens
agaaaagatcagcta

SEQ ID NO: 110767 - DNA, 15 bp, Homo sapiens
cagaaaagatcagct

SEQ ID NO: 110768 - DNA, 15 bp, Homo sapiens
acagaaaagatcagc

SEQ ID NO: 110769 - DNA, 15 bp, Homo sapiens
aacagaaaagatcag

SEQ ID NO: 110770 - DNA, 15 bp, Homo sapiens
gaacagaaaagatca

SEQ ID NO: 110771 - DNA, 15 bp, Homo sapiens
agaacagaaaagatc

SEQ ID NO: 110772 - DNA, 15 bp, Homo sapiens
gagaacagaaaagat

SEQ ID NO: 110773 - DNA, 15 bp, Homo sapiens
agagaacagaaaaga

SEQ ID NO: 110774 - DNA, 15 bp, Homo sapiens
aagagaacagaaaag

SEQ ID NO: 110775 - DNA, 15 bp, Homo sapiens
aaagagaacagaaaa

SEQ ID NO: 110776 - DNA, 15 bp, Homo sapiens
aaaagagaacagaaa

SEQ ID NO: 110777 - DNA, 15 bp, Homo sapiens
caaaagagaacagaa

SEQ ID NO: 110778 - DNA, 15 bp, Homo sapiens
gcaaaagagaacaga

SEQ ID NO: 110779 - DNA, 15 bp, Homo sapiens
agcaaaagagaacag

SEQ ID NO: 110780 - DNA, 15 bp, Homo sapiens
tagcaaaagagaaca

SEQ ID NO: 110781 - DNA, 15 bp, Homo sapiens
ctagcaaaagagaac

SEQ ID NO: 110782 - DNA, 15 bp, Homo sapiens
tctagcaaaagagaa

SEQ ID NO: 110783 - DNA, 15 bp, Homo sapiens
atctagcaaaagaga

SEQ ID NO: 110784 - DNA, 15 bp, Homo sapiens
catctagcaaaagag

SEQ ID NO: 110785 - DNA, 15 bp, Homo sapiens
tcatctagcaaaaga

SEQ ID NO: 110786 - DNA, 15 bp, Homo sapiens
ttcatctagcaaaag

SEQ ID NO: 110787 - DNA, 15 bp, Homo sapiens
cttcatctagcaaaa

SEQ ID NO: 110788 - DNA, 15 bp, Homo sapiens
tcttcatctagcaaa

SEQ ID NO: 110789 - DNA, 15 bp, Homo sapiens
ttcttcatctagcaa

SEQ ID NO: 110790 - DNA, 15 bp, Homo sapiens
tttcttcatctagca

SEQ ID NO: 110791 - DNA, 15 bp, Homo sapiens
atttcttcatctagc

SEQ ID NO: 110792 - DNA, 15 bp, Homo sapiens
tatttcttcatctag

SEQ ID NO: 110793 - DNA, 15 bp, Homo sapiens
ttatttcttcatcta

SEQ ID NO: 110794 - DNA, 15 bp, Homo sapiens
tttatttcttcatct

SEQ ID NO: 110795 - DNA, 15 bp, Homo sapiens
ttttatttcttcatc

SEQ ID NO: 110796 - DNA, 15 bp, Homo sapiens
tttttatttcttcat

SEQ ID NO: 110797 - DNA, 15 bp, Homo sapiens
gtttttatttcttca

SEQ ID NO: 110798 - DNA, 15 bp, Homo sapiens
tgtttttatttcttc

SEQ ID NO: 110799 - DNA, 15 bp, Homo sapiens
ctgtttttatttctt

SEQ ID NO: 110800 - DNA, 15 bp, Homo sapiens
actgtttttatttct

SEQ ID NO: 110801 - DNA, 15 bp, Homo sapiens
gactgtttttatttc

SEQ ID NO: 110802 - DNA, 15 bp, Homo sapiens
tgactgtttttattt

SEQ ID NO: 110803 - DNA, 15 bp, Homo sapiens
atgactgtttttatt

SEQ ID NO: 110804 - DNA, 15 bp, Homo sapiens
tatgactgtttttat

SEQ ID NO: 110805 - DNA, 15 bp, Homo sapiens
ctatgactgttttta

SEQ ID NO: 110806 - DNA, 15 bp, Homo sapiens
cctatgactgttttt

SEQ ID NO: 110807 - DNA, 15 bp, Homo sapiens
gcctatgactgtttt

SEQ ID NO: 110808 - DNA, 15 bp, Homo sapiens
ggcctatgactgttt

SEQ ID NO: 110809 - DNA, 15 bp, Homo sapiens
aggcctatgactgtt

SEQ ID NO: 110810 - DNA, 15 bp, Homo sapiens
taggcctatgactgt

SEQ ID NO: 110811 - DNA, 15 bp, Homo sapiens
ctaggcctatgactg

SEQ ID NO: 110812 - DNA, 15 bp, Homo sapiens
cctaggcctatgact

SEQ ID NO: 110813 - DNA, 15 bp, Homo sapiens
tcctaggcctatgac

SEQ ID NO: 110814 - DNA, 15 bp, Homo sapiens
ttcctaggcctatga

SEQ ID NO: 110815 - DNA, 15 bp, Homo sapiens
attcctaggcctatg

SEQ ID NO: 110816 - DNA, 15 bp, Homo sapiens
tattcctaggcctat

SEQ ID NO: 110817 - DNA, 15 bp, Homo sapiens
atattcctaggccta

SEQ ID NO: 110818 - DNA, 15 bp, Homo sapiens
aatattcctaggcct

SEQ ID NO: 110819 - DNA, 15 bp, Homo sapiens
taatattcctaggcc

SEQ ID NO: 110820 - DNA, 15 bp, Homo sapiens
ttaatattcctaggc

SEQ ID NO: 110821 - DNA, 15 bp, Homo sapiens
gttaatattcctagg

SEQ ID NO: 110822 - DNA, 15 bp, Homo sapiens
agttaatattcctag

SEQ ID NO: 110823 - DNA, 15 bp, Homo sapiens
cagttaatattccta

SEQ ID NO: 110824 - DNA, 15 bp, Homo sapiens
acagttaatattcct

SEQ ID NO: 110825 - DNA, 15 bp, Homo sapiens
tacagttaatattcc

SEQ ID NO: 110826 - DNA, 15 bp, Homo sapiens
atacagttaatattc

SEQ ID NO: 110827 - DNA, 15 bp, Homo sapiens
catacagttaatatt

SEQ ID NO: 110828 - DNA, 15 bp, Homo sapiens
tcatacagttaatat

SEQ ID NO: 110829 - DNA, 15 bp, Homo sapiens
ttcatacagttaata

SEQ ID NO: 110830 - DNA, 15 bp, Homo sapiens
tttcatacagttaat

SEQ ID NO: 110831 - DNA, 15 bp, Homo sapiens
ctttcatacagttaa

SEQ ID NO: 110832 - DNA, 15 bp, Homo sapiens
gctttcatacagtta

SEQ ID NO: 110833 - DNA, 15 bp, Homo sapiens
tgctttcatacagtt

SEQ ID NO: 110834 - DNA, 15 bp, Homo sapiens
atgctttcatacagt

SEQ ID NO: 110835 - DNA, 15 bp, Homo sapiens
gatgctttcatacag

SEQ ID NO: 110836 - DNA, 15 bp, Homo sapiens
tgatgctttcataca

SEQ ID NO: 110837 - DNA, 15 bp, Homo sapiens
ttgatgctttcatac

SEQ ID NO: 110838 - DNA, 15 bp, Homo sapiens
attgatgctttcata

SEQ ID NO: 110839 - DNA, 15 bp, Homo sapiens
tattgatgctttcat

SEQ ID NO: 110840 - DNA, 15 bp, Homo sapiens
ctattgatgctttca

SEQ ID NO: 110841 - DNA, 15 bp, Homo sapiens
actattgatgctttc

SEQ ID NO: 110842 - DNA, 15 bp, Homo sapiens
tactattgatgcttt

SEQ ID NO: 110843 - DNA, 15 bp, Homo sapiens
atactattgatgctt

SEQ ID NO: 110844 - DNA, 15 bp, Homo sapiens
tatactattgatgct

SEQ ID NO: 110845 - DNA, 15 bp, Homo sapiens
ctatactattgatgc

SEQ ID NO: 110846 - DNA, 15 bp, Homo sapiens
tctatactattgatg

SEQ ID NO: 110847 - DNA, 15 bp, Homo sapiens
atctatactattgat

SEQ ID NO: 110848 - DNA, 15 bp, Homo sapiens
catctatactattga

SEQ ID NO: 110849 - DNA, 15 bp, Homo sapiens
acatctatactattg

SEQ ID NO: 110850 - DNA, 15 bp, Homo sapiens
aacatctatactatt

SEQ ID NO: 110851 - DNA, 15 bp, Homo sapiens
taacatctatactat

SEQ ID NO: 110852 - DNA, 15 bp, Homo sapiens
ttaacatctatacta

SEQ ID NO: 110853 - DNA, 15 bp, Homo sapiens
gttaacatctatact

SEQ ID NO: 110854 - DNA, 15 bp, Homo sapiens
tgttaacatctatac

SEQ ID NO: 110855 - DNA, 15 bp, Homo sapiens
atgttaacatctata

SEQ ID NO: 110856 - DNA, 15 bp, Homo sapiens
aatgttaacatctat

SEQ ID NO: 110857 - DNA, 15 bp, Homo sapiens
aaatgttaacatcta

SEQ ID NO: 110858 - DNA, 15 bp, Homo sapiens
aaaatgttaacatct

SEQ ID NO: 110859 - DNA, 15 bp, Homo sapiens
taaaatgttaacatc

SEQ ID NO: 110860 - DNA, 15 bp, Homo sapiens
ataaaatgttaacat

SEQ ID NO: 110861 - DNA, 15 bp, Homo sapiens
aataaaatgttaaca

SEQ ID NO: 110862 - DNA, 15 bp, Homo sapiens
caataaaatgttaac

SEQ ID NO: 110863 - DNA, 15 bp, Homo sapiens
ccaataaaatgttaa

SEQ ID NO: 110864 - DNA, 15 bp, Homo sapiens
tccaataaaatgtta

SEQ ID NO: 110865 - DNA, 15 bp, Homo sapiens
ctccaataaaatgtt

SEQ ID NO: 110866 - DNA, 15 bp, Homo sapiens
tctccaataaaatgt

SEQ ID NO: 110867 - DNA, 15 bp, Homo sapiens
ttctccaataaaatg

SEQ ID NO: 110868 - DNA, 15 bp, Homo sapiens
gttctccaataaaat

SEQ ID NO: 110869 - DNA, 15 bp, Homo sapiens
tgttctccaataaaa

SEQ ID NO: 110870 - DNA, 15 bp, Homo sapiens
gtgttctccaataaa

SEQ ID NO: 110871 - DNA, 15 bp, Homo sapiens
tgtgttctccaataa

SEQ ID NO: 110872 - DNA, 15 bp, Homo sapiens
ttgtgttctccaata

SEQ ID NO: 110873 - DNA, 15 bp, Homo sapiens
cttgtgttctccaat

SEQ ID NO: 110874 - DNA, 15 bp, Homo sapiens
acttgtgttctccaa

SEQ ID NO: 110875 - DNA, 15 bp, Homo sapiens
gacttgtgttctcca

SEQ ID NO: 110876 - DNA, 15 bp, Homo sapiens
agacttgtgttctcc

SEQ ID NO: 110877 - DNA, 15 bp, Homo sapiens
gagacttgtgttctc

SEQ ID NO: 110878 - DNA, 15 bp, Homo sapiens
agagacttgtgttct

SEQ ID NO: 110879 - DNA, 15 bp, Homo sapiens
aagagacttgtgttc

SEQ ID NO: 110880 - DNA, 15 bp, Homo sapiens
caagagacttgtgtt

SEQ ID NO: 110881 - DNA, 15 bp, Homo sapiens
tcaagagacttgtgt

SEQ ID NO: 110882 - DNA, 15 bp, Homo sapiens
gtcaagagacttgtg

SEQ ID NO: 110883 - DNA, 15 bp, Homo sapiens
agtcaagagacttgt

SEQ ID NO: 110884 - DNA, 15 bp, Homo sapiens
tagtcaagagacttg

SEQ ID NO: 110885 - DNA, 15 bp, Homo sapiens
ttagtcaagagactt

SEQ ID NO: 110886 - DNA, 15 bp, Homo sapiens
tttagtcaagagact

SEQ ID NO: 110887 - DNA, 15 bp, Homo sapiens
atttagtcaagagac

SEQ ID NO: 110888 - DNA, 15 bp, Homo sapiens
catttagtcaagaga

SEQ ID NO: 110889 - DNA, 15 bp, Homo sapiens
acatttagtcaagag

SEQ ID NO: 110890 - DNA, 15 bp, Homo sapiens
aacatttagtcaaga

SEQ ID NO: 110891 - DNA, 15 bp, Homo sapiens
aaacatttagtcaag

SEQ ID NO: 110892 - DNA, 15 bp, Homo sapiens
aaaacatttagtcaa

SEQ ID NO: 110893 - DNA, 15 bp, Homo sapiens
caaaacatttagtca

SEQ ID NO: 110894 - DNA, 15 bp, Homo sapiens
tcaaaacatttagtc

SEQ ID NO: 110895 - DNA, 15 bp, Homo sapiens
ttcaaaacatttagt

SEQ ID NO: 110896 - DNA, 15 bp, Homo sapiens
attcaaaacatttag

SEQ ID NO: 110897 - DNA, 15 bp, Homo sapiens
cattcaaaacattta

SEQ ID NO: 110898 - DNA, 15 bp, Homo sapiens
gcattcaaaacattt

SEQ ID NO: 110899 - DNA, 15 bp, Homo sapiens
agcattcaaaacatt

SEQ ID NO: 110900 - DNA, 15 bp, Homo sapiens
tagcattcaaaacat

SEQ ID NO: 110901 - DNA, 15 bp, Homo sapiens
ttagcattcaaaaca

SEQ ID NO: 110902 - DNA, 15 bp, Homo sapiens
attagcattcaaaac

SEQ ID NO: 110903 - DNA, 15 bp, Homo sapiens
tattagcattcaaaa

SEQ ID NO: 110904 - DNA, 15 bp, Homo sapiens
ttattagcattcaaa

SEQ ID NO: 110905 - DNA, 15 bp, Homo sapiens
tttattagcattcaa

SEQ ID NO: 110906 - DNA, 15 bp, Homo sapiens
ctttattagcattca

SEQ ID NO: 110907 - DNA, 15 bp, Homo sapiens
cctttattagcattc

SEQ ID NO: 110908 - DNA, 15 bp, Homo sapiens
gcctttattagcatt

SEQ ID NO: 110909 - DNA, 15 bp, Homo sapiens
agcctttattagcat

SEQ ID NO: 110910 - DNA, 15 bp, Homo sapiens
tagcctttattagca

SEQ ID NO: 110911 - DNA, 15 bp, Homo sapiens
atagcctttattagc

SEQ ID NO: 110912 - DNA, 15 bp, Homo sapiens
aatagcctttattag

SEQ ID NO: 110913 - DNA, 15 bp, Homo sapiens
aaatagcctttatta

SEQ ID NO: 110914 - DNA, 15 bp, Homo sapiens
aaaatagcctttatt

SEQ ID NO: 110915 - DNA, 15 bp, Homo sapiens
gaaaatagcctttat

SEQ ID NO: 110916 - DNA, 15 bp, Homo sapiens
tgaaaatagccttta

SEQ ID NO: 110917 - DNA, 15 bp, Homo sapiens
ctgaaaatagccttt

SEQ ID NO: 110918 - DNA, 15 bp, Homo sapiens
cctgaaaatagcctt

SEQ ID NO: 110919 - DNA, 15 bp, Homo sapiens
ccctgaaaatagcct

SEQ ID NO: 110920 - DNA, 15 bp, Homo sapiens
accctgaaaatagcc

SEQ ID NO: 110921 - DNA, 15 bp, Homo sapiens
taccctgaaaatagc

SEQ ID NO: 110922 - DNA, 15 bp, Homo sapiens
ctaccctgaaaatag

SEQ ID NO: 110923 - DNA, 15 bp, Homo sapiens
gctaccctgaaaata

SEQ ID NO: 110924 - DNA, 15 bp, Homo sapiens
agctaccctgaaaat

SEQ ID NO: 110925 - DNA, 15 bp, Homo sapiens
cagctaccctgaaaa

SEQ ID NO: 110926 - DNA, 15 bp, Homo sapiens
acagctaccctgaaa

SEQ ID NO: 110927 - DNA, 15 bp, Homo sapiens
aacagctaccctgaa

SEQ ID NO: 110928 - DNA, 15 bp, Homo sapiens
caacagctaccctga

SEQ ID NO: 110929 - DNA, 15 bp, Homo sapiens
ccaacagctaccctg

SEQ ID NO: 110930 - DNA, 15 bp, Homo sapiens
accaacagctaccct

SEQ ID NO: 110931 - DNA, 15 bp, Homo sapiens
taccaacagctaccc

SEQ ID NO: 110932 - DNA, 15 bp, Homo sapiens
ttaccaacagctacc

SEQ ID NO: 110933 - DNA, 15 bp, Homo sapiens
cttaccaacagctac

SEQ ID NO: 110934 - DNA, 15 bp, Homo sapiens
tcttaccaacagcta

SEQ ID NO: 110935 - DNA, 15 bp, Homo sapiens
atcttaccaacagct

SEQ ID NO: 110936 - DNA, 15 bp, Homo sapiens
aatcttaccaacagc

SEQ ID NO: 110937 - DNA, 15 bp, Homo sapiens
caatcttaccaacag

SEQ ID NO: 110938 - DNA, 15 bp, Homo sapiens
acaatcttaccaaca

SEQ ID NO: 110939 - DNA, 15 bp, Homo sapiens
tacaatcttaccaac

SEQ ID NO: 110940 - DNA, 15 bp, Homo sapiens
ttacaatcttaccaa

SEQ ID NO: 110941 - DNA, 15 bp, Homo sapiens
tttacaatcttacca

SEQ ID NO: 110942 - DNA, 15 bp, Homo sapiens
ctttacaatcttacc

SEQ ID NO: 110943 - DNA, 15 bp, Homo sapiens
actttacaatcttac

SEQ ID NO: 110944 - DNA, 15 bp, Homo sapiens
tactttacaatctta

SEQ ID NO: 110945 - DNA, 15 bp, Homo sapiens
gtactttacaatctt

SEQ ID NO: 110946 - DNA, 15 bp, Homo sapiens
tgtactttacaatct

SEQ ID NO: 110947 - DNA, 15 bp, Homo sapiens
atgtactttacaatc

SEQ ID NO: 110948 - DNA, 15 bp, Homo sapiens
tatgtactttacaat

SEQ ID NO: 110949 - DNA, 15 bp, Homo sapiens
atatgtactttacaa

SEQ ID NO: 110950 - DNA, 15 bp, Homo sapiens
tatatgtactttaca

SEQ ID NO: 110951 - DNA, 15 bp, Homo sapiens
ttatatgtactttac

SEQ ID NO: 110952 - DNA, 15 bp, Homo sapiens
tttatatgtacttta

SEQ ID NO: 110953 - DNA, 15 bp, Homo sapiens
gtttatatgtacttt

SEQ ID NO: 110954 - DNA, 15 bp, Homo sapiens
agtttatatgtactt

SEQ ID NO: 110955 - DNA, 15 bp, Homo sapiens
gagtttatatgtact

SEQ ID NO: 110956 - DNA, 15 bp, Homo sapiens
ggagtttatatgtac

SEQ ID NO: 110957 - DNA, 15 bp, Homo sapiens
aggagtttatatgta

SEQ ID NO: 110958 - DNA, 15 bp, Homo sapiens
aaggagtttatatgt

SEQ ID NO: 110959 - DNA, 15 bp, Homo sapiens
taaggagtttatatg

SEQ ID NO: 110960 - DNA, 15 bp, Homo sapiens
ctaaggagtttatat

SEQ ID NO: 110961 - DNA, 15 bp, Homo sapiens
actaaggagtttata

SEQ ID NO: 110962 - DNA, 15 bp, Homo sapiens
gactaaggagtttat

SEQ ID NO: 110963 - DNA, 15 bp, Homo sapiens
tgactaaggagttta

SEQ ID NO: 110964 - DNA, 15 bp, Homo sapiens
ttgactaaggagttt

SEQ ID NO: 110965 - DNA, 15 bp, Homo sapiens
tttgactaaggagtt

SEQ ID NO: 110966 - DNA, 15 bp, Homo sapiens
ctttgactaaggagt

SEQ ID NO: 110967 - DNA, 15 bp, Homo sapiens
actttgactaaggag

SEQ ID NO: 110968 - DNA, 15 bp, Homo sapiens
cactttgactaagga

SEQ ID NO: 110969 - DNA, 15 bp, Homo sapiens
acactttgactaagg

SEQ ID NO: 110970 - DNA, 15 bp, Homo sapiens
tacactttgactaag

SEQ ID NO: 110971 - DNA, 15 bp, Homo sapiens
ctacactttgactaa

SEQ ID NO: 110972 - DNA, 15 bp, Homo sapiens
tctacactttgacta

SEQ ID NO: 110973 - DNA, 15 bp, Homo sapiens
atctacactttgact

SEQ ID NO: 110974 - DNA, 15 bp, Homo sapiens
catctacactttgac

SEQ ID NO: 110975 - DNA, 15 bp, Homo sapiens
acatctacactttga

SEQ ID NO: 110976 - DNA, 15 bp, Homo sapiens
cacatctacactttg

SEQ ID NO: 110977 - DNA, 15 bp, Homo sapiens
ccacatctacacttt

SEQ ID NO: 110978 - DNA, 15 bp, Homo sapiens
gccacatctacactt

SEQ ID NO: 110979 - DNA, 15 bp, Homo sapiens
agccacatctacact

SEQ ID NO: 110980 - DNA, 15 bp, Homo sapiens
tagccacatctacac

SEQ ID NO: 110981 - DNA, 15 bp, Homo sapiens
atagccacatctaca

SEQ ID NO: 110982 - DNA, 15 bp, Homo sapiens
catagccacatctac

SEQ ID NO: 110983 - DNA, 15 bp, Homo sapiens
tcatagccacatcta

SEQ ID NO: 110984 - DNA, 15 bp, Homo sapiens
atcatagccacatct

SEQ ID NO: 110985 - DNA, 15 bp, Homo sapiens
gatcatagccacatc

SEQ ID NO: 110986 - DNA, 15 bp, Homo sapiens
agatcatagccacat

SEQ ID NO: 110987 - DNA, 15 bp, Homo sapiens
aagatcatagccaca

SEQ ID NO: 110988 - DNA, 15 bp, Homo sapiens
taagatcatagccac

SEQ ID NO: 110989 - DNA, 15 bp, Homo sapiens
ctaagatcatagcca

SEQ ID NO: 110990 - DNA, 15 bp, Homo sapiens
cctaagatcatagcc

SEQ ID NO: 110991 - DNA, 15 bp, Homo sapiens
tcctaagatcatagc

SEQ ID NO: 110992 - DNA, 15 bp, Homo sapiens
atcctaagatcatag

SEQ ID NO: 110993 - DNA, 15 bp, Homo sapiens
aatcctaagatcata

SEQ ID NO: 110994 - DNA, 15 bp, Homo sapiens
aaatcctaagatcat

SEQ ID NO: 110995 - DNA, 15 bp, Homo sapiens
aaaatcctaagatca

SEQ ID NO: 110996 - DNA, 15 bp, Homo sapiens
taaaatcctaagatc

SEQ ID NO: 110997 - DNA, 15 bp, Homo sapiens
gtaaaatcctaagat

SEQ ID NO: 110998 - DNA, 15 bp, Homo sapiens
agtaaaatcctaaga

SEQ ID NO: 110999 - DNA, 15 bp, Homo sapiens
tagtaaaatcctaag

SEQ ID NO: 111000 - DNA, 15 bp, Homo sapiens
ttagtaaaatcctaa

SEQ ID NO: 111001 - DNA, 15 bp, Homo sapiens
tttagtaaaatccta

SEQ ID NO: 111002 - DNA, 15 bp, Homo sapiens
gtttagtaaaatcct

SEQ ID NO: 111003 - DNA, 15 bp, Homo sapiens
agtttagtaaaatcc

SEQ ID NO: 111004 - DNA, 15 bp, Homo sapiens
gagtttagtaaaatc

SEQ ID NO: 111005 - DNA, 15 bp, Homo sapiens
agagtttagtaaaat

SEQ ID NO: 111006 - DNA, 15 bp, Homo sapiens
cagagtttagtaaaa

SEQ ID NO: 111007 - DNA, 15 bp, Homo sapiens
tcagagtttagtaaa

SEQ ID NO: 111008 - DNA, 15 bp, Homo sapiens
atcagagtttagtaa

SEQ ID NO: 111009 - DNA, 15 bp, Homo sapiens
catcagagtttagta

SEQ ID NO: 111010 - DNA, 15 bp, Homo sapiens
ccatcagagtttagt

SEQ ID NO: 111011 - DNA, 15 bp, Homo sapiens
tccatcagagtttag

SEQ ID NO: 111012 - DNA, 15 bp, Homo sapiens
atccatcagagttta

SEQ ID NO: 111013 - DNA, 15 bp, Homo sapiens
catccatcagagttt

SEQ ID NO: 111014 - DNA, 15 bp, Homo sapiens
ccatccatcagagtt

SEQ ID NO: 111015 - DNA, 15 bp, Homo sapiens
accatccatcagagt

SEQ ID NO: 111016 - DNA, 15 bp, Homo sapiens
aaccatccatcagag

SEQ ID NO: 111017 - DNA, 15 bp, Homo sapiens
taaccatccatcaga

SEQ ID NO: 111018 - DNA, 15 bp, Homo sapiens
ttaaccatccatcag

SEQ ID NO: 111019 - DNA, 15 bp, Homo sapiens
gttaaccatccatca

SEQ ID NO: 111020 - DNA, 15 bp, Homo sapiens
tgttaaccatccatc

SEQ ID NO: 111021 - DNA, 15 bp, Homo sapiens
ctgttaaccatccat

SEQ ID NO: 111022 - DNA, 15 bp, Homo sapiens
actgttaaccatcca

SEQ ID NO: 111023 - DNA, 15 bp, Homo sapiens
aactgttaaccatcc

SEQ ID NO: 111024 - DNA, 15 bp, Homo sapiens
taactgttaaccatc

SEQ ID NO: 111025 - DNA, 15 bp, Homo sapiens
ataactgttaaccat

SEQ ID NO: 111026 - DNA, 15 bp, Homo sapiens
gataactgttaacca

SEQ ID NO: 111027 - DNA, 15 bp, Homo sapiens
tgataactgttaacc

SEQ ID NO: 111028 - DNA, 15 bp, Homo sapiens
atgataactgttaac

SEQ ID NO: 111029 - DNA, 15 bp, Homo sapiens
aatgataactgttaa

SEQ ID NO: 111030 - DNA, 15 bp, Homo sapiens
aaatgataactgtta

SEQ ID NO: 111031 - DNA, 15 bp, Homo sapiens
aaaatgataactgtt

SEQ ID NO: 111032 - DNA, 15 bp, Homo sapiens
aaaaatgataactgt

SEQ ID NO: 111033 - DNA, 15 bp, Homo sapiens
aaaaaatgataactg

SEQ ID NO: 111034 - DNA, 15 bp, Homo sapiens
aaaaaaatgataact

SEQ ID NO: 111035 - DNA, 15 bp, Homo sapiens
caaaaaaatgataac

SEQ ID NO: 111036 - DNA, 15 bp, Homo sapiens
ccaaaaaaatgataa

SEQ ID NO: 111037 - DNA, 15 bp, Homo sapiens
gccaaaaaaatgata

SEQ ID NO: 111038 - DNA, 15 bp, Homo sapiens
agccaaaaaaatgat

SEQ ID NO: 111039 - DNA, 15 bp, Homo sapiens
gagccaaaaaaatga

SEQ ID NO: 111040 - DNA, 15 bp, Homo sapiens
agagccaaaaaaatg

SEQ ID NO: 111041 - DNA, 15 bp, Homo sapiens
aagagccaaaaaaat

SEQ ID NO: 111042 - DNA, 15 bp, Homo sapiens
taagagccaaaaaaa

SEQ ID NO: 111043 - DNA, 15 bp, Homo sapiens
ataagagccaaaaaa

SEQ ID NO: 111044 - DNA, 15 bp, Homo sapiens
tataagagccaaaaa

SEQ ID NO: 111045 - DNA, 15 bp, Homo sapiens
atataagagccaaaa

SEQ ID NO: 111046 - DNA, 15 bp, Homo sapiens
tatataagagccaaa

SEQ ID NO: 111047 - DNA, 15 bp, Homo sapiens
gtatataagagccaa

SEQ ID NO: 111048 - DNA, 15 bp, Homo sapiens
ggtatataagagcca

SEQ ID NO: 111049 - DNA, 15 bp, Homo sapiens
tggtatataagagcc

SEQ ID NO: 111050 - DNA, 15 bp, Homo sapiens
ttggtatataagagc

SEQ ID NO: 111051 - DNA, 15 bp, Homo sapiens
cttggtatataagag

SEQ ID NO: 111052 - DNA, 15 bp, Homo sapiens
tcttggtatataaga

SEQ ID NO: 111053 - DNA, 15 bp, Homo sapiens
ttcttggtatataag

SEQ ID NO: 111054 - DNA, 15 bp, Homo sapiens
tttcttggtatataa

SEQ ID NO: 111055 - DNA, 15 bp, Homo sapiens
ttttcttggtatata

SEQ ID NO: 111056 - DNA, 15 bp, Homo sapiens
attttcttggtatat

SEQ ID NO: 111057 - DNA, 15 bp, Homo sapiens
aattttcttggtata

SEQ ID NO: 111058 - DNA, 15 bp, Homo sapiens
taattttcttggtat

SEQ ID NO: 111059 - DNA, 15 bp, Homo sapiens
ttaattttcttggta

SEQ ID NO: 111060 - DNA, 15 bp, Homo sapiens
attaattttcttggt

SEQ ID NO: 111061 - DNA, 15 bp, Homo sapiens
tattaattttcttgg

SEQ ID NO: 111062 - DNA, 15 bp, Homo sapiens
ttattaattttcttg

SEQ ID NO: 111063 - DNA, 15 bp, Homo sapiens
attattaattttctt

SEQ ID NO: 111064 - DNA, 15 bp, Homo sapiens
tattattaattttct

SEQ ID NO: 111065 - DNA, 15 bp, Homo sapiens
atattattaattttc

SEQ ID NO: 111066 - DNA, 15 bp, Homo sapiens
tatattattaatttt

SEQ ID NO: 111067 - DNA, 15 bp, Homo sapiens
atatattattaattt

SEQ ID NO: 111068 - DNA, 15 bp, Homo sapiens
gatatattattaatt

SEQ ID NO: 111069 - DNA, 15 bp, Homo sapiens
tgatatattattaat

SEQ ID NO: 111070 - DNA, 15 bp, Homo sapiens
ttgatatattattaa

SEQ ID NO: 111071 - DNA, 15 bp, Homo sapiens
tttgatatattatta

SEQ ID NO: 111072 - DNA, 15 bp, Homo sapiens
ttttgatatattatt

SEQ ID NO: 111073 - DNA, 15 bp, Homo sapiens
cttttgatatattat

SEQ ID NO: 111074 - DNA, 15 bp, Homo sapiens
gcttttgatatatta

SEQ ID NO: 111075 - DNA, 15 bp, Homo sapiens
tgcttttgatatatt

SEQ ID NO: 111076 - DNA, 15 bp, Homo sapiens
ctgcttttgatatat

SEQ ID NO: 111077 - DNA, 15 bp, Homo sapiens
cctgcttttgatata

SEQ ID NO: 111078 - DNA, 15 bp, Homo sapiens
gcctgcttttgatat

SEQ ID NO: 111079 - DNA, 15 bp, Homo sapiens
agcctgcttttgata

SEQ ID NO: 111080 - DNA, 15 bp, Homo sapiens
cagcctgcttttgat

SEQ ID NO: 111081 - DNA, 15 bp, Homo sapiens
gcagcctgcttttga

SEQ ID NO: 111082 - DNA, 15 bp, Homo sapiens
tgcagcctgcttttg

SEQ ID NO: 111083 - DNA, 15 bp, Homo sapiens
ttgcagcctgctttt

SEQ ID NO: 111084 - DNA, 15 bp, Homo sapiens
tttgcagcctgcttt

SEQ ID NO: 111085 - DNA, 15 bp, Homo sapiens
atttgcagcctgctt

SEQ ID NO: 111086 - DNA, 15 bp, Homo sapiens
gatttgcagcctgct

SEQ ID NO: 111087 - DNA, 15 bp, Homo sapiens
agatttgcagcctgc

SEQ ID NO: 111088 - DNA, 15 bp, Homo sapiens
tagatttgcagcctg

SEQ ID NO: 111089 - DNA, 15 bp, Homo sapiens
atagatttgcagcct

SEQ ID NO: 111090 - DNA, 15 bp, Homo sapiens
tatagatttgcagcc

SEQ ID NO: 111091 - DNA, 15 bp, Homo sapiens
ctatagatttgcagc

SEQ ID NO: 111092 - DNA, 15 bp, Homo sapiens
tctatagatttgcag

SEQ ID NO: 111093 - DNA, 15 bp, Homo sapiens
ctctatagatttgca

SEQ ID NO: 111094 - DNA, 15 bp, Homo sapiens
tctctatagatttgc

SEQ ID NO: 111095 - DNA, 15 bp, Homo sapiens
gtctctatagatttg

SEQ ID NO: 111096 - DNA, 15 bp, Homo sapiens
tgtctctatagattt

SEQ ID NO: 111097 - DNA, 15 bp, Homo sapiens
ctgtctctatagatt

SEQ ID NO: 111098 - DNA, 15 bp, Homo sapiens
tctgtctctatagat

SEQ ID NO: 111099 - DNA, 15 bp, Homo sapiens
ttctgtctctataga

SEQ ID NO: 111100 - DNA, 15 bp, Homo sapiens
tttctgtctctatag

SEQ ID NO: 111101 - DNA, 15 bp, Homo sapiens
ctttctgtctctata

SEQ ID NO: 111102 - DNA, 15 bp, Homo sapiens
actttctgtctctat

SEQ ID NO: 111103 - DNA, 15 bp, Homo sapiens
tactttctgtctcta

SEQ ID NO: 111104 - DNA, 15 bp, Homo sapiens
ctactttctgtctct

SEQ ID NO: 111105 - DNA, 15 bp, Homo sapiens
tctactttctgtctc

SEQ ID NO: 111106 - DNA, 15 bp, Homo sapiens
atctactttctgtct

SEQ ID NO: 111107 - DNA, 15 bp, Homo sapiens
aatctactttctgtc

SEQ ID NO: 111108 - DNA, 15 bp, Homo sapiens
taatctactttctgt

SEQ ID NO: 111109 - DNA, 15 bp, Homo sapiens
ctaatctactttctg

SEQ ID NO: 111110 - DNA, 15 bp, Homo sapiens
actaatctactttct

SEQ ID NO: 111111 - DNA, 15 bp, Homo sapiens
cactaatctactttc

SEQ ID NO: 111112 - DNA, 15 bp, Homo sapiens
tcactaatctacttt

SEQ ID NO: 111113 - DNA, 15 bp, Homo sapiens
atcactaatctactt

SEQ ID NO: 111114 - DNA, 15 bp, Homo sapiens
aatcactaatctact

SEQ ID NO: 111115 - DNA, 15 bp, Homo sapiens
caatcactaatctac

SEQ ID NO: 111116 - DNA, 15 bp, Homo sapiens
gcaatcactaatcta

SEQ ID NO: 111117 - DNA, 15 bp, Homo sapiens
agcaatcactaatct

SEQ ID NO: 111118 - DNA, 15 bp, Homo sapiens
aagcaatcactaatc

SEQ ID NO: 111119 - DNA, 15 bp, Homo sapiens
caagcaatcactaat

SEQ ID NO: 111120 - DNA, 15 bp, Homo sapiens
acaagcaatcactaa

SEQ ID NO: 111121 - DNA, 15 bp, Homo sapiens
cacaagcaatcacta

SEQ ID NO: 111122 - DNA, 15 bp, Homo sapiens
gcacaagcaatcact

SEQ ID NO: 111123 - DNA, 15 bp, Homo sapiens
agcacaagcaatcac

SEQ ID NO: 111124 - DNA, 15 bp, Homo sapiens
cagcacaagcaatca

SEQ ID NO: 111125 - DNA, 15 bp, Homo sapiens
ccagcacaagcaatc

SEQ ID NO: 111126 - DNA, 15 bp, Homo sapiens
cccagcacaagcaat

SEQ ID NO: 111127 - DNA, 15 bp, Homo sapiens
ccccagcacaagcaa

SEQ ID NO: 111128 - DNA, 15 bp, Homo sapiens
gccccagcacaagca

SEQ ID NO: 111129 - DNA, 15 bp, Homo sapiens
agccccagcacaagc

SEQ ID NO: 111130 - DNA, 15 bp, Homo sapiens
cagccccagcacaag

SEQ ID NO: 111131 - DNA, 15 bp, Homo sapiens
ccagccccagcacaa

SEQ ID NO: 111132 - DNA, 15 bp, Homo sapiens
accagccccagcaca

SEQ ID NO: 111133 - DNA, 15 bp, Homo sapiens
caccagccccagcac

SEQ ID NO: 111134 - DNA, 15 bp, Homo sapiens
ccaccagccccagca

SEQ ID NO: 111135 - DNA, 15 bp, Homo sapiens
cccaccagccccagc

SEQ ID NO: 111136 - DNA, 15 bp, Homo sapiens
ccccaccagccccag

SEQ ID NO: 111137 - DNA, 15 bp, Homo sapiens
tccccaccagcccca

SEQ ID NO: 111138 - DNA, 15 bp, Homo sapiens
ctccccaccagcccc

SEQ ID NO: 111139 - DNA, 15 bp, Homo sapiens
tctccccaccagccc

SEQ ID NO: 111140 - DNA, 15 bp, Homo sapiens
ttctccccaccagcc

SEQ ID NO: 111141 - DNA, 15 bp, Homo sapiens
gttctccccaccagc

SEQ ID NO: 111142 - DNA, 15 bp, Homo sapiens
tgttctccccaccag

SEQ ID NO: 111143 - DNA, 15 bp, Homo sapiens
atgttctccccacca

SEQ ID NO: 111144 - DNA, 15 bp, Homo sapiens
tatgttctccccacc

SEQ ID NO: 111145 - DNA, 15 bp, Homo sapiens
ctatgttctccccac

SEQ ID NO: 111146 - DNA, 15 bp, Homo sapiens
gctatgttctcccca

SEQ ID NO: 111147 - DNA, 15 bp, Homo sapiens
agctatgttctcccc

SEQ ID NO: 111148 - DNA, 15 bp, Homo sapiens
tagctatgttctccc

SEQ ID NO: 111149 - DNA, 15 bp, Homo sapiens
ttagctatgttctcc

SEQ ID NO: 111150 - DNA, 15 bp, Homo sapiens
tttagctatgttctc

SEQ ID NO: 111151 - DNA, 15 bp, Homo sapiens
ctttagctatgttct

SEQ ID NO: 111152 - DNA, 15 bp, Homo sapiens
tctttagctatgttc

SEQ ID NO: 111153 - DNA, 15 bp, Homo sapiens
ctctttagctatgtt

SEQ ID NO: 111154 - DNA, 15 bp, Homo sapiens
actctttagctatgt

SEQ ID NO: 111155 - DNA, 15 bp, Homo sapiens
tactctttagctatg

SEQ ID NO: 111156 - DNA, 15 bp, Homo sapiens
gtactctttagctat

SEQ ID NO: 111157 - DNA, 15 bp, Homo sapiens
tgtactctttagcta

SEQ ID NO: 111158 - DNA, 15 bp, Homo sapiens
ctgtactctttagct

SEQ ID NO: 111159 - DNA, 15 bp, Homo sapiens
cctgtactctttagc

SEQ ID NO: 111160 - DNA, 15 bp, Homo sapiens
tcctgtactctttag

SEQ ID NO: 111161 - DNA, 15 bp, Homo sapiens
atcctgtactcttta

SEQ ID NO: 111162 - DNA, 15 bp, Homo sapiens
aatcctgtactcttt

SEQ ID NO: 111163 - DNA, 15 bp, Homo sapiens
aaatcctgtactctt

SEQ ID NO: 111164 - DNA, 15 bp, Homo sapiens
aaaatcctgtactct

SEQ ID NO: 111165 - DNA, 15 bp, Homo sapiens
aaaaatcctgtactc

SEQ ID NO: 111166 - DNA, 15 bp, Homo sapiens
caaaaatcctgtact

SEQ ID NO: 111167 - DNA, 15 bp, Homo sapiens
acaaaaatcctgtac

SEQ ID NO: 111168 - DNA, 15 bp, Homo sapiens
cacaaaaatcctgta

SEQ ID NO: 111169 - DNA, 15 bp, Homo sapiens
acacaaaaatcctgt

SEQ ID NO: 111170 - DNA, 15 bp, Homo sapiens
cacacaaaaatcctg

SEQ ID NO: 111171 - DNA, 15 bp, Homo sapiens
acacacaaaaatcct

SEQ ID NO: 111172 - DNA, 15 bp, Homo sapiens
cacacacaaaaatcc

SEQ ID NO: 111173 - DNA, 15 bp, Homo sapiens
acacacacaaaaatc

SEQ ID NO: 111174 - DNA, 15 bp, Homo sapiens
cacacacacaaaaat

SEQ ID NO: 111175 - DNA, 15 bp, Homo sapiens
ccacacacacaaaaa

SEQ ID NO: 111176 - DNA, 15 bp, Homo sapiens
gccacacacacaaaa

SEQ ID NO: 111177 - DNA, 15 bp, Homo sapiens
tgccacacacacaaa

SEQ ID NO: 111178 - DNA, 15 bp, Homo sapiens
ttgccacacacacaa

SEQ ID NO: 111179 - DNA, 15 bp, Homo sapiens
attgccacacacaca

SEQ ID NO: 111180 - DNA, 15 bp, Homo sapiens
cattgccacacacac

SEQ ID NO: 111181 - DNA, 15 bp, Homo sapiens
tcattgccacacaca

SEQ ID NO: 111182 - DNA, 15 bp, Homo sapiens
ttcattgccacacac

SEQ ID NO: 111183 - DNA, 15 bp, Homo sapiens
tttcattgccacaca

SEQ ID NO: 111184 - DNA, 15 bp, Homo sapiens
ttttcattgccacac

SEQ ID NO: 111185 - DNA, 15 bp, Homo sapiens
attttcattgccaca

SEQ ID NO: 111186 - DNA, 15 bp, Homo sapiens
cattttcattgccac

SEQ ID NO: 111187 - DNA, 15 bp, Homo sapiens
acattttcattgcca

SEQ ID NO: 111188 - DNA, 15 bp, Homo sapiens
aacattttcattgcc

SEQ ID NO: 111189 - DNA, 15 bp, Homo sapiens
caacattttcattgc

SEQ ID NO: 111190 - DNA, 15 bp, Homo sapiens
acaacattttcattg

SEQ ID NO: 111191 - DNA, 15 bp, Homo sapiens
tacaacattttcatt

SEQ ID NO: 111192 - DNA, 15 bp, Homo sapiens
ttacaacattttcat

SEQ ID NO: 111193 - DNA, 15 bp, Homo sapiens
tttacaacattttca

SEQ ID NO: 111194 - DNA, 15 bp, Homo sapiens
ttttacaacattttc

SEQ ID NO: 111195 - DNA, 15 bp, Homo sapiens
attttacaacatttt

SEQ ID NO: 111196 - DNA, 15 bp, Homo sapiens
aattttacaacattt

SEQ ID NO: 111197 - DNA, 15 bp, Homo sapiens
caattttacaacatt

SEQ ID NO: 111198 - DNA, 15 bp, Homo sapiens
tcaattttacaacat

SEQ ID NO: 111199 - DNA, 15 bp, Homo sapiens
gtcaattttacaaca

SEQ ID NO: 111200 - DNA, 15 bp, Homo sapiens
agtcaattttacaac

SEQ ID NO: 111201 - DNA, 15 bp, Homo sapiens
cagtcaattttacaa

SEQ ID NO: 111202 - DNA, 15 bp, Homo sapiens
ccagtcaattttaca

SEQ ID NO: 111203 - DNA, 15 bp, Homo sapiens
accagtcaattttac

SEQ ID NO: 111204 - DNA, 15 bp, Homo sapiens
taccagtcaatttta

SEQ ID NO: 111205 - DNA, 15 bp, Homo sapiens
ttaccagtcaatttt

SEQ ID NO: 111206 - DNA, 15 bp, Homo sapiens
attaccagtcaattt

SEQ ID NO: 111207 - DNA, 15 bp, Homo sapiens
aattaccagtcaatt

SEQ ID NO: 111208 - DNA, 15 bp, Homo sapiens
taattaccagtcaat

SEQ ID NO: 111209 - DNA, 15 bp, Homo sapiens
ataattaccagtcaa

SEQ ID NO: 111210 - DNA, 15 bp, Homo sapiens
aataattaccagtca

SEQ ID NO: 111211 - DNA, 15 bp, Homo sapiens
caataattaccagtc

SEQ ID NO: 111212 - DNA, 15 bp, Homo sapiens
gcaataattaccagt

SEQ ID NO: 111213 - DNA, 15 bp, Homo sapiens
tgcaataattaccag

SEQ ID NO: 111214 - DNA, 15 bp, Homo sapiens
gtgcaataattacca

SEQ ID NO: 111215 - DNA, 15 bp, Homo sapiens
tgtgcaataattacc

SEQ ID NO: 111216 - DNA, 15 bp, Homo sapiens
atgtgcaataattac

SEQ ID NO: 111217 - DNA, 15 bp, Homo sapiens
tatgtgcaataatta

SEQ ID NO: 111218 - DNA, 15 bp, Homo sapiens
ttatgtgcaataatt

SEQ ID NO: 111219 - DNA, 15 bp, Homo sapiens
gttatgtgcaataat

SEQ ID NO: 111220 - DNA, 15 bp, Homo sapiens
agttatgtgcaataa

SEQ ID NO: 111221 - DNA, 15 bp, Homo sapiens
cagttatgtgcaata

SEQ ID NO: 111222 - DNA, 15 bp, Homo sapiens
acagttatgtgcaat

SEQ ID NO: 111223 - DNA, 15 bp, Homo sapiens
tacagttatgtgcaa

SEQ ID NO: 111224 - DNA, 15 bp, Homo sapiens
ttacagttatgtgca

SEQ ID NO: 111225 - DNA, 15 bp, Homo sapiens
tttacagttatgtgc

SEQ ID NO: 111226 - DNA, 15 bp, Homo sapiens
gtttacagttatgtg

SEQ ID NO: 111227 - DNA, 15 bp, Homo sapiens
ggtttacagttatgt

SEQ ID NO: 111228 - DNA, 15 bp, Homo sapiens
aggtttacagttatg

SEQ ID NO: 111229 - DNA, 15 bp, Homo sapiens
aaggtttacagttat

SEQ ID NO: 111230 - DNA, 15 bp, Homo sapiens
gaaggtttacagtta

SEQ ID NO: 111231 - DNA, 15 bp, Homo sapiens
agaaggtttacagtt

SEQ ID NO: 111232 - DNA, 15 bp, Homo sapiens
tagaaggtttacagt

SEQ ID NO: 111233 - DNA, 15 bp, Homo sapiens
atagaaggtttacag

SEQ ID NO: 111234 - DNA, 15 bp, Homo sapiens
tatagaaggtttaca

SEQ ID NO: 111235 - DNA, 15 bp, Homo sapiens
ttatagaaggtttac

SEQ ID NO: 111236 - DNA, 15 bp, Homo sapiens
tttatagaaggttta

SEQ ID NO: 111237 - DNA, 15 bp, Homo sapiens
gtttatagaaggttt

SEQ ID NO: 111238 - DNA, 15 bp, Homo sapiens
ggtttatagaaggtt

SEQ ID NO: 111239 - DNA, 15 bp, Homo sapiens
tggtttatagaaggt

SEQ ID NO: 111240 - DNA, 15 bp, Homo sapiens
atggtttatagaagg

SEQ ID NO: 111241 - DNA, 15 bp, Homo sapiens
aatggtttatagaag

SEQ ID NO: 111242 - DNA, 15 bp, Homo sapiens
caatggtttatagaa

SEQ ID NO: 111243 - DNA, 15 bp, Homo sapiens
tcaatggtttataga

SEQ ID NO: 111244 - DNA, 15 bp, Homo sapiens
ttcaatggtttatag

SEQ ID NO: 111245 - DNA, 15 bp, Homo sapiens
attcaatggtttata

SEQ ID NO: 111246 - DNA, 15 bp, Homo sapiens
aattcaatggtttat

SEQ ID NO: 111247 - DNA, 15 bp, Homo sapiens
caattcaatggttta

SEQ ID NO: 111248 - DNA, 15 bp, Homo sapiens
acaattcaatggttt

SEQ ID NO: 111249 - DNA, 15 bp, Homo sapiens
tacaattcaatggtt

SEQ ID NO: 111250 - DNA, 15 bp, Homo sapiens
gtacaattcaatggt

SEQ ID NO: 111251 - DNA, 15 bp, Homo sapiens
tgtacaattcaatgg

SEQ ID NO: 111252 - DNA, 15 bp, Homo sapiens
atgtacaattcaatg

SEQ ID NO: 111253 - DNA, 15 bp, Homo sapiens
aatgtacaattcaat

SEQ ID NO: 111254 - DNA, 15 bp, Homo sapiens
aaatgtacaattcaa

SEQ ID NO: 111255 - DNA, 15 bp, Homo sapiens
taaatgtacaattca

SEQ ID NO: 111256 - DNA, 15 bp, Homo sapiens
ttaaatgtacaattc

SEQ ID NO: 111257 - DNA, 15 bp, Homo sapiens
tttaaatgtacaatt

SEQ ID NO: 111258 - DNA, 15 bp, Homo sapiens
atttaaatgtacaat

SEQ ID NO: 111259 - DNA, 15 bp, Homo sapiens
aatttaaatgtacaa

SEQ ID NO: 111260 - DNA, 15 bp, Homo sapiens
caatttaaatgtaca

SEQ ID NO: 111261 - DNA, 15 bp, Homo sapiens
tcaatttaaatgtac

SEQ ID NO: 111262 - DNA, 15 bp, Homo sapiens
atcaatttaaatgta

SEQ ID NO: 111263 - DNA, 15 bp, Homo sapiens
catcaatttaaatgt

SEQ ID NO: 111264 - DNA, 15 bp, Homo sapiens
tcatcaatttaaatg

SEQ ID NO: 111265 - DNA, 15 bp, Homo sapiens
ttcatcaatttaaat

SEQ ID NO: 111266 - DNA, 15 bp, Homo sapiens
attcatcaatttaaa

SEQ ID NO: 111267 - DNA, 15 bp, Homo sapiens
aattcatcaatttaa

SEQ ID NO: 111268 - DNA, 15 bp, Homo sapiens
taattcatcaattta

SEQ ID NO: 111269 - DNA, 15 bp, Homo sapiens
ataattcatcaattt

SEQ ID NO: 111270 - DNA, 15 bp, Homo sapiens
tataattcatcaatt

SEQ ID NO: 111271 - DNA, 15 bp, Homo sapiens
ttataattcatcaat

SEQ ID NO: 111272 - DNA, 15 bp, Homo sapiens
attataattcatcaa

SEQ ID NO: 111273 - DNA, 15 bp, Homo sapiens
cattataattcatca

SEQ ID NO: 111274 - DNA, 15 bp, Homo sapiens
tcattataattcatc

SEQ ID NO: 111275 - DNA, 15 bp, Homo sapiens
atcattataattcat

SEQ ID NO: 111276 - DNA, 15 bp, Homo sapiens
tatcattataattca

SEQ ID NO: 111277 - DNA, 15 bp, Homo sapiens
atatcattataattc

SEQ ID NO: 111278 - DNA, 15 bp, Homo sapiens
catatcattataatt

SEQ ID NO: 111279 - DNA, 15 bp, Homo sapiens
acatatcattataat

SEQ ID NO: 111280 - DNA, 15 bp, Homo sapiens
cacatatcattataa

SEQ ID NO: 111281 - DNA, 15 bp, Homo sapiens
ccacatatcattata

SEQ ID NO: 111282 - DNA, 15 bp, Homo sapiens
tccacatatcattat

SEQ ID NO: 111283 - DNA, 15 bp, Homo sapiens
atccacatatcatta

SEQ ID NO: 111284 - DNA, 15 bp, Homo sapiens
aatccacatatcatt

SEQ ID NO: 111285 - DNA, 15 bp, Homo sapiens
taatccacatatcat

SEQ ID NO: 111286 - DNA, 15 bp, Homo sapiens
ataatccacatatca

SEQ ID NO: 111287 - DNA, 15 bp, Homo sapiens
cataatccacatatc

SEQ ID NO: 111288 - DNA, 15 bp, Homo sapiens
acataatccacatat

SEQ ID NO: 111289 - DNA, 15 bp, Homo sapiens
gacataatccacata

SEQ ID NO: 111290 - DNA, 15 bp, Homo sapiens
agacataatccacat

SEQ ID NO: 111291 - DNA, 15 bp, Homo sapiens
cagacataatccaca

SEQ ID NO: 111292 - DNA, 15 bp, Homo sapiens
gcagacataatccac

SEQ ID NO: 111293 - DNA, 15 bp, Homo sapiens
agcagacataatcca

SEQ ID NO: 111294 - DNA, 15 bp, Homo sapiens
tagcagacataatcc

SEQ ID NO: 111295 - DNA, 15 bp, Homo sapiens
ttagcagacataatc

SEQ ID NO: 111296 - DNA, 15 bp, Homo sapiens
tttagcagacataat

SEQ ID NO: 111297 - DNA, 15 bp, Homo sapiens
ttttagcagacataa

SEQ ID NO: 111298 - DNA, 15 bp, Homo sapiens
attttagcagacata

SEQ ID NO: 111299 - DNA, 15 bp, Homo sapiens
cattttagcagacat

SEQ ID NO: 111300 - DNA, 15 bp, Homo sapiens
acattttagcagaca

SEQ ID NO: 111301 - DNA, 15 bp, Homo sapiens
tacattttagcagac

SEQ ID NO: 111302 - DNA, 15 bp, Homo sapiens
ctacattttagcaga

SEQ ID NO: 111303 - DNA, 15 bp, Homo sapiens
actacattttagcag

SEQ ID NO: 111304 - DNA, 15 bp, Homo sapiens
tactacattttagca

SEQ ID NO: 111305 - DNA, 15 bp, Homo sapiens
atactacattttagc

SEQ ID NO: 111306 - DNA, 15 bp, Homo sapiens
catactacattttag

SEQ ID NO: 111307 - DNA, 15 bp, Homo sapiens
acatactacatttta

SEQ ID NO: 111308 - DNA, 15 bp, Homo sapiens
cacatactacatttt

SEQ ID NO: 111309 - DNA, 15 bp, Homo sapiens
tcacatactacattt

SEQ ID NO: 111310 - DNA, 15 bp, Homo sapiens
gtcacatactacatt

SEQ ID NO: 111311 - DNA, 15 bp, Homo sapiens
ggtcacatactacat

SEQ ID NO: 111312 - DNA, 15 bp, Homo sapiens
gggtcacatactaca

SEQ ID NO: 111313 - DNA, 15 bp, Homo sapiens
tgggtcacatactac

SEQ ID NO: 111314 - DNA, 15 bp, Homo sapiens
ctgggtcacatacta

SEQ ID NO: 111315 - DNA, 15 bp, Homo sapiens
cctgggtcacatact

SEQ ID NO: 111316 - DNA, 15 bp, Homo sapiens
gcctgggtcacatac

SEQ ID NO: 111317 - DNA, 15 bp, Homo sapiens
tgcctgggtcacata

SEQ ID NO: 111318 - DNA, 15 bp, Homo sapiens
atgcctgggtcacat

SEQ ID NO: 111319 - DNA, 15 bp, Homo sapiens
tatgcctgggtcaca

SEQ ID NO: 111320 - DNA, 15 bp, Homo sapiens
gtatgcctgggtcac

SEQ ID NO: 111321 - DNA, 15 bp, Homo sapiens
agtatgcctgggtca

SEQ ID NO: 111322 - DNA, 15 bp, Homo sapiens
cagtatgcctgggtc

SEQ ID NO: 111323 - DNA, 15 bp, Homo sapiens
tcagtatgcctgggt

SEQ ID NO: 111324 - DNA, 15 bp, Homo sapiens
ctcagtatgcctggg

SEQ ID NO: 111325 - DNA, 15 bp, Homo sapiens
gctcagtatgcctgg

SEQ ID NO: 111326 - DNA, 15 bp, Homo sapiens
tgctcagtatgcctg

SEQ ID NO: 111327 - DNA, 15 bp, Homo sapiens
ttgctcagtatgcct

SEQ ID NO: 111328 - DNA, 15 bp, Homo sapiens
attgctcagtatgcc

SEQ ID NO: 111329 - DNA, 15 bp, Homo sapiens
tattgctcagtatgc

SEQ ID NO: 111330 - DNA, 15 bp, Homo sapiens
ttattgctcagtatg

SEQ ID NO: 111331 - DNA, 15 bp, Homo sapiens
tttattgctcagtat

SEQ ID NO: 111332 - DNA, 15 bp, Homo sapiens
atttattgctcagta

SEQ ID NO: 111333 - DNA, 15 bp, Homo sapiens
tatttattgctcagt

SEQ ID NO: 111334 - DNA, 15 bp, Homo sapiens
gtatttattgctcag

SEQ ID NO: 111335 - DNA, 15 bp, Homo sapiens
tgtatttattgctca

SEQ ID NO: 111336 - DNA, 15 bp, Homo sapiens
gtgtatttattgctc

SEQ ID NO: 111337 - DNA, 15 bp, Homo sapiens
tgtgtatttattgct

SEQ ID NO: 111338 - DNA, 15 bp, Homo sapiens
gtgtgtatttattgc

SEQ ID NO: 111339 - DNA, 15 bp, Homo sapiens
tgtgtgtatttattg

SEQ ID NO: 111340 - DNA, 15 bp, Homo sapiens
atgtgtgtatttatt

SEQ ID NO: 111341 - DNA, 15 bp, Homo sapiens
gatgtgtgtatttat

SEQ ID NO: 111342 - DNA, 15 bp, Homo sapiens
agatgtgtgtattta

SEQ ID NO: 111343 - DNA, 15 bp, Homo sapiens
aagatgtgtgtattt

SEQ ID NO: 111344 - DNA, 15 bp, Homo sapiens
caagatgtgtgtatt

SEQ ID NO: 111345 - DNA, 15 bp, Homo sapiens
gcaagatgtgtgtat

SEQ ID NO: 111346 - DNA, 15 bp, Homo sapiens
agcaagatgtgtgta

SEQ ID NO: 111347 - DNA, 15 bp, Homo sapiens
aagcaagatgtgtgt

SEQ ID NO: 111348 - DNA, 15 bp, Homo sapiens
gaagcaagatgtgtg

SEQ ID NO: 111349 - DNA, 15 bp, Homo sapiens
agaagcaagatgtgt

SEQ ID NO: 111350 - DNA, 15 bp, Homo sapiens
tagaagcaagatgtg

SEQ ID NO: 111351 - DNA, 15 bp, Homo sapiens
ttagaagcaagatgt

SEQ ID NO: 111352 - DNA, 15 bp, Homo sapiens
tttagaagcaagatg

SEQ ID NO: 111353 - DNA, 15 bp, Homo sapiens
ctttagaagcaagat

SEQ ID NO: 111354 - DNA, 15 bp, Homo sapiens
actttagaagcaaga

SEQ ID NO: 111355 - DNA, 15 bp, Homo sapiens
aactttagaagcaag

SEQ ID NO: 111356 - DNA, 15 bp, Homo sapiens
aaactttagaagcaa

SEQ ID NO: 111357 - DNA, 15 bp, Homo sapiens
taaactttagaagca

SEQ ID NO: 111358 - DNA, 15 bp, Homo sapiens
ttaaactttagaagc

SEQ ID NO: 111359 - DNA, 15 bp, Homo sapiens
tttaaactttagaag

SEQ ID NO: 111360 - DNA, 15 bp, Homo sapiens
ttttaaactttagaa

SEQ ID NO: 111361 - DNA, 15 bp, Homo sapiens
gttttaaactttaga

SEQ ID NO: 111362 - DNA, 15 bp, Homo sapiens
ggttttaaactttag

SEQ ID NO: 111363 - DNA, 15 bp, Homo sapiens
tggttttaaacttta

SEQ ID NO: 111364 - DNA, 15 bp, Homo sapiens
ctggttttaaacttt

SEQ ID NO: 111365 - DNA, 15 bp, Homo sapiens
cctggttttaaactt

SEQ ID NO: 111366 - DNA, 15 bp, Homo sapiens
gcctggttttaaact

SEQ ID NO: 111367 - DNA, 15 bp, Homo sapiens
ggcctggttttaaac

SEQ ID NO: 111368 - DNA, 15 bp, Homo sapiens
aggcctggttttaaa

SEQ ID NO: 111369 - DNA, 15 bp, Homo sapiens
caggcctggttttaa

SEQ ID NO: 111370 - DNA, 15 bp, Homo sapiens
acaggcctggtttta

SEQ ID NO: 111371 - DNA, 15 bp, Homo sapiens
cacaggcctggtttt

SEQ ID NO: 111372 - DNA, 15 bp, Homo sapiens
acacaggcctggttt

SEQ ID NO: 111373 - DNA, 15 bp, Homo sapiens
aacacaggcctggtt

SEQ ID NO: 111374 - DNA, 15 bp, Homo sapiens
aaacacaggcctggt

SEQ ID NO: 111375 - DNA, 15 bp, Homo sapiens
gaaacacaggcctgg

SEQ ID NO: 111376 - DNA, 15 bp, Homo sapiens
tgaaacacaggcctg

SEQ ID NO: 111377 - DNA, 15 bp, Homo sapiens
ctgaaacacaggcct

SEQ ID NO: 111378 - DNA, 15 bp, Homo sapiens
actgaaacacaggcc

SEQ ID NO: 111379 - DNA, 15 bp, Homo sapiens
cactgaaacacaggc

SEQ ID NO: 111380 - DNA, 15 bp, Homo sapiens
acactgaaacacagg

SEQ ID NO: 111381 - DNA, 15 bp, Homo sapiens
gacactgaaacacag

SEQ ID NO: 111382 - DNA, 15 bp, Homo sapiens
agacactgaaacaca

SEQ ID NO: 111383 - DNA, 15 bp, Homo sapiens
tagacactgaaacac

SEQ ID NO: 111384 - DNA, 15 bp, Homo sapiens
ctagacactgaaaca

SEQ ID NO: 111385 - DNA, 15 bp, Homo sapiens
tctagacactgaaac

SEQ ID NO: 111386 - DNA, 15 bp, Homo sapiens
ttctagacactgaaa

SEQ ID NO: 111387 - DNA, 15 bp, Homo sapiens
tttctagacactgaa

SEQ ID NO: 111388 - DNA, 15 bp, Homo sapiens
ttttctagacactga

SEQ ID NO: 111389 - DNA, 15 bp, Homo sapiens
attttctagacactg

SEQ ID NO: 111390 - DNA, 15 bp, Homo sapiens
tattttctagacact

SEQ ID NO: 111391 - DNA, 15 bp, Homo sapiens
atattttctagacac

SEQ ID NO: 111392 - DNA, 15 bp, Homo sapiens
tatattttctagaca

SEQ ID NO: 111393 - DNA, 15 bp, Homo sapiens
atatattttctagac

SEQ ID NO: 111394 - DNA, 15 bp, Homo sapiens
aatatattttctaga

SEQ ID NO: 111395 - DNA, 15 bp, Homo sapiens
aaatatattttctag

SEQ ID NO: 111396 - DNA, 15 bp, Homo sapiens
gaaatatattttcta

SEQ ID NO: 111397 - DNA, 15 bp, Homo sapiens
tgaaatatattttct

SEQ ID NO: 111398 - DNA, 15 bp, Homo sapiens
atgaaatatattttc

SEQ ID NO: 111399 - DNA, 15 bp, Homo sapiens
tatgaaatatatttt

SEQ ID NO: 111400 - DNA, 15 bp, Homo sapiens
ttatgaaatatattt

SEQ ID NO: 111401 - DNA, 15 bp, Homo sapiens
attatgaaatatatt

SEQ ID NO: 111402 - DNA, 15 bp, Homo sapiens
aattatgaaatatat

SEQ ID NO: 111403 - DNA, 15 bp, Homo sapiens
caattatgaaatata

SEQ ID NO: 111404 - DNA, 15 bp, Homo sapiens
tcaattatgaaatat

SEQ ID NO: 111405 - DNA, 15 bp, Homo sapiens
ttcaattatgaaata

SEQ ID NO: 111406 - DNA, 15 bp, Homo sapiens
gttcaattatgaaat

SEQ ID NO: 111407 - DNA, 15 bp, Homo sapiens
agttcaattatgaaa

SEQ ID NO: 111408 - DNA, 15 bp, Homo sapiens
aagttcaattatgaa

SEQ ID NO: 111409 - DNA, 15 bp, Homo sapiens
taagttcaattatga

SEQ ID NO: 111410 - DNA, 15 bp, Homo sapiens
ctaagttcaattatg

SEQ ID NO: 111411 - DNA, 15 bp, Homo sapiens
gctaagttcaattat

SEQ ID NO: 111412 - DNA, 15 bp, Homo sapiens
tgctaagttcaatta

SEQ ID NO: 111413 - DNA, 15 bp, Homo sapiens
ctgctaagttcaatt

SEQ ID NO: 111414 - DNA, 15 bp, Homo sapiens
tctgctaagttcaat

SEQ ID NO: 111415 - DNA, 15 bp, Homo sapiens
atctgctaagttcaa

SEQ ID NO: 111416 - DNA, 15 bp, Homo sapiens
aatctgctaagttca

SEQ ID NO: 111417 - DNA, 15 bp, Homo sapiens
gaatctgctaagttc

SEQ ID NO: 111418 - DNA, 15 bp, Homo sapiens
agaatctgctaagtt

SEQ ID NO: 111419 - DNA, 15 bp, Homo sapiens
aagaatctgctaagt

SEQ ID NO: 111420 - DNA, 15 bp, Homo sapiens
aaagaatctgctaag

SEQ ID NO: 111421 - DNA, 15 bp, Homo sapiens
aaaagaatctgctaa

SEQ ID NO: 111422 - DNA, 15 bp, Homo sapiens
caaaagaatctgcta

SEQ ID NO: 111423 - DNA, 15 bp, Homo sapiens
ccaaaagaatctgct

SEQ ID NO: 111424 - DNA, 15 bp, Homo sapiens
gccaaaagaatctgc

SEQ ID NO: 111425 - DNA, 15 bp, Homo sapiens
agccaaaagaatctg

SEQ ID NO: 111426 - DNA, 15 bp, Homo sapiens
tagccaaaagaatct

SEQ ID NO: 111427 - DNA, 15 bp, Homo sapiens
ctagccaaaagaatc

SEQ ID NO: 111428 - DNA, 15 bp, Homo sapiens
gctagccaaaagaat

SEQ ID NO: 111429 - DNA, 15 bp, Homo sapiens
tgctagccaaaagaa

SEQ ID NO: 111430 - DNA, 15 bp, Homo sapiens
ttgctagccaaaaga

SEQ ID NO: 111431 - DNA, 15 bp, Homo sapiens
gttgctagccaaaag

SEQ ID NO: 111432 - DNA, 15 bp, Homo sapiens
tgttgctagccaaaa

SEQ ID NO: 111433 - DNA, 15 bp, Homo sapiens
ctgttgctagccaaa

SEQ ID NO: 111434 - DNA, 15 bp, Homo sapiens
cctgttgctagccaa

SEQ ID NO: 111435 - DNA, 15 bp, Homo sapiens
tcctgttgctagcca

SEQ ID NO: 111436 - DNA, 15 bp, Homo sapiens
gtcctgttgctagcc

SEQ ID NO: 111437 - DNA, 15 bp, Homo sapiens
tgtcctgttgctagc

SEQ ID NO: 111438 - DNA, 15 bp, Homo sapiens
ttgtcctgttgctag

SEQ ID NO: 111439 - DNA, 15 bp, Homo sapiens
tttgtcctgttgcta

SEQ ID NO: 111440 - DNA, 15 bp, Homo sapiens
ctttgtcctgttgct

SEQ ID NO: 111441 - DNA, 15 bp, Homo sapiens
actttgtcctgttgc

SEQ ID NO: 111442 - DNA, 15 bp, Homo sapiens
tactttgtcctgttg

SEQ ID NO: 111443 - DNA, 15 bp, Homo sapiens
ctactttgtcctgtt

SEQ ID NO: 111444 - DNA, 15 bp, Homo sapiens
actactttgtcctgt

SEQ ID NO: 111445 - DNA, 15 bp, Homo sapiens
tactactttgtcctg

SEQ ID NO: 111446 - DNA, 15 bp, Homo sapiens
atactactttgtcct

SEQ ID NO: 111447 - DNA, 15 bp, Homo sapiens
gatactactttgtcc

SEQ ID NO: 111448 - DNA, 15 bp, Homo sapiens
ggatactactttgtc

SEQ ID NO: 111449 - DNA, 15 bp, Homo sapiens
aggatactactttgt

SEQ ID NO: 111450 - DNA, 15 bp, Homo sapiens
aaggatactactttg

SEQ ID NO: 111451 - DNA, 15 bp, Homo sapiens
taaggatactacttt

SEQ ID NO: 111452 - DNA, 15 bp, Homo sapiens
ctaaggatactactt

SEQ ID NO: 111453 - DNA, 15 bp, Homo sapiens
tctaaggatactact

SEQ ID NO: 111454 - DNA, 15 bp, Homo sapiens
atctaaggatactac

SEQ ID NO: 111455 - DNA, 15 bp, Homo sapiens
catctaaggatacta

SEQ ID NO: 111456 - DNA, 15 bp, Homo sapiens
gcatctaaggatact

SEQ ID NO: 111457 - DNA, 15 bp, Homo sapiens
ggcatctaaggatac

SEQ ID NO: 111458 - DNA, 15 bp, Homo sapiens
aggcatctaaggata

SEQ ID NO: 111459 - DNA, 15 bp, Homo sapiens
caggcatctaaggat

SEQ ID NO: 111460 - DNA, 15 bp, Homo sapiens
tcaggcatctaagga

SEQ ID NO: 111461 - DNA, 15 bp, Homo sapiens
ttcaggcatctaagg

SEQ ID NO: 111462 - DNA, 15 bp, Homo sapiens
tttcaggcatctaag

SEQ ID NO: 111463 - DNA, 15 bp, Homo sapiens
gtttcaggcatctaa

SEQ ID NO: 111464 - DNA, 15 bp, Homo sapiens
tgtttcaggcatcta

SEQ ID NO: 111465 - DNA, 15 bp, Homo sapiens
gtgtttcaggcatct

SEQ ID NO: 111466 - DNA, 15 bp, Homo sapiens
cgtgtttcaggcatc

SEQ ID NO: 111467 - DNA, 15 bp, Homo sapiens
acgtgtttcaggcat

SEQ ID NO: 111468 - DNA, 15 bp, Homo sapiens
cacgtgtttcaggca

SEQ ID NO: 111469 - DNA, 15 bp, Homo sapiens
acacgtgtttcaggc

SEQ ID NO: 111470 - DNA, 15 bp, Homo sapiens
tacacgtgtttcagg

SEQ ID NO: 111471 - DNA, 15 bp, Homo sapiens
ctacacgtgtttcag

SEQ ID NO: 111472 - DNA, 15 bp, Homo sapiens
cctacacgtgtttca

SEQ ID NO: 111473 - DNA, 15 bp, Homo sapiens
ccctacacgtgtttc

SEQ ID NO: 111474 - DNA, 15 bp, Homo sapiens
cccctacacgtgttt

SEQ ID NO: 111475 - DNA, 15 bp, Homo sapiens
ccccctacacgtgtt

SEQ ID NO: 111476 - DNA, 15 bp, Homo sapiens
tccccctacacgtgt

SEQ ID NO: 111477 - DNA, 15 bp, Homo sapiens
gtccccctacacgtg

SEQ ID NO: 111478 - DNA, 15 bp, Homo sapiens
tgtccccctacacgt

SEQ ID NO: 111479 - DNA, 15 bp, Homo sapiens
ctgtccccctacacg

SEQ ID NO: 111480 - DNA, 15 bp, Homo sapiens
tctgtccccctacac

SEQ ID NO: 111481 - DNA, 15 bp, Homo sapiens
ctctgtccccctaca

SEQ ID NO: 111482 - DNA, 15 bp, Homo sapiens
tctctgtccccctac

SEQ ID NO: 111483 - DNA, 15 bp, Homo sapiens
atctctgtcccccta

SEQ ID NO: 111484 - DNA, 15 bp, Homo sapiens
tatctctgtccccct

SEQ ID NO: 111485 - DNA, 15 bp, Homo sapiens
ttatctctgtccccc

SEQ ID NO: 111486 - DNA, 15 bp, Homo sapiens
tttatctctgtcccc

SEQ ID NO: 111487 - DNA, 15 bp, Homo sapiens
ttttatctctgtccc

SEQ ID NO: 111488 - DNA, 15 bp, Homo sapiens
cttttatctctgtcc

SEQ ID NO: 111489 - DNA, 15 bp, Homo sapiens
ccttttatctctgtc

SEQ ID NO: 111490 - DNA, 15 bp, Homo sapiens
tccttttatctctgt

SEQ ID NO: 111491 - DNA, 15 bp, Homo sapiens
atccttttatctctg

SEQ ID NO: 111492 - DNA, 15 bp, Homo sapiens
aatccttttatctct

SEQ ID NO: 111493 - DNA, 15 bp, Homo sapiens
taatccttttatctc

SEQ ID NO: 111494 - DNA, 15 bp, Homo sapiens
ttaatccttttatct

SEQ ID NO: 111495 - DNA, 15 bp, Homo sapiens
tttaatccttttatc

SEQ ID NO: 111496 - DNA, 15 bp, Homo sapiens
ttttaatccttttat

SEQ ID NO: 111497 - DNA, 15 bp, Homo sapiens
cttttaatcctttta

SEQ ID NO: 111498 - DNA, 15 bp, Homo sapiens
gcttttaatcctttt

SEQ ID NO: 111499 - DNA, 15 bp, Homo sapiens
tgcttttaatccttt

SEQ ID NO: 111500 - DNA, 15 bp, Homo sapiens
atgcttttaatcctt

SEQ ID NO: 111501 - DNA, 15 bp, Homo sapiens
gatgcttttaatcct

SEQ ID NO: 111502 - DNA, 15 bp, Homo sapiens
agatgcttttaatcc

SEQ ID NO: 111503 - DNA, 15 bp, Homo sapiens
tagatgcttttaatc

SEQ ID NO: 111504 - DNA, 15 bp, Homo sapiens
ttagatgcttttaat

SEQ ID NO: 111505 - DNA, 15 bp, Homo sapiens
gttagatgcttttaa

SEQ ID NO: 111506 - DNA, 15 bp, Homo sapiens
ggttagatgctttta

SEQ ID NO: 111507 - DNA, 15 bp, Homo sapiens
gggttagatgctttt

SEQ ID NO: 111508 - DNA, 15 bp, Homo sapiens
agggttagatgcttt

SEQ ID NO: 111509 - DNA, 15 bp, Homo sapiens
tagggttagatgctt

SEQ ID NO: 111510 - DNA, 15 bp, Homo sapiens
atagggttagatgct

SEQ ID NO: 111511 - DNA, 15 bp, Homo sapiens
aatagggttagatgc

SEQ ID NO: 111512 - DNA, 15 bp, Homo sapiens
aaatagggttagatg

SEQ ID NO: 111513 - DNA, 15 bp, Homo sapiens
gaaatagggttagat

SEQ ID NO: 111514 - DNA, 15 bp, Homo sapiens
agaaatagggttaga

SEQ ID NO: 111515 - DNA, 15 bp, Homo sapiens
cagaaatagggttag

SEQ ID NO: 111516 - DNA, 15 bp, Homo sapiens
ccagaaatagggtta

SEQ ID NO: 111517 - DNA, 15 bp, Homo sapiens
gccagaaatagggtt

SEQ ID NO: 111518 - DNA, 15 bp, Homo sapiens
agccagaaatagggt

SEQ ID NO: 111519 - DNA, 15 bp, Homo sapiens
gagccagaaataggg

SEQ ID NO: 111520 - DNA, 15 bp, Homo sapiens
agagccagaaatagg

SEQ ID NO: 111521 - DNA, 15 bp, Homo sapiens
cagagccagaaatag

SEQ ID NO: 111522 - DNA, 15 bp, Homo sapiens
ccagagccagaaata

SEQ ID NO: 111523 - DNA, 15 bp, Homo sapiens
tccagagccagaaat

SEQ ID NO: 111524 - DNA, 15 bp, Homo sapiens
gtccagagccagaaa

SEQ ID NO: 111525 - DNA, 15 bp, Homo sapiens
agtccagagccagaa

SEQ ID NO: 111526 - DNA, 15 bp, Homo sapiens
tagtccagagccaga

SEQ ID NO: 111527 - DNA, 15 bp, Homo sapiens
ttagtccagagccag

SEQ ID NO: 111528 - DNA, 15 bp, Homo sapiens
attagtccagagcca

SEQ ID NO: 111529 - DNA, 15 bp, Homo sapiens
tattagtccagagcc

SEQ ID NO: 111530 - DNA, 15 bp, Homo sapiens
ttattagtccagagc

SEQ ID NO: 111531 - DNA, 15 bp, Homo sapiens
attattagtccagag

SEQ ID NO: 111532 - DNA, 15 bp, Homo sapiens
gattattagtccaga

SEQ ID NO: 111533 - DNA, 15 bp, Homo sapiens
cgattattagtccag

SEQ ID NO: 111534 - DNA, 15 bp, Homo sapiens
gcgattattagtcca

SEQ ID NO: 111535 - DNA, 15 bp, Homo sapiens
tgcgattattagtcc

SEQ ID NO: 111536 - DNA, 15 bp, Homo sapiens
ctgcgattattagtc

SEQ ID NO: 111537 - DNA, 15 bp, Homo sapiens
tctgcgattattagt

SEQ ID NO: 111538 - DNA, 15 bp, Homo sapiens
gtctgcgattattag

SEQ ID NO: 111539 - DNA, 15 bp, Homo sapiens
ggtctgcgattatta

SEQ ID NO: 111540 - DNA, 15 bp, Homo sapiens
tggtctgcgattatt

SEQ ID NO: 111541 - DNA, 15 bp, Homo sapiens
ttggtctgcgattat

SEQ ID NO: 111542 - DNA, 15 bp, Homo sapiens
tttggtctgcgatta

SEQ ID NO: 111543 - DNA, 15 bp, Homo sapiens
ttttggtctgcgatt

SEQ ID NO: 111544 - DNA, 15 bp, Homo sapiens
attttggtctgcgat

SEQ ID NO: 111545 - DNA, 15 bp, Homo sapiens
tattttggtctgcga

SEQ ID NO: 111546 - DNA, 15 bp, Homo sapiens
gtattttggtctgcg

SEQ ID NO: 111547 - DNA, 15 bp, Homo sapiens
tgtattttggtctgc

SEQ ID NO: 111548 - DNA, 15 bp, Homo sapiens
ttgtattttggtctg

SEQ ID NO: 111549 - DNA, 15 bp, Homo sapiens
cttgtattttggtct

SEQ ID NO: 111550 - DNA, 15 bp, Homo sapiens
acttgtattttggtc

SEQ ID NO: 111551 - DNA, 15 bp, Homo sapiens
aacttgtattttggt

SEQ ID NO: 111552 - DNA, 15 bp, Homo sapiens
aaacttgtattttgg

SEQ ID NO: 111553 - DNA, 15 bp, Homo sapiens
caaacttgtattttg

SEQ ID NO: 111554 - DNA, 15 bp, Homo sapiens
tcaaacttgtatttt

SEQ ID NO: 111555 - DNA, 15 bp, Homo sapiens
ttcaaacttgtattt

SEQ ID NO: 111556 - DNA, 15 bp, Homo sapiens
attcaaacttgtatt

SEQ ID NO: 111557 - DNA, 15 bp, Homo sapiens
tattcaaacttgtat

SEQ ID NO: 111558 - DNA, 15 bp, Homo sapiens
ctattcaaacttgta

SEQ ID NO: 111559 - DNA, 15 bp, Homo sapiens
actattcaaacttgt

SEQ ID NO: 111560 - DNA, 15 bp, Homo sapiens
tactattcaaacttg

SEQ ID NO: 111561 - DNA, 15 bp, Homo sapiens
ctactattcaaactt

SEQ ID NO: 111562 - DNA, 15 bp, Homo sapiens
tctactattcaaact

SEQ ID NO: 111563 - DNA, 15 bp, Homo sapiens
ttctactattcaaac

SEQ ID NO: 111564 - DNA, 15 bp, Homo sapiens
attctactattcaaa

SEQ ID NO: 111565 - DNA, 15 bp, Homo sapiens
tattctactattcaa

SEQ ID NO: 111566 - DNA, 15 bp, Homo sapiens
gtattctactattca

SEQ ID NO: 111567 - DNA, 15 bp, Homo sapiens
ggtattctactattc

SEQ ID NO: 111568 - DNA, 15 bp, Homo sapiens
aggtattctactatt

SEQ ID NO: 111569 - DNA, 15 bp, Homo sapiens
aaggtattctactat

SEQ ID NO: 111570 - DNA, 15 bp, Homo sapiens
aaaggtattctacta

SEQ ID NO: 111571 - DNA, 15 bp, Homo sapiens
gaaaggtattctact

SEQ ID NO: 111572 - DNA, 15 bp, Homo sapiens
ggaaaggtattctac

SEQ ID NO: 111573 - DNA, 15 bp, Homo sapiens
gggaaaggtattcta

SEQ ID NO: 111574 - DNA, 15 bp, Homo sapiens
agggaaaggtattct

SEQ ID NO: 111575 - DNA, 15 bp, Homo sapiens
cagggaaaggtattc

SEQ ID NO: 111576 - DNA, 15 bp, Homo sapiens
tcagggaaaggtatt

SEQ ID NO: 111577 - DNA, 15 bp, Homo sapiens
ttcagggaaaggtat

SEQ ID NO: 111578 - DNA, 15 bp, Homo sapiens
attcagggaaaggta

SEQ ID NO: 111579 - DNA, 15 bp, Homo sapiens
tattcagggaaaggt

SEQ ID NO: 111580 - DNA, 15 bp, Homo sapiens
gtattcagggaaagg

SEQ ID NO: 111581 - DNA, 15 bp, Homo sapiens
tgtattcagggaaag

SEQ ID NO: 111582 - DNA, 15 bp, Homo sapiens
atgtattcagggaaa

SEQ ID NO: 111583 - DNA, 15 bp, Homo sapiens
tatgtattcagggaa

SEQ ID NO: 111584 - DNA, 15 bp, Homo sapiens
ttatgtattcaggga

SEQ ID NO: 111585 - DNA, 15 bp, Homo sapiens
tttatgtattcaggg

SEQ ID NO: 111586 - DNA, 15 bp, Homo sapiens
ctttatgtattcagg

SEQ ID NO: 111587 - DNA, 15 bp, Homo sapiens
gctttatgtattcag

SEQ ID NO: 111588 - DNA, 15 bp, Homo sapiens
ggctttatgtattca

SEQ ID NO: 111589 - DNA, 15 bp, Homo sapiens
tggctttatgtattc

SEQ ID NO: 111590 - DNA, 15 bp, Homo sapiens
ttggctttatgtatt

SEQ ID NO: 111591 - DNA, 15 bp, Homo sapiens
tttggctttatgtat

SEQ ID NO: 111592 - DNA, 15 bp, Homo sapiens
ttttggctttatgta

SEQ ID NO: 111593 - DNA, 15 bp, Homo sapiens
cttttggctttatgt

SEQ ID NO: 111594 - DNA, 15 bp, Homo sapiens
acttttggctttatg

SEQ ID NO: 111595 - DNA, 15 bp, Homo sapiens
aacttttggctttat

SEQ ID NO: 111596 - DNA, 15 bp, Homo sapiens
aaacttttggcttta

SEQ ID NO: 111597 - DNA, 15 bp, Homo sapiens
aaaacttttggcttt

SEQ ID NO: 111598 - DNA, 15 bp, Homo sapiens
taaaacttttggctt

SEQ ID NO: 111599 - DNA, 15 bp, Homo sapiens
ctaaaacttttggct

SEQ ID NO: 111600 - DNA, 15 bp, Homo sapiens
actaaaacttttggc

SEQ ID NO: 111601 - DNA, 15 bp, Homo sapiens
tactaaaacttttgg

SEQ ID NO: 111602 - DNA, 15 bp, Homo sapiens
atactaaaacttttg

SEQ ID NO: 111603 - DNA, 15 bp, Homo sapiens
aatactaaaactttt

SEQ ID NO: 111604 - DNA, 15 bp, Homo sapiens
aaatactaaaacttt

SEQ ID NO: 111605 - DNA, 15 bp, Homo sapiens
caaatactaaaactt

SEQ ID NO: 111606 - DNA, 15 bp, Homo sapiens
acaaatactaaaact

SEQ ID NO: 111607 - DNA, 15 bp, Homo sapiens
gacaaatactaaaac

SEQ ID NO: 111608 - DNA, 15 bp, Homo sapiens
agacaaatactaaaa

SEQ ID NO: 111609 - DNA, 15 bp, Homo sapiens
gagacaaatactaaa

SEQ ID NO: 111610 - DNA, 15 bp, Homo sapiens
agagacaaatactaa

SEQ ID NO: 111611 - DNA, 15 bp, Homo sapiens
aagagacaaatacta

SEQ ID NO: 111612 - DNA, 15 bp, Homo sapiens
gaagagacaaatact

SEQ ID NO: 111613 - DNA, 15 bp, Homo sapiens
cgaagagacaaatac

SEQ ID NO: 111614 - DNA, 15 bp, Homo sapiens
gcgaagagacaaata

SEQ ID NO: 111615 - DNA, 15 bp, Homo sapiens
agcgaagagacaaat

SEQ ID NO: 111616 - DNA, 15 bp, Homo sapiens
cagcgaagagacaaa

SEQ ID NO: 111617 - DNA, 15 bp, Homo sapiens
acagcgaagagacaa

SEQ ID NO: 111618 - DNA, 15 bp, Homo sapiens
aacagcgaagagaca

SEQ ID NO: 111619 - DNA, 15 bp, Homo sapiens
aaacagcgaagagac

SEQ ID NO: 111620 - DNA, 15 bp, Homo sapiens
gaaacagcgaagaga

SEQ ID NO: 111621 - DNA, 15 bp, Homo sapiens
tgaaacagcgaagag

SEQ ID NO: 111622 - DNA, 15 bp, Homo sapiens
atgaaacagcgaaga

SEQ ID NO: 111623 - DNA, 15 bp, Homo sapiens
tatgaaacagcgaag

SEQ ID NO: 111624 - DNA, 15 bp, Homo sapiens
atatgaaacagcgaa

SEQ ID NO: 111625 - DNA, 15 bp, Homo sapiens
tatatgaaacagcga

SEQ ID NO: 111626 - DNA, 15 bp, Homo sapiens
atatatgaaacagcg

SEQ ID NO: 111627 - DNA, 15 bp, Homo sapiens
gatatatgaaacagc

SEQ ID NO: 111628 - DNA, 15 bp, Homo sapiens
ggatatatgaaacag

SEQ ID NO: 111629 - DNA, 15 bp, Homo sapiens
tggatatatgaaaca

SEQ ID NO: 111630 - DNA, 15 bp, Homo sapiens
atggatatatgaaac

SEQ ID NO: 111631 - DNA, 15 bp, Homo sapiens
catggatatatgaaa

SEQ ID NO: 111632 - DNA, 15 bp, Homo sapiens
ccatggatatatgaa

SEQ ID NO: 111633 - DNA, 15 bp, Homo sapiens
gccatggatatatga

SEQ ID NO: 111634 - DNA, 15 bp, Homo sapiens
agccatggatatatg

SEQ ID NO: 111635 - DNA, 15 bp, Homo sapiens
tagccatggatatat

SEQ ID NO: 111636 - DNA, 15 bp, Homo sapiens
atagccatggatata

SEQ ID NO: 111637 - DNA, 15 bp, Homo sapiens
catagccatggatat

SEQ ID NO: 111638 - DNA, 15 bp, Homo sapiens
gcatagccatggata

SEQ ID NO: 111639 - DNA, 15 bp, Homo sapiens
tgcatagccatggat

SEQ ID NO: 111640 - DNA, 15 bp, Homo sapiens
ttgcatagccatgga

SEQ ID NO: 111641 - DNA, 15 bp, Homo sapiens
attgcatagccatgg

SEQ ID NO: 111642 - DNA, 15 bp, Homo sapiens
tattgcatagccatg

SEQ ID NO: 111643 - DNA, 15 bp, Homo sapiens
ctattgcatagccat

SEQ ID NO: 111644 - DNA, 15 bp, Homo sapiens
tctattgcatagcca

SEQ ID NO: 111645 - DNA, 15 bp, Homo sapiens
gtctattgcatagcc

SEQ ID NO: 111646 - DNA, 15 bp, Homo sapiens
tgtctattgcatagc

SEQ ID NO: 111647 - DNA, 15 bp, Homo sapiens
ttgtctattgcatag

SEQ ID NO: 111648 - DNA, 15 bp, Homo sapiens
gttgtctattgcata

SEQ ID NO: 111649 - DNA, 15 bp, Homo sapiens
tgttgtctattgcat

SEQ ID NO: 111650 - DNA, 15 bp, Homo sapiens
ctgttgtctattgca

SEQ ID NO: 111651 - DNA, 15 bp, Homo sapiens
gctgttgtctattgc

SEQ ID NO: 111652 - DNA, 15 bp, Homo sapiens
tgctgttgtctattg

SEQ ID NO: 111653 - DNA, 15 bp, Homo sapiens
atgctgttgtctatt

SEQ ID NO: 111654 - DNA, 15 bp, Homo sapiens
gatgctgttgtctat

SEQ ID NO: 111655 - DNA, 15 bp, Homo sapiens
tgatgctgttgtcta

SEQ ID NO: 111656 - DNA, 15 bp, Homo sapiens
gtgatgctgttgtct

SEQ ID NO: 111657 - DNA, 15 bp, Homo sapiens
tgtgatgctgttgtc

SEQ ID NO: 111658 - DNA, 15 bp, Homo sapiens
gtgtgatgctgttgt

SEQ ID NO: 111659 - DNA, 15 bp, Homo sapiens
ggtgtgatgctgttg

SEQ ID NO: 111660 - DNA, 15 bp, Homo sapiens
tggtgtgatgctgtt

SEQ ID NO: 111661 - DNA, 15 bp, Homo sapiens
ttggtgtgatgctgt

SEQ ID NO: 111662 - DNA, 15 bp, Homo sapiens
gttggtgtgatgctg

SEQ ID NO: 111663 - DNA, 15 bp, Homo sapiens
tgttggtgtgatgct

SEQ ID NO: 111664 - DNA, 15 bp, Homo sapiens
ctgttggtgtgatgc

SEQ ID NO: 111665 - DNA, 15 bp, Homo sapiens
tctgttggtgtgatg

SEQ ID NO: 111666 - DNA, 15 bp, Homo sapiens
ctctgttggtgtgat

SEQ ID NO: 111667 - DNA, 15 bp, Homo sapiens
cctctgttggtgtga

SEQ ID NO: 111668 - DNA, 15 bp, Homo sapiens
tcctctgttggtgtg

SEQ ID NO: 111669 - DNA, 15 bp, Homo sapiens
ttcctctgttggtgt

SEQ ID NO: 111670 - DNA, 15 bp, Homo sapiens
attcctctgttggtg

SEQ ID NO: 111671 - DNA, 15 bp, Homo sapiens
gattcctctgttggt

SEQ ID NO: 111672 - DNA, 15 bp, Homo sapiens
agattcctctgttgg

SEQ ID NO: 111673 - DNA, 15 bp, Homo sapiens
aagattcctctgttg

SEQ ID NO: 111674 - DNA, 15 bp, Homo sapiens
aaagattcctctgtt

SEQ ID NO: 111675 - DNA, 15 bp, Homo sapiens
caaagattcctctgt

SEQ ID NO: 111676 - DNA, 15 bp, Homo sapiens
tcaaagattcctctg

SEQ ID NO: 111677 - DNA, 15 bp, Homo sapiens
atcaaagattcctct

SEQ ID NO: 111678 - DNA, 15 bp, Homo sapiens
tatcaaagattcctc

SEQ ID NO: 111679 - DNA, 15 bp, Homo sapiens
ttatcaaagattcct

SEQ ID NO: 111680 - DNA, 15 bp, Homo sapiens
gttatcaaagattcc

SEQ ID NO: 111681 - DNA, 15 bp, Homo sapiens
agttatcaaagattc

SEQ ID NO: 111682 - DNA, 15 bp, Homo sapiens
aagttatcaaagatt

SEQ ID NO: 111683 - DNA, 15 bp, Homo sapiens
caagttatcaaagat

SEQ ID NO: 111684 - DNA, 15 bp, Homo sapiens
ccaagttatcaaaga

SEQ ID NO: 111685 - DNA, 15 bp, Homo sapiens
tccaagttatcaaag

SEQ ID NO: 111686 - DNA, 15 bp, Homo sapiens
ctccaagttatcaaa

SEQ ID NO: 111687 - DNA, 15 bp, Homo sapiens
cctccaagttatcaa

SEQ ID NO: 111688 - DNA, 15 bp, Homo sapiens
ccctccaagttatca

SEQ ID NO: 111689 - DNA, 15 bp, Homo sapiens
accctccaagttatc

SEQ ID NO: 111690 - DNA, 15 bp, Homo sapiens
taccctccaagttat

SEQ ID NO: 111691 - DNA, 15 bp, Homo sapiens
ataccctccaagtta

SEQ ID NO: 111692 - DNA, 15 bp, Homo sapiens
aataccctccaagtt

SEQ ID NO: 111693 - DNA, 15 bp, Homo sapiens
aaataccctccaagt

SEQ ID NO: 111694 - DNA, 15 bp, Homo sapiens
aaaataccctccaag

SEQ ID NO: 111695 - DNA, 15 bp, Homo sapiens
aaaaataccctccaa

SEQ ID NO: 111696 - DNA, 15 bp, Homo sapiens
aaaaaataccctcca

SEQ ID NO: 111697 - DNA, 15 bp, Homo sapiens
aaaaaaataccctcc

SEQ ID NO: 111698 - DNA, 15 bp, Homo sapiens
gaaaaaaataccctc

SEQ ID NO: 111699 - DNA, 15 bp, Homo sapiens
agaaaaaaataccct

SEQ ID NO: 111700 - DNA, 15 bp, Homo sapiens
aagaaaaaaataccc

SEQ ID NO: 111701 - DNA, 15 bp, Homo sapiens
taagaaaaaaatacc

SEQ ID NO: 111702 - DNA, 15 bp, Homo sapiens
gtaagaaaaaaatac

SEQ ID NO: 111703 - DNA, 15 bp, Homo sapiens
tgtaagaaaaaaata

SEQ ID NO: 111704 - DNA, 15 bp, Homo sapiens
ttgtaagaaaaaaat

SEQ ID NO: 111705 - DNA, 15 bp, Homo sapiens
attgtaagaaaaaaa

SEQ ID NO: 111706 - DNA, 15 bp, Homo sapiens
aattgtaagaaaaaa

SEQ ID NO: 111707 - DNA, 15 bp, Homo sapiens
taattgtaagaaaaa

SEQ ID NO: 111708 - DNA, 15 bp, Homo sapiens
ataattgtaagaaaa

SEQ ID NO: 111709 - DNA, 15 bp, Homo sapiens
tataattgtaagaaa

SEQ ID NO: 111710 - DNA, 15 bp, Homo sapiens
gtataattgtaagaa

SEQ ID NO: 111711 - DNA, 15 bp, Homo sapiens
tgtataattgtaaga

SEQ ID NO: 111712 - DNA, 15 bp, Homo sapiens
gtgtataattgtaag

SEQ ID NO: 111713 - DNA, 15 bp, Homo sapiens
agtgtataattgtaa

SEQ ID NO: 111714 - DNA, 15 bp, Homo sapiens
aagtgtataattgta

SEQ ID NO: 111715 - DNA, 15 bp, Homo sapiens
aaagtgtataattgt

SEQ ID NO: 111716 - DNA, 15 bp, Homo sapiens
taaagtgtataattg

SEQ ID NO: 111717 - DNA, 15 bp, Homo sapiens
ataaagtgtataatt

SEQ ID NO: 111718 - DNA, 15 bp, Homo sapiens
gataaagtgtataat

SEQ ID NO: 111719 - DNA, 15 bp, Homo sapiens
agataaagtgtataa

SEQ ID NO: 111720 - DNA, 15 bp, Homo sapiens
tagataaagtgtata

SEQ ID NO: 111721 - DNA, 15 bp, Homo sapiens
gtagataaagtgtat

SEQ ID NO: 111722 - DNA, 15 bp, Homo sapiens
agtagataaagtgta

SEQ ID NO: 111723 - DNA, 15 bp, Homo sapiens
aagtagataaagtgt

SEQ ID NO: 111724 - DNA, 15 bp, Homo sapiens
taagtagataaagtg

SEQ ID NO: 111725 - DNA, 15 bp, Homo sapiens
gtaagtagataaagt

SEQ ID NO: 111726 - DNA, 15 bp, Homo sapiens
agtaagtagataaag

SEQ ID NO: 111727 - DNA, 15 bp, Homo sapiens
aagtaagtagataaa

SEQ ID NO: 111728 - DNA, 15 bp, Homo sapiens
taagtaagtagataa

SEQ ID NO: 111729 - DNA, 15 bp, Homo sapiens
gtaagtaagtagata

SEQ ID NO: 111730 - DNA, 15 bp, Homo sapiens
tgtaagtaagtagat

SEQ ID NO: 111731 - DNA, 15 bp, Homo sapiens
atgtaagtaagtaga

SEQ ID NO: 111732 - DNA, 15 bp, Homo sapiens
gatgtaagtaagtag

SEQ ID NO: 111733 - DNA, 15 bp, Homo sapiens
tgatgtaagtaagta

SEQ ID NO: 111734 - DNA, 15 bp, Homo sapiens
gtgatgtaagtaagt

SEQ ID NO: 111735 - DNA, 15 bp, Homo sapiens
agtgatgtaagtaag

SEQ ID NO: 111736 - DNA, 15 bp, Homo sapiens
tagtgatgtaagtaa

SEQ ID NO: 111737 - DNA, 15 bp, Homo sapiens
ctagtgatgtaagta

SEQ ID NO: 111738 - DNA, 15 bp, Homo sapiens
cctagtgatgtaagt

SEQ ID NO: 111739 - DNA, 15 bp, Homo sapiens
acctagtgatgtaag

SEQ ID NO: 111740 - DNA, 15 bp, Homo sapiens
tacctagtgatgtaa

SEQ ID NO: 111741 - DNA, 15 bp, Homo sapiens
ttacctagtgatgta

SEQ ID NO: 111742 - DNA, 15 bp, Homo sapiens
tttacctagtgatgt

SEQ ID NO: 111743 - DNA, 15 bp, Homo sapiens
atttacctagtgatg

SEQ ID NO: 111744 - DNA, 15 bp, Homo sapiens
catttacctagtgat

SEQ ID NO: 111745 - DNA, 15 bp, Homo sapiens
gcatttacctagtga

SEQ ID NO: 111746 - DNA, 15 bp, Homo sapiens
agcatttacctagtg

SEQ ID NO: 111747 - DNA, 15 bp, Homo sapiens
cagcatttacctagt

SEQ ID NO: 111748 - DNA, 15 bp, Homo sapiens
acagcatttacctag

SEQ ID NO: 111749 - DNA, 15 bp, Homo sapiens
aacagcatttaccta

SEQ ID NO: 111750 - DNA, 15 bp, Homo sapiens
aaacagcatttacct

SEQ ID NO: 111751 - DNA, 15 bp, Homo sapiens
gaaacagcatttacc

SEQ ID NO: 111752 - DNA, 15 bp, Homo sapiens
ggaaacagcatttac

SEQ ID NO: 111753 - DNA, 15 bp, Homo sapiens
gggaaacagcattta

SEQ ID NO: 111754 - DNA, 15 bp, Homo sapiens
tgggaaacagcattt

SEQ ID NO: 111755 - DNA, 15 bp, Homo sapiens
atgggaaacagcatt

SEQ ID NO: 111756 - DNA, 15 bp, Homo sapiens
tatgggaaacagcat

SEQ ID NO: 111757 - DNA, 15 bp, Homo sapiens
ttatgggaaacagca

SEQ ID NO: 111758 - DNA, 15 bp, Homo sapiens
tttatgggaaacagc

SEQ ID NO: 111759 - DNA, 15 bp, Homo sapiens
ctttatgggaaacag

SEQ ID NO: 111760 - DNA, 15 bp, Homo sapiens
cctttatgggaaaca

SEQ ID NO: 111761 - DNA, 15 bp, Homo sapiens
ccctttatgggaaac

SEQ ID NO: 111762 - DNA, 15 bp, Homo sapiens
tccctttatgggaaa

SEQ ID NO: 111763 - DNA, 15 bp, Homo sapiens
ctccctttatgggaa

SEQ ID NO: 111764 - DNA, 15 bp, Homo sapiens
tctccctttatggga

SEQ ID NO: 111765 - DNA, 15 bp, Homo sapiens
ctctccctttatggg

SEQ ID NO: 111766 - DNA, 15 bp, Homo sapiens
actctccctttatgg

SEQ ID NO: 111767 - DNA, 15 bp, Homo sapiens
aactctccctttatg

SEQ ID NO: 111768 - DNA, 15 bp, Homo sapiens
caactctccctttat

SEQ ID NO: 111769 - DNA, 15 bp, Homo sapiens
acaactctcccttta

SEQ ID NO: 111770 - DNA, 15 bp, Homo sapiens
gacaactctcccttt

SEQ ID NO: 111771 - DNA, 15 bp, Homo sapiens
agacaactctccctt

SEQ ID NO: 111772 - DNA, 15 bp, Homo sapiens
aagacaactctccct

SEQ ID NO: 111773 - DNA, 15 bp, Homo sapiens
aaagacaactctccc

SEQ ID NO: 111774 - DNA, 15 bp, Homo sapiens
taaagacaactctcc

SEQ ID NO: 111775 - DNA, 15 bp, Homo sapiens
ataaagacaactctc

SEQ ID NO: 111776 - DNA, 15 bp, Homo sapiens
aataaagacaactct

SEQ ID NO: 111777 - DNA, 15 bp, Homo sapiens
aaataaagacaactc

SEQ ID NO: 111778 - DNA, 15 bp, Homo sapiens
caaataaagacaact

SEQ ID NO: 111779 - DNA, 15 bp, Homo sapiens
gcaaataaagacaac

SEQ ID NO: 111780 - DNA, 15 bp, Homo sapiens
agcaaataaagacaa

SEQ ID NO: 111781 - DNA, 15 bp, Homo sapiens
tagcaaataaagaca

SEQ ID NO: 111782 - DNA, 15 bp, Homo sapiens
gtagcaaataaagac

SEQ ID NO: 111783 - DNA, 15 bp, Homo sapiens
agtagcaaataaaga

SEQ ID NO: 111784 - DNA, 15 bp, Homo sapiens
gagtagcaaataaag

SEQ ID NO: 111785 - DNA, 15 bp, Homo sapiens
agagtagcaaataaa

SEQ ID NO: 111786 - DNA, 15 bp, Homo sapiens
aagagtagcaaataa

SEQ ID NO: 111787 - DNA, 15 bp, Homo sapiens
aaagagtagcaaata

SEQ ID NO: 111788 - DNA, 15 bp, Homo sapiens
aaaagagtagcaaat

SEQ ID NO: 111789 - DNA, 15 bp, Homo sapiens
taaaagagtagcaaa

SEQ ID NO: 111790 - DNA, 15 bp, Homo sapiens
ctaaaagagtagcaa

SEQ ID NO: 111791 - DNA, 15 bp, Homo sapiens
actaaaagagtagca

SEQ ID NO: 111792 - DNA, 15 bp, Homo sapiens
aactaaaagagtagc

SEQ ID NO: 111793 - DNA, 15 bp, Homo sapiens
aaactaaaagagtag

SEQ ID NO: 111794 - DNA, 15 bp, Homo sapiens
aaaactaaaagagta

SEQ ID NO: 111795 - DNA, 15 bp, Homo sapiens
aaaaactaaaagagt

SEQ ID NO: 111796 - DNA, 15 bp, Homo sapiens
gaaaaactaaaagag

SEQ ID NO: 111797 - DNA, 15 bp, Homo sapiens
ggaaaaactaaaaga

SEQ ID NO: 111798 - DNA, 15 bp, Homo sapiens
aggaaaaactaaaag

SEQ ID NO: 111799 - DNA, 15 bp, Homo sapiens
caggaaaaactaaaa

SEQ ID NO: 111800 - DNA, 15 bp, Homo sapiens
acaggaaaaactaaa

SEQ ID NO: 111801 - DNA, 15 bp, Homo sapiens
tacaggaaaaactaa

SEQ ID NO: 111802 - DNA, 15 bp, Homo sapiens
ctacaggaaaaacta

SEQ ID NO: 111803 - DNA, 15 bp, Homo sapiens
actacaggaaaaact

SEQ ID NO: 111804 - DNA, 15 bp, Homo sapiens
gactacaggaaaaac

SEQ ID NO: 111805 - DNA, 15 bp, Homo sapiens
agactacaggaaaaa

SEQ ID NO: 111806 - DNA, 15 bp, Homo sapiens
tagactacaggaaaa

SEQ ID NO: 111807 - DNA, 15 bp, Homo sapiens
atagactacaggaaa

SEQ ID NO: 111808 - DNA, 15 bp, Homo sapiens
tatagactacaggaa

SEQ ID NO: 111809 - DNA, 15 bp, Homo sapiens
ttatagactacagga

SEQ ID NO: 111810 - DNA, 15 bp, Homo sapiens
attatagactacagg

SEQ ID NO: 111811 - DNA, 15 bp, Homo sapiens
gattatagactacag

SEQ ID NO: 111812 - DNA, 15 bp, Homo sapiens
agattatagactaca

SEQ ID NO: 111813 - DNA, 15 bp, Homo sapiens
tagattatagactac

SEQ ID NO: 111814 - DNA, 15 bp, Homo sapiens
ttagattatagacta

SEQ ID NO: 111815 - DNA, 15 bp, Homo sapiens
tttagattatagact

SEQ ID NO: 111816 - DNA, 15 bp, Homo sapiens
ctttagattatagac

SEQ ID NO: 111817 - DNA, 15 bp, Homo sapiens
actttagattataga

SEQ ID NO: 111818 - DNA, 15 bp, Homo sapiens
cactttagattatag

SEQ ID NO: 111819 - DNA, 15 bp, Homo sapiens
acactttagattata

SEQ ID NO: 111820 - DNA, 15 bp, Homo sapiens
aacactttagattat

SEQ ID NO: 111821 - DNA, 15 bp, Homo sapiens
taacactttagatta

SEQ ID NO: 111822 - DNA, 15 bp, Homo sapiens
ttaacactttagatt

SEQ ID NO: 111823 - DNA, 15 bp, Homo sapiens
cttaacactttagat

SEQ ID NO: 111824 - DNA, 15 bp, Homo sapiens
gcttaacactttaga

SEQ ID NO: 111825 - DNA, 15 bp, Homo sapiens
tgcttaacactttag

SEQ ID NO: 111826 - DNA, 15 bp, Homo sapiens
ttgcttaacacttta

SEQ ID NO: 111827 - DNA, 15 bp, Homo sapiens
tttgcttaacacttt

SEQ ID NO: 111828 - DNA, 15 bp, Homo sapiens
gtttgcttaacactt

SEQ ID NO: 111829 - DNA, 15 bp, Homo sapiens
tgtttgcttaacact

SEQ ID NO: 111830 - DNA, 15 bp, Homo sapiens
gtgtttgcttaacac

SEQ ID NO: 111831 - DNA, 15 bp, Homo sapiens
agtgtttgcttaaca

SEQ ID NO: 111832 - DNA, 15 bp, Homo sapiens
gagtgtttgcttaac

SEQ ID NO: 111833 - DNA, 15 bp, Homo sapiens
tgagtgtttgcttaa

SEQ ID NO: 111834 - DNA, 15 bp, Homo sapiens
atgagtgtttgctta

SEQ ID NO: 111835 - DNA, 15 bp, Homo sapiens
aatgagtgtttgctt

SEQ ID NO: 111836 - DNA, 15 bp, Homo sapiens
aaatgagtgtttgct

SEQ ID NO: 111837 - DNA, 15 bp, Homo sapiens
gaaatgagtgtttgc

SEQ ID NO: 111838 - DNA, 15 bp, Homo sapiens
ggaaatgagtgtttg

SEQ ID NO: 111839 - DNA, 15 bp, Homo sapiens
aggaaatgagtgttt

SEQ ID NO: 111840 - DNA, 15 bp, Homo sapiens
gaggaaatgagtgtt

SEQ ID NO: 111841 - DNA, 15 bp, Homo sapiens
agaggaaatgagtgt

SEQ ID NO: 111842 - DNA, 15 bp, Homo sapiens
tagaggaaatgagtg

SEQ ID NO: 111843 - DNA, 15 bp, Homo sapiens
atagaggaaatgagt

SEQ ID NO: 111844 - DNA, 15 bp, Homo sapiens
catagaggaaatgag

SEQ ID NO: 111845 - DNA, 15 bp, Homo sapiens
gcatagaggaaatga

SEQ ID NO: 111846 - DNA, 15 bp, Homo sapiens
tgcatagaggaaatg

SEQ ID NO: 111847 - DNA, 15 bp, Homo sapiens
atgcatagaggaaat

SEQ ID NO: 111848 - DNA, 15 bp, Homo sapiens
aatgcatagaggaaa

SEQ ID NO: 111849 - DNA, 15 bp, Homo sapiens
aaatgcatagaggaa

SEQ ID NO: 111850 - DNA, 15 bp, Homo sapiens
taaatgcatagagga

SEQ ID NO: 111851 - DNA, 15 bp, Homo sapiens
ttaaatgcatagagg

SEQ ID NO: 111852 - DNA, 15 bp, Homo sapiens
cttaaatgcatagag

SEQ ID NO: 111853 - DNA, 15 bp, Homo sapiens
tcttaaatgcataga

SEQ ID NO: 111854 - DNA, 15 bp, Homo sapiens
ttcttaaatgcatag

SEQ ID NO: 111855 - DNA, 15 bp, Homo sapiens
attcttaaatgcata

SEQ ID NO: 111856 - DNA, 15 bp, Homo sapiens
aattcttaaatgcat

SEQ ID NO: 111857 - DNA, 15 bp, Homo sapiens
aaattcttaaatgca

SEQ ID NO: 111858 - DNA, 15 bp, Homo sapiens
caaattcttaaatgc

SEQ ID NO: 111859 - DNA, 15 bp, Homo sapiens
acaaattcttaaatg

SEQ ID NO: 111860 - DNA, 15 bp, Homo sapiens
gacaaattcttaaat

SEQ ID NO: 111861 - DNA, 15 bp, Homo sapiens
agacaaattcttaaa

SEQ ID NO: 111862 - DNA, 15 bp, Homo sapiens
tagacaaattcttaa

SEQ ID NO: 111863 - DNA, 15 bp, Homo sapiens
ctagacaaattctta

SEQ ID NO: 111864 - DNA, 15 bp, Homo sapiens
actagacaaattctt

SEQ ID NO: 111865 - DNA, 15 bp, Homo sapiens
aactagacaaattct

SEQ ID NO: 111866 - DNA, 15 bp, Homo sapiens
aaactagacaaattc

SEQ ID NO: 111867 - DNA, 15 bp, Homo sapiens
taaactagacaaatt

SEQ ID NO: 111868 - DNA, 15 bp, Homo sapiens
ataaactagacaaat

SEQ ID NO: 111869 - DNA, 15 bp, Homo sapiens
tataaactagacaaa

SEQ ID NO: 111870 - DNA, 15 bp, Homo sapiens
gtataaactagacaa

SEQ ID NO: 111871 - DNA, 15 bp, Homo sapiens
tgtataaactagaca

SEQ ID NO: 111872 - DNA, 15 bp, Homo sapiens
atgtataaactagac

SEQ ID NO: 111873 - DNA, 15 bp, Homo sapiens
aatgtataaactaga

SEQ ID NO: 111874 - DNA, 15 bp, Homo sapiens
caatgtataaactag

SEQ ID NO: 111875 - DNA, 15 bp, Homo sapiens
tcaatgtataaacta

SEQ ID NO: 111876 - DNA, 15 bp, Homo sapiens
atcaatgtataaact

SEQ ID NO: 111877 - DNA, 15 bp, Homo sapiens
aatcaatgtataaac

SEQ ID NO: 111878 - DNA, 15 bp, Homo sapiens
aaatcaatgtataaa

SEQ ID NO: 111879 - DNA, 15 bp, Homo sapiens
taaatcaatgtataa

SEQ ID NO: 111880 - DNA, 15 bp, Homo sapiens
ataaatcaatgtata

SEQ ID NO: 111881 - DNA, 15 bp, Homo sapiens
aataaatcaatgtat

SEQ ID NO: 111882 - DNA, 15 bp, Homo sapiens
taataaatcaatgta

SEQ ID NO: 111883 - DNA, 15 bp, Homo sapiens
ctaataaatcaatgt

SEQ ID NO: 111884 - DNA, 15 bp, Homo sapiens
tctaataaatcaatg

SEQ ID NO: 111885 - DNA, 15 bp, Homo sapiens
atctaataaatcaat

SEQ ID NO: 111886 - DNA, 15 bp, Homo sapiens
gatctaataaatcaa

SEQ ID NO: 111887 - DNA, 15 bp, Homo sapiens
tgatctaataaatca

SEQ ID NO: 111888 - DNA, 15 bp, Homo sapiens
gtgatctaataaatc

SEQ ID NO: 111889 - DNA, 15 bp, Homo sapiens
agtgatctaataaat

SEQ ID NO: 111890 - DNA, 15 bp, Homo sapiens
aagtgatctaataaa

SEQ ID NO: 111891 - DNA, 15 bp, Homo sapiens
gaagtgatctaataa

SEQ ID NO: 111892 - DNA, 15 bp, Homo sapiens
agaagtgatctaata

SEQ ID NO: 111893 - DNA, 15 bp, Homo sapiens
aagaagtgatctaat

SEQ ID NO: 111894 - DNA, 15 bp, Homo sapiens
aaagaagtgatctaa

SEQ ID NO: 111895 - DNA, 15 bp, Homo sapiens
aaaagaagtgatcta

SEQ ID NO: 111896 - DNA, 15 bp, Homo sapiens
aaaaagaagtgatct

SEQ ID NO: 111897 - DNA, 15 bp, Homo sapiens
taaaaagaagtgatc

SEQ ID NO: 111898 - DNA, 15 bp, Homo sapiens
ttaaaaagaagtgat

SEQ ID NO: 111899 - DNA, 15 bp, Homo sapiens
attaaaaagaagtga

SEQ ID NO: 111900 - DNA, 15 bp, Homo sapiens
aattaaaaagaagtg

SEQ ID NO: 111901 - DNA, 15 bp, Homo sapiens
aaattaaaaagaagt

SEQ ID NO: 111902 - DNA, 15 bp, Homo sapiens
aaaattaaaaagaag

SEQ ID NO: 111903 - DNA, 15 bp, Homo sapiens
gaaaattaaaaagaa

SEQ ID NO: 111904 - DNA, 15 bp, Homo sapiens
tgaaaattaaaaaga

SEQ ID NO: 111905 - DNA, 15 bp, Homo sapiens
ttgaaaattaaaaag

SEQ ID NO: 111906 - DNA, 15 bp, Homo sapiens
attgaaaattaaaaa

SEQ ID NO: 111907 - DNA, 15 bp, Homo sapiens
gattgaaaattaaaa

SEQ ID NO: 111908 - DNA, 15 bp, Homo sapiens
tgattgaaaattaaa

SEQ ID NO: 111909 - DNA, 15 bp, Homo sapiens
ctgattgaaaattaa

SEQ ID NO: 111910 - DNA, 15 bp, Homo sapiens
tctgattgaaaatta

SEQ ID NO: 111911 - DNA, 15 bp, Homo sapiens
atctgattgaaaatt

SEQ ID NO: 111912 - DNA, 15 bp, Homo sapiens
aatctgattgaaaat

SEQ ID NO: 111913 - DNA, 15 bp, Homo sapiens
aaatctgattgaaaa

SEQ ID NO: 111914 - DNA, 15 bp, Homo sapiens
gaaatctgattgaaa

SEQ ID NO: 111915 - DNA, 15 bp, Homo sapiens
agaaatctgattgaa

SEQ ID NO: 111916 - DNA, 15 bp, Homo sapiens
tagaaatctgattga

SEQ ID NO: 111917 - DNA, 15 bp, Homo sapiens
gtagaaatctgattg

SEQ ID NO: 111918 - DNA, 15 bp, Homo sapiens
ggtagaaatctgatt

SEQ ID NO: 111919 - DNA, 15 bp, Homo sapiens
tggtagaaatctgat

SEQ ID NO: 111920 - DNA, 15 bp, Homo sapiens
atggtagaaatctga

SEQ ID NO: 111921 - DNA, 15 bp, Homo sapiens
tatggtagaaatctg

SEQ ID NO: 111922 - DNA, 15 bp, Homo sapiens
ttatggtagaaatct

SEQ ID NO: 111923 - DNA, 15 bp, Homo sapiens
tttatggtagaaatc

SEQ ID NO: 111924 - DNA, 15 bp, Homo sapiens
gtttatggtagaaat

SEQ ID NO: 111925 - DNA, 15 bp, Homo sapiens
agtttatggtagaaa

SEQ ID NO: 111926 - DNA, 15 bp, Homo sapiens
aagtttatggtagaa

SEQ ID NO: 111927 - DNA, 15 bp, Homo sapiens
taagtttatggtaga

SEQ ID NO: 111928 - DNA, 15 bp, Homo sapiens
ttaagtttatggtag

SEQ ID NO: 111929 - DNA, 15 bp, Homo sapiens
tttaagtttatggta

SEQ ID NO: 111930 - DNA, 15 bp, Homo sapiens
ttttaagtttatggt

SEQ ID NO: 111931 - DNA, 15 bp, Homo sapiens
attttaagtttatgg

SEQ ID NO: 111932 - DNA, 15 bp, Homo sapiens
aattttaagtttatg

SEQ ID NO: 111933 - DNA, 15 bp, Homo sapiens
taattttaagtttat

SEQ ID NO: 111934 - DNA, 15 bp, Homo sapiens
ataattttaagttta

SEQ ID NO: 111935 - DNA, 15 bp, Homo sapiens
aataattttaagttt

SEQ ID NO: 111936 - DNA, 15 bp, Homo sapiens
aaataattttaagtt

SEQ ID NO: 111937 - DNA, 15 bp, Homo sapiens
gaaataattttaagt

SEQ ID NO: 111938 - DNA, 15 bp, Homo sapiens
tgaaataattttaag

SEQ ID NO: 111939 - DNA, 15 bp, Homo sapiens
atgaaataattttaa

SEQ ID NO: 111940 - DNA, 15 bp, Homo sapiens
gatgaaataatttta

SEQ ID NO: 111941 - DNA, 15 bp, Homo sapiens
agatgaaataatttt

SEQ ID NO: 111942 - DNA, 15 bp, Homo sapiens
aagatgaaataattt

SEQ ID NO: 111943 - DNA, 15 bp, Homo sapiens
aaagatgaaataatt

SEQ ID NO: 111944 - DNA, 15 bp, Homo sapiens
caaagatgaaataat

SEQ ID NO: 111945 - DNA, 15 bp, Homo sapiens
ccaaagatgaaataa

SEQ ID NO: 111946 - DNA, 15 bp, Homo sapiens
tccaaagatgaaata

SEQ ID NO: 111947 - DNA, 15 bp, Homo sapiens
gtccaaagatgaaat

SEQ ID NO: 111948 - DNA, 15 bp, Homo sapiens
ggtccaaagatgaaa

SEQ ID NO: 111949 - DNA, 15 bp, Homo sapiens
aggtccaaagatgaa

SEQ ID NO: 111950 - DNA, 15 bp, Homo sapiens
aaggtccaaagatga

SEQ ID NO: 111951 - DNA, 15 bp, Homo sapiens
gaaggtccaaagatg

SEQ ID NO: 111952 - DNA, 15 bp, Homo sapiens
ggaaggtccaaagat

SEQ ID NO: 111953 - DNA, 15 bp, Homo sapiens
tggaaggtccaaaga

SEQ ID NO: 111954 - DNA, 15 bp, Homo sapiens
ttggaaggtccaaag

SEQ ID NO: 111955 - DNA, 15 bp, Homo sapiens
attggaaggtccaaa

SEQ ID NO: 111956 - DNA, 15 bp, Homo sapiens
aattggaaggtccaa

SEQ ID NO: 111957 - DNA, 15 bp, Homo sapiens
taattggaaggtcca

SEQ ID NO: 111958 - DNA, 15 bp, Homo sapiens
ataattggaaggtcc

SEQ ID NO: 111959 - DNA, 15 bp, Homo sapiens
aataattggaaggtc

SEQ ID NO: 111960 - DNA, 15 bp, Homo sapiens
aaataattggaaggt

SEQ ID NO: 111961 - DNA, 15 bp, Homo sapiens
taaataattggaagg

SEQ ID NO: 111962 - DNA, 15 bp, Homo sapiens
ataaataattggaag

SEQ ID NO: 111963 - DNA, 15 bp, Homo sapiens
gataaataattggaa

SEQ ID NO: 111964 - DNA, 15 bp, Homo sapiens
agataaataattgga

SEQ ID NO: 111965 - DNA, 15 bp, Homo sapiens
gagataaataattgg

SEQ ID NO: 111966 - DNA, 15 bp, Homo sapiens
ggagataaataattg

SEQ ID NO: 111967 - DNA, 15 bp, Homo sapiens
aggagataaataatt

SEQ ID NO: 111968 - DNA, 15 bp, Homo sapiens
caggagataaataat

SEQ ID NO: 111969 - DNA, 15 bp, Homo sapiens
acaggagataaataa

SEQ ID NO: 111970 - DNA, 15 bp, Homo sapiens
tacaggagataaata

SEQ ID NO: 111971 - DNA, 15 bp, Homo sapiens
gtacaggagataaat

SEQ ID NO: 111972 - DNA, 15 bp, Homo sapiens
ggtacaggagataaa

SEQ ID NO: 111973 - DNA, 15 bp, Homo sapiens
tggtacaggagataa

SEQ ID NO: 111974 - DNA, 15 bp, Homo sapiens
atggtacaggagata

SEQ ID NO: 111975 - DNA, 15 bp, Homo sapiens
tatggtacaggagat

SEQ ID NO: 111976 - DNA, 15 bp, Homo sapiens
atatggtacaggaga

SEQ ID NO: 111977 - DNA, 15 bp, Homo sapiens
gatatggtacaggag

SEQ ID NO: 111978 - DNA, 15 bp, Homo sapiens
agatatggtacagga

SEQ ID NO: 111979 - DNA, 15 bp, Homo sapiens
cagatatggtacagg

SEQ ID NO: 111980 - DNA, 15 bp, Homo sapiens
gcagatatggtacag

SEQ ID NO: 111981 - DNA, 15 bp, Homo sapiens
tgcagatatggtaca

SEQ ID NO: 111982 - DNA, 15 bp, Homo sapiens
atgcagatatggtac

SEQ ID NO: 111983 - DNA, 15 bp, Homo sapiens
catgcagatatggta

SEQ ID NO: 111984 - DNA, 15 bp, Homo sapiens
tcatgcagatatggt

SEQ ID NO: 111985 - DNA, 15 bp, Homo sapiens
ttcatgcagatatgg

SEQ ID NO: 111986 - DNA, 15 bp, Homo sapiens
tttcatgcagatatg

SEQ ID NO: 111987 - DNA, 15 bp, Homo sapiens
ctttcatgcagatat

SEQ ID NO: 111988 - DNA, 15 bp, Homo sapiens
actttcatgcagata

SEQ ID NO: 111989 - DNA, 15 bp, Homo sapiens
aactttcatgcagat

SEQ ID NO: 111990 - DNA, 15 bp, Homo sapiens
aaactttcatgcaga

SEQ ID NO: 111991 - DNA, 15 bp, Homo sapiens
gaaactttcatgcag

SEQ ID NO: 111992 - DNA, 15 bp, Homo sapiens
agaaactttcatgca

SEQ ID NO: 111993 - DNA, 15 bp, Homo sapiens
gagaaactttcatgc

SEQ ID NO: 111994 - DNA, 15 bp, Homo sapiens
agagaaactttcatg

SEQ ID NO: 111995 - DNA, 15 bp, Homo sapiens
aagagaaactttcat

SEQ ID NO: 111996 - DNA, 15 bp, Homo sapiens
gaagagaaactttca

SEQ ID NO: 111997 - DNA, 15 bp, Homo sapiens
tgaagagaaactttc

SEQ ID NO: 111998 - DNA, 15 bp, Homo sapiens
ttgaagagaaacttt

SEQ ID NO: 111999 - DNA, 15 bp, Homo sapiens
cttgaagagaaactt

SEQ ID NO: 112000 - DNA, 15 bp, Homo sapiens
gcttgaagagaaact

SEQ ID NO: 112001 - DNA, 15 bp, Homo sapiens
agcttgaagagaaac

SEQ ID NO: 112002 - DNA, 15 bp, Homo sapiens
gagcttgaagagaaa

SEQ ID NO: 112003 - DNA, 15 bp, Homo sapiens
agagcttgaagagaa

SEQ ID NO: 112004 - DNA, 15 bp, Homo sapiens
aagagcttgaagaga

SEQ ID NO: 112005 - DNA, 15 bp, Homo sapiens
aaagagcttgaagag

SEQ ID NO: 112006 - DNA, 15 bp, Homo sapiens
caaagagcttgaaga

SEQ ID NO: 112007 - DNA, 15 bp, Homo sapiens
acaaagagcttgaag

SEQ ID NO: 112008 - DNA, 15 bp, Homo sapiens
gacaaagagcttgaa

SEQ ID NO: 112009 - DNA, 15 bp, Homo sapiens
tgacaaagagcttga

SEQ ID NO: 112010 - DNA, 15 bp, Homo sapiens
atgacaaagagcttg

SEQ ID NO: 112011 - DNA, 15 bp, Homo sapiens
gatgacaaagagctt

SEQ ID NO: 112012 - DNA, 15 bp, Homo sapiens
ggatgacaaagagct

SEQ ID NO: 112013 - DNA, 15 bp, Homo sapiens
aggatgacaaagagc

SEQ ID NO: 112014 - DNA, 15 bp, Homo sapiens
caggatgacaaagag

SEQ ID NO: 112015 - DNA, 15 bp, Homo sapiens
ccaggatgacaaaga

SEQ ID NO: 112016 - DNA, 15 bp, Homo sapiens
cccaggatgacaaag

SEQ ID NO: 112017 - DNA, 15 bp, Homo sapiens
tcccaggatgacaaa

SEQ ID NO: 112018 - DNA, 15 bp, Homo sapiens
ctcccaggatgacaa

SEQ ID NO: 112019 - DNA, 15 bp, Homo sapiens
actcccaggatgaca

SEQ ID NO: 112020 - DNA, 15 bp, Homo sapiens
aactcccaggatgac

SEQ ID NO: 112021 - DNA, 15 bp, Homo sapiens
aaactcccaggatga

SEQ ID NO: 112022 - DNA, 15 bp, Homo sapiens
caaactcccaggatg

SEQ ID NO: 112023 - DNA, 15 bp, Homo sapiens
tcaaactcccaggat

SEQ ID NO: 112024 - DNA, 15 bp, Homo sapiens
ttcaaactcccagga

SEQ ID NO: 112025 - DNA, 15 bp, Homo sapiens
tttcaaactcccagg

SEQ ID NO: 112026 - DNA, 15 bp, Homo sapiens
atttcaaactcccag

SEQ ID NO: 112027 - DNA, 15 bp, Homo sapiens
tatttcaaactccca

SEQ ID NO: 112028 - DNA, 15 bp, Homo sapiens
ctatttcaaactccc

SEQ ID NO: 112029 - DNA, 15 bp, Homo sapiens
tctatttcaaactcc

SEQ ID NO: 112030 - DNA, 15 bp, Homo sapiens
atctatttcaaactc

SEQ ID NO: 112031 - DNA, 15 bp, Homo sapiens
gatctatttcaaact

SEQ ID NO: 112032 - DNA, 15 bp, Homo sapiens
tgatctatttcaaac

SEQ ID NO: 112033 - DNA, 15 bp, Homo sapiens
atgatctatttcaaa

SEQ ID NO: 112034 - DNA, 15 bp, Homo sapiens
aatgatctatttcaa

SEQ ID NO: 112035 - DNA, 15 bp, Homo sapiens
caatgatctatttca

SEQ ID NO: 112036 - DNA, 15 bp, Homo sapiens
tcaatgatctatttc

SEQ ID NO: 112037 - DNA, 15 bp, Homo sapiens
atcaatgatctattt

SEQ ID NO: 112038 - DNA, 15 bp, Homo sapiens
aatcaatgatctatt

SEQ ID NO: 112039 - DNA, 15 bp, Homo sapiens
aaatcaatgatctat

SEQ ID NO: 112040 - DNA, 15 bp, Homo sapiens
aaaatcaatgatcta

SEQ ID NO: 112041 - DNA, 15 bp, Homo sapiens
gaaaatcaatgatct

SEQ ID NO: 112042 - DNA, 15 bp, Homo sapiens
ggaaaatcaatgatc

SEQ ID NO: 112043 - DNA, 15 bp, Homo sapiens
gggaaaatcaatgat

SEQ ID NO: 112044 - DNA, 15 bp, Homo sapiens
agggaaaatcaatga

SEQ ID NO: 112045 - DNA, 15 bp, Homo sapiens
aagggaaaatcaatg

SEQ ID NO: 112046 - DNA, 15 bp, Homo sapiens
caagggaaaatcaat

SEQ ID NO: 112047 - DNA, 15 bp, Homo sapiens
acaagggaaaatcaa

SEQ ID NO: 112048 - DNA, 15 bp, Homo sapiens
cacaagggaaaatca

SEQ ID NO: 112049 - DNA, 15 bp, Homo sapiens
acacaagggaaaatc

SEQ ID NO: 112050 - DNA, 15 bp, Homo sapiens
aacacaagggaaaat

SEQ ID NO: 112051 - DNA, 15 bp, Homo sapiens
gaacacaagggaaaa

SEQ ID NO: 112052 - DNA, 15 bp, Homo sapiens
tgaacacaagggaaa

SEQ ID NO: 112053 - DNA, 15 bp, Homo sapiens
atgaacacaagggaa

SEQ ID NO: 112054 - DNA, 15 bp, Homo sapiens
catgaacacaaggga

SEQ ID NO: 112055 - DNA, 15 bp, Homo sapiens
ccatgaacacaaggg

SEQ ID NO: 112056 - DNA, 15 bp, Homo sapiens
tccatgaacacaagg

SEQ ID NO: 112057 - DNA, 15 bp, Homo sapiens
ctccatgaacacaag

SEQ ID NO: 112058 - DNA, 15 bp, Homo sapiens
actccatgaacacaa

SEQ ID NO: 112059 - DNA, 15 bp, Homo sapiens
tactccatgaacaca

SEQ ID NO: 112060 - DNA, 15 bp, Homo sapiens
atactccatgaacac

SEQ ID NO: 112061 - DNA, 15 bp, Homo sapiens
catactccatgaaca

SEQ ID NO: 112062 - DNA, 15 bp, Homo sapiens
acatactccatgaac

SEQ ID NO: 112063 - DNA, 15 bp, Homo sapiens
aacatactccatgaa

SEQ ID NO: 112064 - DNA, 15 bp, Homo sapiens
aaacatactccatga

SEQ ID NO: 112065 - DNA, 15 bp, Homo sapiens
caaacatactccatg

SEQ ID NO: 112066 - DNA, 15 bp, Homo sapiens
gcaaacatactccat

SEQ ID NO: 112067 - DNA, 15 bp, Homo sapiens
tgcaaacatactcca

SEQ ID NO: 112068 - DNA, 15 bp, Homo sapiens
ttgcaaacatactcc

SEQ ID NO: 112069 - DNA, 15 bp, Homo sapiens
attgcaaacatactc

SEQ ID NO: 112070 - DNA, 15 bp, Homo sapiens
tattgcaaacatact

SEQ ID NO: 112071 - DNA, 15 bp, Homo sapiens
gtattgcaaacatac

SEQ ID NO: 112072 - DNA, 15 bp, Homo sapiens
tgtattgcaaacata

SEQ ID NO: 112073 - DNA, 15 bp, Homo sapiens
ttgtattgcaaacat

SEQ ID NO: 112074 - DNA, 15 bp, Homo sapiens
gttgtattgcaaaca

SEQ ID NO: 112075 - DNA, 15 bp, Homo sapiens
tgttgtattgcaaac

SEQ ID NO: 112076 - DNA, 15 bp, Homo sapiens
gtgttgtattgcaaa

SEQ ID NO: 112077 - DNA, 15 bp, Homo sapiens
agtgttgtattgcaa

SEQ ID NO: 112078 - DNA, 15 bp, Homo sapiens
cagtgttgtattgca

SEQ ID NO: 112079 - DNA, 15 bp, Homo sapiens
ccagtgttgtattgc

SEQ ID NO: 112080 - DNA, 15 bp, Homo sapiens
cccagtgttgtattg

SEQ ID NO: 112081 - DNA, 15 bp, Homo sapiens
acccagtgttgtatt

SEQ ID NO: 112082 - DNA, 15 bp, Homo sapiens
aacccagtgttgtat

SEQ ID NO: 112083 - DNA, 15 bp, Homo sapiens
aaacccagtgttgta

SEQ ID NO: 112084 - DNA, 15 bp, Homo sapiens
caaacccagtgttgt

SEQ ID NO: 112085 - DNA, 15 bp, Homo sapiens
tcaaacccagtgttg

SEQ ID NO: 112086 - DNA, 15 bp, Homo sapiens
ctcaaacccagtgtt

SEQ ID NO: 112087 - DNA, 15 bp, Homo sapiens
gctcaaacccagtgt

SEQ ID NO: 112088 - DNA, 15 bp, Homo sapiens
tgctcaaacccagtg

SEQ ID NO: 112089 - DNA, 15 bp, Homo sapiens
gtgctcaaacccagt

SEQ ID NO: 112090 - DNA, 15 bp, Homo sapiens
tgtgctcaaacccag

SEQ ID NO: 112091 - DNA, 15 bp, Homo sapiens
atgtgctcaaaccca

SEQ ID NO: 112092 - DNA, 15 bp, Homo sapiens
gatgtgctcaaaccc

SEQ ID NO: 112093 - DNA, 15 bp, Homo sapiens
tgatgtgctcaaacc

SEQ ID NO: 112094 - DNA, 15 bp, Homo sapiens
ttgatgtgctcaaac

SEQ ID NO: 112095 - DNA, 15 bp, Homo sapiens
attgatgtgctcaaa

SEQ ID NO: 112096 - DNA, 15 bp, Homo sapiens
tattgatgtgctcaa

SEQ ID NO: 112097 - DNA, 15 bp, Homo sapiens
ctattgatgtgctca

SEQ ID NO: 112098 - DNA, 15 bp, Homo sapiens
cctattgatgtgctc

SEQ ID NO: 112099 - DNA, 15 bp, Homo sapiens
tcctattgatgtgct

SEQ ID NO: 112100 - DNA, 15 bp, Homo sapiens
atcctattgatgtgc

SEQ ID NO: 112101 - DNA, 15 bp, Homo sapiens
aatcctattgatgtg

SEQ ID NO: 112102 - DNA, 15 bp, Homo sapiens
aaatcctattgatgt

SEQ ID NO: 112103 - DNA, 15 bp, Homo sapiens
taaatcctattgatg

SEQ ID NO: 112104 - DNA, 15 bp, Homo sapiens
ttaaatcctattgat

SEQ ID NO: 112105 - DNA, 15 bp, Homo sapiens
attaaatcctattga

SEQ ID NO: 112106 - DNA, 15 bp, Homo sapiens
tattaaatcctattg

SEQ ID NO: 112107 - DNA, 15 bp, Homo sapiens
ctattaaatcctatt

SEQ ID NO: 112108 - DNA, 15 bp, Homo sapiens
cctattaaatcctat

SEQ ID NO: 112109 - DNA, 15 bp, Homo sapiens
acctattaaatccta

SEQ ID NO: 112110 - DNA, 15 bp, Homo sapiens
gacctattaaatcct

SEQ ID NO: 112111 - DNA, 15 bp, Homo sapiens
agacctattaaatcc

SEQ ID NO: 112112 - DNA, 15 bp, Homo sapiens
gagacctattaaatc

SEQ ID NO: 112113 - DNA, 15 bp, Homo sapiens
ggagacctattaaat

SEQ ID NO: 112114 - DNA, 15 bp, Homo sapiens
tggagacctattaaa

SEQ ID NO: 112115 - DNA, 15 bp, Homo sapiens
gtggagacctattaa

SEQ ID NO: 112116 - DNA, 15 bp, Homo sapiens
ggtggagacctatta

SEQ ID NO: 112117 - DNA, 15 bp, Homo sapiens
tggtggagacctatt

SEQ ID NO: 112118 - DNA, 15 bp, Homo sapiens
ttggtggagacctat

SEQ ID NO: 112119 - DNA, 15 bp, Homo sapiens
tttggtggagaccta

SEQ ID NO: 112120 - DNA, 15 bp, Homo sapiens
ctttggtggagacct

SEQ ID NO: 112121 - DNA, 15 bp, Homo sapiens
actttggtggagacc

SEQ ID NO: 112122 - DNA, 15 bp, Homo sapiens
tactttggtggagac

SEQ ID NO: 112123 - DNA, 15 bp, Homo sapiens
ttactttggtggaga

SEQ ID NO: 112124 - DNA, 15 bp, Homo sapiens
attactttggtggag

SEQ ID NO: 112125 - DNA, 15 bp, Homo sapiens
gattactttggtgga

SEQ ID NO: 112126 - DNA, 15 bp, Homo sapiens
agattactttggtgg

SEQ ID NO: 112127 - DNA, 15 bp, Homo sapiens
gagattactttggtg

SEQ ID NO: 112128 - DNA, 15 bp, Homo sapiens
agagattactttggt

SEQ ID NO: 112129 - DNA, 15 bp, Homo sapiens
aagagattactttgg

SEQ ID NO: 112130 - DNA, 15 bp, Homo sapiens
aaagagattactttg

SEQ ID NO: 112131 - DNA, 15 bp, Homo sapiens
caaagagattacttt

SEQ ID NO: 112132 - DNA, 15 bp, Homo sapiens
gcaaagagattactt

SEQ ID NO: 112133 - DNA, 15 bp, Homo sapiens
ggcaaagagattact

SEQ ID NO: 112134 - DNA, 15 bp, Homo sapiens
gggcaaagagattac

SEQ ID NO: 112135 - DNA, 15 bp, Homo sapiens
agggcaaagagatta

SEQ ID NO: 112136 - DNA, 15 bp, Homo sapiens
aagggcaaagagatt

SEQ ID NO: 112137 - DNA, 15 bp, Homo sapiens
gaagggcaaagagat

SEQ ID NO: 112138 - DNA, 15 bp, Homo sapiens
ggaagggcaaagaga

SEQ ID NO: 112139 - DNA, 15 bp, Homo sapiens
aggaagggcaaagag

SEQ ID NO: 112140 - DNA, 15 bp, Homo sapiens
aaggaagggcaaaga

SEQ ID NO: 112141 - DNA, 15 bp, Homo sapiens
caaggaagggcaaag

SEQ ID NO: 112142 - DNA, 15 bp, Homo sapiens
acaaggaagggcaaa

SEQ ID NO: 112143 - DNA, 15 bp, Homo sapiens
cacaaggaagggcaa

SEQ ID NO: 112144 - DNA, 15 bp, Homo sapiens
acacaaggaagggca

SEQ ID NO: 112145 - DNA, 15 bp, Homo sapiens
cacacaaggaagggc

SEQ ID NO: 112146 - DNA, 15 bp, Homo sapiens
acacacaaggaaggg

SEQ ID NO: 112147 - DNA, 15 bp, Homo sapiens
aacacacaaggaagg

SEQ ID NO: 112148 - DNA, 15 bp, Homo sapiens
aaacacacaaggaag

SEQ ID NO: 112149 - DNA, 15 bp, Homo sapiens
gaaacacacaaggaa

SEQ ID NO: 112150 - DNA, 15 bp, Homo sapiens
ggaaacacacaagga

SEQ ID NO: 112151 - DNA, 15 bp, Homo sapiens
aggaaacacacaagg

SEQ ID NO: 112152 - DNA, 15 bp, Homo sapiens
aaggaaacacacaag

SEQ ID NO: 112153 - DNA, 15 bp, Homo sapiens
aaaggaaacacacaa

SEQ ID NO: 112154 - DNA, 15 bp, Homo sapiens
aaaaggaaacacaca

SEQ ID NO: 112155 - DNA, 15 bp, Homo sapiens
aaaaaggaaacacac

SEQ ID NO: 112156 - DNA, 15 bp, Homo sapiens
caaaaaggaaacaca

SEQ ID NO: 112157 - DNA, 15 bp, Homo sapiens
ccaaaaaggaaacac

SEQ ID NO: 112158 - DNA, 15 bp, Homo sapiens
accaaaaaggaaaca

SEQ ID NO: 112159 - DNA, 15 bp, Homo sapiens
aaccaaaaaggaaac

SEQ ID NO: 112160 - DNA, 15 bp, Homo sapiens
aaaccaaaaaggaaa

SEQ ID NO: 112161 - DNA, 15 bp, Homo sapiens
aaaaccaaaaaggaa

SEQ ID NO: 112162 - DNA, 15 bp, Homo sapiens
gaaaaccaaaaagga

SEQ ID NO: 112163 - DNA, 15 bp, Homo sapiens
agaaaaccaaaaagg

SEQ ID NO: 112164 - DNA, 15 bp, Homo sapiens
cagaaaaccaaaaag

SEQ ID NO: 112165 - DNA, 15 bp, Homo sapiens
acagaaaaccaaaaa

SEQ ID NO: 112166 - DNA, 15 bp, Homo sapiens
aacagaaaaccaaaa

SEQ ID NO: 112167 - DNA, 15 bp, Homo sapiens
taacagaaaaccaaa

SEQ ID NO: 112168 - DNA, 15 bp, Homo sapiens
ctaacagaaaaccaa

SEQ ID NO: 112169 - DNA, 15 bp, Homo sapiens
tctaacagaaaacca

SEQ ID NO: 112170 - DNA, 15 bp, Homo sapiens
ttctaacagaaaacc

SEQ ID NO: 112171 - DNA, 15 bp, Homo sapiens
tttctaacagaaaac

SEQ ID NO: 112172 - DNA, 15 bp, Homo sapiens
gtttctaacagaaaa

SEQ ID NO: 112173 - DNA, 15 bp, Homo sapiens
tgtttctaacagaaa

SEQ ID NO: 112174 - DNA, 15 bp, Homo sapiens
ttgtttctaacagaa

SEQ ID NO: 112175 - DNA, 15 bp, Homo sapiens
tttgtttctaacaga

SEQ ID NO: 112176 - DNA, 15 bp, Homo sapiens
ttttgtttctaacag

SEQ ID NO: 112177 - DNA, 15 bp, Homo sapiens
gttttgtttctaaca

SEQ ID NO: 112178 - DNA, 15 bp, Homo sapiens
cgttttgtttctaac

SEQ ID NO: 112179 - DNA, 15 bp, Homo sapiens
tcgttttgtttctaa

SEQ ID NO: 112180 - DNA, 15 bp, Homo sapiens
ttcgttttgtttcta

SEQ ID NO: 112181 - DNA, 15 bp, Homo sapiens
tttcgttttgtttct

SEQ ID NO: 112182 - DNA, 15 bp, Homo sapiens
ttttcgttttgtttc

SEQ ID NO: 112183 - DNA, 15 bp, Homo sapiens
gttttcgttttgttt

SEQ ID NO: 112184 - DNA, 15 bp, Homo sapiens
tgttttcgttttgtt

SEQ ID NO: 112185 - DNA, 15 bp, Homo sapiens
ctgttttcgttttgt

SEQ ID NO: 112186 - DNA, 15 bp, Homo sapiens
actgttttcgttttg

SEQ ID NO: 112187 - DNA, 15 bp, Homo sapiens
cactgttttcgtttt

SEQ ID NO: 112188 - DNA, 15 bp, Homo sapiens
acactgttttcgttt

SEQ ID NO: 112189 - DNA, 15 bp, Homo sapiens
aacactgttttcgtt

SEQ ID NO: 112190 - DNA, 15 bp, Homo sapiens
aaacactgttttcgt

SEQ ID NO: 112191 - DNA, 15 bp, Homo sapiens
aaaacactgttttcg

SEQ ID NO: 112192 - DNA, 15 bp, Homo sapiens
caaaacactgttttc

SEQ ID NO: 112193 - DNA, 15 bp, Homo sapiens
acaaaacactgtttt

SEQ ID NO: 112194 - DNA, 15 bp, Homo sapiens
tacaaaacactgttt

SEQ ID NO: 112195 - DNA, 15 bp, Homo sapiens
ttacaaaacactgtt

SEQ ID NO: 112196 - DNA, 15 bp, Homo sapiens
tttacaaaacactgt

SEQ ID NO: 112197 - DNA, 15 bp, Homo sapiens
ttttacaaaacactg

SEQ ID NO: 112198 - DNA, 15 bp, Homo sapiens
gttttacaaaacact

SEQ ID NO: 112199 - DNA, 15 bp, Homo sapiens
tgttttacaaaacac

SEQ ID NO: 112200 - DNA, 15 bp, Homo sapiens
gtgttttacaaaaca

SEQ ID NO: 112201 - DNA, 15 bp, Homo sapiens
ggtgttttacaaaac

SEQ ID NO: 112202 - DNA, 15 bp, Homo sapiens
tggtgttttacaaaa

SEQ ID NO: 112203 - DNA, 15 bp, Homo sapiens
ctggtgttttacaaa

SEQ ID NO: 112204 - DNA, 15 bp, Homo sapiens
tctggtgttttacaa

SEQ ID NO: 112205 - DNA, 15 bp, Homo sapiens
atctggtgttttaca

SEQ ID NO: 112206 - DNA, 15 bp, Homo sapiens
aatctggtgttttac

SEQ ID NO: 112207 - DNA, 15 bp, Homo sapiens
caatctggtgtttta

SEQ ID NO: 112208 - DNA, 15 bp, Homo sapiens
acaatctggtgtttt

SEQ ID NO: 112209 - DNA, 15 bp, Homo sapiens
tacaatctggtgttt

SEQ ID NO: 112210 - DNA, 15 bp, Homo sapiens
atacaatctggtgtt

SEQ ID NO: 112211 - DNA, 15 bp, Homo sapiens
aatacaatctggtgt

SEQ ID NO: 112212 - DNA, 15 bp, Homo sapiens
aaatacaatctggtg

SEQ ID NO: 112213 - DNA, 15 bp, Homo sapiens
taaatacaatctggt

SEQ ID NO: 112214 - DNA, 15 bp, Homo sapiens
gtaaatacaatctgg

SEQ ID NO: 112215 - DNA, 15 bp, Homo sapiens
ggtaaatacaatctg

SEQ ID NO: 112216 - DNA, 15 bp, Homo sapiens
gggtaaatacaatct

SEQ ID NO: 112217 - DNA, 15 bp, Homo sapiens
agggtaaatacaatc

SEQ ID NO: 112218 - DNA, 15 bp, Homo sapiens
aagggtaaatacaat

SEQ ID NO: 112219 - DNA, 15 bp, Homo sapiens
aaagggtaaatacaa

SEQ ID NO: 112220 - DNA, 15 bp, Homo sapiens
gaaagggtaaataca

SEQ ID NO: 112221 - DNA, 15 bp, Homo sapiens
agaaagggtaaatac

SEQ ID NO: 112222 - DNA, 15 bp, Homo sapiens
aagaaagggtaaata

SEQ ID NO: 112223 - DNA, 15 bp, Homo sapiens
aaagaaagggtaaat

SEQ ID NO: 112224 - DNA, 15 bp, Homo sapiens
gaaagaaagggtaaa

SEQ ID NO: 112225 - DNA, 15 bp, Homo sapiens
ggaaagaaagggtaa

SEQ ID NO: 112226 - DNA, 15 bp, Homo sapiens
aggaaagaaagggta

SEQ ID NO: 112227 - DNA, 15 bp, Homo sapiens
aaggaaagaaagggt

SEQ ID NO: 112228 - DNA, 15 bp, Homo sapiens
aaaggaaagaaaggg

SEQ ID NO: 112229 - DNA, 15 bp, Homo sapiens
tgaaaggaaagaaag

SEQ ID NO: 112230 - DNA, 15 bp, Homo sapiens
ttgaaaggaaagaaa

SEQ ID NO: 112231 - DNA, 15 bp, Homo sapiens
attgaaaggaaagaa

SEQ ID NO: 112232 - DNA, 15 bp, Homo sapiens
gattgaaaggaaaga

SEQ ID NO: 112233 - DNA, 15 bp, Homo sapiens
tgattgaaaggaaag

SEQ ID NO: 112234 - DNA, 15 bp, Homo sapiens
ctgattgaaaggaaa

SEQ ID NO: 112235 - DNA, 15 bp, Homo sapiens
cctgattgaaaggaa

SEQ ID NO: 112236 - DNA, 15 bp, Homo sapiens
tcctgattgaaagga

SEQ ID NO: 112237 - DNA, 15 bp, Homo sapiens
ttcctgattgaaagg

SEQ ID NO: 112238 - DNA, 15 bp, Homo sapiens
cttcctgattgaaag

SEQ ID NO: 112239 - DNA, 15 bp, Homo sapiens
tcttcctgattgaaa

SEQ ID NO: 112240 - DNA, 15 bp, Homo sapiens
ttcttcctgattgaa

SEQ ID NO: 112241 - DNA, 15 bp, Homo sapiens
cttcttcctgattga

SEQ ID NO: 112242 - DNA, 15 bp, Homo sapiens
gcttcttcctgattg

SEQ ID NO: 112243 - DNA, 15 bp, Homo sapiens
agcttcttcctgatt

SEQ ID NO: 112244 - DNA, 15 bp, Homo sapiens
gagcttcttcctgat

SEQ ID NO: 112245 - DNA, 15 bp, Homo sapiens
ggagcttcttcctga

SEQ ID NO: 112246 - DNA, 15 bp, Homo sapiens
aggagcttcttcctg

SEQ ID NO: 112247 - DNA, 15 bp, Homo sapiens
caggagcttcttcct

SEQ ID NO: 112248 - DNA, 15 bp, Homo sapiens
acaggagcttcttcc

SEQ ID NO: 112249 - DNA, 15 bp, Homo sapiens
aacaggagcttcttc

SEQ ID NO: 112250 - DNA, 15 bp, Homo sapiens
taacaggagcttctt

SEQ ID NO: 112251 - DNA, 15 bp, Homo sapiens
gtaacaggagcttct

SEQ ID NO: 112252 - DNA, 15 bp, Homo sapiens
agtaacaggagcttc

SEQ ID NO: 112253 - DNA, 15 bp, Homo sapiens
cagtaacaggagctt

SEQ ID NO: 112254 - DNA, 15 bp, Homo sapiens
tcagtaacaggagct

SEQ ID NO: 112255 - DNA, 15 bp, Homo sapiens
atcagtaacaggagc

SEQ ID NO: 112256 - DNA, 15 bp, Homo sapiens
tatcagtaacaggag

SEQ ID NO: 112257 - DNA, 15 bp, Homo sapiens
ctatcagtaacagga

SEQ ID NO: 112258 - DNA, 15 bp, Homo sapiens
gctatcagtaacagg

SEQ ID NO: 112259 - DNA, 15 bp, Homo sapiens
tgctatcagtaacag

SEQ ID NO: 112260 - DNA, 15 bp, Homo sapiens
ctgctatcagtaaca

SEQ ID NO: 112261 - DNA, 15 bp, Homo sapiens
tctgctatcagtaac

SEQ ID NO: 112262 - DNA, 15 bp, Homo sapiens
atctgctatcagtaa

SEQ ID NO: 112263 - DNA, 15 bp, Homo sapiens
aatctgctatcagta

SEQ ID NO: 112264 - DNA, 15 bp, Homo sapiens
caatctgctatcagt

SEQ ID NO: 112265 - DNA, 15 bp, Homo sapiens
acaatctgctatcag

SEQ ID NO: 112266 - DNA, 15 bp, Homo sapiens
aacaatctgctatca

SEQ ID NO: 112267 - DNA, 15 bp, Homo sapiens
aaacaatctgctatc

SEQ ID NO: 112268 - DNA, 15 bp, Homo sapiens
aaaacaatctgctat

SEQ ID NO: 112269 - DNA, 15 bp, Homo sapiens
taaaacaatctgcta

SEQ ID NO: 112270 - DNA, 15 bp, Homo sapiens
ctaaaacaatctgct

SEQ ID NO: 112271 - DNA, 15 bp, Homo sapiens
cctaaaacaatctgc

SEQ ID NO: 112272 - DNA, 15 bp, Homo sapiens
acctaaaacaatctg

SEQ ID NO: 112273 - DNA, 15 bp, Homo sapiens
cacctaaaacaatct

SEQ ID NO: 112274 - DNA, 15 bp, Homo sapiens
gcacctaaaacaatc

SEQ ID NO: 112275 - DNA, 15 bp, Homo sapiens
agcacctaaaacaat

SEQ ID NO: 112276 - DNA, 15 bp, Homo sapiens
aagcacctaaaacaa

SEQ ID NO: 112277 - DNA, 15 bp, Homo sapiens
aaagcacctaaaaca

SEQ ID NO: 112278 - DNA, 15 bp, Homo sapiens
caaagcacctaaaac

SEQ ID NO: 112279 - DNA, 15 bp, Homo sapiens
acaaagcacctaaaa

SEQ ID NO: 112280 - DNA, 15 bp, Homo sapiens
aacaaagcacctaaa

SEQ ID NO: 112281 - DNA, 15 bp, Homo sapiens
aaacaaagcacctaa

SEQ ID NO: 112282 - DNA, 15 bp, Homo sapiens
aaaacaaagcaccta

SEQ ID NO: 112283 - DNA, 15 bp, Homo sapiens
aaaaacaaagcacct

SEQ ID NO: 112284 - DNA, 15 bp, Homo sapiens
taaaaacaaagcacc

SEQ ID NO: 112285 - DNA, 15 bp, Homo sapiens
ctaaaaacaaagcac

SEQ ID NO: 112286 - DNA, 15 bp, Homo sapiens
cctaaaaacaaagca

SEQ ID NO: 112287 - DNA, 15 bp, Homo sapiens
acctaaaaacaaagc

SEQ ID NO: 112288 - DNA, 15 bp, Homo sapiens
cacctaaaaacaaag

SEQ ID NO: 112289 - DNA, 15 bp, Homo sapiens
gcacctaaaaacaaa

SEQ ID NO: 112290 - DNA, 15 bp, Homo sapiens
agcacctaaaaacaa

SEQ ID NO: 112291 - DNA, 15 bp, Homo sapiens
aagcacctaaaaaca

SEQ ID NO: 112292 - DNA, 15 bp, Homo sapiens
gaagcacctaaaaac

SEQ ID NO: 112293 - DNA, 15 bp, Homo sapiens
ggaagcacctaaaaa

SEQ ID NO: 112294 - DNA, 15 bp, Homo sapiens
aggaagcacctaaaa

SEQ ID NO: 112295 - DNA, 15 bp, Homo sapiens
taggaagcacctaaa

SEQ ID NO: 112296 - DNA, 15 bp, Homo sapiens
ttaggaagcacctaa

SEQ ID NO: 112297 - DNA, 15 bp, Homo sapiens
tttaggaagcaccta

SEQ ID NO: 112298 - DNA, 15 bp, Homo sapiens
gtttaggaagcacct

SEQ ID NO: 112299 - DNA, 15 bp, Homo sapiens
ggtttaggaagcacc

SEQ ID NO: 112300 - DNA, 15 bp, Homo sapiens
aggtttaggaagcac

SEQ ID NO: 112301 - DNA, 15 bp, Homo sapiens
aaggtttaggaagca

SEQ ID NO: 112302 - DNA, 15 bp, Homo sapiens
gaaggtttaggaagc

SEQ ID NO: 112303 - DNA, 15 bp, Homo sapiens
ggaaggtttaggaag

SEQ ID NO: 112304 - DNA, 15 bp, Homo sapiens
tggaaggtttaggaa

SEQ ID NO: 112305 - DNA, 15 bp, Homo sapiens
atggaaggtttagga

SEQ ID NO: 112306 - DNA, 15 bp, Homo sapiens
tatggaaggtttagg

SEQ ID NO: 112307 - DNA, 15 bp, Homo sapiens
ttatggaaggtttag

SEQ ID NO: 112308 - DNA, 15 bp, Homo sapiens
tttatggaaggttta

SEQ ID NO: 112309 - DNA, 15 bp, Homo sapiens
ctttatggaaggttt

SEQ ID NO: 112310 - DNA, 15 bp, Homo sapiens
gctttatggaaggtt

SEQ ID NO: 112311 - DNA, 15 bp, Homo sapiens
tgctttatggaaggt

SEQ ID NO: 112312 - DNA, 15 bp, Homo sapiens
atgctttatggaagg

SEQ ID NO: 112313 - DNA, 15 bp, Homo sapiens
tatgctttatggaag

SEQ ID NO: 112314 - DNA, 15 bp, Homo sapiens
ttatgctttatggaa

SEQ ID NO: 112315 - DNA, 15 bp, Homo sapiens
tttatgctttatgga

SEQ ID NO: 112316 - DNA, 15 bp, Homo sapiens
ctttatgctttatgg

SEQ ID NO: 112317 - DNA, 15 bp, Homo sapiens
cctttatgctttatg

SEQ ID NO: 112318 - DNA, 15 bp, Homo sapiens
acctttatgctttat

SEQ ID NO: 112319 - DNA, 15 bp, Homo sapiens
cacctttatgcttta

SEQ ID NO: 112320 - DNA, 15 bp, Homo sapiens
acacctttatgcttt

SEQ ID NO: 112321 - DNA, 15 bp, Homo sapiens
aacacctttatgctt

SEQ ID NO: 112322 - DNA, 15 bp, Homo sapiens
aaacacctttatgct

SEQ ID NO: 112323 - DNA, 15 bp, Homo sapiens
aaaacacctttatgc

SEQ ID NO: 112324 - DNA, 15 bp, Homo sapiens
gaaaacacctttatg

SEQ ID NO: 112325 - DNA, 15 bp, Homo sapiens
tgaaaacacctttat

SEQ ID NO: 112326 - DNA, 15 bp, Homo sapiens
atgaaaacaccttta

SEQ ID NO: 112327 - DNA, 15 bp, Homo sapiens
tatgaaaacaccttt

SEQ ID NO: 112328 - DNA, 15 bp, Homo sapiens
atatgaaaacacctt

SEQ ID NO: 112329 - DNA, 15 bp, Homo sapiens
aatatgaaaacacct

SEQ ID NO: 112330 - DNA, 15 bp, Homo sapiens
aaatatgaaaacacc

SEQ ID NO: 112331 - DNA, 15 bp, Homo sapiens
gaaatatgaaaacac

SEQ ID NO: 112332 - DNA, 15 bp, Homo sapiens
tgaaatatgaaaaca

SEQ ID NO: 112333 - DNA, 15 bp, Homo sapiens
gtgaaatatgaaaac

SEQ ID NO: 112334 - DNA, 15 bp, Homo sapiens
tgtgaaatatgaaaa

SEQ ID NO: 112335 - DNA, 15 bp, Homo sapiens
atgtgaaatatgaaa

SEQ ID NO: 112336 - DNA, 15 bp, Homo sapiens
aatgtgaaatatgaa

SEQ ID NO: 112337 - DNA, 15 bp, Homo sapiens
aaatgtgaaatatga

SEQ ID NO: 112338 - DNA, 15 bp, Homo sapiens
aaaatgtgaaatatg

SEQ ID NO: 112339 - DNA, 15 bp, Homo sapiens
aaaaatgtgaaatat

SEQ ID NO: 112340 - DNA, 15 bp, Homo sapiens
aaaaaatgtgaaata

SEQ ID NO: 112341 - DNA, 15 bp, Homo sapiens
taaaaaatgtgaaat

SEQ ID NO: 112342 - DNA, 15 bp, Homo sapiens
ttaaaaaatgtgaaa

SEQ ID NO: 112343 - DNA, 15 bp, Homo sapiens
attaaaaaatgtgaa

SEQ ID NO: 112344 - DNA, 15 bp, Homo sapiens
tattaaaaaatgtga

SEQ ID NO: 112345 - DNA, 15 bp, Homo sapiens
ttattaaaaaatgtg

SEQ ID NO: 112346 - DNA, 15 bp, Homo sapiens
cttattaaaaaatgt

SEQ ID NO: 112347 - DNA, 15 bp, Homo sapiens
ccttattaaaaaatg

SEQ ID NO: 112348 - DNA, 15 bp, Homo sapiens
tccttattaaaaaat

SEQ ID NO: 112349 - DNA, 15 bp, Homo sapiens
ttccttattaaaaaa

SEQ ID NO: 112350 - DNA, 15 bp, Homo sapiens
attccttattaaaaa

SEQ ID NO: 112351 - DNA, 15 bp, Homo sapiens
aattccttattaaaa

SEQ ID NO: 112352 - DNA, 15 bp, Homo sapiens
aaattccttattaaa

SEQ ID NO: 112353 - DNA, 15 bp, Homo sapiens
caaattccttattaa

SEQ ID NO: 112354 - DNA, 15 bp, Homo sapiens
tcaaattccttatta

SEQ ID NO: 112355 - DNA, 15 bp, Homo sapiens
ttcaaattccttatt

SEQ ID NO: 112356 - DNA, 15 bp, Homo sapiens
attcaaattccttat

SEQ ID NO: 112357 - DNA, 15 bp, Homo sapiens
aattcaaattcctta

SEQ ID NO: 112358 - DNA, 15 bp, Homo sapiens
aaattcaaattcctt

SEQ ID NO: 112359 - DNA, 15 bp, Homo sapiens
aaaattcaaattcct

SEQ ID NO: 112360 - DNA, 15 bp, Homo sapiens
aaaaattcaaattcc

SEQ ID NO: 112361 - DNA, 15 bp, Homo sapiens
taaaaattcaaattc

SEQ ID NO: 112362 - DNA, 15 bp, Homo sapiens
ataaaaattcaaatt

SEQ ID NO: 112363 - DNA, 15 bp, Homo sapiens
gataaaaattcaaat

SEQ ID NO: 112364 - DNA, 15 bp, Homo sapiens
agataaaaattcaaa

SEQ ID NO: 112365 - DNA, 15 bp, Homo sapiens
cagataaaaattcaa

SEQ ID NO: 112366 - DNA, 15 bp, Homo sapiens
acagataaaaattca

SEQ ID NO: 112367 - DNA, 15 bp, Homo sapiens
tacagataaaaattc

SEQ ID NO: 112368 - DNA, 15 bp, Homo sapiens
atacagataaaaatt

SEQ ID NO: 112369 - DNA, 15 bp, Homo sapiens
tatacagataaaaat

SEQ ID NO: 112370 - DNA, 15 bp, Homo sapiens
gtatacagataaaaa

SEQ ID NO: 112371 - DNA, 15 bp, Homo sapiens
tgtatacagataaaa

SEQ ID NO: 112372 - DNA, 15 bp, Homo sapiens
gtgtatacagataaa

SEQ ID NO: 112373 - DNA, 15 bp, Homo sapiens
agtgtatacagataa

SEQ ID NO: 112374 - DNA, 15 bp, Homo sapiens
aagtgtatacagata

SEQ ID NO: 112375 - DNA, 15 bp, Homo sapiens
taagtgtatacagat

SEQ ID NO: 112376 - DNA, 15 bp, Homo sapiens
ttaagtgtatacaga

SEQ ID NO: 112377 - DNA, 15 bp, Homo sapiens
tttaagtgtatacag

SEQ ID NO: 112378 - DNA, 15 bp, Homo sapiens
ttttaagtgtataca

SEQ ID NO: 112379 - DNA, 15 bp, Homo sapiens
attttaagtgtatac

SEQ ID NO: 112380 - DNA, 15 bp, Homo sapiens
gattttaagtgtata

SEQ ID NO: 112381 - DNA, 15 bp, Homo sapiens
tgattttaagtgtat

SEQ ID NO: 112382 - DNA, 15 bp, Homo sapiens
atgattttaagtgta

SEQ ID NO: 112383 - DNA, 15 bp, Homo sapiens
aatgattttaagtgt

SEQ ID NO: 112384 - DNA, 15 bp, Homo sapiens
taatgattttaagtg

SEQ ID NO: 112385 - DNA, 15 bp, Homo sapiens
ataatgattttaagt

SEQ ID NO: 112386 - DNA, 15 bp, Homo sapiens
aataatgattttaag

SEQ ID NO: 112387 - DNA, 15 bp, Homo sapiens
aaataatgattttaa

SEQ ID NO: 112388 - DNA, 15 bp, Homo sapiens
aaaataatgatttta

SEQ ID NO: 112389 - DNA, 15 bp, Homo sapiens
aaaaataatgatttt

SEQ ID NO: 112390 - DNA, 15 bp, Homo sapiens
aaaaaataatgattt

SEQ ID NO: 112391 - DNA, 15 bp, Homo sapiens
gaaaaaataatgatt

SEQ ID NO: 112392 - DNA, 15 bp, Homo sapiens
ggaaaaaataatgat

SEQ ID NO: 112393 - DNA, 15 bp, Homo sapiens
aggaaaaaataatga

SEQ ID NO: 112394 - DNA, 15 bp, Homo sapiens
aaggaaaaaataatg

SEQ ID NO: 112395 - DNA, 15 bp, Homo sapiens
caaggaaaaaataat

SEQ ID NO: 112396 - DNA, 15 bp, Homo sapiens
ccaaggaaaaaataa

SEQ ID NO: 112397 - DNA, 15 bp, Homo sapiens
tccaaggaaaaaata

SEQ ID NO: 112398 - DNA, 15 bp, Homo sapiens
ttccaaggaaaaaat

SEQ ID NO: 112399 - DNA, 15 bp, Homo sapiens
gttccaaggaaaaaa

SEQ ID NO: 112400 - DNA, 15 bp, Homo sapiens
ggttccaaggaaaaa

SEQ ID NO: 112401 - DNA, 15 bp, Homo sapiens
tggttccaaggaaaa

SEQ ID NO: 112402 - DNA, 15 bp, Homo sapiens
atggttccaaggaaa

SEQ ID NO: 112403 - DNA, 15 bp, Homo sapiens
aatggttccaaggaa

SEQ ID NO: 112404 - DNA, 15 bp, Homo sapiens
caatggttccaagga

SEQ ID NO: 112405 - DNA, 15 bp, Homo sapiens
tcaatggttccaagg

SEQ ID NO: 112406 - DNA, 15 bp, Homo sapiens
ctcaatggttccaag

SEQ ID NO: 112407 - DNA, 15 bp, Homo sapiens
actcaatggttccaa

SEQ ID NO: 112408 - DNA, 15 bp, Homo sapiens
aactcaatggttcca

SEQ ID NO: 112409 - DNA, 15 bp, Homo sapiens
taactcaatggttcc

SEQ ID NO: 112410 - DNA, 15 bp, Homo sapiens
ataactcaatggttc

SEQ ID NO: 112411 - DNA, 15 bp, Homo sapiens
tataactcaatggtt

SEQ ID NO: 112412 - DNA, 15 bp, Homo sapiens
atataactcaatggt

SEQ ID NO: 112413 - DNA, 15 bp, Homo sapiens
tatataactcaatgg

SEQ ID NO: 112414 - DNA, 15 bp, Homo sapiens
atatataactcaatg

SEQ ID NO: 112415 - DNA, 15 bp, Homo sapiens
aatatataactcaat

SEQ ID NO: 112416 - DNA, 15 bp, Homo sapiens
taatatataactcaa

SEQ ID NO: 112417 - DNA, 15 bp, Homo sapiens
ataatatataactca

SEQ ID NO: 112418 - DNA, 15 bp, Homo sapiens
aataatatataactc

SEQ ID NO: 112419 - DNA, 15 bp, Homo sapiens
taataatatataact

SEQ ID NO: 112420 - DNA, 15 bp, Homo sapiens
ataataatatataac

SEQ ID NO: 112421 - DNA, 15 bp, Homo sapiens
tataataatatataa

SEQ ID NO: 112422 - DNA, 15 bp, Homo sapiens
atataataatatata

SEQ ID NO: 112423 - DNA, 15 bp, Homo sapiens
catataataatatat

SEQ ID NO: 112424 - DNA, 15 bp, Homo sapiens
gcatataataatata

SEQ ID NO: 112425 - DNA, 15 bp, Homo sapiens
agcatataataatat

SEQ ID NO: 112426 - DNA, 15 bp, Homo sapiens
aagcatataataata

SEQ ID NO: 112427 - DNA, 15 bp, Homo sapiens
aaagcatataataat

SEQ ID NO: 112428 - DNA, 15 bp, Homo sapiens
taaagcatataataa

SEQ ID NO: 112429 - DNA, 15 bp, Homo sapiens
ttaaagcatataata

SEQ ID NO: 112430 - DNA, 15 bp, Homo sapiens
tttaaagcatataat

SEQ ID NO: 112431 - DNA, 15 bp, Homo sapiens
ttttaaagcatataa

SEQ ID NO: 112432 - DNA, 15 bp, Homo sapiens
attttaaagcatata

SEQ ID NO: 112433 - DNA, 15 bp, Homo sapiens
gattttaaagcatat

SEQ ID NO: 112434 - DNA, 15 bp, Homo sapiens
tgattttaaagcata

SEQ ID NO: 112435 - DNA, 15 bp, Homo sapiens
ttgattttaaagcat

SEQ ID NO: 112436 - DNA, 15 bp, Homo sapiens
tttgattttaaagca

SEQ ID NO: 112437 - DNA, 15 bp, Homo sapiens
atttgattttaaagc

SEQ ID NO: 112438 - DNA, 15 bp, Homo sapiens
aatttgattttaaag

SEQ ID NO: 112439 - DNA, 15 bp, Homo sapiens
aaatttgattttaaa

SEQ ID NO: 112440 - DNA, 15 bp, Homo sapiens
taaatttgattttaa

SEQ ID NO: 112441 - DNA, 15 bp, Homo sapiens
ctaaatttgatttta

SEQ ID NO: 112442 - DNA, 15 bp, Homo sapiens
gctaaatttgatttt

SEQ ID NO: 112443 - DNA, 15 bp, Homo sapiens
tgctaaatttgattt

SEQ ID NO: 112444 - DNA, 15 bp, Homo sapiens
ttgctaaatttgatt

SEQ ID NO: 112445 - DNA, 15 bp, Homo sapiens
attgctaaatttgat

SEQ ID NO: 112446 - DNA, 15 bp, Homo sapiens
cattgctaaatttga

SEQ ID NO: 112447 - DNA, 15 bp, Homo sapiens
tcattgctaaatttg

SEQ ID NO: 112448 - DNA, 15 bp, Homo sapiens
ttcattgctaaattt

SEQ ID NO: 112449 - DNA, 15 bp, Homo sapiens
attcattgctaaatt

SEQ ID NO: 112450 - DNA, 15 bp, Homo sapiens
cattcattgctaaat

SEQ ID NO: 112451 - DNA, 15 bp, Homo sapiens
acattcattgctaaa

SEQ ID NO: 112452 - DNA, 15 bp, Homo sapiens
tacattcattgctaa

SEQ ID NO: 112453 - DNA, 15 bp, Homo sapiens
atacattcattgcta

SEQ ID NO: 112454 - DNA, 15 bp, Homo sapiens
tatacattcattgct

SEQ ID NO: 112455 - DNA, 15 bp, Homo sapiens
ttatacattcattgc

SEQ ID NO: 112456 - DNA, 15 bp, Homo sapiens
gttatacattcattg

SEQ ID NO: 112457 - DNA, 15 bp, Homo sapiens
tgttatacattcatt

SEQ ID NO: 112458 - DNA, 15 bp, Homo sapiens
atgttatacattcat

SEQ ID NO: 112459 - DNA, 15 bp, Homo sapiens
gatgttatacattca

SEQ ID NO: 112460 - DNA, 15 bp, Homo sapiens
agatgttatacattc

SEQ ID NO: 112461 - DNA, 15 bp, Homo sapiens
tagatgttatacatt

SEQ ID NO: 112462 - DNA, 15 bp, Homo sapiens
atagatgttatacat

SEQ ID NO: 112463 - DNA, 15 bp, Homo sapiens
aatagatgttataca

SEQ ID NO: 112464 - DNA, 15 bp, Homo sapiens
taatagatgttatac

SEQ ID NO: 112465 - DNA, 15 bp, Homo sapiens
ctaatagatgttata

SEQ ID NO: 112466 - DNA, 15 bp, Homo sapiens
cctaatagatgttat

SEQ ID NO: 112467 - DNA, 15 bp, Homo sapiens
acctaatagatgtta

SEQ ID NO: 112468 - DNA, 15 bp, Homo sapiens
cacctaatagatgtt

SEQ ID NO: 112469 - DNA, 15 bp, Homo sapiens
acacctaatagatgt

SEQ ID NO: 112470 - DNA, 15 bp, Homo sapiens
cacacctaatagatg

SEQ ID NO: 112471 - DNA, 15 bp, Homo sapiens
acacacctaatagat

SEQ ID NO: 112472 - DNA, 15 bp, Homo sapiens
tacacacctaataga

SEQ ID NO: 112473 - DNA, 15 bp, Homo sapiens
atacacacctaatag

SEQ ID NO: 112474 - DNA, 15 bp, Homo sapiens
tatacacacctaata

SEQ ID NO: 112475 - DNA, 15 bp, Homo sapiens
ttatacacacctaat

SEQ ID NO: 112476 - DNA, 15 bp, Homo sapiens
attatacacacctaa

SEQ ID NO: 112477 - DNA, 15 bp, Homo sapiens
tattatacacaccta

SEQ ID NO: 112478 - DNA, 15 bp, Homo sapiens
ttattatacacacct

SEQ ID NO: 112479 - DNA, 15 bp, Homo sapiens
gttattatacacacc

SEQ ID NO: 112480 - DNA, 15 bp, Homo sapiens
agttattatacacac

SEQ ID NO: 112481 - DNA, 15 bp, Homo sapiens
gagttattatacaca

SEQ ID NO: 112482 - DNA, 15 bp, Homo sapiens
tgagttattatacac

SEQ ID NO: 112483 - DNA, 15 bp, Homo sapiens
ctgagttattataca

SEQ ID NO: 112484 - DNA, 15 bp, Homo sapiens
tctgagttattatac

SEQ ID NO: 112485 - DNA, 15 bp, Homo sapiens
ctctgagttattata

SEQ ID NO: 112486 - DNA, 15 bp, Homo sapiens
cctctgagttattat

SEQ ID NO: 112487 - DNA, 15 bp, Homo sapiens
tcctctgagttatta

SEQ ID NO: 112488 - DNA, 15 bp, Homo sapiens
ctcctctgagttatt

SEQ ID NO: 112489 - DNA, 15 bp, Homo sapiens
cctcctctgagttat

SEQ ID NO: 112490 - DNA, 15 bp, Homo sapiens
ccctcctctgagtta

SEQ ID NO: 112491 - DNA, 15 bp, Homo sapiens
accctcctctgagtt

SEQ ID NO: 112492 - DNA, 15 bp, Homo sapiens
aaccctcctctgagt

SEQ ID NO: 112493 - DNA, 15 bp, Homo sapiens
gaaccctcctctgag

SEQ ID NO: 112494 - DNA, 15 bp, Homo sapiens
tgaaccctcctctga

SEQ ID NO: 112495 - DNA, 15 bp, Homo sapiens
ctgaaccctcctctg

SEQ ID NO: 112496 - DNA, 15 bp, Homo sapiens
actgaaccctcctct

SEQ ID NO: 112497 - DNA, 15 bp, Homo sapiens
aactgaaccctcctc

SEQ ID NO: 112498 - DNA, 15 bp, Homo sapiens
taactgaaccctcct

SEQ ID NO: 112499 - DNA, 15 bp, Homo sapiens
ttaactgaaccctcc

SEQ ID NO: 112500 - DNA, 15 bp, Homo sapiens
attaactgaaccctc

SEQ ID NO: 112501 - DNA, 15 bp, Homo sapiens
aattaactgaaccct

SEQ ID NO: 112502 - DNA, 15 bp, Homo sapiens
aaattaactgaaccc

SEQ ID NO: 112503 - DNA, 15 bp, Homo sapiens
taaattaactgaacc

SEQ ID NO: 112504 - DNA, 15 bp, Homo sapiens
ctaaattaactgaac

SEQ ID NO: 112505 - DNA, 15 bp, Homo sapiens
cctaaattaactgaa

SEQ ID NO: 112506 - DNA, 15 bp, Homo sapiens
gcctaaattaactga

SEQ ID NO: 112507 - DNA, 15 bp, Homo sapiens
ggcctaaattaactg

SEQ ID NO: 112508 - DNA, 15 bp, Homo sapiens
gggcctaaattaact

SEQ ID NO: 112509 - DNA, 15 bp, Homo sapiens
agggcctaaattaac

SEQ ID NO: 112510 - DNA, 15 bp, Homo sapiens
tagggcctaaattaa

SEQ ID NO: 112511 - DNA, 15 bp, Homo sapiens
ttagggcctaaatta

SEQ ID NO: 112512 - DNA, 15 bp, Homo sapiens
attagggcctaaatt

SEQ ID NO: 112513 - DNA, 15 bp, Homo sapiens
gattagggcctaaat

SEQ ID NO: 112514 - DNA, 15 bp, Homo sapiens
tgattagggcctaaa

SEQ ID NO: 112515 - DNA, 15 bp, Homo sapiens
ctgattagggcctaa

SEQ ID NO: 112516 - DNA, 15 bp, Homo sapiens
tctgattagggccta

SEQ ID NO: 112517 - DNA, 15 bp, Homo sapiens
atctgattagggcct

SEQ ID NO: 112518 - DNA, 15 bp, Homo sapiens
aatctgattagggcc

SEQ ID NO: 112519 - DNA, 15 bp, Homo sapiens
aaatctgattagggc

SEQ ID NO: 112520 - DNA, 15 bp, Homo sapiens
gaaatctgattaggg

SEQ ID NO: 112521 - DNA, 15 bp, Homo sapiens
ggaaatctgattagg

SEQ ID NO: 112522 - DNA, 15 bp, Homo sapiens
tggaaatctgattag

SEQ ID NO: 112523 - DNA, 15 bp, Homo sapiens
gtggaaatctgatta

SEQ ID NO: 112524 - DNA, 15 bp, Homo sapiens
tgtggaaatctgatt

SEQ ID NO: 112525 - DNA, 15 bp, Homo sapiens
ttgtggaaatctgat

SEQ ID NO: 112526 - DNA, 15 bp, Homo sapiens
tttgtggaaatctga

SEQ ID NO: 112527 - DNA, 15 bp, Homo sapiens
atttgtggaaatctg

SEQ ID NO: 112528 - DNA, 15 bp, Homo sapiens
aatttgtggaaatct

SEQ ID NO: 112529 - DNA, 15 bp, Homo sapiens
gaatttgtggaaatc

SEQ ID NO: 112530 - DNA, 15 bp, Homo sapiens
agaatttgtggaaat

SEQ ID NO: 112531 - DNA, 15 bp, Homo sapiens
cagaatttgtggaaa

SEQ ID NO: 112532 - DNA, 15 bp, Homo sapiens
tcagaatttgtggaa

SEQ ID NO: 112533 - DNA, 15 bp, Homo sapiens
gtcagaatttgtgga

SEQ ID NO: 112534 - DNA, 15 bp, Homo sapiens
agtcagaatttgtgg

SEQ ID NO: 112535 - DNA, 15 bp, Homo sapiens
aagtcagaatttgtg

SEQ ID NO: 112536 - DNA, 15 bp, Homo sapiens
taagtcagaatttgt

SEQ ID NO: 112537 - DNA, 15 bp, Homo sapiens
ttaagtcagaatttg

SEQ ID NO: 112538 - DNA, 15 bp, Homo sapiens
attaagtcagaattt

SEQ ID NO: 112539 - DNA, 15 bp, Homo sapiens
tattaagtcagaatt

SEQ ID NO: 112540 - DNA, 15 bp, Homo sapiens
atattaagtcagaat

SEQ ID NO: 112541 - DNA, 15 bp, Homo sapiens
aatattaagtcagaa

SEQ ID NO: 112542 - DNA, 15 bp, Homo sapiens
aaatattaagtcaga

SEQ ID NO: 112543 - DNA, 15 bp, Homo sapiens
caaatattaagtcag

SEQ ID NO: 112544 - DNA, 15 bp, Homo sapiens
gcaaatattaagtca

SEQ ID NO: 112545 - DNA, 15 bp, Homo sapiens
ggcaaatattaagtc

SEQ ID NO: 112546 - DNA, 15 bp, Homo sapiens
gggcaaatattaagt

SEQ ID NO: 112547 - DNA, 15 bp, Homo sapiens
cgggcaaatattaag

SEQ ID NO: 112548 - DNA, 15 bp, Homo sapiens
gcgggcaaatattaa

SEQ ID NO: 112549 - DNA, 15 bp, Homo sapiens
agcgggcaaatatta

SEQ ID NO: 112550 - DNA, 15 bp, Homo sapiens
aagcgggcaaatatt

SEQ ID NO: 112551 - DNA, 15 bp, Homo sapiens
taagcgggcaaatat

SEQ ID NO: 112552 - DNA, 15 bp, Homo sapiens
ataagcgggcaaata

SEQ ID NO: 112553 - DNA, 15 bp, Homo sapiens
tataagcgggcaaat

SEQ ID NO: 112554 - DNA, 15 bp, Homo sapiens
atataagcgggcaaa

SEQ ID NO: 112555 - DNA, 15 bp, Homo sapiens
tatataagcgggcaa

SEQ ID NO: 112556 - DNA, 15 bp, Homo sapiens
ttatataagcgggca

SEQ ID NO: 112557 - DNA, 15 bp, Homo sapiens
gttatataagcgggc

SEQ ID NO: 112558 - DNA, 15 bp, Homo sapiens
tgttatataagcggg

SEQ ID NO: 112559 - DNA, 15 bp, Homo sapiens
ctgttatataagcgg

SEQ ID NO: 112560 - DNA, 15 bp, Homo sapiens
gctgttatataagcg

SEQ ID NO: 112561 - DNA, 15 bp, Homo sapiens
agctgttatataagc

SEQ ID NO: 112562 - DNA, 15 bp, Homo sapiens
gagctgttatataag

SEQ ID NO: 112563 - DNA, 15 bp, Homo sapiens
agagctgttatataa

SEQ ID NO: 112564 - DNA, 15 bp, Homo sapiens
aagagctgttatata

SEQ ID NO: 112565 - DNA, 15 bp, Homo sapiens
gaagagctgttatat

SEQ ID NO: 112566 - DNA, 15 bp, Homo sapiens
agaagagctgttata

SEQ ID NO: 112567 - DNA, 15 bp, Homo sapiens
aagaagagctgttat

SEQ ID NO: 112568 - DNA, 15 bp, Homo sapiens
aaagaagagctgtta

SEQ ID NO: 112569 - DNA, 15 bp, Homo sapiens
taaagaagagctgtt

SEQ ID NO: 112570 - DNA, 15 bp, Homo sapiens
ttaaagaagagctgt

SEQ ID NO: 112571 - DNA, 15 bp, Homo sapiens
gttaaagaagagctg

SEQ ID NO: 112572 - DNA, 15 bp, Homo sapiens
tgttaaagaagagct

SEQ ID NO: 112573 - DNA, 15 bp, Homo sapiens
ttgttaaagaagagc

SEQ ID NO: 112574 - DNA, 15 bp, Homo sapiens
tttgttaaagaagag

SEQ ID NO: 112575 - DNA, 15 bp, Homo sapiens
ttttgttaaagaaga

SEQ ID NO: 112576 - DNA, 15 bp, Homo sapiens
tttttgttaaagaag

SEQ ID NO: 112577 - DNA, 15 bp, Homo sapiens
gtttttgttaaagaa

SEQ ID NO: 112578 - DNA, 15 bp, Homo sapiens
tgtttttgttaaaga

SEQ ID NO: 112579 - DNA, 15 bp, Homo sapiens
ttgtttttgttaaag

SEQ ID NO: 112580 - DNA, 15 bp, Homo sapiens
cttgtttttgttaaa

SEQ ID NO: 112581 - DNA, 15 bp, Homo sapiens
acttgtttttgttaa

SEQ ID NO: 112582 - DNA, 15 bp, Homo sapiens
tacttgtttttgtta

SEQ ID NO: 112583 - DNA, 15 bp, Homo sapiens
gtacttgtttttgtt

SEQ ID NO: 112584 - DNA, 15 bp, Homo sapiens
agtacttgtttttgt

SEQ ID NO: 112585 - DNA, 15 bp, Homo sapiens
aagtacttgtttttg

SEQ ID NO: 112586 - DNA, 15 bp, Homo sapiens
aaagtacttgttttt

SEQ ID NO: 112587 - DNA, 15 bp, Homo sapiens
aaaagtacttgtttt

SEQ ID NO: 112588 - DNA, 15 bp, Homo sapiens
gaaaagtacttgttt

SEQ ID NO: 112589 - DNA, 15 bp, Homo sapiens
agaaaagtacttgtt

SEQ ID NO: 112590 - DNA, 15 bp, Homo sapiens
gagaaaagtacttgt

SEQ ID NO: 112591 - DNA, 15 bp, Homo sapiens
tgagaaaagtacttg

SEQ ID NO: 112592 - DNA, 15 bp, Homo sapiens
ttgagaaaagtactt

SEQ ID NO: 112593 - DNA, 15 bp, Homo sapiens
attgagaaaagtact

SEQ ID NO: 112594 - DNA, 15 bp, Homo sapiens
tattgagaaaagtac

SEQ ID NO: 112595 - DNA, 15 bp, Homo sapiens
ctattgagaaaagta

SEQ ID NO: 112596 - DNA, 15 bp, Homo sapiens
tctattgagaaaagt

SEQ ID NO: 112597 - DNA, 15 bp, Homo sapiens
ttctattgagaaaag

SEQ ID NO: 112598 - DNA, 15 bp, Homo sapiens
attctattgagaaaa

SEQ ID NO: 112599 - DNA, 15 bp, Homo sapiens
aattctattgagaaa

SEQ ID NO: 112600 - DNA, 15 bp, Homo sapiens
aaattctattgagaa

SEQ ID NO: 112601 - DNA, 15 bp, Homo sapiens
aaaattctattgaga

SEQ ID NO: 112602 - DNA, 15 bp, Homo sapiens
taaaattctattgag

SEQ ID NO: 112603 - DNA, 15 bp, Homo sapiens
gtaaaattctattga

SEQ ID NO: 112604 - DNA, 15 bp, Homo sapiens
agtaaaattctattg

SEQ ID NO: 112605 - DNA, 15 bp, Homo sapiens
tagtaaaattctatt

SEQ ID NO: 112606 - DNA, 15 bp, Homo sapiens
ttagtaaaattctat

SEQ ID NO: 112607 - DNA, 15 bp, Homo sapiens
cttagtaaaattcta

SEQ ID NO: 112608 - DNA, 15 bp, Homo sapiens
tcttagtaaaattct

SEQ ID NO: 112609 - DNA, 15 bp, Homo sapiens
ttcttagtaaaattc

SEQ ID NO: 112610 - DNA, 15 bp, Homo sapiens
tttcttagtaaaatt

SEQ ID NO: 112611 - DNA, 15 bp, Homo sapiens
ctttcttagtaaaat

SEQ ID NO: 112612 - DNA, 15 bp, Homo sapiens
gctttcttagtaaaa

SEQ ID NO: 112613 - DNA, 15 bp, Homo sapiens
agctttcttagtaaa

SEQ ID NO: 112614 - DNA, 15 bp, Homo sapiens
gagctttcttagtaa

SEQ ID NO: 112615 - DNA, 15 bp, Homo sapiens
agagctttcttagta

SEQ ID NO: 112616 - DNA, 15 bp, Homo sapiens
aagagctttcttagt

SEQ ID NO: 112617 - DNA, 15 bp, Homo sapiens
aaagagctttcttag

SEQ ID NO: 112618 - DNA, 15 bp, Homo sapiens
taaagagctttctta

SEQ ID NO: 112619 - DNA, 15 bp, Homo sapiens
ctaaagagctttctt

SEQ ID NO: 112620 - DNA, 15 bp, Homo sapiens
actaaagagctttct

SEQ ID NO: 112621 - DNA, 15 bp, Homo sapiens
tactaaagagctttc

SEQ ID NO: 112622 - DNA, 15 bp, Homo sapiens
ttactaaagagcttt

SEQ ID NO: 112623 - DNA, 15 bp, Homo sapiens
tttactaaagagctt

SEQ ID NO: 112624 - DNA, 15 bp, Homo sapiens
ttttactaaagagct

SEQ ID NO: 112625 - DNA, 15 bp, Homo sapiens
gttttactaaagagc

SEQ ID NO: 112626 - DNA, 15 bp, Homo sapiens
tgttttactaaagag

SEQ ID NO: 112627 - DNA, 15 bp, Homo sapiens
atgttttactaaaga

SEQ ID NO: 112628 - DNA, 15 bp, Homo sapiens
gatgttttactaaag

SEQ ID NO: 112629 - DNA, 15 bp, Homo sapiens
cgatgttttactaaa

SEQ ID NO: 112630 - DNA, 15 bp, Homo sapiens
tcgatgttttactaa

SEQ ID NO: 112631 - DNA, 15 bp, Homo sapiens
gtcgatgttttacta

SEQ ID NO: 112632 - DNA, 15 bp, Homo sapiens
tgtcgatgttttact

SEQ ID NO: 112633 - DNA, 15 bp, Homo sapiens
atgtcgatgttttac

SEQ ID NO: 112634 - DNA, 15 bp, Homo sapiens
aatgtcgatgtttta

SEQ ID NO: 112635 - DNA, 15 bp, Homo sapiens
taatgtcgatgtttt

SEQ ID NO: 112636 - DNA, 15 bp, Homo sapiens
ataatgtcgatgttt

SEQ ID NO: 112637 - DNA, 15 bp, Homo sapiens
tataatgtcgatgtt

SEQ ID NO: 112638 - DNA, 15 bp, Homo sapiens
gtataatgtcgatgt

SEQ ID NO: 112639 - DNA, 15 bp, Homo sapiens
tgtataatgtcgatg

SEQ ID NO: 112640 - DNA, 15 bp, Homo sapiens
atgtataatgtcgat

SEQ ID NO: 112641 - DNA, 15 bp, Homo sapiens
tatgtataatgtcga

SEQ ID NO: 112642 - DNA, 15 bp, Homo sapiens
gtatgtataatgtcg

SEQ ID NO: 112643 - DNA, 15 bp, Homo sapiens
tgtatgtataatgtc

SEQ ID NO: 112644 - DNA, 15 bp, Homo sapiens
ttgtatgtataatgt

SEQ ID NO: 112645 - DNA, 15 bp, Homo sapiens
gttgtatgtataatg

SEQ ID NO: 112646 - DNA, 15 bp, Homo sapiens
tgttgtatgtataat

SEQ ID NO: 112647 - DNA, 15 bp, Homo sapiens
atgttgtatgtataa

SEQ ID NO: 112648 - DNA, 15 bp, Homo sapiens
tatgttgtatgtata

SEQ ID NO: 112649 - DNA, 15 bp, Homo sapiens
atatgttgtatgtat

SEQ ID NO: 112650 - DNA, 15 bp, Homo sapiens
gatatgttgtatgta

SEQ ID NO: 112651 - DNA, 15 bp, Homo sapiens
agatatgttgtatgt

SEQ ID NO: 112652 - DNA, 15 bp, Homo sapiens
gagatatgttgtatg

SEQ ID NO: 112653 - DNA, 15 bp, Homo sapiens
tgagatatgttgtat

SEQ ID NO: 112654 - DNA, 15 bp, Homo sapiens
ctgagatatgttgta

SEQ ID NO: 112655 - DNA, 15 bp, Homo sapiens
actgagatatgttgt

SEQ ID NO: 112656 - DNA, 15 bp, Homo sapiens
tactgagatatgttg

SEQ ID NO: 112657 - DNA, 15 bp, Homo sapiens
atactgagatatgtt

SEQ ID NO: 112658 - DNA, 15 bp, Homo sapiens
gatactgagatatgt

SEQ ID NO: 112659 - DNA, 15 bp, Homo sapiens
agatactgagatatg

SEQ ID NO: 112660 - DNA, 15 bp, Homo sapiens
cagatactgagatat

SEQ ID NO: 112661 - DNA, 15 bp, Homo sapiens
gcagatactgagata

SEQ ID NO: 112662 - DNA, 15 bp, Homo sapiens
agcagatactgagat

SEQ ID NO: 112663 - DNA, 15 bp, Homo sapiens
cagcagatactgaga

SEQ ID NO: 112664 - DNA, 15 bp, Homo sapiens
tcagcagatactgag

SEQ ID NO: 112665 - DNA, 15 bp, Homo sapiens
atcagcagatactga

SEQ ID NO: 112666 - DNA, 15 bp, Homo sapiens
catcagcagatactg

SEQ ID NO: 112667 - DNA, 15 bp, Homo sapiens
tcatcagcagatact

SEQ ID NO: 112668 - DNA, 15 bp, Homo sapiens
ttcatcagcagatac

SEQ ID NO: 112669 - DNA, 15 bp, Homo sapiens
cttcatcagcagata

SEQ ID NO: 112670 - DNA, 15 bp, Homo sapiens
tcttcatcagcagat

SEQ ID NO: 112671 - DNA, 15 bp, Homo sapiens
ttcttcatcagcaga

SEQ ID NO: 112672 - DNA, 15 bp, Homo sapiens
gttcttcatcagcag

SEQ ID NO: 112673 - DNA, 15 bp, Homo sapiens
tgttcttcatcagca

SEQ ID NO: 112674 - DNA, 15 bp, Homo sapiens
gtgttcttcatcagc

SEQ ID NO: 112675 - DNA, 15 bp, Homo sapiens
ggtgttcttcatcag

SEQ ID NO: 112676 - DNA, 15 bp, Homo sapiens
tggtgttcttcatca

SEQ ID NO: 112677 - DNA, 15 bp, Homo sapiens
ttggtgttcttcatc

SEQ ID NO: 112678 - DNA, 15 bp, Homo sapiens
tttggtgttcttcat

SEQ ID NO: 112679 - DNA, 15 bp, Homo sapiens
ttttggtgttcttca

SEQ ID NO: 112680 - DNA, 15 bp, Homo sapiens
tttttggtgttcttc

SEQ ID NO: 112681 - DNA, 15 bp, Homo sapiens
ctttttggtgttctt

SEQ ID NO: 112682 - DNA, 15 bp, Homo sapiens
tctttttggtgttct

SEQ ID NO: 112683 - DNA, 15 bp, Homo sapiens
ttctttttggtgttc

SEQ ID NO: 112684 - DNA, 15 bp, Homo sapiens
gttctttttggtgtt

SEQ ID NO: 112685 - DNA, 15 bp, Homo sapiens
ggttctttttggtgt

SEQ ID NO: 112686 - DNA, 15 bp, Homo sapiens
gggttctttttggtg

SEQ ID NO: 112687 - DNA, 15 bp, Homo sapiens
tgggttctttttggt

SEQ ID NO: 112688 - DNA, 15 bp, Homo sapiens
ctgggttctttttgg

SEQ ID NO: 112689 - DNA, 15 bp, Homo sapiens
tctgggttctttttg

SEQ ID NO: 112690 - DNA, 15 bp, Homo sapiens
atctgggttcttttt

SEQ ID NO: 112691 - DNA, 15 bp, Homo sapiens
catctgggttctttt

SEQ ID NO: 112692 - DNA, 15 bp, Homo sapiens
acatctgggttcttt

SEQ ID NO: 112693 - DNA, 15 bp, Homo sapiens
cacatctgggttctt

SEQ ID NO: 112694 - DNA, 15 bp, Homo sapiens
tcacatctgggttct

SEQ ID NO: 112695 - DNA, 15 bp, Homo sapiens
gtcacatctgggttc

SEQ ID NO: 112696 - DNA, 15 bp, Homo sapiens
agtcacatctgggtt

SEQ ID NO: 112697 - DNA, 15 bp, Homo sapiens
cagtcacatctgggt

SEQ ID NO: 112698 - DNA, 15 bp, Homo sapiens
gcagtcacatctggg

SEQ ID NO: 112699 - DNA, 15 bp, Homo sapiens
agcagtcacatctgg

SEQ ID NO: 112700 - DNA, 15 bp, Homo sapiens
gagcagtcacatctg

SEQ ID NO: 112701 - DNA, 15 bp, Homo sapiens
ggagcagtcacatct

SEQ ID NO: 112702 - DNA, 15 bp, Homo sapiens
cggagcagtcacatc

SEQ ID NO: 112703 - DNA, 15 bp, Homo sapiens
ccggagcagtcacat

SEQ ID NO: 112704 - DNA, 15 bp, Homo sapiens
tccggagcagtcaca

SEQ ID NO: 112705 - DNA, 15 bp, Homo sapiens
ttccggagcagtcac

SEQ ID NO: 112706 - DNA, 15 bp, Homo sapiens
cttccggagcagtca

SEQ ID NO: 112707 - DNA, 15 bp, Homo sapiens
acttccggagcagtc

SEQ ID NO: 112708 - DNA, 15 bp, Homo sapiens
aacttccggagcagt

SEQ ID NO: 112709 - DNA, 15 bp, Homo sapiens
caacttccggagcag

SEQ ID NO: 112710 - DNA, 15 bp, Homo sapiens
tcaacttccggagca

SEQ ID NO: 112711 - DNA, 15 bp, Homo sapiens
ttcaacttccggagc

SEQ ID NO: 112712 - DNA, 15 bp, Homo sapiens
attcaacttccggag

SEQ ID NO: 112713 - DNA, 15 bp, Homo sapiens
gattcaacttccgga

SEQ ID NO: 112714 - DNA, 15 bp, Homo sapiens
ggattcaacttccgg

SEQ ID NO: 112715 - DNA, 15 bp, Homo sapiens
aggattcaacttccg

SEQ ID NO: 112716 - DNA, 15 bp, Homo sapiens
gaggattcaacttcc

SEQ ID NO: 112717 - DNA, 15 bp, Homo sapiens
tgaggattcaacttc

SEQ ID NO: 112718 - DNA, 15 bp, Homo sapiens
ctgaggattcaactt

SEQ ID NO: 112719 - DNA, 15 bp, Homo sapiens
actgaggattcaact

SEQ ID NO: 112720 - DNA, 15 bp, Homo sapiens
tactgaggattcaac

SEQ ID NO: 112721 - DNA, 15 bp, Homo sapiens
atactgaggattcaa

SEQ ID NO: 112722 - DNA, 15 bp, Homo sapiens
aatactgaggattca

SEQ ID NO: 112723 - DNA, 15 bp, Homo sapiens
aaatactgaggattc

SEQ ID NO: 112724 - DNA, 15 bp, Homo sapiens
aaaatactgaggatt

SEQ ID NO: 112725 - DNA, 15 bp, Homo sapiens
aaaaatactgaggat

SEQ ID NO: 112726 - DNA, 15 bp, Homo sapiens
caaaaatactgagga

SEQ ID NO: 112727 - DNA, 15 bp, Homo sapiens
gcaaaaatactgagg

SEQ ID NO: 112728 - DNA, 15 bp, Homo sapiens
tgcaaaaatactgag

SEQ ID NO: 112729 - DNA, 15 bp, Homo sapiens
ttgcaaaaatactga

SEQ ID NO: 112730 - DNA, 15 bp, Homo sapiens
tttgcaaaaatactg

SEQ ID NO: 112731 - DNA, 15 bp, Homo sapiens
ctttgcaaaaatact

SEQ ID NO: 112732 - DNA, 15 bp, Homo sapiens
actttgcaaaaatac

SEQ ID NO: 112733 - DNA, 15 bp, Homo sapiens
aactttgcaaaaata

SEQ ID NO: 112734 - DNA, 15 bp, Homo sapiens
aaactttgcaaaaat

SEQ ID NO: 112735 - DNA, 15 bp, Homo sapiens
caaactttgcaaaaa

SEQ ID NO: 112736 - DNA, 15 bp, Homo sapiens
acaaactttgcaaaa

SEQ ID NO: 112737 - DNA, 15 bp, Homo sapiens
gacaaactttgcaaa

SEQ ID NO: 112738 - DNA, 15 bp, Homo sapiens
agacaaactttgcaa

SEQ ID NO: 112739 - DNA, 15 bp, Homo sapiens
aagacaaactttgca

SEQ ID NO: 112740 - DNA, 15 bp, Homo sapiens
aaagacaaactttgc

SEQ ID NO: 112741 - DNA, 15 bp, Homo sapiens
gaaagacaaactttg

SEQ ID NO: 112742 - DNA, 15 bp, Homo sapiens
tgaaagacaaacttt

SEQ ID NO: 112743 - DNA, 15 bp, Homo sapiens
ctgaaagacaaactt

SEQ ID NO: 112744 - DNA, 15 bp, Homo sapiens
actgaaagacaaact

SEQ ID NO: 112745 - DNA, 15 bp, Homo sapiens
tactgaaagacaaac

SEQ ID NO: 112746 - DNA, 15 bp, Homo sapiens
atactgaaagacaaa

SEQ ID NO: 112747 - DNA, 15 bp, Homo sapiens
aatactgaaagacaa

SEQ ID NO: 112748 - DNA, 15 bp, Homo sapiens
aaatactgaaagaca

SEQ ID NO: 112749 - DNA, 15 bp, Homo sapiens
aaaatactgaaagac

SEQ ID NO: 112750 - DNA, 15 bp, Homo sapiens
taaaatactgaaaga

SEQ ID NO: 112751 - DNA, 15 bp, Homo sapiens
ataaaatactgaaag

SEQ ID NO: 112752 - DNA, 15 bp, Homo sapiens
aataaaatactgaaa

SEQ ID NO: 112753 - DNA, 15 bp, Homo sapiens
aaataaaatactgaa

SEQ ID NO: 112754 - DNA, 15 bp, Homo sapiens
caaataaaatactga

SEQ ID NO: 112755 - DNA, 15 bp, Homo sapiens
acaaataaaatactg

SEQ ID NO: 112756 - DNA, 15 bp, Homo sapiens
cacaaataaaatact

SEQ ID NO: 112757 - DNA, 15 bp, Homo sapiens
acacaaataaaatac

SEQ ID NO: 112758 - DNA, 15 bp, Homo sapiens
cacacaaataaaata

SEQ ID NO: 112759 - DNA, 15 bp, Homo sapiens
acacacaaataaaat

SEQ ID NO: 112760 - DNA, 15 bp, Homo sapiens
cacacacaaataaaa

SEQ ID NO: 112761 - DNA, 15 bp, Homo sapiens
acacacacaaataaa

SEQ ID NO: 112762 - DNA, 15 bp, Homo sapiens
cacacacacaaataa

SEQ ID NO: 112763 - DNA, 15 bp, Homo sapiens
acacacacacaaata

SEQ ID NO: 112764 - DNA, 15 bp, Homo sapiens
cacacacacacaaat

SEQ ID NO: 112765 - DNA, 15 bp, Homo sapiens
acacacacacacaaa

SEQ ID NO: 112766 - DNA, 15 bp, Homo sapiens
gacacacacacacac

SEQ ID NO: 112767 - DNA, 15 bp, Homo sapiens
agacacacacacaca

SEQ ID NO: 112768 - DNA, 15 bp, Homo sapiens
tagacacacacacac

SEQ ID NO: 112769 - DNA, 15 bp, Homo sapiens
atagacacacacaca

SEQ ID NO: 112770 - DNA, 15 bp, Homo sapiens
tatagacacacacac

SEQ ID NO: 112771 - DNA, 15 bp, Homo sapiens
atatagacacacaca

SEQ ID NO: 112772 - DNA, 15 bp, Homo sapiens
tatatagacacacac

SEQ ID NO: 112773 - DNA, 15 bp, Homo sapiens
atatatagacacaca

SEQ ID NO: 112774 - DNA, 15 bp, Homo sapiens
tatatatagacacac

SEQ ID NO: 112775 - DNA, 15 bp, Homo sapiens
atatatatagacaca

SEQ ID NO: 112776 - DNA, 15 bp, Homo sapiens
tatatatatagacac

SEQ ID NO: 112777 - DNA, 15 bp, Homo sapiens
atatatatatagaca

SEQ ID NO: 112778 - DNA, 15 bp, Homo sapiens
tatatatatatagac

SEQ ID NO: 112779 - DNA, 15 bp, Homo sapiens
atatatatatataga

SEQ ID NO: 112780 - DNA, 15 bp, Homo sapiens
tatatatatatatag

SEQ ID NO: 112781 - DNA, 15 bp, Homo sapiens
aatatatatatatat

SEQ ID NO: 112782 - DNA, 15 bp, Homo sapiens
aaatatatatatata

SEQ ID NO: 112783 - DNA, 15 bp, Homo sapiens
aaaatatatatatat

SEQ ID NO: 112784 - DNA, 15 bp, Homo sapiens
aaaaatatatatata

SEQ ID NO: 112785 - DNA, 15 bp, Homo sapiens
aaaaaatatatatat

SEQ ID NO: 112786 - DNA, 15 bp, Homo sapiens
aaaaaaatatatata

SEQ ID NO: 112787 - DNA, 15 bp, Homo sapiens
aaaaaaaatatatat

SEQ ID NO: 112788 - DNA, 15 bp, Homo sapiens
aaaaaaaaatatata

SEQ ID NO: 112789 - DNA, 15 bp, Homo sapiens
aaaaaaaaaatatat

SEQ ID NO: 112790 - DNA, 15 bp, Homo sapiens
aaaaaaaaaaatata

SEQ ID NO: 112791 - DNA, 15 bp, Homo sapiens
aaaaaaaaaaaatat

SEQ ID NO: 112792 - DNA, 15 bp, Homo sapiens
aaaaaaaaaaaaata

SEQ ID NO: 112793 - DNA, 15 bp, Homo sapiens
taaaaaaaaaaaaat

SEQ ID NO: 112794 - DNA, 15 bp, Homo sapiens
ttaaaaaaaaaaaaa

SEQ ID NO: 112795 - DNA, 15 bp, Homo sapiens
tttaaaaaaaaaaaa

SEQ ID NO: 112796 - DNA, 15 bp, Homo sapiens
ctttaaaaaaaaaaa

SEQ ID NO: 112797 - DNA, 15 bp, Homo sapiens
tctttaaaaaaaaaa

SEQ ID NO: 112798 - DNA, 15 bp, Homo sapiens
gtctttaaaaaaaaa

SEQ ID NO: 112799 - DNA, 15 bp, Homo sapiens
tgtctttaaaaaaaa

SEQ ID NO: 112800 - DNA, 15 bp, Homo sapiens
ctgtctttaaaaaaa

SEQ ID NO: 112801 - DNA, 15 bp, Homo sapiens
cctgtctttaaaaaa

SEQ ID NO: 112802 - DNA, 15 bp, Homo sapiens
tcctgtctttaaaaa

SEQ ID NO: 112803 - DNA, 15 bp, Homo sapiens
atcctgtctttaaaa

SEQ ID NO: 112804 - DNA, 15 bp, Homo sapiens
gatcctgtctttaaa

SEQ ID NO: 112805 - DNA, 15 bp, Homo sapiens
agatcctgtctttaa

SEQ ID NO: 112806 - DNA, 15 bp, Homo sapiens
gagatcctgtcttta

SEQ ID NO: 112807 - DNA, 15 bp, Homo sapiens
tgagatcctgtcttt

SEQ ID NO: 112808 - DNA, 15 bp, Homo sapiens
gtgagatcctgtctt

SEQ ID NO: 112809 - DNA, 15 bp, Homo sapiens
agtgagatcctgtct

SEQ ID NO: 112810 - DNA, 15 bp, Homo sapiens
gagtgagatcctgtc

SEQ ID NO: 112811 - DNA, 15 bp, Homo sapiens
agagtgagatcctgt

SEQ ID NO: 112812 - DNA, 15 bp, Homo sapiens
cagagtgagatcctg

SEQ ID NO: 112813 - DNA, 15 bp, Homo sapiens
acagagtgagatcct

SEQ ID NO: 112814 - DNA, 15 bp, Homo sapiens
gacagagtgagatcc

SEQ ID NO: 112815 - DNA, 15 bp, Homo sapiens
tgacagagtgagatc

SEQ ID NO: 112816 - DNA, 15 bp, Homo sapiens
gtgacagagtgagat

SEQ ID NO: 112817 - DNA, 15 bp, Homo sapiens
ggtgacagagtgaga

SEQ ID NO: 112818 - DNA, 15 bp, Homo sapiens
aggtgacagagtgag

SEQ ID NO: 112819 - DNA, 15 bp, Homo sapiens
taggtgacagagtga

SEQ ID NO: 112820 - DNA, 15 bp, Homo sapiens
ctaggtgacagagtg

SEQ ID NO: 112821 - DNA, 15 bp, Homo sapiens
cctaggtgacagagt

SEQ ID NO: 112822 - DNA, 15 bp, Homo sapiens
gcctaggtgacagag

SEQ ID NO: 112823 - DNA, 15 bp, Homo sapiens
agcctaggtgacaga

SEQ ID NO: 112824 - DNA, 15 bp, Homo sapiens
cagcctaggtgacag

SEQ ID NO: 112825 - DNA, 15 bp, Homo sapiens
ccagcctaggtgaca

SEQ ID NO: 112826 - DNA, 15 bp, Homo sapiens
tccagcctaggtgac

SEQ ID NO: 112827 - DNA, 15 bp, Homo sapiens
ctccagcctaggtga

SEQ ID NO: 112828 - DNA, 15 bp, Homo sapiens
actccagcctaggtg

SEQ ID NO: 112829 - DNA, 15 bp, Homo sapiens
cactccagcctaggt

SEQ ID NO: 112830 - DNA, 15 bp, Homo sapiens
gcactccagcctagg

SEQ ID NO: 112831 - DNA, 15 bp, Homo sapiens
tgcactccagcctag

SEQ ID NO: 112832 - DNA, 15 bp, Homo sapiens
ctgcactccagccta

SEQ ID NO: 112833 - DNA, 15 bp, Homo sapiens
actgcactccagcct

SEQ ID NO: 112834 - DNA, 15 bp, Homo sapiens
gccactgcactccag

SEQ ID NO: 112835 - DNA, 15 bp, Homo sapiens
tgccactgcactcca

SEQ ID NO: 112836 - DNA, 15 bp, Homo sapiens
atgccactgcactcc

SEQ ID NO: 112837 - DNA, 15 bp, Homo sapiens
catgccactgcactc

SEQ ID NO: 112838 - DNA, 15 bp, Homo sapiens
tcatgccactgcact

SEQ ID NO: 112839 - DNA, 15 bp, Homo sapiens
atcatgccactgcac

SEQ ID NO: 112840 - DNA, 15 bp, Homo sapiens
gatcatgccactgca

SEQ ID NO: 112841 - DNA, 15 bp, Homo sapiens
tgatcatgccactgc

SEQ ID NO: 112842 - DNA, 15 bp, Homo sapiens
atgatcatgccactg

SEQ ID NO: 112843 - DNA, 15 bp, Homo sapiens
catgatcatgccact

SEQ ID NO: 112844 - DNA, 15 bp, Homo sapiens
ccatgatcatgccac

SEQ ID NO: 112845 - DNA, 15 bp, Homo sapiens
gccatgatcatgcca

SEQ ID NO: 112846 - DNA, 15 bp, Homo sapiens
agccatgatcatgcc

SEQ ID NO: 112847 - DNA, 15 bp, Homo sapiens
gagccatgatcatgc

SEQ ID NO: 112848 - DNA, 15 bp, Homo sapiens
tgagccatgatcatg

SEQ ID NO: 112849 - DNA, 15 bp, Homo sapiens
gtgagccatgatcat

SEQ ID NO: 112850 - DNA, 15 bp, Homo sapiens
agtgagccatgatca

SEQ ID NO: 112851 - DNA, 15 bp, Homo sapiens
cagtgagccatgatc

SEQ ID NO: 112852 - DNA, 15 bp, Homo sapiens
acagtgagccatgat

SEQ ID NO: 112853 - DNA, 15 bp, Homo sapiens
tacagtgagccatga

SEQ ID NO: 112854 - DNA, 15 bp, Homo sapiens
ttacagtgagccatg

SEQ ID NO: 112855 - DNA, 15 bp, Homo sapiens
gttacagtgagccat

SEQ ID NO: 112856 - DNA, 15 bp, Homo sapiens
ggttacagtgagcca

SEQ ID NO: 112857 - DNA, 15 bp, Homo sapiens
aggttacagtgagcc

SEQ ID NO: 112858 - DNA, 15 bp, Homo sapiens
aaggttacagtgagc

SEQ ID NO: 112859 - DNA, 15 bp, Homo sapiens
caaggttacagtgag

SEQ ID NO: 112860 - DNA, 15 bp, Homo sapiens
tcaaggttacagtga

SEQ ID NO: 112861 - DNA, 15 bp, Homo sapiens
ttcaaggttacagtg

SEQ ID NO: 112862 - DNA, 15 bp, Homo sapiens
gttcaaggttacagt

SEQ ID NO: 112863 - DNA, 15 bp, Homo sapiens
agttcaaggttacag

SEQ ID NO: 112864 - DNA, 15 bp, Homo sapiens
gagttcaaggttaca

SEQ ID NO: 112865 - DNA, 15 bp, Homo sapiens
ggagttcaaggttac

SEQ ID NO: 112866 - DNA, 15 bp, Homo sapiens
aggagttcaaggtta

SEQ ID NO: 112867 - DNA, 15 bp, Homo sapiens
caggagttcaaggtt

SEQ ID NO: 112868 - DNA, 15 bp, Homo sapiens
tcaggagttcaaggt

SEQ ID NO: 112869 - DNA, 15 bp, Homo sapiens
ctcaggagttcaagg

SEQ ID NO: 112870 - DNA, 15 bp, Homo sapiens
gctcaggagttcaag

SEQ ID NO: 112871 - DNA, 15 bp, Homo sapiens
agctcaggagttcaa

SEQ ID NO: 112872 - DNA, 15 bp, Homo sapiens
aagctcaggagttca

SEQ ID NO: 112873 - DNA, 15 bp, Homo sapiens
caagctcaggagttc

SEQ ID NO: 112874 - DNA, 15 bp, Homo sapiens
tcaagctcaggagtt

SEQ ID NO: 112875 - DNA, 15 bp, Homo sapiens
ctcaagctcaggagt

SEQ ID NO: 112876 - DNA, 15 bp, Homo sapiens
gctcaagctcaggag

SEQ ID NO: 112877 - DNA, 15 bp, Homo sapiens
agctcaagctcagga

SEQ ID NO: 112878 - DNA, 15 bp, Homo sapiens
tagctcaagctcagg

SEQ ID NO: 112879 - DNA, 15 bp, Homo sapiens
atagctcaagctcag

SEQ ID NO: 112880 - DNA, 15 bp, Homo sapiens
gatagctcaagctca

SEQ ID NO: 112881 - DNA, 15 bp, Homo sapiens
ggatagctcaagctc

SEQ ID NO: 112882 - DNA, 15 bp, Homo sapiens
aggatagctcaagct

SEQ ID NO: 112883 - DNA, 15 bp, Homo sapiens
gaggatagctcaagc

SEQ ID NO: 112884 - DNA, 15 bp, Homo sapiens
ggaggatagctcaag

SEQ ID NO: 112885 - DNA, 15 bp, Homo sapiens
gggaggatagctcaa

SEQ ID NO: 112886 - DNA, 15 bp, Homo sapiens
tgggaggatagctca

SEQ ID NO: 112887 - DNA, 15 bp, Homo sapiens
gtgggaggatagctc

SEQ ID NO: 112888 - DNA, 15 bp, Homo sapiens
ggtgggaggatagct

SEQ ID NO: 112889 - DNA, 15 bp, Homo sapiens
aggtgggaggatagc

SEQ ID NO: 112890 - DNA, 15 bp, Homo sapiens
gaggtgggaggatag

SEQ ID NO: 112891 - DNA, 15 bp, Homo sapiens
tgaggtgggaggata

SEQ ID NO: 112892 - DNA, 15 bp, Homo sapiens
ctgaggtgggaggat

SEQ ID NO: 112893 - DNA, 15 bp, Homo sapiens
gctgaggtgggagga

SEQ ID NO: 112894 - DNA, 15 bp, Homo sapiens
ggctgaggtgggagg

SEQ ID NO: 112895 - DNA, 15 bp, Homo sapiens
aggctgaggtgggag

SEQ ID NO: 112896 - DNA, 15 bp, Homo sapiens
gaggctgaggtggga

SEQ ID NO: 112897 - DNA, 15 bp, Homo sapiens
ggaggctgaggtggg

SEQ ID NO: 112898 - DNA, 15 bp, Homo sapiens
gggaggctgaggtgg

SEQ ID NO: 112899 - DNA, 15 bp, Homo sapiens
cgggaggctgaggtg

SEQ ID NO: 112900 - DNA, 15 bp, Homo sapiens
tcgggaggctgaggt

SEQ ID NO: 112901 - DNA, 15 bp, Homo sapiens
ctcgggaggctgagg

SEQ ID NO: 112902 - DNA, 15 bp, Homo sapiens
actcgggaggctgag

SEQ ID NO: 112903 - DNA, 15 bp, Homo sapiens
tactcgggaggctga

SEQ ID NO: 112904 - DNA, 15 bp, Homo sapiens
ctactcgggaggctg

SEQ ID NO: 112905 - DNA, 15 bp, Homo sapiens
gctactcgggaggct

SEQ ID NO: 112906 - DNA, 15 bp, Homo sapiens
agctactcgggaggc

SEQ ID NO: 112907 - DNA, 15 bp, Homo sapiens
cagctactcgggagg

SEQ ID NO: 112908 - DNA, 15 bp, Homo sapiens
ccagctactcgggag

SEQ ID NO: 112909 - DNA, 15 bp, Homo sapiens
cccagctactcggga

SEQ ID NO: 112910 - DNA, 15 bp, Homo sapiens
tcccagctactcggg

SEQ ID NO: 112911 - DNA, 15 bp, Homo sapiens
gtcccagctactcgg

SEQ ID NO: 112912 - DNA, 15 bp, Homo sapiens
agtcccagctactcg

SEQ ID NO: 112913 - DNA, 15 bp, Homo sapiens
tagtcccagctactc

SEQ ID NO: 112914 - DNA, 15 bp, Homo sapiens
atagtcccagctact

SEQ ID NO: 112915 - DNA, 15 bp, Homo sapiens
tatagtcccagctac

SEQ ID NO: 112916 - DNA, 15 bp, Homo sapiens
ctatagtcccagcta

SEQ ID NO: 112917 - DNA, 15 bp, Homo sapiens
cctatagtcccagct

SEQ ID NO: 112918 - DNA, 15 bp, Homo sapiens
gcctatagtcccagc

SEQ ID NO: 112919 - DNA, 15 bp, Homo sapiens
tgcctatagtcccag

SEQ ID NO: 112920 - DNA, 15 bp, Homo sapiens
gtgcctatagtccca

SEQ ID NO: 112921 - DNA, 15 bp, Homo sapiens
tgtgcctatagtccc

SEQ ID NO: 112922 - DNA, 15 bp, Homo sapiens
atgtgcctatagtcc

SEQ ID NO: 112923 - DNA, 15 bp, Homo sapiens
tatgtgcctatagtc

SEQ ID NO: 112924 - DNA, 15 bp, Homo sapiens
gtatgtgcctatagt

SEQ ID NO: 112925 - DNA, 15 bp, Homo sapiens
ggtatgtgcctatag

SEQ ID NO: 112926 - DNA, 15 bp, Homo sapiens
tggtatgtgcctata

SEQ ID NO: 112927 - DNA, 15 bp, Homo sapiens
gtggtatgtgcctat

SEQ ID NO: 112928 - DNA, 15 bp, Homo sapiens
agtggtatgtgccta

SEQ ID NO: 112929 - DNA, 15 bp, Homo sapiens
cagtggtatgtgcct

SEQ ID NO: 112930 - DNA, 15 bp, Homo sapiens
gcagtggtatgtgcc

SEQ ID NO: 112931 - DNA, 15 bp, Homo sapiens
tgcagtggtatgtgc

SEQ ID NO: 112932 - DNA, 15 bp, Homo sapiens
gtgcagtggtatgtg

SEQ ID NO: 112933 - DNA, 15 bp, Homo sapiens
ggtgcagtggtatgt

SEQ ID NO: 112934 - DNA, 15 bp, Homo sapiens
aggtgcagtggtatg

SEQ ID NO: 112935 - DNA, 15 bp, Homo sapiens
taggtgcagtggtat

SEQ ID NO: 112936 - DNA, 15 bp, Homo sapiens
ttaggtgcagtggta

SEQ ID NO: 112937 - DNA, 15 bp, Homo sapiens
attaggtgcagtggt

SEQ ID NO: 112938 - DNA, 15 bp, Homo sapiens
aattaggtgcagtgg

SEQ ID NO: 112939 - DNA, 15 bp, Homo sapiens
aaattaggtgcagtg

SEQ ID NO: 112940 - DNA, 15 bp, Homo sapiens
aaaattaggtgcagt

SEQ ID NO: 112941 - DNA, 15 bp, Homo sapiens
aaaaattaggtgcag

SEQ ID NO: 112942 - DNA, 15 bp, Homo sapiens
aaaaaattaggtgca

SEQ ID NO: 112943 - DNA, 15 bp, Homo sapiens
aaaaaaattaggtgc

SEQ ID NO: 112944 - DNA, 15 bp, Homo sapiens
aaaaaaaattaggtg

SEQ ID NO: 112945 - DNA, 15 bp, Homo sapiens
aaaaaaaaattaggt

SEQ ID NO: 112946 - DNA, 15 bp, Homo sapiens
aaaaaaaaaattagg

SEQ ID NO: 112947 - DNA, 15 bp, Homo sapiens
aaaaaaaaaaattag

SEQ ID NO: 112948 - DNA, 15 bp, Homo sapiens
aaaaaaaaaaaatta

SEQ ID NO: 112949 - DNA, 15 bp, Homo sapiens
aaaaaaaaaaaaatt

SEQ ID NO: 112950 - DNA, 15 bp, Homo sapiens
aaaaaaaaaaaaaat

SEQ ID NO: 112951 - DNA, 15 bp, Homo sapiens
taaaaaaaaaaaaaa

SEQ ID NO: 112952 - DNA, 15 bp, Homo sapiens
attaaaaaaaaaaaa

SEQ ID NO: 112953 - DNA, 15 bp, Homo sapiens
tattaaaaaaaaaaa

SEQ ID NO: 112954 - DNA, 15 bp, Homo sapiens
ttattaaaaaaaaaa

SEQ ID NO: 112955 - DNA, 15 bp, Homo sapiens
attattaaaaaaaaa

SEQ ID NO: 112956 - DNA, 15 bp, Homo sapiens
aattattaaaaaaaa

SEQ ID NO: 112957 - DNA, 15 bp, Homo sapiens
aaattattaaaaaaa

SEQ ID NO: 112958 - DNA, 15 bp, Homo sapiens
caaattattaaaaaa

SEQ ID NO: 112959 - DNA, 15 bp, Homo sapiens
acaaattattaaaaa

SEQ ID NO: 112960 - DNA, 15 bp, Homo sapiens
aacaaattattaaaa

SEQ ID NO: 112961 - DNA, 15 bp, Homo sapiens
caacaaattattaaa

SEQ ID NO: 112962 - DNA, 15 bp, Homo sapiens
acaacaaattattaa

SEQ ID NO: 112963 - DNA, 15 bp, Homo sapiens
tacaacaaattatta

SEQ ID NO: 112964 - DNA, 15 bp, Homo sapiens
ttacaacaaattatt

SEQ ID NO: 112965 - DNA, 15 bp, Homo sapiens
tttacaacaaattat

SEQ ID NO: 112966 - DNA, 15 bp, Homo sapiens
ctttacaacaaatta

SEQ ID NO: 112967 - DNA, 15 bp, Homo sapiens
tctttacaacaaatt

SEQ ID NO: 112968 - DNA, 15 bp, Homo sapiens
atctttacaacaaat

SEQ ID NO: 112969 - DNA, 15 bp, Homo sapiens
gatctttacaacaaa

SEQ ID NO: 112970 - DNA, 15 bp, Homo sapiens
tgatctttacaacaa

SEQ ID NO: 112971 - DNA, 15 bp, Homo sapiens
ctgatctttacaaca

SEQ ID NO: 112972 - DNA, 15 bp, Homo sapiens
cctgatctttacaac

SEQ ID NO: 112973 - DNA, 15 bp, Homo sapiens
acctgatctttacaa

SEQ ID NO: 112974 - DNA, 15 bp, Homo sapiens
gacctgatctttaca

SEQ ID NO: 112975 - DNA, 15 bp, Homo sapiens
agacctgatctttac

SEQ ID NO: 112976 - DNA, 15 bp, Homo sapiens
aagacctgatcttta

SEQ ID NO: 112977 - DNA, 15 bp, Homo sapiens
taagacctgatcttt

SEQ ID NO: 112978 - DNA, 15 bp, Homo sapiens
gtaagacctgatctt

SEQ ID NO: 112979 - DNA, 15 bp, Homo sapiens
ggtaagacctgatct

SEQ ID NO: 112980 - DNA, 15 bp, Homo sapiens
aggtaagacctgatc

SEQ ID NO: 112981 - DNA, 15 bp, Homo sapiens
aaggtaagacctgat

SEQ ID NO: 112982 - DNA, 15 bp, Homo sapiens
caaggtaagacctga

SEQ ID NO: 112983 - DNA, 15 bp, Homo sapiens
acaaggtaagacctg

SEQ ID NO: 112984 - DNA, 15 bp, Homo sapiens
aacaaggtaagacct

SEQ ID NO: 112985 - DNA, 15 bp, Homo sapiens
caacaaggtaagacc

SEQ ID NO: 112986 - DNA, 15 bp, Homo sapiens
gcaacaaggtaagac

SEQ ID NO: 112987 - DNA, 15 bp, Homo sapiens
ggcaacaaggtaaga

SEQ ID NO: 112988 - DNA, 15 bp, Homo sapiens
gggcaacaaggtaag

SEQ ID NO: 112989 - DNA, 15 bp, Homo sapiens
tgggcaacaaggtaa

SEQ ID NO: 112990 - DNA, 15 bp, Homo sapiens
ctgggcaacaaggta

SEQ ID NO: 112991 - DNA, 15 bp, Homo sapiens
cctgggcaacaaggt

SEQ ID NO: 112992 - DNA, 15 bp, Homo sapiens
gcctgggcaacaagg

SEQ ID NO: 112993 - DNA, 15 bp, Homo sapiens
agcctgggcaacaag

SEQ ID NO: 112994 - DNA, 15 bp, Homo sapiens
cagcctgggcaacaa

SEQ ID NO: 112995 - DNA, 15 bp, Homo sapiens
gcagcctgggcaaca

SEQ ID NO: 112996 - DNA, 15 bp, Homo sapiens
agcagcctgggcaac

SEQ ID NO: 112997 - DNA, 15 bp, Homo sapiens
gagcagcctgggcaa

SEQ ID NO: 112998 - DNA, 15 bp, Homo sapiens
agagcagcctgggca

SEQ ID NO: 112999 - DNA, 15 bp, Homo sapiens
aagagcagcctgggc

SEQ ID NO: 113000 - DNA, 15 bp, Homo sapiens
caagagcagcctggg

SEQ ID NO: 113001 - DNA, 15 bp, Homo sapiens
tcaagagcagcctgg

SEQ ID NO: 113002 - DNA, 15 bp, Homo sapiens
ttcaagagcagcctg

SEQ ID NO: 113003 - DNA, 15 bp, Homo sapiens
cttcaagagcagcct

SEQ ID NO: 113004 - DNA, 15 bp, Homo sapiens
acttcaagagcagcc

SEQ ID NO: 113005 - DNA, 15 bp, Homo sapiens
gacttcaagagcagc

SEQ ID NO: 113006 - DNA, 15 bp, Homo sapiens
ggacttcaagagcag

SEQ ID NO: 113007 - DNA, 15 bp, Homo sapiens
aggacttcaagagca

SEQ ID NO: 113008 - DNA, 15 bp, Homo sapiens
caggacttcaagagc

SEQ ID NO: 113009 - DNA, 15 bp, Homo sapiens
ccaggacttcaagag

SEQ ID NO: 113010 - DNA, 15 bp, Homo sapiens
gccaggacttcaaga

SEQ ID NO: 113011 - DNA, 15 bp, Homo sapiens
ggccaggacttcaag

SEQ ID NO: 113012 - DNA, 15 bp, Homo sapiens
aggccaggacttcaa

SEQ ID NO: 113013 - DNA, 15 bp, Homo sapiens
caggccaggacttca

SEQ ID NO: 113014 - DNA, 15 bp, Homo sapiens
tcaggccaggacttc

SEQ ID NO: 113015 - DNA, 15 bp, Homo sapiens
ttcaggccaggactt

SEQ ID NO: 113016 - DNA, 15 bp, Homo sapiens
cttcaggccaggact

SEQ ID NO: 113017 - DNA, 15 bp, Homo sapiens
gcttcaggccaggac

SEQ ID NO: 113018 - DNA, 15 bp, Homo sapiens
tgcttcaggccagga

SEQ ID NO: 113019 - DNA, 15 bp, Homo sapiens
ctgcttcaggccagg

SEQ ID NO: 113020 - DNA, 15 bp, Homo sapiens
actgcttcaggccag

SEQ ID NO: 113021 - DNA, 15 bp, Homo sapiens
cactgcttcaggcca

SEQ ID NO: 113022 - DNA, 15 bp, Homo sapiens
gcactgcttcaggcc

SEQ ID NO: 113023 - DNA, 15 bp, Homo sapiens
agcactgcttcaggc

SEQ ID NO: 113024 - DNA, 15 bp, Homo sapiens
gagcactgcttcagg

SEQ ID NO: 113025 - DNA, 15 bp, Homo sapiens
ggagcactgcttcag

SEQ ID NO: 113026 - DNA, 15 bp, Homo sapiens
gggagcactgcttca

SEQ ID NO: 113027 - DNA, 15 bp, Homo sapiens
tgggagcactgcttc

SEQ ID NO: 113028 - DNA, 15 bp, Homo sapiens
gtgggagcactgctt

SEQ ID NO: 113029 - DNA, 15 bp, Homo sapiens
ggtgggagcactgct

SEQ ID NO: 113030 - DNA, 15 bp, Homo sapiens
aggtgggagcactgc

SEQ ID NO: 113031 - DNA, 15 bp, Homo sapiens
gaggtgggagcactg

SEQ ID NO: 113032 - DNA, 15 bp, Homo sapiens
tgaggtgggagcact

SEQ ID NO: 113033 - DNA, 15 bp, Homo sapiens
ctgaggtgggagcac

SEQ ID NO: 113034 - DNA, 15 bp, Homo sapiens
gctgaggtgggagca

SEQ ID NO: 113035 - DNA, 15 bp, Homo sapiens
ggctgaggtgggagc

SEQ ID NO: 113036 - DNA, 15 bp, Homo sapiens
tgggaggctgaggtg

SEQ ID NO: 113037 - DNA, 15 bp, Homo sapiens
ttgggaggctgaggt

SEQ ID NO: 113038 - DNA, 15 bp, Homo sapiens
tttgggaggctgagg

SEQ ID NO: 113039 - DNA, 15 bp, Homo sapiens
ctttgggaggctgag

SEQ ID NO: 113040 - DNA, 15 bp, Homo sapiens
gctttgggaggctga

SEQ ID NO: 113041 - DNA, 15 bp, Homo sapiens
agctttgggaggctg

SEQ ID NO: 113042 - DNA, 15 bp, Homo sapiens
gagctttgggaggct

SEQ ID NO: 113043 - DNA, 15 bp, Homo sapiens
agagctttgggaggc

SEQ ID NO: 113044 - DNA, 15 bp, Homo sapiens
cagagctttgggagg

SEQ ID NO: 113045 - DNA, 15 bp, Homo sapiens
ccagagctttgggag

SEQ ID NO: 113046 - DNA, 15 bp, Homo sapiens
cccagagctttggga

SEQ ID NO: 113047 - DNA, 15 bp, Homo sapiens
tcccagagctttggg

SEQ ID NO: 113048 - DNA, 15 bp, Homo sapiens
atcccagagctttgg

SEQ ID NO: 113049 - DNA, 15 bp, Homo sapiens
aatcccagagctttg

SEQ ID NO: 113050 - DNA, 15 bp, Homo sapiens
taatcccagagcttt

SEQ ID NO: 113051 - DNA, 15 bp, Homo sapiens
ataatcccagagctt

SEQ ID NO: 113052 - DNA, 15 bp, Homo sapiens
tataatcccagagct

SEQ ID NO: 113053 - DNA, 15 bp, Homo sapiens
ctataatcccagagc

SEQ ID NO: 113054 - DNA, 15 bp, Homo sapiens
cctataatcccagag

SEQ ID NO: 113055 - DNA, 15 bp, Homo sapiens
gcctataatcccaga

SEQ ID NO: 113056 - DNA, 15 bp, Homo sapiens
agcctataatcccag

SEQ ID NO: 113057 - DNA, 15 bp, Homo sapiens
aagcctataatccca

SEQ ID NO: 113058 - DNA, 15 bp, Homo sapiens
caagcctataatccc

SEQ ID NO: 113059 - DNA, 15 bp, Homo sapiens
tcaagcctataatcc

SEQ ID NO: 113060 - DNA, 15 bp, Homo sapiens
ctcaagcctataatc

SEQ ID NO: 113061 - DNA, 15 bp, Homo sapiens
gctcaagcctataat

SEQ ID NO: 113062 - DNA, 15 bp, Homo sapiens
ggctcaagcctataa

SEQ ID NO: 113063 - DNA, 15 bp, Homo sapiens
tggctcaagcctata

SEQ ID NO: 113064 - DNA, 15 bp, Homo sapiens
gtggctcaagcctat

SEQ ID NO: 113065 - DNA, 15 bp, Homo sapiens
ggtggctcaagccta

SEQ ID NO: 113066 - DNA, 15 bp, Homo sapiens
cggtggctcaagcct

SEQ ID NO: 113067 - DNA, 15 bp, Homo sapiens
gcggtggctcaagcc

SEQ ID NO: 113068 - DNA, 15 bp, Homo sapiens
tgcggtggctcaagc

SEQ ID NO: 113069 - DNA, 15 bp, Homo sapiens
atgcggtggctcaag

SEQ ID NO: 113070 - DNA, 15 bp, Homo sapiens
gatgcggtggctcaa

SEQ ID NO: 113071 - DNA, 15 bp, Homo sapiens
ggatgcggtggctca

SEQ ID NO: 113072 - DNA, 15 bp, Homo sapiens
aggatgcggtggctc

SEQ ID NO: 113073 - DNA, 15 bp, Homo sapiens
taggatgcggtggct

SEQ ID NO: 113074 - DNA, 15 bp, Homo sapiens
ttaggatgcggtggc

SEQ ID NO: 113075 - DNA, 15 bp, Homo sapiens
attaggatgcggtgg

SEQ ID NO: 113076 - DNA, 15 bp, Homo sapiens
tattaggatgcggtg

SEQ ID NO: 113077 - DNA, 15 bp, Homo sapiens
atattaggatgcggt

SEQ ID NO: 113078 - DNA, 15 bp, Homo sapiens
aatattaggatgcgg

SEQ ID NO: 113079 - DNA, 15 bp, Homo sapiens
aaatattaggatgcg

SEQ ID NO: 113080 - DNA, 15 bp, Homo sapiens
aaaatattaggatgc

SEQ ID NO: 113081 - DNA, 15 bp, Homo sapiens
taaaatattaggatg

SEQ ID NO: 113082 - DNA, 15 bp, Homo sapiens
ataaaatattaggat

SEQ ID NO: 113083 - DNA, 15 bp, Homo sapiens
tataaaatattagga

SEQ ID NO: 113084 - DNA, 15 bp, Homo sapiens
atataaaatattagg

SEQ ID NO: 113085 - DNA, 15 bp, Homo sapiens
aatataaaatattag

SEQ ID NO: 113086 - DNA, 15 bp, Homo sapiens
aaatataaaatatta

SEQ ID NO: 113087 - DNA, 15 bp, Homo sapiens
aaaatataaaatatt

SEQ ID NO: 113088 - DNA, 15 bp, Homo sapiens
aaaaatataaaatat

SEQ ID NO: 113089 - DNA, 15 bp, Homo sapiens
taaaaatataaaata

SEQ ID NO: 113090 - DNA, 15 bp, Homo sapiens
ataaaaatataaaat

SEQ ID NO: 113091 - DNA, 15 bp, Homo sapiens
cataaaaatataaaa

SEQ ID NO: 113092 - DNA, 15 bp, Homo sapiens
ccataaaaatataaa

SEQ ID NO: 113093 - DNA, 15 bp, Homo sapiens
tccataaaaatataa

SEQ ID NO: 113094 - DNA, 15 bp, Homo sapiens
atccataaaaatata

SEQ ID NO: 113095 - DNA, 15 bp, Homo sapiens
tatccataaaaatat

SEQ ID NO: 113096 - DNA, 15 bp, Homo sapiens
atatccataaaaata

SEQ ID NO: 113097 - DNA, 15 bp, Homo sapiens
tatatccataaaaat

SEQ ID NO: 113098 - DNA, 15 bp, Homo sapiens
ttatatccataaaaa

SEQ ID NO: 113099 - DNA, 15 bp, Homo sapiens
tttatatccataaaa

SEQ ID NO: 113100 - DNA, 15 bp, Homo sapiens
ttttatatccataaa

SEQ ID NO: 113101 - DNA, 15 bp, Homo sapiens
tttttatatccataa

SEQ ID NO: 113102 - DNA, 15 bp, Homo sapiens
ttttttatatccata

SEQ ID NO: 113103 - DNA, 15 bp, Homo sapiens
attttttatatccat

SEQ ID NO: 113104 - DNA, 15 bp, Homo sapiens
tattttttatatcca

SEQ ID NO: 113105 - DNA, 15 bp, Homo sapiens
ttattttttatatcc

SEQ ID NO: 113106 - DNA, 15 bp, Homo sapiens
attattttttatatc

SEQ ID NO: 113107 - DNA, 15 bp, Homo sapiens
aattattttttatat

SEQ ID NO: 113108 - DNA, 15 bp, Homo sapiens
aaattattttttata

SEQ ID NO: 113109 - DNA, 15 bp, Homo sapiens
caaattattttttat

SEQ ID NO: 113110 - DNA, 15 bp, Homo sapiens
ccaaattatttttta

SEQ ID NO: 113111 - DNA, 15 bp, Homo sapiens
accaaattatttttt

SEQ ID NO: 113112 - DNA, 15 bp, Homo sapiens
taccaaattattttt

SEQ ID NO: 113113 - DNA, 15 bp, Homo sapiens
ataccaaattatttt

SEQ ID NO: 113114 - DNA, 15 bp, Homo sapiens
gataccaaattattt

SEQ ID NO: 113115 - DNA, 15 bp, Homo sapiens
agataccaaattatt

SEQ ID NO: 113116 - DNA, 15 bp, Homo sapiens
aagataccaaattat

SEQ ID NO: 113117 - DNA, 15 bp, Homo sapiens
aaagataccaaatta

SEQ ID NO: 113118 - DNA, 15 bp, Homo sapiens
gaaagataccaaatt

SEQ ID NO: 113119 - DNA, 15 bp, Homo sapiens
tgaaagataccaaat

SEQ ID NO: 113120 - DNA, 15 bp, Homo sapiens
ctgaaagataccaaa

SEQ ID NO: 113121 - DNA, 15 bp, Homo sapiens
tctgaaagataccaa

SEQ ID NO: 113122 - DNA, 15 bp, Homo sapiens
ctctgaaagatacca

SEQ ID NO: 113123 - DNA, 15 bp, Homo sapiens
actctgaaagatacc

SEQ ID NO: 113124 - DNA, 15 bp, Homo sapiens
aactctgaaagatac

SEQ ID NO: 113125 - DNA, 15 bp, Homo sapiens
caactctgaaagata

SEQ ID NO: 113126 - DNA, 15 bp, Homo sapiens
acaactctgaaagat

SEQ ID NO: 113127 - DNA, 15 bp, Homo sapiens
aacaactctgaaaga

SEQ ID NO: 113128 - DNA, 15 bp, Homo sapiens
aaacaactctgaaag

SEQ ID NO: 113129 - DNA, 15 bp, Homo sapiens
taaacaactctgaaa

SEQ ID NO: 113130 - DNA, 15 bp, Homo sapiens
ttaaacaactctgaa

SEQ ID NO: 113131 - DNA, 15 bp, Homo sapiens
attaaacaactctga

SEQ ID NO: 113132 - DNA, 15 bp, Homo sapiens
tattaaacaactctg

SEQ ID NO: 113133 - DNA, 15 bp, Homo sapiens
atattaaacaactct

SEQ ID NO: 113134 - DNA, 15 bp, Homo sapiens
gatattaaacaactc

SEQ ID NO: 113135 - DNA, 15 bp, Homo sapiens
tgatattaaacaact

SEQ ID NO: 113136 - DNA, 15 bp, Homo sapiens
atgatattaaacaac

SEQ ID NO: 113137 - DNA, 15 bp, Homo sapiens
aatgatattaaacaa

SEQ ID NO: 113138 - DNA, 15 bp, Homo sapiens
aaatgatattaaaca

SEQ ID NO: 113139 - DNA, 15 bp, Homo sapiens
aaaatgatattaaac

SEQ ID NO: 113140 - DNA, 15 bp, Homo sapiens
taaaatgatattaaa

SEQ ID NO: 113141 - DNA, 15 bp, Homo sapiens
ttaaaatgatattaa

SEQ ID NO: 113142 - DNA, 15 bp, Homo sapiens
tttaaaatgatatta

SEQ ID NO: 113143 - DNA, 15 bp, Homo sapiens
atttaaaatgatatt

SEQ ID NO: 113144 - DNA, 15 bp, Homo sapiens
aatttaaaatgatat

SEQ ID NO: 113145 - DNA, 15 bp, Homo sapiens
aaatttaaaatgata

SEQ ID NO: 113146 - DNA, 15 bp, Homo sapiens
taaatttaaaatgat

SEQ ID NO: 113147 - DNA, 15 bp, Homo sapiens
ttaaatttaaaatga

SEQ ID NO: 113148 - DNA, 15 bp, Homo sapiens
tttaaatttaaaatg

SEQ ID NO: 113149 - DNA, 15 bp, Homo sapiens
ttttaaatttaaaat

SEQ ID NO: 113150 - DNA, 15 bp, Homo sapiens
tttttaaatttaaaa

SEQ ID NO: 113151 - DNA, 15 bp, Homo sapiens
gtttttaaatttaaa

SEQ ID NO: 113152 - DNA, 15 bp, Homo sapiens
tgtttttaaatttaa

SEQ ID NO: 113153 - DNA, 15 bp, Homo sapiens
atgtttttaaattta

SEQ ID NO: 113154 - DNA, 15 bp, Homo sapiens
tatgtttttaaattt

SEQ ID NO: 113155 - DNA, 15 bp, Homo sapiens
ctatgtttttaaatt

SEQ ID NO: 113156 - DNA, 15 bp, Homo sapiens
cctatgtttttaaat

SEQ ID NO: 113157 - DNA, 15 bp, Homo sapiens
gcctatgtttttaaa

SEQ ID NO: 113158 - DNA, 15 bp, Homo sapiens
tgcctatgtttttaa

SEQ ID NO: 113159 - DNA, 15 bp, Homo sapiens
ttgcctatgttttta

SEQ ID NO: 113160 - DNA, 15 bp, Homo sapiens
gttgcctatgttttt

SEQ ID NO: 113161 - DNA, 15 bp, Homo sapiens
agttgcctatgtttt

SEQ ID NO: 113162 - DNA, 15 bp, Homo sapiens
aagttgcctatgttt

SEQ ID NO: 113163 - DNA, 15 bp, Homo sapiens
taagttgcctatgtt

SEQ ID NO: 113164 - DNA, 15 bp, Homo sapiens
ttaagttgcctatgt

SEQ ID NO: 113165 - DNA, 15 bp, Homo sapiens
tttaagttgcctatg

SEQ ID NO: 113166 - DNA, 15 bp, Homo sapiens
gtttaagttgcctat

SEQ ID NO: 113167 - DNA, 15 bp, Homo sapiens
agtttaagttgccta

SEQ ID NO: 113168 - DNA, 15 bp, Homo sapiens
gagtttaagttgcct

SEQ ID NO: 113169 - DNA, 15 bp, Homo sapiens
ggagtttaagttgcc

SEQ ID NO: 113170 - DNA, 15 bp, Homo sapiens
aggagtttaagttgc

SEQ ID NO: 113171 - DNA, 15 bp, Homo sapiens
taggagtttaagttg

SEQ ID NO: 113172 - DNA, 15 bp, Homo sapiens
ataggagtttaagtt

SEQ ID NO: 113173 - DNA, 15 bp, Homo sapiens
tataggagtttaagt

SEQ ID NO: 113174 - DNA, 15 bp, Homo sapiens
ctataggagtttaag

SEQ ID NO: 113175 - DNA, 15 bp, Homo sapiens
cctataggagtttaa

SEQ ID NO: 113176 - DNA, 15 bp, Homo sapiens
gcctataggagttta

SEQ ID NO: 113177 - DNA, 15 bp, Homo sapiens
agcctataggagttt

SEQ ID NO: 113178 - DNA, 15 bp, Homo sapiens
cagcctataggagtt

SEQ ID NO: 113179 - DNA, 15 bp, Homo sapiens
acagcctataggagt

SEQ ID NO: 113180 - DNA, 15 bp, Homo sapiens
gacagcctataggag

SEQ ID NO: 113181 - DNA, 15 bp, Homo sapiens
agacagcctatagga

SEQ ID NO: 113182 - DNA, 15 bp, Homo sapiens
gagacagcctatagg

SEQ ID NO: 113183 - DNA, 15 bp, Homo sapiens
ggagacagcctatag

SEQ ID NO: 113184 - DNA, 15 bp, Homo sapiens
tggagacagcctata

SEQ ID NO: 113185 - DNA, 15 bp, Homo sapiens
atggagacagcctat

SEQ ID NO: 113186 - DNA, 15 bp, Homo sapiens
gatggagacagccta

SEQ ID NO: 113187 - DNA, 15 bp, Homo sapiens
cgatggagacagcct

SEQ ID NO: 113188 - DNA, 15 bp, Homo sapiens
ccgatggagacagcc

SEQ ID NO: 113189 - DNA, 15 bp, Homo sapiens
cccgatggagacagc

SEQ ID NO: 113190 - DNA, 15 bp, Homo sapiens
acccgatggagacag

SEQ ID NO: 113191 - DNA, 15 bp, Homo sapiens
aacccgatggagaca

SEQ ID NO: 113192 - DNA, 15 bp, Homo sapiens
aaacccgatggagac

SEQ ID NO: 113193 - DNA, 15 bp, Homo sapiens
gaaacccgatggaga

SEQ ID NO: 113194 - DNA, 15 bp, Homo sapiens
agaaacccgatggag

SEQ ID NO: 113195 - DNA, 15 bp, Homo sapiens
cagaaacccgatgga

SEQ ID NO: 113196 - DNA, 15 bp, Homo sapiens
acagaaacccgatgg

SEQ ID NO: 113197 - DNA, 15 bp, Homo sapiens
cacagaaacccgatg

SEQ ID NO: 113198 - DNA, 15 bp, Homo sapiens
ccacagaaacccgat

SEQ ID NO: 113199 - DNA, 15 bp, Homo sapiens
accacagaaacccga

SEQ ID NO: 113200 - DNA, 15 bp, Homo sapiens
aaccacagaaacccg

SEQ ID NO: 113201 - DNA, 15 bp, Homo sapiens
aaaccacagaaaccc

SEQ ID NO: 113202 - DNA, 15 bp, Homo sapiens
taaaccacagaaacc

SEQ ID NO: 113203 - DNA, 15 bp, Homo sapiens
ctaaaccacagaaac

SEQ ID NO: 113204 - DNA, 15 bp, Homo sapiens
cctaaaccacagaaa

SEQ ID NO: 113205 - DNA, 15 bp, Homo sapiens
tcctaaaccacagaa

SEQ ID NO: 113206 - DNA, 15 bp, Homo sapiens
ctcctaaaccacaga

SEQ ID NO: 113207 - DNA, 15 bp, Homo sapiens
tctcctaaaccacag

SEQ ID NO: 113208 - DNA, 15 bp, Homo sapiens
gtctcctaaaccaca

SEQ ID NO: 113209 - DNA, 15 bp, Homo sapiens
ggtctcctaaaccac

SEQ ID NO: 113210 - DNA, 15 bp, Homo sapiens
gggtctcctaaacca

SEQ ID NO: 113211 - DNA, 15 bp, Homo sapiens
ggggtctcctaaacc

SEQ ID NO: 113212 - DNA, 15 bp, Homo sapiens
tggggtctcctaaac

SEQ ID NO: 113213 - DNA, 15 bp, Homo sapiens
gtggggtctcctaaa

SEQ ID NO: 113214 - DNA, 15 bp, Homo sapiens
ggtggggtctcctaa

SEQ ID NO: 113215 - DNA, 15 bp, Homo sapiens
tggtggggtctccta

SEQ ID NO: 113216 - DNA, 15 bp, Homo sapiens
atggtggggtctcct

SEQ ID NO: 113217 - DNA, 15 bp, Homo sapiens
gatggtggggtctcc

SEQ ID NO: 113218 - DNA, 15 bp, Homo sapiens
ggatggtggggtctc

SEQ ID NO: 113219 - DNA, 15 bp, Homo sapiens
gggatggtggggtct

SEQ ID NO: 113220 - DNA, 15 bp, Homo sapiens
tgggatggtggggtc

SEQ ID NO: 113221 - DNA, 15 bp, Homo sapiens
ctgggatggtggggt

SEQ ID NO: 113222 - DNA, 15 bp, Homo sapiens
actgggatggtgggg

SEQ ID NO: 113223 - DNA, 15 bp, Homo sapiens
cactgggatggtggg

SEQ ID NO: 113224 - DNA, 15 bp, Homo sapiens
gcactgggatggtgg

SEQ ID NO: 113225 - DNA, 15 bp, Homo sapiens
tgcactgggatggtg

SEQ ID NO: 113226 - DNA, 15 bp, Homo sapiens
atgcactgggatggt

SEQ ID NO: 113227 - DNA, 15 bp, Homo sapiens
catgcactgggatgg

SEQ ID NO: 113228 - DNA, 15 bp, Homo sapiens
gcatgcactgggatg

SEQ ID NO: 113229 - DNA, 15 bp, Homo sapiens
agcatgcactgggat

SEQ ID NO: 113230 - DNA, 15 bp, Homo sapiens
cagcatgcactggga

SEQ ID NO: 113231 - DNA, 15 bp, Homo sapiens
tcagcatgcactggg

SEQ ID NO: 113232 - DNA, 15 bp, Homo sapiens
atcagcatgcactgg

SEQ ID NO: 113233 - DNA, 15 bp, Homo sapiens
tatcagcatgcactg

SEQ ID NO: 113234 - DNA, 15 bp, Homo sapiens
ttatcagcatgcact

SEQ ID NO: 113235 - DNA, 15 bp, Homo sapiens
gttatcagcatgcac

SEQ ID NO: 113236 - DNA, 15 bp, Homo sapiens
cgttatcagcatgca

SEQ ID NO: 113237 - DNA, 15 bp, Homo sapiens
acgttatcagcatgc

SEQ ID NO: 113238 - DNA, 15 bp, Homo sapiens
gacgttatcagcatg

SEQ ID NO: 113239 - DNA, 15 bp, Homo sapiens
tgacgttatcagcat

SEQ ID NO: 113240 - DNA, 15 bp, Homo sapiens
atgacgttatcagca

SEQ ID NO: 113241 - DNA, 15 bp, Homo sapiens
tatgacgttatcagc

SEQ ID NO: 113242 - DNA, 15 bp, Homo sapiens
gtatgacgttatcag

SEQ ID NO: 113243 - DNA, 15 bp, Homo sapiens
agtatgacgttatca

SEQ ID NO: 113244 - DNA, 15 bp, Homo sapiens
cagtatgacgttatc

SEQ ID NO: 113245 - DNA, 15 bp, Homo sapiens
tcagtatgacgttat

SEQ ID NO: 113246 - DNA, 15 bp, Homo sapiens
atcagtatgacgtta

SEQ ID NO: 113247 - DNA, 15 bp, Homo sapiens
gatcagtatgacgtt

SEQ ID NO: 113248 - DNA, 15 bp, Homo sapiens
tgatcagtatgacgt

SEQ ID NO: 113249 - DNA, 15 bp, Homo sapiens
ctgatcagtatgacg

SEQ ID NO: 113250 - DNA, 15 bp, Homo sapiens
gctgatcagtatgac

SEQ ID NO: 113251 - DNA, 15 bp, Homo sapiens
tgctgatcagtatga

SEQ ID NO: 113252 - DNA, 15 bp, Homo sapiens
atgctgatcagtatg

SEQ ID NO: 113253 - DNA, 15 bp, Homo sapiens
gatgctgatcagtat

SEQ ID NO: 113254 - DNA, 15 bp, Homo sapiens
ggatgctgatcagta

SEQ ID NO: 113255 - DNA, 15 bp, Homo sapiens
tggatgctgatcagt

SEQ ID NO: 113256 - DNA, 15 bp, Homo sapiens
ctggatgctgatcag

SEQ ID NO: 113257 - DNA, 15 bp, Homo sapiens
gctggatgctgatca

SEQ ID NO: 113258 - DNA, 15 bp, Homo sapiens
agctggatgctgatc

SEQ ID NO: 113259 - DNA, 15 bp, Homo sapiens
tagctggatgctgat

SEQ ID NO: 113260 - DNA, 15 bp, Homo sapiens
gtagctggatgctga

SEQ ID NO: 113261 - DNA, 15 bp, Homo sapiens
ggtagctggatgctg

SEQ ID NO: 113262 - DNA, 15 bp, Homo sapiens
gggtagctggatgct

SEQ ID NO: 113263 - DNA, 15 bp, Homo sapiens
tgggtagctggatgc

SEQ ID NO: 113264 - DNA, 15 bp, Homo sapiens
gtgggtagctggatg

SEQ ID NO: 113265 - DNA, 15 bp, Homo sapiens
tgtgggtagctggat

SEQ ID NO: 113266 - DNA, 15 bp, Homo sapiens
ctgtgggtagctgga

SEQ ID NO: 113267 - DNA, 15 bp, Homo sapiens
gctgtgggtagctgg

SEQ ID NO: 113268 - DNA, 15 bp, Homo sapiens
tgctgtgggtagctg

SEQ ID NO: 113269 - DNA, 15 bp, Homo sapiens
ttgctgtgggtagct

SEQ ID NO: 113270 - DNA, 15 bp, Homo sapiens
cttgctgtgggtagc

SEQ ID NO: 113271 - DNA, 15 bp, Homo sapiens
tcttgctgtgggtag

SEQ ID NO: 113272 - DNA, 15 bp, Homo sapiens
ttcttgctgtgggta

SEQ ID NO: 113273 - DNA, 15 bp, Homo sapiens
attcttgctgtgggt

SEQ ID NO: 113274 - DNA, 15 bp, Homo sapiens
aattcttgctgtggg

SEQ ID NO: 113275 - DNA, 15 bp, Homo sapiens
caattcttgctgtgg

SEQ ID NO: 113276 - DNA, 15 bp, Homo sapiens
tcaattcttgctgtg

SEQ ID NO: 113277 - DNA, 15 bp, Homo sapiens
gtcaattcttgctgt

SEQ ID NO: 113278 - DNA, 15 bp, Homo sapiens
ggtcaattcttgctg

SEQ ID NO: 113279 - DNA, 15 bp, Homo sapiens
tggtcaattcttgct

SEQ ID NO: 113280 - DNA, 15 bp, Homo sapiens
gtggtcaattcttgc

SEQ ID NO: 113281 - DNA, 15 bp, Homo sapiens
ggtggtcaattcttg

SEQ ID NO: 113282 - DNA, 15 bp, Homo sapiens
aggtggtcaattctt

SEQ ID NO: 113283 - DNA, 15 bp, Homo sapiens
gaggtggtcaattct

SEQ ID NO: 113284 - DNA, 15 bp, Homo sapiens
cgaggtggtcaattc

SEQ ID NO: 113285 - DNA, 15 bp, Homo sapiens
acgaggtggtcaatt

SEQ ID NO: 113286 - DNA, 15 bp, Homo sapiens
cacgaggtggtcaat

SEQ ID NO: 113287 - DNA, 15 bp, Homo sapiens
ccacgaggtggtcaa

SEQ ID NO: 113288 - DNA, 15 bp, Homo sapiens
cccacgaggtggtca

SEQ ID NO: 113289 - DNA, 15 bp, Homo sapiens
tcccacgaggtggtc

SEQ ID NO: 113290 - DNA, 15 bp, Homo sapiens
atcccacgaggtggt

SEQ ID NO: 113291 - DNA, 15 bp, Homo sapiens
gatcccacgaggtgg

SEQ ID NO: 113292 - DNA, 15 bp, Homo sapiens
agatcccacgaggtg

SEQ ID NO: 113293 - DNA, 15 bp, Homo sapiens
tagatcccacgaggt

SEQ ID NO: 113294 - DNA, 15 bp, Homo sapiens
ttagatcccacgagg

SEQ ID NO: 113295 - DNA, 15 bp, Homo sapiens
tttagatcccacgag

SEQ ID NO: 113296 - DNA, 15 bp, Homo sapiens
ttttagatcccacga

SEQ ID NO: 113297 - DNA, 15 bp, Homo sapiens
attttagatcccacg

SEQ ID NO: 113298 - DNA, 15 bp, Homo sapiens
aattttagatcccac

SEQ ID NO: 113299 - DNA, 15 bp, Homo sapiens
aaattttagatccca

SEQ ID NO: 113300 - DNA, 15 bp, Homo sapiens
taaattttagatccc

SEQ ID NO: 113301 - DNA, 15 bp, Homo sapiens
ttaaattttagatcc

SEQ ID NO: 113302 - DNA, 15 bp, Homo sapiens
tttaaattttagatc

SEQ ID NO: 113303 - DNA, 15 bp, Homo sapiens
ctttaaattttagat

SEQ ID NO: 113304 - DNA, 15 bp, Homo sapiens
cctttaaattttaga

SEQ ID NO: 113305 - DNA, 15 bp, Homo sapiens
ccctttaaattttag

SEQ ID NO: 113306 - DNA, 15 bp, Homo sapiens
cccctttaaatttta

SEQ ID NO: 113307 - DNA, 15 bp, Homo sapiens
ccccctttaaatttt

SEQ ID NO: 113308 - DNA, 15 bp, Homo sapiens
tccccctttaaattt

SEQ ID NO: 113309 - DNA, 15 bp, Homo sapiens
ttccccctttaaatt

SEQ ID NO: 113310 - DNA, 15 bp, Homo sapiens
tttccccctttaaat

SEQ ID NO: 113311 - DNA, 15 bp, Homo sapiens
ttttccccctttaaa

SEQ ID NO: 113312 - DNA, 15 bp, Homo sapiens
cttttccccctttaa

SEQ ID NO: 113313 - DNA, 15 bp, Homo sapiens
acttttcccccttta

SEQ ID NO: 113314 - DNA, 15 bp, Homo sapiens
cacttttcccccttt

SEQ ID NO: 113315 - DNA, 15 bp, Homo sapiens
tcacttttccccctt

SEQ ID NO: 113316 - DNA, 15 bp, Homo sapiens
ctcacttttccccct

SEQ ID NO: 113317 - DNA, 15 bp, Homo sapiens
actcacttttccccc

SEQ ID NO: 113318 - DNA, 15 bp, Homo sapiens
aactcacttttcccc

SEQ ID NO: 113319 - DNA, 15 bp, Homo sapiens
caactcacttttccc

SEQ ID NO: 113320 - DNA, 15 bp, Homo sapiens
acaactcacttttcc

SEQ ID NO: 113321 - DNA, 15 bp, Homo sapiens
cacaactcacttttc

SEQ ID NO: 113322 - DNA, 15 bp, Homo sapiens
tcacaactcactttt

SEQ ID NO: 113323 - DNA, 15 bp, Homo sapiens
ttcacaactcacttt

SEQ ID NO: 113324 - DNA, 15 bp, Homo sapiens
attcacaactcactt

SEQ ID NO: 113325 - DNA, 15 bp, Homo sapiens
aattcacaactcact

SEQ ID NO: 113326 - DNA, 15 bp, Homo sapiens
caattcacaactcac

SEQ ID NO: 113327 - DNA, 15 bp, Homo sapiens
gcaattcacaactca

SEQ ID NO: 113328 - DNA, 15 bp, Homo sapiens
agcaattcacaactc

SEQ ID NO: 113329 - DNA, 15 bp, Homo sapiens
tagcaattcacaact

SEQ ID NO: 113330 - DNA, 15 bp, Homo sapiens
ttagcaattcacaac

SEQ ID NO: 113331 - DNA, 15 bp, Homo sapiens
attagcaattcacaa

SEQ ID NO: 113332 - DNA, 15 bp, Homo sapiens
cattagcaattcaca

SEQ ID NO: 113333 - DNA, 15 bp, Homo sapiens
acattagcaattcac

SEQ ID NO: 113334 - DNA, 15 bp, Homo sapiens
cacattagcaattca

SEQ ID NO: 113335 - DNA, 15 bp, Homo sapiens
gcacattagcaattc

SEQ ID NO: 113336 - DNA, 15 bp, Homo sapiens
agcacattagcaatt

SEQ ID NO: 113337 - DNA, 15 bp, Homo sapiens
cagcacattagcaat

SEQ ID NO: 113338 - DNA, 15 bp, Homo sapiens
tcagcacattagcaa

SEQ ID NO: 113339 - DNA, 15 bp, Homo sapiens
atcagcacattagca

SEQ ID NO: 113340 - DNA, 15 bp, Homo sapiens
tatcagcacattagc

SEQ ID NO: 113341 - DNA, 15 bp, Homo sapiens
ctatcagcacattag

SEQ ID NO: 113342 - DNA, 15 bp, Homo sapiens
gctatcagcacatta

SEQ ID NO: 113343 - DNA, 15 bp, Homo sapiens
ggctatcagcacatt

SEQ ID NO: 113344 - DNA, 15 bp, Homo sapiens
gggctatcagcacat

SEQ ID NO: 113345 - DNA, 15 bp, Homo sapiens
ggggctatcagcaca

SEQ ID NO: 113346 - DNA, 15 bp, Homo sapiens
tggggctatcagcac

SEQ ID NO: 113347 - DNA, 15 bp, Homo sapiens
atggggctatcagca

SEQ ID NO: 113348 - DNA, 15 bp, Homo sapiens
aatggggctatcagc

SEQ ID NO: 113349 - DNA, 15 bp, Homo sapiens
aaatggggctatcag

SEQ ID NO: 113350 - DNA, 15 bp, Homo sapiens
aaaatggggctatca

SEQ ID NO: 113351 - DNA, 15 bp, Homo sapiens
caaaatggggctatc

SEQ ID NO: 113352 - DNA, 15 bp, Homo sapiens
gcaaaatggggctat

SEQ ID NO: 113353 - DNA, 15 bp, Homo sapiens
agcaaaatggggcta

SEQ ID NO: 113354 - DNA, 15 bp, Homo sapiens
aagcaaaatggggct

SEQ ID NO: 113355 - DNA, 15 bp, Homo sapiens
caagcaaaatggggc

SEQ ID NO: 113356 - DNA, 15 bp, Homo sapiens
ccaagcaaaatgggg

SEQ ID NO: 113357 - DNA, 15 bp, Homo sapiens
cccaagcaaaatggg

SEQ ID NO: 113358 - DNA, 15 bp, Homo sapiens
tcccaagcaaaatgg

SEQ ID NO: 113359 - DNA, 15 bp, Homo sapiens
ttcccaagcaaaatg

SEQ ID NO: 113360 - DNA, 15 bp, Homo sapiens
attcccaagcaaaat

SEQ ID NO: 113361 - DNA, 15 bp, Homo sapiens
aattcccaagcaaaa

SEQ ID NO: 113362 - DNA, 15 bp, Homo sapiens
taattcccaagcaaa

SEQ ID NO: 113363 - DNA, 15 bp, Homo sapiens
ctaattcccaagcaa

SEQ ID NO: 113364 - DNA, 15 bp, Homo sapiens
tctaattcccaagca

SEQ ID NO: 113365 - DNA, 15 bp, Homo sapiens
ctctaattcccaagc

SEQ ID NO: 113366 - DNA, 15 bp, Homo sapiens
cctctaattcccaag

SEQ ID NO: 113367 - DNA, 15 bp, Homo sapiens
ccctctaattcccaa

SEQ ID NO: 113368 - DNA, 15 bp, Homo sapiens
gccctctaattccca

SEQ ID NO: 113369 - DNA, 15 bp, Homo sapiens
tgccctctaattccc

SEQ ID NO: 113370 - DNA, 15 bp, Homo sapiens
ctgccctctaattcc

SEQ ID NO: 113371 - DNA, 15 bp, Homo sapiens
actgccctctaattc

SEQ ID NO: 113372 - DNA, 15 bp, Homo sapiens
aactgccctctaatt

SEQ ID NO: 113373 - DNA, 15 bp, Homo sapiens
aaactgccctctaat

SEQ ID NO: 113374 - DNA, 15 bp, Homo sapiens
aaaactgccctctaa

SEQ ID NO: 113375 - DNA, 15 bp, Homo sapiens
aaaaactgccctcta

SEQ ID NO: 113376 - DNA, 15 bp, Homo sapiens
caaaaactgccctct

SEQ ID NO: 113377 - DNA, 15 bp, Homo sapiens
acaaaaactgccctc

SEQ ID NO: 113378 - DNA, 15 bp, Homo sapiens
cacaaaaactgccct

SEQ ID NO: 113379 - DNA, 15 bp, Homo sapiens
ccacaaaaactgccc

SEQ ID NO: 113380 - DNA, 15 bp, Homo sapiens
accacaaaaactgcc

SEQ ID NO: 113381 - DNA, 15 bp, Homo sapiens
gaccacaaaaactgc

SEQ ID NO: 113382 - DNA, 15 bp, Homo sapiens
ggaccacaaaaactg

SEQ ID NO: 113383 - DNA, 15 bp, Homo sapiens
aggaccacaaaaact

SEQ ID NO: 113384 - DNA, 15 bp, Homo sapiens
aaggaccacaaaaac

SEQ ID NO: 113385 - DNA, 15 bp, Homo sapiens
caaggaccacaaaaa

SEQ ID NO: 113386 - DNA, 15 bp, Homo sapiens
ccaaggaccacaaaa

SEQ ID NO: 113387 - DNA, 15 bp, Homo sapiens
tccaaggaccacaaa

SEQ ID NO: 113388 - DNA, 15 bp, Homo sapiens
ttccaaggaccacaa

SEQ ID NO: 113389 - DNA, 15 bp, Homo sapiens
attccaaggaccaca

SEQ ID NO: 113390 - DNA, 15 bp, Homo sapiens
cattccaaggaccac

SEQ ID NO: 113391 - DNA, 15 bp, Homo sapiens
acattccaaggacca

SEQ ID NO: 113392 - DNA, 15 bp, Homo sapiens
cacattccaaggacc

SEQ ID NO: 113393 - DNA, 15 bp, Homo sapiens
ccacattccaaggac

SEQ ID NO: 113394 - DNA, 15 bp, Homo sapiens
accacattccaagga

SEQ ID NO: 113395 - DNA, 15 bp, Homo sapiens
aaccacattccaagg

SEQ ID NO: 113396 - DNA, 15 bp, Homo sapiens
taaccacattccaag

SEQ ID NO: 113397 - DNA, 15 bp, Homo sapiens
ttaaccacattccaa

SEQ ID NO: 113398 - DNA, 15 bp, Homo sapiens
tttaaccacattcca

SEQ ID NO: 113399 - DNA, 15 bp, Homo sapiens
ttttaaccacattcc

SEQ ID NO: 113400 - DNA, 15 bp, Homo sapiens
attttaaccacattc

SEQ ID NO: 113401 - DNA, 15 bp, Homo sapiens
aattttaaccacatt

SEQ ID NO: 113402 - DNA, 15 bp, Homo sapiens
gaattttaaccacat

SEQ ID NO: 113403 - DNA, 15 bp, Homo sapiens
agaattttaaccaca

SEQ ID NO: 113404 - DNA, 15 bp, Homo sapiens
aagaattttaaccac

SEQ ID NO: 113405 - DNA, 15 bp, Homo sapiens
gaagaattttaacca

SEQ ID NO: 113406 - DNA, 15 bp, Homo sapiens
agaagaattttaacc

SEQ ID NO: 113407 - DNA, 15 bp, Homo sapiens
cagaagaattttaac

SEQ ID NO: 113408 - DNA, 15 bp, Homo sapiens
gcagaagaattttaa

SEQ ID NO: 113409 - DNA, 15 bp, Homo sapiens
tgcagaagaatttta

SEQ ID NO: 113410 - DNA, 15 bp, Homo sapiens
ttgcagaagaatttt

SEQ ID NO: 113411 - DNA, 15 bp, Homo sapiens
cttgcagaagaattt

SEQ ID NO: 113412 - DNA, 15 bp, Homo sapiens
acttgcagaagaatt

SEQ ID NO: 113413 - DNA, 15 bp, Homo sapiens
cacttgcagaagaat

SEQ ID NO: 113414 - DNA, 15 bp, Homo sapiens
ccacttgcagaagaa

SEQ ID NO: 113415 - DNA, 15 bp, Homo sapiens
tccacttgcagaaga

SEQ ID NO: 113416 - DNA, 15 bp, Homo sapiens
ttccacttgcagaag

SEQ ID NO: 113417 - DNA, 15 bp, Homo sapiens
cttccacttgcagaa

SEQ ID NO: 113418 - DNA, 15 bp, Homo sapiens
gcttccacttgcaga

SEQ ID NO: 113419 - DNA, 15 bp, Homo sapiens
tgcttccacttgcag

SEQ ID NO: 113420 - DNA, 15 bp, Homo sapiens
atgcttccacttgca

SEQ ID NO: 113421 - DNA, 15 bp, Homo sapiens
tatgcttccacttgc

SEQ ID NO: 113422 - DNA, 15 bp, Homo sapiens
atatgcttccacttg

SEQ ID NO: 113423 - DNA, 15 bp, Homo sapiens
aatatgcttccactt

SEQ ID NO: 113424 - DNA, 15 bp, Homo sapiens
aaatatgcttccact

SEQ ID NO: 113425 - DNA, 15 bp, Homo sapiens
taaatatgcttccac

SEQ ID NO: 113426 - DNA, 15 bp, Homo sapiens
ataaatatgcttcca

SEQ ID NO: 113427 - DNA, 15 bp, Homo sapiens
tataaatatgcttcc

SEQ ID NO: 113428 - DNA, 15 bp, Homo sapiens
atataaatatgcttc

SEQ ID NO: 113429 - DNA, 15 bp, Homo sapiens
aatataaatatgctt

SEQ ID NO: 113430 - DNA, 15 bp, Homo sapiens
taatataaatatgct

SEQ ID NO: 113431 - DNA, 15 bp, Homo sapiens
gtaatataaatatgc

SEQ ID NO: 113432 - DNA, 15 bp, Homo sapiens
agtaatataaatatg

SEQ ID NO: 113433 - DNA, 15 bp, Homo sapiens
tagtaatataaatat

SEQ ID NO: 113434 - DNA, 15 bp, Homo sapiens
ttagtaatataaata

SEQ ID NO: 113435 - DNA, 15 bp, Homo sapiens
gttagtaatataaat

SEQ ID NO: 113436 - DNA, 15 bp, Homo sapiens
tgttagtaatataaa

SEQ ID NO: 113437 - DNA, 15 bp, Homo sapiens
ttgttagtaatataa

SEQ ID NO: 113438 - DNA, 15 bp, Homo sapiens
attgttagtaatata

SEQ ID NO: 113439 - DNA, 15 bp, Homo sapiens
aattgttagtaatat

SEQ ID NO: 113440 - DNA, 15 bp, Homo sapiens
taattgttagtaata

SEQ ID NO: 113441 - DNA, 15 bp, Homo sapiens
gtaattgttagtaat

SEQ ID NO: 113442 - DNA, 15 bp, Homo sapiens
agtaattgttagtaa

SEQ ID NO: 113443 - DNA, 15 bp, Homo sapiens
cagtaattgttagta

SEQ ID NO: 113444 - DNA, 15 bp, Homo sapiens
ccagtaattgttagt

SEQ ID NO: 113445 - DNA, 15 bp, Homo sapiens
accagtaattgttag

SEQ ID NO: 113446 - DNA, 15 bp, Homo sapiens
taccagtaattgtta

SEQ ID NO: 113447 - DNA, 15 bp, Homo sapiens
gtaccagtaattgtt

SEQ ID NO: 113448 - DNA, 15 bp, Homo sapiens
agtaccagtaattgt

SEQ ID NO: 113449 - DNA, 15 bp, Homo sapiens
tagtaccagtaattg

SEQ ID NO: 113450 - DNA, 15 bp, Homo sapiens
ttagtaccagtaatt

SEQ ID NO: 113451 - DNA, 15 bp, Homo sapiens
attagtaccagtaat

SEQ ID NO: 113452 - DNA, 15 bp, Homo sapiens
tattagtaccagtaa

SEQ ID NO: 113453 - DNA, 15 bp, Homo sapiens
atattagtaccagta

SEQ ID NO: 113454 - DNA, 15 bp, Homo sapiens
aatattagtaccagt

SEQ ID NO: 113455 - DNA, 15 bp, Homo sapiens
gaatattagtaccag

SEQ ID NO: 113456 - DNA, 15 bp, Homo sapiens
tgaatattagtacca

SEQ ID NO: 113457 - DNA, 15 bp, Homo sapiens
ttgaatattagtacc

SEQ ID NO: 113458 - DNA, 15 bp, Homo sapiens
tttgaatattagtac

SEQ ID NO: 113459 - DNA, 15 bp, Homo sapiens
atttgaatattagta

SEQ ID NO: 113460 - DNA, 15 bp, Homo sapiens
tatttgaatattagt

SEQ ID NO: 113461 - DNA, 15 bp, Homo sapiens
atatttgaatattag

SEQ ID NO: 113462 - DNA, 15 bp, Homo sapiens
aatatttgaatatta

SEQ ID NO: 113463 - DNA, 15 bp, Homo sapiens
caatatttgaatatt

SEQ ID NO: 113464 - DNA, 15 bp, Homo sapiens
tcaatatttgaatat

SEQ ID NO: 113465 - DNA, 15 bp, Homo sapiens
ttcaatatttgaata

SEQ ID NO: 113466 - DNA, 15 bp, Homo sapiens
cttcaatatttgaat

SEQ ID NO: 113467 - DNA, 15 bp, Homo sapiens
ccttcaatatttgaa

SEQ ID NO: 113468 - DNA, 15 bp, Homo sapiens
tccttcaatatttga

SEQ ID NO: 113469 - DNA, 15 bp, Homo sapiens
ttccttcaatatttg

SEQ ID NO: 113470 - DNA, 15 bp, Homo sapiens
tttccttcaatattt

SEQ ID NO: 113471 - DNA, 15 bp, Homo sapiens
atttccttcaatatt

SEQ ID NO: 113472 - DNA, 15 bp, Homo sapiens
aatttccttcaatat

SEQ ID NO: 113473 - DNA, 15 bp, Homo sapiens
aaatttccttcaata

SEQ ID NO: 113474 - DNA, 15 bp, Homo sapiens
gaaatttccttcaat

SEQ ID NO: 113475 - DNA, 15 bp, Homo sapiens
agaaatttccttcaa

SEQ ID NO: 113476 - DNA, 15 bp, Homo sapiens
cagaaatttccttca

SEQ ID NO: 113477 - DNA, 15 bp, Homo sapiens
acagaaatttccttc

SEQ ID NO: 113478 - DNA, 15 bp, Homo sapiens
aacagaaatttcctt

SEQ ID NO: 113479 - DNA, 15 bp, Homo sapiens
caacagaaatttcct

SEQ ID NO: 113480 - DNA, 15 bp, Homo sapiens
acaacagaaatttcc

SEQ ID NO: 113481 - DNA, 15 bp, Homo sapiens
cacaacagaaatttc

SEQ ID NO: 113482 - DNA, 15 bp, Homo sapiens
ccacaacagaaattt

SEQ ID NO: 113483 - DNA, 15 bp, Homo sapiens
tccacaacagaaatt

SEQ ID NO: 113484 - DNA, 15 bp, Homo sapiens
gtccacaacagaaat

SEQ ID NO: 113485 - DNA, 15 bp, Homo sapiens
agtccacaacagaaa

SEQ ID NO: 113486 - DNA, 15 bp, Homo sapiens
aagtccacaacagaa

SEQ ID NO: 113487 - DNA, 15 bp, Homo sapiens
taagtccacaacaga

SEQ ID NO: 113488 - DNA, 15 bp, Homo sapiens
ataagtccacaacag

SEQ ID NO: 113489 - DNA, 15 bp, Homo sapiens
cataagtccacaaca

SEQ ID NO: 113490 - DNA, 15 bp, Homo sapiens
acataagtccacaac

SEQ ID NO: 113491 - DNA, 15 bp, Homo sapiens
aacataagtccacaa

SEQ ID NO: 113492 - DNA, 15 bp, Homo sapiens
aaacataagtccaca

SEQ ID NO: 113493 - DNA, 15 bp, Homo sapiens
taaacataagtccac

SEQ ID NO: 113494 - DNA, 15 bp, Homo sapiens
ttaaacataagtcca

SEQ ID NO: 113495 - DNA, 15 bp, Homo sapiens
tttaaacataagtcc

SEQ ID NO: 113496 - DNA, 15 bp, Homo sapiens
ctttaaacataagtc

SEQ ID NO: 113497 - DNA, 15 bp, Homo sapiens
gctttaaacataagt

SEQ ID NO: 113498 - DNA, 15 bp, Homo sapiens
agctttaaacataag

SEQ ID NO: 113499 - DNA, 15 bp, Homo sapiens
gagctttaaacataa

SEQ ID NO: 113500 - DNA, 15 bp, Homo sapiens
agagctttaaacata

SEQ ID NO: 113501 - DNA, 15 bp, Homo sapiens
aagagctttaaacat

SEQ ID NO: 113502 - DNA, 15 bp, Homo sapiens
taagagctttaaaca

SEQ ID NO: 113503 - DNA, 15 bp, Homo sapiens
ctaagagctttaaac

SEQ ID NO: 113504 - DNA, 15 bp, Homo sapiens
tctaagagctttaaa

SEQ ID NO: 113505 - DNA, 15 bp, Homo sapiens
ttctaagagctttaa

SEQ ID NO: 113506 - DNA, 15 bp, Homo sapiens
cttctaagagcttta

SEQ ID NO: 113507 - DNA, 15 bp, Homo sapiens
acttctaagagcttt

SEQ ID NO: 113508 - DNA, 15 bp, Homo sapiens
aacttctaagagctt

SEQ ID NO: 113509 - DNA, 15 bp, Homo sapiens
caacttctaagagct

SEQ ID NO: 113510 - DNA, 15 bp, Homo sapiens
tcaacttctaagagc

SEQ ID NO: 113511 - DNA, 15 bp, Homo sapiens
ttcaacttctaagag

SEQ ID NO: 113512 - DNA, 15 bp, Homo sapiens
tttcaacttctaaga

SEQ ID NO: 113513 - DNA, 15 bp, Homo sapiens
atttcaacttctaag

SEQ ID NO: 113514 - DNA, 15 bp, Homo sapiens
aatttcaacttctaa

SEQ ID NO: 113515 - DNA, 15 bp, Homo sapiens
taatttcaacttcta

SEQ ID NO: 113516 - DNA, 15 bp, Homo sapiens
ataatttcaacttct

SEQ ID NO: 113517 - DNA, 15 bp, Homo sapiens
aataatttcaacttc

SEQ ID NO: 113518 - DNA, 15 bp, Homo sapiens
caataatttcaactt

SEQ ID NO: 113519 - DNA, 15 bp, Homo sapiens
ccaataatttcaact

SEQ ID NO: 113520 - DNA, 15 bp, Homo sapiens
tccaataatttcaac

SEQ ID NO: 113521 - DNA, 15 bp, Homo sapiens
ttccaataatttcaa

SEQ ID NO: 113522 - DNA, 15 bp, Homo sapiens
tttccaataatttca

SEQ ID NO: 113523 - DNA, 15 bp, Homo sapiens
ctttccaataatttc

SEQ ID NO: 113524 - DNA, 15 bp, Homo sapiens
tctttccaataattt

SEQ ID NO: 113525 - DNA, 15 bp, Homo sapiens
ttctttccaataatt

SEQ ID NO: 113526 - DNA, 15 bp, Homo sapiens
cttctttccaataat

SEQ ID NO: 113527 - DNA, 15 bp, Homo sapiens
tcttctttccaataa

SEQ ID NO: 113528 - DNA, 15 bp, Homo sapiens
gtcttctttccaata

SEQ ID NO: 113529 - DNA, 15 bp, Homo sapiens
agtcttctttccaat

SEQ ID NO: 113530 - DNA, 15 bp, Homo sapiens
aagtcttctttccaa

SEQ ID NO: 113531 - DNA, 15 bp, Homo sapiens
caagtcttctttcca

SEQ ID NO: 113532 - DNA, 15 bp, Homo sapiens
acaagtcttctttcc

SEQ ID NO: 113533 - DNA, 15 bp, Homo sapiens
aacaagtcttctttc

SEQ ID NO: 113534 - DNA, 15 bp, Homo sapiens
aaacaagtcttcttt

SEQ ID NO: 113535 - DNA, 15 bp, Homo sapiens
aaaacaagtcttctt

SEQ ID NO: 113536 - DNA, 15 bp, Homo sapiens
caaaacaagtcttct

SEQ ID NO: 113537 - DNA, 15 bp, Homo sapiens
tcaaaacaagtcttc

SEQ ID NO: 113538 - DNA, 15 bp, Homo sapiens
ttcaaaacaagtctt

SEQ ID NO: 113539 - DNA, 15 bp, Homo sapiens
tttcaaaacaagtct

SEQ ID NO: 113540 - DNA, 15 bp, Homo sapiens
ttttcaaaacaagtc

SEQ ID NO: 113541 - DNA, 15 bp, Homo sapiens
attttcaaaacaagt

SEQ ID NO: 113542 - DNA, 15 bp, Homo sapiens
gattttcaaaacaag

SEQ ID NO: 113543 - DNA, 15 bp, Homo sapiens
tgattttcaaaacaa

SEQ ID NO: 113544 - DNA, 15 bp, Homo sapiens
atgattttcaaaaca

SEQ ID NO: 113545 - DNA, 15 bp, Homo sapiens
tatgattttcaaaac

SEQ ID NO: 113546 - DNA, 15 bp, Homo sapiens
ttatgattttcaaaa

SEQ ID NO: 113547 - DNA, 15 bp, Homo sapiens
attatgattttcaaa

SEQ ID NO: 113548 - DNA, 15 bp, Homo sapiens
cattatgattttcaa

SEQ ID NO: 113549 - DNA, 15 bp, Homo sapiens
acattatgattttca

SEQ ID NO: 113550 - DNA, 15 bp, Homo sapiens
aacattatgattttc

SEQ ID NO: 113551 - DNA, 15 bp, Homo sapiens
caacattatgatttt

SEQ ID NO: 113552 - DNA, 15 bp, Homo sapiens
gcaacattatgattt

SEQ ID NO: 113553 - DNA, 15 bp, Homo sapiens
agcaacattatgatt

SEQ ID NO: 113554 - DNA, 15 bp, Homo sapiens
cagcaacattatgat

SEQ ID NO: 113555 - DNA, 15 bp, Homo sapiens
acagcaacattatga

SEQ ID NO: 113556 - DNA, 15 bp, Homo sapiens
tacagcaacattatg

SEQ ID NO: 113557 - DNA, 15 bp, Homo sapiens
atacagcaacattat

SEQ ID NO: 113558 - DNA, 15 bp, Homo sapiens
aatacagcaacatta

SEQ ID NO: 113559 - DNA, 15 bp, Homo sapiens
caatacagcaacatt

SEQ ID NO: 113560 - DNA, 15 bp, Homo sapiens
acaatacagcaacat

SEQ ID NO: 113561 - DNA, 15 bp, Homo sapiens
cacaatacagcaaca

SEQ ID NO: 113562 - DNA, 15 bp, Homo sapiens
acacaatacagcaac

SEQ ID NO: 113563 - DNA, 15 bp, Homo sapiens
aacacaatacagcaa

SEQ ID NO: 113564 - DNA, 15 bp, Homo sapiens
aaacacaatacagca

SEQ ID NO: 113565 - DNA, 15 bp, Homo sapiens
taaacacaatacagc

SEQ ID NO: 113566 - DNA, 15 bp, Homo sapiens
ctaaacacaatacag

SEQ ID NO: 113567 - DNA, 15 bp, Homo sapiens
tctaaacacaataca

SEQ ID NO: 113568 - DNA, 15 bp, Homo sapiens
ctctaaacacaatac

SEQ ID NO: 113569 - DNA, 15 bp, Homo sapiens
tctctaaacacaata

SEQ ID NO: 113570 - DNA, 15 bp, Homo sapiens
ttctctaaacacaat

SEQ ID NO: 113571 - DNA, 15 bp, Homo sapiens
tttctctaaacacaa

SEQ ID NO: 113572 - DNA, 15 bp, Homo sapiens
atttctctaaacaca

SEQ ID NO: 113573 - DNA, 15 bp, Homo sapiens
tatttctctaaacac

SEQ ID NO: 113574 - DNA, 15 bp, Homo sapiens
atatttctctaaaca

SEQ ID NO: 113575 - DNA, 15 bp, Homo sapiens
aatatttctctaaac

SEQ ID NO: 113576 - DNA, 15 bp, Homo sapiens
gaatatttctctaaa

SEQ ID NO: 113577 - DNA, 15 bp, Homo sapiens
ggaatatttctctaa

SEQ ID NO: 113578 - DNA, 15 bp, Homo sapiens
tggaatatttctcta

SEQ ID NO: 113579 - DNA, 15 bp, Homo sapiens
ttggaatatttctct

SEQ ID NO: 113580 - DNA, 15 bp, Homo sapiens
tttggaatatttctc

SEQ ID NO: 113581 - DNA, 15 bp, Homo sapiens
gtttggaatatttct

SEQ ID NO: 113582 - DNA, 15 bp, Homo sapiens
cgtttggaatatttc

SEQ ID NO: 113583 - DNA, 15 bp, Homo sapiens
ccgtttggaatattt

SEQ ID NO: 113584 - DNA, 15 bp, Homo sapiens
cccgtttggaatatt

SEQ ID NO: 113585 - DNA, 15 bp, Homo sapiens
tcccgtttggaatat

SEQ ID NO: 113586 - DNA, 15 bp, Homo sapiens
ctcccgtttggaata

SEQ ID NO: 113587 - DNA, 15 bp, Homo sapiens
actcccgtttggaat

SEQ ID NO: 113588 - DNA, 15 bp, Homo sapiens
tactcccgtttggaa

SEQ ID NO: 113589 - DNA, 15 bp, Homo sapiens
ctactcccgtttgga

SEQ ID NO: 113590 - DNA, 15 bp, Homo sapiens
cctactcccgtttgg

SEQ ID NO: 113591 - DNA, 15 bp, Homo sapiens
gcctactcccgtttg

SEQ ID NO: 113592 - DNA, 15 bp, Homo sapiens
agcctactcccgttt

SEQ ID NO: 113593 - DNA, 15 bp, Homo sapiens
cagcctactcccgtt

SEQ ID NO: 113594 - DNA, 15 bp, Homo sapiens
gcagcctactcccgt

SEQ ID NO: 113595 - DNA, 15 bp, Homo sapiens
agcagcctactcccg

SEQ ID NO: 113596 - DNA, 15 bp, Homo sapiens
cagcagcctactccc

SEQ ID NO: 113597 - DNA, 15 bp, Homo sapiens
acagcagcctactcc

SEQ ID NO: 113598 - DNA, 15 bp, Homo sapiens
cacagcagcctactc

SEQ ID NO: 113599 - DNA, 15 bp, Homo sapiens
gcacagcagcctact

SEQ ID NO: 113600 - DNA, 15 bp, Homo sapiens
agcacagcagcctac

SEQ ID NO: 113601 - DNA, 15 bp, Homo sapiens
cagcacagcagccta

SEQ ID NO: 113602 - DNA, 15 bp, Homo sapiens
gcagcacagcagcct

SEQ ID NO: 113603 - DNA, 15 bp, Homo sapiens
tgcagcacagcagcc

SEQ ID NO: 113604 - DNA, 15 bp, Homo sapiens
atgcagcacagcagc

SEQ ID NO: 113605 - DNA, 15 bp, Homo sapiens
catgcagcacagcag

SEQ ID NO: 113606 - DNA, 15 bp, Homo sapiens
gcatgcagcacagca

SEQ ID NO: 113607 - DNA, 15 bp, Homo sapiens
tgcatgcagcacagc

SEQ ID NO: 113608 - DNA, 15 bp, Homo sapiens
ctgcatgcagcacag

SEQ ID NO: 113609 - DNA, 15 bp, Homo sapiens
tctgcatgcagcaca

SEQ ID NO: 113610 - DNA, 15 bp, Homo sapiens
gtctgcatgcagcac

SEQ ID NO: 113611 - DNA, 15 bp, Homo sapiens
agtctgcatgcagca

SEQ ID NO: 113612 - DNA, 15 bp, Homo sapiens
aagtctgcatgcagc

SEQ ID NO: 113613 - DNA, 15 bp, Homo sapiens
aaagtctgcatgcag

SEQ ID NO: 113614 - DNA, 15 bp, Homo sapiens
caaagtctgcatgca

SEQ ID NO: 113615 - DNA, 15 bp, Homo sapiens
gcaaagtctgcatgc

SEQ ID NO: 113616 - DNA, 15 bp, Homo sapiens
agcaaagtctgcatg

SEQ ID NO: 113617 - DNA, 15 bp, Homo sapiens
cagcaaagtctgcat

SEQ ID NO: 113618 - DNA, 15 bp, Homo sapiens
tcagcaaagtctgca

SEQ ID NO: 113619 - DNA, 15 bp, Homo sapiens
ttcagcaaagtctgc

SEQ ID NO: 113620 - DNA, 15 bp, Homo sapiens
tttcagcaaagtctg

SEQ ID NO: 113621 - DNA, 15 bp, Homo sapiens
atttcagcaaagtct

SEQ ID NO: 113622 - DNA, 15 bp, Homo sapiens
catttcagcaaagtc

SEQ ID NO: 113623 - DNA, 15 bp, Homo sapiens
acatttcagcaaagt

SEQ ID NO: 113624 - DNA, 15 bp, Homo sapiens
aacatttcagcaaag

SEQ ID NO: 113625 - DNA, 15 bp, Homo sapiens
taacatttcagcaaa

SEQ ID NO: 113626 - DNA, 15 bp, Homo sapiens
gtaacatttcagcaa

SEQ ID NO: 113627 - DNA, 15 bp, Homo sapiens
agtaacatttcagca

SEQ ID NO: 113628 - DNA, 15 bp, Homo sapiens
tagtaacatttcagc

SEQ ID NO: 113629 - DNA, 15 bp, Homo sapiens
atagtaacatttcag

SEQ ID NO: 113630 - DNA, 15 bp, Homo sapiens
tatagtaacatttca

SEQ ID NO: 113631 - DNA, 15 bp, Homo sapiens
atatagtaacatttc

SEQ ID NO: 113632 - DNA, 15 bp, Homo sapiens
aatatagtaacattt

SEQ ID NO: 113633 - DNA, 15 bp, Homo sapiens
caatatagtaacatt

SEQ ID NO: 113634 - DNA, 15 bp, Homo sapiens
gcaatatagtaacat

SEQ ID NO: 113635 - DNA, 15 bp, Homo sapiens
ggcaatatagtaaca

SEQ ID NO: 113636 - DNA, 15 bp, Homo sapiens
cggcaatatagtaac

SEQ ID NO: 113637 - DNA, 15 bp, Homo sapiens
acggcaatatagtaa

SEQ ID NO: 113638 - DNA, 15 bp, Homo sapiens
aacggcaatatagta

SEQ ID NO: 113639 - DNA, 15 bp, Homo sapiens
taacggcaatatagt

SEQ ID NO: 113640 - DNA, 15 bp, Homo sapiens
ataacggcaatatag

SEQ ID NO: 113641 - DNA, 15 bp, Homo sapiens
cataacggcaatata

SEQ ID NO: 113642 - DNA, 15 bp, Homo sapiens
acataacggcaatat

SEQ ID NO: 113643 - DNA, 15 bp, Homo sapiens
gacataacggcaata

SEQ ID NO: 113644 - DNA, 15 bp, Homo sapiens
ggacataacggcaat

SEQ ID NO: 113645 - DNA, 15 bp, Homo sapiens
gggacataacggcaa

SEQ ID NO: 113646 - DNA, 15 bp, Homo sapiens
tgggacataacggca

SEQ ID NO: 113647 - DNA, 15 bp, Homo sapiens
gtgggacataacggc

SEQ ID NO: 113648 - DNA, 15 bp, Homo sapiens
agtgggacataacgg

SEQ ID NO: 113649 - DNA, 15 bp, Homo sapiens
gagtgggacataacg

SEQ ID NO: 113650 - DNA, 15 bp, Homo sapiens
tgagtgggacataac

SEQ ID NO: 113651 - DNA, 15 bp, Homo sapiens
ctgagtgggacataa

SEQ ID NO: 113652 - DNA, 15 bp, Homo sapiens
gctgagtgggacata

SEQ ID NO: 113653 - DNA, 15 bp, Homo sapiens
tgctgagtgggacat

SEQ ID NO: 113654 - DNA, 15 bp, Homo sapiens
ttgctgagtgggaca

SEQ ID NO: 113655 - DNA, 15 bp, Homo sapiens
tttgctgagtgggac

SEQ ID NO: 113656 - DNA, 15 bp, Homo sapiens
ttttgctgagtggga

SEQ ID NO: 113657 - DNA, 15 bp, Homo sapiens
tttttgctgagtggg

SEQ ID NO: 113658 - DNA, 15 bp, Homo sapiens
gtttttgctgagtgg

SEQ ID NO: 113659 - DNA, 15 bp, Homo sapiens
agtttttgctgagtg

SEQ ID NO: 113660 - DNA, 15 bp, Homo sapiens
cagtttttgctgagt

SEQ ID NO: 113661 - DNA, 15 bp, Homo sapiens
tcagtttttgctgag

SEQ ID NO: 113662 - DNA, 15 bp, Homo sapiens
atcagtttttgctga

SEQ ID NO: 113663 - DNA, 15 bp, Homo sapiens
catcagtttttgctg

SEQ ID NO: 113664 - DNA, 15 bp, Homo sapiens
tcatcagtttttgct

SEQ ID NO: 113665 - DNA, 15 bp, Homo sapiens
atcatcagtttttgc

SEQ ID NO: 113666 - DNA, 15 bp, Homo sapiens
aatcatcagtttttg

SEQ ID NO: 113667 - DNA, 15 bp, Homo sapiens
aaatcatcagttttt

SEQ ID NO: 113668 - DNA, 15 bp, Homo sapiens
aaaatcatcagtttt

SEQ ID NO: 113669 - DNA, 15 bp, Homo sapiens
taaaatcatcagttt

SEQ ID NO: 113670 - DNA, 15 bp, Homo sapiens
ttaaaatcatcagtt

SEQ ID NO: 113671 - DNA, 15 bp, Homo sapiens
tttaaaatcatcagt

SEQ ID NO: 113672 - DNA, 15 bp, Homo sapiens
ctttaaaatcatcag

SEQ ID NO: 113673 - DNA, 15 bp, Homo sapiens
gctttaaaatcatca

SEQ ID NO: 113674 - DNA, 15 bp, Homo sapiens
agctttaaaatcatc

SEQ ID NO: 113675 - DNA, 15 bp, Homo sapiens
aagctttaaaatcat

SEQ ID NO: 113676 - DNA, 15 bp, Homo sapiens
aaagctttaaaatca

SEQ ID NO: 113677 - DNA, 15 bp, Homo sapiens
aaaagctttaaaatc

SEQ ID NO: 113678 - DNA, 15 bp, Homo sapiens
caaaagctttaaaat

SEQ ID NO: 113679 - DNA, 15 bp, Homo sapiens
gcaaaagctttaaaa

SEQ ID NO: 113680 - DNA, 15 bp, Homo sapiens
agcaaaagctttaaa

SEQ ID NO: 113681 - DNA, 15 bp, Homo sapiens
aagcaaaagctttaa

SEQ ID NO: 113682 - DNA, 15 bp, Homo sapiens
gaagcaaaagcttta

SEQ ID NO: 113683 - DNA, 15 bp, Homo sapiens
agaagcaaaagcttt

SEQ ID NO: 113684 - DNA, 15 bp, Homo sapiens
aagaagcaaaagctt

SEQ ID NO: 113685 - DNA, 15 bp, Homo sapiens
caagaagcaaaagct

SEQ ID NO: 113686 - DNA, 15 bp, Homo sapiens
tcaagaagcaaaagc

SEQ ID NO: 113687 - DNA, 15 bp, Homo sapiens
ttcaagaagcaaaag

SEQ ID NO: 113688 - DNA, 15 bp, Homo sapiens
tttcaagaagcaaaa

SEQ ID NO: 113689 - DNA, 15 bp, Homo sapiens
gtttcaagaagcaaa

SEQ ID NO: 113690 - DNA, 15 bp, Homo sapiens
agtttcaagaagcaa

SEQ ID NO: 113691 - DNA, 15 bp, Homo sapiens
tagtttcaagaagca

SEQ ID NO: 113692 - DNA, 15 bp, Homo sapiens
ctagtttcaagaagc

SEQ ID NO: 113693 - DNA, 15 bp, Homo sapiens
tctagtttcaagaag

SEQ ID NO: 113694 - DNA, 15 bp, Homo sapiens
ttctagtttcaagaa

SEQ ID NO: 113695 - DNA, 15 bp, Homo sapiens
tttctagtttcaaga

SEQ ID NO: 113696 - DNA, 15 bp, Homo sapiens
ttttctagtttcaag

SEQ ID NO: 113697 - DNA, 15 bp, Homo sapiens
tttttctagtttcaa

SEQ ID NO: 113698 - DNA, 15 bp, Homo sapiens
ctttttctagtttca

SEQ ID NO: 113699 - DNA, 15 bp, Homo sapiens
tctttttctagtttc

SEQ ID NO: 113700 - DNA, 15 bp, Homo sapiens
ctctttttctagttt

SEQ ID NO: 113701 - DNA, 15 bp, Homo sapiens
cctctttttctagtt

SEQ ID NO: 113702 - DNA, 15 bp, Homo sapiens
ccctctttttctagt

SEQ ID NO: 113703 - DNA, 15 bp, Homo sapiens
cccctctttttctag

SEQ ID NO: 113704 - DNA, 15 bp, Homo sapiens
acccctctttttcta

SEQ ID NO: 113705 - DNA, 15 bp, Homo sapiens
gacccctctttttct

SEQ ID NO: 113706 - DNA, 15 bp, Homo sapiens
tgacccctctttttc

SEQ ID NO: 113707 - DNA, 15 bp, Homo sapiens
ctgacccctcttttt

SEQ ID NO: 113708 - DNA, 15 bp, Homo sapiens
gctgacccctctttt

SEQ ID NO: 113709 - DNA, 15 bp, Homo sapiens
ggctgacccctcttt

SEQ ID NO: 113710 - DNA, 15 bp, Homo sapiens
aggctgacccctctt

SEQ ID NO: 113711 - DNA, 15 bp, Homo sapiens
aaggctgacccctct

SEQ ID NO: 113712 - DNA, 15 bp, Homo sapiens
taaggctgacccctc

SEQ ID NO: 113713 - DNA, 15 bp, Homo sapiens
ttaaggctgacccct

SEQ ID NO: 113714 - DNA, 15 bp, Homo sapiens
gttaaggctgacccc

SEQ ID NO: 113715 - DNA, 15 bp, Homo sapiens
ggttaaggctgaccc

SEQ ID NO: 113716 - DNA, 15 bp, Homo sapiens
tggttaaggctgacc

SEQ ID NO: 113717 - DNA, 15 bp, Homo sapiens
ttggttaaggctgac

SEQ ID NO: 113718 - DNA, 15 bp, Homo sapiens
tttggttaaggctga

SEQ ID NO: 113719 - DNA, 15 bp, Homo sapiens
ttttggttaaggctg

SEQ ID NO: 113720 - DNA, 15 bp, Homo sapiens
cttttggttaaggct

SEQ ID NO: 113721 - DNA, 15 bp, Homo sapiens
acttttggttaaggc

SEQ ID NO: 113722 - DNA, 15 bp, Homo sapiens
aacttttggttaagg

SEQ ID NO: 113723 - DNA, 15 bp, Homo sapiens
caacttttggttaag

SEQ ID NO: 113724 - DNA, 15 bp, Homo sapiens
tcaacttttggttaa

SEQ ID NO: 113725 - DNA, 15 bp, Homo sapiens
atcaacttttggtta

SEQ ID NO: 113726 - DNA, 15 bp, Homo sapiens
catcaacttttggtt

SEQ ID NO: 113727 - DNA, 15 bp, Homo sapiens
ccatcaacttttggt

SEQ ID NO: 113728 - DNA, 15 bp, Homo sapiens
gccatcaacttttgg

SEQ ID NO: 113729 - DNA, 15 bp, Homo sapiens
tgccatcaacttttg

SEQ ID NO: 113730 - DNA, 15 bp, Homo sapiens
ctgccatcaactttt

SEQ ID NO: 113731 - DNA, 15 bp, Homo sapiens
tctgccatcaacttt

SEQ ID NO: 113732 - DNA, 15 bp, Homo sapiens
ctctgccatcaactt

SEQ ID NO: 113733 - DNA, 15 bp, Homo sapiens
actctgccatcaact

SEQ ID NO: 113734 - DNA, 15 bp, Homo sapiens
cactctgccatcaac

SEQ ID NO: 113735 - DNA, 15 bp, Homo sapiens
ccactctgccatcaa

SEQ ID NO: 113736 - DNA, 15 bp, Homo sapiens
accactctgccatca

SEQ ID NO: 113737 - DNA, 15 bp, Homo sapiens
gaccactctgccatc

SEQ ID NO: 113738 - DNA, 15 bp, Homo sapiens
tgaccactctgccat

SEQ ID NO: 113739 - DNA, 15 bp, Homo sapiens
atgaccactctgcca

SEQ ID NO: 113740 - DNA, 15 bp, Homo sapiens
aatgaccactctgcc

SEQ ID NO: 113741 - DNA, 15 bp, Homo sapiens
taatgaccactctgc

SEQ ID NO: 113742 - DNA, 15 bp, Homo sapiens
ataatgaccactctg

SEQ ID NO: 113743 - DNA, 15 bp, Homo sapiens
aataatgaccactct

SEQ ID NO: 113744 - DNA, 15 bp, Homo sapiens
aaataatgaccactc

SEQ ID NO: 113745 - DNA, 15 bp, Homo sapiens
gaaataatgaccact

SEQ ID NO: 113746 - DNA, 15 bp, Homo sapiens
tgaaataatgaccac

SEQ ID NO: 113747 - DNA, 15 bp, Homo sapiens
ctgaaataatgacca

SEQ ID NO: 113748 - DNA, 15 bp, Homo sapiens
actgaaataatgacc

SEQ ID NO: 113749 - DNA, 15 bp, Homo sapiens
aactgaaataatgac

SEQ ID NO: 113750 - DNA, 15 bp, Homo sapiens
taactgaaataatga

SEQ ID NO: 113751 - DNA, 15 bp, Homo sapiens
ttaactgaaataatg

SEQ ID NO: 113752 - DNA, 15 bp, Homo sapiens
tttaactgaaataat

SEQ ID NO: 113753 - DNA, 15 bp, Homo sapiens
gtttaactgaaataa

SEQ ID NO: 113754 - DNA, 15 bp, Homo sapiens
tgtttaactgaaata

SEQ ID NO: 113755 - DNA, 15 bp, Homo sapiens
atgtttaactgaaat

SEQ ID NO: 113756 - DNA, 15 bp, Homo sapiens
catgtttaactgaaa

SEQ ID NO: 113757 - DNA, 15 bp, Homo sapiens
tcatgtttaactgaa

SEQ ID NO: 113758 - DNA, 15 bp, Homo sapiens
ttcatgtttaactga

SEQ ID NO: 113759 - DNA, 15 bp, Homo sapiens
tttcatgtttaactg

SEQ ID NO: 113760 - DNA, 15 bp, Homo sapiens
ttttcatgtttaact

SEQ ID NO: 113761 - DNA, 15 bp, Homo sapiens
cttttcatgtttaac

SEQ ID NO: 113762 - DNA, 15 bp, Homo sapiens
gcttttcatgtttaa

SEQ ID NO: 113763 - DNA, 15 bp, Homo sapiens
tgcttttcatgttta

SEQ ID NO: 113764 - DNA, 15 bp, Homo sapiens
atgcttttcatgttt

SEQ ID NO: 113765 - DNA, 15 bp, Homo sapiens
catgcttttcatgtt

SEQ ID NO: 113766 - DNA, 15 bp, Homo sapiens
acatgcttttcatgt

SEQ ID NO: 113767 - DNA, 15 bp, Homo sapiens
aacatgcttttcatg

SEQ ID NO: 113768 - DNA, 15 bp, Homo sapiens
taacatgcttttcat

SEQ ID NO: 113769 - DNA, 15 bp, Homo sapiens
ttaacatgcttttca

SEQ ID NO: 113770 - DNA, 15 bp, Homo sapiens
tttaacatgcttttc

SEQ ID NO: 113771 - DNA, 15 bp, Homo sapiens
atttaacatgctttt

SEQ ID NO: 113772 - DNA, 15 bp, Homo sapiens
tatttaacatgcttt

SEQ ID NO: 113773 - DNA, 15 bp, Homo sapiens
ttatttaacatgctt

SEQ ID NO: 113774 - DNA, 15 bp, Homo sapiens
attatttaacatgct

SEQ ID NO: 113775 - DNA, 15 bp, Homo sapiens
aattatttaacatgc

SEQ ID NO: 113776 - DNA, 15 bp, Homo sapiens
caattatttaacatg

SEQ ID NO: 113777 - DNA, 15 bp, Homo sapiens
acaattatttaacat

SEQ ID NO: 113778 - DNA, 15 bp, Homo sapiens
tacaattatttaaca

SEQ ID NO: 113779 - DNA, 15 bp, Homo sapiens
atacaattatttaac

SEQ ID NO: 113780 - DNA, 15 bp, Homo sapiens
catacaattatttaa

SEQ ID NO: 113781 - DNA, 15 bp, Homo sapiens
acatacaattattta

SEQ ID NO: 113782 - DNA, 15 bp, Homo sapiens
aacatacaattattt

SEQ ID NO: 113783 - DNA, 15 bp, Homo sapiens
aaacatacaattatt

SEQ ID NO: 113784 - DNA, 15 bp, Homo sapiens
caaacatacaattat

SEQ ID NO: 113785 - DNA, 15 bp, Homo sapiens
gcaaacatacaatta

SEQ ID NO: 113786 - DNA, 15 bp, Homo sapiens
agcaaacatacaatt

SEQ ID NO: 113787 - DNA, 15 bp, Homo sapiens
aagcaaacatacaat

SEQ ID NO: 113788 - DNA, 15 bp, Homo sapiens
taagcaaacatacaa

SEQ ID NO: 113789 - DNA, 15 bp, Homo sapiens
ataagcaaacataca

SEQ ID NO: 113790 - DNA, 15 bp, Homo sapiens
aataagcaaacatac

SEQ ID NO: 113791 - DNA, 15 bp, Homo sapiens
aaataagcaaacata

SEQ ID NO: 113792 - DNA, 15 bp, Homo sapiens
taaataagcaaacat

SEQ ID NO: 113793 - DNA, 15 bp, Homo sapiens
gtaaataagcaaaca

SEQ ID NO: 113794 - DNA, 15 bp, Homo sapiens
tgtaaataagcaaac

SEQ ID NO: 113795 - DNA, 15 bp, Homo sapiens
ctgtaaataagcaaa

SEQ ID NO: 113796 - DNA, 15 bp, Homo sapiens
gctgtaaataagcaa

SEQ ID NO: 113797 - DNA, 15 bp, Homo sapiens
agctgtaaataagca

SEQ ID NO: 113798 - DNA, 15 bp, Homo sapiens
cagctgtaaataagc

SEQ ID NO: 113799 - DNA, 15 bp, Homo sapiens
ccagctgtaaataag

SEQ ID NO: 113800 - DNA, 15 bp, Homo sapiens
gccagctgtaaataa

SEQ ID NO: 113801 - DNA, 15 bp, Homo sapiens
tgccagctgtaaata

SEQ ID NO: 113802 - DNA, 15 bp, Homo sapiens
ctgccagctgtaaat

SEQ ID NO: 113803 - DNA, 15 bp, Homo sapiens
gctgccagctgtaaa

SEQ ID NO: 113804 - DNA, 15 bp, Homo sapiens
ggctgccagctgtaa

SEQ ID NO: 113805 - DNA, 15 bp, Homo sapiens
aggctgccagctgta

SEQ ID NO: 113806 - DNA, 15 bp, Homo sapiens
caggctgccagctgt

SEQ ID NO: 113807 - DNA, 15 bp, Homo sapiens
tcaggctgccagctg

SEQ ID NO: 113808 - DNA, 15 bp, Homo sapiens
atcaggctgccagct

SEQ ID NO: 113809 - DNA, 15 bp, Homo sapiens
tatcaggctgccagc

SEQ ID NO: 113810 - DNA, 15 bp, Homo sapiens
ctatcaggctgccag

SEQ ID NO: 113811 - DNA, 15 bp, Homo sapiens
cctatcaggctgcca

SEQ ID NO: 113812 - DNA, 15 bp, Homo sapiens
gcctatcaggctgcc

SEQ ID NO: 113813 - DNA, 15 bp, Homo sapiens
tgcctatcaggctgc

SEQ ID NO: 113814 - DNA, 15 bp, Homo sapiens
ctgcctatcaggctg

SEQ ID NO: 113815 - DNA, 15 bp, Homo sapiens
tctgcctatcaggct

SEQ ID NO: 113816 - DNA, 15 bp, Homo sapiens
atctgcctatcaggc

SEQ ID NO: 113817 - DNA, 15 bp, Homo sapiens
aatctgcctatcagg

SEQ ID NO: 113818 - DNA, 15 bp, Homo sapiens
gaatctgcctatcag

SEQ ID NO: 113819 - DNA, 15 bp, Homo sapiens
ggaatctgcctatca

SEQ ID NO: 113820 - DNA, 15 bp, Homo sapiens
tggaatctgcctatc

SEQ ID NO: 113821 - DNA, 15 bp, Homo sapiens
atggaatctgcctat

SEQ ID NO: 113822 - DNA, 15 bp, Homo sapiens
aatggaatctgccta

SEQ ID NO: 113823 - DNA, 15 bp, Homo sapiens
aaatggaatctgcct

SEQ ID NO: 113824 - DNA, 15 bp, Homo sapiens
gaaatggaatctgcc

SEQ ID NO: 113825 - DNA, 15 bp, Homo sapiens
tgaaatggaatctgc

SEQ ID NO: 113826 - DNA, 15 bp, Homo sapiens
atgaaatggaatctg

SEQ ID NO: 113827 - DNA, 15 bp, Homo sapiens
catgaaatggaatct

SEQ ID NO: 113828 - DNA, 15 bp, Homo sapiens
tcatgaaatggaatc

SEQ ID NO: 113829 - DNA, 15 bp, Homo sapiens
atcatgaaatggaat

SEQ ID NO: 113830 - DNA, 15 bp, Homo sapiens
catcatgaaatggaa

SEQ ID NO: 113831 - DNA, 15 bp, Homo sapiens
acatcatgaaatgga

SEQ ID NO: 113832 - DNA, 15 bp, Homo sapiens
gacatcatgaaatgg

SEQ ID NO: 113833 - DNA, 15 bp, Homo sapiens
tgacatcatgaaatg

SEQ ID NO: 113834 - DNA, 15 bp, Homo sapiens
ctgacatcatgaaat

SEQ ID NO: 113835 - DNA, 15 bp, Homo sapiens
tctgacatcatgaaa

SEQ ID NO: 113836 - DNA, 15 bp, Homo sapiens
atctgacatcatgaa

SEQ ID NO: 113837 - DNA, 15 bp, Homo sapiens
aatctgacatcatga

SEQ ID NO: 113838 - DNA, 15 bp, Homo sapiens
gaatctgacatcatg

SEQ ID NO: 113839 - DNA, 15 bp, Homo sapiens
ggaatctgacatcat

SEQ ID NO: 113840 - DNA, 15 bp, Homo sapiens
gggaatctgacatca

SEQ ID NO: 113841 - DNA, 15 bp, Homo sapiens
tgggaatctgacatc

SEQ ID NO: 113842 - DNA, 15 bp, Homo sapiens
gtgggaatctgacat

SEQ ID NO: 113843 - DNA, 15 bp, Homo sapiens
ggtgggaatctgaca

SEQ ID NO: 113844 - DNA, 15 bp, Homo sapiens
aggtgggaatctgac

SEQ ID NO: 113845 - DNA, 15 bp, Homo sapiens
gaggtgggaatctga

SEQ ID NO: 113846 - DNA, 15 bp, Homo sapiens
ggaggtgggaatctg

SEQ ID NO: 113847 - DNA, 15 bp, Homo sapiens
aggaggtgggaatct

SEQ ID NO: 113848 - DNA, 15 bp, Homo sapiens
caggaggtgggaatc

SEQ ID NO: 113849 - DNA, 15 bp, Homo sapiens
acaggaggtgggaat

SEQ ID NO: 113850 - DNA, 15 bp, Homo sapiens
tacaggaggtgggaa

SEQ ID NO: 113851 - DNA, 15 bp, Homo sapiens
ctacaggaggtggga

SEQ ID NO: 113852 - DNA, 15 bp, Homo sapiens
cctacaggaggtggg

SEQ ID NO: 113853 - DNA, 15 bp, Homo sapiens
acctacaggaggtgg

SEQ ID NO: 113854 - DNA, 15 bp, Homo sapiens
aacctacaggaggtg

SEQ ID NO: 113855 - DNA, 15 bp, Homo sapiens
taacctacaggaggt

SEQ ID NO: 113856 - DNA, 15 bp, Homo sapiens
ataacctacaggagg

SEQ ID NO: 113857 - DNA, 15 bp, Homo sapiens
tataacctacaggag

SEQ ID NO: 113858 - DNA, 15 bp, Homo sapiens
ttataacctacagga

SEQ ID NO: 113859 - DNA, 15 bp, Homo sapiens
attataacctacagg

SEQ ID NO: 113860 - DNA, 15 bp, Homo sapiens
tattataacctacag

SEQ ID NO: 113861 - DNA, 15 bp, Homo sapiens
ttattataacctaca

SEQ ID NO: 113862 - DNA, 15 bp, Homo sapiens
tttattataacctac

SEQ ID NO: 113863 - DNA, 15 bp, Homo sapiens
ctttattataaccta

SEQ ID NO: 113864 - DNA, 15 bp, Homo sapiens
tctttattataacct

SEQ ID NO: 113865 - DNA, 15 bp, Homo sapiens
atctttattataacc

SEQ ID NO: 113866 - DNA, 15 bp, Homo sapiens
tatctttattataac

SEQ ID NO: 113867 - DNA, 15 bp, Homo sapiens
atatctttattataa

SEQ ID NO: 113868 - DNA, 15 bp, Homo sapiens
tatatctttattata

SEQ ID NO: 113869 - DNA, 15 bp, Homo sapiens
ttatatctttattat

SEQ ID NO: 113870 - DNA, 15 bp, Homo sapiens
tttatatctttatta

SEQ ID NO: 113871 - DNA, 15 bp, Homo sapiens
atttatatctttatt

SEQ ID NO: 113872 - DNA, 15 bp, Homo sapiens
catttatatctttat

SEQ ID NO: 113873 - DNA, 15 bp, Homo sapiens
tcatttatatcttta

SEQ ID NO: 113874 - DNA, 15 bp, Homo sapiens
ttcatttatatcttt

SEQ ID NO: 113875 - DNA, 15 bp, Homo sapiens
tttcatttatatctt

SEQ ID NO: 113876 - DNA, 15 bp, Homo sapiens
ctttcatttatatct

SEQ ID NO: 113877 - DNA, 15 bp, Homo sapiens
actttcatttatatc

SEQ ID NO: 113878 - DNA, 15 bp, Homo sapiens
cactttcatttatat

SEQ ID NO: 113879 - DNA, 15 bp, Homo sapiens
tcactttcatttata

SEQ ID NO: 113880 - DNA, 15 bp, Homo sapiens
atcactttcatttat

SEQ ID NO: 113881 - DNA, 15 bp, Homo sapiens
catcactttcattta

SEQ ID NO: 113882 - DNA, 15 bp, Homo sapiens
tcatcactttcattt

SEQ ID NO: 113883 - DNA, 15 bp, Homo sapiens
ttcatcactttcatt

SEQ ID NO: 113884 - DNA, 15 bp, Homo sapiens
cttcatcactttcat

SEQ ID NO: 113885 - DNA, 15 bp, Homo sapiens
acttcatcactttca

SEQ ID NO: 113886 - DNA, 15 bp, Homo sapiens
aacttcatcactttc

SEQ ID NO: 113887 - DNA, 15 bp, Homo sapiens
caacttcatcacttt

SEQ ID NO: 113888 - DNA, 15 bp, Homo sapiens
tcaacttcatcactt

SEQ ID NO: 113889 - DNA, 15 bp, Homo sapiens
ctcaacttcatcact

SEQ ID NO: 113890 - DNA, 15 bp, Homo sapiens
cctcaacttcatcac

SEQ ID NO: 113891 - DNA, 15 bp, Homo sapiens
acctcaacttcatca

SEQ ID NO: 113892 - DNA, 15 bp, Homo sapiens
cacctcaacttcatc

SEQ ID NO: 113893 - DNA, 15 bp, Homo sapiens
tcacctcaacttcat

SEQ ID NO: 113894 - DNA, 15 bp, Homo sapiens
ctcacctcaacttca

SEQ ID NO: 113895 - DNA, 15 bp, Homo sapiens
actcacctcaacttc

SEQ ID NO: 113896 - DNA, 15 bp, Homo sapiens
aactcacctcaactt

SEQ ID NO: 113897 - DNA, 15 bp, Homo sapiens
aaactcacctcaact

SEQ ID NO: 113898 - DNA, 15 bp, Homo sapiens
aaaactcacctcaac

SEQ ID NO: 113899 - DNA, 15 bp, Homo sapiens
gaaaactcacctcaa

SEQ ID NO: 113900 - DNA, 15 bp, Homo sapiens
ggaaaactcacctca

SEQ ID NO: 113901 - DNA, 15 bp, Homo sapiens
gggaaaactcacctc

SEQ ID NO: 113902 - DNA, 15 bp, Homo sapiens
agggaaaactcacct

SEQ ID NO: 113903 - DNA, 15 bp, Homo sapiens
cagggaaaactcacc

SEQ ID NO: 113904 - DNA, 15 bp, Homo sapiens
gcagggaaaactcac

SEQ ID NO: 113905 - DNA, 15 bp, Homo sapiens
ggcagggaaaactca

SEQ ID NO: 113906 - DNA, 15 bp, Homo sapiens
tggcagggaaaactc

SEQ ID NO: 113907 - DNA, 15 bp, Homo sapiens
atggcagggaaaact

SEQ ID NO: 113908 - DNA, 15 bp, Homo sapiens
tatggcagggaaaac

SEQ ID NO: 113909 - DNA, 15 bp, Homo sapiens
ttatggcagggaaaa

SEQ ID NO: 113910 - DNA, 15 bp, Homo sapiens
tttatggcagggaaa

SEQ ID NO: 113911 - DNA, 15 bp, Homo sapiens
ctttatggcagggaa

SEQ ID NO: 113912 - DNA, 15 bp, Homo sapiens
actttatggcaggga

SEQ ID NO: 113913 - DNA, 15 bp, Homo sapiens
gactttatggcaggg

SEQ ID NO: 113914 - DNA, 15 bp, Homo sapiens
tgactttatggcagg

SEQ ID NO: 113915 - DNA, 15 bp, Homo sapiens
atgactttatggcag

SEQ ID NO: 113916 - DNA, 15 bp, Homo sapiens
aatgactttatggca

SEQ ID NO: 113917 - DNA, 15 bp, Homo sapiens
aaatgactttatggc

SEQ ID NO: 113918 - DNA, 15 bp, Homo sapiens
taaatgactttatgg

SEQ ID NO: 113919 - DNA, 15 bp, Homo sapiens
ctaaatgactttatg

SEQ ID NO: 113920 - DNA, 15 bp, Homo sapiens
gctaaatgactttat

SEQ ID NO: 113921 - DNA, 15 bp, Homo sapiens
tgctaaatgacttta

SEQ ID NO: 113922 - DNA, 15 bp, Homo sapiens
gtgctaaatgacttt

SEQ ID NO: 113923 - DNA, 15 bp, Homo sapiens
agtgctaaatgactt

SEQ ID NO: 113924 - DNA, 15 bp, Homo sapiens
cagtgctaaatgact

SEQ ID NO: 113925 - DNA, 15 bp, Homo sapiens
tcagtgctaaatgac

SEQ ID NO: 113926 - DNA, 15 bp, Homo sapiens
ttcagtgctaaatga

SEQ ID NO: 113927 - DNA, 15 bp, Homo sapiens
tttcagtgctaaatg

SEQ ID NO: 113928 - DNA, 15 bp, Homo sapiens
ctttcagtgctaaat

SEQ ID NO: 113929 - DNA, 15 bp, Homo sapiens
tctttcagtgctaaa

SEQ ID NO: 113930 - DNA, 15 bp, Homo sapiens
ctctttcagtgctaa

SEQ ID NO: 113931 - DNA, 15 bp, Homo sapiens
actctttcagtgcta

SEQ ID NO: 113932 - DNA, 15 bp, Homo sapiens
cactctttcagtgct

SEQ ID NO: 113933 - DNA, 15 bp, Homo sapiens
ccactctttcagtgc

SEQ ID NO: 113934 - DNA, 15 bp, Homo sapiens
cccactctttcagtg

SEQ ID NO: 113935 - DNA, 15 bp, Homo sapiens
ccccactctttcagt

SEQ ID NO: 113936 - DNA, 15 bp, Homo sapiens
accccactctttcag

SEQ ID NO: 113937 - DNA, 15 bp, Homo sapiens
aaccccactctttca

SEQ ID NO: 113938 - DNA, 15 bp, Homo sapiens
taaccccactctttc

SEQ ID NO: 113939 - DNA, 15 bp, Homo sapiens
ttaaccccactcttt

SEQ ID NO: 113940 - DNA, 15 bp, Homo sapiens
attaaccccactctt

SEQ ID NO: 113941 - DNA, 15 bp, Homo sapiens
aattaaccccactct

SEQ ID NO: 113942 - DNA, 15 bp, Homo sapiens
aaattaaccccactc

SEQ ID NO: 113943 - DNA, 15 bp, Homo sapiens
taaattaaccccact

SEQ ID NO: 113944 - DNA, 15 bp, Homo sapiens
ataaattaaccccac

SEQ ID NO: 113945 - DNA, 15 bp, Homo sapiens
gataaattaacccca

SEQ ID NO: 113946 - DNA, 15 bp, Homo sapiens
agataaattaacccc

SEQ ID NO: 113947 - DNA, 15 bp, Homo sapiens
cagataaattaaccc

SEQ ID NO: 113948 - DNA, 15 bp, Homo sapiens
acagataaattaacc

SEQ ID NO: 113949 - DNA, 15 bp, Homo sapiens
cacagataaattaac

SEQ ID NO: 113950 - DNA, 15 bp, Homo sapiens
acacagataaattaa

SEQ ID NO: 113951 - DNA, 15 bp, Homo sapiens
aacacagataaatta

SEQ ID NO: 113952 - DNA, 15 bp, Homo sapiens
aaacacagataaatt

SEQ ID NO: 113953 - DNA, 15 bp, Homo sapiens
aaaacacagataaat

SEQ ID NO: 113954 - DNA, 15 bp, Homo sapiens
aaaaacacagataaa

SEQ ID NO: 113955 - DNA, 15 bp, Homo sapiens
aaaaaacacagataa

SEQ ID NO: 113956 - DNA, 15 bp, Homo sapiens
aaaaaaacacagata

SEQ ID NO: 113957 - DNA, 15 bp, Homo sapiens
aaaaaaaacacagat

SEQ ID NO: 113958 - DNA, 15 bp, Homo sapiens
aaaaaaaaacacaga

SEQ ID NO: 113959 - DNA, 15 bp, Homo sapiens
taaaaaaaaacacag

SEQ ID NO: 113960 - DNA, 15 bp, Homo sapiens
ttaaaaaaaaacaca

SEQ ID NO: 113961 - DNA, 15 bp, Homo sapiens
attaaaaaaaaacac

SEQ ID NO: 113962 - DNA, 15 bp, Homo sapiens
tattaaaaaaaaaca

SEQ ID NO: 113963 - DNA, 15 bp, Homo sapiens
gtattaaaaaaaaac

SEQ ID NO: 113964 - DNA, 15 bp, Homo sapiens
agtattaaaaaaaaa

SEQ ID NO: 113965 - DNA, 15 bp, Homo sapiens
aagtattaaaaaaaa

SEQ ID NO: 113966 - DNA, 15 bp, Homo sapiens
aaagtattaaaaaaa

SEQ ID NO: 113967 - DNA, 15 bp, Homo sapiens
caaagtattaaaaaa

SEQ ID NO: 113968 - DNA, 15 bp, Homo sapiens
acaaagtattaaaaa

SEQ ID NO: 113969 - DNA, 15 bp, Homo sapiens
gacaaagtattaaaa

SEQ ID NO: 113970 - DNA, 15 bp, Homo sapiens
agacaaagtattaaa

SEQ ID NO: 113971 - DNA, 15 bp, Homo sapiens
aagacaaagtattaa

SEQ ID NO: 113972 - DNA, 15 bp, Homo sapiens
aaagacaaagtatta

SEQ ID NO: 113973 - DNA, 15 bp, Homo sapiens
taaagacaaagtatt

SEQ ID NO: 113974 - DNA, 15 bp, Homo sapiens
ttaaagacaaagtat

SEQ ID NO: 113975 - DNA, 15 bp, Homo sapiens
gttaaagacaaagta

SEQ ID NO: 113976 - DNA, 15 bp, Homo sapiens
tgttaaagacaaagt

SEQ ID NO: 113977 - DNA, 15 bp, Homo sapiens
gtgttaaagacaaag

SEQ ID NO: 113978 - DNA, 15 bp, Homo sapiens
agtgttaaagacaaa

SEQ ID NO: 113979 - DNA, 15 bp, Homo sapiens
cagtgttaaagacaa

SEQ ID NO: 113980 - DNA, 15 bp, Homo sapiens
acagtgttaaagaca

SEQ ID NO: 113981 - DNA, 15 bp, Homo sapiens
aacagtgttaaagac

SEQ ID NO: 113982 - DNA, 15 bp, Homo sapiens
aaacagtgttaaaga

SEQ ID NO: 113983 - DNA, 15 bp, Homo sapiens
taaacagtgttaaag

SEQ ID NO: 113984 - DNA, 15 bp, Homo sapiens
ttaaacagtgttaaa

SEQ ID NO: 113985 - DNA, 15 bp, Homo sapiens
tttaaacagtgttaa

SEQ ID NO: 113986 - DNA, 15 bp, Homo sapiens
atttaaacagtgtta

SEQ ID NO: 113987 - DNA, 15 bp, Homo sapiens
aatttaaacagtgtt

SEQ ID NO: 113988 - DNA, 15 bp, Homo sapiens
taatttaaacagtgt

SEQ ID NO: 113989 - DNA, 15 bp, Homo sapiens
gtaatttaaacagtg

SEQ ID NO: 113990 - DNA, 15 bp, Homo sapiens
agtaatttaaacagt

SEQ ID NO: 113991 - DNA, 15 bp, Homo sapiens
aagtaatttaaacag

SEQ ID NO: 113992 - DNA, 15 bp, Homo sapiens
aaagtaatttaaaca

SEQ ID NO: 113993 - DNA, 15 bp, Homo sapiens
caaagtaatttaaac

SEQ ID NO: 113994 - DNA, 15 bp, Homo sapiens
tcaaagtaatttaaa

SEQ ID NO: 113995 - DNA, 15 bp, Homo sapiens
ctcaaagtaatttaa

SEQ ID NO: 113996 - DNA, 15 bp, Homo sapiens
tctcaaagtaattta

SEQ ID NO: 113997 - DNA, 15 bp, Homo sapiens
ttctcaaagtaattt

SEQ ID NO: 113998 - DNA, 15 bp, Homo sapiens
attctcaaagtaatt

SEQ ID NO: 113999 - DNA, 15 bp, Homo sapiens
aattctcaaagtaat

SEQ ID NO: 114000 - DNA, 15 bp, Homo sapiens
taattctcaaagtaa

SEQ ID NO: 114001 - DNA, 15 bp, Homo sapiens
gtaattctcaaagta

SEQ ID NO: 114002 - DNA, 15 bp, Homo sapiens
tgtaattctcaaagt

SEQ ID NO: 114003 - DNA, 15 bp, Homo sapiens
ctgtaattctcaaag

SEQ ID NO: 114004 - DNA, 15 bp, Homo sapiens
gctgtaattctcaaa

SEQ ID NO: 114005 - DNA, 15 bp, Homo sapiens
agctgtaattctcaa

SEQ ID NO: 114006 - DNA, 15 bp, Homo sapiens
cagctgtaattctca

SEQ ID NO: 114007 - DNA, 15 bp, Homo sapiens
ccagctgtaattctc

SEQ ID NO: 114008 - DNA, 15 bp, Homo sapiens
tccagctgtaattct

SEQ ID NO: 114009 - DNA, 15 bp, Homo sapiens
ttccagctgtaattc

SEQ ID NO: 114010 - DNA, 15 bp, Homo sapiens
attccagctgtaatt

SEQ ID NO: 114011 - DNA, 15 bp, Homo sapiens
cattccagctgtaat

SEQ ID NO: 114012 - DNA, 15 bp, Homo sapiens
ccattccagctgtaa

SEQ ID NO: 114013 - DNA, 15 bp, Homo sapiens
tccattccagctgta

SEQ ID NO: 114014 - DNA, 15 bp, Homo sapiens
gtccattccagctgt

SEQ ID NO: 114015 - DNA, 15 bp, Homo sapiens
tgtccattccagctg

SEQ ID NO: 114016 - DNA, 15 bp, Homo sapiens
gtgtccattccagct

SEQ ID NO: 114017 - DNA, 15 bp, Homo sapiens
cgtgtccattccagc

SEQ ID NO: 114018 - DNA, 15 bp, Homo sapiens
acgtgtccattccag

SEQ ID NO: 114019 - DNA, 15 bp, Homo sapiens
cacgtgtccattcca

SEQ ID NO: 114020 - DNA, 15 bp, Homo sapiens
gcacgtgtccattcc

SEQ ID NO: 114021 - DNA, 15 bp, Homo sapiens
agcacgtgtccattc

SEQ ID NO: 114022 - DNA, 15 bp, Homo sapiens
aagcacgtgtccatt

SEQ ID NO: 114023 - DNA, 15 bp, Homo sapiens
aaagcacgtgtccat

SEQ ID NO: 114024 - DNA, 15 bp, Homo sapiens
aaaagcacgtgtcca

SEQ ID NO: 114025 - DNA, 15 bp, Homo sapiens
caaaagcacgtgtcc

SEQ ID NO: 114026 - DNA, 15 bp, Homo sapiens
tcaaaagcacgtgtc

SEQ ID NO: 114027 - DNA, 15 bp, Homo sapiens
gtcaaaagcacgtgt

SEQ ID NO: 114028 - DNA, 15 bp, Homo sapiens
agtcaaaagcacgtg

SEQ ID NO: 114029 - DNA, 15 bp, Homo sapiens
tagtcaaaagcacgt

SEQ ID NO: 114030 - DNA, 15 bp, Homo sapiens
ttagtcaaaagcacg

SEQ ID NO: 114031 - DNA, 15 bp, Homo sapiens
gttagtcaaaagcac

SEQ ID NO: 114032 - DNA, 15 bp, Homo sapiens
agttagtcaaaagca

SEQ ID NO: 114033 - DNA, 15 bp, Homo sapiens
gagttagtcaaaagc

SEQ ID NO: 114034 - DNA, 15 bp, Homo sapiens
tgagttagtcaaaag

SEQ ID NO: 114035 - DNA, 15 bp, Homo sapiens
atgagttagtcaaaa

SEQ ID NO: 114036 - DNA, 15 bp, Homo sapiens
gatgagttagtcaaa

SEQ ID NO: 114037 - DNA, 15 bp, Homo sapiens
agatgagttagtcaa

SEQ ID NO: 114038 - DNA, 15 bp, Homo sapiens
aagatgagttagtca

SEQ ID NO: 114039 - DNA, 15 bp, Homo sapiens
taagatgagttagtc

SEQ ID NO: 114040 - DNA, 15 bp, Homo sapiens
ataagatgagttagt

SEQ ID NO: 114041 - DNA, 15 bp, Homo sapiens
aataagatgagttag

SEQ ID NO: 114042 - DNA, 15 bp, Homo sapiens
taataagatgagtta

SEQ ID NO: 114043 - DNA, 15 bp, Homo sapiens
ttaataagatgagtt

SEQ ID NO: 114044 - DNA, 15 bp, Homo sapiens
attaataagatgagt

SEQ ID NO: 114045 - DNA, 15 bp, Homo sapiens
tattaataagatgag

SEQ ID NO: 114046 - DNA, 15 bp, Homo sapiens
ttattaataagatga

SEQ ID NO: 114047 - DNA, 15 bp, Homo sapiens
attattaataagatg

SEQ ID NO: 114048 - DNA, 15 bp, Homo sapiens
aattattaataagat

SEQ ID NO: 114049 - DNA, 15 bp, Homo sapiens
gaattattaataaga

SEQ ID NO: 114050 - DNA, 15 bp, Homo sapiens
tgaattattaataag

SEQ ID NO: 114051 - DNA, 15 bp, Homo sapiens
ttgaattattaataa

SEQ ID NO: 114052 - DNA, 15 bp, Homo sapiens
tttgaattattaata

SEQ ID NO: 114053 - DNA, 15 bp, Homo sapiens
ttttgaattattaat

SEQ ID NO: 114054 - DNA, 15 bp, Homo sapiens
attttgaattattaa

SEQ ID NO: 114055 - DNA, 15 bp, Homo sapiens
cattttgaattatta

SEQ ID NO: 114056 - DNA, 15 bp, Homo sapiens
tcattttgaattatt

SEQ ID NO: 114057 - DNA, 15 bp, Homo sapiens
atcattttgaattat

SEQ ID NO: 114058 - DNA, 15 bp, Homo sapiens
tatcattttgaatta

SEQ ID NO: 114059 - DNA, 15 bp, Homo sapiens
gtatcattttgaatt

SEQ ID NO: 114060 - DNA, 15 bp, Homo sapiens
tgtatcattttgaat

SEQ ID NO: 114061 - DNA, 15 bp, Homo sapiens
atgtatcattttgaa

SEQ ID NO: 114062 - DNA, 15 bp, Homo sapiens
catgtatcattttga

SEQ ID NO: 114063 - DNA, 15 bp, Homo sapiens
tcatgtatcattttg

SEQ ID NO: 114064 - DNA, 15 bp, Homo sapiens
atcatgtatcatttt

SEQ ID NO: 114065 - DNA, 15 bp, Homo sapiens
catcatgtatcattt

SEQ ID NO: 114066 - DNA, 15 bp, Homo sapiens
gcatcatgtatcatt

SEQ ID NO: 114067 - DNA, 15 bp, Homo sapiens
agcatcatgtatcat

SEQ ID NO: 114068 - DNA, 15 bp, Homo sapiens
aagcatcatgtatca

SEQ ID NO: 114069 - DNA, 15 bp, Homo sapiens
taagcatcatgtatc

SEQ ID NO: 114070 - DNA, 15 bp, Homo sapiens
gtaagcatcatgtat

SEQ ID NO: 114071 - DNA, 15 bp, Homo sapiens
tgtaagcatcatgta

SEQ ID NO: 114072 - DNA, 15 bp, Homo sapiens
atgtaagcatcatgt

SEQ ID NO: 114073 - DNA, 15 bp, Homo sapiens
aatgtaagcatcatg

SEQ ID NO: 114074 - DNA, 15 bp, Homo sapiens
aaatgtaagcatcat

SEQ ID NO: 114075 - DNA, 15 bp, Homo sapiens
caaatgtaagcatca

SEQ ID NO: 114076 - DNA, 15 bp, Homo sapiens
ccaaatgtaagcatc

SEQ ID NO: 114077 - DNA, 15 bp, Homo sapiens
gccaaatgtaagcat

SEQ ID NO: 114078 - DNA, 15 bp, Homo sapiens
agccaaatgtaagca

SEQ ID NO: 114079 - DNA, 15 bp, Homo sapiens
tagccaaatgtaagc

SEQ ID NO: 114080 - DNA, 15 bp, Homo sapiens
atagccaaatgtaag

SEQ ID NO: 114081 - DNA, 15 bp, Homo sapiens
aatagccaaatgtaa

SEQ ID NO: 114082 - DNA, 15 bp, Homo sapiens
aaatagccaaatgta

SEQ ID NO: 114083 - DNA, 15 bp, Homo sapiens
caaatagccaaatgt

SEQ ID NO: 114084 - DNA, 15 bp, Homo sapiens
tcaaatagccaaatg

SEQ ID NO: 114085 - DNA, 15 bp, Homo sapiens
ctcaaatagccaaat

SEQ ID NO: 114086 - DNA, 15 bp, Homo sapiens
gctcaaatagccaaa

SEQ ID NO: 114087 - DNA, 15 bp, Homo sapiens
tgctcaaatagccaa

SEQ ID NO: 114088 - DNA, 15 bp, Homo sapiens
ctgctcaaatagcca

SEQ ID NO: 114089 - DNA, 15 bp, Homo sapiens
actgctcaaatagcc

SEQ ID NO: 114090 - DNA, 15 bp, Homo sapiens
tactgctcaaatagc

SEQ ID NO: 114091 - DNA, 15 bp, Homo sapiens
gtactgctcaaatag

SEQ ID NO: 114092 - DNA, 15 bp, Homo sapiens
agtactgctcaaata

SEQ ID NO: 114093 - DNA, 15 bp, Homo sapiens
gagtactgctcaaat

SEQ ID NO: 114094 - DNA, 15 bp, Homo sapiens
tgagtactgctcaaa

SEQ ID NO: 114095 - DNA, 15 bp, Homo sapiens
ctgagtactgctcaa

SEQ ID NO: 114096 - DNA, 15 bp, Homo sapiens
tctgagtactgctca

SEQ ID NO: 114097 - DNA, 15 bp, Homo sapiens
ctctgagtactgctc

SEQ ID NO: 114098 - DNA, 15 bp, Homo sapiens
gctctgagtactgct

SEQ ID NO: 114099 - DNA, 15 bp, Homo sapiens
tgctctgagtactgc

SEQ ID NO: 114100 - DNA, 15 bp, Homo sapiens
atgctctgagtactg

SEQ ID NO: 114101 - DNA, 15 bp, Homo sapiens
catgctctgagtact

SEQ ID NO: 114102 - DNA, 15 bp, Homo sapiens
acatgctctgagtac

SEQ ID NO: 114103 - DNA, 15 bp, Homo sapiens
tacatgctctgagta

SEQ ID NO: 114104 - DNA, 15 bp, Homo sapiens
atacatgctctgagt

SEQ ID NO: 114105 - DNA, 15 bp, Homo sapiens
aatacatgctctgag

SEQ ID NO: 114106 - DNA, 15 bp, Homo sapiens
aaatacatgctctga

SEQ ID NO: 114107 - DNA, 15 bp, Homo sapiens
caaatacatgctctg

SEQ ID NO: 114108 - DNA, 15 bp, Homo sapiens
tcaaatacatgctct

SEQ ID NO: 114109 - DNA, 15 bp, Homo sapiens
ttcaaatacatgctc

SEQ ID NO: 114110 - DNA, 15 bp, Homo sapiens
tttcaaatacatgct

SEQ ID NO: 114111 - DNA, 15 bp, Homo sapiens
ctttcaaatacatgc

SEQ ID NO: 114112 - DNA, 15 bp, Homo sapiens
actttcaaatacatg

SEQ ID NO: 114113 - DNA, 15 bp, Homo sapiens
gactttcaaatacat

SEQ ID NO: 114114 - DNA, 15 bp, Homo sapiens
tgactttcaaataca

SEQ ID NO: 114115 - DNA, 15 bp, Homo sapiens
gtgactttcaaatac

SEQ ID NO: 114116 - DNA, 15 bp, Homo sapiens
agtgactttcaaata

SEQ ID NO: 114117 - DNA, 15 bp, Homo sapiens
cagtgactttcaaat

SEQ ID NO: 114118 - DNA, 15 bp, Homo sapiens
gcagtgactttcaaa

SEQ ID NO: 114119 - DNA, 15 bp, Homo sapiens
ggcagtgactttcaa

SEQ ID NO: 114120 - DNA, 15 bp, Homo sapiens
cggcagtgactttca

SEQ ID NO: 114121 - DNA, 15 bp, Homo sapiens
gcggcagtgactttc

SEQ ID NO: 114122 - DNA, 15 bp, Homo sapiens
tgcggcagtgacttt

SEQ ID NO: 114123 - DNA, 15 bp, Homo sapiens
ttgcggcagtgactt

SEQ ID NO: 114124 - DNA, 15 bp, Homo sapiens
cttgcggcagtgact

SEQ ID NO: 114125 - DNA, 15 bp, Homo sapiens
acttgcggcagtgac

SEQ ID NO: 114126 - DNA, 15 bp, Homo sapiens
aacttgcggcagtga

SEQ ID NO: 114127 - DNA, 15 bp, Homo sapiens
gaacttgcggcagtg

SEQ ID NO: 114128 - DNA, 15 bp, Homo sapiens
ggaacttgcggcagt

SEQ ID NO: 114129 - DNA, 15 bp, Homo sapiens
aggaacttgcggcag

SEQ ID NO: 114130 - DNA, 15 bp, Homo sapiens
aaggaacttgcggca

SEQ ID NO: 114131 - DNA, 15 bp, Homo sapiens
aaaggaacttgcggc

SEQ ID NO: 114132 - DNA, 15 bp, Homo sapiens
caaaggaacttgcgg

SEQ ID NO: 114133 - DNA, 15 bp, Homo sapiens
gcaaaggaacttgcg

SEQ ID NO: 114134 - DNA, 15 bp, Homo sapiens
ggcaaaggaacttgc

SEQ ID NO: 114135 - DNA, 15 bp, Homo sapiens
gggcaaaggaacttg

SEQ ID NO: 114136 - DNA, 15 bp, Homo sapiens
tgggcaaaggaactt

SEQ ID NO: 114137 - DNA, 15 bp, Homo sapiens
gtgggcaaaggaact

SEQ ID NO: 114138 - DNA, 15 bp, Homo sapiens
agtgggcaaaggaac

SEQ ID NO: 114139 - DNA, 15 bp, Homo sapiens
tagtgggcaaaggaa

SEQ ID NO: 114140 - DNA, 15 bp, Homo sapiens
ctagtgggcaaagga

SEQ ID NO: 114141 - DNA, 15 bp, Homo sapiens
actagtgggcaaagg

SEQ ID NO: 114142 - DNA, 15 bp, Homo sapiens
tactagtgggcaaag

SEQ ID NO: 114143 - DNA, 15 bp, Homo sapiens
ttactagtgggcaaa

SEQ ID NO: 114144 - DNA, 15 bp, Homo sapiens
attactagtgggcaa

SEQ ID NO: 114145 - DNA, 15 bp, Homo sapiens
aattactagtgggca

SEQ ID NO: 114146 - DNA, 15 bp, Homo sapiens
gaattactagtgggc

SEQ ID NO: 114147 - DNA, 15 bp, Homo sapiens
agaattactagtggg

SEQ ID NO: 114148 - DNA, 15 bp, Homo sapiens
aagaattactagtgg

SEQ ID NO: 114149 - DNA, 15 bp, Homo sapiens
aaagaattactagtg

SEQ ID NO: 114150 - DNA, 15 bp, Homo sapiens
aaaagaattactagt

SEQ ID NO: 114151 - DNA, 15 bp, Homo sapiens
gaaaagaattactag

SEQ ID NO: 114152 - DNA, 15 bp, Homo sapiens
agaaaagaattacta

SEQ ID NO: 114153 - DNA, 15 bp, Homo sapiens
gagaaaagaattact

SEQ ID NO: 114154 - DNA, 15 bp, Homo sapiens
ggagaaaagaattac

SEQ ID NO: 114155 - DNA, 15 bp, Homo sapiens
aggagaaaagaatta

SEQ ID NO: 114156 - DNA, 15 bp, Homo sapiens
aaggagaaaagaatt

SEQ ID NO: 114157 - DNA, 15 bp, Homo sapiens
gaaggagaaaagaat

SEQ ID NO: 114158 - DNA, 15 bp, Homo sapiens
agaaggagaaaagaa

SEQ ID NO: 114159 - DNA, 15 bp, Homo sapiens
gagaaggagaaaaga

SEQ ID NO: 114160 - DNA, 15 bp, Homo sapiens
agagaaggagaaaag

SEQ ID NO: 114161 - DNA, 15 bp, Homo sapiens
gagagaaggagaaaa

SEQ ID NO: 114162 - DNA, 15 bp, Homo sapiens
tgagagaaggagaaa

SEQ ID NO: 114163 - DNA, 15 bp, Homo sapiens
ttgagagaaggagaa

SEQ ID NO: 114164 - DNA, 15 bp, Homo sapiens
attgagagaaggaga

SEQ ID NO: 114165 - DNA, 15 bp, Homo sapiens
aattgagagaaggag

SEQ ID NO: 114166 - DNA, 15 bp, Homo sapiens
aaattgagagaagga

SEQ ID NO: 114167 - DNA, 15 bp, Homo sapiens
gaaattgagagaagg

SEQ ID NO: 114168 - DNA, 15 bp, Homo sapiens
agaaattgagagaag

SEQ ID NO: 114169 - DNA, 15 bp, Homo sapiens
cagaaattgagagaa

SEQ ID NO: 114170 - DNA, 15 bp, Homo sapiens
tcagaaattgagaga

SEQ ID NO: 114171 - DNA, 15 bp, Homo sapiens
ttcagaaattgagag

SEQ ID NO: 114172 - DNA, 15 bp, Homo sapiens
attcagaaattgaga

SEQ ID NO: 114173 - DNA, 15 bp, Homo sapiens
gattcagaaattgag

SEQ ID NO: 114174 - DNA, 15 bp, Homo sapiens
agattcagaaattga

SEQ ID NO: 114175 - DNA, 15 bp, Homo sapiens
aagattcagaaattg

SEQ ID NO: 114176 - DNA, 15 bp, Homo sapiens
aaagattcagaaatt

SEQ ID NO: 114177 - DNA, 15 bp, Homo sapiens
caaagattcagaaat

SEQ ID NO: 114178 - DNA, 15 bp, Homo sapiens
tcaaagattcagaaa

SEQ ID NO: 114179 - DNA, 15 bp, Homo sapiens
ttcaaagattcagaa

SEQ ID NO: 114180 - DNA, 15 bp, Homo sapiens
attcaaagattcaga

SEQ ID NO: 114181 - DNA, 15 bp, Homo sapiens
tattcaaagattcag

SEQ ID NO: 114182 - DNA, 15 bp, Homo sapiens
ctattcaaagattca

SEQ ID NO: 114183 - DNA, 15 bp, Homo sapiens
actattcaaagattc

SEQ ID NO: 114184 - DNA, 15 bp, Homo sapiens
tactattcaaagatt

SEQ ID NO: 114185 - DNA, 15 bp, Homo sapiens
atactattcaaagat

SEQ ID NO: 114186 - DNA, 15 bp, Homo sapiens
catactattcaaaga

SEQ ID NO: 114187 - DNA, 15 bp, Homo sapiens
acatactattcaaag

SEQ ID NO: 114188 - DNA, 15 bp, Homo sapiens
aacatactattcaaa

SEQ ID NO: 114189 - DNA, 15 bp, Homo sapiens
caacatactattcaa

SEQ ID NO: 114190 - DNA, 15 bp, Homo sapiens
acaacatactattca

SEQ ID NO: 114191 - DNA, 15 bp, Homo sapiens
aacaacatactattc

SEQ ID NO: 114192 - DNA, 15 bp, Homo sapiens
aaacaacatactatt

SEQ ID NO: 114193 - DNA, 15 bp, Homo sapiens
caaacaacatactat

SEQ ID NO: 114194 - DNA, 15 bp, Homo sapiens
acaaacaacatacta

SEQ ID NO: 114195 - DNA, 15 bp, Homo sapiens
aacaaacaacatact

SEQ ID NO: 114196 - DNA, 15 bp, Homo sapiens
aaacaaacaacatac

SEQ ID NO: 114197 - DNA, 15 bp, Homo sapiens
taaacaaacaacata

SEQ ID NO: 114198 - DNA, 15 bp, Homo sapiens
gtaaacaaacaacat

SEQ ID NO: 114199 - DNA, 15 bp, Homo sapiens
tgtaaacaaacaaca

SEQ ID NO: 114200 - DNA, 15 bp, Homo sapiens
ttgtaaacaaacaac

SEQ ID NO: 114201 - DNA, 15 bp, Homo sapiens
gttgtaaacaaacaa

SEQ ID NO: 114202 - DNA, 15 bp, Homo sapiens
agttgtaaacaaaca

SEQ ID NO: 114203 - DNA, 15 bp, Homo sapiens
cagttgtaaacaaac

SEQ ID NO: 114204 - DNA, 15 bp, Homo sapiens
acagttgtaaacaaa

SEQ ID NO: 114205 - DNA, 15 bp, Homo sapiens
cacagttgtaaacaa

SEQ ID NO: 114206 - DNA, 15 bp, Homo sapiens
acacagttgtaaaca

SEQ ID NO: 114207 - DNA, 15 bp, Homo sapiens
gacacagttgtaaac

SEQ ID NO: 114208 - DNA, 15 bp, Homo sapiens
ggacacagttgtaaa

SEQ ID NO: 114209 - DNA, 15 bp, Homo sapiens
gggacacagttgtaa

SEQ ID NO: 114210 - DNA, 15 bp, Homo sapiens
ggggacacagttgta

SEQ ID NO: 114211 - DNA, 15 bp, Homo sapiens
tggggacacagttgt

SEQ ID NO: 114212 - DNA, 15 bp, Homo sapiens
atggggacacagttg

SEQ ID NO: 114213 - DNA, 15 bp, Homo sapiens
aatggggacacagtt

SEQ ID NO: 114214 - DNA, 15 bp, Homo sapiens
caatggggacacagt

SEQ ID NO: 114215 - DNA, 15 bp, Homo sapiens
acaatggggacacag

SEQ ID NO: 114216 - DNA, 15 bp, Homo sapiens
tacaatggggacaca

SEQ ID NO: 114217 - DNA, 15 bp, Homo sapiens
ttacaatggggacac

SEQ ID NO: 114218 - DNA, 15 bp, Homo sapiens
cttacaatggggaca

SEQ ID NO: 114219 - DNA, 15 bp, Homo sapiens
gcttacaatggggac

SEQ ID NO: 114220 - DNA, 15 bp, Homo sapiens
tgcttacaatgggga

SEQ ID NO: 114221 - DNA, 15 bp, Homo sapiens
ttgcttacaatgggg

SEQ ID NO: 114222 - DNA, 15 bp, Homo sapiens
tttgcttacaatggg

SEQ ID NO: 114223 - DNA, 15 bp, Homo sapiens
ttttgcttacaatgg

SEQ ID NO: 114224 - DNA, 15 bp, Homo sapiens
attttgcttacaatg

SEQ ID NO: 114225 - DNA, 15 bp, Homo sapiens
cattttgcttacaat

SEQ ID NO: 114226 - DNA, 15 bp, Homo sapiens
ccattttgcttacaa

SEQ ID NO: 114227 - DNA, 15 bp, Homo sapiens
tccattttgcttaca

SEQ ID NO: 114228 - DNA, 15 bp, Homo sapiens
atccattttgcttac

SEQ ID NO: 114229 - DNA, 15 bp, Homo sapiens
aatccattttgctta

SEQ ID NO: 114230 - DNA, 15 bp, Homo sapiens
taatccattttgctt

SEQ ID NO: 114231 - DNA, 15 bp, Homo sapiens
ataatccattttgct

SEQ ID NO: 114232 - DNA, 15 bp, Homo sapiens
cataatccattttgc

SEQ ID NO: 114233 - DNA, 15 bp, Homo sapiens
tcataatccattttg

SEQ ID NO: 114234 - DNA, 15 bp, Homo sapiens
ttcataatccatttt

SEQ ID NO: 114235 - DNA, 15 bp, Homo sapiens
tttcataatccattt

SEQ ID NO: 114236 - DNA, 15 bp, Homo sapiens
ttttcataatccatt

SEQ ID NO: 114237 - DNA, 15 bp, Homo sapiens
attttcataatccat

SEQ ID NO: 114238 - DNA, 15 bp, Homo sapiens
aattttcataatcca

SEQ ID NO: 114239 - DNA, 15 bp, Homo sapiens
taattttcataatcc

SEQ ID NO: 114240 - DNA, 15 bp, Homo sapiens
ttaattttcataatc

SEQ ID NO: 114241 - DNA, 15 bp, Homo sapiens
attaattttcataat

SEQ ID NO: 114242 - DNA, 15 bp, Homo sapiens
aattaattttcataa

SEQ ID NO: 114243 - DNA, 15 bp, Homo sapiens
aaattaattttcata

SEQ ID NO: 114244 - DNA, 15 bp, Homo sapiens
aaaattaattttcat

SEQ ID NO: 114245 - DNA, 15 bp, Homo sapiens
taaaattaattttca

SEQ ID NO: 114246 - DNA, 15 bp, Homo sapiens
gtaaaattaattttc

SEQ ID NO: 114247 - DNA, 15 bp, Homo sapiens
tgtaaaattaatttt

SEQ ID NO: 114248 - DNA, 15 bp, Homo sapiens
gtgtaaaattaattt

SEQ ID NO: 114249 - DNA, 15 bp, Homo sapiens
tgtgtaaaattaatt

SEQ ID NO: 114250 - DNA, 15 bp, Homo sapiens
ctgtgtaaaattaat

SEQ ID NO: 114251 - DNA, 15 bp, Homo sapiens
cctgtgtaaaattaa

SEQ ID NO: 114252 - DNA, 15 bp, Homo sapiens
tcctgtgtaaaatta

SEQ ID NO: 114253 - DNA, 15 bp, Homo sapiens
ttcctgtgtaaaatt

SEQ ID NO: 114254 - DNA, 15 bp, Homo sapiens
tttcctgtgtaaaat

SEQ ID NO: 114255 - DNA, 15 bp, Homo sapiens
ctttcctgtgtaaaa

SEQ ID NO: 114256 - DNA, 15 bp, Homo sapiens
tctttcctgtgtaaa

SEQ ID NO: 114257 - DNA, 15 bp, Homo sapiens
ttctttcctgtgtaa

SEQ ID NO: 114258 - DNA, 15 bp, Homo sapiens
tttctttcctgtgta

SEQ ID NO: 114259 - DNA, 15 bp, Homo sapiens
atttctttcctgtgt

SEQ ID NO: 114260 - DNA, 15 bp, Homo sapiens
gatttctttcctgtg

SEQ ID NO: 114261 - DNA, 15 bp, Homo sapiens
tgatttctttcctgt

SEQ ID NO: 114262 - DNA, 15 bp, Homo sapiens
atgatttctttcctg

SEQ ID NO: 114263 - DNA, 15 bp, Homo sapiens
catgatttctttcct

SEQ ID NO: 114264 - DNA, 15 bp, Homo sapiens
gcatgatttctttcc

SEQ ID NO: 114265 - DNA, 15 bp, Homo sapiens
agcatgatttctttc

SEQ ID NO: 114266 - DNA, 15 bp, Homo sapiens
aagcatgatttcttt

SEQ ID NO: 114267 - DNA, 15 bp, Homo sapiens
aaagcatgatttctt

SEQ ID NO: 114268 - DNA, 15 bp, Homo sapiens
taaagcatgatttct

SEQ ID NO: 114269 - DNA, 15 bp, Homo sapiens
ataaagcatgatttc

SEQ ID NO: 114270 - DNA, 15 bp, Homo sapiens
aataaagcatgattt

SEQ ID NO: 114271 - DNA, 15 bp, Homo sapiens
taataaagcatgatt

SEQ ID NO: 114272 - DNA, 15 bp, Homo sapiens
gtaataaagcatgat

SEQ ID NO: 114273 - DNA, 15 bp, Homo sapiens
tgtaataaagcatga

SEQ ID NO: 114274 - DNA, 15 bp, Homo sapiens
ttgtaataaagcatg

SEQ ID NO: 114275 - DNA, 15 bp, Homo sapiens
tttgtaataaagcat

SEQ ID NO: 114276 - DNA, 15 bp, Homo sapiens
ttttgtaataaagca

SEQ ID NO: 114277 - DNA, 15 bp, Homo sapiens
attttgtaataaagc

SEQ ID NO: 114278 - DNA, 15 bp, Homo sapiens
tattttgtaataaag

SEQ ID NO: 114279 - DNA, 15 bp, Homo sapiens
ctattttgtaataaa

SEQ ID NO: 114280 - DNA, 15 bp, Homo sapiens
actattttgtaataa

SEQ ID NO: 114281 - DNA, 15 bp, Homo sapiens
tactattttgtaata

SEQ ID NO: 114282 - DNA, 15 bp, Homo sapiens
atactattttgtaat

SEQ ID NO: 114283 - DNA, 15 bp, Homo sapiens
tatactattttgtaa

SEQ ID NO: 114284 - DNA, 15 bp, Homo sapiens
gtatactattttgta

SEQ ID NO: 114285 - DNA, 15 bp, Homo sapiens
agtatactattttgt

SEQ ID NO: 114286 - DNA, 15 bp, Homo sapiens
tagtatactattttg

SEQ ID NO: 114287 - DNA, 15 bp, Homo sapiens
ctagtatactatttt

SEQ ID NO: 114288 - DNA, 15 bp, Homo sapiens
tctagtatactattt

SEQ ID NO: 114289 - DNA, 15 bp, Homo sapiens
ttctagtatactatt

SEQ ID NO: 114290 - DNA, 15 bp, Homo sapiens
attctagtatactat

SEQ ID NO: 114291 - DNA, 15 bp, Homo sapiens
aattctagtatacta

SEQ ID NO: 114292 - DNA, 15 bp, Homo sapiens
aaattctagtatact

SEQ ID NO: 114293 - DNA, 15 bp, Homo sapiens
gaaattctagtatac

SEQ ID NO: 114294 - DNA, 15 bp, Homo sapiens
agaaattctagtata

SEQ ID NO: 114295 - DNA, 15 bp, Homo sapiens
aagaaattctagtat

SEQ ID NO: 114296 - DNA, 15 bp, Homo sapiens
aaagaaattctagta

SEQ ID NO: 114297 - DNA, 15 bp, Homo sapiens
taaagaaattctagt

SEQ ID NO: 114298 - DNA, 15 bp, Homo sapiens
ttaaagaaattctag

SEQ ID NO: 114299 - DNA, 15 bp, Homo sapiens
cttaaagaaattcta

SEQ ID NO: 114300 - DNA, 15 bp, Homo sapiens
acttaaagaaattct

SEQ ID NO: 114301 - DNA, 15 bp, Homo sapiens
tacttaaagaaattc

SEQ ID NO: 114302 - DNA, 15 bp, Homo sapiens
ctacttaaagaaatt

SEQ ID NO: 114303 - DNA, 15 bp, Homo sapiens
gctacttaaagaaat

SEQ ID NO: 114304 - DNA, 15 bp, Homo sapiens
tgctacttaaagaaa

SEQ ID NO: 114305 - DNA, 15 bp, Homo sapiens
ctgctacttaaagaa

SEQ ID NO: 114306 - DNA, 15 bp, Homo sapiens
actgctacttaaaga

SEQ ID NO: 114307 - DNA, 15 bp, Homo sapiens
cactgctacttaaag

SEQ ID NO: 114308 - DNA, 15 bp, Homo sapiens
tcactgctacttaaa

SEQ ID NO: 114309 - DNA, 15 bp, Homo sapiens
ttcactgctacttaa

SEQ ID NO: 114310 - DNA, 15 bp, Homo sapiens
attcactgctactta

SEQ ID NO: 114311 - DNA, 15 bp, Homo sapiens
gattcactgctactt

SEQ ID NO: 114312 - DNA, 15 bp, Homo sapiens
agattcactgctact

SEQ ID NO: 114313 - DNA, 15 bp, Homo sapiens
aagattcactgctac

SEQ ID NO: 114314 - DNA, 15 bp, Homo sapiens
gaagattcactgcta

SEQ ID NO: 114315 - DNA, 15 bp, Homo sapiens
agaagattcactgct

SEQ ID NO: 114316 - DNA, 15 bp, Homo sapiens
aagaagattcactgc

SEQ ID NO: 114317 - DNA, 15 bp, Homo sapiens
caagaagattcactg

SEQ ID NO: 114318 - DNA, 15 bp, Homo sapiens
ccaagaagattcact

SEQ ID NO: 114319 - DNA, 15 bp, Homo sapiens
accaagaagattcac

SEQ ID NO: 114320 - DNA, 15 bp, Homo sapiens
taccaagaagattca

SEQ ID NO: 114321 - DNA, 15 bp, Homo sapiens
ataccaagaagattc

SEQ ID NO: 114322 - DNA, 15 bp, Homo sapiens
tataccaagaagatt

SEQ ID NO: 114323 - DNA, 15 bp, Homo sapiens
atataccaagaagat

SEQ ID NO: 114324 - DNA, 15 bp, Homo sapiens
aatataccaagaaga

SEQ ID NO: 114325 - DNA, 15 bp, Homo sapiens
aaatataccaagaag

SEQ ID NO: 114326 - DNA, 15 bp, Homo sapiens
aaaatataccaagaa

SEQ ID NO: 114327 - DNA, 15 bp, Homo sapiens
aaaaatataccaaga

SEQ ID NO: 114328 - DNA, 15 bp, Homo sapiens
taaaaatataccaag

SEQ ID NO: 114329 - DNA, 15 bp, Homo sapiens
ttaaaaatataccaa

SEQ ID NO: 114330 - DNA, 15 bp, Homo sapiens
tttaaaaatatacca

SEQ ID NO: 114331 - DNA, 15 bp, Homo sapiens
ttttaaaaatatacc

SEQ ID NO: 114332 - DNA, 15 bp, Homo sapiens
tttttaaaaatatac

SEQ ID NO: 114333 - DNA, 15 bp, Homo sapiens
gtttttaaaaatata

SEQ ID NO: 114334 - DNA, 15 bp, Homo sapiens
ggtttttaaaaatat

SEQ ID NO: 114335 - DNA, 15 bp, Homo sapiens
aggtttttaaaaata

SEQ ID NO: 114336 - DNA, 15 bp, Homo sapiens
taggtttttaaaaat

SEQ ID NO: 114337 - DNA, 15 bp, Homo sapiens
gtaggtttttaaaaa

SEQ ID NO: 114338 - DNA, 15 bp, Homo sapiens
tgtaggtttttaaaa

SEQ ID NO: 114339 - DNA, 15 bp, Homo sapiens
ttgtaggtttttaaa

SEQ ID NO: 114340 - DNA, 15 bp, Homo sapiens
cttgtaggtttttaa

SEQ ID NO: 114341 - DNA, 15 bp, Homo sapiens
gcttgtaggttttta

SEQ ID NO: 114342 - DNA, 15 bp, Homo sapiens
agcttgtaggttttt

SEQ ID NO: 114343 - DNA, 15 bp, Homo sapiens
aagcttgtaggtttt

SEQ ID NO: 114344 - DNA, 15 bp, Homo sapiens
aaagcttgtaggttt

SEQ ID NO: 114345 - DNA, 15 bp, Homo sapiens
taaagcttgtaggtt

SEQ ID NO: 114346 - DNA, 15 bp, Homo sapiens
ctaaagcttgtaggt

SEQ ID NO: 114347 - DNA, 15 bp, Homo sapiens
actaaagcttgtagg

SEQ ID NO: 114348 - DNA, 15 bp, Homo sapiens
aactaaagcttgtag

SEQ ID NO: 114349 - DNA, 15 bp, Homo sapiens
aaactaaagcttgta

SEQ ID NO: 114350 - DNA, 15 bp, Homo sapiens
taaactaaagcttgt

SEQ ID NO: 114351 - DNA, 15 bp, Homo sapiens
ataaactaaagcttg

SEQ ID NO: 114352 - DNA, 15 bp, Homo sapiens
tataaactaaagctt

SEQ ID NO: 114353 - DNA, 15 bp, Homo sapiens
gtataaactaaagct

SEQ ID NO: 114354 - DNA, 15 bp, Homo sapiens
tgtataaactaaagc

SEQ ID NO: 114355 - DNA, 15 bp, Homo sapiens
atgtataaactaaag

SEQ ID NO: 114356 - DNA, 15 bp, Homo sapiens
tatgtataaactaaa

SEQ ID NO: 114357 - DNA, 15 bp, Homo sapiens
atatgtataaactaa

SEQ ID NO: 114358 - DNA, 15 bp, Homo sapiens
aatatgtataaacta

SEQ ID NO: 114359 - DNA, 15 bp, Homo sapiens
caatatgtataaact

SEQ ID NO: 114360 - DNA, 15 bp, Homo sapiens
ccaatatgtataaac

SEQ ID NO: 114361 - DNA, 15 bp, Homo sapiens
accaatatgtataaa

SEQ ID NO: 114362 - DNA, 15 bp, Homo sapiens
taccaatatgtataa

SEQ ID NO: 114363 - DNA, 15 bp, Homo sapiens
ttaccaatatgtata

SEQ ID NO: 114364 - DNA, 15 bp, Homo sapiens
tttaccaatatgtat

SEQ ID NO: 114365 - DNA, 15 bp, Homo sapiens
ttttaccaatatgta

SEQ ID NO: 114366 - DNA, 15 bp, Homo sapiens
attttaccaatatgt

SEQ ID NO: 114367 - DNA, 15 bp, Homo sapiens
gattttaccaatatg

SEQ ID NO: 114368 - DNA, 15 bp, Homo sapiens
agattttaccaatat

SEQ ID NO: 114369 - DNA, 15 bp, Homo sapiens
gagattttaccaata

SEQ ID NO: 114370 - DNA, 15 bp, Homo sapiens
agagattttaccaat

SEQ ID NO: 114371 - DNA, 15 bp, Homo sapiens
aagagattttaccaa

SEQ ID NO: 114372 - DNA, 15 bp, Homo sapiens
aaagagattttacca

SEQ ID NO: 114373 - DNA, 15 bp, Homo sapiens
aaaagagattttacc

SEQ ID NO: 114374 - DNA, 15 bp, Homo sapiens
aaaaagagattttac

SEQ ID NO: 114375 - DNA, 15 bp, Homo sapiens
gaaaaagagatttta

SEQ ID NO: 114376 - DNA, 15 bp, Homo sapiens
tgaaaaagagatttt

SEQ ID NO: 114377 - DNA, 15 bp, Homo sapiens
gtgaaaaagagattt

SEQ ID NO: 114378 - DNA, 15 bp, Homo sapiens
tgtgaaaaagagatt

SEQ ID NO: 114379 - DNA, 15 bp, Homo sapiens
ctgtgaaaaagagat

SEQ ID NO: 114380 - DNA, 15 bp, Homo sapiens
cctgtgaaaaagaga

SEQ ID NO: 114381 - DNA, 15 bp, Homo sapiens
acctgtgaaaaagag

SEQ ID NO: 114382 - DNA, 15 bp, Homo sapiens
aacctgtgaaaaaga

SEQ ID NO: 114383 - DNA, 15 bp, Homo sapiens
taacctgtgaaaaag

SEQ ID NO: 114384 - DNA, 15 bp, Homo sapiens
ataacctgtgaaaaa

SEQ ID NO: 114385 - DNA, 15 bp, Homo sapiens
tataacctgtgaaaa

SEQ ID NO: 114386 - DNA, 15 bp, Homo sapiens
gtataacctgtgaaa

SEQ ID NO: 114387 - DNA, 15 bp, Homo sapiens
ggtataacctgtgaa

SEQ ID NO: 114388 - DNA, 15 bp, Homo sapiens
cggtataacctgtga

SEQ ID NO: 114389 - DNA, 15 bp, Homo sapiens
acggtataacctgtg

SEQ ID NO: 114390 - DNA, 15 bp, Homo sapiens
cacggtataacctgt

SEQ ID NO: 114391 - DNA, 15 bp, Homo sapiens
tcacggtataacctg

SEQ ID NO: 114392 - DNA, 15 bp, Homo sapiens
ttcacggtataacct

SEQ ID NO: 114393 - DNA, 15 bp, Homo sapiens
gttcacggtataacc

SEQ ID NO: 114394 - DNA, 15 bp, Homo sapiens
agttcacggtataac

SEQ ID NO: 114395 - DNA, 15 bp, Homo sapiens
tagttcacggtataa

SEQ ID NO: 114396 - DNA, 15 bp, Homo sapiens
gtagttcacggtata

SEQ ID NO: 114397 - DNA, 15 bp, Homo sapiens
ggtagttcacggtat

SEQ ID NO: 114398 - DNA, 15 bp, Homo sapiens
aggtagttcacggta

SEQ ID NO: 114399 - DNA, 15 bp, Homo sapiens
caggtagttcacggt

SEQ ID NO: 114400 - DNA, 15 bp, Homo sapiens
gcaggtagttcacgg

SEQ ID NO: 114401 - DNA, 15 bp, Homo sapiens
agcaggtagttcacg

SEQ ID NO: 114402 - DNA, 15 bp, Homo sapiens
aagcaggtagttcac

SEQ ID NO: 114403 - DNA, 15 bp, Homo sapiens
taagcaggtagttca

SEQ ID NO: 114404 - DNA, 15 bp, Homo sapiens
ataagcaggtagttc

SEQ ID NO: 114405 - DNA, 15 bp, Homo sapiens
gataagcaggtagtt

SEQ ID NO: 114406 - DNA, 15 bp, Homo sapiens
agataagcaggtagt

SEQ ID NO: 114407 - DNA, 15 bp, Homo sapiens
gagataagcaggtag

SEQ ID NO: 114408 - DNA, 15 bp, Homo sapiens
ggagataagcaggta

SEQ ID NO: 114409 - DNA, 15 bp, Homo sapiens
gggagataagcaggt

SEQ ID NO: 114410 - DNA, 15 bp, Homo sapiens
cgggagataagcagg

SEQ ID NO: 114411 - DNA, 15 bp, Homo sapiens
acgggagataagcag

SEQ ID NO: 114412 - DNA, 15 bp, Homo sapiens
aacgggagataagca

SEQ ID NO: 114413 - DNA, 15 bp, Homo sapiens
caacgggagataagc

SEQ ID NO: 114414 - DNA, 15 bp, Homo sapiens
tcaacgggagataag

SEQ ID NO: 114415 - DNA, 15 bp, Homo sapiens
ctcaacgggagataa

SEQ ID NO: 114416 - DNA, 15 bp, Homo sapiens
gctcaacgggagata

SEQ ID NO: 114417 - DNA, 15 bp, Homo sapiens
agctcaacgggagat

SEQ ID NO: 114418 - DNA, 15 bp, Homo sapiens
gagctcaacgggaga

SEQ ID NO: 114419 - DNA, 15 bp, Homo sapiens
agagctcaacgggag

SEQ ID NO: 114420 - DNA, 15 bp, Homo sapiens
aagagctcaacggga

SEQ ID NO: 114421 - DNA, 15 bp, Homo sapiens
aaagagctcaacggg

SEQ ID NO: 114422 - DNA, 15 bp, Homo sapiens
caaagagctcaacgg

SEQ ID NO: 114423 - DNA, 15 bp, Homo sapiens
tcaaagagctcaacg

SEQ ID NO: 114424 - DNA, 15 bp, Homo sapiens
gtcaaagagctcaac

SEQ ID NO: 114425 - DNA, 15 bp, Homo sapiens
ggtcaaagagctcaa

SEQ ID NO: 114426 - DNA, 15 bp, Homo sapiens
tggtcaaagagctca

SEQ ID NO: 114427 - DNA, 15 bp, Homo sapiens
ttggtcaaagagctc

SEQ ID NO: 114428 - DNA, 15 bp, Homo sapiens
tttggtcaaagagct

SEQ ID NO: 114429 - DNA, 15 bp, Homo sapiens
ttttggtcaaagagc

SEQ ID NO: 114430 - DNA, 15 bp, Homo sapiens
attttggtcaaagag

SEQ ID NO: 114431 - DNA, 15 bp, Homo sapiens
cattttggtcaaaga

SEQ ID NO: 114432 - DNA, 15 bp, Homo sapiens
acattttggtcaaag

SEQ ID NO: 114433 - DNA, 15 bp, Homo sapiens
cacattttggtcaaa

SEQ ID NO: 114434 - DNA, 15 bp, Homo sapiens
gcacattttggtcaa

SEQ ID NO: 114435 - DNA, 15 bp, Homo sapiens
agcacattttggtca

SEQ ID NO: 114436 - DNA, 15 bp, Homo sapiens
tagcacattttggtc

SEQ ID NO: 114437 - DNA, 15 bp, Homo sapiens
atagcacattttggt

SEQ ID NO: 114438 - DNA, 15 bp, Homo sapiens
catagcacattttgg

SEQ ID NO: 114439 - DNA, 15 bp, Homo sapiens
ccatagcacattttg

SEQ ID NO: 114440 - DNA, 15 bp, Homo sapiens
tccatagcacatttt

SEQ ID NO: 114441 - DNA, 15 bp, Homo sapiens
ctccatagcacattt

SEQ ID NO: 114442 - DNA, 15 bp, Homo sapiens
tctccatagcacatt

SEQ ID NO: 114443 - DNA, 15 bp, Homo sapiens
atctccatagcacat

SEQ ID NO: 114444 - DNA, 15 bp, Homo sapiens
gatctccatagcaca

SEQ ID NO: 114445 - DNA, 15 bp, Homo sapiens
agatctccatagcac

SEQ ID NO: 114446 - DNA, 15 bp, Homo sapiens
tagatctccatagca

SEQ ID NO: 114447 - DNA, 15 bp, Homo sapiens
ttagatctccatagc

SEQ ID NO: 114448 - DNA, 15 bp, Homo sapiens
gttagatctccatag

SEQ ID NO: 114449 - DNA, 15 bp, Homo sapiens
tgttagatctccata

SEQ ID NO: 114450 - DNA, 15 bp, Homo sapiens
atgttagatctccat

SEQ ID NO: 114451 - DNA, 15 bp, Homo sapiens
catgttagatctcca

SEQ ID NO: 114452 - DNA, 15 bp, Homo sapiens
acatgttagatctcc

SEQ ID NO: 114453 - DNA, 15 bp, Homo sapiens
cacatgttagatctc

SEQ ID NO: 114454 - DNA, 15 bp, Homo sapiens
tcacatgttagatct

SEQ ID NO: 114455 - DNA, 15 bp, Homo sapiens
ttcacatgttagatc

SEQ ID NO: 114456 - DNA, 15 bp, Homo sapiens
gttcacatgttagat

SEQ ID NO: 114457 - DNA, 15 bp, Homo sapiens
tgttcacatgttaga

SEQ ID NO: 114458 - DNA, 15 bp, Homo sapiens
ctgttcacatgttag

SEQ ID NO: 114459 - DNA, 15 bp, Homo sapiens
tctgttcacatgtta

SEQ ID NO: 114460 - DNA, 15 bp, Homo sapiens
ttctgttcacatgtt

SEQ ID NO: 114461 - DNA, 15 bp, Homo sapiens
tttctgttcacatgt

SEQ ID NO: 114462 - DNA, 15 bp, Homo sapiens
atttctgttcacatg

SEQ ID NO: 114463 - DNA, 15 bp, Homo sapiens
catttctgttcacat

SEQ ID NO: 114464 - DNA, 15 bp, Homo sapiens
acatttctgttcaca

SEQ ID NO: 114465 - DNA, 15 bp, Homo sapiens
aacatttctgttcac

SEQ ID NO: 114466 - DNA, 15 bp, Homo sapiens
caacatttctgttca

SEQ ID NO: 114467 - DNA, 15 bp, Homo sapiens
acaacatttctgttc

SEQ ID NO: 114468 - DNA, 15 bp, Homo sapiens
cacaacatttctgtt

SEQ ID NO: 114469 - DNA, 15 bp, Homo sapiens
acacaacatttctgt

SEQ ID NO: 114470 - DNA, 15 bp, Homo sapiens
aacacaacatttctg

SEQ ID NO: 114471 - DNA, 15 bp, Homo sapiens
aaacacaacatttct

SEQ ID NO: 114472 - DNA, 15 bp, Homo sapiens
caaacacaacatttc

SEQ ID NO: 114473 - DNA, 15 bp, Homo sapiens
acaaacacaacattt

SEQ ID NO: 114474 - DNA, 15 bp, Homo sapiens
cacaaacacaacatt

SEQ ID NO: 114475 - DNA, 15 bp, Homo sapiens
tcacaaacacaacat

SEQ ID NO: 114476 - DNA, 15 bp, Homo sapiens
atcacaaacacaaca

SEQ ID NO: 114477 - DNA, 15 bp, Homo sapiens
aatcacaaacacaac

SEQ ID NO: 114478 - DNA, 15 bp, Homo sapiens
aaatcacaaacacaa

SEQ ID NO: 114479 - DNA, 15 bp, Homo sapiens
gaaatcacaaacaca

SEQ ID NO: 114480 - DNA, 15 bp, Homo sapiens
agaaatcacaaacac

SEQ ID NO: 114481 - DNA, 15 bp, Homo sapiens
aagaaatcacaaaca

SEQ ID NO: 114482 - DNA, 15 bp, Homo sapiens
aaagaaatcacaaac

SEQ ID NO: 114483 - DNA, 15 bp, Homo sapiens
gaaagaaatcacaaa

SEQ ID NO: 114484 - DNA, 15 bp, Homo sapiens
agaaagaaatcacaa

SEQ ID NO: 114485 - DNA, 15 bp, Homo sapiens
gagaaagaaatcaca

SEQ ID NO: 114486 - DNA, 15 bp, Homo sapiens
ggagaaagaaatcac

SEQ ID NO: 114487 - DNA, 15 bp, Homo sapiens
tggagaaagaaatca

SEQ ID NO: 114488 - DNA, 15 bp, Homo sapiens
atggagaaagaaatc

SEQ ID NO: 114489 - DNA, 15 bp, Homo sapiens
aatggagaaagaaat

SEQ ID NO: 114490 - DNA, 15 bp, Homo sapiens
taatggagaaagaaa

SEQ ID NO: 114491 - DNA, 15 bp, Homo sapiens
ctaatggagaaagaa

SEQ ID NO: 114492 - DNA, 15 bp, Homo sapiens
tctaatggagaaaga

SEQ ID NO: 114493 - DNA, 15 bp, Homo sapiens
ttctaatggagaaag

SEQ ID NO: 114494 - DNA, 15 bp, Homo sapiens
tttctaatggagaaa

SEQ ID NO: 114495 - DNA, 15 bp, Homo sapiens
atttctaatggagaa

SEQ ID NO: 114496 - DNA, 15 bp, Homo sapiens
aatttctaatggaga

SEQ ID NO: 114497 - DNA, 15 bp, Homo sapiens
caatttctaatggag

SEQ ID NO: 114498 - DNA, 15 bp, Homo sapiens
ccaatttctaatgga

SEQ ID NO: 114499 - DNA, 15 bp, Homo sapiens
accaatttctaatgg

SEQ ID NO: 114500 - DNA, 15 bp, Homo sapiens
aaccaatttctaatg

SEQ ID NO: 114501 - DNA, 15 bp, Homo sapiens
aaaccaatttctaat

SEQ ID NO: 114502 - DNA, 15 bp, Homo sapiens
aaaaccaatttctaa

SEQ ID NO: 114503 - DNA, 15 bp, Homo sapiens
caaaaccaatttcta

SEQ ID NO: 114504 - DNA, 15 bp, Homo sapiens
acaaaaccaatttct

SEQ ID NO: 114505 - DNA, 15 bp, Homo sapiens
tacaaaaccaatttc

SEQ ID NO: 114506 - DNA, 15 bp, Homo sapiens
atacaaaaccaattt

SEQ ID NO: 114507 - DNA, 15 bp, Homo sapiens
aatacaaaaccaatt

SEQ ID NO: 114508 - DNA, 15 bp, Homo sapiens
aaatacaaaaccaat

SEQ ID NO: 114509 - DNA, 15 bp, Homo sapiens
taaatacaaaaccaa

SEQ ID NO: 114510 - DNA, 15 bp, Homo sapiens
ttaaatacaaaacca

SEQ ID NO: 114511 - DNA, 15 bp, Homo sapiens
cttaaatacaaaacc

SEQ ID NO: 114512 - DNA, 15 bp, Homo sapiens
ccttaaatacaaaac

SEQ ID NO: 114513 - DNA, 15 bp, Homo sapiens
gccttaaatacaaaa

SEQ ID NO: 114514 - DNA, 15 bp, Homo sapiens
cgccttaaatacaaa

SEQ ID NO: 114515 - DNA, 15 bp, Homo sapiens
gcgccttaaatacaa

SEQ ID NO: 114516 - DNA, 15 bp, Homo sapiens
agcgccttaaataca

SEQ ID NO: 114517 - DNA, 15 bp, Homo sapiens
aagcgccttaaatac

SEQ ID NO: 114518 - DNA, 15 bp, Homo sapiens
taagcgccttaaata

SEQ ID NO: 114519 - DNA, 15 bp, Homo sapiens
gtaagcgccttaaat

SEQ ID NO: 114520 - DNA, 15 bp, Homo sapiens
tgtaagcgccttaaa

SEQ ID NO: 114521 - DNA, 15 bp, Homo sapiens
ctgtaagcgccttaa

SEQ ID NO: 114522 - DNA, 15 bp, Homo sapiens
actgtaagcgcctta

SEQ ID NO: 114523 - DNA, 15 bp, Homo sapiens
cactgtaagcgcctt

SEQ ID NO: 114524 - DNA, 15 bp, Homo sapiens
gcactgtaagcgcct

SEQ ID NO: 114525 - DNA, 15 bp, Homo sapiens
ggcactgtaagcgcc

SEQ ID NO: 114526 - DNA, 15 bp, Homo sapiens
aggcactgtaagcgc

SEQ ID NO: 114527 - DNA, 15 bp, Homo sapiens
gaggcactgtaagcg

SEQ ID NO: 114528 - DNA, 15 bp, Homo sapiens
tgaggcactgtaagc

SEQ ID NO: 114529 - DNA, 15 bp, Homo sapiens
atgaggcactgtaag

SEQ ID NO: 114530 - DNA, 15 bp, Homo sapiens
tatgaggcactgtaa

SEQ ID NO: 114531 - DNA, 15 bp, Homo sapiens
atatgaggcactgta

SEQ ID NO: 114532 - DNA, 15 bp, Homo sapiens
tatatgaggcactgt

SEQ ID NO: 114533 - DNA, 15 bp, Homo sapiens
ctatatgaggcactg

SEQ ID NO: 114534 - DNA, 15 bp, Homo sapiens
actatatgaggcact

SEQ ID NO: 114535 - DNA, 15 bp, Homo sapiens
aactatatgaggcac

SEQ ID NO: 114536 - DNA, 15 bp, Homo sapiens
aaactatatgaggca

SEQ ID NO: 114537 - DNA, 15 bp, Homo sapiens
caaactatatgaggc

SEQ ID NO: 114538 - DNA, 15 bp, Homo sapiens
acaaactatatgagg

SEQ ID NO: 114539 - DNA, 15 bp, Homo sapiens
cacaaactatatgag

SEQ ID NO: 114540 - DNA, 15 bp, Homo sapiens
acacaaactatatga

SEQ ID NO: 114541 - DNA, 15 bp, Homo sapiens
cacacaaactatatg

SEQ ID NO: 114542 - DNA, 15 bp, Homo sapiens
ccacacaaactatat

SEQ ID NO: 114543 - DNA, 15 bp, Homo sapiens
accacacaaactata

SEQ ID NO: 114544 - DNA, 15 bp, Homo sapiens
taccacacaaactat

SEQ ID NO: 114545 - DNA, 15 bp, Homo sapiens
ataccacacaaacta

SEQ ID NO: 114546 - DNA, 15 bp, Homo sapiens
gataccacacaaact

SEQ ID NO: 114547 - DNA, 15 bp, Homo sapiens
agataccacacaaac

SEQ ID NO: 114548 - DNA, 15 bp, Homo sapiens
aagataccacacaaa

SEQ ID NO: 114549 - DNA, 15 bp, Homo sapiens
gaagataccacacaa

SEQ ID NO: 114550 - DNA, 15 bp, Homo sapiens
agaagataccacaca

SEQ ID NO: 114551 - DNA, 15 bp, Homo sapiens
gagaagataccacac

SEQ ID NO: 114552 - DNA, 15 bp, Homo sapiens
agagaagataccaca

SEQ ID NO: 114553 - DNA, 15 bp, Homo sapiens
gagagaagataccac

SEQ ID NO: 114554 - DNA, 15 bp, Homo sapiens
ggagagaagatacca

SEQ ID NO: 114555 - DNA, 15 bp, Homo sapiens
aggagagaagatacc

SEQ ID NO: 114556 - DNA, 15 bp, Homo sapiens
aaggagagaagatac

SEQ ID NO: 114557 - DNA, 15 bp, Homo sapiens
aaaggagagaagata

SEQ ID NO: 114558 - DNA, 15 bp, Homo sapiens
caaaggagagaagat

SEQ ID NO: 114559 - DNA, 15 bp, Homo sapiens
acaaaggagagaaga

SEQ ID NO: 114560 - DNA, 15 bp, Homo sapiens
tacaaaggagagaag

SEQ ID NO: 114561 - DNA, 15 bp, Homo sapiens
atacaaaggagagaa

SEQ ID NO: 114562 - DNA, 15 bp, Homo sapiens
gatacaaaggagaga

SEQ ID NO: 114563 - DNA, 15 bp, Homo sapiens
ggatacaaaggagag

SEQ ID NO: 114564 - DNA, 15 bp, Homo sapiens
aggatacaaaggaga

SEQ ID NO: 114565 - DNA, 15 bp, Homo sapiens
aaggatacaaaggag

SEQ ID NO: 114566 - DNA, 15 bp, Homo sapiens
aaaggatacaaagga

SEQ ID NO: 114567 - DNA, 15 bp, Homo sapiens
gaaaggatacaaagg

SEQ ID NO: 114568 - DNA, 15 bp, Homo sapiens
tgaaaggatacaaag

SEQ ID NO: 114569 - DNA, 15 bp, Homo sapiens
gtgaaaggatacaaa

SEQ ID NO: 114570 - DNA, 15 bp, Homo sapiens
tgtgaaaggatacaa

SEQ ID NO: 114571 - DNA, 15 bp, Homo sapiens
atgtgaaaggataca

SEQ ID NO: 114572 - DNA, 15 bp, Homo sapiens
tatgtgaaaggatac

SEQ ID NO: 114573 - DNA, 15 bp, Homo sapiens
gtatgtgaaaggata

SEQ ID NO: 114574 - DNA, 15 bp, Homo sapiens
agtatgtgaaaggat

SEQ ID NO: 114575 - DNA, 15 bp, Homo sapiens
gagtatgtgaaagga

SEQ ID NO: 114576 - DNA, 15 bp, Homo sapiens
ggagtatgtgaaagg

SEQ ID NO: 114577 - DNA, 15 bp, Homo sapiens
tggagtatgtgaaag

SEQ ID NO: 114578 - DNA, 15 bp, Homo sapiens
atggagtatgtgaaa

SEQ ID NO: 114579 - DNA, 15 bp, Homo sapiens
aatggagtatgtgaa

SEQ ID NO: 114580 - DNA, 15 bp, Homo sapiens
aaatggagtatgtga

SEQ ID NO: 114581 - DNA, 15 bp, Homo sapiens
aaaatggagtatgtg

SEQ ID NO: 114582 - DNA, 15 bp, Homo sapiens
caaaatggagtatgt

SEQ ID NO: 114583 - DNA, 15 bp, Homo sapiens
tcaaaatggagtatg

SEQ ID NO: 114584 - DNA, 15 bp, Homo sapiens
ctcaaaatggagtat

SEQ ID NO: 114585 - DNA, 15 bp, Homo sapiens
gctcaaaatggagta

SEQ ID NO: 114586 - DNA, 15 bp, Homo sapiens
agctcaaaatggagt

SEQ ID NO: 114587 - DNA, 15 bp, Homo sapiens
cagctcaaaatggag

SEQ ID NO: 114588 - DNA, 15 bp, Homo sapiens
gcagctcaaaatgga

SEQ ID NO: 114589 - DNA, 15 bp, Homo sapiens
agcagctcaaaatgg

SEQ ID NO: 114590 - DNA, 15 bp, Homo sapiens
aagcagctcaaaatg

SEQ ID NO: 114591 - DNA, 15 bp, Homo sapiens
gaagcagctcaaaat

SEQ ID NO: 114592 - DNA, 15 bp, Homo sapiens
agaagcagctcaaaa

SEQ ID NO: 114593 - DNA, 15 bp, Homo sapiens
gagaagcagctcaaa

SEQ ID NO: 114594 - DNA, 15 bp, Homo sapiens
agagaagcagctcaa

SEQ ID NO: 114595 - DNA, 15 bp, Homo sapiens
aagagaagcagctca

SEQ ID NO: 114596 - DNA, 15 bp, Homo sapiens
gaagagaagcagctc

SEQ ID NO: 114597 - DNA, 15 bp, Homo sapiens
agaagagaagcagct

SEQ ID NO: 114598 - DNA, 15 bp, Homo sapiens
aagaagagaagcagc

SEQ ID NO: 114599 - DNA, 15 bp, Homo sapiens
aaagaagagaagcag

SEQ ID NO: 114600 - DNA, 15 bp, Homo sapiens
aaaagaagagaagca

SEQ ID NO: 114601 - DNA, 15 bp, Homo sapiens
aaaaagaagagaagc

SEQ ID NO: 114602 - DNA, 15 bp, Homo sapiens
gaaaaagaagagaag

SEQ ID NO: 114603 - DNA, 15 bp, Homo sapiens
agaaaaagaagagaa

SEQ ID NO: 114604 - DNA, 15 bp, Homo sapiens
tagaaaaagaagaga

SEQ ID NO: 114605 - DNA, 15 bp, Homo sapiens
gtagaaaaagaagag

SEQ ID NO: 114606 - DNA, 15 bp, Homo sapiens
tgtagaaaaagaaga

SEQ ID NO: 114607 - DNA, 15 bp, Homo sapiens
ttgtagaaaaagaag

SEQ ID NO: 114608 - DNA, 15 bp, Homo sapiens
attgtagaaaaagaa

SEQ ID NO: 114609 - DNA, 15 bp, Homo sapiens
tattgtagaaaaaga

SEQ ID NO: 114610 - DNA, 15 bp, Homo sapiens
ttattgtagaaaaag

SEQ ID NO: 114611 - DNA, 15 bp, Homo sapiens
attattgtagaaaaa

SEQ ID NO: 114612 - DNA, 15 bp, Homo sapiens
tattattgtagaaaa

SEQ ID NO: 114613 - DNA, 15 bp, Homo sapiens
ttattattgtagaaa

SEQ ID NO: 114614 - DNA, 15 bp, Homo sapiens
cttattattgtagaa

SEQ ID NO: 114615 - DNA, 15 bp, Homo sapiens
gcttattattgtaga

SEQ ID NO: 114616 - DNA, 15 bp, Homo sapiens
tgcttattattgtag

SEQ ID NO: 114617 - DNA, 15 bp, Homo sapiens
atgcttattattgta

SEQ ID NO: 114618 - DNA, 15 bp, Homo sapiens
tatgcttattattgt

SEQ ID NO: 114619 - DNA, 15 bp, Homo sapiens
ttatgcttattattg

SEQ ID NO: 114620 - DNA, 15 bp, Homo sapiens
attatgcttattatt

SEQ ID NO: 114621 - DNA, 15 bp, Homo sapiens
cattatgcttattat

SEQ ID NO: 114622 - DNA, 15 bp, Homo sapiens
gcattatgcttatta

SEQ ID NO: 114623 - DNA, 15 bp, Homo sapiens
ggcattatgcttatt

SEQ ID NO: 114624 - DNA, 15 bp, Homo sapiens
aggcattatgcttat

SEQ ID NO: 114625 - DNA, 15 bp, Homo sapiens
aaggcattatgctta

SEQ ID NO: 114626 - DNA, 15 bp, Homo sapiens
taaggcattatgctt

SEQ ID NO: 114627 - DNA, 15 bp, Homo sapiens
gtaaggcattatgct

SEQ ID NO: 114628 - DNA, 15 bp, Homo sapiens
agtaaggcattatgc

SEQ ID NO: 114629 - DNA, 15 bp, Homo sapiens
tagtaaggcattatg

SEQ ID NO: 114630 - DNA, 15 bp, Homo sapiens
atagtaaggcattat

SEQ ID NO: 114631 - DNA, 15 bp, Homo sapiens
aatagtaaggcatta

SEQ ID NO: 114632 - DNA, 15 bp, Homo sapiens
taatagtaaggcatt

SEQ ID NO: 114633 - DNA, 15 bp, Homo sapiens
ctaatagtaaggcat

SEQ ID NO: 114634 - DNA, 15 bp, Homo sapiens
actaatagtaaggca

SEQ ID NO: 114635 - DNA, 15 bp, Homo sapiens
aactaatagtaaggc

SEQ ID NO: 114636 - DNA, 15 bp, Homo sapiens
taactaatagtaagg

SEQ ID NO: 114637 - DNA, 15 bp, Homo sapiens
ttaactaatagtaag

SEQ ID NO: 114638 - DNA, 15 bp, Homo sapiens
attaactaatagtaa

SEQ ID NO: 114639 - DNA, 15 bp, Homo sapiens
tattaactaatagta

SEQ ID NO: 114640 - DNA, 15 bp, Homo sapiens
ttattaactaatagt

SEQ ID NO: 114641 - DNA, 15 bp, Homo sapiens
attattaactaatag

SEQ ID NO: 114642 - DNA, 15 bp, Homo sapiens
tattattaactaata

SEQ ID NO: 114643 - DNA, 15 bp, Homo sapiens
ctattattaactaat

SEQ ID NO: 114644 - DNA, 15 bp, Homo sapiens
actattattaactaa

SEQ ID NO: 114645 - DNA, 15 bp, Homo sapiens
aactattattaacta

SEQ ID NO: 114646 - DNA, 15 bp, Homo sapiens
caactattattaact

SEQ ID NO: 114647 - DNA, 15 bp, Homo sapiens
gcaactattattaac

SEQ ID NO: 114648 - DNA, 15 bp, Homo sapiens
ggcaactattattaa

SEQ ID NO: 114649 - DNA, 15 bp, Homo sapiens
cggcaactattatta

SEQ ID NO: 114650 - DNA, 15 bp, Homo sapiens
acggcaactattatt

SEQ ID NO: 114651 - DNA, 15 bp, Homo sapiens
aacggcaactattat

SEQ ID NO: 114652 - DNA, 15 bp, Homo sapiens
gaacggcaactatta

SEQ ID NO: 114653 - DNA, 15 bp, Homo sapiens
ggaacggcaactatt

SEQ ID NO: 114654 - DNA, 15 bp, Homo sapiens
tggaacggcaactat

SEQ ID NO: 114655 - DNA, 15 bp, Homo sapiens
atggaacggcaacta

SEQ ID NO: 114656 - DNA, 15 bp, Homo sapiens
catggaacggcaact

SEQ ID NO: 114657 - DNA, 15 bp, Homo sapiens
tcatggaacggcaac

SEQ ID NO: 114658 - DNA, 15 bp, Homo sapiens
ttcatggaacggcaa

SEQ ID NO: 114659 - DNA, 15 bp, Homo sapiens
attcatggaacggca

SEQ ID NO: 114660 - DNA, 15 bp, Homo sapiens
tattcatggaacggc

SEQ ID NO: 114661 - DNA, 15 bp, Homo sapiens
atattcatggaacgg

SEQ ID NO: 114662 - DNA, 15 bp, Homo sapiens
aatattcatggaacg

SEQ ID NO: 114663 - DNA, 15 bp, Homo sapiens
aaatattcatggaac

SEQ ID NO: 114664 - DNA, 15 bp, Homo sapiens
caaatattcatggaa

SEQ ID NO: 114665 - DNA, 15 bp, Homo sapiens
acaaatattcatgga

SEQ ID NO: 114666 - DNA, 15 bp, Homo sapiens
tacaaatattcatgg

SEQ ID NO: 114667 - DNA, 15 bp, Homo sapiens
ctacaaatattcatg

SEQ ID NO: 114668 - DNA, 15 bp, Homo sapiens
actacaaatattcat

SEQ ID NO: 114669 - DNA, 15 bp, Homo sapiens
tactacaaatattca

SEQ ID NO: 114670 - DNA, 15 bp, Homo sapiens
atactacaaatattc

SEQ ID NO: 114671 - DNA, 15 bp, Homo sapiens
catactacaaatatt

SEQ ID NO: 114672 - DNA, 15 bp, Homo sapiens
tcatactacaaatat

SEQ ID NO: 114673 - DNA, 15 bp, Homo sapiens
ttcatactacaaata

SEQ ID NO: 114674 - DNA, 15 bp, Homo sapiens
cttcatactacaaat

SEQ ID NO: 114675 - DNA, 15 bp, Homo sapiens
ccttcatactacaaa

SEQ ID NO: 114676 - DNA, 15 bp, Homo sapiens
tccttcatactacaa

SEQ ID NO: 114677 - DNA, 15 bp, Homo sapiens
atccttcatactaca

SEQ ID NO: 114678 - DNA, 15 bp, Homo sapiens
catccttcatactac

SEQ ID NO: 114679 - DNA, 15 bp, Homo sapiens
acatccttcatacta

SEQ ID NO: 114680 - DNA, 15 bp, Homo sapiens
gacatccttcatact

SEQ ID NO: 114681 - DNA, 15 bp, Homo sapiens
cgacatccttcatac

SEQ ID NO: 114682 - DNA, 15 bp, Homo sapiens
gcgacatccttcata

SEQ ID NO: 114683 - DNA, 15 bp, Homo sapiens
agcgacatccttcat

SEQ ID NO: 114684 - DNA, 15 bp, Homo sapiens
tagcgacatccttca

SEQ ID NO: 114685 - DNA, 15 bp, Homo sapiens
ttagcgacatccttc

SEQ ID NO: 114686 - DNA, 15 bp, Homo sapiens
cttagcgacatcctt

SEQ ID NO: 114687 - DNA, 15 bp, Homo sapiens
acttagcgacatcct

SEQ ID NO: 114688 - DNA, 15 bp, Homo sapiens
tacttagcgacatcc

SEQ ID NO: 114689 - DNA, 15 bp, Homo sapiens
ctacttagcgacatc

SEQ ID NO: 114690 - DNA, 15 bp, Homo sapiens
tctacttagcgacat

SEQ ID NO: 114691 - DNA, 15 bp, Homo sapiens
gtctacttagcgaca

SEQ ID NO: 114692 - DNA, 15 bp, Homo sapiens
tgtctacttagcgac

SEQ ID NO: 114693 - DNA, 15 bp, Homo sapiens
atgtctacttagcga

SEQ ID NO: 114694 - DNA, 15 bp, Homo sapiens
aatgtctacttagcg

SEQ ID NO: 114695 - DNA, 15 bp, Homo sapiens
aaatgtctacttagc

SEQ ID NO: 114696 - DNA, 15 bp, Homo sapiens
caaatgtctacttag

SEQ ID NO: 114697 - DNA, 15 bp, Homo sapiens
acaaatgtctactta

SEQ ID NO: 114698 - DNA, 15 bp, Homo sapiens
cacaaatgtctactt

SEQ ID NO: 114699 - DNA, 15 bp, Homo sapiens
gcacaaatgtctact

SEQ ID NO: 114700 - DNA, 15 bp, Homo sapiens
tgcacaaatgtctac

SEQ ID NO: 114701 - DNA, 15 bp, Homo sapiens
ctgcacaaatgtcta

SEQ ID NO: 114702 - DNA, 15 bp, Homo sapiens
cctgcacaaatgtct

SEQ ID NO: 114703 - DNA, 15 bp, Homo sapiens
acctgcacaaatgtc

SEQ ID NO: 114704 - DNA, 15 bp, Homo sapiens
cacctgcacaaatgt

SEQ ID NO: 114705 - DNA, 15 bp, Homo sapiens
tcacctgcacaaatg

SEQ ID NO: 114706 - DNA, 15 bp, Homo sapiens
ctcacctgcacaaat

SEQ ID NO: 114707 - DNA, 15 bp, Homo sapiens
cctcacctgcacaaa

SEQ ID NO: 114708 - DNA, 15 bp, Homo sapiens
gcctcacctgcacaa

SEQ ID NO: 114709 - DNA, 15 bp, Homo sapiens
tgcctcacctgcaca

SEQ ID NO: 114710 - DNA, 15 bp, Homo sapiens
ctgcctcacctgcac

SEQ ID NO: 114711 - DNA, 15 bp, Homo sapiens
tctgcctcacctgca

SEQ ID NO: 114712 - DNA, 15 bp, Homo sapiens
ctctgcctcacctgc

SEQ ID NO: 114713 - DNA, 15 bp, Homo sapiens
actctgcctcacctg

SEQ ID NO: 114714 - DNA, 15 bp, Homo sapiens
cactctgcctcacct

SEQ ID NO: 114715 - DNA, 15 bp, Homo sapiens
ccactctgcctcacc

SEQ ID NO: 114716 - DNA, 15 bp, Homo sapiens
accactctgcctcac

SEQ ID NO: 114717 - DNA, 15 bp, Homo sapiens
aaccactctgcctca

SEQ ID NO: 114718 - DNA, 15 bp, Homo sapiens
gaaccactctgcctc

SEQ ID NO: 114719 - DNA, 15 bp, Homo sapiens
agaaccactctgcct

SEQ ID NO: 114720 - DNA, 15 bp, Homo sapiens
tagaaccactctgcc

SEQ ID NO: 114721 - DNA, 15 bp, Homo sapiens
ctagaaccactctgc

SEQ ID NO: 114722 - DNA, 15 bp, Homo sapiens
cctagaaccactctg

SEQ ID NO: 114723 - DNA, 15 bp, Homo sapiens
acctagaaccactct

SEQ ID NO: 114724 - DNA, 15 bp, Homo sapiens
gacctagaaccactc

SEQ ID NO: 114725 - DNA, 15 bp, Homo sapiens
ggacctagaaccact

SEQ ID NO: 114726 - DNA, 15 bp, Homo sapiens
aggacctagaaccac

SEQ ID NO: 114727 - DNA, 15 bp, Homo sapiens
caggacctagaacca

SEQ ID NO: 114728 - DNA, 15 bp, Homo sapiens
acaggacctagaacc

SEQ ID NO: 114729 - DNA, 15 bp, Homo sapiens
gacaggacctagaac

SEQ ID NO: 114730 - DNA, 15 bp, Homo sapiens
ggacaggacctagaa

SEQ ID NO: 114731 - DNA, 15 bp, Homo sapiens
aggacaggacctaga

SEQ ID NO: 114732 - DNA, 15 bp, Homo sapiens
aaggacaggacctag

SEQ ID NO: 114733 - DNA, 15 bp, Homo sapiens
gaaggacaggaccta

SEQ ID NO: 114734 - DNA, 15 bp, Homo sapiens
tgaaggacaggacct

SEQ ID NO: 114735 - DNA, 15 bp, Homo sapiens
ctgaaggacaggacc

SEQ ID NO: 114736 - DNA, 15 bp, Homo sapiens
actgaaggacaggac

SEQ ID NO: 114737 - DNA, 15 bp, Homo sapiens
aactgaaggacagga

SEQ ID NO: 114738 - DNA, 15 bp, Homo sapiens
gaactgaaggacagg

SEQ ID NO: 114739 - DNA, 15 bp, Homo sapiens
agaactgaaggacag

SEQ ID NO: 114740 - DNA, 15 bp, Homo sapiens
aagaactgaaggaca

SEQ ID NO: 114741 - DNA, 15 bp, Homo sapiens
aaagaactgaaggac

SEQ ID NO: 114742 - DNA, 15 bp, Homo sapiens
taaagaactgaagga

SEQ ID NO: 114743 - DNA, 15 bp, Homo sapiens
ataaagaactgaagg

SEQ ID NO: 114744 - DNA, 15 bp, Homo sapiens
aataaagaactgaag

SEQ ID NO: 114745 - DNA, 15 bp, Homo sapiens
aaataaagaactgaa

SEQ ID NO: 114746 - DNA, 15 bp, Homo sapiens
taaataaagaactga

SEQ ID NO: 114747 - DNA, 15 bp, Homo sapiens
ataaataaagaactg

SEQ ID NO: 114748 - DNA, 15 bp, Homo sapiens
aataaataaagaact

SEQ ID NO: 114749 - DNA, 15 bp, Homo sapiens
aaataaataaagaac

SEQ ID NO: 114750 - DNA, 15 bp, Homo sapiens
taaataaataaagaa

SEQ ID NO: 114751 - DNA, 15 bp, Homo sapiens
ataaataaataaaga

SEQ ID NO: 114752 - DNA, 15 bp, Homo sapiens
aataaataaataaag

SEQ ID NO: 114753 - DNA, 15 bp, Homo sapiens
aaataaataaataaa

SEQ ID NO: 114754 - DNA, 15 bp, Homo sapiens
taaataaataaataa

SEQ ID NO: 114755 - DNA, 15 bp, Homo sapiens
ataaataaataaata

SEQ ID NO: 114756 - DNA, 15 bp, Homo sapiens
aataaataaataaat

SEQ ID NO: 114757 - DNA, 15 bp, Homo sapiens
aaaataaataaataa

SEQ ID NO: 114758 - DNA, 15 bp, Homo sapiens
aaaaataaataaata

SEQ ID NO: 114759 - DNA, 15 bp, Homo sapiens
aaaaaataaataaat

SEQ ID NO: 114760 - DNA, 15 bp, Homo sapiens
caaaaaataaataaa

SEQ ID NO: 114761 - DNA, 15 bp, Homo sapiens
tcaaaaaataaataa

SEQ ID NO: 114762 - DNA, 15 bp, Homo sapiens
ctcaaaaaataaata

SEQ ID NO: 114763 - DNA, 15 bp, Homo sapiens
tctcaaaaaataaat

SEQ ID NO: 114764 - DNA, 15 bp, Homo sapiens
atctcaaaaaataaa

SEQ ID NO: 114765 - DNA, 15 bp, Homo sapiens
catctcaaaaaataa

SEQ ID NO: 114766 - DNA, 15 bp, Homo sapiens
ccatctcaaaaaata

SEQ ID NO: 114767 - DNA, 15 bp, Homo sapiens
tccatctcaaaaaat

SEQ ID NO: 114768 - DNA, 15 bp, Homo sapiens
ctccatctcaaaaaa

SEQ ID NO: 114769 - DNA, 15 bp, Homo sapiens
actccatctcaaaaa

SEQ ID NO: 114770 - DNA, 15 bp, Homo sapiens
gactccatctcaaaa

SEQ ID NO: 114771 - DNA, 15 bp, Homo sapiens
agactccatctcaaa

SEQ ID NO: 114772 - DNA, 15 bp, Homo sapiens
gagactccatctcaa

SEQ ID NO: 114773 - DNA, 15 bp, Homo sapiens
tgagactccatctca

SEQ ID NO: 114774 - DNA, 15 bp, Homo sapiens
gtgagactccatctc

SEQ ID NO: 114775 - DNA, 15 bp, Homo sapiens
agtgagactccatct

SEQ ID NO: 114776 - DNA, 15 bp, Homo sapiens
gagtgagactccatc

SEQ ID NO: 114777 - DNA, 15 bp, Homo sapiens
agagtgagactccat

SEQ ID NO: 114778 - DNA, 15 bp, Homo sapiens
aagagtgagactcca

SEQ ID NO: 114779 - DNA, 15 bp, Homo sapiens
caagagtgagactcc

SEQ ID NO: 114780 - DNA, 15 bp, Homo sapiens
acaagagtgagactc

SEQ ID NO: 114781 - DNA, 15 bp, Homo sapiens
gacaagagtgagact

SEQ ID NO: 114782 - DNA, 15 bp, Homo sapiens
tgacaagagtgagac

SEQ ID NO: 114783 - DNA, 15 bp, Homo sapiens
atgacaagagtgaga

SEQ ID NO: 114784 - DNA, 15 bp, Homo sapiens
gatgacaagagtgag

SEQ ID NO: 114785 - DNA, 15 bp, Homo sapiens
ggatgacaagagtga

SEQ ID NO: 114786 - DNA, 15 bp, Homo sapiens
tggatgacaagagtg

SEQ ID NO: 114787 - DNA, 15 bp, Homo sapiens
ctggatgacaagagt

SEQ ID NO: 114788 - DNA, 15 bp, Homo sapiens
cctggatgacaagag

SEQ ID NO: 114789 - DNA, 15 bp, Homo sapiens
tcctggatgacaaga

SEQ ID NO: 114790 - DNA, 15 bp, Homo sapiens
ctcctggatgacaag

SEQ ID NO: 114791 - DNA, 15 bp, Homo sapiens
actcctggatgacaa

SEQ ID NO: 114792 - DNA, 15 bp, Homo sapiens
cactcctggatgaca

SEQ ID NO: 114793 - DNA, 15 bp, Homo sapiens
gcactcctggatgac

SEQ ID NO: 114794 - DNA, 15 bp, Homo sapiens
tgcactcctggatga

SEQ ID NO: 114795 - DNA, 15 bp, Homo sapiens
ttgcactcctggatg

SEQ ID NO: 114796 - DNA, 15 bp, Homo sapiens
attgcactcctggat

SEQ ID NO: 114797 - DNA, 15 bp, Homo sapiens
cattgcactcctgga

SEQ ID NO: 114798 - DNA, 15 bp, Homo sapiens
ccattgcactcctgg

SEQ ID NO: 114799 - DNA, 15 bp, Homo sapiens
gccattgcactcctg

SEQ ID NO: 114800 - DNA, 15 bp, Homo sapiens
cgccattgcactcct

SEQ ID NO: 114801 - DNA, 15 bp, Homo sapiens
gcgccattgcactcc

SEQ ID NO: 114802 - DNA, 15 bp, Homo sapiens
cgcgccattgcactc

SEQ ID NO: 114803 - DNA, 15 bp, Homo sapiens
tcgcgccattgcact

SEQ ID NO: 114804 - DNA, 15 bp, Homo sapiens
atcgcgccattgcac

SEQ ID NO: 114805 - DNA, 15 bp, Homo sapiens
gatcgcgccattgca

SEQ ID NO: 114806 - DNA, 15 bp, Homo sapiens
agatcgcgccattgc

SEQ ID NO: 114807 - DNA, 15 bp, Homo sapiens
aagatcgcgccattg

SEQ ID NO: 114808 - DNA, 15 bp, Homo sapiens
caagatcgcgccatt

SEQ ID NO: 114809 - DNA, 15 bp, Homo sapiens
ccaagatcgcgccat

SEQ ID NO: 114810 - DNA, 15 bp, Homo sapiens
gccaagatcgcgcca

SEQ ID NO: 114811 - DNA, 15 bp, Homo sapiens
agccaagatcgcgcc

SEQ ID NO: 114812 - DNA, 15 bp, Homo sapiens
gagccaagatcgcgc

SEQ ID NO: 114813 - DNA, 15 bp, Homo sapiens
ggagccaagatcgcg

SEQ ID NO: 114814 - DNA, 15 bp, Homo sapiens
gggagccaagatcgc

SEQ ID NO: 114815 - DNA, 15 bp, Homo sapiens
agggagccaagatcg

SEQ ID NO: 114816 - DNA, 15 bp, Homo sapiens
cagggagccaagatc

SEQ ID NO: 114817 - DNA, 15 bp, Homo sapiens
gcagggagccaagat

SEQ ID NO: 114818 - DNA, 15 bp, Homo sapiens
tgcagggagccaaga

SEQ ID NO: 114819 - DNA, 15 bp, Homo sapiens
ttgcagggagccaag

SEQ ID NO: 114820 - DNA, 15 bp, Homo sapiens
gttgcagggagccaa

SEQ ID NO: 114821 - DNA, 15 bp, Homo sapiens
ggttgcagggagcca

SEQ ID NO: 114822 - DNA, 15 bp, Homo sapiens
aggttgcagggagcc

SEQ ID NO: 114823 - DNA, 15 bp, Homo sapiens
gaggttgcagggagc

SEQ ID NO: 114824 - DNA, 15 bp, Homo sapiens
ggaggttgcagggag

SEQ ID NO: 114825 - DNA, 15 bp, Homo sapiens
cggaggttgcaggga

SEQ ID NO: 114826 - DNA, 15 bp, Homo sapiens
gcggaggttgcaggg

SEQ ID NO: 114827 - DNA, 15 bp, Homo sapiens
ggcggaggttgcagg

SEQ ID NO: 114828 - DNA, 15 bp, Homo sapiens
aggcggaggttgcag

SEQ ID NO: 114829 - DNA, 15 bp, Homo sapiens
gaggcggaggttgca

SEQ ID NO: 114830 - DNA, 15 bp, Homo sapiens
ggaggcggaggttgc

SEQ ID NO: 114831 - DNA, 15 bp, Homo sapiens
gggaggcggaggttg

SEQ ID NO: 114832 - DNA, 15 bp, Homo sapiens
cgggaggcggaggtt

SEQ ID NO: 114833 - DNA, 15 bp, Homo sapiens
ccgggaggcggaggt

SEQ ID NO: 114834 - DNA, 15 bp, Homo sapiens
cccgggaggcggagg

SEQ ID NO: 114835 - DNA, 15 bp, Homo sapiens
acccgggaggcggag

SEQ ID NO: 114836 - DNA, 15 bp, Homo sapiens
aacccgggaggcgga

SEQ ID NO: 114837 - DNA, 15 bp, Homo sapiens
gaacccgggaggcgg

SEQ ID NO: 114838 - DNA, 15 bp, Homo sapiens
agaacccgggaggcg

SEQ ID NO: 114839 - DNA, 15 bp, Homo sapiens
tagaacccgggaggc

SEQ ID NO: 114840 - DNA, 15 bp, Homo sapiens
ctagaacccgggagg

SEQ ID NO: 114841 - DNA, 15 bp, Homo sapiens
gctagaacccgggag

SEQ ID NO: 114842 - DNA, 15 bp, Homo sapiens
cgctagaacccggga

SEQ ID NO: 114843 - DNA, 15 bp, Homo sapiens
tcgctagaacccggg

SEQ ID NO: 114844 - DNA, 15 bp, Homo sapiens
atcgctagaacccgg

SEQ ID NO: 114845 - DNA, 15 bp, Homo sapiens
aatcgctagaacccg

SEQ ID NO: 114846 - DNA, 15 bp, Homo sapiens
gaatcgctagaaccc

SEQ ID NO: 114847 - DNA, 15 bp, Homo sapiens
agaatcgctagaacc

SEQ ID NO: 114848 - DNA, 15 bp, Homo sapiens
aagaatcgctagaac

SEQ ID NO: 114849 - DNA, 15 bp, Homo sapiens
gaagaatcgctagaa

SEQ ID NO: 114850 - DNA, 15 bp, Homo sapiens
agaagaatcgctaga

SEQ ID NO: 114851 - DNA, 15 bp, Homo sapiens
cagaagaatcgctag

SEQ ID NO: 114852 - DNA, 15 bp, Homo sapiens
gcagaagaatcgcta

SEQ ID NO: 114853 - DNA, 15 bp, Homo sapiens
ggcagaagaatcgct

SEQ ID NO: 114854 - DNA, 15 bp, Homo sapiens
aggcagaagaatcgc

SEQ ID NO: 114855 - DNA, 15 bp, Homo sapiens
gaggcagaagaatcg

SEQ ID NO: 114856 - DNA, 15 bp, Homo sapiens
tgaggcagaagaatc

SEQ ID NO: 114857 - DNA, 15 bp, Homo sapiens
ctgaggcagaagaat

SEQ ID NO: 114858 - DNA, 15 bp, Homo sapiens
gctgaggcagaagaa

SEQ ID NO: 114859 - DNA, 15 bp, Homo sapiens
ggctgaggcagaaga

SEQ ID NO: 114860 - DNA, 15 bp, Homo sapiens
aggctgaggcagaag

SEQ ID NO: 114861 - DNA, 15 bp, Homo sapiens
gaggctgaggcagaa

SEQ ID NO: 114862 - DNA, 15 bp, Homo sapiens
ggaggctgaggcaga

SEQ ID NO: 114863 - DNA, 15 bp, Homo sapiens
aggaggctgaggcag

SEQ ID NO: 114864 - DNA, 15 bp, Homo sapiens
actgtaatcccagct

SEQ ID NO: 114865 - DNA, 15 bp, Homo sapiens
gactgtaatcccagc

SEQ ID NO: 114866 - DNA, 15 bp, Homo sapiens
cgactgtaatcccag

SEQ ID NO: 114867 - DNA, 15 bp, Homo sapiens
gcgactgtaatccca

SEQ ID NO: 114868 - DNA, 15 bp, Homo sapiens
ggcgactgtaatccc

SEQ ID NO: 114869 - DNA, 15 bp, Homo sapiens
gggcgactgtaatcc

SEQ ID NO: 114870 - DNA, 15 bp, Homo sapiens
tgggcgactgtaatc

SEQ ID NO: 114871 - DNA, 15 bp, Homo sapiens
gtgggcgactgtaat

SEQ ID NO: 114872 - DNA, 15 bp, Homo sapiens
ggtgggcgactgtaa

SEQ ID NO: 114873 - DNA, 15 bp, Homo sapiens
tggtgggcgactgta

SEQ ID NO: 114874 - DNA, 15 bp, Homo sapiens
gtggtgggcgactgt

SEQ ID NO: 114875 - DNA, 15 bp, Homo sapiens
ggtggtgggcgactg

SEQ ID NO: 114876 - DNA, 15 bp, Homo sapiens
tggtggtgggcgact

SEQ ID NO: 114877 - DNA, 15 bp, Homo sapiens
gtggtggtgggcgac

SEQ ID NO: 114878 - DNA, 15 bp, Homo sapiens
cgtggtggtgggcga

SEQ ID NO: 114879 - DNA, 15 bp, Homo sapiens
gcgtggtggtgggcg

SEQ ID NO: 114880 - DNA, 15 bp, Homo sapiens
ggcgtggtggtgggc

SEQ ID NO: 114881 - DNA, 15 bp, Homo sapiens
gggcgtggtggtggg

SEQ ID NO: 114882 - DNA, 15 bp, Homo sapiens
tgggcgtggtggtgg

SEQ ID NO: 114883 - DNA, 15 bp, Homo sapiens
ctgggcgtggtggtg

SEQ ID NO: 114884 - DNA, 15 bp, Homo sapiens
tctgggcgtggtggt

SEQ ID NO: 114885 - DNA, 15 bp, Homo sapiens
atctgggcgtggtgg

SEQ ID NO: 114886 - DNA, 15 bp, Homo sapiens
tatctgggcgtggtg

SEQ ID NO: 114887 - DNA, 15 bp, Homo sapiens
ttatctgggcgtggt

SEQ ID NO: 114888 - DNA, 15 bp, Homo sapiens
attatctgggcgtgg

SEQ ID NO: 114889 - DNA, 15 bp, Homo sapiens
aattatctgggcgtg

SEQ ID NO: 114890 - DNA, 15 bp, Homo sapiens
aaattatctgggcgt

SEQ ID NO: 114891 - DNA, 15 bp, Homo sapiens
aaaattatctgggcg

SEQ ID NO: 114892 - DNA, 15 bp, Homo sapiens
aaaaattatctgggc

SEQ ID NO: 114893 - DNA, 15 bp, Homo sapiens
taaaaattatctggg

SEQ ID NO: 114894 - DNA, 15 bp, Homo sapiens
ataaaaattatctgg

SEQ ID NO: 114895 - DNA, 15 bp, Homo sapiens
tataaaaattatctg

SEQ ID NO: 114896 - DNA, 15 bp, Homo sapiens
atataaaaattatct

SEQ ID NO: 114897 - DNA, 15 bp, Homo sapiens
aatataaaaattatc

SEQ ID NO: 114898 - DNA, 15 bp, Homo sapiens
aaatataaaaattat

SEQ ID NO: 114899 - DNA, 15 bp, Homo sapiens
aaaatataaaaatta

SEQ ID NO: 114900 - DNA, 15 bp, Homo sapiens
aaaaatataaaaatt

SEQ ID NO: 114901 - DNA, 15 bp, Homo sapiens
taaaaatataaaaat

SEQ ID NO: 114902 - DNA, 15 bp, Homo sapiens
ctaaaaatataaaaa

SEQ ID NO: 114903 - DNA, 15 bp, Homo sapiens
actaaaaatataaaa

SEQ ID NO: 114904 - DNA, 15 bp, Homo sapiens
tactaaaaatataaa

SEQ ID NO: 114905 - DNA, 15 bp, Homo sapiens
ctactaaaaatataa

SEQ ID NO: 114906 - DNA, 15 bp, Homo sapiens
tctactaaaaatata

SEQ ID NO: 114907 - DNA, 15 bp, Homo sapiens
ctctactaaaaatat

SEQ ID NO: 114908 - DNA, 15 bp, Homo sapiens
accccgtctctacta

SEQ ID NO: 114909 - DNA, 15 bp, Homo sapiens
aaccccgtctctact

SEQ ID NO: 114910 - DNA, 15 bp, Homo sapiens
aaaccccgtctctac

SEQ ID NO: 114911 - DNA, 15 bp, Homo sapiens
gaaaccccgtctcta

SEQ ID NO: 114912 - DNA, 15 bp, Homo sapiens
tgaaaccccgtctct

SEQ ID NO: 114913 - DNA, 15 bp, Homo sapiens
gtgaaaccccgtctc

SEQ ID NO: 114914 - DNA, 15 bp, Homo sapiens
ggtgaaaccccgtct

SEQ ID NO: 114915 - DNA, 15 bp, Homo sapiens
tggtgaaaccccgtc

SEQ ID NO: 114916 - DNA, 15 bp, Homo sapiens
atggtgaaaccccgt

SEQ ID NO: 114917 - DNA, 15 bp, Homo sapiens
catggtgaaaccccg

SEQ ID NO: 114918 - DNA, 15 bp, Homo sapiens
acatggtgaaacccc

SEQ ID NO: 114919 - DNA, 15 bp, Homo sapiens
aacatggtgaaaccc

SEQ ID NO: 114920 - DNA, 15 bp, Homo sapiens
caacatggtgaaacc

SEQ ID NO: 114921 - DNA, 15 bp, Homo sapiens
ccaacatggtgaaac

SEQ ID NO: 114922 - DNA, 15 bp, Homo sapiens
accaacatggtgaaa

SEQ ID NO: 114923 - DNA, 15 bp, Homo sapiens
gaccaacatggtgaa

SEQ ID NO: 114924 - DNA, 15 bp, Homo sapiens
tgaccaacatggtga

SEQ ID NO: 114925 - DNA, 15 bp, Homo sapiens
ctgaccaacatggtg

SEQ ID NO: 114926 - DNA, 15 bp, Homo sapiens
cctgaccaacatggt

SEQ ID NO: 114927 - DNA, 15 bp, Homo sapiens
gcctgaccaacatgg

SEQ ID NO: 114928 - DNA, 15 bp, Homo sapiens
agcctgaccaacatg

SEQ ID NO: 114929 - DNA, 15 bp, Homo sapiens
tagcctgaccaacat

SEQ ID NO: 114930 - DNA, 15 bp, Homo sapiens
ctagcctgaccaaca

SEQ ID NO: 114931 - DNA, 15 bp, Homo sapiens
actagcctgaccaac

SEQ ID NO: 114932 - DNA, 15 bp, Homo sapiens
gactagcctgaccaa

SEQ ID NO: 114933 - DNA, 15 bp, Homo sapiens
agactagcctgacca

SEQ ID NO: 114934 - DNA, 15 bp, Homo sapiens
gagactagcctgacc

SEQ ID NO: 114935 - DNA, 15 bp, Homo sapiens
cgagactagcctgac

SEQ ID NO: 114936 - DNA, 15 bp, Homo sapiens
tcgagactagcctga

SEQ ID NO: 114937 - DNA, 15 bp, Homo sapiens
ttcgagactagcctg

SEQ ID NO: 114938 - DNA, 15 bp, Homo sapiens
gttcgagactagcct

SEQ ID NO: 114939 - DNA, 15 bp, Homo sapiens
agttcgagactagcc

SEQ ID NO: 114940 - DNA, 15 bp, Homo sapiens
gagttcgagactagc

SEQ ID NO: 114941 - DNA, 15 bp, Homo sapiens
ggagttcgagactag

SEQ ID NO: 114942 - DNA, 15 bp, Homo sapiens
aggagttcgagacta

SEQ ID NO: 114943 - DNA, 15 bp, Homo sapiens
caggagttcgagact

SEQ ID NO: 114944 - DNA, 15 bp, Homo sapiens
gaggtcaggagttcg

SEQ ID NO: 114945 - DNA, 15 bp, Homo sapiens
tgaggtcaggagttc

SEQ ID NO: 114946 - DNA, 15 bp, Homo sapiens
ctgaggtcaggagtt

SEQ ID NO: 114947 - DNA, 15 bp, Homo sapiens
cctgaggtcaggagt

SEQ ID NO: 114948 - DNA, 15 bp, Homo sapiens
acctgaggtcaggag

SEQ ID NO: 114949 - DNA, 15 bp, Homo sapiens
cacctgaggtcagga

SEQ ID NO: 114950 - DNA, 15 bp, Homo sapiens
tcacctgaggtcagg

SEQ ID NO: 114951 - DNA, 15 bp, Homo sapiens
atcacctgaggtcag

SEQ ID NO: 114952 - DNA, 15 bp, Homo sapiens
gatcacctgaggtca

SEQ ID NO: 114953 - DNA, 15 bp, Homo sapiens
ggatcacctgaggtc

SEQ ID NO: 114954 - DNA, 15 bp, Homo sapiens
tggatcacctgaggt

SEQ ID NO: 114955 - DNA, 15 bp, Homo sapiens
gtggatcacctgagg

SEQ ID NO: 114956 - DNA, 15 bp, Homo sapiens
agtggatcacctgag

SEQ ID NO: 114957 - DNA, 15 bp, Homo sapiens
gagtggatcacctga

SEQ ID NO: 114958 - DNA, 15 bp, Homo sapiens
cgagtggatcacctg

SEQ ID NO: 114959 - DNA, 15 bp, Homo sapiens
gcgagtggatcacct

SEQ ID NO: 114960 - DNA, 15 bp, Homo sapiens
ggcgagtggatcacc

SEQ ID NO: 114961 - DNA, 15 bp, Homo sapiens
aggcgagtggatcac

SEQ ID NO: 114962 - DNA, 15 bp, Homo sapiens
gaggcgagtggatca

SEQ ID NO: 114963 - DNA, 15 bp, Homo sapiens
cgaggcgagtggatc

SEQ ID NO: 114964 - DNA, 15 bp, Homo sapiens
ccgaggcgagtggat

SEQ ID NO: 114965 - DNA, 15 bp, Homo sapiens
gccgaggcgagtgga

SEQ ID NO: 114966 - DNA, 15 bp, Homo sapiens
ggccgaggcgagtgg

SEQ ID NO: 114967 - DNA, 15 bp, Homo sapiens
aggccgaggcgagtg

SEQ ID NO: 114968 - DNA, 15 bp, Homo sapiens
gaggccgaggcgagt

SEQ ID NO: 114969 - DNA, 15 bp, Homo sapiens
ggaggccgaggcgag

SEQ ID NO: 114970 - DNA, 15 bp, Homo sapiens
gggaggccgaggcga

SEQ ID NO: 114971 - DNA, 15 bp, Homo sapiens
tgggaggccgaggcg

SEQ ID NO: 114972 - DNA, 15 bp, Homo sapiens
ttgggaggccgaggc

SEQ ID NO: 114973 - DNA, 15 bp, Homo sapiens
tttgggaggccgagg

SEQ ID NO: 114974 - DNA, 15 bp, Homo sapiens
ctttgggaggccgag

SEQ ID NO: 114975 - DNA, 15 bp, Homo sapiens
actttgggaggccga

SEQ ID NO: 114976 - DNA, 15 bp, Homo sapiens
cactttgggaggccg

SEQ ID NO: 114977 - DNA, 15 bp, Homo sapiens
gcactttgggaggcc

SEQ ID NO: 114978 - DNA, 15 bp, Homo sapiens
agcactttgggaggc

SEQ ID NO: 114979 - DNA, 15 bp, Homo sapiens
cagcactttgggagg

SEQ ID NO: 114980 - DNA, 15 bp, Homo sapiens
ccagcactttgggag

SEQ ID NO: 114981 - DNA, 15 bp, Homo sapiens
cccagcactttggga

SEQ ID NO: 114982 - DNA, 15 bp, Homo sapiens
tcccagcactttggg

SEQ ID NO: 114983 - DNA, 15 bp, Homo sapiens
atcccagcactttgg

SEQ ID NO: 114984 - DNA, 15 bp, Homo sapiens
aatcccagcactttg

SEQ ID NO: 114985 - DNA, 15 bp, Homo sapiens
taatcccagcacttt

SEQ ID NO: 114986 - DNA, 15 bp, Homo sapiens
gtaatcccagcactt

SEQ ID NO: 114987 - DNA, 15 bp, Homo sapiens
tgtaatcccagcact

SEQ ID NO: 114988 - DNA, 15 bp, Homo sapiens
ctgtaatcccagcac

SEQ ID NO: 114989 - DNA, 15 bp, Homo sapiens
tctgtaatcccagca

SEQ ID NO: 114990 - DNA, 15 bp, Homo sapiens
atctgtaatcccagc

SEQ ID NO: 114991 - DNA, 15 bp, Homo sapiens
catctgtaatcccag

SEQ ID NO: 114992 - DNA, 15 bp, Homo sapiens
acatctgtaatccca

SEQ ID NO: 114993 - DNA, 15 bp, Homo sapiens
cacatctgtaatccc

SEQ ID NO: 114994 - DNA, 15 bp, Homo sapiens
tcacatctgtaatcc

SEQ ID NO: 114995 - DNA, 15 bp, Homo sapiens
ctcacatctgtaatc

SEQ ID NO: 114996 - DNA, 15 bp, Homo sapiens
gctcacatctgtaat

SEQ ID NO: 114997 - DNA, 15 bp, Homo sapiens
ggctcacatctgtaa

SEQ ID NO: 114998 - DNA, 15 bp, Homo sapiens
tggctcacatctgta

SEQ ID NO: 114999 - DNA, 15 bp, Homo sapiens
gtggctcacatctgt

SEQ ID NO: 115000 - DNA, 15 bp, Homo sapiens
ggtggctcacatctg

SEQ ID NO: 115001 - DNA, 15 bp, Homo sapiens
tggtggctcacatct

SEQ ID NO: 115002 - DNA, 15 bp, Homo sapiens
atggtggctcacatc

SEQ ID NO: 115003 - DNA, 15 bp, Homo sapiens
catggtggctcacat

SEQ ID NO: 115004 - DNA, 15 bp, Homo sapiens
gcatggtggctcaca

SEQ ID NO: 115005 - DNA, 15 bp, Homo sapiens
ggcatggtggctcac

SEQ ID NO: 115006 - DNA, 15 bp, Homo sapiens
gggcatggtggctca

SEQ ID NO: 115007 - DNA, 15 bp, Homo sapiens
tgggcatggtggctc

SEQ ID NO: 115008 - DNA, 15 bp, Homo sapiens
ctgggcatggtggct

SEQ ID NO: 115009 - DNA, 15 bp, Homo sapiens
gctgggcatggtggc

SEQ ID NO: 115010 - DNA, 15 bp, Homo sapiens
agctgggcatggtgg

SEQ ID NO: 115011 - DNA, 15 bp, Homo sapiens
cagctgggcatggtg

SEQ ID NO: 115012 - DNA, 15 bp, Homo sapiens
ccagctgggcatggt

SEQ ID NO: 115013 - DNA, 15 bp, Homo sapiens
accagctgggcatgg

SEQ ID NO: 115014 - DNA, 15 bp, Homo sapiens
gaccagctgggcatg

SEQ ID NO: 115015 - DNA, 15 bp, Homo sapiens
ggaccagctgggcat

SEQ ID NO: 115016 - DNA, 15 bp, Homo sapiens
aggaccagctgggca

SEQ ID NO: 115017 - DNA, 15 bp, Homo sapiens
aaggaccagctgggc

SEQ ID NO: 115018 - DNA, 15 bp, Homo sapiens
caaggaccagctggg

SEQ ID NO: 115019 - DNA, 15 bp, Homo sapiens
tcaaggaccagctgg

SEQ ID NO: 115020 - DNA, 15 bp, Homo sapiens
ttcaaggaccagctg

SEQ ID NO: 115021 - DNA, 15 bp, Homo sapiens
attcaaggaccagct

SEQ ID NO: 115022 - DNA, 15 bp, Homo sapiens
aattcaaggaccagc

SEQ ID NO: 115023 - DNA, 15 bp, Homo sapiens
gaattcaaggaccag

SEQ ID NO: 115024 - DNA, 15 bp, Homo sapiens
agaattcaaggacca

SEQ ID NO: 115025 - DNA, 15 bp, Homo sapiens
aagaattcaaggacc

SEQ ID NO: 115026 - DNA, 15 bp, Homo sapiens
taagaattcaaggac

SEQ ID NO: 115027 - DNA, 15 bp, Homo sapiens
ataagaattcaagga

SEQ ID NO: 115028 - DNA, 15 bp, Homo sapiens
aataagaattcaagg

SEQ ID NO: 115029 - DNA, 15 bp, Homo sapiens
aaataagaattcaag

SEQ ID NO: 115030 - DNA, 15 bp, Homo sapiens
caaataagaattcaa

SEQ ID NO: 115031 - DNA, 15 bp, Homo sapiens
gcaaataagaattca

SEQ ID NO: 115032 - DNA, 15 bp, Homo sapiens
agcaaataagaattc

SEQ ID NO: 115033 - DNA, 15 bp, Homo sapiens
cagcaaataagaatt

SEQ ID NO: 115034 - DNA, 15 bp, Homo sapiens
gcagcaaataagaat

SEQ ID NO: 115035 - DNA, 15 bp, Homo sapiens
tgcagcaaataagaa

SEQ ID NO: 115036 - DNA, 15 bp, Homo sapiens
gtgcagcaaataaga

SEQ ID NO: 115037 - DNA, 15 bp, Homo sapiens
agtgcagcaaataag

SEQ ID NO: 115038 - DNA, 15 bp, Homo sapiens
tagtgcagcaaataa

SEQ ID NO: 115039 - DNA, 15 bp, Homo sapiens
ctagtgcagcaaata

SEQ ID NO: 115040 - DNA, 15 bp, Homo sapiens
cctagtgcagcaaat

SEQ ID NO: 115041 - DNA, 15 bp, Homo sapiens
acctagtgcagcaaa

SEQ ID NO: 115042 - DNA, 15 bp, Homo sapiens
tacctagtgcagcaa

SEQ ID NO: 115043 - DNA, 15 bp, Homo sapiens
ctacctagtgcagca

SEQ ID NO: 115044 - DNA, 15 bp, Homo sapiens
actacctagtgcagc

SEQ ID NO: 115045 - DNA, 15 bp, Homo sapiens
tactacctagtgcag

SEQ ID NO: 115046 - DNA, 15 bp, Homo sapiens
ttactacctagtgca

SEQ ID NO: 115047 - DNA, 15 bp, Homo sapiens
tttactacctagtgc

SEQ ID NO: 115048 - DNA, 15 bp, Homo sapiens
ctttactacctagtg

SEQ ID NO: 115049 - DNA, 15 bp, Homo sapiens
cctttactacctagt

SEQ ID NO: 115050 - DNA, 15 bp, Homo sapiens
acctttactacctag

SEQ ID NO: 115051 - DNA, 15 bp, Homo sapiens
cacctttactaccta

SEQ ID NO: 115052 - DNA, 15 bp, Homo sapiens
acacctttactacct

SEQ ID NO: 115053 - DNA, 15 bp, Homo sapiens
tacacctttactacc

SEQ ID NO: 115054 - DNA, 15 bp, Homo sapiens
ctacacctttactac

SEQ ID NO: 115055 - DNA, 15 bp, Homo sapiens
gctacacctttacta

SEQ ID NO: 115056 - DNA, 15 bp, Homo sapiens
tgctacacctttact

SEQ ID NO: 115057 - DNA, 15 bp, Homo sapiens
ttgctacacctttac

SEQ ID NO: 115058 - DNA, 15 bp, Homo sapiens
tttgctacaccttta

SEQ ID NO: 115059 - DNA, 15 bp, Homo sapiens
ttttgctacaccttt

SEQ ID NO: 115060 - DNA, 15 bp, Homo sapiens
tttttgctacacctt

SEQ ID NO: 115061 - DNA, 15 bp, Homo sapiens
gtttttgctacacct

SEQ ID NO: 115062 - DNA, 15 bp, Homo sapiens
tgtttttgctacacc

SEQ ID NO: 115063 - DNA, 15 bp, Homo sapiens
ctgtttttgctacac

SEQ ID NO: 115064 - DNA, 15 bp, Homo sapiens
cctgtttttgctaca

SEQ ID NO: 115065 - DNA, 15 bp, Homo sapiens
tcctgtttttgctac

SEQ ID NO: 115066 - DNA, 15 bp, Homo sapiens
gtcctgtttttgcta

SEQ ID NO: 115067 - DNA, 15 bp, Homo sapiens
tgtcctgtttttgct

SEQ ID NO: 115068 - DNA, 15 bp, Homo sapiens
ctgtcctgtttttgc

SEQ ID NO: 115069 - DNA, 15 bp, Homo sapiens
tctgtcctgtttttg

SEQ ID NO: 115070 - DNA, 15 bp, Homo sapiens
ttctgtcctgttttt

SEQ ID NO: 115071 - DNA, 15 bp, Homo sapiens
attctgtcctgtttt

SEQ ID NO: 115072 - DNA, 15 bp, Homo sapiens
gattctgtcctgttt

SEQ ID NO: 115073 - DNA, 15 bp, Homo sapiens
agattctgtcctgtt

SEQ ID NO: 115074 - DNA, 15 bp, Homo sapiens
aagattctgtcctgt

SEQ ID NO: 115075 - DNA, 15 bp, Homo sapiens
gaagattctgtcctg

SEQ ID NO: 115076 - DNA, 15 bp, Homo sapiens
agaagattctgtcct

SEQ ID NO: 115077 - DNA, 15 bp, Homo sapiens
cagaagattctgtcc

SEQ ID NO: 115078 - DNA, 15 bp, Homo sapiens
gcagaagattctgtc

SEQ ID NO: 115079 - DNA, 15 bp, Homo sapiens
ggcagaagattctgt

SEQ ID NO: 115080 - DNA, 15 bp, Homo sapiens
aggcagaagattctg

SEQ ID NO: 115081 - DNA, 15 bp, Homo sapiens
aaggcagaagattct

SEQ ID NO: 115082 - DNA, 15 bp, Homo sapiens
aaaggcagaagattc

SEQ ID NO: 115083 - DNA, 15 bp, Homo sapiens
caaaggcagaagatt

SEQ ID NO: 115084 - DNA, 15 bp, Homo sapiens
tcaaaggcagaagat

SEQ ID NO: 115085 - DNA, 15 bp, Homo sapiens
atcaaaggcagaaga

SEQ ID NO: 115086 - DNA, 15 bp, Homo sapiens
catcaaaggcagaag

SEQ ID NO: 115087 - DNA, 15 bp, Homo sapiens
tcatcaaaggcagaa

SEQ ID NO: 115088 - DNA, 15 bp, Homo sapiens
ttcatcaaaggcaga

SEQ ID NO: 115089 - DNA, 15 bp, Homo sapiens
tttcatcaaaggcag

SEQ ID NO: 115090 - DNA, 15 bp, Homo sapiens
atttcatcaaaggca

SEQ ID NO: 115091 - DNA, 15 bp, Homo sapiens
gatttcatcaaaggc

SEQ ID NO: 115092 - DNA, 15 bp, Homo sapiens
tgatttcatcaaagg

SEQ ID NO: 115093 - DNA, 15 bp, Homo sapiens
gtgatttcatcaaag

SEQ ID NO: 115094 - DNA, 15 bp, Homo sapiens
tgtgatttcatcaaa

SEQ ID NO: 115095 - DNA, 15 bp, Homo sapiens
atgtgatttcatcaa

SEQ ID NO: 115096 - DNA, 15 bp, Homo sapiens
aatgtgatttcatca

SEQ ID NO: 115097 - DNA, 15 bp, Homo sapiens
gaatgtgatttcatc

SEQ ID NO: 115098 - DNA, 15 bp, Homo sapiens
ggaatgtgatttcat

SEQ ID NO: 115099 - DNA, 15 bp, Homo sapiens
tggaatgtgatttca

SEQ ID NO: 115100 - DNA, 15 bp, Homo sapiens
ctggaatgtgatttc

SEQ ID NO: 115101 - DNA, 15 bp, Homo sapiens
actggaatgtgattt

SEQ ID NO: 115102 - DNA, 15 bp, Homo sapiens
tactggaatgtgatt

SEQ ID NO: 115103 - DNA, 15 bp, Homo sapiens
ttactggaatgtgat

SEQ ID NO: 115104 - DNA, 15 bp, Homo sapiens
cttactggaatgtga

SEQ ID NO: 115105 - DNA, 15 bp, Homo sapiens
ccttactggaatgtg

SEQ ID NO: 115106 - DNA, 15 bp, Homo sapiens
tccttactggaatgt

SEQ ID NO: 115107 - DNA, 15 bp, Homo sapiens
atccttactggaatg

SEQ ID NO: 115108 - DNA, 15 bp, Homo sapiens
tatccttactggaat

SEQ ID NO: 115109 - DNA, 15 bp, Homo sapiens
ctatccttactggaa

SEQ ID NO: 115110 - DNA, 15 bp, Homo sapiens
gctatccttactgga

SEQ ID NO: 115111 - DNA, 15 bp, Homo sapiens
agctatccttactgg

SEQ ID NO: 115112 - DNA, 15 bp, Homo sapiens
tagctatccttactg

SEQ ID NO: 115113 - DNA, 15 bp, Homo sapiens
ttagctatccttact

SEQ ID NO: 115114 - DNA, 15 bp, Homo sapiens
attagctatccttac

SEQ ID NO: 115115 - DNA, 15 bp, Homo sapiens
tattagctatcctta

SEQ ID NO: 115116 - DNA, 15 bp, Homo sapiens
atattagctatcctt

SEQ ID NO: 115117 - DNA, 15 bp, Homo sapiens
catattagctatcct

SEQ ID NO: 115118 - DNA, 15 bp, Homo sapiens
tcatattagctatcc

SEQ ID NO: 115119 - DNA, 15 bp, Homo sapiens
gtcatattagctatc

SEQ ID NO: 115120 - DNA, 15 bp, Homo sapiens
tgtcatattagctat

SEQ ID NO: 115121 - DNA, 15 bp, Homo sapiens
ctgtcatattagcta

SEQ ID NO: 115122 - DNA, 15 bp, Homo sapiens
tctgtcatattagct

SEQ ID NO: 115123 - DNA, 15 bp, Homo sapiens
atctgtcatattagc

SEQ ID NO: 115124 - DNA, 15 bp, Homo sapiens
catctgtcatattag

SEQ ID NO: 115125 - DNA, 15 bp, Homo sapiens
acatctgtcatatta

SEQ ID NO: 115126 - DNA, 15 bp, Homo sapiens
cacatctgtcatatt

SEQ ID NO: 115127 - DNA, 15 bp, Homo sapiens
tcacatctgtcatat

SEQ ID NO: 115128 - DNA, 15 bp, Homo sapiens
ctcacatctgtcata

SEQ ID NO: 115129 - DNA, 15 bp, Homo sapiens
actcacatctgtcat

SEQ ID NO: 115130 - DNA, 15 bp, Homo sapiens
gactcacatctgtca

SEQ ID NO: 115131 - DNA, 15 bp, Homo sapiens
agactcacatctgtc

SEQ ID NO: 115132 - DNA, 15 bp, Homo sapiens
aagactcacatctgt

SEQ ID NO: 115133 - DNA, 15 bp, Homo sapiens
taagactcacatctg

SEQ ID NO: 115134 - DNA, 15 bp, Homo sapiens
ttaagactcacatct

SEQ ID NO: 115135 - DNA, 15 bp, Homo sapiens
tttaagactcacatc

SEQ ID NO: 115136 - DNA, 15 bp, Homo sapiens
ctttaagactcacat

SEQ ID NO: 115137 - DNA, 15 bp, Homo sapiens
tctttaagactcaca

SEQ ID NO: 115138 - DNA, 15 bp, Homo sapiens
ttctttaagactcac

SEQ ID NO: 115139 - DNA, 15 bp, Homo sapiens
tttctttaagactca

SEQ ID NO: 115140 - DNA, 15 bp, Homo sapiens
ttttctttaagactc

SEQ ID NO: 115141 - DNA, 15 bp, Homo sapiens
tttttctttaagact

SEQ ID NO: 115142 - DNA, 15 bp, Homo sapiens
ttttttctttaagac

SEQ ID NO: 115143 - DNA, 15 bp, Homo sapiens
tttttttctttaaga

SEQ ID NO: 115144 - DNA, 15 bp, Homo sapiens
ttttttttctttaag

SEQ ID NO: 115145 - DNA, 15 bp, Homo sapiens
tttttttttctttaa

SEQ ID NO: 115146 - DNA, 15 bp, Homo sapiens
ctttttttttcttta

SEQ ID NO: 115147 - DNA, 15 bp, Homo sapiens
cctttttttttcttt

SEQ ID NO: 115148 - DNA, 15 bp, Homo sapiens
ccctttttttttctt

SEQ ID NO: 115149 - DNA, 15 bp, Homo sapiens
tccctttttttttct

SEQ ID NO: 115150 - DNA, 15 bp, Homo sapiens
ctccctttttttttc

SEQ ID NO: 115151 - DNA, 15 bp, Homo sapiens
tctcccttttttttt

SEQ ID NO: 115152 - DNA, 15 bp, Homo sapiens
ctctccctttttttt

SEQ ID NO: 115153 - DNA, 15 bp, Homo sapiens
cctctcccttttttt

SEQ ID NO: 115154 - DNA, 15 bp, Homo sapiens
tcctctccctttttt

SEQ ID NO: 115155 - DNA, 15 bp, Homo sapiens
atcctctcccttttt

SEQ ID NO: 115156 - DNA, 15 bp, Homo sapiens
catcctctccctttt

SEQ ID NO: 115157 - DNA, 15 bp, Homo sapiens
tcatcctctcccttt

SEQ ID NO: 115158 - DNA, 15 bp, Homo sapiens
ttcatcctctccctt

SEQ ID NO: 115159 - DNA, 15 bp, Homo sapiens
tttcatcctctccct

SEQ ID NO: 115160 - DNA, 15 bp, Homo sapiens
ctttcatcctctccc

SEQ ID NO: 115161 - DNA, 15 bp, Homo sapiens
cctttcatcctctcc

SEQ ID NO: 115162 - DNA, 15 bp, Homo sapiens
acctttcatcctctc

SEQ ID NO: 115163 - DNA, 15 bp, Homo sapiens
cacctttcatcctct

SEQ ID NO: 115164 - DNA, 15 bp, Homo sapiens
tcacctttcatcctc

SEQ ID NO: 115165 - DNA, 15 bp, Homo sapiens
atcacctttcatcct

SEQ ID NO: 115166 - DNA, 15 bp, Homo sapiens
aatcacctttcatcc

SEQ ID NO: 115167 - DNA, 15 bp, Homo sapiens
aaatcacctttcatc

SEQ ID NO: 115168 - DNA, 15 bp, Homo sapiens
taaatcacctttcat

SEQ ID NO: 115169 - DNA, 15 bp, Homo sapiens
ctaaatcacctttca

SEQ ID NO: 115170 - DNA, 15 bp, Homo sapiens
cctaaatcacctttc

SEQ ID NO: 115171 - DNA, 15 bp, Homo sapiens
ccctaaatcaccttt

SEQ ID NO: 115172 - DNA, 15 bp, Homo sapiens
tccctaaatcacctt

SEQ ID NO: 115173 - DNA, 15 bp, Homo sapiens
gtccctaaatcacct

SEQ ID NO: 115174 - DNA, 15 bp, Homo sapiens
tgtccctaaatcacc

SEQ ID NO: 115175 - DNA, 15 bp, Homo sapiens
ctgtccctaaatcac

SEQ ID NO: 115176 - DNA, 15 bp, Homo sapiens
cctgtccctaaatca

SEQ ID NO: 115177 - DNA, 15 bp, Homo sapiens
tcctgtccctaaatc

SEQ ID NO: 115178 - DNA, 15 bp, Homo sapiens
atcctgtccctaaat

SEQ ID NO: 115179 - DNA, 15 bp, Homo sapiens
aatcctgtccctaaa

SEQ ID NO: 115180 - DNA, 15 bp, Homo sapiens
caatcctgtccctaa

SEQ ID NO: 115181 - DNA, 15 bp, Homo sapiens
gcaatcctgtcccta

SEQ ID NO: 115182 - DNA, 15 bp, Homo sapiens
agcaatcctgtccct

SEQ ID NO: 115183 - DNA, 15 bp, Homo sapiens
cagcaatcctgtccc

SEQ ID NO: 115184 - DNA, 15 bp, Homo sapiens
acagcaatcctgtcc

SEQ ID NO: 115185 - DNA, 15 bp, Homo sapiens
aacagcaatcctgtc

SEQ ID NO: 115186 - DNA, 15 bp, Homo sapiens
aaacagcaatcctgt

SEQ ID NO: 115187 - DNA, 15 bp, Homo sapiens
gaaacagcaatcctg

SEQ ID NO: 115188 - DNA, 15 bp, Homo sapiens
tgaaacagcaatcct

SEQ ID NO: 115189 - DNA, 15 bp, Homo sapiens
ctgaaacagcaatcc

SEQ ID NO: 115190 - DNA, 15 bp, Homo sapiens
tctgaaacagcaatc

SEQ ID NO: 115191 - DNA, 15 bp, Homo sapiens
ctctgaaacagcaat

SEQ ID NO: 115192 - DNA, 15 bp, Homo sapiens
tctctgaaacagcaa

SEQ ID NO: 115193 - DNA, 15 bp, Homo sapiens
ctctctgaaacagca

SEQ ID NO: 115194 - DNA, 15 bp, Homo sapiens
actctctgaaacagc

SEQ ID NO: 115195 - DNA, 15 bp, Homo sapiens
tactctctgaaacag

SEQ ID NO: 115196 - DNA, 15 bp, Homo sapiens
ctactctctgaaaca

SEQ ID NO: 115197 - DNA, 15 bp, Homo sapiens
actactctctgaaac

SEQ ID NO: 115198 - DNA, 15 bp, Homo sapiens
gactactctctgaaa

SEQ ID NO: 115199 - DNA, 15 bp, Homo sapiens
tgactactctctgaa

SEQ ID NO: 115200 - DNA, 15 bp, Homo sapiens
ctgactactctctga

SEQ ID NO: 115201 - DNA, 15 bp, Homo sapiens
cctgactactctctg

SEQ ID NO: 115202 - DNA, 15 bp, Homo sapiens
ccctgactactctct

SEQ ID NO: 115203 - DNA, 15 bp, Homo sapiens
tccctgactactctc

SEQ ID NO: 115204 - DNA, 15 bp, Homo sapiens
ttccctgactactct

SEQ ID NO: 115205 - DNA, 15 bp, Homo sapiens
cttccctgactactc

SEQ ID NO: 115206 - DNA, 15 bp, Homo sapiens
tcttccctgactact

SEQ ID NO: 115207 - DNA, 15 bp, Homo sapiens
atcttccctgactac

SEQ ID NO: 115208 - DNA, 15 bp, Homo sapiens
gatcttccctgacta

SEQ ID NO: 115209 - DNA, 15 bp, Homo sapiens
agatcttccctgact

SEQ ID NO: 115210 - DNA, 15 bp, Homo sapiens
gagatcttccctgac

SEQ ID NO: 115211 - DNA, 15 bp, Homo sapiens
agagatcttccctga

SEQ ID NO: 115212 - DNA, 15 bp, Homo sapiens
gagagatcttccctg

SEQ ID NO: 115213 - DNA, 15 bp, Homo sapiens
tgagagatcttccct

SEQ ID NO: 115214 - DNA, 15 bp, Homo sapiens
ttgagagatcttccc

SEQ ID NO: 115215 - DNA, 15 bp, Homo sapiens
attgagagatcttcc

SEQ ID NO: 115216 - DNA, 15 bp, Homo sapiens
cattgagagatcttc

SEQ ID NO: 115217 - DNA, 15 bp, Homo sapiens
acattgagagatctt

SEQ ID NO: 115218 - DNA, 15 bp, Homo sapiens
gacattgagagatct

SEQ ID NO: 115219 - DNA, 15 bp, Homo sapiens
ggacattgagagatc

SEQ ID NO: 115220 - DNA, 15 bp, Homo sapiens
tggacattgagagat

SEQ ID NO: 115221 - DNA, 15 bp, Homo sapiens
ctggacattgagaga

SEQ ID NO: 115222 - DNA, 15 bp, Homo sapiens
cctggacattgagag

SEQ ID NO: 115223 - DNA, 15 bp, Homo sapiens
gcctggacattgaga

SEQ ID NO: 115224 - DNA, 15 bp, Homo sapiens
ggcctggacattgag

SEQ ID NO: 115225 - DNA, 15 bp, Homo sapiens
aggcctggacattga

SEQ ID NO: 115226 - DNA, 15 bp, Homo sapiens
caggcctggacattg

SEQ ID NO: 115227 - DNA, 15 bp, Homo sapiens
acaggcctggacatt

SEQ ID NO: 115228 - DNA, 15 bp, Homo sapiens
cacaggcctggacat

SEQ ID NO: 115229 - DNA, 15 bp, Homo sapiens
acacaggcctggaca

SEQ ID NO: 115230 - DNA, 15 bp, Homo sapiens
aacacaggcctggac

SEQ ID NO: 115231 - DNA, 15 bp, Homo sapiens
aaacacaggcctgga

SEQ ID NO: 115232 - DNA, 15 bp, Homo sapiens
aaaacacaggcctgg

SEQ ID NO: 115233 - DNA, 15 bp, Homo sapiens
aaaaacacaggcctg

SEQ ID NO: 115234 - DNA, 15 bp, Homo sapiens
gaaaaacacaggcct

SEQ ID NO: 115235 - DNA, 15 bp, Homo sapiens
agaaaaacacaggcc

SEQ ID NO: 115236 - DNA, 15 bp, Homo sapiens
gagaaaaacacaggc

SEQ ID NO: 115237 - DNA, 15 bp, Homo sapiens
agagaaaaacacagg

SEQ ID NO: 115238 - DNA, 15 bp, Homo sapiens
gagagaaaaacacag

SEQ ID NO: 115239 - DNA, 15 bp, Homo sapiens
agagagaaaaacaca

SEQ ID NO: 115240 - DNA, 15 bp, Homo sapiens
tagagagaaaaacac

SEQ ID NO: 115241 - DNA, 15 bp, Homo sapiens
gtagagagaaaaaca

SEQ ID NO: 115242 - DNA, 15 bp, Homo sapiens
tgtagagagaaaaac

SEQ ID NO: 115243 - DNA, 15 bp, Homo sapiens
ctgtagagagaaaaa

SEQ ID NO: 115244 - DNA, 15 bp, Homo sapiens
actgtagagagaaaa

SEQ ID NO: 115245 - DNA, 15 bp, Homo sapiens
aactgtagagagaaa

SEQ ID NO: 115246 - DNA, 15 bp, Homo sapiens
aaactgtagagagaa

SEQ ID NO: 115247 - DNA, 15 bp, Homo sapiens
aaaactgtagagaga

SEQ ID NO: 115248 - DNA, 15 bp, Homo sapiens
taaaactgtagagag

SEQ ID NO: 115249 - DNA, 15 bp, Homo sapiens
ttaaaactgtagaga

SEQ ID NO: 115250 - DNA, 15 bp, Homo sapiens
tttaaaactgtagag

SEQ ID NO: 115251 - DNA, 15 bp, Homo sapiens
ctttaaaactgtaga

SEQ ID NO: 115252 - DNA, 15 bp, Homo sapiens
actttaaaactgtag

SEQ ID NO: 115253 - DNA, 15 bp, Homo sapiens
cactttaaaactgta

SEQ ID NO: 115254 - DNA, 15 bp, Homo sapiens
ccactttaaaactgt

SEQ ID NO: 115255 - DNA, 15 bp, Homo sapiens
tccactttaaaactg

SEQ ID NO: 115256 - DNA, 15 bp, Homo sapiens
gtccactttaaaact

SEQ ID NO: 115257 - DNA, 15 bp, Homo sapiens
tgtccactttaaaac

SEQ ID NO: 115258 - DNA, 15 bp, Homo sapiens
atgtccactttaaaa

SEQ ID NO: 115259 - DNA, 15 bp, Homo sapiens
tatgtccactttaaa

SEQ ID NO: 115260 - DNA, 15 bp, Homo sapiens
ctatgtccactttaa

SEQ ID NO: 115261 - DNA, 15 bp, Homo sapiens
cctatgtccacttta

SEQ ID NO: 115262 - DNA, 15 bp, Homo sapiens
tcctatgtccacttt

SEQ ID NO: 115263 - DNA, 15 bp, Homo sapiens
atcctatgtccactt

SEQ ID NO: 115264 - DNA, 15 bp, Homo sapiens
tatcctatgtccact

SEQ ID NO: 115265 - DNA, 15 bp, Homo sapiens
atatcctatgtccac

SEQ ID NO: 115266 - DNA, 15 bp, Homo sapiens
tatatcctatgtcca

SEQ ID NO: 115267 - DNA, 15 bp, Homo sapiens
ctatatcctatgtcc

SEQ ID NO: 115268 - DNA, 15 bp, Homo sapiens
actatatcctatgtc

SEQ ID NO: 115269 - DNA, 15 bp, Homo sapiens
cactatatcctatgt

SEQ ID NO: 115270 - DNA, 15 bp, Homo sapiens
acactatatcctatg

SEQ ID NO: 115271 - DNA, 15 bp, Homo sapiens
aacactatatcctat

SEQ ID NO: 115272 - DNA, 15 bp, Homo sapiens
taacactatatccta

SEQ ID NO: 115273 - DNA, 15 bp, Homo sapiens
ataacactatatcct

SEQ ID NO: 115274 - DNA, 15 bp, Homo sapiens
aataacactatatcc

SEQ ID NO: 115275 - DNA, 15 bp, Homo sapiens
aaataacactatatc

SEQ ID NO: 115276 - DNA, 15 bp, Homo sapiens
taaataacactatat

SEQ ID NO: 115277 - DNA, 15 bp, Homo sapiens
ataaataacactata

SEQ ID NO: 115278 - DNA, 15 bp, Homo sapiens
aataaataacactat

SEQ ID NO: 115279 - DNA, 15 bp, Homo sapiens
aaataaataacacta

SEQ ID NO: 115280 - DNA, 15 bp, Homo sapiens
aaaataaataacact

SEQ ID NO: 115281 - DNA, 15 bp, Homo sapiens
gaaaataaataacac

SEQ ID NO: 115282 - DNA, 15 bp, Homo sapiens
ggaaaataaataaca

SEQ ID NO: 115283 - DNA, 15 bp, Homo sapiens
tggaaaataaataac

SEQ ID NO: 115284 - DNA, 15 bp, Homo sapiens
ttggaaaataaataa

SEQ ID NO: 115285 - DNA, 15 bp, Homo sapiens
tttggaaaataaata

SEQ ID NO: 115286 - DNA, 15 bp, Homo sapiens
ttttggaaaataaat

SEQ ID NO: 115287 - DNA, 15 bp, Homo sapiens
tttttggaaaataaa

SEQ ID NO: 115288 - DNA, 15 bp, Homo sapiens
atttttggaaaataa

SEQ ID NO: 115289 - DNA, 15 bp, Homo sapiens
catttttggaaaata

SEQ ID NO: 115290 - DNA, 15 bp, Homo sapiens
acatttttggaaaat

SEQ ID NO: 115291 - DNA, 15 bp, Homo sapiens
tacatttttggaaaa

SEQ ID NO: 115292 - DNA, 15 bp, Homo sapiens
ttacatttttggaaa

SEQ ID NO: 115293 - DNA, 15 bp, Homo sapiens
gttacatttttggaa

SEQ ID NO: 115294 - DNA, 15 bp, Homo sapiens
ggttacatttttgga

SEQ ID NO: 115295 - DNA, 15 bp, Homo sapiens
tggttacatttttgg

SEQ ID NO: 115296 - DNA, 15 bp, Homo sapiens
ttggttacatttttg

SEQ ID NO: 115297 - DNA, 15 bp, Homo sapiens
attggttacattttt

SEQ ID NO: 115298 - DNA, 15 bp, Homo sapiens
gattggttacatttt

SEQ ID NO: 115299 - DNA, 15 bp, Homo sapiens
agattggttacattt

SEQ ID NO: 115300 - DNA, 15 bp, Homo sapiens
gagattggttacatt

SEQ ID NO: 115301 - DNA, 15 bp, Homo sapiens
agagattggttacat

SEQ ID NO: 115302 - DNA, 15 bp, Homo sapiens
tagagattggttaca

SEQ ID NO: 115303 - DNA, 15 bp, Homo sapiens
gtagagattggttac

SEQ ID NO: 115304 - DNA, 15 bp, Homo sapiens
agtagagattggtta

SEQ ID NO: 115305 - DNA, 15 bp, Homo sapiens
tagtagagattggtt

SEQ ID NO: 115306 - DNA, 15 bp, Homo sapiens
ctagtagagattggt

SEQ ID NO: 115307 - DNA, 15 bp, Homo sapiens
cctagtagagattgg

SEQ ID NO: 115308 - DNA, 15 bp, Homo sapiens
acctagtagagattg

SEQ ID NO: 115309 - DNA, 15 bp, Homo sapiens
cacctagtagagatt

SEQ ID NO: 115310 - DNA, 15 bp, Homo sapiens
acacctagtagagat

SEQ ID NO: 115311 - DNA, 15 bp, Homo sapiens
tacacctagtagaga

SEQ ID NO: 115312 - DNA, 15 bp, Homo sapiens
ttacacctagtagag

SEQ ID NO: 115313 - DNA, 15 bp, Homo sapiens
cttacacctagtaga

SEQ ID NO: 115314 - DNA, 15 bp, Homo sapiens
gcttacacctagtag

SEQ ID NO: 115315 - DNA, 15 bp, Homo sapiens
tgcttacacctagta

SEQ ID NO: 115316 - DNA, 15 bp, Homo sapiens
ctgcttacacctagt

SEQ ID NO: 115317 - DNA, 15 bp, Homo sapiens
gctgcttacacctag

SEQ ID NO: 115318 - DNA, 15 bp, Homo sapiens
agctgcttacaccta

SEQ ID NO: 115319 - DNA, 15 bp, Homo sapiens
cagctgcttacacct

SEQ ID NO: 115320 - DNA, 15 bp, Homo sapiens
ccagctgcttacacc

SEQ ID NO: 115321 - DNA, 15 bp, Homo sapiens
cccagctgcttacac

SEQ ID NO: 115322 - DNA, 15 bp, Homo sapiens
gcccagctgcttaca

SEQ ID NO: 115323 - DNA, 15 bp, Homo sapiens
agcccagctgcttac

SEQ ID NO: 115324 - DNA, 15 bp, Homo sapiens
aagcccagctgctta

SEQ ID NO: 115325 - DNA, 15 bp, Homo sapiens
caagcccagctgctt

SEQ ID NO: 115326 - DNA, 15 bp, Homo sapiens
ccaagcccagctgct

SEQ ID NO: 115327 - DNA, 15 bp, Homo sapiens
accaagcccagctgc

SEQ ID NO: 115328 - DNA, 15 bp, Homo sapiens
aaccaagcccagctg

SEQ ID NO: 115329 - DNA, 15 bp, Homo sapiens
aaaccaagcccagct

SEQ ID NO: 115330 - DNA, 15 bp, Homo sapiens
aaaaccaagcccagc

SEQ ID NO: 115331 - DNA, 15 bp, Homo sapiens
caaaaccaagcccag

SEQ ID NO: 115332 - DNA, 15 bp, Homo sapiens
gcaaaaccaagccca

SEQ ID NO: 115333 - DNA, 15 bp, Homo sapiens
tgcaaaaccaagccc

SEQ ID NO: 115334 - DNA, 15 bp, Homo sapiens
ttgcaaaaccaagcc

SEQ ID NO: 115335 - DNA, 15 bp, Homo sapiens
cttgcaaaaccaagc

SEQ ID NO: 115336 - DNA, 15 bp, Homo sapiens
ccttgcaaaaccaag

SEQ ID NO: 115337 - DNA, 15 bp, Homo sapiens
cccttgcaaaaccaa

SEQ ID NO: 115338 - DNA, 15 bp, Homo sapiens
tcccttgcaaaacca

SEQ ID NO: 115339 - DNA, 15 bp, Homo sapiens
atcccttgcaaaacc

SEQ ID NO: 115340 - DNA, 15 bp, Homo sapiens
gatcccttgcaaaac

SEQ ID NO: 115341 - DNA, 15 bp, Homo sapiens
agatcccttgcaaaa

SEQ ID NO: 115342 - DNA, 15 bp, Homo sapiens
aagatcccttgcaaa

SEQ ID NO: 115343 - DNA, 15 bp, Homo sapiens
taagatcccttgcaa

SEQ ID NO: 115344 - DNA, 15 bp, Homo sapiens
ttaagatcccttgca

SEQ ID NO: 115345 - DNA, 15 bp, Homo sapiens
attaagatcccttgc

SEQ ID NO: 115346 - DNA, 15 bp, Homo sapiens
tattaagatcccttg

SEQ ID NO: 115347 - DNA, 15 bp, Homo sapiens
ctattaagatccctt

SEQ ID NO: 115348 - DNA, 15 bp, Homo sapiens
cctattaagatccct

SEQ ID NO: 115349 - DNA, 15 bp, Homo sapiens
ccctattaagatccc

SEQ ID NO: 115350 - DNA, 15 bp, Homo sapiens
tccctattaagatcc

SEQ ID NO: 115351 - DNA, 15 bp, Homo sapiens
ttccctattaagatc

SEQ ID NO: 115352 - DNA, 15 bp, Homo sapiens
gttccctattaagat

SEQ ID NO: 115353 - DNA, 15 bp, Homo sapiens
tgttccctattaaga

SEQ ID NO: 115354 - DNA, 15 bp, Homo sapiens
ctgttccctattaag

SEQ ID NO: 115355 - DNA, 15 bp, Homo sapiens
tctgttccctattaa

SEQ ID NO: 115356 - DNA, 15 bp, Homo sapiens
ttctgttccctatta

SEQ ID NO: 115357 - DNA, 15 bp, Homo sapiens
tttctgttccctatt

SEQ ID NO: 115358 - DNA, 15 bp, Homo sapiens
gtttctgttccctat

SEQ ID NO: 115359 - DNA, 15 bp, Homo sapiens
tgtttctgttcccta

SEQ ID NO: 115360 - DNA, 15 bp, Homo sapiens
gtgtttctgttccct

SEQ ID NO: 115361 - DNA, 15 bp, Homo sapiens
agtgtttctgttccc

SEQ ID NO: 115362 - DNA, 15 bp, Homo sapiens
cagtgtttctgttcc

SEQ ID NO: 115363 - DNA, 15 bp, Homo sapiens
acagtgtttctgttc

SEQ ID NO: 115364 - DNA, 15 bp, Homo sapiens
cacagtgtttctgtt

SEQ ID NO: 115365 - DNA, 15 bp, Homo sapiens
acacagtgtttctgt

SEQ ID NO: 115366 - DNA, 15 bp, Homo sapiens
tacacagtgtttctg

SEQ ID NO: 115367 - DNA, 15 bp, Homo sapiens
atacacagtgtttct

SEQ ID NO: 115368 - DNA, 15 bp, Homo sapiens
catacacagtgtttc

SEQ ID NO: 115369 - DNA, 15 bp, Homo sapiens
gcatacacagtgttt

SEQ ID NO: 115370 - DNA, 15 bp, Homo sapiens
agcatacacagtgtt

SEQ ID NO: 115371 - DNA, 15 bp, Homo sapiens
aagcatacacagtgt

SEQ ID NO: 115372 - DNA, 15 bp, Homo sapiens
taagcatacacagtg

SEQ ID NO: 115373 - DNA, 15 bp, Homo sapiens
ctaagcatacacagt

SEQ ID NO: 115374 - DNA, 15 bp, Homo sapiens
gctaagcatacacag

SEQ ID NO: 115375 - DNA, 15 bp, Homo sapiens
agctaagcatacaca

SEQ ID NO: 115376 - DNA, 15 bp, Homo sapiens
cagctaagcatacac

SEQ ID NO: 115377 - DNA, 15 bp, Homo sapiens
acagctaagcataca

SEQ ID NO: 115378 - DNA, 15 bp, Homo sapiens
gacagctaagcatac

SEQ ID NO: 115379 - DNA, 15 bp, Homo sapiens
ggacagctaagcata

SEQ ID NO: 115380 - DNA, 15 bp, Homo sapiens
tggacagctaagcat

SEQ ID NO: 115381 - DNA, 15 bp, Homo sapiens
gtggacagctaagca

SEQ ID NO: 115382 - DNA, 15 bp, Homo sapiens
agtggacagctaagc

SEQ ID NO: 115383 - DNA, 15 bp, Homo sapiens
aagtggacagctaag

SEQ ID NO: 115384 - DNA, 15 bp, Homo sapiens
gaagtggacagctaa

SEQ ID NO: 115385 - DNA, 15 bp, Homo sapiens
ggaagtggacagcta

SEQ ID NO: 115386 - DNA, 15 bp, Homo sapiens
gggaagtggacagct

SEQ ID NO: 115387 - DNA, 15 bp, Homo sapiens
ggggaagtggacagc

SEQ ID NO: 115388 - DNA, 15 bp, Homo sapiens
tggggaagtggacag

SEQ ID NO: 115389 - DNA, 15 bp, Homo sapiens
ctggggaagtggaca

SEQ ID NO: 115390 - DNA, 15 bp, Homo sapiens
tctggggaagtggac

SEQ ID NO: 115391 - DNA, 15 bp, Homo sapiens
ttctggggaagtgga

SEQ ID NO: 115392 - DNA, 15 bp, Homo sapiens
cttctggggaagtgg

SEQ ID NO: 115393 - DNA, 15 bp, Homo sapiens
tcttctggggaagtg

SEQ ID NO: 115394 - DNA, 15 bp, Homo sapiens
gtcttctggggaagt

SEQ ID NO: 115395 - DNA, 15 bp, Homo sapiens
agtcttctggggaag

SEQ ID NO: 115396 - DNA, 15 bp, Homo sapiens
cagtcttctggggaa

SEQ ID NO: 115397 - DNA, 15 bp, Homo sapiens
acagtcttctgggga

SEQ ID NO: 115398 - DNA, 15 bp, Homo sapiens
tacagtcttctgggg

SEQ ID NO: 115399 - DNA, 15 bp, Homo sapiens
ttacagtcttctggg

SEQ ID NO: 115400 - DNA, 15 bp, Homo sapiens
cttacagtcttctgg

SEQ ID NO: 115401 - DNA, 15 bp, Homo sapiens
gcttacagtcttctg

SEQ ID NO: 115402 - DNA, 15 bp, Homo sapiens
agcttacagtcttct

SEQ ID NO: 115403 - DNA, 15 bp, Homo sapiens
gagcttacagtcttc

SEQ ID NO: 115404 - DNA, 15 bp, Homo sapiens
agagcttacagtctt

SEQ ID NO: 115405 - DNA, 15 bp, Homo sapiens
gagagcttacagtct

SEQ ID NO: 115406 - DNA, 15 bp, Homo sapiens
agagagcttacagtc

SEQ ID NO: 115407 - DNA, 15 bp, Homo sapiens
cagagagcttacagt

SEQ ID NO: 115408 - DNA, 15 bp, Homo sapiens
tcagagagcttacag

SEQ ID NO: 115409 - DNA, 15 bp, Homo sapiens
ttcagagagcttaca

SEQ ID NO: 115410 - DNA, 15 bp, Homo sapiens
cttcagagagcttac

SEQ ID NO: 115411 - DNA, 15 bp, Homo sapiens
ccttcagagagctta

SEQ ID NO: 115412 - DNA, 15 bp, Homo sapiens
gccttcagagagctt

SEQ ID NO: 115413 - DNA, 15 bp, Homo sapiens
tgccttcagagagct

SEQ ID NO: 115414 - DNA, 15 bp, Homo sapiens
ttgccttcagagagc

SEQ ID NO: 115415 - DNA, 15 bp, Homo sapiens
cttgccttcagagag

SEQ ID NO: 115416 - DNA, 15 bp, Homo sapiens
tcttgccttcagaga

SEQ ID NO: 115417 - DNA, 15 bp, Homo sapiens
gtcttgccttcagag

SEQ ID NO: 115418 - DNA, 15 bp, Homo sapiens
ggtcttgccttcaga

SEQ ID NO: 115419 - DNA, 15 bp, Homo sapiens
gggtcttgccttcag

SEQ ID NO: 115420 - DNA, 15 bp, Homo sapiens
tgggtcttgccttca

SEQ ID NO: 115421 - DNA, 15 bp, Homo sapiens
ctgggtcttgccttc

SEQ ID NO: 115422 - DNA, 15 bp, Homo sapiens
cctgggtcttgcctt

SEQ ID NO: 115423 - DNA, 15 bp, Homo sapiens
acctgggtcttgcct

SEQ ID NO: 115424 - DNA, 15 bp, Homo sapiens
gacctgggtcttgcc

SEQ ID NO: 115425 - DNA, 15 bp, Homo sapiens
agacctgggtcttgc

SEQ ID NO: 115426 - DNA, 15 bp, Homo sapiens
aagacctgggtcttg

SEQ ID NO: 115427 - DNA, 15 bp, Homo sapiens
aaagacctgggtctt

SEQ ID NO: 115428 - DNA, 15 bp, Homo sapiens
caaagacctgggtct

SEQ ID NO: 115429 - DNA, 15 bp, Homo sapiens
ccaaagacctgggtc

SEQ ID NO: 115430 - DNA, 15 bp, Homo sapiens
accaaagacctgggt

SEQ ID NO: 115431 - DNA, 15 bp, Homo sapiens
gaccaaagacctggg

SEQ ID NO: 115432 - DNA, 15 bp, Homo sapiens
agaccaaagacctgg

SEQ ID NO: 115433 - DNA, 15 bp, Homo sapiens
cagaccaaagacctg

SEQ ID NO: 115434 - DNA, 15 bp, Homo sapiens
acagaccaaagacct

SEQ ID NO: 115435 - DNA, 15 bp, Homo sapiens
tacagaccaaagacc

SEQ ID NO: 115436 - DNA, 15 bp, Homo sapiens
atacagaccaaagac

SEQ ID NO: 115437 - DNA, 15 bp, Homo sapiens
aatacagaccaaaga

SEQ ID NO: 115438 - DNA, 15 bp, Homo sapiens
taatacagaccaaag

SEQ ID NO: 115439 - DNA, 15 bp, Homo sapiens
ctaatacagaccaaa

SEQ ID NO: 115440 - DNA, 15 bp, Homo sapiens
cctaatacagaccaa

SEQ ID NO: 115441 - DNA, 15 bp, Homo sapiens
tcctaatacagacca

SEQ ID NO: 115442 - DNA, 15 bp, Homo sapiens
ctcctaatacagacc

SEQ ID NO: 115443 - DNA, 15 bp, Homo sapiens
actcctaatacagac

SEQ ID NO: 115444 - DNA, 15 bp, Homo sapiens
tactcctaatacaga

SEQ ID NO: 115445 - DNA, 15 bp, Homo sapiens
gtactcctaatacag

SEQ ID NO: 115446 - DNA, 15 bp, Homo sapiens
ggtactcctaataca

SEQ ID NO: 115447 - DNA, 15 bp, Homo sapiens
gggtactcctaatac

SEQ ID NO: 115448 - DNA, 15 bp, Homo sapiens
tgggtactcctaata

SEQ ID NO: 115449 - DNA, 15 bp, Homo sapiens
ctgggtactcctaat

SEQ ID NO: 115450 - DNA, 15 bp, Homo sapiens
tctgggtactcctaa

SEQ ID NO: 115451 - DNA, 15 bp, Homo sapiens
ttctgggtactccta

SEQ ID NO: 115452 - DNA, 15 bp, Homo sapiens
attctgggtactcct

SEQ ID NO: 115453 - DNA, 15 bp, Homo sapiens
tattctgggtactcc

SEQ ID NO: 115454 - DNA, 15 bp, Homo sapiens
ctattctgggtactc

SEQ ID NO: 115455 - DNA, 15 bp, Homo sapiens
actattctgggtact

SEQ ID NO: 115456 - DNA, 15 bp, Homo sapiens
cactattctgggtac

SEQ ID NO: 115457 - DNA, 15 bp, Homo sapiens
acactattctgggta

SEQ ID NO: 115458 - DNA, 15 bp, Homo sapiens
aacactattctgggt

SEQ ID NO: 115459 - DNA, 15 bp, Homo sapiens
aaacactattctggg

SEQ ID NO: 115460 - DNA, 15 bp, Homo sapiens
caaacactattctgg

SEQ ID NO: 115461 - DNA, 15 bp, Homo sapiens
tcaaacactattctg

SEQ ID NO: 115462 - DNA, 15 bp, Homo sapiens
atcaaacactattct

SEQ ID NO: 115463 - DNA, 15 bp, Homo sapiens
catcaaacactattc

SEQ ID NO: 115464 - DNA, 15 bp, Homo sapiens
ccatcaaacactatt

SEQ ID NO: 115465 - DNA, 15 bp, Homo sapiens
tccatcaaacactat

SEQ ID NO: 115466 - DNA, 15 bp, Homo sapiens
ctccatcaaacacta

SEQ ID NO: 115467 - DNA, 15 bp, Homo sapiens
cctccatcaaacact

SEQ ID NO: 115468 - DNA, 15 bp, Homo sapiens
ccctccatcaaacac

SEQ ID NO: 115469 - DNA, 15 bp, Homo sapiens
tccctccatcaaaca

SEQ ID NO: 115470 - DNA, 15 bp, Homo sapiens
atccctccatcaaac

SEQ ID NO: 115471 - DNA, 15 bp, Homo sapiens
catccctccatcaaa

SEQ ID NO: 115472 - DNA, 15 bp, Homo sapiens
tcatccctccatcaa

SEQ ID NO: 115473 - DNA, 15 bp, Homo sapiens
ttcatccctccatca

SEQ ID NO: 115474 - DNA, 15 bp, Homo sapiens
tttcatccctccatc

SEQ ID NO: 115475 - DNA, 15 bp, Homo sapiens
ctttcatccctccat

SEQ ID NO: 115476 - DNA, 15 bp, Homo sapiens
cctttcatccctcca

SEQ ID NO: 115477 - DNA, 15 bp, Homo sapiens
ccctttcatccctcc

SEQ ID NO: 115478 - DNA, 15 bp, Homo sapiens
tccctttcatccctc

SEQ ID NO: 115479 - DNA, 15 bp, Homo sapiens
gtccctttcatccct

SEQ ID NO: 115480 - DNA, 15 bp, Homo sapiens
agtccctttcatccc

SEQ ID NO: 115481 - DNA, 15 bp, Homo sapiens
aagtccctttcatcc

SEQ ID NO: 115482 - DNA, 15 bp, Homo sapiens
aaagtccctttcatc

SEQ ID NO: 115483 - DNA, 15 bp, Homo sapiens
aaaagtccctttcat

SEQ ID NO: 115484 - DNA, 15 bp, Homo sapiens
aaaaagtccctttca

SEQ ID NO: 115485 - DNA, 15 bp, Homo sapiens
gaaaaagtccctttc

SEQ ID NO: 115486 - DNA, 15 bp, Homo sapiens
agaaaaagtcccttt

SEQ ID NO: 115487 - DNA, 15 bp, Homo sapiens
gagaaaaagtccctt

SEQ ID NO: 115488 - DNA, 15 bp, Homo sapiens
ggagaaaaagtccct

SEQ ID NO: 115489 - DNA, 15 bp, Homo sapiens
gggagaaaaagtccc

SEQ ID NO: 115490 - DNA, 15 bp, Homo sapiens
ggggagaaaaagtcc

SEQ ID NO: 115491 - DNA, 15 bp, Homo sapiens
tggggagaaaaagtc

SEQ ID NO: 115492 - DNA, 15 bp, Homo sapiens
ctggggagaaaaagt

SEQ ID NO: 115493 - DNA, 15 bp, Homo sapiens
gctggggagaaaaag

SEQ ID NO: 115494 - DNA, 15 bp, Homo sapiens
agctggggagaaaaa

SEQ ID NO: 115495 - DNA, 15 bp, Homo sapiens
aagctggggagaaaa

SEQ ID NO: 115496 - DNA, 15 bp, Homo sapiens
caagctggggagaaa

SEQ ID NO: 115497 - DNA, 15 bp, Homo sapiens
ccaagctggggagaa

SEQ ID NO: 115498 - DNA, 15 bp, Homo sapiens
accaagctggggaga

SEQ ID NO: 115499 - DNA, 15 bp, Homo sapiens
gaccaagctggggag

SEQ ID NO: 115500 - DNA, 15 bp, Homo sapiens
tgaccaagctgggga

SEQ ID NO: 115501 - DNA, 15 bp, Homo sapiens
gtgaccaagctgggg

SEQ ID NO: 115502 - DNA, 15 bp, Homo sapiens
agtgaccaagctggg

SEQ ID NO: 115503 - DNA, 15 bp, Homo sapiens
aagtgaccaagctgg

SEQ ID NO: 115504 - DNA, 15 bp, Homo sapiens
caagtgaccaagctg

SEQ ID NO: 115505 - DNA, 15 bp, Homo sapiens
tcaagtgaccaagct

SEQ ID NO: 115506 - DNA, 15 bp, Homo sapiens
gtcaagtgaccaagc

SEQ ID NO: 115507 - DNA, 15 bp, Homo sapiens
tgtcaagtgaccaag

SEQ ID NO: 115508 - DNA, 15 bp, Homo sapiens
ctgtcaagtgaccaa

SEQ ID NO: 115509 - DNA, 15 bp, Homo sapiens
tctgtcaagtgacca

SEQ ID NO: 115510 - DNA, 15 bp, Homo sapiens
atctgtcaagtgacc

SEQ ID NO: 115511 - DNA, 15 bp, Homo sapiens
gatctgtcaagtgac

SEQ ID NO: 115512 - DNA, 15 bp, Homo sapiens
cgatctgtcaagtga

SEQ ID NO: 115513 - DNA, 15 bp, Homo sapiens
ccgatctgtcaagtg

SEQ ID NO: 115514 - DNA, 15 bp, Homo sapiens
cccgatctgtcaagt

SEQ ID NO: 115515 - DNA, 15 bp, Homo sapiens
tcccgatctgtcaag

SEQ ID NO: 115516 - DNA, 15 bp, Homo sapiens
gtcccgatctgtcaa

SEQ ID NO: 115517 - DNA, 15 bp, Homo sapiens
ggtcccgatctgtca

SEQ ID NO: 115518 - DNA, 15 bp, Homo sapiens
tggtcccgatctgtc

SEQ ID NO: 115519 - DNA, 15 bp, Homo sapiens
ttggtcccgatctgt

SEQ ID NO: 115520 - DNA, 15 bp, Homo sapiens
attggtcccgatctg

SEQ ID NO: 115521 - DNA, 15 bp, Homo sapiens
cattggtcccgatct

SEQ ID NO: 115522 - DNA, 15 bp, Homo sapiens
tcattggtcccgatc

SEQ ID NO: 115523 - DNA, 15 bp, Homo sapiens
ctcattggtcccgat

SEQ ID NO: 115524 - DNA, 15 bp, Homo sapiens
tctcattggtcccga

SEQ ID NO: 115525 - DNA, 15 bp, Homo sapiens
atctcattggtcccg

SEQ ID NO: 115526 - DNA, 15 bp, Homo sapiens
tatctcattggtccc

SEQ ID NO: 115527 - DNA, 15 bp, Homo sapiens
gtatctcattggtcc

SEQ ID NO: 115528 - DNA, 15 bp, Homo sapiens
ggtatctcattggtc

SEQ ID NO: 115529 - DNA, 15 bp, Homo sapiens
tggtatctcattggt

SEQ ID NO: 115530 - DNA, 15 bp, Homo sapiens
atggtatctcattgg

SEQ ID NO: 115531 - DNA, 15 bp, Homo sapiens
aatggtatctcattg

SEQ ID NO: 115532 - DNA, 15 bp, Homo sapiens
caatggtatctcatt

SEQ ID NO: 115533 - DNA, 15 bp, Homo sapiens
gcaatggtatctcat

SEQ ID NO: 115534 - DNA, 15 bp, Homo sapiens
agcaatggtatctca

SEQ ID NO: 115535 - DNA, 15 bp, Homo sapiens
tagcaatggtatctc

SEQ ID NO: 115536 - DNA, 15 bp, Homo sapiens
ctagcaatggtatct

SEQ ID NO: 115537 - DNA, 15 bp, Homo sapiens
cctagcaatggtatc

SEQ ID NO: 115538 - DNA, 15 bp, Homo sapiens
tcctagcaatggtat

SEQ ID NO: 115539 - DNA, 15 bp, Homo sapiens
atcctagcaatggta

SEQ ID NO: 115540 - DNA, 15 bp, Homo sapiens
catcctagcaatggt

SEQ ID NO: 115541 - DNA, 15 bp, Homo sapiens
tcatcctagcaatgg

SEQ ID NO: 115542 - DNA, 15 bp, Homo sapiens
gtcatcctagcaatg

SEQ ID NO: 115543 - DNA, 15 bp, Homo sapiens
ggtcatcctagcaat

SEQ ID NO: 115544 - DNA, 15 bp, Homo sapiens
aggtcatcctagcaa

SEQ ID NO: 115545 - DNA, 15 bp, Homo sapiens
gaggtcatcctagca

SEQ ID NO: 115546 - DNA, 15 bp, Homo sapiens
tgaggtcatcctagc

SEQ ID NO: 115547 - DNA, 15 bp, Homo sapiens
gtgaggtcatcctag

SEQ ID NO: 115548 - DNA, 15 bp, Homo sapiens
agtgaggtcatccta

SEQ ID NO: 115549 - DNA, 15 bp, Homo sapiens
cagtgaggtcatcct

SEQ ID NO: 115550 - DNA, 15 bp, Homo sapiens
acagtgaggtcatcc

SEQ ID NO: 115551 - DNA, 15 bp, Homo sapiens
gacagtgaggtcatc

SEQ ID NO: 115552 - DNA, 15 bp, Homo sapiens
agacagtgaggtcat

SEQ ID NO: 115553 - DNA, 15 bp, Homo sapiens
aagacagtgaggtca

SEQ ID NO: 115554 - DNA, 15 bp, Homo sapiens
taagacagtgaggtc

SEQ ID NO: 115555 - DNA, 15 bp, Homo sapiens
gtaagacagtgaggt

SEQ ID NO: 115556 - DNA, 15 bp, Homo sapiens
tgtaagacagtgagg

SEQ ID NO: 115557 - DNA, 15 bp, Homo sapiens
gtgtaagacagtgag

SEQ ID NO: 115558 - DNA, 15 bp, Homo sapiens
tgtgtaagacagtga

SEQ ID NO: 115559 - DNA, 15 bp, Homo sapiens
gtgtgtaagacagtg

SEQ ID NO: 115560 - DNA, 15 bp, Homo sapiens
ggtgtgtaagacagt

SEQ ID NO: 115561 - DNA, 15 bp, Homo sapiens
cggtgtgtaagacag

SEQ ID NO: 115562 - DNA, 15 bp, Homo sapiens
tcggtgtgtaagaca

SEQ ID NO: 115563 - DNA, 15 bp, Homo sapiens
atcggtgtgtaagac

SEQ ID NO: 115564 - DNA, 15 bp, Homo sapiens
aatcggtgtgtaaga

SEQ ID NO: 115565 - DNA, 15 bp, Homo sapiens
gaatcggtgtgtaag

SEQ ID NO: 115566 - DNA, 15 bp, Homo sapiens
cgaatcggtgtgtaa

SEQ ID NO: 115567 - DNA, 15 bp, Homo sapiens
acgaatcggtgtgta

SEQ ID NO: 115568 - DNA, 15 bp, Homo sapiens
aacgaatcggtgtgt

SEQ ID NO: 115569 - DNA, 15 bp, Homo sapiens
caacgaatcggtgtg

SEQ ID NO: 115570 - DNA, 15 bp, Homo sapiens
tcaacgaatcggtgt

SEQ ID NO: 115571 - DNA, 15 bp, Homo sapiens
ctcaacgaatcggtg

SEQ ID NO: 115572 - DNA, 15 bp, Homo sapiens
cctcaacgaatcggt

SEQ ID NO: 115573 - DNA, 15 bp, Homo sapiens
acctcaacgaatcgg

SEQ ID NO: 115574 - DNA, 15 bp, Homo sapiens
tacctcaacgaatcg

SEQ ID NO: 115575 - DNA, 15 bp, Homo sapiens
ttacctcaacgaatc

SEQ ID NO: 115576 - DNA, 15 bp, Homo sapiens
attacctcaacgaat

SEQ ID NO: 115577 - DNA, 15 bp, Homo sapiens
aattacctcaacgaa

SEQ ID NO: 115578 - DNA, 15 bp, Homo sapiens
aaattacctcaacga

SEQ ID NO: 115579 - DNA, 15 bp, Homo sapiens
gaaattacctcaacg

SEQ ID NO: 115580 - DNA, 15 bp, Homo sapiens
agaaattacctcaac

SEQ ID NO: 115581 - DNA, 15 bp, Homo sapiens
gagaaattacctcaa

SEQ ID NO: 115582 - DNA, 15 bp, Homo sapiens
agagaaattacctca

SEQ ID NO: 115583 - DNA, 15 bp, Homo sapiens
cagagaaattacctc

SEQ ID NO: 115584 - DNA, 15 bp, Homo sapiens
ccagagaaattacct

SEQ ID NO: 115585 - DNA, 15 bp, Homo sapiens
gccagagaaattacc

SEQ ID NO: 115586 - DNA, 15 bp, Homo sapiens
agccagagaaattac

SEQ ID NO: 115587 - DNA, 15 bp, Homo sapiens
tagccagagaaatta

SEQ ID NO: 115588 - DNA, 15 bp, Homo sapiens
ctagccagagaaatt

SEQ ID NO: 115589 - DNA, 15 bp, Homo sapiens
tctagccagagaaat

SEQ ID NO: 115590 - DNA, 15 bp, Homo sapiens
ctctagccagagaaa

SEQ ID NO: 115591 - DNA, 15 bp, Homo sapiens
actctagccagagaa

SEQ ID NO: 115592 - DNA, 15 bp, Homo sapiens
tactctagccagaga

SEQ ID NO: 115593 - DNA, 15 bp, Homo sapiens
ctactctagccagag

SEQ ID NO: 115594 - DNA, 15 bp, Homo sapiens
actactctagccaga

SEQ ID NO: 115595 - DNA, 15 bp, Homo sapiens
aactactctagccag

SEQ ID NO: 115596 - DNA, 15 bp, Homo sapiens
caactactctagcca

SEQ ID NO: 115597 - DNA, 15 bp, Homo sapiens
tcaactactctagcc

SEQ ID NO: 115598 - DNA, 15 bp, Homo sapiens
ctcaactactctagc

SEQ ID NO: 115599 - DNA, 15 bp, Homo sapiens
tctcaactactctag

SEQ ID NO: 115600 - DNA, 15 bp, Homo sapiens
ttctcaactactcta

SEQ ID NO: 115601 - DNA, 15 bp, Homo sapiens
tttctcaactactct

SEQ ID NO: 115602 - DNA, 15 bp, Homo sapiens
ctttctcaactactc

SEQ ID NO: 115603 - DNA, 15 bp, Homo sapiens
tctttctcaactact

SEQ ID NO: 115604 - DNA, 15 bp, Homo sapiens
atctttctcaactac

SEQ ID NO: 115605 - DNA, 15 bp, Homo sapiens
catctttctcaacta

SEQ ID NO: 115606 - DNA, 15 bp, Homo sapiens
ccatctttctcaact

SEQ ID NO: 115607 - DNA, 15 bp, Homo sapiens
tccatctttctcaac

SEQ ID NO: 115608 - DNA, 15 bp, Homo sapiens
ttccatctttctcaa

SEQ ID NO: 115609 - DNA, 15 bp, Homo sapiens
cttccatctttctca

SEQ ID NO: 115610 - DNA, 15 bp, Homo sapiens
gcttccatctttctc

SEQ ID NO: 115611 - DNA, 15 bp, Homo sapiens
tgcttccatctttct

SEQ ID NO: 115612 - DNA, 15 bp, Homo sapiens
ttgcttccatctttc

SEQ ID NO: 115613 - DNA, 15 bp, Homo sapiens
cttgcttccatcttt

SEQ ID NO: 115614 - DNA, 15 bp, Homo sapiens
tcttgcttccatctt

SEQ ID NO: 115615 - DNA, 15 bp, Homo sapiens
ctcttgcttccatct

SEQ ID NO: 115616 - DNA, 15 bp, Homo sapiens
cctcttgcttccatc

SEQ ID NO: 115617 - DNA, 15 bp, Homo sapiens
ccctcttgcttccat

SEQ ID NO: 115618 - DNA, 15 bp, Homo sapiens
tccctcttgcttcca

SEQ ID NO: 115619 - DNA, 15 bp, Homo sapiens
ttccctcttgcttcc

SEQ ID NO: 115620 - DNA, 15 bp, Homo sapiens
tttccctcttgcttc

SEQ ID NO: 115621 - DNA, 15 bp, Homo sapiens
ctttccctcttgctt

SEQ ID NO: 115622 - DNA, 15 bp, Homo sapiens
cctttccctcttgct

SEQ ID NO: 115623 - DNA, 15 bp, Homo sapiens
acctttccctcttgc

SEQ ID NO: 115624 - DNA, 15 bp, Homo sapiens
tacctttccctcttg

SEQ ID NO: 115625 - DNA, 15 bp, Homo sapiens
atacctttccctctt

SEQ ID NO: 115626 - DNA, 15 bp, Homo sapiens
catacctttccctct

SEQ ID NO: 115627 - DNA, 15 bp, Homo sapiens
acatacctttccctc

SEQ ID NO: 115628 - DNA, 15 bp, Homo sapiens
aacatacctttccct

SEQ ID NO: 115629 - DNA, 15 bp, Homo sapiens
taacatacctttccc

SEQ ID NO: 115630 - DNA, 15 bp, Homo sapiens
ttaacatacctttcc

SEQ ID NO: 115631 - DNA, 15 bp, Homo sapiens
cttaacatacctttc

SEQ ID NO: 115632 - DNA, 15 bp, Homo sapiens
acttaacataccttt

SEQ ID NO: 115633 - DNA, 15 bp, Homo sapiens
aacttaacatacctt

SEQ ID NO: 115634 - DNA, 15 bp, Homo sapiens
caacttaacatacct

SEQ ID NO: 115635 - DNA, 15 bp, Homo sapiens
acaacttaacatacc

SEQ ID NO: 115636 - DNA, 15 bp, Homo sapiens
tacaacttaacatac

SEQ ID NO: 115637 - DNA, 15 bp, Homo sapiens
atacaacttaacata

SEQ ID NO: 115638 - DNA, 15 bp, Homo sapiens
aatacaacttaacat

SEQ ID NO: 115639 - DNA, 15 bp, Homo sapiens
gaatacaacttaaca

SEQ ID NO: 115640 - DNA, 15 bp, Homo sapiens
tgaatacaacttaac

SEQ ID NO: 115641 - DNA, 15 bp, Homo sapiens
ctgaatacaacttaa

SEQ ID NO: 115642 - DNA, 15 bp, Homo sapiens
actgaatacaactta

SEQ ID NO: 115643 - DNA, 15 bp, Homo sapiens
gactgaatacaactt

SEQ ID NO: 115644 - DNA, 15 bp, Homo sapiens
tgactgaatacaact

SEQ ID NO: 115645 - DNA, 15 bp, Homo sapiens
gtgactgaatacaac

SEQ ID NO: 115646 - DNA, 15 bp, Homo sapiens
agtgactgaatacaa

SEQ ID NO: 115647 - DNA, 15 bp, Homo sapiens
cagtgactgaataca

SEQ ID NO: 115648 - DNA, 15 bp, Homo sapiens
acagtgactgaatac

SEQ ID NO: 115649 - DNA, 15 bp, Homo sapiens
tacagtgactgaata

SEQ ID NO: 115650 - DNA, 15 bp, Homo sapiens
atacagtgactgaat

SEQ ID NO: 115651 - DNA, 15 bp, Homo sapiens
aatacagtgactgaa

SEQ ID NO: 115652 - DNA, 15 bp, Homo sapiens
caatacagtgactga

SEQ ID NO: 115653 - DNA, 15 bp, Homo sapiens
acaatacagtgactg

SEQ ID NO: 115654 - DNA, 15 bp, Homo sapiens
cacaatacagtgact

SEQ ID NO: 115655 - DNA, 15 bp, Homo sapiens
acacaatacagtgac

SEQ ID NO: 115656 - DNA, 15 bp, Homo sapiens
cacacaatacagtga

SEQ ID NO: 115657 - DNA, 15 bp, Homo sapiens
tcacacaatacagtg

SEQ ID NO: 115658 - DNA, 15 bp, Homo sapiens
atcacacaatacagt

SEQ ID NO: 115659 - DNA, 15 bp, Homo sapiens
gatcacacaatacag

SEQ ID NO: 115660 - DNA, 15 bp, Homo sapiens
tgatcacacaataca

SEQ ID NO: 115661 - DNA, 15 bp, Homo sapiens
atgatcacacaatac

SEQ ID NO: 115662 - DNA, 15 bp, Homo sapiens
aatgatcacacaata

SEQ ID NO: 115663 - DNA, 15 bp, Homo sapiens
taatgatcacacaat

SEQ ID NO: 115664 - DNA, 15 bp, Homo sapiens
ttaatgatcacacaa

SEQ ID NO: 115665 - DNA, 15 bp, Homo sapiens
gttaatgatcacaca

SEQ ID NO: 115666 - DNA, 15 bp, Homo sapiens
agttaatgatcacac

SEQ ID NO: 115667 - DNA, 15 bp, Homo sapiens
aagttaatgatcaca

SEQ ID NO: 115668 - DNA, 15 bp, Homo sapiens
aaagttaatgatcac

SEQ ID NO: 115669 - DNA, 15 bp, Homo sapiens
caaagttaatgatca

SEQ ID NO: 115670 - DNA, 15 bp, Homo sapiens
ccaaagttaatgatc

SEQ ID NO: 115671 - DNA, 15 bp, Homo sapiens
accaaagttaatgat

SEQ ID NO: 115672 - DNA, 15 bp, Homo sapiens
aaccaaagttaatga

SEQ ID NO: 115673 - DNA, 15 bp, Homo sapiens
caaccaaagttaatg

SEQ ID NO: 115674 - DNA, 15 bp, Homo sapiens
acaaccaaagttaat

SEQ ID NO: 115675 - DNA, 15 bp, Homo sapiens
tacaaccaaagttaa

SEQ ID NO: 115676 - DNA, 15 bp, Homo sapiens
ttacaaccaaagtta

SEQ ID NO: 115677 - DNA, 15 bp, Homo sapiens
tttacaaccaaagtt

SEQ ID NO: 115678 - DNA, 15 bp, Homo sapiens
ttttacaaccaaagt

SEQ ID NO: 115679 - DNA, 15 bp, Homo sapiens
cttttacaaccaaag

SEQ ID NO: 115680 - DNA, 15 bp, Homo sapiens
ccttttacaaccaaa

SEQ ID NO: 115681 - DNA, 15 bp, Homo sapiens
cccttttacaaccaa

SEQ ID NO: 115682 - DNA, 15 bp, Homo sapiens
tcccttttacaacca

SEQ ID NO: 115683 - DNA, 15 bp, Homo sapiens
ctcccttttacaacc

SEQ ID NO: 115684 - DNA, 15 bp, Homo sapiens
tctcccttttacaac

SEQ ID NO: 115685 - DNA, 15 bp, Homo sapiens
gtctcccttttacaa

SEQ ID NO: 115686 - DNA, 15 bp, Homo sapiens
tgtctcccttttaca

SEQ ID NO: 115687 - DNA, 15 bp, Homo sapiens
ttgtctcccttttac

SEQ ID NO: 115688 - DNA, 15 bp, Homo sapiens
cttgtctccctttta

SEQ ID NO: 115689 - DNA, 15 bp, Homo sapiens
acttgtctccctttt

SEQ ID NO: 115690 - DNA, 15 bp, Homo sapiens
aacttgtctcccttt

SEQ ID NO: 115691 - DNA, 15 bp, Homo sapiens
gaacttgtctccctt

SEQ ID NO: 115692 - DNA, 15 bp, Homo sapiens
cgaacttgtctccct

SEQ ID NO: 115693 - DNA, 15 bp, Homo sapiens
tcgaacttgtctccc

SEQ ID NO: 115694 - DNA, 15 bp, Homo sapiens
ctcgaacttgtctcc

SEQ ID NO: 115695 - DNA, 15 bp, Homo sapiens
gctcgaacttgtctc

SEQ ID NO: 115696 - DNA, 15 bp, Homo sapiens
agctcgaacttgtct

SEQ ID NO: 115697 - DNA, 15 bp, Homo sapiens
aagctcgaacttgtc

SEQ ID NO: 115698 - DNA, 15 bp, Homo sapiens
aaagctcgaacttgt

SEQ ID NO: 115699 - DNA, 15 bp, Homo sapiens
aaaagctcgaacttg

SEQ ID NO: 115700 - DNA, 15 bp, Homo sapiens
taaaagctcgaactt

SEQ ID NO: 115701 - DNA, 15 bp, Homo sapiens
gtaaaagctcgaact

SEQ ID NO: 115702 - DNA, 15 bp, Homo sapiens
agtaaaagctcgaac

SEQ ID NO: 115703 - DNA, 15 bp, Homo sapiens
gagtaaaagctcgaa

SEQ ID NO: 115704 - DNA, 15 bp, Homo sapiens
agagtaaaagctcga

SEQ ID NO: 115705 - DNA, 15 bp, Homo sapiens
tagagtaaaagctcg

SEQ ID NO: 115706 - DNA, 15 bp, Homo sapiens
gtagagtaaaagctc

SEQ ID NO: 115707 - DNA, 15 bp, Homo sapiens
agtagagtaaaagct

SEQ ID NO: 115708 - DNA, 15 bp, Homo sapiens
aagtagagtaaaagc

SEQ ID NO: 115709 - DNA, 15 bp, Homo sapiens
caagtagagtaaaag

SEQ ID NO: 115710 - DNA, 15 bp, Homo sapiens
acaagtagagtaaaa

SEQ ID NO: 115711 - DNA, 15 bp, Homo sapiens
gacaagtagagtaaa

SEQ ID NO: 115712 - DNA, 15 bp, Homo sapiens
tgacaagtagagtaa

SEQ ID NO: 115713 - DNA, 15 bp, Homo sapiens
ctgacaagtagagta

SEQ ID NO: 115714 - DNA, 15 bp, Homo sapiens
gctgacaagtagagt

SEQ ID NO: 115715 - DNA, 15 bp, Homo sapiens
ggctgacaagtagag

SEQ ID NO: 115716 - DNA, 15 bp, Homo sapiens
gggctgacaagtaga

SEQ ID NO: 115717 - DNA, 15 bp, Homo sapiens
agggctgacaagtag

SEQ ID NO: 115718 - DNA, 15 bp, Homo sapiens
tagggctgacaagta

SEQ ID NO: 115719 - DNA, 15 bp, Homo sapiens
ctagggctgacaagt

SEQ ID NO: 115720 - DNA, 15 bp, Homo sapiens
tctagggctgacaag

SEQ ID NO: 115721 - DNA, 15 bp, Homo sapiens
gtctagggctgacaa

SEQ ID NO: 115722 - DNA, 15 bp, Homo sapiens
agtctagggctgaca

SEQ ID NO: 115723 - DNA, 15 bp, Homo sapiens
aagtctagggctgac

SEQ ID NO: 115724 - DNA, 15 bp, Homo sapiens
aaagtctagggctga

SEQ ID NO: 115725 - DNA, 15 bp, Homo sapiens
caaagtctagggctg

SEQ ID NO: 115726 - DNA, 15 bp, Homo sapiens
acaaagtctagggct

SEQ ID NO: 115727 - DNA, 15 bp, Homo sapiens
tacaaagtctagggc

SEQ ID NO: 115728 - DNA, 15 bp, Homo sapiens
gtacaaagtctaggg

SEQ ID NO: 115729 - DNA, 15 bp, Homo sapiens
ggtacaaagtctagg

SEQ ID NO: 115730 - DNA, 15 bp, Homo sapiens
aggtacaaagtctag

SEQ ID NO: 115731 - DNA, 15 bp, Homo sapiens
gaggtacaaagtcta

SEQ ID NO: 115732 - DNA, 15 bp, Homo sapiens
agaggtacaaagtct

SEQ ID NO: 115733 - DNA, 15 bp, Homo sapiens
gagaggtacaaagtc

SEQ ID NO: 115734 - DNA, 15 bp, Homo sapiens
agagaggtacaaagt

SEQ ID NO: 115735 - DNA, 15 bp, Homo sapiens
aagagaggtacaaag

SEQ ID NO: 115736 - DNA, 15 bp, Homo sapiens
caagagaggtacaaa

SEQ ID NO: 115737 - DNA, 15 bp, Homo sapiens
ccaagagaggtacaa

SEQ ID NO: 115738 - DNA, 15 bp, Homo sapiens
gccaagagaggtaca

SEQ ID NO: 115739 - DNA, 15 bp, Homo sapiens
ggccaagagaggtac

SEQ ID NO: 115740 - DNA, 15 bp, Homo sapiens
aggccaagagaggta

SEQ ID NO: 115741 - DNA, 15 bp, Homo sapiens
gaggccaagagaggt

SEQ ID NO: 115742 - DNA, 15 bp, Homo sapiens
tgaggccaagagagg

SEQ ID NO: 115743 - DNA, 15 bp, Homo sapiens
atgaggccaagagag

SEQ ID NO: 115744 - DNA, 15 bp, Homo sapiens
catgaggccaagaga

SEQ ID NO: 115745 - DNA, 15 bp, Homo sapiens
acatgaggccaagag

SEQ ID NO: 115746 - DNA, 15 bp, Homo sapiens
gacatgaggccaaga

SEQ ID NO: 115747 - DNA, 15 bp, Homo sapiens
agacatgaggccaag

SEQ ID NO: 115748 - DNA, 15 bp, Homo sapiens
aagacatgaggccaa

SEQ ID NO: 115749 - DNA, 15 bp, Homo sapiens
aaagacatgaggcca

SEQ ID NO: 115750 - DNA, 15 bp, Homo sapiens
taaagacatgaggcc

SEQ ID NO: 115751 - DNA, 15 bp, Homo sapiens
ataaagacatgaggc

SEQ ID NO: 115752 - DNA, 15 bp, Homo sapiens
gataaagacatgagg

SEQ ID NO: 115753 - DNA, 15 bp, Homo sapiens
ggataaagacatgag

SEQ ID NO: 115754 - DNA, 15 bp, Homo sapiens
gggataaagacatga

SEQ ID NO: 115755 - DNA, 15 bp, Homo sapiens
ggggataaagacatg

SEQ ID NO: 115756 - DNA, 15 bp, Homo sapiens
gggggataaagacat

SEQ ID NO: 115757 - DNA, 15 bp, Homo sapiens
agggggataaagaca

SEQ ID NO: 115758 - DNA, 15 bp, Homo sapiens
aagggggataaagac

SEQ ID NO: 115759 - DNA, 15 bp, Homo sapiens
caagggggataaaga

SEQ ID NO: 115760 - DNA, 15 bp, Homo sapiens
acaagggggataaag

SEQ ID NO: 115761 - DNA, 15 bp, Homo sapiens
gacaagggggataaa

SEQ ID NO: 115762 - DNA, 15 bp, Homo sapiens
agacaagggggataa

SEQ ID NO: 115763 - DNA, 15 bp, Homo sapiens
aagacaagggggata

SEQ ID NO: 115764 - DNA, 15 bp, Homo sapiens
aaagacaagggggat

SEQ ID NO: 115765 - DNA, 15 bp, Homo sapiens
gaaagacaaggggga

SEQ ID NO: 115766 - DNA, 15 bp, Homo sapiens
agaaagacaaggggg

SEQ ID NO: 115767 - DNA, 15 bp, Homo sapiens
aagaaagacaagggg

SEQ ID NO: 115768 - DNA, 15 bp, Homo sapiens
taagaaagacaaggg

SEQ ID NO: 115769 - DNA, 15 bp, Homo sapiens
ataagaaagacaagg

SEQ ID NO: 115770 - DNA, 15 bp, Homo sapiens
aataagaaagacaag

SEQ ID NO: 115771 - DNA, 15 bp, Homo sapiens
aaataagaaagacaa

SEQ ID NO: 115772 - DNA, 15 bp, Homo sapiens
gaaataagaaagaca

SEQ ID NO: 115773 - DNA, 15 bp, Homo sapiens
agaaataagaaagac

SEQ ID NO: 115774 - DNA, 15 bp, Homo sapiens
gagaaataagaaaga

SEQ ID NO: 115775 - DNA, 15 bp, Homo sapiens
agagaaataagaaag

SEQ ID NO: 115776 - DNA, 15 bp, Homo sapiens
aagagaaataagaaa

SEQ ID NO: 115777 - DNA, 15 bp, Homo sapiens
aaagagaaataagaa

SEQ ID NO: 115778 - DNA, 15 bp, Homo sapiens
aaaagagaaataaga

SEQ ID NO: 115779 - DNA, 15 bp, Homo sapiens
gaaaagagaaataag

SEQ ID NO: 115780 - DNA, 15 bp, Homo sapiens
agaaaagagaaataa

SEQ ID NO: 115781 - DNA, 15 bp, Homo sapiens
cagaaaagagaaata

SEQ ID NO: 115782 - DNA, 15 bp, Homo sapiens
gcagaaaagagaaat

SEQ ID NO: 115783 - DNA, 15 bp, Homo sapiens
agcagaaaagagaaa

SEQ ID NO: 115784 - DNA, 15 bp, Homo sapiens
aagcagaaaagagaa

SEQ ID NO: 115785 - DNA, 15 bp, Homo sapiens
gaagcagaaaagaga

SEQ ID NO: 115786 - DNA, 15 bp, Homo sapiens
agaagcagaaaagag

SEQ ID NO: 115787 - DNA, 15 bp, Homo sapiens
cagaagcagaaaaga

SEQ ID NO: 115788 - DNA, 15 bp, Homo sapiens
tcagaagcagaaaag

SEQ ID NO: 115789 - DNA, 15 bp, Homo sapiens
ctcagaagcagaaaa

SEQ ID NO: 115790 - DNA, 15 bp, Homo sapiens
actcagaagcagaaa

SEQ ID NO: 115791 - DNA, 15 bp, Homo sapiens
tactcagaagcagaa

SEQ ID NO: 115792 - DNA, 15 bp, Homo sapiens
atactcagaagcaga

SEQ ID NO: 115793 - DNA, 15 bp, Homo sapiens
gatactcagaagcag

SEQ ID NO: 115794 - DNA, 15 bp, Homo sapiens
ggatactcagaagca

SEQ ID NO: 115795 - DNA, 15 bp, Homo sapiens
gggatactcagaagc

SEQ ID NO: 115796 - DNA, 15 bp, Homo sapiens
agggatactcagaag

SEQ ID NO: 115797 - DNA, 15 bp, Homo sapiens
cagggatactcagaa

SEQ ID NO: 115798 - DNA, 15 bp, Homo sapiens
acagggatactcaga

SEQ ID NO: 115799 - DNA, 15 bp, Homo sapiens
gacagggatactcag

SEQ ID NO: 115800 - DNA, 15 bp, Homo sapiens
agacagggatactca

SEQ ID NO: 115801 - DNA, 15 bp, Homo sapiens
gagacagggatactc

SEQ ID NO: 115802 - DNA, 15 bp, Homo sapiens
agagacagggatact

SEQ ID NO: 115803 - DNA, 15 bp, Homo sapiens
gagagacagggatac

SEQ ID NO: 115804 - DNA, 15 bp, Homo sapiens
agagagacagggata

SEQ ID NO: 115805 - DNA, 15 bp, Homo sapiens
cagagagacagggat

SEQ ID NO: 115806 - DNA, 15 bp, Homo sapiens
acagagagacaggga

SEQ ID NO: 115807 - DNA, 15 bp, Homo sapiens
gacagagagacaggg

SEQ ID NO: 115808 - DNA, 15 bp, Homo sapiens
ggacagagagacagg

SEQ ID NO: 115809 - DNA, 15 bp, Homo sapiens
tggacagagagacag

SEQ ID NO: 115810 - DNA, 15 bp, Homo sapiens
atggacagagagaca

SEQ ID NO: 115811 - DNA, 15 bp, Homo sapiens
tatggacagagagac

SEQ ID NO: 115812 - DNA, 15 bp, Homo sapiens
atatggacagagaga

SEQ ID NO: 115813 - DNA, 15 bp, Homo sapiens
tatatggacagagag

SEQ ID NO: 115814 - DNA, 15 bp, Homo sapiens
atatatggacagaga

SEQ ID NO: 115815 - DNA, 15 bp, Homo sapiens
tatatatggacagag

SEQ ID NO: 115816 - DNA, 15 bp, Homo sapiens
gtatatatggacaga

SEQ ID NO: 115817 - DNA, 15 bp, Homo sapiens
agtatatatggacag

SEQ ID NO: 115818 - DNA, 15 bp, Homo sapiens
gagtatatatggaca

SEQ ID NO: 115819 - DNA, 15 bp, Homo sapiens
agagtatatatggac

SEQ ID NO: 115820 - DNA, 15 bp, Homo sapiens
cagagtatatatgga

SEQ ID NO: 115821 - DNA, 15 bp, Homo sapiens
acagagtatatatgg

SEQ ID NO: 115822 - DNA, 15 bp, Homo sapiens
aacagagtatatatg

SEQ ID NO: 115823 - DNA, 15 bp, Homo sapiens
caacagagtatatat

SEQ ID NO: 115824 - DNA, 15 bp, Homo sapiens
acaacagagtatata

SEQ ID NO: 115825 - DNA, 15 bp, Homo sapiens
gacaacagagtatat

SEQ ID NO: 115826 - DNA, 15 bp, Homo sapiens
agacaacagagtata

SEQ ID NO: 115827 - DNA, 15 bp, Homo sapiens
gagacaacagagtat

SEQ ID NO: 115828 - DNA, 15 bp, Homo sapiens
agagacaacagagta

SEQ ID NO: 115829 - DNA, 15 bp, Homo sapiens
aagagacaacagagt

SEQ ID NO: 115830 - DNA, 15 bp, Homo sapiens
aaagagacaacagag

SEQ ID NO: 115831 - DNA, 15 bp, Homo sapiens
aaaagagacaacaga

SEQ ID NO: 115832 - DNA, 15 bp, Homo sapiens
gaaaagagacaacag

SEQ ID NO: 115833 - DNA, 15 bp, Homo sapiens
ggaaaagagacaaca

SEQ ID NO: 115834 - DNA, 15 bp, Homo sapiens
aggaaaagagacaac

SEQ ID NO: 115835 - DNA, 15 bp, Homo sapiens
taggaaaagagacaa

SEQ ID NO: 115836 - DNA, 15 bp, Homo sapiens
ataggaaaagagaca

SEQ ID NO: 115837 - DNA, 15 bp, Homo sapiens
aataggaaaagagac

SEQ ID NO: 115838 - DNA, 15 bp, Homo sapiens
taataggaaaagaga

SEQ ID NO: 115839 - DNA, 15 bp, Homo sapiens
ttaataggaaaagag

SEQ ID NO: 115840 - DNA, 15 bp, Homo sapiens
gttaataggaaaaga

SEQ ID NO: 115841 - DNA, 15 bp, Homo sapiens
ggttaataggaaaag

SEQ ID NO: 115842 - DNA, 15 bp, Homo sapiens
aggttaataggaaaa

SEQ ID NO: 115843 - DNA, 15 bp, Homo sapiens
aaggttaataggaaa

SEQ ID NO: 115844 - DNA, 15 bp, Homo sapiens
caaggttaataggaa

SEQ ID NO: 115845 - DNA, 15 bp, Homo sapiens
tcaaggttaatagga

SEQ ID NO: 115846 - DNA, 15 bp, Homo sapiens
atcaaggttaatagg

SEQ ID NO: 115847 - DNA, 15 bp, Homo sapiens
aatcaaggttaatag

SEQ ID NO: 115848 - DNA, 15 bp, Homo sapiens
aaatcaaggttaata

SEQ ID NO: 115849 - DNA, 15 bp, Homo sapiens
caaatcaaggttaat

SEQ ID NO: 115850 - DNA, 15 bp, Homo sapiens
gcaaatcaaggttaa

SEQ ID NO: 115851 - DNA, 15 bp, Homo sapiens
agcaaatcaaggtta

SEQ ID NO: 115852 - DNA, 15 bp, Homo sapiens
tagcaaatcaaggtt

SEQ ID NO: 115853 - DNA, 15 bp, Homo sapiens
ctagcaaatcaaggt

SEQ ID NO: 115854 - DNA, 15 bp, Homo sapiens
cctagcaaatcaagg

SEQ ID NO: 115855 - DNA, 15 bp, Homo sapiens
ccctagcaaatcaag

SEQ ID NO: 115856 - DNA, 15 bp, Homo sapiens
accctagcaaatcaa

SEQ ID NO: 115857 - DNA, 15 bp, Homo sapiens
gaccctagcaaatca

SEQ ID NO: 115858 - DNA, 15 bp, Homo sapiens
agaccctagcaaatc

SEQ ID NO: 115859 - DNA, 15 bp, Homo sapiens
aagaccctagcaaat

SEQ ID NO: 115860 - DNA, 15 bp, Homo sapiens
gaagaccctagcaaa

SEQ ID NO: 115861 - DNA, 15 bp, Homo sapiens
tgaagaccctagcaa

SEQ ID NO: 115862 - DNA, 15 bp, Homo sapiens
atgaagaccctagca

SEQ ID NO: 115863 - DNA, 15 bp, Homo sapiens
catgaagaccctagc

SEQ ID NO: 115864 - DNA, 15 bp, Homo sapiens
tcatgaagaccctag

SEQ ID NO: 115865 - DNA, 15 bp, Homo sapiens
ttcatgaagacccta

SEQ ID NO: 115866 - DNA, 15 bp, Homo sapiens
tttcatgaagaccct

SEQ ID NO: 115867 - DNA, 15 bp, Homo sapiens
ctttcatgaagaccc

SEQ ID NO: 115868 - DNA, 15 bp, Homo sapiens
cctttcatgaagacc

SEQ ID NO: 115869 - DNA, 15 bp, Homo sapiens
acctttcatgaagac

SEQ ID NO: 115870 - DNA, 15 bp, Homo sapiens
aacctttcatgaaga

SEQ ID NO: 115871 - DNA, 15 bp, Homo sapiens
gaacctttcatgaag

SEQ ID NO: 115872 - DNA, 15 bp, Homo sapiens
ggaacctttcatgaa

SEQ ID NO: 115873 - DNA, 15 bp, Homo sapiens
tggaacctttcatga

SEQ ID NO: 115874 - DNA, 15 bp, Homo sapiens
atggaacctttcatg

SEQ ID NO: 115875 - DNA, 15 bp, Homo sapiens
catggaacctttcat

SEQ ID NO: 115876 - DNA, 15 bp, Homo sapiens
gcatggaacctttca

SEQ ID NO: 115877 - DNA, 15 bp, Homo sapiens
agcatggaacctttc

SEQ ID NO: 115878 - DNA, 15 bp, Homo sapiens
cagcatggaaccttt

SEQ ID NO: 115879 - DNA, 15 bp, Homo sapiens
acagcatggaacctt

SEQ ID NO: 115880 - DNA, 15 bp, Homo sapiens
tacagcatggaacct

SEQ ID NO: 115881 - DNA, 15 bp, Homo sapiens
gtacagcatggaacc

SEQ ID NO: 115882 - DNA, 15 bp, Homo sapiens
tgtacagcatggaac

SEQ ID NO: 115883 - DNA, 15 bp, Homo sapiens
atgtacagcatggaa

SEQ ID NO: 115884 - DNA, 15 bp, Homo sapiens
gatgtacagcatgga

SEQ ID NO: 115885 - DNA, 15 bp, Homo sapiens
agatgtacagcatgg

SEQ ID NO: 115886 - DNA, 15 bp, Homo sapiens
aagatgtacagcatg

SEQ ID NO: 115887 - DNA, 15 bp, Homo sapiens
taagatgtacagcat

SEQ ID NO: 115888 - DNA, 15 bp, Homo sapiens
ttaagatgtacagca

SEQ ID NO: 115889 - DNA, 15 bp, Homo sapiens
cttaagatgtacagc

SEQ ID NO: 115890 - DNA, 15 bp, Homo sapiens
acttaagatgtacag

SEQ ID NO: 115891 - DNA, 15 bp, Homo sapiens
cacttaagatgtaca

SEQ ID NO: 115892 - DNA, 15 bp, Homo sapiens
tcacttaagatgtac

SEQ ID NO: 115893 - DNA, 15 bp, Homo sapiens
ttcacttaagatgta

SEQ ID NO: 115894 - DNA, 15 bp, Homo sapiens
gttcacttaagatgt

SEQ ID NO: 115895 - DNA, 15 bp, Homo sapiens
agttcacttaagatg

SEQ ID NO: 115896 - DNA, 15 bp, Homo sapiens
aagttcacttaagat

SEQ ID NO: 115897 - DNA, 15 bp, Homo sapiens
aaagttcacttaaga

SEQ ID NO: 115898 - DNA, 15 bp, Homo sapiens
caaagttcacttaag

SEQ ID NO: 115899 - DNA, 15 bp, Homo sapiens
tcaaagttcacttaa

SEQ ID NO: 115900 - DNA, 15 bp, Homo sapiens
ttcaaagttcactta

SEQ ID NO: 115901 - DNA, 15 bp, Homo sapiens
cttcaaagttcactt

SEQ ID NO: 115902 - DNA, 15 bp, Homo sapiens
acttcaaagttcact

SEQ ID NO: 115903 - DNA, 15 bp, Homo sapiens
cacttcaaagttcac

SEQ ID NO: 115904 - DNA, 15 bp, Homo sapiens
ccacttcaaagttca

SEQ ID NO: 115905 - DNA, 15 bp, Homo sapiens
accacttcaaagttc

SEQ ID NO: 115906 - DNA, 15 bp, Homo sapiens
gaccacttcaaagtt

SEQ ID NO: 115907 - DNA, 15 bp, Homo sapiens
tgaccacttcaaagt

SEQ ID NO: 115908 - DNA, 15 bp, Homo sapiens
atgaccacttcaaag

SEQ ID NO: 115909 - DNA, 15 bp, Homo sapiens
gatgaccacttcaaa

SEQ ID NO: 115910 - DNA, 15 bp, Homo sapiens
tgatgaccacttcaa

SEQ ID NO: 115911 - DNA, 15 bp, Homo sapiens
ttgatgaccacttca

SEQ ID NO: 115912 - DNA, 15 bp, Homo sapiens
tttgatgaccacttc

SEQ ID NO: 115913 - DNA, 15 bp, Homo sapiens
ctttgatgaccactt

SEQ ID NO: 115914 - DNA, 15 bp, Homo sapiens
tctttgatgaccact

SEQ ID NO: 115915 - DNA, 15 bp, Homo sapiens
ctctttgatgaccac

SEQ ID NO: 115916 - DNA, 15 bp, Homo sapiens
tctctttgatgacca

SEQ ID NO: 115917 - DNA, 15 bp, Homo sapiens
atctctttgatgacc

SEQ ID NO: 115918 - DNA, 15 bp, Homo sapiens
gatctctttgatgac

SEQ ID NO: 115919 - DNA, 15 bp, Homo sapiens
tgatctctttgatga

SEQ ID NO: 115920 - DNA, 15 bp, Homo sapiens
ctgatctctttgatg

SEQ ID NO: 115921 - DNA, 15 bp, Homo sapiens
actgatctctttgat

SEQ ID NO: 115922 - DNA, 15 bp, Homo sapiens
aactgatctctttga

SEQ ID NO: 115923 - DNA, 15 bp, Homo sapiens
taactgatctctttg

SEQ ID NO: 115924 - DNA, 15 bp, Homo sapiens
ctaactgatctcttt

SEQ ID NO: 115925 - DNA, 15 bp, Homo sapiens
tctaactgatctctt

SEQ ID NO: 115926 - DNA, 15 bp, Homo sapiens
ttctaactgatctct

SEQ ID NO: 115927 - DNA, 15 bp, Homo sapiens
cttctaactgatctc

SEQ ID NO: 115928 - DNA, 15 bp, Homo sapiens
tcttctaactgatct

SEQ ID NO: 115929 - DNA, 15 bp, Homo sapiens
ttcttctaactgatc

SEQ ID NO: 115930 - DNA, 15 bp, Homo sapiens
gttcttctaactgat

SEQ ID NO: 115931 - DNA, 15 bp, Homo sapiens
agttcttctaactga

SEQ ID NO: 115932 - DNA, 15 bp, Homo sapiens
cagttcttctaactg

SEQ ID NO: 115933 - DNA, 15 bp, Homo sapiens
tcagttcttctaact

SEQ ID NO: 115934 - DNA, 15 bp, Homo sapiens
atcagttcttctaac

SEQ ID NO: 115935 - DNA, 15 bp, Homo sapiens
gatcagttcttctaa

SEQ ID NO: 115936 - DNA, 15 bp, Homo sapiens
agatcagttcttcta

SEQ ID NO: 115937 - DNA, 15 bp, Homo sapiens
cagatcagttcttct

SEQ ID NO: 115938 - DNA, 15 bp, Homo sapiens
gcagatcagttcttc

SEQ ID NO: 115939 - DNA, 15 bp, Homo sapiens
tgcagatcagttctt

SEQ ID NO: 115940 - DNA, 15 bp, Homo sapiens
ctgcagatcagttct

SEQ ID NO: 115941 - DNA, 15 bp, Homo sapiens
actgcagatcagttc

SEQ ID NO: 115942 - DNA, 15 bp, Homo sapiens
cactgcagatcagtt

SEQ ID NO: 115943 - DNA, 15 bp, Homo sapiens
acactgcagatcagt

SEQ ID NO: 115944 - DNA, 15 bp, Homo sapiens
cacactgcagatcag

SEQ ID NO: 115945 - DNA, 15 bp, Homo sapiens
acacactgcagatca

SEQ ID NO: 115946 - DNA, 15 bp, Homo sapiens
cacacactgcagatc

SEQ ID NO: 115947 - DNA, 15 bp, Homo sapiens
tcacacactgcagat

SEQ ID NO: 115948 - DNA, 15 bp, Homo sapiens
gtcacacactgcaga

SEQ ID NO: 115949 - DNA, 15 bp, Homo sapiens
tgtcacacactgcag

SEQ ID NO: 115950 - DNA, 15 bp, Homo sapiens
ctgtcacacactgca

SEQ ID NO: 115951 - DNA, 15 bp, Homo sapiens
tctgtcacacactgc

SEQ ID NO: 115952 - DNA, 15 bp, Homo sapiens
gtctgtcacacactg

SEQ ID NO: 115953 - DNA, 15 bp, Homo sapiens
ggtctgtcacacact

SEQ ID NO: 115954 - DNA, 15 bp, Homo sapiens
tggtctgtcacacac

SEQ ID NO: 115955 - DNA, 15 bp, Homo sapiens
ctggtctgtcacaca

SEQ ID NO: 115956 - DNA, 15 bp, Homo sapiens
cctggtctgtcacac

SEQ ID NO: 115957 - DNA, 15 bp, Homo sapiens
tcctggtctgtcaca

SEQ ID NO: 115958 - DNA, 15 bp, Homo sapiens
ttcctggtctgtcac

SEQ ID NO: 115959 - DNA, 15 bp, Homo sapiens
tttcctggtctgtca

SEQ ID NO: 115960 - DNA, 15 bp, Homo sapiens
ctttcctggtctgtc

SEQ ID NO: 115961 - DNA, 15 bp, Homo sapiens
actttcctggtctgt

SEQ ID NO: 115962 - DNA, 15 bp, Homo sapiens
cactttcctggtctg

SEQ ID NO: 115963 - DNA, 15 bp, Homo sapiens
tcactttcctggtct

SEQ ID NO: 115964 - DNA, 15 bp, Homo sapiens
atcactttcctggtc

SEQ ID NO: 115965 - DNA, 15 bp, Homo sapiens
tatcactttcctggt

SEQ ID NO: 115966 - DNA, 15 bp, Homo sapiens
atatcactttcctgg

SEQ ID NO: 115967 - DNA, 15 bp, Homo sapiens
gatatcactttcctg

SEQ ID NO: 115968 - DNA, 15 bp, Homo sapiens
ggatatcactttcct

SEQ ID NO: 115969 - DNA, 15 bp, Homo sapiens
tggatatcactttcc

SEQ ID NO: 115970 - DNA, 15 bp, Homo sapiens
ctggatatcactttc

SEQ ID NO: 115971 - DNA, 15 bp, Homo sapiens
tctggatatcacttt

SEQ ID NO: 115972 - DNA, 15 bp, Homo sapiens
ctctggatatcactt

SEQ ID NO: 115973 - DNA, 15 bp, Homo sapiens
cctctggatatcact

SEQ ID NO: 115974 - DNA, 15 bp, Homo sapiens
tcctctggatatcac

SEQ ID NO: 115975 - DNA, 15 bp, Homo sapiens
atcctctggatatca

SEQ ID NO: 115976 - DNA, 15 bp, Homo sapiens
aatcctctggatatc

SEQ ID NO: 115977 - DNA, 15 bp, Homo sapiens
caatcctctggatat

SEQ ID NO: 115978 - DNA, 15 bp, Homo sapiens
gcaatcctctggata

SEQ ID NO: 115979 - DNA, 15 bp, Homo sapiens
ggcaatcctctggat

SEQ ID NO: 115980 - DNA, 15 bp, Homo sapiens
tggcaatcctctgga

SEQ ID NO: 115981 - DNA, 15 bp, Homo sapiens
gtggcaatcctctgg

SEQ ID NO: 115982 - DNA, 15 bp, Homo sapiens
ggtggcaatcctctg

SEQ ID NO: 115983 - DNA, 15 bp, Homo sapiens
tggtggcaatcctct

SEQ ID NO: 115984 - DNA, 15 bp, Homo sapiens
atggtggcaatcctc

SEQ ID NO: 115985 - DNA, 15 bp, Homo sapiens
catggtggcaatcct

SEQ ID NO: 115986 - DNA, 15 bp, Homo sapiens
tcatggtggcaatcc

SEQ ID NO: 115987 - DNA, 15 bp, Homo sapiens
ttcatggtggcaatc

SEQ ID NO: 115988 - DNA, 15 bp, Homo sapiens
cttcatggtggcaat

SEQ ID NO: 115989 - DNA, 15 bp, Homo sapiens
acttcatggtggcaa

SEQ ID NO: 115990 - DNA, 15 bp, Homo sapiens
aacttcatggtggca

SEQ ID NO: 115991 - DNA, 15 bp, Homo sapiens
caacttcatggtggc

SEQ ID NO: 115992 - DNA, 15 bp, Homo sapiens
acaacttcatggtgg

SEQ ID NO: 115993 - DNA, 15 bp, Homo sapiens
gacaacttcatggtg

SEQ ID NO: 115994 - DNA, 15 bp, Homo sapiens
tgacaacttcatggt

SEQ ID NO: 115995 - DNA, 15 bp, Homo sapiens
atgacaacttcatgg

SEQ ID NO: 115996 - DNA, 15 bp, Homo sapiens
aatgacaacttcatg

SEQ ID NO: 115997 - DNA, 15 bp, Homo sapiens
aaatgacaacttcat

SEQ ID NO: 115998 - DNA, 15 bp, Homo sapiens
aaaatgacaacttca

SEQ ID NO: 115999 - DNA, 15 bp, Homo sapiens
aaaaatgacaacttc

SEQ ID NO: 116000 - DNA, 15 bp, Homo sapiens
taaaaatgacaactt

SEQ ID NO: 116001 - DNA, 15 bp, Homo sapiens
ctaaaaatgacaact

SEQ ID NO: 116002 - DNA, 15 bp, Homo sapiens
actaaaaatgacaac

SEQ ID NO: 116003 - DNA, 15 bp, Homo sapiens
cactaaaaatgacaa

SEQ ID NO: 116004 - DNA, 15 bp, Homo sapiens
ccactaaaaatgaca

SEQ ID NO: 116005 - DNA, 15 bp, Homo sapiens
tccactaaaaatgac

SEQ ID NO: 116006 - DNA, 15 bp, Homo sapiens
ctccactaaaaatga

SEQ ID NO: 116007 - DNA, 15 bp, Homo sapiens
tctccactaaaaatg

SEQ ID NO: 116008 - DNA, 15 bp, Homo sapiens
ctctccactaaaaat

SEQ ID NO: 116009 - DNA, 15 bp, Homo sapiens
cctctccactaaaaa

SEQ ID NO: 116010 - DNA, 15 bp, Homo sapiens
tcctctccactaaaa

SEQ ID NO: 116011 - DNA, 15 bp, Homo sapiens
ttcctctccactaaa

SEQ ID NO: 116012 - DNA, 15 bp, Homo sapiens
cttcctctccactaa

SEQ ID NO: 116013 - DNA, 15 bp, Homo sapiens
gcttcctctccacta

SEQ ID NO: 116014 - DNA, 15 bp, Homo sapiens
tgcttcctctccact

SEQ ID NO: 116015 - DNA, 15 bp, Homo sapiens
ctgcttcctctccac

SEQ ID NO: 116016 - DNA, 15 bp, Homo sapiens
cctgcttcctctcca

SEQ ID NO: 116017 - DNA, 15 bp, Homo sapiens
tcctgcttcctctcc

SEQ ID NO: 116018 - DNA, 15 bp, Homo sapiens
ctcctgcttcctctc

SEQ ID NO: 116019 - DNA, 15 bp, Homo sapiens
tctcctgcttcctct

SEQ ID NO: 116020 - DNA, 15 bp, Homo sapiens
gtctcctgcttcctc

SEQ ID NO: 116021 - DNA, 15 bp, Homo sapiens
ggtctcctgcttcct

SEQ ID NO: 116022 - DNA, 15 bp, Homo sapiens
tggtctcctgcttcc

SEQ ID NO: 116023 - DNA, 15 bp, Homo sapiens
ctggtctcctgcttc

SEQ ID NO: 116024 - DNA, 15 bp, Homo sapiens
tctggtctcctgctt

SEQ ID NO: 116025 - DNA, 15 bp, Homo sapiens
ttctggtctcctgct

SEQ ID NO: 116026 - DNA, 15 bp, Homo sapiens
tttctggtctcctgc

SEQ ID NO: 116027 - DNA, 15 bp, Homo sapiens
ctttctggtctcctg

SEQ ID NO: 116028 - DNA, 15 bp, Homo sapiens
actttctggtctcct

SEQ ID NO: 116029 - DNA, 15 bp, Homo sapiens
cactttctggtctcc

SEQ ID NO: 116030 - DNA, 15 bp, Homo sapiens
tcactttctggtctc

SEQ ID NO: 116031 - DNA, 15 bp, Homo sapiens
gtcactttctggtct

SEQ ID NO: 116032 - DNA, 15 bp, Homo sapiens
ggtcactttctggtc

SEQ ID NO: 116033 - DNA, 15 bp, Homo sapiens
tggtcactttctggt

SEQ ID NO: 116034 - DNA, 15 bp, Homo sapiens
ttggtcactttctgg

SEQ ID NO: 116035 - DNA, 15 bp, Homo sapiens
cttggtcactttctg

SEQ ID NO: 116036 - DNA, 15 bp, Homo sapiens
ccttggtcactttct

SEQ ID NO: 116037 - DNA, 15 bp, Homo sapiens
tccttggtcactttc

SEQ ID NO: 116038 - DNA, 15 bp, Homo sapiens
atccttggtcacttt

SEQ ID NO: 116039 - DNA, 15 bp, Homo sapiens
gatccttggtcactt

SEQ ID NO: 116040 - DNA, 15 bp, Homo sapiens
agatccttggtcact

SEQ ID NO: 116041 - DNA, 15 bp, Homo sapiens
cagatccttggtcac

SEQ ID NO: 116042 - DNA, 15 bp, Homo sapiens
acagatccttggtca

SEQ ID NO: 116043 - DNA, 15 bp, Homo sapiens
gacagatccttggtc

SEQ ID NO: 116044 - DNA, 15 bp, Homo sapiens
ggacagatccttggt

SEQ ID NO: 116045 - DNA, 15 bp, Homo sapiens
tggacagatccttgg

SEQ ID NO: 116046 - DNA, 15 bp, Homo sapiens
atggacagatccttg

SEQ ID NO: 116047 - DNA, 15 bp, Homo sapiens
aatggacagatcctt

SEQ ID NO: 116048 - DNA, 15 bp, Homo sapiens
aaatggacagatcct

SEQ ID NO: 116049 - DNA, 15 bp, Homo sapiens
taaatggacagatcc

SEQ ID NO: 116050 - DNA, 15 bp, Homo sapiens
ctaaatggacagatc

SEQ ID NO: 116051 - DNA, 15 bp, Homo sapiens
actaaatggacagat

SEQ ID NO: 116052 - DNA, 15 bp, Homo sapiens
aactaaatggacaga

SEQ ID NO: 116053 - DNA, 15 bp, Homo sapiens
gaactaaatggacag

SEQ ID NO: 116054 - DNA, 15 bp, Homo sapiens
ggaactaaatggaca

SEQ ID NO: 116055 - DNA, 15 bp, Homo sapiens
tggaactaaatggac

SEQ ID NO: 116056 - DNA, 15 bp, Homo sapiens
ctggaactaaatgga

SEQ ID NO: 116057 - DNA, 15 bp, Homo sapiens
cctggaactaaatgg

SEQ ID NO: 116058 - DNA, 15 bp, Homo sapiens
tcctggaactaaatg

SEQ ID NO: 116059 - DNA, 15 bp, Homo sapiens
ctcctggaactaaat

SEQ ID NO: 116060 - DNA, 15 bp, Homo sapiens
tctcctggaactaaa

SEQ ID NO: 116061 - DNA, 15 bp, Homo sapiens
atctcctggaactaa

SEQ ID NO: 116062 - DNA, 15 bp, Homo sapiens
tatctcctggaacta

SEQ ID NO: 116063 - DNA, 15 bp, Homo sapiens
atatctcctggaact

SEQ ID NO: 116064 - DNA, 15 bp, Homo sapiens
catatctcctggaac

SEQ ID NO: 116065 - DNA, 15 bp, Homo sapiens
tcatatctcctggaa

SEQ ID NO: 116066 - DNA, 15 bp, Homo sapiens
gtcatatctcctgga

SEQ ID NO: 116067 - DNA, 15 bp, Homo sapiens
agtcatatctcctgg

SEQ ID NO: 116068 - DNA, 15 bp, Homo sapiens
cagtcatatctcctg

SEQ ID NO: 116069 - DNA, 15 bp, Homo sapiens
gcagtcatatctcct

SEQ ID NO: 116070 - DNA, 15 bp, Homo sapiens
ggcagtcatatctcc

SEQ ID NO: 116071 - DNA, 15 bp, Homo sapiens
tggcagtcatatctc

SEQ ID NO: 116072 - DNA, 15 bp, Homo sapiens
ctggcagtcatatct

SEQ ID NO: 116073 - DNA, 15 bp, Homo sapiens
tctggcagtcatatc

SEQ ID NO: 116074 - DNA, 15 bp, Homo sapiens
ctctggcagtcatat

SEQ ID NO: 116075 - DNA, 15 bp, Homo sapiens
actctggcagtcata

SEQ ID NO: 116076 - DNA, 15 bp, Homo sapiens
cactctggcagtcat

SEQ ID NO: 116077 - DNA, 15 bp, Homo sapiens
ccactctggcagtca

SEQ ID NO: 116078 - DNA, 15 bp, Homo sapiens
accactctggcagtc

SEQ ID NO: 116079 - DNA, 15 bp, Homo sapiens
taccactctggcagt

SEQ ID NO: 116080 - DNA, 15 bp, Homo sapiens
ataccactctggcag

SEQ ID NO: 116081 - DNA, 15 bp, Homo sapiens
gataccactctggca

SEQ ID NO: 116082 - DNA, 15 bp, Homo sapiens
ggataccactctggc

SEQ ID NO: 116083 - DNA, 15 bp, Homo sapiens
aggataccactctgg

SEQ ID NO: 116084 - DNA, 15 bp, Homo sapiens
aaggataccactctg

SEQ ID NO: 116085 - DNA, 15 bp, Homo sapiens
taaggataccactct

SEQ ID NO: 116086 - DNA, 15 bp, Homo sapiens
ctaaggataccactc

SEQ ID NO: 116087 - DNA, 15 bp, Homo sapiens
actaaggataccact

SEQ ID NO: 116088 - DNA, 15 bp, Homo sapiens
cactaaggataccac

SEQ ID NO: 116089 - DNA, 15 bp, Homo sapiens
ccactaaggatacca

SEQ ID NO: 116090 - DNA, 15 bp, Homo sapiens
cccactaaggatacc

SEQ ID NO: 116091 - DNA, 15 bp, Homo sapiens
gcccactaaggatac

SEQ ID NO: 116092 - DNA, 15 bp, Homo sapiens
agcccactaaggata

SEQ ID NO: 116093 - DNA, 15 bp, Homo sapiens
cagcccactaaggat

SEQ ID NO: 116094 - DNA, 15 bp, Homo sapiens
tcagcccactaagga

SEQ ID NO: 116095 - DNA, 15 bp, Homo sapiens
ttcagcccactaagg

SEQ ID NO: 116096 - DNA, 15 bp, Homo sapiens
attcagcccactaag

SEQ ID NO: 116097 - DNA, 15 bp, Homo sapiens
cattcagcccactaa

SEQ ID NO: 116098 - DNA, 15 bp, Homo sapiens
acattcagcccacta

SEQ ID NO: 116099 - DNA, 15 bp, Homo sapiens
aacattcagcccact

SEQ ID NO: 116100 - DNA, 15 bp, Homo sapiens
gaacattcagcccac

SEQ ID NO: 116101 - DNA, 15 bp, Homo sapiens
tgaacattcagccca

SEQ ID NO: 116102 - DNA, 15 bp, Homo sapiens
ctgaacattcagccc

SEQ ID NO: 116103 - DNA, 15 bp, Homo sapiens
actgaacattcagcc

SEQ ID NO: 116104 - DNA, 15 bp, Homo sapiens
cactgaacattcagc

SEQ ID NO: 116105 - DNA, 15 bp, Homo sapiens
ccactgaacattcag

SEQ ID NO: 116106 - DNA, 15 bp, Homo sapiens
accactgaacattca

SEQ ID NO: 116107 - DNA, 15 bp, Homo sapiens
gaccactgaacattc

SEQ ID NO: 116108 - DNA, 15 bp, Homo sapiens
agaccactgaacatt

SEQ ID NO: 116109 - DNA, 15 bp, Homo sapiens
aagaccactgaacat

SEQ ID NO: 116110 - DNA, 15 bp, Homo sapiens
taagaccactgaaca

SEQ ID NO: 116111 - DNA, 15 bp, Homo sapiens
gtaagaccactgaac

SEQ ID NO: 116112 - DNA, 15 bp, Homo sapiens
agtaagaccactgaa

SEQ ID NO: 116113 - DNA, 15 bp, Homo sapiens
aagtaagaccactga

SEQ ID NO: 116114 - DNA, 15 bp, Homo sapiens
aaagtaagaccactg

SEQ ID NO: 116115 - DNA, 15 bp, Homo sapiens
taaagtaagaccact

SEQ ID NO: 116116 - DNA, 15 bp, Homo sapiens
ctaaagtaagaccac

SEQ ID NO: 116117 - DNA, 15 bp, Homo sapiens
actaaagtaagacca

SEQ ID NO: 116118 - DNA, 15 bp, Homo sapiens
cactaaagtaagacc

SEQ ID NO: 116119 - DNA, 15 bp, Homo sapiens
tcactaaagtaagac

SEQ ID NO: 116120 - DNA, 15 bp, Homo sapiens
gtcactaaagtaaga

SEQ ID NO: 116121 - DNA, 15 bp, Homo sapiens
ggtcactaaagtaag

SEQ ID NO: 116122 - DNA, 15 bp, Homo sapiens
tggtcactaaagtaa

SEQ ID NO: 116123 - DNA, 15 bp, Homo sapiens
ttggtcactaaagta

SEQ ID NO: 116124 - DNA, 15 bp, Homo sapiens
cttggtcactaaagt

SEQ ID NO: 116125 - DNA, 15 bp, Homo sapiens
gcttggtcactaaag

SEQ ID NO: 116126 - DNA, 15 bp, Homo sapiens
tgcttggtcactaaa

SEQ ID NO: 116127 - DNA, 15 bp, Homo sapiens
ttgcttggtcactaa

SEQ ID NO: 116128 - DNA, 15 bp, Homo sapiens
gttgcttggtcacta

SEQ ID NO: 116129 - DNA, 15 bp, Homo sapiens
tgttgcttggtcact

SEQ ID NO: 116130 - DNA, 15 bp, Homo sapiens
ttgttgcttggtcac

SEQ ID NO: 116131 - DNA, 15 bp, Homo sapiens
cttgttgcttggtca

SEQ ID NO: 116132 - DNA, 15 bp, Homo sapiens
tcttgttgcttggtc

SEQ ID NO: 116133 - DNA, 15 bp, Homo sapiens
gtcttgttgcttggt

SEQ ID NO: 116134 - DNA, 15 bp, Homo sapiens
tgtcttgttgcttgg

SEQ ID NO: 116135 - DNA, 15 bp, Homo sapiens
ctgtcttgttgcttg

SEQ ID NO: 116136 - DNA, 15 bp, Homo sapiens
actgtcttgttgctt

SEQ ID NO: 116137 - DNA, 15 bp, Homo sapiens
tactgtcttgttgct

SEQ ID NO: 116138 - DNA, 15 bp, Homo sapiens
ctactgtcttgttgc

SEQ ID NO: 116139 - DNA, 15 bp, Homo sapiens
cctactgtcttgttg

SEQ ID NO: 116140 - DNA, 15 bp, Homo sapiens
ccctactgtcttgtt

SEQ ID NO: 116141 - DNA, 15 bp, Homo sapiens
gccctactgtcttgt

SEQ ID NO: 116142 - DNA, 15 bp, Homo sapiens
tgccctactgtcttg

SEQ ID NO: 116143 - DNA, 15 bp, Homo sapiens
atgccctactgtctt

SEQ ID NO: 116144 - DNA, 15 bp, Homo sapiens
catgccctactgtct

SEQ ID NO: 116145 - DNA, 15 bp, Homo sapiens
ccatgccctactgtc

SEQ ID NO: 116146 - DNA, 15 bp, Homo sapiens
accatgccctactgt

SEQ ID NO: 116147 - DNA, 15 bp, Homo sapiens
gaccatgccctactg

SEQ ID NO: 116148 - DNA, 15 bp, Homo sapiens
tgaccatgccctact

SEQ ID NO: 116149 - DNA, 15 bp, Homo sapiens
ctgaccatgccctac

SEQ ID NO: 116150 - DNA, 15 bp, Homo sapiens
actgaccatgcccta

SEQ ID NO: 116151 - DNA, 15 bp, Homo sapiens
tactgaccatgccct

SEQ ID NO: 116152 - DNA, 15 bp, Homo sapiens
ttactgaccatgccc

SEQ ID NO: 116153 - DNA, 15 bp, Homo sapiens
gttactgaccatgcc

SEQ ID NO: 116154 - DNA, 15 bp, Homo sapiens
agttactgaccatgc

SEQ ID NO: 116155 - DNA, 15 bp, Homo sapiens
aagttactgaccatg

SEQ ID NO: 116156 - DNA, 15 bp, Homo sapiens
aaagttactgaccat

SEQ ID NO: 116157 - DNA, 15 bp, Homo sapiens
gaaagttactgacca

SEQ ID NO: 116158 - DNA, 15 bp, Homo sapiens
tgaaagttactgacc

SEQ ID NO: 116159 - DNA, 15 bp, Homo sapiens
ctgaaagttactgac

SEQ ID NO: 116160 - DNA, 15 bp, Homo sapiens
actgaaagttactga

SEQ ID NO: 116161 - DNA, 15 bp, Homo sapiens
gactgaaagttactg

SEQ ID NO: 116162 - DNA, 15 bp, Homo sapiens
tgactgaaagttact

SEQ ID NO: 116163 - DNA, 15 bp, Homo sapiens
ttgactgaaagttac

SEQ ID NO: 116164 - DNA, 15 bp, Homo sapiens
attgactgaaagtta

SEQ ID NO: 116165 - DNA, 15 bp, Homo sapiens
aattgactgaaagtt

SEQ ID NO: 116166 - DNA, 15 bp, Homo sapiens
aaattgactgaaagt

SEQ ID NO: 116167 - DNA, 15 bp, Homo sapiens
aaaattgactgaaag

SEQ ID NO: 116168 - DNA, 15 bp, Homo sapiens
aaaaattgactgaaa

SEQ ID NO: 116169 - DNA, 15 bp, Homo sapiens
caaaaattgactgaa

SEQ ID NO: 116170 - DNA, 15 bp, Homo sapiens
gcaaaaattgactga

SEQ ID NO: 116171 - DNA, 15 bp, Homo sapiens
agcaaaaattgactg

SEQ ID NO: 116172 - DNA, 15 bp, Homo sapiens
aagcaaaaattgact

SEQ ID NO: 116173 - DNA, 15 bp, Homo sapiens
taagcaaaaattgac

SEQ ID NO: 116174 - DNA, 15 bp, Homo sapiens
gtaagcaaaaattga

SEQ ID NO: 116175 - DNA, 15 bp, Homo sapiens
agtaagcaaaaattg

SEQ ID NO: 116176 - DNA, 15 bp, Homo sapiens
tagtaagcaaaaatt

SEQ ID NO: 116177 - DNA, 15 bp, Homo sapiens
ctagtaagcaaaaat

SEQ ID NO: 116178 - DNA, 15 bp, Homo sapiens
cctagtaagcaaaaa

SEQ ID NO: 116179 - DNA, 15 bp, Homo sapiens
tcctagtaagcaaaa

SEQ ID NO: 116180 - DNA, 15 bp, Homo sapiens
atcctagtaagcaaa

SEQ ID NO: 116181 - DNA, 15 bp, Homo sapiens
tatcctagtaagcaa

SEQ ID NO: 116182 - DNA, 15 bp, Homo sapiens
ttatcctagtaagca

SEQ ID NO: 116183 - DNA, 15 bp, Homo sapiens
tttatcctagtaagc

SEQ ID NO: 116184 - DNA, 15 bp, Homo sapiens
ctttatcctagtaag

SEQ ID NO: 116185 - DNA, 15 bp, Homo sapiens
gctttatcctagtaa

SEQ ID NO: 116186 - DNA, 15 bp, Homo sapiens
tgctttatcctagta

SEQ ID NO: 116187 - DNA, 15 bp, Homo sapiens
ttgctttatcctagt

SEQ ID NO: 116188 - DNA, 15 bp, Homo sapiens
tttgctttatcctag

SEQ ID NO: 116189 - DNA, 15 bp, Homo sapiens
ttttgctttatccta

SEQ ID NO: 116190 - DNA, 15 bp, Homo sapiens
tttttgctttatcct

SEQ ID NO: 116191 - DNA, 15 bp, Homo sapiens
atttttgctttatcc

SEQ ID NO: 116192 - DNA, 15 bp, Homo sapiens
tatttttgctttatc

SEQ ID NO: 116193 - DNA, 15 bp, Homo sapiens
ttatttttgctttat

SEQ ID NO: 116194 - DNA, 15 bp, Homo sapiens
cttatttttgcttta

SEQ ID NO: 116195 - DNA, 15 bp, Homo sapiens
gcttatttttgcttt

SEQ ID NO: 116196 - DNA, 15 bp, Homo sapiens
agcttatttttgctt

SEQ ID NO: 116197 - DNA, 15 bp, Homo sapiens
aagcttatttttgct

SEQ ID NO: 116198 - DNA, 15 bp, Homo sapiens
taagcttatttttgc

SEQ ID NO: 116199 - DNA, 15 bp, Homo sapiens
ataagcttatttttg

SEQ ID NO: 116200 - DNA, 15 bp, Homo sapiens
tataagcttattttt

SEQ ID NO: 116201 - DNA, 15 bp, Homo sapiens
gtataagcttatttt

SEQ ID NO: 116202 - DNA, 15 bp, Homo sapiens
tgtataagcttattt

SEQ ID NO: 116203 - DNA, 15 bp, Homo sapiens
atgtataagcttatt

SEQ ID NO: 116204 - DNA, 15 bp, Homo sapiens
aatgtataagcttat

SEQ ID NO: 116205 - DNA, 15 bp, Homo sapiens
aaatgtataagctta

SEQ ID NO: 116206 - DNA, 15 bp, Homo sapiens
aaaatgtataagctt

SEQ ID NO: 116207 - DNA, 15 bp, Homo sapiens
aaaaatgtataagct

SEQ ID NO: 116208 - DNA, 15 bp, Homo sapiens
taaaaatgtataagc

SEQ ID NO: 116209 - DNA, 15 bp, Homo sapiens
ctaaaaatgtataag

SEQ ID NO: 116210 - DNA, 15 bp, Homo sapiens
tctaaaaatgtataa

SEQ ID NO: 116211 - DNA, 15 bp, Homo sapiens
atctaaaaatgtata

SEQ ID NO: 116212 - DNA, 15 bp, Homo sapiens
tatctaaaaatgtat

SEQ ID NO: 116213 - DNA, 15 bp, Homo sapiens
gtatctaaaaatgta

SEQ ID NO: 116214 - DNA, 15 bp, Homo sapiens
tgtatctaaaaatgt

SEQ ID NO: 116215 - DNA, 15 bp, Homo sapiens
atgtatctaaaaatg

SEQ ID NO: 116216 - DNA, 15 bp, Homo sapiens
aatgtatctaaaaat

SEQ ID NO: 116217 - DNA, 15 bp, Homo sapiens
aaatgtatctaaaaa

SEQ ID NO: 116218 - DNA, 15 bp, Homo sapiens
aaaatgtatctaaaa

SEQ ID NO: 116219 - DNA, 15 bp, Homo sapiens
aaaaatgtatctaaa

SEQ ID NO: 116220 - DNA, 15 bp, Homo sapiens
aaaaaatgtatctaa

SEQ ID NO: 116221 - DNA, 15 bp, Homo sapiens
caaaaaatgtatcta

SEQ ID NO: 116222 - DNA, 15 bp, Homo sapiens
acaaaaaatgtatct

SEQ ID NO: 116223 - DNA, 15 bp, Homo sapiens
tacaaaaaatgtatc

SEQ ID NO: 116224 - DNA, 15 bp, Homo sapiens
ttacaaaaaatgtat

SEQ ID NO: 116225 - DNA, 15 bp, Homo sapiens
gttacaaaaaatgta

SEQ ID NO: 116226 - DNA, 15 bp, Homo sapiens
agttacaaaaaatgt

SEQ ID NO: 116227 - DNA, 15 bp, Homo sapiens
aagttacaaaaaatg

SEQ ID NO: 116228 - DNA, 15 bp, Homo sapiens
caagttacaaaaaat

SEQ ID NO: 116229 - DNA, 15 bp, Homo sapiens
gcaagttacaaaaaa

SEQ ID NO: 116230 - DNA, 15 bp, Homo sapiens
agcaagttacaaaaa

SEQ ID NO: 116231 - DNA, 15 bp, Homo sapiens
cagcaagttacaaaa

SEQ ID NO: 116232 - DNA, 15 bp, Homo sapiens
tcagcaagttacaaa

SEQ ID NO: 116233 - DNA, 15 bp, Homo sapiens
ctcagcaagttacaa

SEQ ID NO: 116234 - DNA, 15 bp, Homo sapiens
actcagcaagttaca

SEQ ID NO: 116235 - DNA, 15 bp, Homo sapiens
tactcagcaagttac

SEQ ID NO: 116236 - DNA, 15 bp, Homo sapiens
gtactcagcaagtta

SEQ ID NO: 116237 - DNA, 15 bp, Homo sapiens
ggtactcagcaagtt

SEQ ID NO: 116238 - DNA, 15 bp, Homo sapiens
gggtactcagcaagt

SEQ ID NO: 116239 - DNA, 15 bp, Homo sapiens
tgggtactcagcaag

SEQ ID NO: 116240 - DNA, 15 bp, Homo sapiens
ttgggtactcagcaa

SEQ ID NO: 116241 - DNA, 15 bp, Homo sapiens
cttgggtactcagca

SEQ ID NO: 116242 - DNA, 15 bp, Homo sapiens
ccttgggtactcagc

SEQ ID NO: 116243 - DNA, 15 bp, Homo sapiens
tccttgggtactcag

SEQ ID NO: 116244 - DNA, 15 bp, Homo sapiens
ttccttgggtactca

SEQ ID NO: 116245 - DNA, 15 bp, Homo sapiens
tttccttgggtactc

SEQ ID NO: 116246 - DNA, 15 bp, Homo sapiens
ctttccttgggtact

SEQ ID NO: 116247 - DNA, 15 bp, Homo sapiens
actttccttgggtac

SEQ ID NO: 116248 - DNA, 15 bp, Homo sapiens
cactttccttgggta

SEQ ID NO: 116249 - DNA, 15 bp, Homo sapiens
acactttccttgggt

SEQ ID NO: 116250 - DNA, 15 bp, Homo sapiens
tggaatacacctaca

SEQ ID NO: 116251 - DNA, 15 bp, Homo sapiens
ctggaatacacctac

SEQ ID NO: 116252 - DNA, 15 bp, Homo sapiens
tctggaatacaccta

SEQ ID NO: 116253 - DNA, 15 bp, Homo sapiens
ctctggaatacacct

SEQ ID NO: 116254 - DNA, 15 bp, Homo sapiens
gctctggaatacacc

SEQ ID NO: 116255 - DNA, 15 bp, Homo sapiens
tgctctggaatacac

SEQ ID NO: 116256 - DNA, 15 bp, Homo sapiens
ttgctctggaataca

SEQ ID NO: 116257 - DNA, 15 bp, Homo sapiens
tttgctctggaatac

SEQ ID NO: 116258 - DNA, 15 bp, Homo sapiens
atttgctctggaata

SEQ ID NO: 116259 - DNA, 15 bp, Homo sapiens
catttgctctggaat

SEQ ID NO: 116260 - DNA, 15 bp, Homo sapiens
tcatttgctctggaa

SEQ ID NO: 116261 - DNA, 15 bp, Homo sapiens
ttcatttgctctgga

SEQ ID NO: 116262 - DNA, 15 bp, Homo sapiens
tttcatttgctctgg

SEQ ID NO: 116263 - DNA, 15 bp, Homo sapiens
ttttcatttgctctg

SEQ ID NO: 116264 - DNA, 15 bp, Homo sapiens
tttttcatttgctct

SEQ ID NO: 116265 - DNA, 15 bp, Homo sapiens
ctttttcatttgctc

SEQ ID NO: 116266 - DNA, 15 bp, Homo sapiens
tctttttcatttgct

SEQ ID NO: 116267 - DNA, 15 bp, Homo sapiens
ctctttttcatttgc

SEQ ID NO: 116268 - DNA, 15 bp, Homo sapiens
gctctttttcatttg

SEQ ID NO: 116269 - DNA, 15 bp, Homo sapiens
ggctctttttcattt

SEQ ID NO: 116270 - DNA, 15 bp, Homo sapiens
aggctctttttcatt

SEQ ID NO: 116271 - DNA, 15 bp, Homo sapiens
aaggctctttttcat

SEQ ID NO: 116272 - DNA, 15 bp, Homo sapiens
caaggctctttttca

SEQ ID NO: 116273 - DNA, 15 bp, Homo sapiens
gcaaggctctttttc

SEQ ID NO: 116274 - DNA, 15 bp, Homo sapiens
agcaaggctcttttt

SEQ ID NO: 116275 - DNA, 15 bp, Homo sapiens
cagcaaggctctttt

SEQ ID NO: 116276 - DNA, 15 bp, Homo sapiens
acagcaaggctcttt

SEQ ID NO: 116277 - DNA, 15 bp, Homo sapiens
aacagcaaggctctt

SEQ ID NO: 116278 - DNA, 15 bp, Homo sapiens
caacagcaaggctct

SEQ ID NO: 116279 - DNA, 15 bp, Homo sapiens
ccaacagcaaggctc

SEQ ID NO: 116280 - DNA, 15 bp, Homo sapiens
accaacagcaaggct

SEQ ID NO: 116281 - DNA, 15 bp, Homo sapiens
caccaacagcaaggc

SEQ ID NO: 116282 - DNA, 15 bp, Homo sapiens
ccaccaacagcaagg

SEQ ID NO: 116283 - DNA, 15 bp, Homo sapiens
accaccaacagcaag

SEQ ID NO: 116284 - DNA, 15 bp, Homo sapiens
aaccaccaacagcaa

SEQ ID NO: 116285 - DNA, 15 bp, Homo sapiens
taaccaccaacagca

SEQ ID NO: 116286 - DNA, 15 bp, Homo sapiens
ctaaccaccaacagc

SEQ ID NO: 116287 - DNA, 15 bp, Homo sapiens
gctaaccaccaacag

SEQ ID NO: 116288 - DNA, 15 bp, Homo sapiens
agctaaccaccaaca

SEQ ID NO: 116289 - DNA, 15 bp, Homo sapiens
tagctaaccaccaac

SEQ ID NO: 116290 - DNA, 15 bp, Homo sapiens
ttagctaaccaccaa

SEQ ID NO: 116291 - DNA, 15 bp, Homo sapiens
tttagctaaccacca

SEQ ID NO: 116292 - DNA, 15 bp, Homo sapiens
ctttagctaaccacc

SEQ ID NO: 116293 - DNA, 15 bp, Homo sapiens
actttagctaaccac

SEQ ID NO: 116294 - DNA, 15 bp, Homo sapiens
cactttagctaacca

SEQ ID NO: 116295 - DNA, 15 bp, Homo sapiens
tcactttagctaacc

SEQ ID NO: 116296 - DNA, 15 bp, Homo sapiens
ctcactttagctaac

SEQ ID NO: 116297 - DNA, 15 bp, Homo sapiens
cctcactttagctaa

SEQ ID NO: 116298 - DNA, 15 bp, Homo sapiens
tcctcactttagcta

SEQ ID NO: 116299 - DNA, 15 bp, Homo sapiens
atcctcactttagct

SEQ ID NO: 116300 - DNA, 15 bp, Homo sapiens
catcctcactttagc

SEQ ID NO: 116301 - DNA, 15 bp, Homo sapiens
tcatcctcactttag

SEQ ID NO: 116302 - DNA, 15 bp, Homo sapiens
atcatcctcacttta

SEQ ID NO: 116303 - DNA, 15 bp, Homo sapiens
tatcatcctcacttt

SEQ ID NO: 116304 - DNA, 15 bp, Homo sapiens
ttatcatcctcactt

SEQ ID NO: 116305 - DNA, 15 bp, Homo sapiens
tttatcatcctcact

SEQ ID NO: 116306 - DNA, 15 bp, Homo sapiens
ctttatcatcctcac

SEQ ID NO: 116307 - DNA, 15 bp, Homo sapiens
cctttatcatcctca

SEQ ID NO: 116308 - DNA, 15 bp, Homo sapiens
ccctttatcatcctc

SEQ ID NO: 116309 - DNA, 15 bp, Homo sapiens
accctttatcatcct

SEQ ID NO: 116310 - DNA, 15 bp, Homo sapiens
caccctttatcatcc

SEQ ID NO: 116311 - DNA, 15 bp, Homo sapiens
tcaccctttatcatc

SEQ ID NO: 116312 - DNA, 15 bp, Homo sapiens
ctcaccctttatcat

SEQ ID NO: 116313 - DNA, 15 bp, Homo sapiens
cctcaccctttatca

SEQ ID NO: 116314 - DNA, 15 bp, Homo sapiens
acctcaccctttatc

SEQ ID NO: 116315 - DNA, 15 bp, Homo sapiens
tacctcaccctttat

SEQ ID NO: 116316 - DNA, 15 bp, Homo sapiens
ctacctcacccttta

SEQ ID NO: 116317 - DNA, 15 bp, Homo sapiens
cctacctcacccttt

SEQ ID NO: 116318 - DNA, 15 bp, Homo sapiens
tcctacctcaccctt

SEQ ID NO: 116319 - DNA, 15 bp, Homo sapiens
ttcctacctcaccct

SEQ ID NO: 116320 - DNA, 15 bp, Homo sapiens
tttcctacctcaccc

SEQ ID NO: 116321 - DNA, 15 bp, Homo sapiens
ttttcctacctcacc

SEQ ID NO: 116322 - DNA, 15 bp, Homo sapiens
attttcctacctcac

SEQ ID NO: 116323 - DNA, 15 bp, Homo sapiens
cattttcctacctca

SEQ ID NO: 116324 - DNA, 15 bp, Homo sapiens
gcattttcctacctc

SEQ ID NO: 116325 - DNA, 15 bp, Homo sapiens
ggcattttcctacct

SEQ ID NO: 116326 - DNA, 15 bp, Homo sapiens
aggcattttcctacc

SEQ ID NO: 116327 - DNA, 15 bp, Homo sapiens
taggcattttcctac

SEQ ID NO: 116328 - DNA, 15 bp, Homo sapiens
ataggcattttccta

SEQ ID NO: 116329 - DNA, 15 bp, Homo sapiens
aataggcattttcct

SEQ ID NO: 116330 - DNA, 15 bp, Homo sapiens
aaataggcattttcc

SEQ ID NO: 116331 - DNA, 15 bp, Homo sapiens
taaataggcattttc

SEQ ID NO: 116332 - DNA, 15 bp, Homo sapiens
ttaaataggcatttt

SEQ ID NO: 116333 - DNA, 15 bp, Homo sapiens
tttaaataggcattt

SEQ ID NO: 116334 - DNA, 15 bp, Homo sapiens
atttaaataggcatt

SEQ ID NO: 116335 - DNA, 15 bp, Homo sapiens
aatttaaataggcat

SEQ ID NO: 116336 - DNA, 15 bp, Homo sapiens
aaatttaaataggca

SEQ ID NO: 116337 - DNA, 15 bp, Homo sapiens
aaaatttaaataggc

SEQ ID NO: 116338 - DNA, 15 bp, Homo sapiens
aaaaatttaaatagg

SEQ ID NO: 116339 - DNA, 15 bp, Homo sapiens
aaaaaatttaaatag

SEQ ID NO: 116340 - DNA, 15 bp, Homo sapiens
aaaaaaatttaaata

SEQ ID NO: 116341 - DNA, 15 bp, Homo sapiens
gaaaaaaatttaaat

SEQ ID NO: 116342 - DNA, 15 bp, Homo sapiens
agaaaaaaatttaaa

SEQ ID NO: 116343 - DNA, 15 bp, Homo sapiens
aagaaaaaaatttaa

SEQ ID NO: 116344 - DNA, 15 bp, Homo sapiens
taagaaaaaaattta

SEQ ID NO: 116345 - DNA, 15 bp, Homo sapiens
ataagaaaaaaattt

SEQ ID NO: 116346 - DNA, 15 bp, Homo sapiens
tataagaaaaaaatt

SEQ ID NO: 116347 - DNA, 15 bp, Homo sapiens
atataagaaaaaaat

SEQ ID NO: 116348 - DNA, 15 bp, Homo sapiens
aatataagaaaaaaa

SEQ ID NO: 116349 - DNA, 15 bp, Homo sapiens
caatataagaaaaaa

SEQ ID NO: 116350 - DNA, 15 bp, Homo sapiens
acaatataagaaaaa

SEQ ID NO: 116351 - DNA, 15 bp, Homo sapiens
aacaatataagaaaa

SEQ ID NO: 116352 - DNA, 15 bp, Homo sapiens
aaacaatataagaaa

SEQ ID NO: 116353 - DNA, 15 bp, Homo sapiens
gaaacaatataagaa

SEQ ID NO: 116354 - DNA, 15 bp, Homo sapiens
ggaaacaatataaga

SEQ ID NO: 116355 - DNA, 15 bp, Homo sapiens
aggaaacaatataag

SEQ ID NO: 116356 - DNA, 15 bp, Homo sapiens
aaggaaacaatataa

SEQ ID NO: 116357 - DNA, 15 bp, Homo sapiens
aaaggaaacaatata

SEQ ID NO: 116358 - DNA, 15 bp, Homo sapiens
aaaaggaaacaatat

SEQ ID NO: 116359 - DNA, 15 bp, Homo sapiens
aaaaaggaaacaata

SEQ ID NO: 116360 - DNA, 15 bp, Homo sapiens
aaaaaaggaaacaat

SEQ ID NO: 116361 - DNA, 15 bp, Homo sapiens
aaaaaaaggaaacaa

SEQ ID NO: 116362 - DNA, 15 bp, Homo sapiens
taaaaaaaggaaaca

SEQ ID NO: 116363 - DNA, 15 bp, Homo sapiens
ttaaaaaaaggaaac

SEQ ID NO: 116364 - DNA, 15 bp, Homo sapiens
tttaaaaaaaggaaa

SEQ ID NO: 116365 - DNA, 15 bp, Homo sapiens
gtttaaaaaaaggaa

SEQ ID NO: 116366 - DNA, 15 bp, Homo sapiens
ggtttaaaaaaagga

SEQ ID NO: 116367 - DNA, 15 bp, Homo sapiens
gggtttaaaaaaagg

SEQ ID NO: 116368 - DNA, 15 bp, Homo sapiens
tgggtttaaaaaaag

SEQ ID NO: 116369 - DNA, 15 bp, Homo sapiens
ctgggtttaaaaaaa

SEQ ID NO: 116370 - DNA, 15 bp, Homo sapiens
cctgggtttaaaaaa

SEQ ID NO: 116371 - DNA, 15 bp, Homo sapiens
acctgggtttaaaaa

SEQ ID NO: 116372 - DNA, 15 bp, Homo sapiens
aacctgggtttaaaa

SEQ ID NO: 116373 - DNA, 15 bp, Homo sapiens
caacctgggtttaaa

SEQ ID NO: 116374 - DNA, 15 bp, Homo sapiens
acaacctgggtttaa

SEQ ID NO: 116375 - DNA, 15 bp, Homo sapiens
tacaacctgggttta

SEQ ID NO: 116376 - DNA, 15 bp, Homo sapiens
gtacaacctgggttt

SEQ ID NO: 116377 - DNA, 15 bp, Homo sapiens
tgtacaacctgggtt

SEQ ID NO: 116378 - DNA, 15 bp, Homo sapiens
atgtacaacctgggt

SEQ ID NO: 116379 - DNA, 15 bp, Homo sapiens
aatgtacaacctggg

SEQ ID NO: 116380 - DNA, 15 bp, Homo sapiens
gaatgtacaacctgg

SEQ ID NO: 116381 - DNA, 15 bp, Homo sapiens
ggaatgtacaacctg

SEQ ID NO: 116382 - DNA, 15 bp, Homo sapiens
gggaatgtacaacct

SEQ ID NO: 116383 - DNA, 15 bp, Homo sapiens
cgggaatgtacaacc

SEQ ID NO: 116384 - DNA, 15 bp, Homo sapiens
acgggaatgtacaac

SEQ ID NO: 116385 - DNA, 15 bp, Homo sapiens
cacgggaatgtacaa

SEQ ID NO: 116386 - DNA, 15 bp, Homo sapiens
acacgggaatgtaca

SEQ ID NO: 116387 - DNA, 15 bp, Homo sapiens
cacacgggaatgtac

SEQ ID NO: 116388 - DNA, 15 bp, Homo sapiens
ccacacgggaatgta

SEQ ID NO: 116389 - DNA, 15 bp, Homo sapiens
tccacacgggaatgt

SEQ ID NO: 116390 - DNA, 15 bp, Homo sapiens
atccacacgggaatg

SEQ ID NO: 116391 - DNA, 15 bp, Homo sapiens
aatccacacgggaat

SEQ ID NO: 116392 - DNA, 15 bp, Homo sapiens
aaatccacacgggaa

SEQ ID NO: 116393 - DNA, 15 bp, Homo sapiens
gaaatccacacggga

SEQ ID NO: 116394 - DNA, 15 bp, Homo sapiens
agaaatccacacggg

SEQ ID NO: 116395 - DNA, 15 bp, Homo sapiens
tagaaatccacacgg

SEQ ID NO: 116396 - DNA, 15 bp, Homo sapiens
atagaaatccacacg

SEQ ID NO: 116397 - DNA, 15 bp, Homo sapiens
aatagaaatccacac

SEQ ID NO: 116398 - DNA, 15 bp, Homo sapiens
aaatagaaatccaca

SEQ ID NO: 116399 - DNA, 15 bp, Homo sapiens
aaaatagaaatccac

SEQ ID NO: 116400 - DNA, 15 bp, Homo sapiens
caaaatagaaatcca

SEQ ID NO: 116401 - DNA, 15 bp, Homo sapiens
tcaaaatagaaatcc

SEQ ID NO: 116402 - DNA, 15 bp, Homo sapiens
ttcaaaatagaaatc

SEQ ID NO: 116403 - DNA, 15 bp, Homo sapiens
cttcaaaatagaaat

SEQ ID NO: 116404 - DNA, 15 bp, Homo sapiens
acttcaaaatagaaa

SEQ ID NO: 116405 - DNA, 15 bp, Homo sapiens
tacttcaaaatagaa

SEQ ID NO: 116406 - DNA, 15 bp, Homo sapiens
ttacttcaaaataga

SEQ ID NO: 116407 - DNA, 15 bp, Homo sapiens
attacttcaaaatag

SEQ ID NO: 116408 - DNA, 15 bp, Homo sapiens
tattacttcaaaata

SEQ ID NO: 116409 - DNA, 15 bp, Homo sapiens
atattacttcaaaat

SEQ ID NO: 116410 - DNA, 15 bp, Homo sapiens
gatattacttcaaaa

SEQ ID NO: 116411 - DNA, 15 bp, Homo sapiens
agatattacttcaaa

SEQ ID NO: 116412 - DNA, 15 bp, Homo sapiens
tagatattacttcaa

SEQ ID NO: 116413 - DNA, 15 bp, Homo sapiens
ttagatattacttca

SEQ ID NO: 116414 - DNA, 15 bp, Homo sapiens
attagatattacttc

SEQ ID NO: 116415 - DNA, 15 bp, Homo sapiens
aattagatattactt

SEQ ID NO: 116416 - DNA, 15 bp, Homo sapiens
aaattagatattact

SEQ ID NO: 116417 - DNA, 15 bp, Homo sapiens
aaaattagatattac

SEQ ID NO: 116418 - DNA, 15 bp, Homo sapiens
caaaattagatatta

SEQ ID NO: 116419 - DNA, 15 bp, Homo sapiens
tcaaaattagatatt

SEQ ID NO: 116420 - DNA, 15 bp, Homo sapiens
ctcaaaattagatat

SEQ ID NO: 116421 - DNA, 15 bp, Homo sapiens
actcaaaattagata

SEQ ID NO: 116422 - DNA, 15 bp, Homo sapiens
tactcaaaattagat

SEQ ID NO: 116423 - DNA, 15 bp, Homo sapiens
ttactcaaaattaga

SEQ ID NO: 116424 - DNA, 15 bp, Homo sapiens
attactcaaaattag

SEQ ID NO: 116425 - DNA, 15 bp, Homo sapiens
aattactcaaaatta

SEQ ID NO: 116426 - DNA, 15 bp, Homo sapiens
aaattactcaaaatt

SEQ ID NO: 116427 - DNA, 15 bp, Homo sapiens
taaattactcaaaat

SEQ ID NO: 116428 - DNA, 15 bp, Homo sapiens
ttaaattactcaaaa

SEQ ID NO: 116429 - DNA, 15 bp, Homo sapiens
attaaattactcaaa

SEQ ID NO: 116430 - DNA, 15 bp, Homo sapiens
aattaaattactcaa

SEQ ID NO: 116431 - DNA, 15 bp, Homo sapiens
taattaaattactca

SEQ ID NO: 116432 - DNA, 15 bp, Homo sapiens
ttaattaaattactc

SEQ ID NO: 116433 - DNA, 15 bp, Homo sapiens
tttaattaaattact

SEQ ID NO: 116434 - DNA, 15 bp, Homo sapiens
ttttaattaaattac

SEQ ID NO: 116435 - DNA, 15 bp, Homo sapiens
attttaattaaatta

SEQ ID NO: 116436 - DNA, 15 bp, Homo sapiens
cattttaattaaatt

SEQ ID NO: 116437 - DNA, 15 bp, Homo sapiens
acattttaattaaat

SEQ ID NO: 116438 - DNA, 15 bp, Homo sapiens
aacattttaattaaa

SEQ ID NO: 116439 - DNA, 15 bp, Homo sapiens
aaacattttaattaa

SEQ ID NO: 116440 - DNA, 15 bp, Homo sapiens
aaaacattttaatta

SEQ ID NO: 116441 - DNA, 15 bp, Homo sapiens
gaaaacattttaatt

SEQ ID NO: 116442 - DNA, 15 bp, Homo sapiens
tgaaaacattttaat

SEQ ID NO: 116443 - DNA, 15 bp, Homo sapiens
gtgaaaacattttaa

SEQ ID NO: 116444 - DNA, 15 bp, Homo sapiens
agtgaaaacatttta

SEQ ID NO: 116445 - DNA, 15 bp, Homo sapiens
tagtgaaaacatttt

SEQ ID NO: 116446 - DNA, 15 bp, Homo sapiens
atagtgaaaacattt

SEQ ID NO: 116447 - DNA, 15 bp, Homo sapiens
catagtgaaaacatt

SEQ ID NO: 116448 - DNA, 15 bp, Homo sapiens
acatagtgaaaacat

SEQ ID NO: 116449 - DNA, 15 bp, Homo sapiens
cacatagtgaaaaca

SEQ ID NO: 116450 - DNA, 15 bp, Homo sapiens
acacatagtgaaaac

SEQ ID NO: 116451 - DNA, 15 bp, Homo sapiens
aacacatagtgaaaa

SEQ ID NO: 116452 - DNA, 15 bp, Homo sapiens
gaacacatagtgaaa

SEQ ID NO: 116453 - DNA, 15 bp, Homo sapiens
tgaacacatagtgaa

SEQ ID NO: 116454 - DNA, 15 bp, Homo sapiens
ctgaacacatagtga

SEQ ID NO: 116455 - DNA, 15 bp, Homo sapiens
actgaacacatagtg

SEQ ID NO: 116456 - DNA, 15 bp, Homo sapiens
tactgaacacatagt

SEQ ID NO: 116457 - DNA, 15 bp, Homo sapiens
atactgaacacatag

SEQ ID NO: 116458 - DNA, 15 bp, Homo sapiens
catactgaacacata

SEQ ID NO: 116459 - DNA, 15 bp, Homo sapiens
acatactgaacacat

SEQ ID NO: 116460 - DNA, 15 bp, Homo sapiens
aacatactgaacaca

SEQ ID NO: 116461 - DNA, 15 bp, Homo sapiens
aaacatactgaacac

SEQ ID NO: 116462 - DNA, 15 bp, Homo sapiens
gaaacatactgaaca

SEQ ID NO: 116463 - DNA, 15 bp, Homo sapiens
agaaacatactgaac

SEQ ID NO: 116464 - DNA, 15 bp, Homo sapiens
cagaaacatactgaa

SEQ ID NO: 116465 - DNA, 15 bp, Homo sapiens
acagaaacatactga

SEQ ID NO: 116466 - DNA, 15 bp, Homo sapiens
aacagaaacatactg

SEQ ID NO: 116467 - DNA, 15 bp, Homo sapiens
caacagaaacatact

SEQ ID NO: 116468 - DNA, 15 bp, Homo sapiens
ccaacagaaacatac

SEQ ID NO: 116469 - DNA, 15 bp, Homo sapiens
accaacagaaacata

SEQ ID NO: 116470 - DNA, 15 bp, Homo sapiens
gaccaacagaaacat

SEQ ID NO: 116471 - DNA, 15 bp, Homo sapiens
tgaccaacagaaaca

SEQ ID NO: 116472 - DNA, 15 bp, Homo sapiens
atgaccaacagaaac

SEQ ID NO: 116473 - DNA, 15 bp, Homo sapiens
tatgaccaacagaaa

SEQ ID NO: 116474 - DNA, 15 bp, Homo sapiens
ttatgaccaacagaa

SEQ ID NO: 116475 - DNA, 15 bp, Homo sapiens
tttatgaccaacaga

SEQ ID NO: 116476 - DNA, 15 bp, Homo sapiens
atttatgaccaacag

SEQ ID NO: 116477 - DNA, 15 bp, Homo sapiens
aatttatgaccaaca

SEQ ID NO: 116478 - DNA, 15 bp, Homo sapiens
aaatttatgaccaac

SEQ ID NO: 116479 - DNA, 15 bp, Homo sapiens
aaaatttatgaccaa

SEQ ID NO: 116480 - DNA, 15 bp, Homo sapiens
aaaaatttatgacca

SEQ ID NO: 116481 - DNA, 15 bp, Homo sapiens
aaaaaatttatgacc

SEQ ID NO: 116482 - DNA, 15 bp, Homo sapiens
gaaaaaatttatgac

SEQ ID NO: 116483 - DNA, 15 bp, Homo sapiens
tgaaaaaatttatga

SEQ ID NO: 116484 - DNA, 15 bp, Homo sapiens
gtgaaaaaatttatg

SEQ ID NO: 116485 - DNA, 15 bp, Homo sapiens
tgtgaaaaaatttat

SEQ ID NO: 116486 - DNA, 15 bp, Homo sapiens
atgtgaaaaaattta

SEQ ID NO: 116487 - DNA, 15 bp, Homo sapiens
tatgtgaaaaaattt

SEQ ID NO: 116488 - DNA, 15 bp, Homo sapiens
ctatgtgaaaaaatt

SEQ ID NO: 116489 - DNA, 15 bp, Homo sapiens
tctatgtgaaaaaat

SEQ ID NO: 116490 - DNA, 15 bp, Homo sapiens
atctatgtgaaaaaa

SEQ ID NO: 116491 - DNA, 15 bp, Homo sapiens
aatctatgtgaaaaa

SEQ ID NO: 116492 - DNA, 15 bp, Homo sapiens
taatctatgtgaaaa

SEQ ID NO: 116493 - DNA, 15 bp, Homo sapiens
ataatctatgtgaaa

SEQ ID NO: 116494 - DNA, 15 bp, Homo sapiens
aataatctatgtgaa

SEQ ID NO: 116495 - DNA, 15 bp, Homo sapiens
aaataatctatgtga

SEQ ID NO: 116496 - DNA, 15 bp, Homo sapiens
taaataatctatgtg

SEQ ID NO: 116497 - DNA, 15 bp, Homo sapiens
ataaataatctatgt

SEQ ID NO: 116498 - DNA, 15 bp, Homo sapiens
aataaataatctatg

SEQ ID NO: 116499 - DNA, 15 bp, Homo sapiens
aaataaataatctat

SEQ ID NO: 116500 - DNA, 15 bp, Homo sapiens
aaaataaataatcta

SEQ ID NO: 116501 - DNA, 15 bp, Homo sapiens
taaaataaataatct

SEQ ID NO: 116502 - DNA, 15 bp, Homo sapiens
ttaaaataaataatc

SEQ ID NO: 116503 - DNA, 15 bp, Homo sapiens
tttaaaataaataat

SEQ ID NO: 116504 - DNA, 15 bp, Homo sapiens
ttttaaaataaataa

SEQ ID NO: 116505 - DNA, 15 bp, Homo sapiens
attttaaaataaata

SEQ ID NO: 116506 - DNA, 15 bp, Homo sapiens
tattttaaaataaat

SEQ ID NO: 116507 - DNA, 15 bp, Homo sapiens
ttattttaaaataaa

SEQ ID NO: 116508 - DNA, 15 bp, Homo sapiens
gttattttaaaataa

SEQ ID NO: 116509 - DNA, 15 bp, Homo sapiens
agttattttaaaata

SEQ ID NO: 116510 - DNA, 15 bp, Homo sapiens
cagttattttaaaat

SEQ ID NO: 116511 - DNA, 15 bp, Homo sapiens
tcagttattttaaaa

SEQ ID NO: 116512 - DNA, 15 bp, Homo sapiens
ttcagttattttaaa

SEQ ID NO: 116513 - DNA, 15 bp, Homo sapiens
attcagttattttaa

SEQ ID NO: 116514 - DNA, 15 bp, Homo sapiens
tattcagttatttta

SEQ ID NO: 116515 - DNA, 15 bp, Homo sapiens
ctattcagttatttt

SEQ ID NO: 116516 - DNA, 15 bp, Homo sapiens
cctattcagttattt

SEQ ID NO: 116517 - DNA, 15 bp, Homo sapiens
ccctattcagttatt

SEQ ID NO: 116518 - DNA, 15 bp, Homo sapiens
tccctattcagttat

SEQ ID NO: 116519 - DNA, 15 bp, Homo sapiens
ctccctattcagtta

SEQ ID NO: 116520 - DNA, 15 bp, Homo sapiens
tctccctattcagtt

SEQ ID NO: 116521 - DNA, 15 bp, Homo sapiens
ttctccctattcagt

SEQ ID NO: 116522 - DNA, 15 bp, Homo sapiens
gttctccctattcag

SEQ ID NO: 116523 - DNA, 15 bp, Homo sapiens
agttctccctattca

SEQ ID NO: 116524 - DNA, 15 bp, Homo sapiens
aagttctccctattc

SEQ ID NO: 116525 - DNA, 15 bp, Homo sapiens
gaagttctccctatt

SEQ ID NO: 116526 - DNA, 15 bp, Homo sapiens
agaagttctccctat

SEQ ID NO: 116527 - DNA, 15 bp, Homo sapiens
aagaagttctcccta

SEQ ID NO: 116528 - DNA, 15 bp, Homo sapiens
taagaagttctccct

SEQ ID NO: 116529 - DNA, 15 bp, Homo sapiens
ataagaagttctccc

SEQ ID NO: 116530 - DNA, 15 bp, Homo sapiens
aataagaagttctcc

SEQ ID NO: 116531 - DNA, 15 bp, Homo sapiens
gaataagaagttctc

SEQ ID NO: 116532 - DNA, 15 bp, Homo sapiens
agaataagaagttct

SEQ ID NO: 116533 - DNA, 15 bp, Homo sapiens
aagaataagaagttc

SEQ ID NO: 116534 - DNA, 15 bp, Homo sapiens
taagaataagaagtt

SEQ ID NO: 116535 - DNA, 15 bp, Homo sapiens
gtaagaataagaagt

SEQ ID NO: 116536 - DNA, 15 bp, Homo sapiens
agtaagaataagaag

SEQ ID NO: 116537 - DNA, 15 bp, Homo sapiens
aagtaagaataagaa

SEQ ID NO: 116538 - DNA, 15 bp, Homo sapiens
aaagtaagaataaga

SEQ ID NO: 116539 - DNA, 15 bp, Homo sapiens
taaagtaagaataag

SEQ ID NO: 116540 - DNA, 15 bp, Homo sapiens
ttaaagtaagaataa

SEQ ID NO: 116541 - DNA, 15 bp, Homo sapiens
tttaaagtaagaata

SEQ ID NO: 116542 - DNA, 15 bp, Homo sapiens
ttttaaagtaagaat

SEQ ID NO: 116543 - DNA, 15 bp, Homo sapiens
tttttaaagtaagaa

SEQ ID NO: 116544 - DNA, 15 bp, Homo sapiens
atttttaaagtaaga

SEQ ID NO: 116545 - DNA, 15 bp, Homo sapiens
aatttttaaagtaag

SEQ ID NO: 116546 - DNA, 15 bp, Homo sapiens
caatttttaaagtaa

SEQ ID NO: 116547 - DNA, 15 bp, Homo sapiens
acaatttttaaagta

SEQ ID NO: 116548 - DNA, 15 bp, Homo sapiens
cacaatttttaaagt

SEQ ID NO: 116549 - DNA, 15 bp, Homo sapiens
tcacaatttttaaag

SEQ ID NO: 116550 - DNA, 15 bp, Homo sapiens
atcacaatttttaaa

SEQ ID NO: 116551 - DNA, 15 bp, Homo sapiens
aatcacaatttttaa

SEQ ID NO: 116552 - DNA, 15 bp, Homo sapiens
taatcacaattttta

SEQ ID NO: 116553 - DNA, 15 bp, Homo sapiens
ctaatcacaattttt

SEQ ID NO: 116554 - DNA, 15 bp, Homo sapiens
tctaatcacaatttt

SEQ ID NO: 116555 - DNA, 15 bp, Homo sapiens
ttctaatcacaattt

SEQ ID NO: 116556 - DNA, 15 bp, Homo sapiens
cttctaatcacaatt

SEQ ID NO: 116557 - DNA, 15 bp, Homo sapiens
acttctaatcacaat

SEQ ID NO: 116558 - DNA, 15 bp, Homo sapiens
cacttctaatcacaa

SEQ ID NO: 116559 - DNA, 15 bp, Homo sapiens
tcacttctaatcaca

SEQ ID NO: 116560 - DNA, 15 bp, Homo sapiens
gtcacttctaatcac

SEQ ID NO: 116561 - DNA, 15 bp, Homo sapiens
agtcacttctaatca

SEQ ID NO: 116562 - DNA, 15 bp, Homo sapiens
aagtcacttctaatc

SEQ ID NO: 116563 - DNA, 15 bp, Homo sapiens
aaagtcacttctaat

SEQ ID NO: 116564 - DNA, 15 bp, Homo sapiens
aaaagtcacttctaa

SEQ ID NO: 116565 - DNA, 15 bp, Homo sapiens
taaaagtcacttcta

SEQ ID NO: 116566 - DNA, 15 bp, Homo sapiens
ataaaagtcacttct

SEQ ID NO: 116567 - DNA, 15 bp, Homo sapiens
aataaaagtcacttc

SEQ ID NO: 116568 - DNA, 15 bp, Homo sapiens
aaataaaagtcactt

SEQ ID NO: 116569 - DNA, 15 bp, Homo sapiens
taaataaaagtcact

SEQ ID NO: 116570 - DNA, 15 bp, Homo sapiens
ataaataaaagtcac

SEQ ID NO: 116571 - DNA, 15 bp, Homo sapiens
aataaataaaagtca

SEQ ID NO: 116572 - DNA, 15 bp, Homo sapiens
aaataaataaaagtc

SEQ ID NO: 116573 - DNA, 15 bp, Homo sapiens
gaaataaataaaagt

SEQ ID NO: 116574 - DNA, 15 bp, Homo sapiens
agaaataaataaaag

SEQ ID NO: 116575 - DNA, 15 bp, Homo sapiens
gagaaataaataaaa

SEQ ID NO: 116576 - DNA, 15 bp, Homo sapiens
tgagaaataaataaa

SEQ ID NO: 116577 - DNA, 15 bp, Homo sapiens
ctgagaaataaataa

SEQ ID NO: 116578 - DNA, 15 bp, Homo sapiens
actgagaaataaata

SEQ ID NO: 116579 - DNA, 15 bp, Homo sapiens
aactgagaaataaat

SEQ ID NO: 116580 - DNA, 15 bp, Homo sapiens
aaactgagaaataaa

SEQ ID NO: 116581 - DNA, 15 bp, Homo sapiens
aaaactgagaaataa

SEQ ID NO: 116582 - DNA, 15 bp, Homo sapiens
taaaactgagaaata

SEQ ID NO: 116583 - DNA, 15 bp, Homo sapiens
ataaaactgagaaat

SEQ ID NO: 116584 - DNA, 15 bp, Homo sapiens
cataaaactgagaaa

SEQ ID NO: 116585 - DNA, 15 bp, Homo sapiens
acataaaactgagaa

SEQ ID NO: 116586 - DNA, 15 bp, Homo sapiens
cacataaaactgaga

SEQ ID NO: 116587 - DNA, 15 bp, Homo sapiens
tcacataaaactgag

SEQ ID NO: 116588 - DNA, 15 bp, Homo sapiens
atcacataaaactga

SEQ ID NO: 116589 - DNA, 15 bp, Homo sapiens
tatcacataaaactg

SEQ ID NO: 116590 - DNA, 15 bp, Homo sapiens
ctatcacataaaact

SEQ ID NO: 116591 - DNA, 15 bp, Homo sapiens
tctatcacataaaac

SEQ ID NO: 116592 - DNA, 15 bp, Homo sapiens
ttctatcacataaaa

SEQ ID NO: 116593 - DNA, 15 bp, Homo sapiens
attctatcacataaa

SEQ ID NO: 116594 - DNA, 15 bp, Homo sapiens
tattctatcacataa

SEQ ID NO: 116595 - DNA, 15 bp, Homo sapiens
atattctatcacata

SEQ ID NO: 116596 - DNA, 15 bp, Homo sapiens
catattctatcacat

SEQ ID NO: 116597 - DNA, 15 bp, Homo sapiens
gcatattctatcaca

SEQ ID NO: 116598 - DNA, 15 bp, Homo sapiens
tgcatattctatcac

SEQ ID NO: 116599 - DNA, 15 bp, Homo sapiens
ctgcatattctatca

SEQ ID NO: 116600 - DNA, 15 bp, Homo sapiens
gctgcatattctatc

SEQ ID NO: 116601 - DNA, 15 bp, Homo sapiens
tgctgcatattctat

SEQ ID NO: 116602 - DNA, 15 bp, Homo sapiens
atgctgcatattcta

SEQ ID NO: 116603 - DNA, 15 bp, Homo sapiens
catgctgcatattct

SEQ ID NO: 116604 - DNA, 15 bp, Homo sapiens
acatgctgcatattc

SEQ ID NO: 116605 - DNA, 15 bp, Homo sapiens
cacatgctgcatatt

SEQ ID NO: 116606 - DNA, 15 bp, Homo sapiens
tcacatgctgcatat

SEQ ID NO: 116607 - DNA, 15 bp, Homo sapiens
atcacatgctgcata

SEQ ID NO: 116608 - DNA, 15 bp, Homo sapiens
catcacatgctgcat

SEQ ID NO: 116609 - DNA, 15 bp, Homo sapiens
gcatcacatgctgca

SEQ ID NO: 116610 - DNA, 15 bp, Homo sapiens
tgcatcacatgctgc

SEQ ID NO: 116611 - DNA, 15 bp, Homo sapiens
ttgcatcacatgctg

SEQ ID NO: 116612 - DNA, 15 bp, Homo sapiens
gttgcatcacatgct

SEQ ID NO: 116613 - DNA, 15 bp, Homo sapiens
agttgcatcacatgc

SEQ ID NO: 116614 - DNA, 15 bp, Homo sapiens
aagttgcatcacatg

SEQ ID NO: 116615 - DNA, 15 bp, Homo sapiens
taagttgcatcacat

SEQ ID NO: 116616 - DNA, 15 bp, Homo sapiens
gtaagttgcatcaca

SEQ ID NO: 116617 - DNA, 15 bp, Homo sapiens
tgtaagttgcatcac

SEQ ID NO: 116618 - DNA, 15 bp, Homo sapiens
ttgtaagttgcatca

SEQ ID NO: 116619 - DNA, 15 bp, Homo sapiens
attgtaagttgcatc

SEQ ID NO: 116620 - DNA, 15 bp, Homo sapiens
cattgtaagttgcat

SEQ ID NO: 116621 - DNA, 15 bp, Homo sapiens
tcattgtaagttgca

SEQ ID NO: 116622 - DNA, 15 bp, Homo sapiens
ttcattgtaagttgc

SEQ ID NO: 116623 - DNA, 15 bp, Homo sapiens
tttcattgtaagttg

SEQ ID NO: 116624 - DNA, 15 bp, Homo sapiens
atttcattgtaagtt

SEQ ID NO: 116625 - DNA, 15 bp, Homo sapiens
aatttcattgtaagt

SEQ ID NO: 116626 - DNA, 15 bp, Homo sapiens
caatttcattgtaag

SEQ ID NO: 116627 - DNA, 15 bp, Homo sapiens
acaatttcattgtaa

SEQ ID NO: 116628 - DNA, 15 bp, Homo sapiens
gacaatttcattgta

SEQ ID NO: 116629 - DNA, 15 bp, Homo sapiens
tgacaatttcattgt

SEQ ID NO: 116630 - DNA, 15 bp, Homo sapiens
gtgacaatttcattg

SEQ ID NO: 116631 - DNA, 15 bp, Homo sapiens
tgtgacaatttcatt

SEQ ID NO: 116632 - DNA, 15 bp, Homo sapiens
ttgtgacaatttcat

SEQ ID NO: 116633 - DNA, 15 bp, Homo sapiens
attgtgacaatttca

SEQ ID NO: 116634 - DNA, 15 bp, Homo sapiens
aattgtgacaatttc

SEQ ID NO: 116635 - DNA, 15 bp, Homo sapiens
caattgtgacaattt

SEQ ID NO: 116636 - DNA, 15 bp, Homo sapiens
tcaattgtgacaatt

SEQ ID NO: 116637 - DNA, 15 bp, Homo sapiens
ttcaattgtgacaat

SEQ ID NO: 116638 - DNA, 15 bp, Homo sapiens
gttcaattgtgacaa

SEQ ID NO: 116639 - DNA, 15 bp, Homo sapiens
cgttcaattgtgaca

SEQ ID NO: 116640 - DNA, 15 bp, Homo sapiens
acgttcaattgtgac

SEQ ID NO: 116641 - DNA, 15 bp, Homo sapiens
gacgttcaattgtga

SEQ ID NO: 116642 - DNA, 15 bp, Homo sapiens
agacgttcaattgtg

SEQ ID NO: 116643 - DNA, 15 bp, Homo sapiens
tagacgttcaattgt

SEQ ID NO: 116644 - DNA, 15 bp, Homo sapiens
ttagacgttcaattg

SEQ ID NO: 116645 - DNA, 15 bp, Homo sapiens
cttagacgttcaatt

SEQ ID NO: 116646 - DNA, 15 bp, Homo sapiens
tcttagacgttcaat

SEQ ID NO: 116647 - DNA, 15 bp, Homo sapiens
atcttagacgttcaa

SEQ ID NO: 116648 - DNA, 15 bp, Homo sapiens
gatcttagacgttca

SEQ ID NO: 116649 - DNA, 15 bp, Homo sapiens
agatcttagacgttc

SEQ ID NO: 116650 - DNA, 15 bp, Homo sapiens
cagatcttagacgtt

SEQ ID NO: 116651 - DNA, 15 bp, Homo sapiens
acagatcttagacgt

SEQ ID NO: 116652 - DNA, 15 bp, Homo sapiens
aacagatcttagacg

SEQ ID NO: 116653 - DNA, 15 bp, Homo sapiens
taacagatcttagac

SEQ ID NO: 116654 - DNA, 15 bp, Homo sapiens
ttaacagatcttaga

SEQ ID NO: 116655 - DNA, 15 bp, Homo sapiens
attaacagatcttag

SEQ ID NO: 116656 - DNA, 15 bp, Homo sapiens
gattaacagatctta

SEQ ID NO: 116657 - DNA, 15 bp, Homo sapiens
ggattaacagatctt

SEQ ID NO: 116658 - DNA, 15 bp, Homo sapiens
gggattaacagatct

SEQ ID NO: 116659 - DNA, 15 bp, Homo sapiens
tgggattaacagatc

SEQ ID NO: 116660 - DNA, 15 bp, Homo sapiens
ttgggattaacagat

SEQ ID NO: 116661 - DNA, 15 bp, Homo sapiens
gttgggattaacaga

SEQ ID NO: 116662 - DNA, 15 bp, Homo sapiens
tgttgggattaacag

SEQ ID NO: 116663 - DNA, 15 bp, Homo sapiens
ttgttgggattaaca

SEQ ID NO: 116664 - DNA, 15 bp, Homo sapiens
tttgttgggattaac

SEQ ID NO: 116665 - DNA, 15 bp, Homo sapiens
gtttgttgggattaa

SEQ ID NO: 116666 - DNA, 15 bp, Homo sapiens
ggtttgttgggatta

SEQ ID NO: 116667 - DNA, 15 bp, Homo sapiens
aggtttgttgggatt

SEQ ID NO: 116668 - DNA, 15 bp, Homo sapiens
caggtttgttgggat

SEQ ID NO: 116669 - DNA, 15 bp, Homo sapiens
gcaggtttgttggga

SEQ ID NO: 116670 - DNA, 15 bp, Homo sapiens
ggcaggtttgttggg

SEQ ID NO: 116671 - DNA, 15 bp, Homo sapiens
tggcaggtttgttgg

SEQ ID NO: 116672 - DNA, 15 bp, Homo sapiens
gtggcaggtttgttg

SEQ ID NO: 116673 - DNA, 15 bp, Homo sapiens
tgtggcaggtttgtt

SEQ ID NO: 116674 - DNA, 15 bp, Homo sapiens
ttgtggcaggtttgt

SEQ ID NO: 116675 - DNA, 15 bp, Homo sapiens
tttgtggcaggtttg

SEQ ID NO: 116676 - DNA, 15 bp, Homo sapiens
ttttgtggcaggttt

SEQ ID NO: 116677 - DNA, 15 bp, Homo sapiens
cttttgtggcaggtt

SEQ ID NO: 116678 - DNA, 15 bp, Homo sapiens
tcttttgtggcaggt

SEQ ID NO: 116679 - DNA, 15 bp, Homo sapiens
atcttttgtggcagg

SEQ ID NO: 116680 - DNA, 15 bp, Homo sapiens
tatcttttgtggcag

SEQ ID NO: 116681 - DNA, 15 bp, Homo sapiens
gtatcttttgtggca

SEQ ID NO: 116682 - DNA, 15 bp, Homo sapiens
agtatcttttgtggc

SEQ ID NO: 116683 - DNA, 15 bp, Homo sapiens
aagtatcttttgtgg

SEQ ID NO: 116684 - DNA, 15 bp, Homo sapiens
aaagtatcttttgtg

SEQ ID NO: 116685 - DNA, 15 bp, Homo sapiens
gaaagtatcttttgt

SEQ ID NO: 116686 - DNA, 15 bp, Homo sapiens
ggaaagtatcttttg

SEQ ID NO: 116687 - DNA, 15 bp, Homo sapiens
tggaaagtatctttt

SEQ ID NO: 116688 - DNA, 15 bp, Homo sapiens
atggaaagtatcttt

SEQ ID NO: 116689 - DNA, 15 bp, Homo sapiens
tatggaaagtatctt

SEQ ID NO: 116690 - DNA, 15 bp, Homo sapiens
ttatggaaagtatct

SEQ ID NO: 116691 - DNA, 15 bp, Homo sapiens
cttatggaaagtatc

SEQ ID NO: 116692 - DNA, 15 bp, Homo sapiens
tcttatggaaagtat

SEQ ID NO: 116693 - DNA, 15 bp, Homo sapiens
atcttatggaaagta

SEQ ID NO: 116694 - DNA, 15 bp, Homo sapiens
gatcttatggaaagt

SEQ ID NO: 116695 - DNA, 15 bp, Homo sapiens
tgatcttatggaaag

SEQ ID NO: 116696 - DNA, 15 bp, Homo sapiens
ttgatcttatggaaa

SEQ ID NO: 116697 - DNA, 15 bp, Homo sapiens
cttgatcttatggaa

SEQ ID NO: 116698 - DNA, 15 bp, Homo sapiens
gcttgatcttatgga

SEQ ID NO: 116699 - DNA, 15 bp, Homo sapiens
agcttgatcttatgg

SEQ ID NO: 116700 - DNA, 15 bp, Homo sapiens
cagcttgatcttatg

SEQ ID NO: 116701 - DNA, 15 bp, Homo sapiens
ccagcttgatcttat

SEQ ID NO: 116702 - DNA, 15 bp, Homo sapiens
tccagcttgatctta

SEQ ID NO: 116703 - DNA, 15 bp, Homo sapiens
atccagcttgatctt

SEQ ID NO: 116704 - DNA, 15 bp, Homo sapiens
catccagcttgatct

SEQ ID NO: 116705 - DNA, 15 bp, Homo sapiens
acatccagcttgatc

SEQ ID NO: 116706 - DNA, 15 bp, Homo sapiens
cacatccagcttgat

SEQ ID NO: 116707 - DNA, 15 bp, Homo sapiens
gcacatccagcttga

SEQ ID NO: 116708 - DNA, 15 bp, Homo sapiens
ggcacatccagcttg

SEQ ID NO: 116709 - DNA, 15 bp, Homo sapiens
tggcacatccagctt

SEQ ID NO: 116710 - DNA, 15 bp, Homo sapiens
ctggcacatccagct

SEQ ID NO: 116711 - DNA, 15 bp, Homo sapiens
tctggcacatccagc

SEQ ID NO: 116712 - DNA, 15 bp, Homo sapiens
ttctggcacatccag

SEQ ID NO: 116713 - DNA, 15 bp, Homo sapiens
cttctggcacatcca

SEQ ID NO: 116714 - DNA, 15 bp, Homo sapiens
tcttctggcacatcc

SEQ ID NO: 116715 - DNA, 15 bp, Homo sapiens
gtcttctggcacatc

SEQ ID NO: 116716 - DNA, 15 bp, Homo sapiens
agtcttctggcacat

SEQ ID NO: 116717 - DNA, 15 bp, Homo sapiens
aagtcttctggcaca

SEQ ID NO: 116718 - DNA, 15 bp, Homo sapiens
taagtcttctggcac

SEQ ID NO: 116719 - DNA, 15 bp, Homo sapiens
gtaagtcttctggca

SEQ ID NO: 116720 - DNA, 15 bp, Homo sapiens
cgtaagtcttctggc

SEQ ID NO: 116721 - DNA, 15 bp, Homo sapiens
ccgtaagtcttctgg

SEQ ID NO: 116722 - DNA, 15 bp, Homo sapiens
gccgtaagtcttctg

SEQ ID NO: 116723 - DNA, 15 bp, Homo sapiens
tgccgtaagtcttct

SEQ ID NO: 116724 - DNA, 15 bp, Homo sapiens
ttgccgtaagtcttc

SEQ ID NO: 116725 - DNA, 15 bp, Homo sapiens
tttgccgtaagtctt

SEQ ID NO: 116726 - DNA, 15 bp, Homo sapiens
atttgccgtaagtct

SEQ ID NO: 116727 - DNA, 15 bp, Homo sapiens
catttgccgtaagtc

SEQ ID NO: 116728 - DNA, 15 bp, Homo sapiens
acatttgccgtaagt

SEQ ID NO: 116729 - DNA, 15 bp, Homo sapiens
tacatttgccgtaag

SEQ ID NO: 116730 - DNA, 15 bp, Homo sapiens
ttacatttgccgtaa

SEQ ID NO: 116731 - DNA, 15 bp, Homo sapiens
cttacatttgccgta

SEQ ID NO: 116732 - DNA, 15 bp, Homo sapiens
acttacatttgccgt

SEQ ID NO: 116733 - DNA, 15 bp, Homo sapiens
aacttacatttgccg

SEQ ID NO: 116734 - DNA, 15 bp, Homo sapiens
caacttacatttgcc

SEQ ID NO: 116735 - DNA, 15 bp, Homo sapiens
tcaacttacatttgc

SEQ ID NO: 116736 - DNA, 15 bp, Homo sapiens
atcaacttacatttg

SEQ ID NO: 116737 - DNA, 15 bp, Homo sapiens
tatcaacttacattt

SEQ ID NO: 116738 - DNA, 15 bp, Homo sapiens
gtatcaacttacatt

SEQ ID NO: 116739 - DNA, 15 bp, Homo sapiens
tgtatcaacttacat

SEQ ID NO: 116740 - DNA, 15 bp, Homo sapiens
gtgtatcaacttaca

SEQ ID NO: 116741 - DNA, 15 bp, Homo sapiens
tgtgtatcaacttac

SEQ ID NO: 116742 - DNA, 15 bp, Homo sapiens
ttgtgtatcaactta

SEQ ID NO: 116743 - DNA, 15 bp, Homo sapiens
cttgtgtatcaactt

SEQ ID NO: 116744 - DNA, 15 bp, Homo sapiens
tcttgtgtatcaact

SEQ ID NO: 116745 - DNA, 15 bp, Homo sapiens
ttcttgtgtatcaac

SEQ ID NO: 116746 - DNA, 15 bp, Homo sapiens
tttcttgtgtatcaa

SEQ ID NO: 116747 - DNA, 15 bp, Homo sapiens
atttcttgtgtatca

SEQ ID NO: 116748 - DNA, 15 bp, Homo sapiens
catttcttgtgtatc

SEQ ID NO: 116749 - DNA, 15 bp, Homo sapiens
gcatttcttgtgtat

SEQ ID NO: 116750 - DNA, 15 bp, Homo sapiens
agcatttcttgtgta

SEQ ID NO: 116751 - DNA, 15 bp, Homo sapiens
cagcatttcttgtgt

SEQ ID NO: 116752 - DNA, 15 bp, Homo sapiens
tcagcatttcttgtg

SEQ ID NO: 116753 - DNA, 15 bp, Homo sapiens
ctcagcatttcttgt

SEQ ID NO: 116754 - DNA, 15 bp, Homo sapiens
tctcagcatttcttg

SEQ ID NO: 116755 - DNA, 15 bp, Homo sapiens
ttctcagcatttctt

SEQ ID NO: 116756 - DNA, 15 bp, Homo sapiens
gttctcagcatttct

SEQ ID NO: 116757 - DNA, 15 bp, Homo sapiens
agttctcagcatttc

SEQ ID NO: 116758 - DNA, 15 bp, Homo sapiens
aagttctcagcattt

SEQ ID NO: 116759 - DNA, 15 bp, Homo sapiens
caagttctcagcatt

SEQ ID NO: 116760 - DNA, 15 bp, Homo sapiens
ccaagttctcagcat

SEQ ID NO: 116761 - DNA, 15 bp, Homo sapiens
tccaagttctcagca

SEQ ID NO: 116762 - DNA, 15 bp, Homo sapiens
ttccaagttctcagc

SEQ ID NO: 116763 - DNA, 15 bp, Homo sapiens
cttccaagttctcag

SEQ ID NO: 116764 - DNA, 15 bp, Homo sapiens
acttccaagttctca

SEQ ID NO: 116765 - DNA, 15 bp, Homo sapiens
cacttccaagttctc

SEQ ID NO: 116766 - DNA, 15 bp, Homo sapiens
tcacttccaagttct

SEQ ID NO: 116767 - DNA, 15 bp, Homo sapiens
atcacttccaagttc

SEQ ID NO: 116768 - DNA, 15 bp, Homo sapiens
tatcacttccaagtt

SEQ ID NO: 116769 - DNA, 15 bp, Homo sapiens
atatcacttccaagt

SEQ ID NO: 116770 - DNA, 15 bp, Homo sapiens
catatcacttccaag

SEQ ID NO: 116771 - DNA, 15 bp, Homo sapiens
gcatatcacttccaa

SEQ ID NO: 116772 - DNA, 15 bp, Homo sapiens
tgcatatcacttcca

SEQ ID NO: 116773 - DNA, 15 bp, Homo sapiens
ttgcatatcacttcc

SEQ ID NO: 116774 - DNA, 15 bp, Homo sapiens
attgcatatcacttc

SEQ ID NO: 116775 - DNA, 15 bp, Homo sapiens
aattgcatatcactt

SEQ ID NO: 116776 - DNA, 15 bp, Homo sapiens
taattgcatatcact

SEQ ID NO: 116777 - DNA, 15 bp, Homo sapiens
ctaattgcatatcac

SEQ ID NO: 116778 - DNA, 15 bp, Homo sapiens
actaattgcatatca

SEQ ID NO: 116779 - DNA, 15 bp, Homo sapiens
aactaattgcatatc

SEQ ID NO: 116780 - DNA, 15 bp, Homo sapiens
aaactaattgcatat

SEQ ID NO: 116781 - DNA, 15 bp, Homo sapiens
taaactaattgcata

SEQ ID NO: 116782 - DNA, 15 bp, Homo sapiens
ctaaactaattgcat

SEQ ID NO: 116783 - DNA, 15 bp, Homo sapiens
tctaaactaattgca

SEQ ID NO: 116784 - DNA, 15 bp, Homo sapiens
ttctaaactaattgc

SEQ ID NO: 116785 - DNA, 15 bp, Homo sapiens
cttctaaactaattg

SEQ ID NO: 116786 - DNA, 15 bp, Homo sapiens
tcttctaaactaatt

SEQ ID NO: 116787 - DNA, 15 bp, Homo sapiens
ttcttctaaactaat

SEQ ID NO: 116788 - DNA, 15 bp, Homo sapiens
attcttctaaactaa

SEQ ID NO: 116789 - DNA, 15 bp, Homo sapiens
aattcttctaaacta

SEQ ID NO: 116790 - DNA, 15 bp, Homo sapiens
aaattcttctaaact

SEQ ID NO: 116791 - DNA, 15 bp, Homo sapiens
gaaattcttctaaac

SEQ ID NO: 116792 - DNA, 15 bp, Homo sapiens
agaaattcttctaaa

SEQ ID NO: 116793 - DNA, 15 bp, Homo sapiens
tagaaattcttctaa

SEQ ID NO: 116794 - DNA, 15 bp, Homo sapiens
ctagaaattcttcta

SEQ ID NO: 116795 - DNA, 15 bp, Homo sapiens
actagaaattcttct

SEQ ID NO: 116796 - DNA, 15 bp, Homo sapiens
tactagaaattcttc

SEQ ID NO: 116797 - DNA, 15 bp, Homo sapiens
ctactagaaattctt

SEQ ID NO: 116798 - DNA, 15 bp, Homo sapiens
actactagaaattct

SEQ ID NO: 116799 - DNA, 15 bp, Homo sapiens
aactactagaaattc

SEQ ID NO: 116800 - DNA, 15 bp, Homo sapiens
aaactactagaaatt

SEQ ID NO: 116801 - DNA, 15 bp, Homo sapiens
taaactactagaaat

SEQ ID NO: 116802 - DNA, 15 bp, Homo sapiens
ttaaactactagaaa

SEQ ID NO: 116803 - DNA, 15 bp, Homo sapiens
tttaaactactagaa

SEQ ID NO: 116804 - DNA, 15 bp, Homo sapiens
ttttaaactactaga

SEQ ID NO: 116805 - DNA, 15 bp, Homo sapiens
attttaaactactag

SEQ ID NO: 116806 - DNA, 15 bp, Homo sapiens
aattttaaactacta

SEQ ID NO: 116807 - DNA, 15 bp, Homo sapiens
aaattttaaactact

SEQ ID NO: 116808 - DNA, 15 bp, Homo sapiens
aaaattttaaactac

SEQ ID NO: 116809 - DNA, 15 bp, Homo sapiens
aaaaattttaaacta

SEQ ID NO: 116810 - DNA, 15 bp, Homo sapiens
aaaaaattttaaact

SEQ ID NO: 116811 - DNA, 15 bp, Homo sapiens
taaaaaattttaaac

SEQ ID NO: 116812 - DNA, 15 bp, Homo sapiens
ttaaaaaattttaaa

SEQ ID NO: 116813 - DNA, 15 bp, Homo sapiens
tttaaaaaattttaa

SEQ ID NO: 116814 - DNA, 15 bp, Homo sapiens
gtttaaaaaatttta

SEQ ID NO: 116815 - DNA, 15 bp, Homo sapiens
agtttaaaaaatttt

SEQ ID NO: 116816 - DNA, 15 bp, Homo sapiens
tagtttaaaaaattt

SEQ ID NO: 116817 - DNA, 15 bp, Homo sapiens
gtagtttaaaaaatt

SEQ ID NO: 116818 - DNA, 15 bp, Homo sapiens
agtagtttaaaaaat

SEQ ID NO: 116819 - DNA, 15 bp, Homo sapiens
tagtagtttaaaaaa

SEQ ID NO: 116820 - DNA, 15 bp, Homo sapiens
ctagtagtttaaaaa

SEQ ID NO: 116821 - DNA, 15 bp, Homo sapiens
tctagtagtttaaaa

SEQ ID NO: 116822 - DNA, 15 bp, Homo sapiens
ttctagtagtttaaa

SEQ ID NO: 116823 - DNA, 15 bp, Homo sapiens
tttctagtagtttaa

SEQ ID NO: 116824 - DNA, 15 bp, Homo sapiens
atttctagtagttta

SEQ ID NO: 116825 - DNA, 15 bp, Homo sapiens
aatttctagtagttt

SEQ ID NO: 116826 - DNA, 15 bp, Homo sapiens
caatttctagtagtt

SEQ ID NO: 116827 - DNA, 15 bp, Homo sapiens
tcaatttctagtagt

SEQ ID NO: 116828 - DNA, 15 bp, Homo sapiens
atcaatttctagtag

SEQ ID NO: 116829 - DNA, 15 bp, Homo sapiens
aatcaatttctagta

SEQ ID NO: 116830 - DNA, 15 bp, Homo sapiens
aaatcaatttctagt

SEQ ID NO: 116831 - DNA, 15 bp, Homo sapiens
aaaatcaatttctag

SEQ ID NO: 116832 - DNA, 15 bp, Homo sapiens
taaaatcaatttcta

SEQ ID NO: 116833 - DNA, 15 bp, Homo sapiens
ttaaaatcaatttct

SEQ ID NO: 116834 - DNA, 15 bp, Homo sapiens
tttaaaatcaatttc

SEQ ID NO: 116835 - DNA, 15 bp, Homo sapiens
atttaaaatcaattt

SEQ ID NO: 116836 - DNA, 15 bp, Homo sapiens
aatttaaaatcaatt

SEQ ID NO: 116837 - DNA, 15 bp, Homo sapiens
aaatttaaaatcaat

SEQ ID NO: 116838 - DNA, 15 bp, Homo sapiens
caaatttaaaatcaa

SEQ ID NO: 116839 - DNA, 15 bp, Homo sapiens
ccaaatttaaaatca

SEQ ID NO: 116840 - DNA, 15 bp, Homo sapiens
accaaatttaaaatc

SEQ ID NO: 116841 - DNA, 15 bp, Homo sapiens
caccaaatttaaaat

SEQ ID NO: 116842 - DNA, 15 bp, Homo sapiens
ccaccaaatttaaaa

SEQ ID NO: 116843 - DNA, 15 bp, Homo sapiens
tccaccaaatttaaa

SEQ ID NO: 116844 - DNA, 15 bp, Homo sapiens
gtccaccaaatttaa

SEQ ID NO: 116845 - DNA, 15 bp, Homo sapiens
agtccaccaaattta

SEQ ID NO: 116846 - DNA, 15 bp, Homo sapiens
aagtccaccaaattt

SEQ ID NO: 116847 - DNA, 15 bp, Homo sapiens
aaagtccaccaaatt

SEQ ID NO: 116848 - DNA, 15 bp, Homo sapiens
caaagtccaccaaat

SEQ ID NO: 116849 - DNA, 15 bp, Homo sapiens
ccaaagtccaccaaa

SEQ ID NO: 116850 - DNA, 15 bp, Homo sapiens
gccaaagtccaccaa

SEQ ID NO: 116851 - DNA, 15 bp, Homo sapiens
tgccaaagtccacca

SEQ ID NO: 116852 - DNA, 15 bp, Homo sapiens
ttgccaaagtccacc

SEQ ID NO: 116853 - DNA, 15 bp, Homo sapiens
tttgccaaagtccac

SEQ ID NO: 116854 - DNA, 15 bp, Homo sapiens
ttttgccaaagtcca

SEQ ID NO: 116855 - DNA, 15 bp, Homo sapiens
tttttgccaaagtcc

SEQ ID NO: 116856 - DNA, 15 bp, Homo sapiens
atttttgccaaagtc

SEQ ID NO: 116857 - DNA, 15 bp, Homo sapiens
catttttgccaaagt

SEQ ID NO: 116858 - DNA, 15 bp, Homo sapiens
ccatttttgccaaag

SEQ ID NO: 116859 - DNA, 15 bp, Homo sapiens
accatttttgccaaa

SEQ ID NO: 116860 - DNA, 15 bp, Homo sapiens
aaccatttttgccaa

SEQ ID NO: 116861 - DNA, 15 bp, Homo sapiens
aaaccatttttgcca

SEQ ID NO: 116862 - DNA, 15 bp, Homo sapiens
caaaccatttttgcc

SEQ ID NO: 116863 - DNA, 15 bp, Homo sapiens
ccaaaccatttttgc

SEQ ID NO: 116864 - DNA, 15 bp, Homo sapiens
accaaaccatttttg

SEQ ID NO: 116865 - DNA, 15 bp, Homo sapiens
aaccaaaccattttt

SEQ ID NO: 116866 - DNA, 15 bp, Homo sapiens
aaaccaaaccatttt

SEQ ID NO: 116867 - DNA, 15 bp, Homo sapiens
caaaccaaaccattt

SEQ ID NO: 116868 - DNA, 15 bp, Homo sapiens
gcaaaccaaaccatt

SEQ ID NO: 116869 - DNA, 15 bp, Homo sapiens
tgcaaaccaaaccat

SEQ ID NO: 116870 - DNA, 15 bp, Homo sapiens
ttgcaaaccaaacca

SEQ ID NO: 116871 - DNA, 15 bp, Homo sapiens
cttgcaaaccaaacc

SEQ ID NO: 116872 - DNA, 15 bp, Homo sapiens
tcttgcaaaccaaac

SEQ ID NO: 116873 - DNA, 15 bp, Homo sapiens
ctcttgcaaaccaaa

SEQ ID NO: 116874 - DNA, 15 bp, Homo sapiens
gctcttgcaaaccaa

SEQ ID NO: 116875 - DNA, 15 bp, Homo sapiens
tgctcttgcaaacca

SEQ ID NO: 116876 - DNA, 15 bp, Homo sapiens
ttgctcttgcaaacc

SEQ ID NO: 116877 - DNA, 15 bp, Homo sapiens
attgctcttgcaaac

SEQ ID NO: 116878 - DNA, 15 bp, Homo sapiens
cattgctcttgcaaa

SEQ ID NO: 116879 - DNA, 15 bp, Homo sapiens
ccattgctcttgcaa

SEQ ID NO: 116880 - DNA, 15 bp, Homo sapiens
tccattgctcttgca

SEQ ID NO: 116881 - DNA, 15 bp, Homo sapiens
ctccattgctcttgc

SEQ ID NO: 116882 - DNA, 15 bp, Homo sapiens
tctccattgctcttg

SEQ ID NO: 116883 - DNA, 15 bp, Homo sapiens
ttctccattgctctt

SEQ ID NO: 116884 - DNA, 15 bp, Homo sapiens
tttctccattgctct

SEQ ID NO: 116885 - DNA, 15 bp, Homo sapiens
ttttctccattgctc

SEQ ID NO: 116886 - DNA, 15 bp, Homo sapiens
tttttctccattgct

SEQ ID NO: 116887 - DNA, 15 bp, Homo sapiens
ttttttctccattgc

SEQ ID NO: 116888 - DNA, 15 bp, Homo sapiens
gttttttctccattg

SEQ ID NO: 116889 - DNA, 15 bp, Homo sapiens
agttttttctccatt

SEQ ID NO: 116890 - DNA, 15 bp, Homo sapiens
aagttttttctccat

SEQ ID NO: 116891 - DNA, 15 bp, Homo sapiens
taagttttttctcca

SEQ ID NO: 116892 - DNA, 15 bp, Homo sapiens
ataagttttttctcc

SEQ ID NO: 116893 - DNA, 15 bp, Homo sapiens
aataagttttttctc

SEQ ID NO: 116894 - DNA, 15 bp, Homo sapiens
aaataagttttttct

SEQ ID NO: 116895 - DNA, 15 bp, Homo sapiens
taaataagttttttc

SEQ ID NO: 116896 - DNA, 15 bp, Homo sapiens
ttaaataagtttttt

SEQ ID NO: 116897 - DNA, 15 bp, Homo sapiens
gttaaataagttttt

SEQ ID NO: 116898 - DNA, 15 bp, Homo sapiens
agttaaataagtttt

SEQ ID NO: 116899 - DNA, 15 bp, Homo sapiens
aagttaaataagttt

SEQ ID NO: 116900 - DNA, 15 bp, Homo sapiens
aaagttaaataagtt

SEQ ID NO: 116901 - DNA, 15 bp, Homo sapiens
aaaagttaaataagt

SEQ ID NO: 116902 - DNA, 15 bp, Homo sapiens
gaaaagttaaataag

SEQ ID NO: 116903 - DNA, 15 bp, Homo sapiens
ggaaaagttaaataa

SEQ ID NO: 116904 - DNA, 15 bp, Homo sapiens
aggaaaagttaaata

SEQ ID NO: 116905 - DNA, 15 bp, Homo sapiens
taggaaaagttaaat

SEQ ID NO: 116906 - DNA, 15 bp, Homo sapiens
gtaggaaaagttaaa

SEQ ID NO: 116907 - DNA, 15 bp, Homo sapiens
agtaggaaaagttaa

SEQ ID NO: 116908 - DNA, 15 bp, Homo sapiens
aagtaggaaaagtta

SEQ ID NO: 116909 - DNA, 15 bp, Homo sapiens
taagtaggaaaagtt

SEQ ID NO: 116910 - DNA, 15 bp, Homo sapiens
ataagtaggaaaagt

SEQ ID NO: 116911 - DNA, 15 bp, Homo sapiens
tataagtaggaaaag

SEQ ID NO: 116912 - DNA, 15 bp, Homo sapiens
ctataagtaggaaaa

SEQ ID NO: 116913 - DNA, 15 bp, Homo sapiens
tctataagtaggaaa

SEQ ID NO: 116914 - DNA, 15 bp, Homo sapiens
ttctataagtaggaa

SEQ ID NO: 116915 - DNA, 15 bp, Homo sapiens
attctataagtagga

SEQ ID NO: 116916 - DNA, 15 bp, Homo sapiens
gattctataagtagg

SEQ ID NO: 116917 - DNA, 15 bp, Homo sapiens
tgattctataagtag

SEQ ID NO: 116918 - DNA, 15 bp, Homo sapiens
ttgattctataagta

SEQ ID NO: 116919 - DNA, 15 bp, Homo sapiens
cttgattctataagt

SEQ ID NO: 116920 - DNA, 15 bp, Homo sapiens
ccttgattctataag

SEQ ID NO: 116921 - DNA, 15 bp, Homo sapiens
gccttgattctataa

SEQ ID NO: 116922 - DNA, 15 bp, Homo sapiens
tgccttgattctata

SEQ ID NO: 116923 - DNA, 15 bp, Homo sapiens
ctgccttgattctat

SEQ ID NO: 116924 - DNA, 15 bp, Homo sapiens
gctgccttgattcta

SEQ ID NO: 116925 - DNA, 15 bp, Homo sapiens
ggctgccttgattct

SEQ ID NO: 116926 - DNA, 15 bp, Homo sapiens
aggctgccttgattc

SEQ ID NO: 116927 - DNA, 15 bp, Homo sapiens
aaggctgccttgatt

SEQ ID NO: 116928 - DNA, 15 bp, Homo sapiens
caaggctgccttgat

SEQ ID NO: 116929 - DNA, 15 bp, Homo sapiens
gcaaggctgccttga

SEQ ID NO: 116930 - DNA, 15 bp, Homo sapiens
cgcaaggctgccttg

SEQ ID NO: 116931 - DNA, 15 bp, Homo sapiens
gcgcaaggctgcctt

SEQ ID NO: 116932 - DNA, 15 bp, Homo sapiens
agcgcaaggctgcct

SEQ ID NO: 116933 - DNA, 15 bp, Homo sapiens
aagcgcaaggctgcc

SEQ ID NO: 116934 - DNA, 15 bp, Homo sapiens
caagcgcaaggctgc

SEQ ID NO: 116935 - DNA, 15 bp, Homo sapiens
acaagcgcaaggctg

SEQ ID NO: 116936 - DNA, 15 bp, Homo sapiens
aacaagcgcaaggct

SEQ ID NO: 116937 - DNA, 15 bp, Homo sapiens
aaacaagcgcaaggc

SEQ ID NO: 116938 - DNA, 15 bp, Homo sapiens
taaacaagcgcaagg

SEQ ID NO: 116939 - DNA, 15 bp, Homo sapiens
ttaaacaagcgcaag

SEQ ID NO: 116940 - DNA, 15 bp, Homo sapiens
tttaaacaagcgcaa

SEQ ID NO: 116941 - DNA, 15 bp, Homo sapiens
gtttaaacaagcgca

SEQ ID NO: 116942 - DNA, 15 bp, Homo sapiens
agtttaaacaagcgc

SEQ ID NO: 116943 - DNA, 15 bp, Homo sapiens
aagtttaaacaagcg

SEQ ID NO: 116944 - DNA, 15 bp, Homo sapiens
taagtttaaacaagc

SEQ ID NO: 116945 - DNA, 15 bp, Homo sapiens
gtaagtttaaacaag

SEQ ID NO: 116946 - DNA, 15 bp, Homo sapiens
agtaagtttaaacaa

SEQ ID NO: 116947 - DNA, 15 bp, Homo sapiens
aagtaagtttaaaca

SEQ ID NO: 116948 - DNA, 15 bp, Homo sapiens
caagtaagtttaaac

SEQ ID NO: 116949 - DNA, 15 bp, Homo sapiens
ccaagtaagtttaaa

SEQ ID NO: 116950 - DNA, 15 bp, Homo sapiens
gccaagtaagtttaa

SEQ ID NO: 116951 - DNA, 15 bp, Homo sapiens
agccaagtaagttta

SEQ ID NO: 116952 - DNA, 15 bp, Homo sapiens
tagccaagtaagttt

SEQ ID NO: 116953 - DNA, 15 bp, Homo sapiens
atagccaagtaagtt

SEQ ID NO: 116954 - DNA, 15 bp, Homo sapiens
tatagccaagtaagt

SEQ ID NO: 116955 - DNA, 15 bp, Homo sapiens
gtatagccaagtaag

SEQ ID NO: 116956 - DNA, 15 bp, Homo sapiens
tgtatagccaagtaa

SEQ ID NO: 116957 - DNA, 15 bp, Homo sapiens
gtgtatagccaagta

SEQ ID NO: 116958 - DNA, 15 bp, Homo sapiens
cgtgtatagccaagt

SEQ ID NO: 116959 - DNA, 15 bp, Homo sapiens
acgtgtatagccaag

SEQ ID NO: 116960 - DNA, 15 bp, Homo sapiens
cacgtgtatagccaa

SEQ ID NO: 116961 - DNA, 15 bp, Homo sapiens
acacgtgtatagcca

SEQ ID NO: 116962 - DNA, 15 bp, Homo sapiens
gacacgtgtatagcc

SEQ ID NO: 116963 - DNA, 15 bp, Homo sapiens
agacacgtgtatagc

SEQ ID NO: 116964 - DNA, 15 bp, Homo sapiens
cagacacgtgtatag

SEQ ID NO: 116965 - DNA, 15 bp, Homo sapiens
tcagacacgtgtata

SEQ ID NO: 116966 - DNA, 15 bp, Homo sapiens
atcagacacgtgtat

SEQ ID NO: 116967 - DNA, 15 bp, Homo sapiens
catcagacacgtgta

SEQ ID NO: 116968 - DNA, 15 bp, Homo sapiens
acatcagacacgtgt

SEQ ID NO: 116969 - DNA, 15 bp, Homo sapiens
tacatcagacacgtg

SEQ ID NO: 116970 - DNA, 15 bp, Homo sapiens
gtacatcagacacgt

SEQ ID NO: 116971 - DNA, 15 bp, Homo sapiens
tgtacatcagacacg

SEQ ID NO: 116972 - DNA, 15 bp, Homo sapiens
atgtacatcagacac

SEQ ID NO: 116973 - DNA, 15 bp, Homo sapiens
tatgtacatcagaca

SEQ ID NO: 116974 - DNA, 15 bp, Homo sapiens
ttatgtacatcagac

SEQ ID NO: 116975 - DNA, 15 bp, Homo sapiens
attatgtacatcaga

SEQ ID NO: 116976 - DNA, 15 bp, Homo sapiens
cattatgtacatcag

SEQ ID NO: 116977 - DNA, 15 bp, Homo sapiens
acattatgtacatca

SEQ ID NO: 116978 - DNA, 15 bp, Homo sapiens
tacattatgtacatc

SEQ ID NO: 116979 - DNA, 15 bp, Homo sapiens
gtacattatgtacat

SEQ ID NO: 116980 - DNA, 15 bp, Homo sapiens
tgtacattatgtaca

SEQ ID NO: 116981 - DNA, 15 bp, Homo sapiens
atgtacattatgtac

SEQ ID NO: 116982 - DNA, 15 bp, Homo sapiens
aatgtacattatgta

SEQ ID NO: 116983 - DNA, 15 bp, Homo sapiens
aaatgtacattatgt

SEQ ID NO: 116984 - DNA, 15 bp, Homo sapiens
caaatgtacattatg

SEQ ID NO: 116985 - DNA, 15 bp, Homo sapiens
acaaatgtacattat

SEQ ID NO: 116986 - DNA, 15 bp, Homo sapiens
aacaaatgtacatta

SEQ ID NO: 116987 - DNA, 15 bp, Homo sapiens
aaacaaatgtacatt

SEQ ID NO: 116988 - DNA, 15 bp, Homo sapiens
aaaacaaatgtacat

SEQ ID NO: 116989 - DNA, 15 bp, Homo sapiens
gaaaacaaatgtaca

SEQ ID NO: 116990 - DNA, 15 bp, Homo sapiens
agaaaacaaatgtac

SEQ ID NO: 116991 - DNA, 15 bp, Homo sapiens
tagaaaacaaatgta

SEQ ID NO: 116992 - DNA, 15 bp, Homo sapiens
ttagaaaacaaatgt

SEQ ID NO: 116993 - DNA, 15 bp, Homo sapiens
tttagaaaacaaatg

SEQ ID NO: 116994 - DNA, 15 bp, Homo sapiens
gtttagaaaacaaat

SEQ ID NO: 116995 - DNA, 15 bp, Homo sapiens
agtttagaaaacaaa

SEQ ID NO: 116996 - DNA, 15 bp, Homo sapiens
tagtttagaaaacaa

SEQ ID NO: 116997 - DNA, 15 bp, Homo sapiens
ttagtttagaaaaca

SEQ ID NO: 116998 - DNA, 15 bp, Homo sapiens
gttagtttagaaaac

SEQ ID NO: 116999 - DNA, 15 bp, Homo sapiens
agttagtttagaaaa

SEQ ID NO: 117000 - DNA, 15 bp, Homo sapiens
aagttagtttagaaa

SEQ ID NO: 117001 - DNA, 15 bp, Homo sapiens
aaagttagtttagaa

SEQ ID NO: 117002 - DNA, 15 bp, Homo sapiens
caaagttagtttaga

SEQ ID NO: 117003 - DNA, 15 bp, Homo sapiens
acaaagttagtttag

SEQ ID NO: 117004 - DNA, 15 bp, Homo sapiens
aacaaagttagttta

SEQ ID NO: 117005 - DNA, 15 bp, Homo sapiens
gaacaaagttagttt

SEQ ID NO: 117006 - DNA, 15 bp, Homo sapiens
tgaacaaagttagtt

SEQ ID NO: 117007 - DNA, 15 bp, Homo sapiens
atgaacaaagttagt

SEQ ID NO: 117008 - DNA, 15 bp, Homo sapiens
aatgaacaaagttag

SEQ ID NO: 117009 - DNA, 15 bp, Homo sapiens
gaatgaacaaagtta

SEQ ID NO: 117010 - DNA, 15 bp, Homo sapiens
agaatgaacaaagtt

SEQ ID NO: 117011 - DNA, 15 bp, Homo sapiens
tagaatgaacaaagt

SEQ ID NO: 117012 - DNA, 15 bp, Homo sapiens
ttagaatgaacaaag

SEQ ID NO: 117013 - DNA, 15 bp, Homo sapiens
cttagaatgaacaaa

SEQ ID NO: 117014 - DNA, 15 bp, Homo sapiens
tcttagaatgaacaa

SEQ ID NO: 117015 - DNA, 15 bp, Homo sapiens
atcttagaatgaaca

SEQ ID NO: 117016 - DNA, 15 bp, Homo sapiens
aatcttagaatgaac

SEQ ID NO: 117017 - DNA, 15 bp, Homo sapiens
aaatcttagaatgaa

SEQ ID NO: 117018 - DNA, 15 bp, Homo sapiens
taaatcttagaatga

SEQ ID NO: 117019 - DNA, 15 bp, Homo sapiens
ttaaatcttagaatg

SEQ ID NO: 117020 - DNA, 15 bp, Homo sapiens
tttaaatcttagaat

SEQ ID NO: 117021 - DNA, 15 bp, Homo sapiens
ttttaaatcttagaa

SEQ ID NO: 117022 - DNA, 15 bp, Homo sapiens
tttttaaatcttaga

SEQ ID NO: 117023 - DNA, 15 bp, Homo sapiens
gtttttaaatcttag

SEQ ID NO: 117024 - DNA, 15 bp, Homo sapiens
agtttttaaatctta

SEQ ID NO: 117025 - DNA, 15 bp, Homo sapiens
cagtttttaaatctt

SEQ ID NO: 117026 - DNA, 15 bp, Homo sapiens
tcagtttttaaatct

SEQ ID NO: 117027 - DNA, 15 bp, Homo sapiens
atcagtttttaaatc

SEQ ID NO: 117028 - DNA, 15 bp, Homo sapiens
gatcagtttttaaat

SEQ ID NO: 117029 - DNA, 15 bp, Homo sapiens
tgatcagtttttaaa

SEQ ID NO: 117030 - DNA, 15 bp, Homo sapiens
ttgatcagtttttaa

SEQ ID NO: 117031 - DNA, 15 bp, Homo sapiens
tttgatcagttttta

SEQ ID NO: 117032 - DNA, 15 bp, Homo sapiens
gtttgatcagttttt

SEQ ID NO: 117033 - DNA, 15 bp, Homo sapiens
tgtttgatcagtttt

SEQ ID NO: 117034 - DNA, 15 bp, Homo sapiens
ttgtttgatcagttt

SEQ ID NO: 117035 - DNA, 15 bp, Homo sapiens
tttgtttgatcagtt

SEQ ID NO: 117036 - DNA, 15 bp, Homo sapiens
atttgtttgatcagt

SEQ ID NO: 117037 - DNA, 15 bp, Homo sapiens
catttgtttgatcag

SEQ ID NO: 117038 - DNA, 15 bp, Homo sapiens
acatttgtttgatca

SEQ ID NO: 117039 - DNA, 15 bp, Homo sapiens
cacatttgtttgatc

SEQ ID NO: 117040 - DNA, 15 bp, Homo sapiens
tcacatttgtttgat

SEQ ID NO: 117041 - DNA, 15 bp, Homo sapiens
atcacatttgtttga

SEQ ID NO: 117042 - DNA, 15 bp, Homo sapiens
tatcacatttgtttg

SEQ ID NO: 117043 - DNA, 15 bp, Homo sapiens
ttatcacatttgttt

SEQ ID NO: 117044 - DNA, 15 bp, Homo sapiens
attatcacatttgtt

SEQ ID NO: 117045 - DNA, 15 bp, Homo sapiens
aattatcacatttgt

SEQ ID NO: 117046 - DNA, 15 bp, Homo sapiens
gaattatcacatttg

SEQ ID NO: 117047 - DNA, 15 bp, Homo sapiens
agaattatcacattt

SEQ ID NO: 117048 - DNA, 15 bp, Homo sapiens
cagaattatcacatt

SEQ ID NO: 117049 - DNA, 15 bp, Homo sapiens
acagaattatcacat

SEQ ID NO: 117050 - DNA, 15 bp, Homo sapiens
gacagaattatcaca

SEQ ID NO: 117051 - DNA, 15 bp, Homo sapiens
tgacagaattatcac

SEQ ID NO: 117052 - DNA, 15 bp, Homo sapiens
atgacagaattatca

SEQ ID NO: 117053 - DNA, 15 bp, Homo sapiens
tatgacagaattatc

SEQ ID NO: 117054 - DNA, 15 bp, Homo sapiens
ttatgacagaattat

SEQ ID NO: 117055 - DNA, 15 bp, Homo sapiens
cttatgacagaatta

SEQ ID NO: 117056 - DNA, 15 bp, Homo sapiens
acttatgacagaatt

SEQ ID NO: 117057 - DNA, 15 bp, Homo sapiens
gacttatgacagaat

SEQ ID NO: 117058 - DNA, 15 bp, Homo sapiens
tgacttatgacagaa

SEQ ID NO: 117059 - DNA, 15 bp, Homo sapiens
gtgacttatgacaga

SEQ ID NO: 117060 - DNA, 15 bp, Homo sapiens
tgtgacttatgacag

SEQ ID NO: 117061 - DNA, 15 bp, Homo sapiens
ttgtgacttatgaca

SEQ ID NO: 117062 - DNA, 15 bp, Homo sapiens
tttgtgacttatgac

SEQ ID NO: 117063 - DNA, 15 bp, Homo sapiens
gtttgtgacttatga

SEQ ID NO: 117064 - DNA, 15 bp, Homo sapiens
agtttgtgacttatg

SEQ ID NO: 117065 - DNA, 15 bp, Homo sapiens
tagtttgtgacttat

SEQ ID NO: 117066 - DNA, 15 bp, Homo sapiens
atagtttgtgactta

SEQ ID NO: 117067 - DNA, 15 bp, Homo sapiens
tatagtttgtgactt

SEQ ID NO: 117068 - DNA, 15 bp, Homo sapiens
ttatagtttgtgact

SEQ ID NO: 117069 - DNA, 15 bp, Homo sapiens
tttatagtttgtgac

SEQ ID NO: 117070 - DNA, 15 bp, Homo sapiens
gtttatagtttgtga

SEQ ID NO: 117071 - DNA, 15 bp, Homo sapiens
cgtttatagtttgtg

SEQ ID NO: 117072 - DNA, 15 bp, Homo sapiens
tcgtttatagtttgt

SEQ ID NO: 117073 - DNA, 15 bp, Homo sapiens
atcgtttatagtttg

SEQ ID NO: 117074 - DNA, 15 bp, Homo sapiens
aatcgtttatagttt

SEQ ID NO: 117075 - DNA, 15 bp, Homo sapiens
aaatcgtttatagtt

SEQ ID NO: 117076 - DNA, 15 bp, Homo sapiens
gaaatcgtttatagt

SEQ ID NO: 117077 - DNA, 15 bp, Homo sapiens
agaaatcgtttatag

SEQ ID NO: 117078 - DNA, 15 bp, Homo sapiens
gagaaatcgtttata

SEQ ID NO: 117079 - DNA, 15 bp, Homo sapiens
ggagaaatcgtttat

SEQ ID NO: 117080 - DNA, 15 bp, Homo sapiens
cggagaaatcgttta

SEQ ID NO: 117081 - DNA, 15 bp, Homo sapiens
acggagaaatcgttt

SEQ ID NO: 117082 - DNA, 15 bp, Homo sapiens
aacggagaaatcgtt

SEQ ID NO: 117083 - DNA, 15 bp, Homo sapiens
aaacggagaaatcgt

SEQ ID NO: 117084 - DNA, 15 bp, Homo sapiens
aaaacggagaaatcg

SEQ ID NO: 117085 - DNA, 15 bp, Homo sapiens
aaaaacggagaaatc

SEQ ID NO: 117086 - DNA, 15 bp, Homo sapiens
aaaaaacggagaaat

SEQ ID NO: 117087 - DNA, 15 bp, Homo sapiens
aaaaaaacggagaaa

SEQ ID NO: 117088 - DNA, 15 bp, Homo sapiens
gaaaaaaacggagaa

SEQ ID NO: 117089 - DNA, 15 bp, Homo sapiens
agaaaaaaacggaga

SEQ ID NO: 117090 - DNA, 15 bp, Homo sapiens
gagaaaaaaacggag

SEQ ID NO: 117091 - DNA, 15 bp, Homo sapiens
agagaaaaaaacgga

SEQ ID NO: 117092 - DNA, 15 bp, Homo sapiens
aagagaaaaaaacgg

SEQ ID NO: 117093 - DNA, 15 bp, Homo sapiens
aaagagaaaaaaacg

SEQ ID NO: 117094 - DNA, 15 bp, Homo sapiens
aaaagagaaaaaaac

SEQ ID NO: 117095 - DNA, 15 bp, Homo sapiens
taaaagagaaaaaaa

SEQ ID NO: 117096 - DNA, 15 bp, Homo sapiens
gtaaaagagaaaaaa

SEQ ID NO: 117097 - DNA, 15 bp, Homo sapiens
ggtaaaagagaaaaa

SEQ ID NO: 117098 - DNA, 15 bp, Homo sapiens
aggtaaaagagaaaa

SEQ ID NO: 117099 - DNA, 15 bp, Homo sapiens
taggtaaaagagaaa

SEQ ID NO: 117100 - DNA, 15 bp, Homo sapiens
ttaggtaaaagagaa

SEQ ID NO: 117101 - DNA, 15 bp, Homo sapiens
tttaggtaaaagaga

SEQ ID NO: 117102 - DNA, 15 bp, Homo sapiens
ttttaggtaaaagag

SEQ ID NO: 117103 - DNA, 15 bp, Homo sapiens
attttaggtaaaaga

SEQ ID NO: 117104 - DNA, 15 bp, Homo sapiens
cattttaggtaaaag

SEQ ID NO: 117105 - DNA, 15 bp, Homo sapiens
acattttaggtaaaa

SEQ ID NO: 117106 - DNA, 15 bp, Homo sapiens
aacattttaggtaaa

SEQ ID NO: 117107 - DNA, 15 bp, Homo sapiens
aaacattttaggtaa

SEQ ID NO: 117108 - DNA, 15 bp, Homo sapiens
aaaacattttaggta

SEQ ID NO: 117109 - DNA, 15 bp, Homo sapiens
gaaaacattttaggt

SEQ ID NO: 117110 - DNA, 15 bp, Homo sapiens
tgaaaacattttagg

SEQ ID NO: 117111 - DNA, 15 bp, Homo sapiens
ctgaaaacattttag

SEQ ID NO: 117112 - DNA, 15 bp, Homo sapiens
tctgaaaacatttta

SEQ ID NO: 117113 - DNA, 15 bp, Homo sapiens
atctgaaaacatttt

SEQ ID NO: 117114 - DNA, 15 bp, Homo sapiens
tatctgaaaacattt

SEQ ID NO: 117115 - DNA, 15 bp, Homo sapiens
ttatctgaaaacatt

SEQ ID NO: 117116 - DNA, 15 bp, Homo sapiens
tttatctgaaaacat

SEQ ID NO: 117117 - DNA, 15 bp, Homo sapiens
atttatctgaaaaca

SEQ ID NO: 117118 - DNA, 15 bp, Homo sapiens
catttatctgaaaac

SEQ ID NO: 117119 - DNA, 15 bp, Homo sapiens
acatttatctgaaaa

SEQ ID NO: 117120 - DNA, 15 bp, Homo sapiens
cacatttatctgaaa

SEQ ID NO: 117121 - DNA, 15 bp, Homo sapiens
acacatttatctgaa

SEQ ID NO: 117122 - DNA, 15 bp, Homo sapiens
tacacatttatctga

SEQ ID NO: 117123 - DNA, 15 bp, Homo sapiens
ttacacatttatctg

SEQ ID NO: 117124 - DNA, 15 bp, Homo sapiens
attacacatttatct

SEQ ID NO: 117125 - DNA, 15 bp, Homo sapiens
tattacacatttatc

SEQ ID NO: 117126 - DNA, 15 bp, Homo sapiens
ttattacacatttat

SEQ ID NO: 117127 - DNA, 15 bp, Homo sapiens
cttattacacattta

SEQ ID NO: 117128 - DNA, 15 bp, Homo sapiens
acttattacacattt

SEQ ID NO: 117129 - DNA, 15 bp, Homo sapiens
tacttattacacatt

SEQ ID NO: 117130 - DNA, 15 bp, Homo sapiens
ctacttattacacat

SEQ ID NO: 117131 - DNA, 15 bp, Homo sapiens
tctacttattacaca

SEQ ID NO: 117132 - DNA, 15 bp, Homo sapiens
ctctacttattacac

SEQ ID NO: 117133 - DNA, 15 bp, Homo sapiens
gctctacttattaca

SEQ ID NO: 117134 - DNA, 15 bp, Homo sapiens
ggctctacttattac

SEQ ID NO: 117135 - DNA, 15 bp, Homo sapiens
tggctctacttatta

SEQ ID NO: 117136 - DNA, 15 bp, Homo sapiens
ttggctctacttatt

SEQ ID NO: 117137 - DNA, 15 bp, Homo sapiens
tttggctctacttat

SEQ ID NO: 117138 - DNA, 15 bp, Homo sapiens
ctttggctctactta

SEQ ID NO: 117139 - DNA, 15 bp, Homo sapiens
tctttggctctactt

SEQ ID NO: 117140 - DNA, 15 bp, Homo sapiens
ttctttggctctact

SEQ ID NO: 117141 - DNA, 15 bp, Homo sapiens
cttctttggctctac

SEQ ID NO: 117142 - DNA, 15 bp, Homo sapiens
gcttctttggctcta

SEQ ID NO: 117143 - DNA, 15 bp, Homo sapiens
agcttctttggctct

SEQ ID NO: 117144 - DNA, 15 bp, Homo sapiens
aagcttctttggctc

SEQ ID NO: 117145 - DNA, 15 bp, Homo sapiens
aaagcttctttggct

SEQ ID NO: 117146 - DNA, 15 bp, Homo sapiens
taaagcttctttggc

SEQ ID NO: 117147 - DNA, 15 bp, Homo sapiens
ttaaagcttctttgg

SEQ ID NO: 117148 - DNA, 15 bp, Homo sapiens
tttaaagcttctttg

SEQ ID NO: 117149 - DNA, 15 bp, Homo sapiens
ttttaaagcttcttt

SEQ ID NO: 117150 - DNA, 15 bp, Homo sapiens
tttttaaagcttctt

SEQ ID NO: 117151 - DNA, 15 bp, Homo sapiens
ctttttaaagcttct

SEQ ID NO: 117152 - DNA, 15 bp, Homo sapiens
actttttaaagcttc

SEQ ID NO: 117153 - DNA, 15 bp, Homo sapiens
gactttttaaagctt

SEQ ID NO: 117154 - DNA, 15 bp, Homo sapiens
tgactttttaaagct

SEQ ID NO: 117155 - DNA, 15 bp, Homo sapiens
atgactttttaaagc

SEQ ID NO: 117156 - DNA, 15 bp, Homo sapiens
gatgactttttaaag

SEQ ID NO: 117157 - DNA, 15 bp, Homo sapiens
agatgactttttaaa

SEQ ID NO: 117158 - DNA, 15 bp, Homo sapiens
gagatgactttttaa

SEQ ID NO: 117159 - DNA, 15 bp, Homo sapiens
tgagatgacttttta

SEQ ID NO: 117160 - DNA, 15 bp, Homo sapiens
atgagatgacttttt

SEQ ID NO: 117161 - DNA, 15 bp, Homo sapiens
gatgagatgactttt

SEQ ID NO: 117162 - DNA, 15 bp, Homo sapiens
agatgagatgacttt

SEQ ID NO: 117163 - DNA, 15 bp, Homo sapiens
aagatgagatgactt

SEQ ID NO: 117164 - DNA, 15 bp, Homo sapiens
taagatgagatgact

SEQ ID NO: 117165 - DNA, 15 bp, Homo sapiens
gtaagatgagatgac

SEQ ID NO: 117166 - DNA, 15 bp, Homo sapiens
tgtaagatgagatga

SEQ ID NO: 117167 - DNA, 15 bp, Homo sapiens
ttgtaagatgagatg

SEQ ID NO: 117168 - DNA, 15 bp, Homo sapiens
attgtaagatgagat

SEQ ID NO: 117169 - DNA, 15 bp, Homo sapiens
gattgtaagatgaga

SEQ ID NO: 117170 - DNA, 15 bp, Homo sapiens
ggattgtaagatgag

SEQ ID NO: 117171 - DNA, 15 bp, Homo sapiens
aggattgtaagatga

SEQ ID NO: 117172 - DNA, 15 bp, Homo sapiens
aaggattgtaagatg

SEQ ID NO: 117173 - DNA, 15 bp, Homo sapiens
caaggattgtaagat

SEQ ID NO: 117174 - DNA, 15 bp, Homo sapiens
tcaaggattgtaaga

SEQ ID NO: 117175 - DNA, 15 bp, Homo sapiens
atcaaggattgtaag

SEQ ID NO: 117176 - DNA, 15 bp, Homo sapiens
gatcaaggattgtaa

SEQ ID NO: 117177 - DNA, 15 bp, Homo sapiens
agatcaaggattgta

SEQ ID NO: 117178 - DNA, 15 bp, Homo sapiens
cagatcaaggattgt

SEQ ID NO: 117179 - DNA, 15 bp, Homo sapiens
ccagatcaaggattg

SEQ ID NO: 117180 - DNA, 15 bp, Homo sapiens
tccagatcaaggatt

SEQ ID NO: 117181 - DNA, 15 bp, Homo sapiens
ttccagatcaaggat

SEQ ID NO: 117182 - DNA, 15 bp, Homo sapiens
attccagatcaagga

SEQ ID NO: 117183 - DNA, 15 bp, Homo sapiens
tattccagatcaagg

SEQ ID NO: 117184 - DNA, 15 bp, Homo sapiens
ttattccagatcaag

SEQ ID NO: 117185 - DNA, 15 bp, Homo sapiens
attattccagatcaa

SEQ ID NO: 117186 - DNA, 15 bp, Homo sapiens
cattattccagatca

SEQ ID NO: 117187 - DNA, 15 bp, Homo sapiens
gcattattccagatc

SEQ ID NO: 117188 - DNA, 15 bp, Homo sapiens
agcattattccagat

SEQ ID NO: 117189 - DNA, 15 bp, Homo sapiens
aagcattattccaga

SEQ ID NO: 117190 - DNA, 15 bp, Homo sapiens
taagcattattccag

SEQ ID NO: 117191 - DNA, 15 bp, Homo sapiens
ttaagcattattcca

SEQ ID NO: 117192 - DNA, 15 bp, Homo sapiens
tttaagcattattcc

SEQ ID NO: 117193 - DNA, 15 bp, Homo sapiens
ctttaagcattattc

SEQ ID NO: 117194 - DNA, 15 bp, Homo sapiens
tctttaagcattatt

SEQ ID NO: 117195 - DNA, 15 bp, Homo sapiens
gtctttaagcattat

SEQ ID NO: 117196 - DNA, 15 bp, Homo sapiens
agtctttaagcatta

SEQ ID NO: 117197 - DNA, 15 bp, Homo sapiens
tagtctttaagcatt

SEQ ID NO: 117198 - DNA, 15 bp, Homo sapiens
atagtctttaagcat

SEQ ID NO: 117199 - DNA, 15 bp, Homo sapiens
tatagtctttaagca

SEQ ID NO: 117200 - DNA, 15 bp, Homo sapiens
ctatagtctttaagc

SEQ ID NO: 117201 - DNA, 15 bp, Homo sapiens
tctatagtctttaag

SEQ ID NO: 117202 - DNA, 15 bp, Homo sapiens
ttctatagtctttaa

SEQ ID NO: 117203 - DNA, 15 bp, Homo sapiens
cttctatagtcttta

SEQ ID NO: 117204 - DNA, 15 bp, Homo sapiens
tcttctatagtcttt

SEQ ID NO: 117205 - DNA, 15 bp, Homo sapiens
ctcttctatagtctt

SEQ ID NO: 117206 - DNA, 15 bp, Homo sapiens
tctcttctatagtct

SEQ ID NO: 117207 - DNA, 15 bp, Homo sapiens
gtctcttctatagtc

SEQ ID NO: 117208 - DNA, 15 bp, Homo sapiens
cgtctcttctatagt

SEQ ID NO: 117209 - DNA, 15 bp, Homo sapiens
gcgtctcttctatag

SEQ ID NO: 117210 - DNA, 15 bp, Homo sapiens
tgcgtctcttctata

SEQ ID NO: 117211 - DNA, 15 bp, Homo sapiens
atgcgtctcttctat

SEQ ID NO: 117212 - DNA, 15 bp, Homo sapiens
aatgcgtctcttcta

SEQ ID NO: 117213 - DNA, 15 bp, Homo sapiens
aaatgcgtctcttct

SEQ ID NO: 117214 - DNA, 15 bp, Homo sapiens
aaaatgcgtctcttc

SEQ ID NO: 117215 - DNA, 15 bp, Homo sapiens
aaaaatgcgtctctt

SEQ ID NO: 117216 - DNA, 15 bp, Homo sapiens
taaaaatgcgtctct

SEQ ID NO: 117217 - DNA, 15 bp, Homo sapiens
ataaaaatgcgtctc

SEQ ID NO: 117218 - DNA, 15 bp, Homo sapiens
aataaaaatgcgtct

SEQ ID NO: 117219 - DNA, 15 bp, Homo sapiens
aaataaaaatgcgtc

SEQ ID NO: 117220 - DNA, 15 bp, Homo sapiens
aaaataaaaatgcgt

SEQ ID NO: 117221 - DNA, 15 bp, Homo sapiens
aaaaataaaaatgcg

SEQ ID NO: 117222 - DNA, 15 bp, Homo sapiens
aaaaaataaaaatgc

SEQ ID NO: 117223 - DNA, 15 bp, Homo sapiens
taaaaaataaaaatg

SEQ ID NO: 117224 - DNA, 15 bp, Homo sapiens
gtaaaaaataaaaat

SEQ ID NO: 117225 - DNA, 15 bp, Homo sapiens
tgtaaaaaataaaaa

SEQ ID NO: 117226 - DNA, 15 bp, Homo sapiens
ctgtaaaaaataaaa

SEQ ID NO: 117227 - DNA, 15 bp, Homo sapiens
tctgtaaaaaataaa

SEQ ID NO: 117228 - DNA, 15 bp, Homo sapiens
atctgtaaaaaataa

SEQ ID NO: 117229 - DNA, 15 bp, Homo sapiens
aatctgtaaaaaata

SEQ ID NO: 117230 - DNA, 15 bp, Homo sapiens
aaatctgtaaaaaat

SEQ ID NO: 117231 - DNA, 15 bp, Homo sapiens
aaaatctgtaaaaaa

SEQ ID NO: 117232 - DNA, 15 bp, Homo sapiens
taaaatctgtaaaaa

SEQ ID NO: 117233 - DNA, 15 bp, Homo sapiens
ataaaatctgtaaaa

SEQ ID NO: 117234 - DNA, 15 bp, Homo sapiens
aataaaatctgtaaa

SEQ ID NO: 117235 - DNA, 15 bp, Homo sapiens
taataaaatctgtaa

SEQ ID NO: 117236 - DNA, 15 bp, Homo sapiens
ttaataaaatctgta

SEQ ID NO: 117237 - DNA, 15 bp, Homo sapiens
cttaataaaatctgt

SEQ ID NO: 117238 - DNA, 15 bp, Homo sapiens
acttaataaaatctg

SEQ ID NO: 117239 - DNA, 15 bp, Homo sapiens
cacttaataaaatct

SEQ ID NO: 117240 - DNA, 15 bp, Homo sapiens
tcacttaataaaatc

SEQ ID NO: 117241 - DNA, 15 bp, Homo sapiens
ttcacttaataaaat

SEQ ID NO: 117242 - DNA, 15 bp, Homo sapiens
attcacttaataaaa

SEQ ID NO: 117243 - DNA, 15 bp, Homo sapiens
tattcacttaataaa

SEQ ID NO: 117244 - DNA, 15 bp, Homo sapiens
gtattcacttaataa

SEQ ID NO: 117245 - DNA, 15 bp, Homo sapiens
tgtattcacttaata

SEQ ID NO: 117246 - DNA, 15 bp, Homo sapiens
ctgtattcacttaat

SEQ ID NO: 117247 - DNA, 15 bp, Homo sapiens
actgtattcacttaa

SEQ ID NO: 117248 - DNA, 15 bp, Homo sapiens
tactgtattcactta

SEQ ID NO: 117249 - DNA, 15 bp, Homo sapiens
gtactgtattcactt

SEQ ID NO: 117250 - DNA, 15 bp, Homo sapiens
cgtactgtattcact

SEQ ID NO: 117251 - DNA, 15 bp, Homo sapiens
acgtactgtattcac

SEQ ID NO: 117252 - DNA, 15 bp, Homo sapiens
aacgtactgtattca

SEQ ID NO: 117253 - DNA, 15 bp, Homo sapiens
aaacgtactgtattc

SEQ ID NO: 117254 - DNA, 15 bp, Homo sapiens
caaacgtactgtatt

SEQ ID NO: 117255 - DNA, 15 bp, Homo sapiens
tcaaacgtactgtat

SEQ ID NO: 117256 - DNA, 15 bp, Homo sapiens
atcaaacgtactgta

SEQ ID NO: 117257 - DNA, 15 bp, Homo sapiens
aatcaaacgtactgt

SEQ ID NO: 117258 - DNA, 15 bp, Homo sapiens
aaatcaaacgtactg

SEQ ID NO: 117259 - DNA, 15 bp, Homo sapiens
caaatcaaacgtact

SEQ ID NO: 117260 - DNA, 15 bp, Homo sapiens
ccaaatcaaacgtac

SEQ ID NO: 117261 - DNA, 15 bp, Homo sapiens
tccaaatcaaacgta

SEQ ID NO: 117262 - DNA, 15 bp, Homo sapiens
gtccaaatcaaacgt

SEQ ID NO: 117263 - DNA, 15 bp, Homo sapiens
tgtccaaatcaaacg

SEQ ID NO: 117264 - DNA, 15 bp, Homo sapiens
atgtccaaatcaaac

SEQ ID NO: 117265 - DNA, 15 bp, Homo sapiens
catgtccaaatcaaa

SEQ ID NO: 117266 - DNA, 15 bp, Homo sapiens
acatgtccaaatcaa

SEQ ID NO: 117267 - DNA, 15 bp, Homo sapiens
aacatgtccaaatca

SEQ ID NO: 117268 - DNA, 15 bp, Homo sapiens
caacatgtccaaatc

SEQ ID NO: 117269 - DNA, 15 bp, Homo sapiens
acaacatgtccaaat

SEQ ID NO: 117270 - DNA, 15 bp, Homo sapiens
aacaacatgtccaaa

SEQ ID NO: 117271 - DNA, 15 bp, Homo sapiens
caacaacatgtccaa

SEQ ID NO: 117272 - DNA, 15 bp, Homo sapiens
tcaacaacatgtcca

SEQ ID NO: 117273 - DNA, 15 bp, Homo sapiens
ttcaacaacatgtcc

SEQ ID NO: 117274 - DNA, 15 bp, Homo sapiens
gttcaacaacatgtc

SEQ ID NO: 117275 - DNA, 15 bp, Homo sapiens
tgttcaacaacatgt

SEQ ID NO: 117276 - DNA, 15 bp, Homo sapiens
atgttcaacaacatg

SEQ ID NO: 117277 - DNA, 15 bp, Homo sapiens
aatgttcaacaacat

SEQ ID NO: 117278 - DNA, 15 bp, Homo sapiens
taatgttcaacaaca

SEQ ID NO: 117279 - DNA, 15 bp, Homo sapiens
ttaatgttcaacaac

SEQ ID NO: 117280 - DNA, 15 bp, Homo sapiens
tttaatgttcaacaa

SEQ ID NO: 117281 - DNA, 15 bp, Homo sapiens
atttaatgttcaaca

SEQ ID NO: 117282 - DNA, 15 bp, Homo sapiens
aatttaatgttcaac

SEQ ID NO: 117283 - DNA, 15 bp, Homo sapiens
caatttaatgttcaa

SEQ ID NO: 117284 - DNA, 15 bp, Homo sapiens
gcaatttaatgttca

SEQ ID NO: 117285 - DNA, 15 bp, Homo sapiens
tgcaatttaatgttc

SEQ ID NO: 117286 - DNA, 15 bp, Homo sapiens
ctgcaatttaatgtt

SEQ ID NO: 117287 - DNA, 15 bp, Homo sapiens
actgcaatttaatgt

SEQ ID NO: 117288 - DNA, 15 bp, Homo sapiens
aactgcaatttaatg

SEQ ID NO: 117289 - DNA, 15 bp, Homo sapiens
gaactgcaatttaat

SEQ ID NO: 117290 - DNA, 15 bp, Homo sapiens
tgaactgcaatttaa

SEQ ID NO: 117291 - DNA, 15 bp, Homo sapiens
ctgaactgcaattta

SEQ ID NO: 117292 - DNA, 15 bp, Homo sapiens
tctgaactgcaattt

SEQ ID NO: 117293 - DNA, 15 bp, Homo sapiens
ttctgaactgcaatt

SEQ ID NO: 117294 - DNA, 15 bp, Homo sapiens
attctgaactgcaat

SEQ ID NO: 117295 - DNA, 15 bp, Homo sapiens
tattctgaactgcaa

SEQ ID NO: 117296 - DNA, 15 bp, Homo sapiens
gtattctgaactgca

SEQ ID NO: 117297 - DNA, 15 bp, Homo sapiens
tgtattctgaactgc

SEQ ID NO: 117298 - DNA, 15 bp, Homo sapiens
atgtattctgaactg

SEQ ID NO: 117299 - DNA, 15 bp, Homo sapiens
tatgtattctgaact

SEQ ID NO: 117300 - DNA, 15 bp, Homo sapiens
ctatgtattctgaac

SEQ ID NO: 117301 - DNA, 15 bp, Homo sapiens
tctatgtattctgaa

SEQ ID NO: 117302 - DNA, 15 bp, Homo sapiens
ttctatgtattctga

SEQ ID NO: 117303 - DNA, 15 bp, Homo sapiens
tttctatgtattctg

SEQ ID NO: 117304 - DNA, 15 bp, Homo sapiens
atttctatgtattct

SEQ ID NO: 117305 - DNA, 15 bp, Homo sapiens
gatttctatgtattc

SEQ ID NO: 117306 - DNA, 15 bp, Homo sapiens
ggatttctatgtatt

SEQ ID NO: 117307 - DNA, 15 bp, Homo sapiens
aggatttctatgtat

SEQ ID NO: 117308 - DNA, 15 bp, Homo sapiens
gaggatttctatgta

SEQ ID NO: 117309 - DNA, 15 bp, Homo sapiens
ggaggatttctatgt

SEQ ID NO: 117310 - DNA, 15 bp, Homo sapiens
gggaggatttctatg

SEQ ID NO: 117311 - DNA, 15 bp, Homo sapiens
agggaggatttctat

SEQ ID NO: 117312 - DNA, 15 bp, Homo sapiens
aagggaggatttcta

SEQ ID NO: 117313 - DNA, 15 bp, Homo sapiens
aaagggaggatttct

SEQ ID NO: 117314 - DNA, 15 bp, Homo sapiens
aaaagggaggatttc

SEQ ID NO: 117315 - DNA, 15 bp, Homo sapiens
gaaaagggaggattt

SEQ ID NO: 117316 - DNA, 15 bp, Homo sapiens
agaaaagggaggatt

SEQ ID NO: 117317 - DNA, 15 bp, Homo sapiens
tagaaaagggaggat

SEQ ID NO: 117318 - DNA, 15 bp, Homo sapiens
ctagaaaagggagga

SEQ ID NO: 117319 - DNA, 15 bp, Homo sapiens
tctagaaaagggagg

SEQ ID NO: 117320 - DNA, 15 bp, Homo sapiens
ctctagaaaagggag

SEQ ID NO: 117321 - DNA, 15 bp, Homo sapiens
tctctagaaaaggga

SEQ ID NO: 117322 - DNA, 15 bp, Homo sapiens
atctctagaaaaggg

SEQ ID NO: 117323 - DNA, 15 bp, Homo sapiens
aatctctagaaaagg

SEQ ID NO: 117324 - DNA, 15 bp, Homo sapiens
caatctctagaaaag

SEQ ID NO: 117325 - DNA, 15 bp, Homo sapiens
acaatctctagaaaa

SEQ ID NO: 117326 - DNA, 15 bp, Homo sapiens
cacaatctctagaaa

SEQ ID NO: 117327 - DNA, 15 bp, Homo sapiens
acacaatctctagaa

SEQ ID NO: 117328 - DNA, 15 bp, Homo sapiens
tacacaatctctaga

SEQ ID NO: 117329 - DNA, 15 bp, Homo sapiens
atacacaatctctag

SEQ ID NO: 117330 - DNA, 15 bp, Homo sapiens
catacacaatctcta

SEQ ID NO: 117331 - DNA, 15 bp, Homo sapiens
acatacacaatctct

SEQ ID NO: 117332 - DNA, 15 bp, Homo sapiens
cacatacacaatctc

SEQ ID NO: 117333 - DNA, 15 bp, Homo sapiens
acacatacacaatct

SEQ ID NO: 117334 - DNA, 15 bp, Homo sapiens
cacacatacacaatc

SEQ ID NO: 117335 - DNA, 15 bp, Homo sapiens
acacacatacacaat

SEQ ID NO: 117336 - DNA, 15 bp, Homo sapiens
tacacacatacacaa

SEQ ID NO: 117337 - DNA, 15 bp, Homo sapiens
ttacacacatacaca

SEQ ID NO: 117338 - DNA, 15 bp, Homo sapiens
tttacacacatacac

SEQ ID NO: 117339 - DNA, 15 bp, Homo sapiens
atttacacacataca

SEQ ID NO: 117340 - DNA, 15 bp, Homo sapiens
aatttacacacatac

SEQ ID NO: 117341 - DNA, 15 bp, Homo sapiens
aaatttacacacata

SEQ ID NO: 117342 - DNA, 15 bp, Homo sapiens
aaaatttacacacat

SEQ ID NO: 117343 - DNA, 15 bp, Homo sapiens
aaaaatttacacaca

SEQ ID NO: 117344 - DNA, 15 bp, Homo sapiens
caaaaatttacacac

SEQ ID NO: 117345 - DNA, 15 bp, Homo sapiens
acaaaaatttacaca

SEQ ID NO: 117346 - DNA, 15 bp, Homo sapiens
cacaaaaatttacac

SEQ ID NO: 117347 - DNA, 15 bp, Homo sapiens
gcacaaaaatttaca

SEQ ID NO: 117348 - DNA, 15 bp, Homo sapiens
ggcacaaaaatttac

SEQ ID NO: 117349 - DNA, 15 bp, Homo sapiens
aggcacaaaaattta

SEQ ID NO: 117350 - DNA, 15 bp, Homo sapiens
aaggcacaaaaattt

SEQ ID NO: 117351 - DNA, 15 bp, Homo sapiens
gaaggcacaaaaatt

SEQ ID NO: 117352 - DNA, 15 bp, Homo sapiens
agaaggcacaaaaat

SEQ ID NO: 117353 - DNA, 15 bp, Homo sapiens
cagaaggcacaaaaa

SEQ ID NO: 117354 - DNA, 15 bp, Homo sapiens
ccagaaggcacaaaa

SEQ ID NO: 117355 - DNA, 15 bp, Homo sapiens
accagaaggcacaaa

SEQ ID NO: 117356 - DNA, 15 bp, Homo sapiens
aaccagaaggcacaa

SEQ ID NO: 117357 - DNA, 15 bp, Homo sapiens
gaaccagaaggcaca

SEQ ID NO: 117358 - DNA, 15 bp, Homo sapiens
tgaaccagaaggcac

SEQ ID NO: 117359 - DNA, 15 bp, Homo sapiens
atgaaccagaaggca

SEQ ID NO: 117360 - DNA, 15 bp, Homo sapiens
catgaaccagaaggc

SEQ ID NO: 117361 - DNA, 15 bp, Homo sapiens
acatgaaccagaagg

SEQ ID NO: 117362 - DNA, 15 bp, Homo sapiens
tacatgaaccagaag

SEQ ID NO: 117363 - DNA, 15 bp, Homo sapiens
gtacatgaaccagaa

SEQ ID NO: 117364 - DNA, 15 bp, Homo sapiens
cgtacatgaaccaga

SEQ ID NO: 117365 - DNA, 15 bp, Homo sapiens
acgtacatgaaccag

SEQ ID NO: 117366 - DNA, 15 bp, Homo sapiens
aacgtacatgaacca

SEQ ID NO: 117367 - DNA, 15 bp, Homo sapiens
aaacgtacatgaacc

SEQ ID NO: 117368 - DNA, 15 bp, Homo sapiens
gaaacgtacatgaac

SEQ ID NO: 117369 - DNA, 15 bp, Homo sapiens
ggaaacgtacatgaa

SEQ ID NO: 117370 - DNA, 15 bp, Homo sapiens
aggaaacgtacatga

SEQ ID NO: 117371 - DNA, 15 bp, Homo sapiens
aaggaaacgtacatg

SEQ ID NO: 117372 - DNA, 15 bp, Homo sapiens
gaaggaaacgtacat

SEQ ID NO: 117373 - DNA, 15 bp, Homo sapiens
agaaggaaacgtaca

SEQ ID NO: 117374 - DNA, 15 bp, Homo sapiens
gagaaggaaacgtac

SEQ ID NO: 117375 - DNA, 15 bp, Homo sapiens
agagaaggaaacgta

SEQ ID NO: 117376 - DNA, 15 bp, Homo sapiens
gagagaaggaaacgt

SEQ ID NO: 117377 - DNA, 15 bp, Homo sapiens
ggagagaaggaaacg

SEQ ID NO: 117378 - DNA, 15 bp, Homo sapiens
gggagagaaggaaac

SEQ ID NO: 117379 - DNA, 15 bp, Homo sapiens
agggagagaaggaaa

SEQ ID NO: 117380 - DNA, 15 bp, Homo sapiens
gagggagagaaggaa

SEQ ID NO: 117381 - DNA, 15 bp, Homo sapiens
tgagggagagaagga

SEQ ID NO: 117382 - DNA, 15 bp, Homo sapiens
ttgagggagagaagg

SEQ ID NO: 117383 - DNA, 15 bp, Homo sapiens
tttgagggagagaag

SEQ ID NO: 117384 - DNA, 15 bp, Homo sapiens
atttgagggagagaa

SEQ ID NO: 117385 - DNA, 15 bp, Homo sapiens
gatttgagggagaga

SEQ ID NO: 117386 - DNA, 15 bp, Homo sapiens
cgatttgagggagag

SEQ ID NO: 117387 - DNA, 15 bp, Homo sapiens
acgatttgagggaga

SEQ ID NO: 117388 - DNA, 15 bp, Homo sapiens
aacgatttgagggag

SEQ ID NO: 117389 - DNA, 15 bp, Homo sapiens
aaacgatttgaggga

SEQ ID NO: 117390 - DNA, 15 bp, Homo sapiens
taaacgatttgaggg

SEQ ID NO: 117391 - DNA, 15 bp, Homo sapiens
ctaaacgatttgagg

SEQ ID NO: 117392 - DNA, 15 bp, Homo sapiens
gctaaacgatttgag

SEQ ID NO: 117393 - DNA, 15 bp, Homo sapiens
tgctaaacgatttga

SEQ ID NO: 117394 - DNA, 15 bp, Homo sapiens
ctgctaaacgatttg

SEQ ID NO: 117395 - DNA, 15 bp, Homo sapiens
actgctaaacgattt

SEQ ID NO: 117396 - DNA, 15 bp, Homo sapiens
aactgctaaacgatt

SEQ ID NO: 117397 - DNA, 15 bp, Homo sapiens
aaactgctaaacgat

SEQ ID NO: 117398 - DNA, 15 bp, Homo sapiens
gaaactgctaaacga

SEQ ID NO: 117399 - DNA, 15 bp, Homo sapiens
agaaactgctaaacg

SEQ ID NO: 117400 - DNA, 15 bp, Homo sapiens
aagaaactgctaaac

SEQ ID NO: 117401 - DNA, 15 bp, Homo sapiens
taagaaactgctaaa

SEQ ID NO: 117402 - DNA, 15 bp, Homo sapiens
gtaagaaactgctaa

SEQ ID NO: 117403 - DNA, 15 bp, Homo sapiens
ggtaagaaactgcta

SEQ ID NO: 117404 - DNA, 15 bp, Homo sapiens
gggtaagaaactgct

SEQ ID NO: 117405 - DNA, 15 bp, Homo sapiens
ggggtaagaaactgc

SEQ ID NO: 117406 - DNA, 15 bp, Homo sapiens
tggggtaagaaactg

SEQ ID NO: 117407 - DNA, 15 bp, Homo sapiens
atggggtaagaaact

SEQ ID NO: 117408 - DNA, 15 bp, Homo sapiens
aatggggtaagaaac

SEQ ID NO: 117409 - DNA, 15 bp, Homo sapiens
gaatggggtaagaaa

SEQ ID NO: 117410 - DNA, 15 bp, Homo sapiens
agaatggggtaagaa

SEQ ID NO: 117411 - DNA, 15 bp, Homo sapiens
gagaatggggtaaga

SEQ ID NO: 117412 - DNA, 15 bp, Homo sapiens
ggagaatggggtaag

SEQ ID NO: 117413 - DNA, 15 bp, Homo sapiens
cggagaatggggtaa

SEQ ID NO: 117414 - DNA, 15 bp, Homo sapiens
acggagaatggggta

SEQ ID NO: 117415 - DNA, 15 bp, Homo sapiens
cacggagaatggggt

SEQ ID NO: 117416 - DNA, 15 bp, Homo sapiens
tcacggagaatgggg

SEQ ID NO: 117417 - DNA, 15 bp, Homo sapiens
atcacggagaatggg

SEQ ID NO: 117418 - DNA, 15 bp, Homo sapiens
catcacggagaatgg

SEQ ID NO: 117419 - DNA, 15 bp, Homo sapiens
acatcacggagaatg

SEQ ID NO: 117420 - DNA, 15 bp, Homo sapiens
cacatcacggagaat

SEQ ID NO: 117421 - DNA, 15 bp, Homo sapiens
gcacatcacggagaa

SEQ ID NO: 117422 - DNA, 15 bp, Homo sapiens
agcacatcacggaga

SEQ ID NO: 117423 - DNA, 15 bp, Homo sapiens
aagcacatcacggag

SEQ ID NO: 117424 - DNA, 15 bp, Homo sapiens
taagcacatcacgga

SEQ ID NO: 117425 - DNA, 15 bp, Homo sapiens
ataagcacatcacgg

SEQ ID NO: 117426 - DNA, 15 bp, Homo sapiens
aataagcacatcacg

SEQ ID NO: 117427 - DNA, 15 bp, Homo sapiens
aaataagcacatcac

SEQ ID NO: 117428 - DNA, 15 bp, Homo sapiens
gaaataagcacatca

SEQ ID NO: 117429 - DNA, 15 bp, Homo sapiens
tgaaataagcacatc

SEQ ID NO: 117430 - DNA, 15 bp, Homo sapiens
atgaaataagcacat

SEQ ID NO: 117431 - DNA, 15 bp, Homo sapiens
tatgaaataagcaca

SEQ ID NO: 117432 - DNA, 15 bp, Homo sapiens
atatgaaataagcac

SEQ ID NO: 117433 - DNA, 15 bp, Homo sapiens
aatatgaaataagca

SEQ ID NO: 117434 - DNA, 15 bp, Homo sapiens
caatatgaaataagc

SEQ ID NO: 117435 - DNA, 15 bp, Homo sapiens
gcaatatgaaataag

SEQ ID NO: 117436 - DNA, 15 bp, Homo sapiens
tgcaatatgaaataa

SEQ ID NO: 117437 - DNA, 15 bp, Homo sapiens
atgcaatatgaaata

SEQ ID NO: 117438 - DNA, 15 bp, Homo sapiens
catgcaatatgaaat

SEQ ID NO: 117439 - DNA, 15 bp, Homo sapiens
gcatgcaatatgaaa

SEQ ID NO: 117440 - DNA, 15 bp, Homo sapiens
ggcatgcaatatgaa

SEQ ID NO: 117441 - DNA, 15 bp, Homo sapiens
aggcatgcaatatga

SEQ ID NO: 117442 - DNA, 15 bp, Homo sapiens
caggcatgcaatatg

SEQ ID NO: 117443 - DNA, 15 bp, Homo sapiens
acaggcatgcaatat

SEQ ID NO: 117444 - DNA, 15 bp, Homo sapiens
tacaggcatgcaata

SEQ ID NO: 117445 - DNA, 15 bp, Homo sapiens
atacaggcatgcaat

SEQ ID NO: 117446 - DNA, 15 bp, Homo sapiens
gatacaggcatgcaa

SEQ ID NO: 117447 - DNA, 15 bp, Homo sapiens
tgatacaggcatgca

SEQ ID NO: 117448 - DNA, 15 bp, Homo sapiens
ttgatacaggcatgc

SEQ ID NO: 117449 - DNA, 15 bp, Homo sapiens
tttgatacaggcatg

SEQ ID NO: 117450 - DNA, 15 bp, Homo sapiens
ttttgatacaggcat

SEQ ID NO: 117451 - DNA, 15 bp, Homo sapiens
gttttgatacaggca

SEQ ID NO: 117452 - DNA, 15 bp, Homo sapiens
tgttttgatacaggc

SEQ ID NO: 117453 - DNA, 15 bp, Homo sapiens
atgttttgatacagg

SEQ ID NO: 117454 - DNA, 15 bp, Homo sapiens
gatgttttgatacag

SEQ ID NO: 117455 - DNA, 15 bp, Homo sapiens
agatgttttgataca

SEQ ID NO: 117456 - DNA, 15 bp, Homo sapiens
gagatgttttgatac

SEQ ID NO: 117457 - DNA, 15 bp, Homo sapiens
tgagatgttttgata

SEQ ID NO: 117458 - DNA, 15 bp, Homo sapiens
atgagatgttttgat

SEQ ID NO: 117459 - DNA, 15 bp, Homo sapiens
tatgagatgttttga

SEQ ID NO: 117460 - DNA, 15 bp, Homo sapiens
atatgagatgttttg

SEQ ID NO: 117461 - DNA, 15 bp, Homo sapiens
catatgagatgtttt

SEQ ID NO: 117462 - DNA, 15 bp, Homo sapiens
gcatatgagatgttt

SEQ ID NO: 117463 - DNA, 15 bp, Homo sapiens
ggcatatgagatgtt

SEQ ID NO: 117464 - DNA, 15 bp, Homo sapiens
gggcatatgagatgt

SEQ ID NO: 117465 - DNA, 15 bp, Homo sapiens
ggggcatatgagatg

SEQ ID NO: 117466 - DNA, 15 bp, Homo sapiens
tggggcatatgagat

SEQ ID NO: 117467 - DNA, 15 bp, Homo sapiens
atggggcatatgaga

SEQ ID NO: 117468 - DNA, 15 bp, Homo sapiens
tatggggcatatgag

SEQ ID NO: 117469 - DNA, 15 bp, Homo sapiens
ttatggggcatatga

SEQ ID NO: 117470 - DNA, 15 bp, Homo sapiens
tttatggggcatatg

SEQ ID NO: 117471 - DNA, 15 bp, Homo sapiens
atttatggggcatat

SEQ ID NO: 117472 - DNA, 15 bp, Homo sapiens
tatttatggggcata

SEQ ID NO: 117473 - DNA, 15 bp, Homo sapiens
atatttatggggcat

SEQ ID NO: 117474 - DNA, 15 bp, Homo sapiens
tatatttatggggca

SEQ ID NO: 117475 - DNA, 15 bp, Homo sapiens
atatatttatggggc

SEQ ID NO: 117476 - DNA, 15 bp, Homo sapiens
tatatatttatgggg

SEQ ID NO: 117477 - DNA, 15 bp, Homo sapiens
atatatatttatggg

SEQ ID NO: 117478 - DNA, 15 bp, Homo sapiens
tatatatatttatgg

SEQ ID NO: 117479 - DNA, 15 bp, Homo sapiens
gtatatatatttatg

SEQ ID NO: 117480 - DNA, 15 bp, Homo sapiens
ggtatatatatttat

SEQ ID NO: 117481 - DNA, 15 bp, Homo sapiens
aggtatatatattta

SEQ ID NO: 117482 - DNA, 15 bp, Homo sapiens
taggtatatatattt

SEQ ID NO: 117483 - DNA, 15 bp, Homo sapiens
gtaggtatatatatt

SEQ ID NO: 117484 - DNA, 15 bp, Homo sapiens
agtaggtatatatat

SEQ ID NO: 117485 - DNA, 15 bp, Homo sapiens
tagtaggtatatata

SEQ ID NO: 117486 - DNA, 15 bp, Homo sapiens
atagtaggtatatat

SEQ ID NO: 117487 - DNA, 15 bp, Homo sapiens
catagtaggtatata

SEQ ID NO: 117488 - DNA, 15 bp, Homo sapiens
acatagtaggtatat

SEQ ID NO: 117489 - DNA, 15 bp, Homo sapiens
tacatagtaggtata

SEQ ID NO: 117490 - DNA, 15 bp, Homo sapiens
gtacatagtaggtat

SEQ ID NO: 117491 - DNA, 15 bp, Homo sapiens
ggtacatagtaggta

SEQ ID NO: 117492 - DNA, 15 bp, Homo sapiens
gggtacatagtaggt

SEQ ID NO: 117493 - DNA, 15 bp, Homo sapiens
tgggtacatagtagg

SEQ ID NO: 117494 - DNA, 15 bp, Homo sapiens
gtgggtacatagtag

SEQ ID NO: 117495 - DNA, 15 bp, Homo sapiens
tgtgggtacatagta

SEQ ID NO: 117496 - DNA, 15 bp, Homo sapiens
ttgtgggtacatagt

SEQ ID NO: 117497 - DNA, 15 bp, Homo sapiens
tttgtgggtacatag

SEQ ID NO: 117498 - DNA, 15 bp, Homo sapiens
ttttgtgggtacata

SEQ ID NO: 117499 - DNA, 15 bp, Homo sapiens
gttttgtgggtacat

SEQ ID NO: 117500 - DNA, 15 bp, Homo sapiens
agttttgtgggtaca

SEQ ID NO: 117501 - DNA, 15 bp, Homo sapiens
tagttttgtgggtac

SEQ ID NO: 117502 - DNA, 15 bp, Homo sapiens
ttagttttgtgggta

SEQ ID NO: 117503 - DNA, 15 bp, Homo sapiens
tttagttttgtgggt

SEQ ID NO: 117504 - DNA, 15 bp, Homo sapiens
ttttagttttgtggg

SEQ ID NO: 117505 - DNA, 15 bp, Homo sapiens
tttttagttttgtgg

SEQ ID NO: 117506 - DNA, 15 bp, Homo sapiens
atttttagttttgtg

SEQ ID NO: 117507 - DNA, 15 bp, Homo sapiens
aatttttagttttgt

SEQ ID NO: 117508 - DNA, 15 bp, Homo sapiens
taatttttagttttg

SEQ ID NO: 117509 - DNA, 15 bp, Homo sapiens
ttaatttttagtttt

SEQ ID NO: 117510 - DNA, 15 bp, Homo sapiens
tttaatttttagttt

SEQ ID NO: 117511 - DNA, 15 bp, Homo sapiens
ttttaatttttagtt

SEQ ID NO: 117512 - DNA, 15 bp, Homo sapiens
tttttaatttttagt

SEQ ID NO: 117513 - DNA, 15 bp, Homo sapiens
ttttttaatttttag

SEQ ID NO: 117514 - DNA, 15 bp, Homo sapiens
ttttttttaattttt

SEQ ID NO: 117515 - DNA, 15 bp, Homo sapiens
tttttttttaatttt

SEQ ID NO: 117516 - DNA, 15 bp, Homo sapiens
ctttttttttaattt

SEQ ID NO: 117517 - DNA, 15 bp, Homo sapiens
cctttttttttaatt

SEQ ID NO: 117518 - DNA, 15 bp, Homo sapiens
tcctttttttttaat

SEQ ID NO: 117519 - DNA, 15 bp, Homo sapiens
ttcctttttttttaa

SEQ ID NO: 117520 - DNA, 15 bp, Homo sapiens
tttccttttttttta

SEQ ID NO: 117521 - DNA, 15 bp, Homo sapiens
ttttccttttttttt

SEQ ID NO: 117522 - DNA, 15 bp, Homo sapiens
tttttcctttttttt

SEQ ID NO: 117523 - DNA, 15 bp, Homo sapiens
ttttttccttttttt

SEQ ID NO: 117524 - DNA, 15 bp, Homo sapiens
tttttttcctttttt

SEQ ID NO: 117525 - DNA, 15 bp, Homo sapiens
ttttttttccttttt

SEQ ID NO: 117526 - DNA, 15 bp, Homo sapiens
tttttttttcctttt

SEQ ID NO: 117527 - DNA, 15 bp, Homo sapiens
ctttttttttccttt

SEQ ID NO: 117528 - DNA, 15 bp, Homo sapiens
cctttttttttcctt

SEQ ID NO: 117529 - DNA, 15 bp, Homo sapiens
gcctttttttttcct

SEQ ID NO: 117530 - DNA, 15 bp, Homo sapiens
ggcctttttttttcc

SEQ ID NO: 117531 - DNA, 15 bp, Homo sapiens
aggcctttttttttc

SEQ ID NO: 117532 - DNA, 15 bp, Homo sapiens
caggccttttttttt

SEQ ID NO: 117533 - DNA, 15 bp, Homo sapiens
gcaggcctttttttt

SEQ ID NO: 117534 - DNA, 15 bp, Homo sapiens
tgcaggccttttttt

SEQ ID NO: 117535 - DNA, 15 bp, Homo sapiens
ttgcaggcctttttt

SEQ ID NO: 117536 - DNA, 15 bp, Homo sapiens
gttgcaggccttttt

SEQ ID NO: 117537 - DNA, 15 bp, Homo sapiens
tgttgcaggcctttt

SEQ ID NO: 117538 - DNA, 15 bp, Homo sapiens
ttgttgcaggccttt

SEQ ID NO: 117539 - DNA, 15 bp, Homo sapiens
cttgttgcaggcctt

SEQ ID NO: 117540 - DNA, 15 bp, Homo sapiens
tcttgttgcaggcct

SEQ ID NO: 117541 - DNA, 15 bp, Homo sapiens
ctcttgttgcaggcc

SEQ ID NO: 117542 - DNA, 15 bp, Homo sapiens
tctcttgttgcaggc

SEQ ID NO: 117543 - DNA, 15 bp, Homo sapiens
ttctcttgttgcagg

SEQ ID NO: 117544 - DNA, 15 bp, Homo sapiens
cttctcttgttgcag

SEQ ID NO: 117545 - DNA, 15 bp, Homo sapiens
tcttctcttgttgca

SEQ ID NO: 117546 - DNA, 15 bp, Homo sapiens
ttcttctcttgttgc

SEQ ID NO: 117547 - DNA, 15 bp, Homo sapiens
cttcttctcttgttg

SEQ ID NO: 117548 - DNA, 15 bp, Homo sapiens
tcttcttctcttgtt

SEQ ID NO: 117549 - DNA, 15 bp, Homo sapiens
ttcttcttctcttgt

SEQ ID NO: 117550 - DNA, 15 bp, Homo sapiens
tttcttcttctcttg

SEQ ID NO: 117551 - DNA, 15 bp, Homo sapiens
ctttcttcttctctt

SEQ ID NO: 117552 - DNA, 15 bp, Homo sapiens
tctttcttcttctct

SEQ ID NO: 117553 - DNA, 15 bp, Homo sapiens
ttctttcttcttctc

SEQ ID NO: 117554 - DNA, 15 bp, Homo sapiens
tttctttcttcttct

SEQ ID NO: 117555 - DNA, 15 bp, Homo sapiens
atttctttcttcttc

SEQ ID NO: 117556 - DNA, 15 bp, Homo sapiens
gatttctttcttctt

SEQ ID NO: 117557 - DNA, 15 bp, Homo sapiens
tgatttctttcttct

SEQ ID NO: 117558 - DNA, 15 bp, Homo sapiens
ctgatttctttcttc

SEQ ID NO: 117559 - DNA, 15 bp, Homo sapiens
tctgatttctttctt

SEQ ID NO: 117560 - DNA, 15 bp, Homo sapiens
atctgatttctttct

SEQ ID NO: 117561 - DNA, 15 bp, Homo sapiens
tatctgatttctttc

SEQ ID NO: 117562 - DNA, 15 bp, Homo sapiens
gtatctgatttcttt

SEQ ID NO: 117563 - DNA, 15 bp, Homo sapiens
ggtatctgatttctt

SEQ ID NO: 117564 - DNA, 15 bp, Homo sapiens
gggtatctgatttct

SEQ ID NO: 117565 - DNA, 15 bp, Homo sapiens
agggtatctgatttc

SEQ ID NO: 117566 - DNA, 15 bp, Homo sapiens
cagggtatctgattt

SEQ ID NO: 117567 - DNA, 15 bp, Homo sapiens
acagggtatctgatt

SEQ ID NO: 117568 - DNA, 15 bp, Homo sapiens
tacagggtatctgat

SEQ ID NO: 117569 - DNA, 15 bp, Homo sapiens
ctacagggtatctga

SEQ ID NO: 117570 - DNA, 15 bp, Homo sapiens
cctacagggtatctg

SEQ ID NO: 117571 - DNA, 15 bp, Homo sapiens
acctacagggtatct

SEQ ID NO: 117572 - DNA, 15 bp, Homo sapiens
tacctacagggtatc

SEQ ID NO: 117573 - DNA, 15 bp, Homo sapiens
ctacctacagggtat

SEQ ID NO: 117574 - DNA, 15 bp, Homo sapiens
gctacctacagggta

SEQ ID NO: 117575 - DNA, 15 bp, Homo sapiens
agctacctacagggt

SEQ ID NO: 117576 - DNA, 15 bp, Homo sapiens
tagctacctacaggg

SEQ ID NO: 117577 - DNA, 15 bp, Homo sapiens
atagctacctacagg

SEQ ID NO: 117578 - DNA, 15 bp, Homo sapiens
gatagctacctacag

SEQ ID NO: 117579 - DNA, 15 bp, Homo sapiens
agatagctacctaca

SEQ ID NO: 117580 - DNA, 15 bp, Homo sapiens
gagatagctacctac

SEQ ID NO: 117581 - DNA, 15 bp, Homo sapiens
ggagatagctaccta

SEQ ID NO: 117582 - DNA, 15 bp, Homo sapiens
gggagatagctacct

SEQ ID NO: 117583 - DNA, 15 bp, Homo sapiens
tgggagatagctacc

SEQ ID NO: 117584 - DNA, 15 bp, Homo sapiens
ttgggagatagctac

SEQ ID NO: 117585 - DNA, 15 bp, Homo sapiens
tttgggagatagcta

SEQ ID NO: 117586 - DNA, 15 bp, Homo sapiens
ttttgggagatagct

SEQ ID NO: 117587 - DNA, 15 bp, Homo sapiens
cttttgggagatagc

SEQ ID NO: 117588 - DNA, 15 bp, Homo sapiens
acttttgggagatag

SEQ ID NO: 117589 - DNA, 15 bp, Homo sapiens
aacttttgggagata

SEQ ID NO: 117590 - DNA, 15 bp, Homo sapiens
aaacttttgggagat

SEQ ID NO: 117591 - DNA, 15 bp, Homo sapiens
aaaacttttgggaga

SEQ ID NO: 117592 - DNA, 15 bp, Homo sapiens
gaaaacttttgggag

SEQ ID NO: 117593 - DNA, 15 bp, Homo sapiens
tgaaaacttttggga

SEQ ID NO: 117594 - DNA, 15 bp, Homo sapiens
ttgaaaacttttggg

SEQ ID NO: 117595 - DNA, 15 bp, Homo sapiens
attgaaaacttttgg

SEQ ID NO: 117596 - DNA, 15 bp, Homo sapiens
tattgaaaacttttg

SEQ ID NO: 117597 - DNA, 15 bp, Homo sapiens
ctattgaaaactttt

SEQ ID NO: 117598 - DNA, 15 bp, Homo sapiens
actattgaaaacttt

SEQ ID NO: 117599 - DNA, 15 bp, Homo sapiens
aactattgaaaactt

SEQ ID NO: 117600 - DNA, 15 bp, Homo sapiens
caactattgaaaact

SEQ ID NO: 117601 - DNA, 15 bp, Homo sapiens
tcaactattgaaaac

SEQ ID NO: 117602 - DNA, 15 bp, Homo sapiens
gtcaactattgaaaa

SEQ ID NO: 117603 - DNA, 15 bp, Homo sapiens
agtcaactattgaaa

SEQ ID NO: 117604 - DNA, 15 bp, Homo sapiens
aagtcaactattgaa

SEQ ID NO: 117605 - DNA, 15 bp, Homo sapiens
taagtcaactattga

SEQ ID NO: 117606 - DNA, 15 bp, Homo sapiens
ttaagtcaactattg

SEQ ID NO: 117607 - DNA, 15 bp, Homo sapiens
cttaagtcaactatt

SEQ ID NO: 117608 - DNA, 15 bp, Homo sapiens
tcttaagtcaactat

SEQ ID NO: 117609 - DNA, 15 bp, Homo sapiens
ttcttaagtcaacta

SEQ ID NO: 117610 - DNA, 15 bp, Homo sapiens
tttcttaagtcaact

SEQ ID NO: 117611 - DNA, 15 bp, Homo sapiens
ttttcttaagtcaac

SEQ ID NO: 117612 - DNA, 15 bp, Homo sapiens
gttttcttaagtcaa

SEQ ID NO: 117613 - DNA, 15 bp, Homo sapiens
agttttcttaagtca

SEQ ID NO: 117614 - DNA, 15 bp, Homo sapiens
tagttttcttaagtc

SEQ ID NO: 117615 - DNA, 15 bp, Homo sapiens
gtagttttcttaagt

SEQ ID NO: 117616 - DNA, 15 bp, Homo sapiens
agtagttttcttaag

SEQ ID NO: 117617 - DNA, 15 bp, Homo sapiens
cagtagttttcttaa

SEQ ID NO: 117618 - DNA, 15 bp, Homo sapiens
tcagtagttttctta

SEQ ID NO: 117619 - DNA, 15 bp, Homo sapiens
gtcagtagttttctt

SEQ ID NO: 117620 - DNA, 15 bp, Homo sapiens
agtcagtagttttct

SEQ ID NO: 117621 - DNA, 15 bp, Homo sapiens
aagtcagtagttttc

SEQ ID NO: 117622 - DNA, 15 bp, Homo sapiens
caagtcagtagtttt

SEQ ID NO: 117623 - DNA, 15 bp, Homo sapiens
acaagtcagtagttt

SEQ ID NO: 117624 - DNA, 15 bp, Homo sapiens
tacaagtcagtagtt

SEQ ID NO: 117625 - DNA, 15 bp, Homo sapiens
atacaagtcagtagt

SEQ ID NO: 117626 - DNA, 15 bp, Homo sapiens
catacaagtcagtag

SEQ ID NO: 117627 - DNA, 15 bp, Homo sapiens
acatacaagtcagta

SEQ ID NO: 117628 - DNA, 15 bp, Homo sapiens
tacatacaagtcagt

SEQ ID NO: 117629 - DNA, 15 bp, Homo sapiens
ttacatacaagtcag

SEQ ID NO: 117630 - DNA, 15 bp, Homo sapiens
gttacatacaagtca

SEQ ID NO: 117631 - DNA, 15 bp, Homo sapiens
agttacatacaagtc

SEQ ID NO: 117632 - DNA, 15 bp, Homo sapiens
cagttacatacaagt

SEQ ID NO: 117633 - DNA, 15 bp, Homo sapiens
tcagttacatacaag

SEQ ID NO: 117634 - DNA, 15 bp, Homo sapiens
ttcagttacatacaa

SEQ ID NO: 117635 - DNA, 15 bp, Homo sapiens
tttcagttacataca

SEQ ID NO: 117636 - DNA, 15 bp, Homo sapiens
atttcagttacatac

SEQ ID NO: 117637 - DNA, 15 bp, Homo sapiens
gatttcagttacata

SEQ ID NO: 117638 - DNA, 15 bp, Homo sapiens
tgatttcagttacat

SEQ ID NO: 117639 - DNA, 15 bp, Homo sapiens
ctgatttcagttaca

SEQ ID NO: 117640 - DNA, 15 bp, Homo sapiens
cctgatttcagttac

SEQ ID NO: 117641 - DNA, 15 bp, Homo sapiens
tcctgatttcagtta

SEQ ID NO: 117642 - DNA, 15 bp, Homo sapiens
ttcctgatttcagtt

SEQ ID NO: 117643 - DNA, 15 bp, Homo sapiens
tttcctgatttcagt

SEQ ID NO: 117644 - DNA, 15 bp, Homo sapiens
gtttcctgatttcag

SEQ ID NO: 117645 - DNA, 15 bp, Homo sapiens
ggtttcctgatttca

SEQ ID NO: 117646 - DNA, 15 bp, Homo sapiens
aggtttcctgatttc

SEQ ID NO: 117647 - DNA, 15 bp, Homo sapiens
caggtttcctgattt

SEQ ID NO: 117648 - DNA, 15 bp, Homo sapiens
acaggtttcctgatt

SEQ ID NO: 117649 - DNA, 15 bp, Homo sapiens
tacaggtttcctgat

SEQ ID NO: 117650 - DNA, 15 bp, Homo sapiens
ctacaggtttcctga

SEQ ID NO: 117651 - DNA, 15 bp, Homo sapiens
actacaggtttcctg

SEQ ID NO: 117652 - DNA, 15 bp, Homo sapiens
cactacaggtttcct

SEQ ID NO: 117653 - DNA, 15 bp, Homo sapiens
acactacaggtttcc

SEQ ID NO: 117654 - DNA, 15 bp, Homo sapiens
tacactacaggtttc

SEQ ID NO: 117655 - DNA, 15 bp, Homo sapiens
ctacactacaggttt

SEQ ID NO: 117656 - DNA, 15 bp, Homo sapiens
tctacactacaggtt

SEQ ID NO: 117657 - DNA, 15 bp, Homo sapiens
ctctacactacaggt

SEQ ID NO: 117658 - DNA, 15 bp, Homo sapiens
actctacactacagg

SEQ ID NO: 117659 - DNA, 15 bp, Homo sapiens
cactctacactacag

SEQ ID NO: 117660 - DNA, 15 bp, Homo sapiens
ccactctacactaca

SEQ ID NO: 117661 - DNA, 15 bp, Homo sapiens
accactctacactac

SEQ ID NO: 117662 - DNA, 15 bp, Homo sapiens
aaccactctacacta

SEQ ID NO: 117663 - DNA, 15 bp, Homo sapiens
gaaccactctacact

SEQ ID NO: 117664 - DNA, 15 bp, Homo sapiens
ggaaccactctacac

SEQ ID NO: 117665 - DNA, 15 bp, Homo sapiens
gggaaccactctaca

SEQ ID NO: 117666 - DNA, 15 bp, Homo sapiens
ggggaaccactctac

SEQ ID NO: 117667 - DNA, 15 bp, Homo sapiens
aggggaaccactcta

SEQ ID NO: 117668 - DNA, 15 bp, Homo sapiens
caggggaaccactct

SEQ ID NO: 117669 - DNA, 15 bp, Homo sapiens
tcaggggaaccactc

SEQ ID NO: 117670 - DNA, 15 bp, Homo sapiens
ttcaggggaaccact

SEQ ID NO: 117671 - DNA, 15 bp, Homo sapiens
attcaggggaaccac

SEQ ID NO: 117672 - DNA, 15 bp, Homo sapiens
tattcaggggaacca

SEQ ID NO: 117673 - DNA, 15 bp, Homo sapiens
atattcaggggaacc

SEQ ID NO: 117674 - DNA, 15 bp, Homo sapiens
catattcaggggaac

SEQ ID NO: 117675 - DNA, 15 bp, Homo sapiens
acatattcaggggaa

SEQ ID NO: 117676 - DNA, 15 bp, Homo sapiens
gacatattcagggga

SEQ ID NO: 117677 - DNA, 15 bp, Homo sapiens
agacatattcagggg

SEQ ID NO: 117678 - DNA, 15 bp, Homo sapiens
gagacatattcaggg

SEQ ID NO: 117679 - DNA, 15 bp, Homo sapiens
agagacatattcagg

SEQ ID NO: 117680 - DNA, 15 bp, Homo sapiens
aagagacatattcag

SEQ ID NO: 117681 - DNA, 15 bp, Homo sapiens
aaagagacatattca

SEQ ID NO: 117682 - DNA, 15 bp, Homo sapiens
aaaagagacatattc

SEQ ID NO: 117683 - DNA, 15 bp, Homo sapiens
caaaagagacatatt

SEQ ID NO: 117684 - DNA, 15 bp, Homo sapiens
ccaaaagagacatat

SEQ ID NO: 117685 - DNA, 15 bp, Homo sapiens
accaaaagagacata

SEQ ID NO: 117686 - DNA, 15 bp, Homo sapiens
taccaaaagagacat

SEQ ID NO: 117687 - DNA, 15 bp, Homo sapiens
ttaccaaaagagaca

SEQ ID NO: 117688 - DNA, 15 bp, Homo sapiens
attaccaaaagagac

SEQ ID NO: 117689 - DNA, 15 bp, Homo sapiens
gattaccaaaagaga

SEQ ID NO: 117690 - DNA, 15 bp, Homo sapiens
agattaccaaaagag

SEQ ID NO: 117691 - DNA, 15 bp, Homo sapiens
tagattaccaaaaga

SEQ ID NO: 117692 - DNA, 15 bp, Homo sapiens
ttagattaccaaaag

SEQ ID NO: 117693 - DNA, 15 bp, Homo sapiens
cttagattaccaaaa

SEQ ID NO: 117694 - DNA, 15 bp, Homo sapiens
gcttagattaccaaa

SEQ ID NO: 117695 - DNA, 15 bp, Homo sapiens
agcttagattaccaa

SEQ ID NO: 117696 - DNA, 15 bp, Homo sapiens
cagcttagattacca

SEQ ID NO: 117697 - DNA, 15 bp, Homo sapiens
acagcttagattacc

SEQ ID NO: 117698 - DNA, 15 bp, Homo sapiens
tacagcttagattac

SEQ ID NO: 117699 - DNA, 15 bp, Homo sapiens
atacagcttagatta

SEQ ID NO: 117700 - DNA, 15 bp, Homo sapiens
aatacagcttagatt

SEQ ID NO: 117701 - DNA, 15 bp, Homo sapiens
aaatacagcttagat

SEQ ID NO: 117702 - DNA, 15 bp, Homo sapiens
gaaatacagcttaga

SEQ ID NO: 117703 - DNA, 15 bp, Homo sapiens
tgaaatacagcttag

SEQ ID NO: 117704 - DNA, 15 bp, Homo sapiens
ctgaaatacagctta

SEQ ID NO: 117705 - DNA, 15 bp, Homo sapiens
tctgaaatacagctt

SEQ ID NO: 117706 - DNA, 15 bp, Homo sapiens
ttctgaaatacagct

SEQ ID NO: 117707 - DNA, 15 bp, Homo sapiens
tttctgaaatacagc

SEQ ID NO: 117708 - DNA, 15 bp, Homo sapiens
atttctgaaatacag

SEQ ID NO: 117709 - DNA, 15 bp, Homo sapiens
catttctgaaataca

SEQ ID NO: 117710 - DNA, 15 bp, Homo sapiens
acatttctgaaatac

SEQ ID NO: 117711 - DNA, 15 bp, Homo sapiens
tacatttctgaaata

SEQ ID NO: 117712 - DNA, 15 bp, Homo sapiens
gtacatttctgaaat

SEQ ID NO: 117713 - DNA, 15 bp, Homo sapiens
tgtacatttctgaaa

SEQ ID NO: 117714 - DNA, 15 bp, Homo sapiens
ctgtacatttctgaa

SEQ ID NO: 117715 - DNA, 15 bp, Homo sapiens
tctgtacatttctga

SEQ ID NO: 117716 - DNA, 15 bp, Homo sapiens
ttctgtacatttctg

SEQ ID NO: 117717 - DNA, 15 bp, Homo sapiens
tttctgtacatttct

SEQ ID NO: 117718 - DNA, 15 bp, Homo sapiens
ttttctgtacatttc

SEQ ID NO: 117719 - DNA, 15 bp, Homo sapiens
cttttctgtacattt

SEQ ID NO: 117720 - DNA, 15 bp, Homo sapiens
ccttttctgtacatt

SEQ ID NO: 117721 - DNA, 15 bp, Homo sapiens
tccttttctgtacat

SEQ ID NO: 117722 - DNA, 15 bp, Homo sapiens
ctccttttctgtaca

SEQ ID NO: 117723 - DNA, 15 bp, Homo sapiens
gctccttttctgtac

SEQ ID NO: 117724 - DNA, 15 bp, Homo sapiens
agctccttttctgta

SEQ ID NO: 117725 - DNA, 15 bp, Homo sapiens
tagctccttttctgt

SEQ ID NO: 117726 - DNA, 15 bp, Homo sapiens
ttagctccttttctg

SEQ ID NO: 117727 - DNA, 15 bp, Homo sapiens
cttagctccttttct

SEQ ID NO: 117728 - DNA, 15 bp, Homo sapiens
gcttagctccttttc

SEQ ID NO: 117729 - DNA, 15 bp, Homo sapiens
agcttagctcctttt

SEQ ID NO: 117730 - DNA, 15 bp, Homo sapiens
aagcttagctccttt

SEQ ID NO: 117731 - DNA, 15 bp, Homo sapiens
gaagcttagctcctt

SEQ ID NO: 117732 - DNA, 15 bp, Homo sapiens
agaagcttagctcct

SEQ ID NO: 117733 - DNA, 15 bp, Homo sapiens
tagaagcttagctcc

SEQ ID NO: 117734 - DNA, 15 bp, Homo sapiens
ttagaagcttagctc

SEQ ID NO: 117735 - DNA, 15 bp, Homo sapiens
tttagaagcttagct

SEQ ID NO: 117736 - DNA, 15 bp, Homo sapiens
atttagaagcttagc

SEQ ID NO: 117737 - DNA, 15 bp, Homo sapiens
catttagaagcttag

SEQ ID NO: 117738 - DNA, 15 bp, Homo sapiens
ccatttagaagctta

SEQ ID NO: 117739 - DNA, 15 bp, Homo sapiens
tccatttagaagctt

SEQ ID NO: 117740 - DNA, 15 bp, Homo sapiens
atccatttagaagct

SEQ ID NO: 117741 - DNA, 15 bp, Homo sapiens
tatccatttagaagc

SEQ ID NO: 117742 - DNA, 15 bp, Homo sapiens
atatccatttagaag

SEQ ID NO: 117743 - DNA, 15 bp, Homo sapiens
tatatccatttagaa

SEQ ID NO: 117744 - DNA, 15 bp, Homo sapiens
ctatatccatttaga

SEQ ID NO: 117745 - DNA, 15 bp, Homo sapiens
gctatatccatttag

SEQ ID NO: 117746 - DNA, 15 bp, Homo sapiens
tgctatatccattta

SEQ ID NO: 117747 - DNA, 15 bp, Homo sapiens
atgctatatccattt

SEQ ID NO: 117748 - DNA, 15 bp, Homo sapiens
tatgctatatccatt

SEQ ID NO: 117749 - DNA, 15 bp, Homo sapiens
atatgctatatccat

SEQ ID NO: 117750 - DNA, 15 bp, Homo sapiens
aatatgctatatcca

SEQ ID NO: 117751 - DNA, 15 bp, Homo sapiens
aaatatgctatatcc

SEQ ID NO: 117752 - DNA, 15 bp, Homo sapiens
aaaatatgctatatc

SEQ ID NO: 117753 - DNA, 15 bp, Homo sapiens
caaaatatgctatat

SEQ ID NO: 117754 - DNA, 15 bp, Homo sapiens
gcaaaatatgctata

SEQ ID NO: 117755 - DNA, 15 bp, Homo sapiens
tgcaaaatatgctat

SEQ ID NO: 117756 - DNA, 15 bp, Homo sapiens
atgcaaaatatgcta

SEQ ID NO: 117757 - DNA, 15 bp, Homo sapiens
tatgcaaaatatgct

SEQ ID NO: 117758 - DNA, 15 bp, Homo sapiens
ttatgcaaaatatgc

SEQ ID NO: 117759 - DNA, 15 bp, Homo sapiens
tttatgcaaaatatg

SEQ ID NO: 117760 - DNA, 15 bp, Homo sapiens
atttatgcaaaatat

SEQ ID NO: 117761 - DNA, 15 bp, Homo sapiens
gatttatgcaaaata

SEQ ID NO: 117762 - DNA, 15 bp, Homo sapiens
tgatttatgcaaaat

SEQ ID NO: 117763 - DNA, 15 bp, Homo sapiens
ttgatttatgcaaaa

SEQ ID NO: 117764 - DNA, 15 bp, Homo sapiens
tttgatttatgcaaa

SEQ ID NO: 117765 - DNA, 15 bp, Homo sapiens
atttgatttatgcaa

SEQ ID NO: 117766 - DNA, 15 bp, Homo sapiens
aatttgatttatgca

SEQ ID NO: 117767 - DNA, 15 bp, Homo sapiens
aaatttgatttatgc

SEQ ID NO: 117768 - DNA, 15 bp, Homo sapiens
taaatttgatttatg

SEQ ID NO: 117769 - DNA, 15 bp, Homo sapiens
ttaaatttgatttat

SEQ ID NO: 117770 - DNA, 15 bp, Homo sapiens
attaaatttgattta

SEQ ID NO: 117771 - DNA, 15 bp, Homo sapiens
tattaaatttgattt

SEQ ID NO: 117772 - DNA, 15 bp, Homo sapiens
atattaaatttgatt

SEQ ID NO: 117773 - DNA, 15 bp, Homo sapiens
catattaaatttgat

SEQ ID NO: 117774 - DNA, 15 bp, Homo sapiens
tcatattaaatttga

SEQ ID NO: 117775 - DNA, 15 bp, Homo sapiens
ttcatattaaatttg

SEQ ID NO: 117776 - DNA, 15 bp, Homo sapiens
attcatattaaattt

SEQ ID NO: 117777 - DNA, 15 bp, Homo sapiens
gattcatattaaatt

SEQ ID NO: 117778 - DNA, 15 bp, Homo sapiens
ggattcatattaaat

SEQ ID NO: 117779 - DNA, 15 bp, Homo sapiens
tggattcatattaaa

SEQ ID NO: 117780 - DNA, 15 bp, Homo sapiens
atggattcatattaa

SEQ ID NO: 117781 - DNA, 15 bp, Homo sapiens
catggattcatatta

SEQ ID NO: 117782 - DNA, 15 bp, Homo sapiens
tcatggattcatatt

SEQ ID NO: 117783 - DNA, 15 bp, Homo sapiens
atcatggattcatat

SEQ ID NO: 117784 - DNA, 15 bp, Homo sapiens
aatcatggattcata

SEQ ID NO: 117785 - DNA, 15 bp, Homo sapiens
gaatcatggattcat

SEQ ID NO: 117786 - DNA, 15 bp, Homo sapiens
agaatcatggattca

SEQ ID NO: 117787 - DNA, 15 bp, Homo sapiens
aagaatcatggattc

SEQ ID NO: 117788 - DNA, 15 bp, Homo sapiens
caagaatcatggatt

SEQ ID NO: 117789 - DNA, 15 bp, Homo sapiens
acaagaatcatggat

SEQ ID NO: 117790 - DNA, 15 bp, Homo sapiens
tacaagaatcatgga

SEQ ID NO: 117791 - DNA, 15 bp, Homo sapiens
atacaagaatcatgg

SEQ ID NO: 117792 - DNA, 15 bp, Homo sapiens
catacaagaatcatg

SEQ ID NO: 117793 - DNA, 15 bp, Homo sapiens
acatacaagaatcat

SEQ ID NO: 117794 - DNA, 15 bp, Homo sapiens
cacatacaagaatca

SEQ ID NO: 117795 - DNA, 15 bp, Homo sapiens
acacatacaagaatc

SEQ ID NO: 117796 - DNA, 15 bp, Homo sapiens
tacacatacaagaat

SEQ ID NO: 117797 - DNA, 15 bp, Homo sapiens
ttacacatacaagaa

SEQ ID NO: 117798 - DNA, 15 bp, Homo sapiens
tttacacatacaaga

SEQ ID NO: 117799 - DNA, 15 bp, Homo sapiens
atttacacatacaag

SEQ ID NO: 117800 - DNA, 15 bp, Homo sapiens
gatttacacatacaa

SEQ ID NO: 117801 - DNA, 15 bp, Homo sapiens
agatttacacataca

SEQ ID NO: 117802 - DNA, 15 bp, Homo sapiens
cagatttacacatac

SEQ ID NO: 117803 - DNA, 15 bp, Homo sapiens
gcagatttacacata

SEQ ID NO: 117804 - DNA, 15 bp, Homo sapiens
ggcagatttacacat

SEQ ID NO: 117805 - DNA, 15 bp, Homo sapiens
aggcagatttacaca

SEQ ID NO: 117806 - DNA, 15 bp, Homo sapiens
caggcagatttacac

SEQ ID NO: 117807 - DNA, 15 bp, Homo sapiens
gcaggcagatttaca

SEQ ID NO: 117808 - DNA, 15 bp, Homo sapiens
tgcaggcagatttac

SEQ ID NO: 117809 - DNA, 15 bp, Homo sapiens
atgcaggcagattta

SEQ ID NO: 117810 - DNA, 15 bp, Homo sapiens
aatgcaggcagattt

SEQ ID NO: 117811 - DNA, 15 bp, Homo sapiens
aaatgcaggcagatt

SEQ ID NO: 117812 - DNA, 15 bp, Homo sapiens
taaatgcaggcagat

SEQ ID NO: 117813 - DNA, 15 bp, Homo sapiens
ataaatgcaggcaga

SEQ ID NO: 117814 - DNA, 15 bp, Homo sapiens
aataaatgcaggcag

SEQ ID NO: 117815 - DNA, 15 bp, Homo sapiens
aaataaatgcaggca

SEQ ID NO: 117816 - DNA, 15 bp, Homo sapiens
taaataaatgcaggc

SEQ ID NO: 117817 - DNA, 15 bp, Homo sapiens
ataaataaatgcagg

SEQ ID NO: 117818 - DNA, 15 bp, Homo sapiens
cataaataaatgcag

SEQ ID NO: 117819 - DNA, 15 bp, Homo sapiens
acataaataaatgca

SEQ ID NO: 117820 - DNA, 15 bp, Homo sapiens
gacataaataaatgc

SEQ ID NO: 117821 - DNA, 15 bp, Homo sapiens
tgacataaataaatg

SEQ ID NO: 117822 - DNA, 15 bp, Homo sapiens
ctgacataaataaat

SEQ ID NO: 117823 - DNA, 15 bp, Homo sapiens
actgacataaataaa

SEQ ID NO: 117824 - DNA, 15 bp, Homo sapiens
tactgacataaataa

SEQ ID NO: 117825 - DNA, 15 bp, Homo sapiens
ctactgacataaata

SEQ ID NO: 117826 - DNA, 15 bp, Homo sapiens
actactgacataaat

SEQ ID NO: 117827 - DNA, 15 bp, Homo sapiens
aactactgacataaa

SEQ ID NO: 117828 - DNA, 15 bp, Homo sapiens
caactactgacataa

SEQ ID NO: 117829 - DNA, 15 bp, Homo sapiens
ccaactactgacata

SEQ ID NO: 117830 - DNA, 15 bp, Homo sapiens
accaactactgacat

SEQ ID NO: 117831 - DNA, 15 bp, Homo sapiens
taccaactactgaca

SEQ ID NO: 117832 - DNA, 15 bp, Homo sapiens
ttaccaactactgac

SEQ ID NO: 117833 - DNA, 15 bp, Homo sapiens
attaccaactactga

SEQ ID NO: 117834 - DNA, 15 bp, Homo sapiens
aattaccaactactg

SEQ ID NO: 117835 - DNA, 15 bp, Homo sapiens
taattaccaactact

SEQ ID NO: 117836 - DNA, 15 bp, Homo sapiens
ataattaccaactac

SEQ ID NO: 117837 - DNA, 15 bp, Homo sapiens
aataattaccaacta

SEQ ID NO: 117838 - DNA, 15 bp, Homo sapiens
gaataattaccaact

SEQ ID NO: 117839 - DNA, 15 bp, Homo sapiens
tgaataattaccaac

SEQ ID NO: 117840 - DNA, 15 bp, Homo sapiens
atgaataattaccaa

SEQ ID NO: 117841 - DNA, 15 bp, Homo sapiens
gatgaataattacca

SEQ ID NO: 117842 - DNA, 15 bp, Homo sapiens
agatgaataattacc

SEQ ID NO: 117843 - DNA, 15 bp, Homo sapiens
aagatgaataattac

SEQ ID NO: 117844 - DNA, 15 bp, Homo sapiens
taagatgaataatta

SEQ ID NO: 117845 - DNA, 15 bp, Homo sapiens
ttaagatgaataatt

SEQ ID NO: 117846 - DNA, 15 bp, Homo sapiens
attaagatgaataat

SEQ ID NO: 117847 - DNA, 15 bp, Homo sapiens
aattaagatgaataa

SEQ ID NO: 117848 - DNA, 15 bp, Homo sapiens
aaattaagatgaata

SEQ ID NO: 117849 - DNA, 15 bp, Homo sapiens
aaaattaagatgaat

SEQ ID NO: 117850 - DNA, 15 bp, Homo sapiens
aaaaattaagatgaa

SEQ ID NO: 117851 - DNA, 15 bp, Homo sapiens
aaaaaattaagatga

SEQ ID NO: 117852 - DNA, 15 bp, Homo sapiens
aaaaaaattaagatg

SEQ ID NO: 117853 - DNA, 15 bp, Homo sapiens
aaaaaaaattaagat

SEQ ID NO: 117854 - DNA, 15 bp, Homo sapiens
aaaaaaaaattaaga

SEQ ID NO: 117855 - DNA, 15 bp, Homo sapiens
aaaaaaaaaattaag

SEQ ID NO: 117856 - DNA, 15 bp, Homo sapiens
aaaaaaaaaaattaa

SEQ ID NO: 117857 - DNA, 15 bp, Homo sapiens
taaaaaaaaaaatta

SEQ ID NO: 117858 - DNA, 15 bp, Homo sapiens
ttaaaaaaaaaaatt

SEQ ID NO: 117859 - DNA, 15 bp, Homo sapiens
tttaaaaaaaaaaat

SEQ ID NO: 117860 - DNA, 15 bp, Homo sapiens
atttaaaaaaaaaaa

SEQ ID NO: 117861 - DNA, 15 bp, Homo sapiens
aatttaaaaaaaaaa

SEQ ID NO: 117862 - DNA, 15 bp, Homo sapiens
aaatttaaaaaaaaa

SEQ ID NO: 117863 - DNA, 15 bp, Homo sapiens
gaaatttaaaaaaaa

SEQ ID NO: 117864 - DNA, 15 bp, Homo sapiens
agaaatttaaaaaaa

SEQ ID NO: 117865 - DNA, 15 bp, Homo sapiens
tagaaatttaaaaaa

SEQ ID NO: 117866 - DNA, 15 bp, Homo sapiens
ctagaaatttaaaaa

SEQ ID NO: 117867 - DNA, 15 bp, Homo sapiens
cctagaaatttaaaa

SEQ ID NO: 117868 - DNA, 15 bp, Homo sapiens
acctagaaatttaaa

SEQ ID NO: 117869 - DNA, 15 bp, Homo sapiens
cacctagaaatttaa

SEQ ID NO: 117870 - DNA, 15 bp, Homo sapiens
acacctagaaattta

SEQ ID NO: 117871 - DNA, 15 bp, Homo sapiens
cacacctagaaattt

SEQ ID NO: 117872 - DNA, 15 bp, Homo sapiens
gcacacctagaaatt

SEQ ID NO: 117873 - DNA, 15 bp, Homo sapiens
ggcacacctagaaat

SEQ ID NO: 117874 - DNA, 15 bp, Homo sapiens
tggcacacctagaaa

SEQ ID NO: 117875 - DNA, 15 bp, Homo sapiens
ttggcacacctagaa

SEQ ID NO: 117876 - DNA, 15 bp, Homo sapiens
tttggcacacctaga

SEQ ID NO: 117877 - DNA, 15 bp, Homo sapiens
ctttggcacacctag

SEQ ID NO: 117878 - DNA, 15 bp, Homo sapiens
tctttggcacaccta

SEQ ID NO: 117879 - DNA, 15 bp, Homo sapiens
ctctttggcacacct

SEQ ID NO: 117880 - DNA, 15 bp, Homo sapiens
cctctttggcacacc

SEQ ID NO: 117881 - DNA, 15 bp, Homo sapiens
gcctctttggcacac

SEQ ID NO: 117882 - DNA, 15 bp, Homo sapiens
cgcctctttggcaca

SEQ ID NO: 117883 - DNA, 15 bp, Homo sapiens
ccgcctctttggcac

SEQ ID NO: 117884 - DNA, 15 bp, Homo sapiens
gccgcctctttggca

SEQ ID NO: 117885 - DNA, 15 bp, Homo sapiens
tgccgcctctttggc

SEQ ID NO: 117886 - DNA, 15 bp, Homo sapiens
gtgccgcctctttgg

SEQ ID NO: 117887 - DNA, 15 bp, Homo sapiens
tgtgccgcctctttg

SEQ ID NO: 117888 - DNA, 15 bp, Homo sapiens
atgtgccgcctcttt

SEQ ID NO: 117889 - DNA, 15 bp, Homo sapiens
tatgtgccgcctctt

SEQ ID NO: 117890 - DNA, 15 bp, Homo sapiens
ttatgtgccgcctct

SEQ ID NO: 117891 - DNA, 15 bp, Homo sapiens
cttatgtgccgcctc

SEQ ID NO: 117892 - DNA, 15 bp, Homo sapiens
ccttatgtgccgcct

SEQ ID NO: 117893 - DNA, 15 bp, Homo sapiens
tccttatgtgccgcc

SEQ ID NO: 117894 - DNA, 15 bp, Homo sapiens
atccttatgtgccgc

SEQ ID NO: 117895 - DNA, 15 bp, Homo sapiens
aatccttatgtgccg

SEQ ID NO: 117896 - DNA, 15 bp, Homo sapiens
aaatccttatgtgcc

SEQ ID NO: 117897 - DNA, 15 bp, Homo sapiens
aaaatccttatgtgc

SEQ ID NO: 117898 - DNA, 15 bp, Homo sapiens
taaaatccttatgtg

SEQ ID NO: 117899 - DNA, 15 bp, Homo sapiens
ttaaaatccttatgt

SEQ ID NO: 117900 - DNA, 15 bp, Homo sapiens
tttaaaatccttatg

SEQ ID NO: 117901 - DNA, 15 bp, Homo sapiens
ttttaaaatccttat

SEQ ID NO: 117902 - DNA, 15 bp, Homo sapiens
tttttaaaatcctta

SEQ ID NO: 117903 - DNA, 15 bp, Homo sapiens
ctttttaaaatcctt

SEQ ID NO: 117904 - DNA, 15 bp, Homo sapiens
cctttttaaaatcct

SEQ ID NO: 117905 - DNA, 15 bp, Homo sapiens
gcctttttaaaatcc

SEQ ID NO: 117906 - DNA, 15 bp, Homo sapiens
tgcctttttaaaatc

SEQ ID NO: 117907 - DNA, 15 bp, Homo sapiens
ctgcctttttaaaat

SEQ ID NO: 117908 - DNA, 15 bp, Homo sapiens
actgcctttttaaaa

SEQ ID NO: 117909 - DNA, 15 bp, Homo sapiens
aactgcctttttaaa

SEQ ID NO: 117910 - DNA, 15 bp, Homo sapiens
caactgcctttttaa

SEQ ID NO: 117911 - DNA, 15 bp, Homo sapiens
ccaactgccttttta

SEQ ID NO: 117912 - DNA, 15 bp, Homo sapiens
accaactgccttttt

SEQ ID NO: 117913 - DNA, 15 bp, Homo sapiens
caccaactgcctttt

SEQ ID NO: 117914 - DNA, 15 bp, Homo sapiens
gcaccaactgccttt

SEQ ID NO: 117915 - DNA, 15 bp, Homo sapiens
ggcaccaactgcctt

SEQ ID NO: 117916 - DNA, 15 bp, Homo sapiens
aggcaccaactgcct

SEQ ID NO: 117917 - DNA, 15 bp, Homo sapiens
aaggcaccaactgcc

SEQ ID NO: 117918 - DNA, 15 bp, Homo sapiens
aaaggcaccaactgc

SEQ ID NO: 117919 - DNA, 15 bp, Homo sapiens
aaaaggcaccaactg

SEQ ID NO: 117920 - DNA, 15 bp, Homo sapiens
gaaaaggcaccaact

SEQ ID NO: 117921 - DNA, 15 bp, Homo sapiens
agaaaaggcaccaac

SEQ ID NO: 117922 - DNA, 15 bp, Homo sapiens
cagaaaaggcaccaa

SEQ ID NO: 117923 - DNA, 15 bp, Homo sapiens
acagaaaaggcacca

SEQ ID NO: 117924 - DNA, 15 bp, Homo sapiens
tacagaaaaggcacc

SEQ ID NO: 117925 - DNA, 15 bp, Homo sapiens
ttacagaaaaggcac

SEQ ID NO: 117926 - DNA, 15 bp, Homo sapiens
gttacagaaaaggca

SEQ ID NO: 117927 - DNA, 15 bp, Homo sapiens
agttacagaaaaggc

SEQ ID NO: 117928 - DNA, 15 bp, Homo sapiens
aagttacagaaaagg

SEQ ID NO: 117929 - DNA, 15 bp, Homo sapiens
taagttacagaaaag

SEQ ID NO: 117930 - DNA, 15 bp, Homo sapiens
ataagttacagaaaa

SEQ ID NO: 117931 - DNA, 15 bp, Homo sapiens
cataagttacagaaa

SEQ ID NO: 117932 - DNA, 15 bp, Homo sapiens
tcataagttacagaa

SEQ ID NO: 117933 - DNA, 15 bp, Homo sapiens
atcataagttacaga

SEQ ID NO: 117934 - DNA, 15 bp, Homo sapiens
gatcataagttacag

SEQ ID NO: 117935 - DNA, 15 bp, Homo sapiens
ggatcataagttaca

SEQ ID NO: 117936 - DNA, 15 bp, Homo sapiens
tggatcataagttac

SEQ ID NO: 117937 - DNA, 15 bp, Homo sapiens
ctggatcataagtta

SEQ ID NO: 117938 - DNA, 15 bp, Homo sapiens
tctggatcataagtt

SEQ ID NO: 117939 - DNA, 15 bp, Homo sapiens
ttctggatcataagt

SEQ ID NO: 117940 - DNA, 15 bp, Homo sapiens
tttctggatcataag

SEQ ID NO: 117941 - DNA, 15 bp, Homo sapiens
ttttctggatcataa

SEQ ID NO: 117942 - DNA, 15 bp, Homo sapiens
attttctggatcata

SEQ ID NO: 117943 - DNA, 15 bp, Homo sapiens
aattttctggatcat

SEQ ID NO: 117944 - DNA, 15 bp, Homo sapiens
taattttctggatca

SEQ ID NO: 117945 - DNA, 15 bp, Homo sapiens
ataattttctggatc

SEQ ID NO: 117946 - DNA, 15 bp, Homo sapiens
gataattttctggat

SEQ ID NO: 117947 - DNA, 15 bp, Homo sapiens
tgataattttctgga

SEQ ID NO: 117948 - DNA, 15 bp, Homo sapiens
ctgataattttctgg

SEQ ID NO: 117949 - DNA, 15 bp, Homo sapiens
gctgataattttctg

SEQ ID NO: 117950 - DNA, 15 bp, Homo sapiens
agctgataattttct

SEQ ID NO: 117951 - DNA, 15 bp, Homo sapiens
aagctgataattttc

SEQ ID NO: 117952 - DNA, 15 bp, Homo sapiens
caagctgataatttt

SEQ ID NO: 117953 - DNA, 15 bp, Homo sapiens
acaagctgataattt

SEQ ID NO: 117954 - DNA, 15 bp, Homo sapiens
gacaagctgataatt

SEQ ID NO: 117955 - DNA, 15 bp, Homo sapiens
tgacaagctgataat

SEQ ID NO: 117956 - DNA, 15 bp, Homo sapiens
atgacaagctgataa

SEQ ID NO: 117957 - DNA, 15 bp, Homo sapiens
aatgacaagctgata

SEQ ID NO: 117958 - DNA, 15 bp, Homo sapiens
aaatgacaagctgat

SEQ ID NO: 117959 - DNA, 15 bp, Homo sapiens
aaaatgacaagctga

SEQ ID NO: 117960 - DNA, 15 bp, Homo sapiens
caaaatgacaagctg

SEQ ID NO: 117961 - DNA, 15 bp, Homo sapiens
ccaaaatgacaagct

SEQ ID NO: 117962 - DNA, 15 bp, Homo sapiens
accaaaatgacaagc

SEQ ID NO: 117963 - DNA, 15 bp, Homo sapiens
caccaaaatgacaag

SEQ ID NO: 117964 - DNA, 15 bp, Homo sapiens
tcaccaaaatgacaa

SEQ ID NO: 117965 - DNA, 15 bp, Homo sapiens
ctcaccaaaatgaca

SEQ ID NO: 117966 - DNA, 15 bp, Homo sapiens
gctcaccaaaatgac

SEQ ID NO: 117967 - DNA, 15 bp, Homo sapiens
tgctcaccaaaatga

SEQ ID NO: 117968 - DNA, 15 bp, Homo sapiens
atgctcaccaaaatg

SEQ ID NO: 117969 - DNA, 15 bp, Homo sapiens
aatgctcaccaaaat

SEQ ID NO: 117970 - DNA, 15 bp, Homo sapiens
aaatgctcaccaaaa

SEQ ID NO: 117971 - DNA, 15 bp, Homo sapiens
aaaatgctcaccaaa

SEQ ID NO: 117972 - DNA, 15 bp, Homo sapiens
aaaaatgctcaccaa

SEQ ID NO: 117973 - DNA, 15 bp, Homo sapiens
caaaaatgctcacca

SEQ ID NO: 117974 - DNA, 15 bp, Homo sapiens
tcaaaaatgctcacc

SEQ ID NO: 117975 - DNA, 15 bp, Homo sapiens
ctcaaaaatgctcac

SEQ ID NO: 117976 - DNA, 15 bp, Homo sapiens
actcaaaaatgctca

SEQ ID NO: 117977 - DNA, 15 bp, Homo sapiens
aactcaaaaatgctc

SEQ ID NO: 117978 - DNA, 15 bp, Homo sapiens
caactcaaaaatgct

SEQ ID NO: 117979 - DNA, 15 bp, Homo sapiens
acaactcaaaaatgc

SEQ ID NO: 117980 - DNA, 15 bp, Homo sapiens
aacaactcaaaaatg

SEQ ID NO: 117981 - DNA, 15 bp, Homo sapiens
aaacaactcaaaaat

SEQ ID NO: 117982 - DNA, 15 bp, Homo sapiens
taaacaactcaaaaa

SEQ ID NO: 117983 - DNA, 15 bp, Homo sapiens
ataaacaactcaaaa

SEQ ID NO: 117984 - DNA, 15 bp, Homo sapiens
aataaacaactcaaa

SEQ ID NO: 117985 - DNA, 15 bp, Homo sapiens
aaataaacaactcaa

SEQ ID NO: 117986 - DNA, 15 bp, Homo sapiens
aaaataaacaactca

SEQ ID NO: 117987 - DNA, 15 bp, Homo sapiens
aaaaataaacaactc

SEQ ID NO: 117988 - DNA, 15 bp, Homo sapiens
taaaaataaacaact

SEQ ID NO: 117989 - DNA, 15 bp, Homo sapiens
ctaaaaataaacaac

SEQ ID NO: 117990 - DNA, 15 bp, Homo sapiens
actaaaaataaacaa

SEQ ID NO: 117991 - DNA, 15 bp, Homo sapiens
aactaaaaataaaca

SEQ ID NO: 117992 - DNA, 15 bp, Homo sapiens
aaactaaaaataaac

SEQ ID NO: 117993 - DNA, 15 bp, Homo sapiens
taaactaaaaataaa

SEQ ID NO: 117994 - DNA, 15 bp, Homo sapiens
ttaaactaaaaataa

SEQ ID NO: 117995 - DNA, 15 bp, Homo sapiens
attaaactaaaaata

SEQ ID NO: 117996 - DNA, 15 bp, Homo sapiens
aattaaactaaaaat

SEQ ID NO: 117997 - DNA, 15 bp, Homo sapiens
gaattaaactaaaaa

SEQ ID NO: 117998 - DNA, 15 bp, Homo sapiens
tgaattaaactaaaa

SEQ ID NO: 117999 - DNA, 15 bp, Homo sapiens
atgaattaaactaaa

SEQ ID NO: 118000 - DNA, 15 bp, Homo sapiens
gatgaattaaactaa

SEQ ID NO: 118001 - DNA, 15 bp, Homo sapiens
agatgaattaaacta

SEQ ID NO: 118002 - DNA, 15 bp, Homo sapiens
cagatgaattaaact

SEQ ID NO: 118003 - DNA, 15 bp, Homo sapiens
ccagatgaattaaac

SEQ ID NO: 118004 - DNA, 15 bp, Homo sapiens
cccagatgaattaaa

SEQ ID NO: 118005 - DNA, 15 bp, Homo sapiens
ccccagatgaattaa

SEQ ID NO: 118006 - DNA, 15 bp, Homo sapiens
gccccagatgaatta

SEQ ID NO: 118007 - DNA, 15 bp, Homo sapiens
tgccccagatgaatt

SEQ ID NO: 118008 - DNA, 15 bp, Homo sapiens
ttgccccagatgaat

SEQ ID NO: 118009 - DNA, 15 bp, Homo sapiens
attgccccagatgaa

SEQ ID NO: 118010 - DNA, 15 bp, Homo sapiens
aattgccccagatga

SEQ ID NO: 118011 - DNA, 15 bp, Homo sapiens
caattgccccagatg

SEQ ID NO: 118012 - DNA, 15 bp, Homo sapiens
gcaattgccccagat

SEQ ID NO: 118013 - DNA, 15 bp, Homo sapiens
ggcaattgccccaga

SEQ ID NO: 118014 - DNA, 15 bp, Homo sapiens
aggcaattgccccag

SEQ ID NO: 118015 - DNA, 15 bp, Homo sapiens
aaggcaattgcccca

SEQ ID NO: 118016 - DNA, 15 bp, Homo sapiens
caaggcaattgcccc

SEQ ID NO: 118017 - DNA, 15 bp, Homo sapiens
tcaaggcaattgccc

SEQ ID NO: 118018 - DNA, 15 bp, Homo sapiens
atcaaggcaattgcc

SEQ ID NO: 118019 - DNA, 15 bp, Homo sapiens
tatcaaggcaattgc

SEQ ID NO: 118020 - DNA, 15 bp, Homo sapiens
ttatcaaggcaattg

SEQ ID NO: 118021 - DNA, 15 bp, Homo sapiens
attatcaaggcaatt

SEQ ID NO: 118022 - DNA, 15 bp, Homo sapiens
tattatcaaggcaat

SEQ ID NO: 118023 - DNA, 15 bp, Homo sapiens
ttattatcaaggcaa

SEQ ID NO: 118024 - DNA, 15 bp, Homo sapiens
attattatcaaggca

SEQ ID NO: 118025 - DNA, 15 bp, Homo sapiens
cattattatcaaggc

SEQ ID NO: 118026 - DNA, 15 bp, Homo sapiens
acattattatcaagg

SEQ ID NO: 118027 - DNA, 15 bp, Homo sapiens
aacattattatcaag

SEQ ID NO: 118028 - DNA, 15 bp, Homo sapiens
caacattattatcaa

SEQ ID NO: 118029 - DNA, 15 bp, Homo sapiens
acaacattattatca

SEQ ID NO: 118030 - DNA, 15 bp, Homo sapiens
aacaacattattatc

SEQ ID NO: 118031 - DNA, 15 bp, Homo sapiens
taacaacattattat

SEQ ID NO: 118032 - DNA, 15 bp, Homo sapiens
ttaacaacattatta

SEQ ID NO: 118033 - DNA, 15 bp, Homo sapiens
attaacaacattatt

SEQ ID NO: 118034 - DNA, 15 bp, Homo sapiens
aattaacaacattat

SEQ ID NO: 118035 - DNA, 15 bp, Homo sapiens
aaattaacaacatta

SEQ ID NO: 118036 - DNA, 15 bp, Homo sapiens
taaattaacaacatt

SEQ ID NO: 118037 - DNA, 15 bp, Homo sapiens
ttaaattaacaacat

SEQ ID NO: 118038 - DNA, 15 bp, Homo sapiens
tttaaattaacaaca

SEQ ID NO: 118039 - DNA, 15 bp, Homo sapiens
atttaaattaacaac

SEQ ID NO: 118040 - DNA, 15 bp, Homo sapiens
gatttaaattaacaa

SEQ ID NO: 118041 - DNA, 15 bp, Homo sapiens
tgatttaaattaaca

SEQ ID NO: 118042 - DNA, 15 bp, Homo sapiens
atgatttaaattaac

SEQ ID NO: 118043 - DNA, 15 bp, Homo sapiens
aatgatttaaattaa

SEQ ID NO: 118044 - DNA, 15 bp, Homo sapiens
aaatgatttaaatta

SEQ ID NO: 118045 - DNA, 15 bp, Homo sapiens
taaatgatttaaatt

SEQ ID NO: 118046 - DNA, 15 bp, Homo sapiens
ctaaatgatttaaat

SEQ ID NO: 118047 - DNA, 15 bp, Homo sapiens
actaaatgatttaaa

SEQ ID NO: 118048 - DNA, 15 bp, Homo sapiens
gactaaatgatttaa

SEQ ID NO: 118049 - DNA, 15 bp, Homo sapiens
ggactaaatgattta

SEQ ID NO: 118050 - DNA, 15 bp, Homo sapiens
tggactaaatgattt

SEQ ID NO: 118051 - DNA, 15 bp, Homo sapiens
atggactaaatgatt

SEQ ID NO: 118052 - DNA, 15 bp, Homo sapiens
gatggactaaatgat

SEQ ID NO: 118053 - DNA, 15 bp, Homo sapiens
tgatggactaaatga

SEQ ID NO: 118054 - DNA, 15 bp, Homo sapiens
ttgatggactaaatg

SEQ ID NO: 118055 - DNA, 15 bp, Homo sapiens
attgatggactaaat

SEQ ID NO: 118056 - DNA, 15 bp, Homo sapiens
cattgatggactaaa

SEQ ID NO: 118057 - DNA, 15 bp, Homo sapiens
tcattgatggactaa

SEQ ID NO: 118058 - DNA, 15 bp, Homo sapiens
ttcattgatggacta

SEQ ID NO: 118059 - DNA, 15 bp, Homo sapiens
cttcattgatggact

SEQ ID NO: 118060 - DNA, 15 bp, Homo sapiens
acttcattgatggac

SEQ ID NO: 118061 - DNA, 15 bp, Homo sapiens
gacttcattgatgga

SEQ ID NO: 118062 - DNA, 15 bp, Homo sapiens
tgacttcattgatgg

SEQ ID NO: 118063 - DNA, 15 bp, Homo sapiens
gtgacttcattgatg

SEQ ID NO: 118064 - DNA, 15 bp, Homo sapiens
ggtgacttcattgat

SEQ ID NO: 118065 - DNA, 15 bp, Homo sapiens
aggtgacttcattga

SEQ ID NO: 118066 - DNA, 15 bp, Homo sapiens
gaggtgacttcattg

SEQ ID NO: 118067 - DNA, 15 bp, Homo sapiens
tgaggtgacttcatt

SEQ ID NO: 118068 - DNA, 15 bp, Homo sapiens
ttgaggtgacttcat

SEQ ID NO: 118069 - DNA, 15 bp, Homo sapiens
tttgaggtgacttca

SEQ ID NO: 118070 - DNA, 15 bp, Homo sapiens
ctttgaggtgacttc

SEQ ID NO: 118071 - DNA, 15 bp, Homo sapiens
gctttgaggtgactt

SEQ ID NO: 118072 - DNA, 15 bp, Homo sapiens
cgctttgaggtgact

SEQ ID NO: 118073 - DNA, 15 bp, Homo sapiens
tcgctttgaggtgac

SEQ ID NO: 118074 - DNA, 15 bp, Homo sapiens
ctcgctttgaggtga

SEQ ID NO: 118075 - DNA, 15 bp, Homo sapiens
gctcgctttgaggtg

SEQ ID NO: 118076 - DNA, 15 bp, Homo sapiens
tgctcgctttgaggt

SEQ ID NO: 118077 - DNA, 15 bp, Homo sapiens
gtgctcgctttgagg

SEQ ID NO: 118078 - DNA, 15 bp, Homo sapiens
tgtgctcgctttgag

SEQ ID NO: 118079 - DNA, 15 bp, Homo sapiens
atgtgctcgctttga

SEQ ID NO: 118080 - DNA, 15 bp, Homo sapiens
tatgtgctcgctttg

SEQ ID NO: 118081 - DNA, 15 bp, Homo sapiens
atatgtgctcgcttt

SEQ ID NO: 118082 - DNA, 15 bp, Homo sapiens
catatgtgctcgctt

SEQ ID NO: 118083 - DNA, 15 bp, Homo sapiens
gcatatgtgctcgct

SEQ ID NO: 118084 - DNA, 15 bp, Homo sapiens
agcatatgtgctcgc

SEQ ID NO: 118085 - DNA, 15 bp, Homo sapiens
cagcatatgtgctcg

SEQ ID NO: 118086 - DNA, 15 bp, Homo sapiens
tcagcatatgtgctc

SEQ ID NO: 118087 - DNA, 15 bp, Homo sapiens
atcagcatatgtgct

SEQ ID NO: 118088 - DNA, 15 bp, Homo sapiens
aatcagcatatgtgc

SEQ ID NO: 118089 - DNA, 15 bp, Homo sapiens
caatcagcatatgtg

SEQ ID NO: 118090 - DNA, 15 bp, Homo sapiens
tcaatcagcatatgt

SEQ ID NO: 118091 - DNA, 15 bp, Homo sapiens
gtcaatcagcatatg

SEQ ID NO: 118092 - DNA, 15 bp, Homo sapiens
tgtcaatcagcatat

SEQ ID NO: 118093 - DNA, 15 bp, Homo sapiens
atgtcaatcagcata

SEQ ID NO: 118094 - DNA, 15 bp, Homo sapiens
catgtcaatcagcat

SEQ ID NO: 118095 - DNA, 15 bp, Homo sapiens
gcatgtcaatcagca

SEQ ID NO: 118096 - DNA, 15 bp, Homo sapiens
tgcatgtcaatcagc

SEQ ID NO: 118097 - DNA, 15 bp, Homo sapiens
gtgcatgtcaatcag

SEQ ID NO: 118098 - DNA, 15 bp, Homo sapiens
agtgcatgtcaatca

SEQ ID NO: 118099 - DNA, 15 bp, Homo sapiens
aagtgcatgtcaatc

SEQ ID NO: 118100 - DNA, 15 bp, Homo sapiens
aaagtgcatgtcaat

SEQ ID NO: 118101 - DNA, 15 bp, Homo sapiens
gaaagtgcatgtcaa

SEQ ID NO: 118102 - DNA, 15 bp, Homo sapiens
cgaaagtgcatgtca

SEQ ID NO: 118103 - DNA, 15 bp, Homo sapiens
ccgaaagtgcatgtc

SEQ ID NO: 118104 - DNA, 15 bp, Homo sapiens
tccgaaagtgcatgt

SEQ ID NO: 118105 - DNA, 15 bp, Homo sapiens
ctccgaaagtgcatg

SEQ ID NO: 118106 - DNA, 15 bp, Homo sapiens
actccgaaagtgcat

SEQ ID NO: 118107 - DNA, 15 bp, Homo sapiens
gactccgaaagtgca

SEQ ID NO: 118108 - DNA, 15 bp, Homo sapiens
agactccgaaagtgc

SEQ ID NO: 118109 - DNA, 15 bp, Homo sapiens
cagactccgaaagtg

SEQ ID NO: 118110 - DNA, 15 bp, Homo sapiens
gcagactccgaaagt

SEQ ID NO: 118111 - DNA, 15 bp, Homo sapiens
cgcagactccgaaag

SEQ ID NO: 118112 - DNA, 15 bp, Homo sapiens
gcgcagactccgaaa

SEQ ID NO: 118113 - DNA, 15 bp, Homo sapiens
tgcgcagactccgaa

SEQ ID NO: 118114 - DNA, 15 bp, Homo sapiens
gtgcgcagactccga

SEQ ID NO: 118115 - DNA, 15 bp, Homo sapiens
agtgcgcagactccg

SEQ ID NO: 118116 - DNA, 15 bp, Homo sapiens
tagtgcgcagactcc

SEQ ID NO: 118117 - DNA, 15 bp, Homo sapiens
ttagtgcgcagactc

SEQ ID NO: 118118 - DNA, 15 bp, Homo sapiens
cttagtgcgcagact

SEQ ID NO: 118119 - DNA, 15 bp, Homo sapiens
acttagtgcgcagac

SEQ ID NO: 118120 - DNA, 15 bp, Homo sapiens
aacttagtgcgcaga

SEQ ID NO: 118121 - DNA, 15 bp, Homo sapiens
caacttagtgcgcag

SEQ ID NO: 118122 - DNA, 15 bp, Homo sapiens
acaacttagtgcgca

SEQ ID NO: 118123 - DNA, 15 bp, Homo sapiens
gacaacttagtgcgc

SEQ ID NO: 118124 - DNA, 15 bp, Homo sapiens
agacaacttagtgcg

SEQ ID NO: 118125 - DNA, 15 bp, Homo sapiens
gagacaacttagtgc

SEQ ID NO: 118126 - DNA, 15 bp, Homo sapiens
agagacaacttagtg

SEQ ID NO: 118127 - DNA, 15 bp, Homo sapiens
cagagacaacttagt

SEQ ID NO: 118128 - DNA, 15 bp, Homo sapiens
tcagagacaacttag

SEQ ID NO: 118129 - DNA, 15 bp, Homo sapiens
atcagagacaactta

SEQ ID NO: 118130 - DNA, 15 bp, Homo sapiens
tatcagagacaactt

SEQ ID NO: 118131 - DNA, 15 bp, Homo sapiens
ttatcagagacaact

SEQ ID NO: 118132 - DNA, 15 bp, Homo sapiens
attatcagagacaac

SEQ ID NO: 118133 - DNA, 15 bp, Homo sapiens
cattatcagagacaa

SEQ ID NO: 118134 - DNA, 15 bp, Homo sapiens
tcattatcagagaca

SEQ ID NO: 118135 - DNA, 15 bp, Homo sapiens
ctcattatcagagac

SEQ ID NO: 118136 - DNA, 15 bp, Homo sapiens
tctcattatcagaga

SEQ ID NO: 118137 - DNA, 15 bp, Homo sapiens
ttctcattatcagag

SEQ ID NO: 118138 - DNA, 15 bp, Homo sapiens
tttctcattatcaga

SEQ ID NO: 118139 - DNA, 15 bp, Homo sapiens
atttctcattatcag

SEQ ID NO: 118140 - DNA, 15 bp, Homo sapiens
catttctcattatca

SEQ ID NO: 118141 - DNA, 15 bp, Homo sapiens
tcatttctcattatc

SEQ ID NO: 118142 - DNA, 15 bp, Homo sapiens
ttcatttctcattat

SEQ ID NO: 118143 - DNA, 15 bp, Homo sapiens
cttcatttctcatta

SEQ ID NO: 118144 - DNA, 15 bp, Homo sapiens
tcttcatttctcatt

SEQ ID NO: 118145 - DNA, 15 bp, Homo sapiens
ttcttcatttctcat

SEQ ID NO: 118146 - DNA, 15 bp, Homo sapiens
cttcttcatttctca

SEQ ID NO: 118147 - DNA, 15 bp, Homo sapiens
gcttcttcatttctc

SEQ ID NO: 118148 - DNA, 15 bp, Homo sapiens
agcttcttcatttct

SEQ ID NO: 118149 - DNA, 15 bp, Homo sapiens
tagcttcttcatttc

SEQ ID NO: 118150 - DNA, 15 bp, Homo sapiens
ctagcttcttcattt

SEQ ID NO: 118151 - DNA, 15 bp, Homo sapiens
actagcttcttcatt

SEQ ID NO: 118152 - DNA, 15 bp, Homo sapiens
tactagcttcttcat

SEQ ID NO: 118153 - DNA, 15 bp, Homo sapiens
ttactagcttcttca

SEQ ID NO: 118154 - DNA, 15 bp, Homo sapiens
cttactagcttcttc

SEQ ID NO: 118155 - DNA, 15 bp, Homo sapiens
gcttactagcttctt

SEQ ID NO: 118156 - DNA, 15 bp, Homo sapiens
tgcttactagcttct

SEQ ID NO: 118157 - DNA, 15 bp, Homo sapiens
ctgcttactagcttc

SEQ ID NO: 118158 - DNA, 15 bp, Homo sapiens
gctgcttactagctt

SEQ ID NO: 118159 - DNA, 15 bp, Homo sapiens
agctgcttactagct

SEQ ID NO: 118160 - DNA, 15 bp, Homo sapiens
cagctgcttactagc

SEQ ID NO: 118161 - DNA, 15 bp, Homo sapiens
ccagctgcttactag

SEQ ID NO: 118162 - DNA, 15 bp, Homo sapiens
tccagctgcttacta

SEQ ID NO: 118163 - DNA, 15 bp, Homo sapiens
ctccagctgcttact

SEQ ID NO: 118164 - DNA, 15 bp, Homo sapiens
cctccagctgcttac

SEQ ID NO: 118165 - DNA, 15 bp, Homo sapiens
acctccagctgctta

SEQ ID NO: 118166 - DNA, 15 bp, Homo sapiens
tacctccagctgctt

SEQ ID NO: 118167 - DNA, 15 bp, Homo sapiens
atacctccagctgct

SEQ ID NO: 118168 - DNA, 15 bp, Homo sapiens
catacctccagctgc

SEQ ID NO: 118169 - DNA, 15 bp, Homo sapiens
acatacctccagctg

SEQ ID NO: 118170 - DNA, 15 bp, Homo sapiens
gacatacctccagct

SEQ ID NO: 118171 - DNA, 15 bp, Homo sapiens
tgacatacctccagc

SEQ ID NO: 118172 - DNA, 15 bp, Homo sapiens
gtgacatacctccag

SEQ ID NO: 118173 - DNA, 15 bp, Homo sapiens
agtgacatacctcca

SEQ ID NO: 118174 - DNA, 15 bp, Homo sapiens
aagtgacatacctcc

SEQ ID NO: 118175 - DNA, 15 bp, Homo sapiens
aaagtgacatacctc

SEQ ID NO: 118176 - DNA, 15 bp, Homo sapiens
gaaagtgacatacct

SEQ ID NO: 118177 - DNA, 15 bp, Homo sapiens
ggaaagtgacatacc

SEQ ID NO: 118178 - DNA, 15 bp, Homo sapiens
gggaaagtgacatac

SEQ ID NO: 118179 - DNA, 15 bp, Homo sapiens
agggaaagtgacata

SEQ ID NO: 118180 - DNA, 15 bp, Homo sapiens
tagggaaagtgacat

SEQ ID NO: 118181 - DNA, 15 bp, Homo sapiens
ctagggaaagtgaca

SEQ ID NO: 118182 - DNA, 15 bp, Homo sapiens
gctagggaaagtgac

SEQ ID NO: 118183 - DNA, 15 bp, Homo sapiens
tgctagggaaagtga

SEQ ID NO: 118184 - DNA, 15 bp, Homo sapiens
gtgctagggaaagtg

SEQ ID NO: 118185 - DNA, 15 bp, Homo sapiens
agtgctagggaaagt

SEQ ID NO: 118186 - DNA, 15 bp, Homo sapiens
cagtgctagggaaag

SEQ ID NO: 118187 - DNA, 15 bp, Homo sapiens
gcagtgctagggaaa

SEQ ID NO: 118188 - DNA, 15 bp, Homo sapiens
agcagtgctagggaa

SEQ ID NO: 118189 - DNA, 15 bp, Homo sapiens
aagcagtgctaggga

SEQ ID NO: 118190 - DNA, 15 bp, Homo sapiens
caagcagtgctaggg

SEQ ID NO: 118191 - DNA, 15 bp, Homo sapiens
acaagcagtgctagg

SEQ ID NO: 118192 - DNA, 15 bp, Homo sapiens
tacaagcagtgctag

SEQ ID NO: 118193 - DNA, 15 bp, Homo sapiens
ttacaagcagtgcta

SEQ ID NO: 118194 - DNA, 15 bp, Homo sapiens
cttacaagcagtgct

SEQ ID NO: 118195 - DNA, 15 bp, Homo sapiens
ccttacaagcagtgc

SEQ ID NO: 118196 - DNA, 15 bp, Homo sapiens
cccttacaagcagtg

SEQ ID NO: 118197 - DNA, 15 bp, Homo sapiens
acccttacaagcagt

SEQ ID NO: 118198 - DNA, 15 bp, Homo sapiens
tacccttacaagcag

SEQ ID NO: 118199 - DNA, 15 bp, Homo sapiens
gtacccttacaagca

SEQ ID NO: 118200 - DNA, 15 bp, Homo sapiens
ggtacccttacaagc

SEQ ID NO: 118201 - DNA, 15 bp, Homo sapiens
aggtacccttacaag

SEQ ID NO: 118202 - DNA, 15 bp, Homo sapiens
taggtacccttacaa

SEQ ID NO: 118203 - DNA, 15 bp, Homo sapiens
ctaggtacccttaca

SEQ ID NO: 118204 - DNA, 15 bp, Homo sapiens
cctaggtacccttac

SEQ ID NO: 118205 - DNA, 15 bp, Homo sapiens
tcctaggtaccctta

SEQ ID NO: 118206 - DNA, 15 bp, Homo sapiens
ttcctaggtaccctt

SEQ ID NO: 118207 - DNA, 15 bp, Homo sapiens
gttcctaggtaccct

SEQ ID NO: 118208 - DNA, 15 bp, Homo sapiens
cgttcctaggtaccc

SEQ ID NO: 118209 - DNA, 15 bp, Homo sapiens
tcgttcctaggtacc

SEQ ID NO: 118210 - DNA, 15 bp, Homo sapiens
atcgttcctaggtac

SEQ ID NO: 118211 - DNA, 15 bp, Homo sapiens
aatcgttcctaggta

SEQ ID NO: 118212 - DNA, 15 bp, Homo sapiens
taatcgttcctaggt

SEQ ID NO: 118213 - DNA, 15 bp, Homo sapiens
ttaatcgttcctagg

SEQ ID NO: 118214 - DNA, 15 bp, Homo sapiens
gttaatcgttcctag

SEQ ID NO: 118215 - DNA, 15 bp, Homo sapiens
agttaatcgttccta

SEQ ID NO: 118216 - DNA, 15 bp, Homo sapiens
cagttaatcgttcct

SEQ ID NO: 118217 - DNA, 15 bp, Homo sapiens
acagttaatcgttcc

SEQ ID NO: 118218 - DNA, 15 bp, Homo sapiens
tacagttaatcgttc

SEQ ID NO: 118219 - DNA, 15 bp, Homo sapiens
atacagttaatcgtt

SEQ ID NO: 118220 - DNA, 15 bp, Homo sapiens
gatacagttaatcgt

SEQ ID NO: 118221 - DNA, 15 bp, Homo sapiens
tgatacagttaatcg

SEQ ID NO: 118222 - DNA, 15 bp, Homo sapiens
atgatacagttaatc

SEQ ID NO: 118223 - DNA, 15 bp, Homo sapiens
aatgatacagttaat

SEQ ID NO: 118224 - DNA, 15 bp, Homo sapiens
gaatgatacagttaa

SEQ ID NO: 118225 - DNA, 15 bp, Homo sapiens
ggaatgatacagtta

SEQ ID NO: 118226 - DNA, 15 bp, Homo sapiens
tggaatgatacagtt

SEQ ID NO: 118227 - DNA, 15 bp, Homo sapiens
gtggaatgatacagt

SEQ ID NO: 118228 - DNA, 15 bp, Homo sapiens
tgtggaatgatacag

SEQ ID NO: 118229 - DNA, 15 bp, Homo sapiens
ttgtggaatgataca

SEQ ID NO: 118230 - DNA, 15 bp, Homo sapiens
gttgtggaatgatac

SEQ ID NO: 118231 - DNA, 15 bp, Homo sapiens
agttgtggaatgata

SEQ ID NO: 118232 - DNA, 15 bp, Homo sapiens
aagttgtggaatgat

SEQ ID NO: 118233 - DNA, 15 bp, Homo sapiens
caagttgtggaatga

SEQ ID NO: 118234 - DNA, 15 bp, Homo sapiens
tcaagttgtggaatg

SEQ ID NO: 118235 - DNA, 15 bp, Homo sapiens
ttcaagttgtggaat

SEQ ID NO: 118236 - DNA, 15 bp, Homo sapiens
attcaagttgtggaa

SEQ ID NO: 118237 - DNA, 15 bp, Homo sapiens
tattcaagttgtgga

SEQ ID NO: 118238 - DNA, 15 bp, Homo sapiens
atattcaagttgtgg

SEQ ID NO: 118239 - DNA, 15 bp, Homo sapiens
catattcaagttgtg

SEQ ID NO: 118240 - DNA, 15 bp, Homo sapiens
ccatattcaagttgt

SEQ ID NO: 118241 - DNA, 15 bp, Homo sapiens
cccatattcaagttg

SEQ ID NO: 118242 - DNA, 15 bp, Homo sapiens
ccccatattcaagtt

SEQ ID NO: 118243 - DNA, 15 bp, Homo sapiens
tccccatattcaagt

SEQ ID NO: 118244 - DNA, 15 bp, Homo sapiens
ctccccatattcaag

SEQ ID NO: 118245 - DNA, 15 bp, Homo sapiens
gctccccatattcaa

SEQ ID NO: 118246 - DNA, 15 bp, Homo sapiens
agctccccatattca

SEQ ID NO: 118247 - DNA, 15 bp, Homo sapiens
aagctccccatattc

SEQ ID NO: 118248 - DNA, 15 bp, Homo sapiens
caagctccccatatt

SEQ ID NO: 118249 - DNA, 15 bp, Homo sapiens
acaagctccccatat

SEQ ID NO: 118250 - DNA, 15 bp, Homo sapiens
gacaagctccccata

SEQ ID NO: 118251 - DNA, 15 bp, Homo sapiens
tgacaagctccccat

SEQ ID NO: 118252 - DNA, 15 bp, Homo sapiens
atgacaagctcccca

SEQ ID NO: 118253 - DNA, 15 bp, Homo sapiens
aatgacaagctcccc

SEQ ID NO: 118254 - DNA, 15 bp, Homo sapiens
aaatgacaagctccc

SEQ ID NO: 118255 - DNA, 15 bp, Homo sapiens
taaatgacaagctcc

SEQ ID NO: 118256 - DNA, 15 bp, Homo sapiens
ataaatgacaagctc

SEQ ID NO: 118257 - DNA, 15 bp, Homo sapiens
aataaatgacaagct

SEQ ID NO: 118258 - DNA, 15 bp, Homo sapiens
aaataaatgacaagc

SEQ ID NO: 118259 - DNA, 15 bp, Homo sapiens
taaataaatgacaag

SEQ ID NO: 118260 - DNA, 15 bp, Homo sapiens
gtaaataaatgacaa

SEQ ID NO: 118261 - DNA, 15 bp, Homo sapiens
agtaaataaatgaca

SEQ ID NO: 118262 - DNA, 15 bp, Homo sapiens
cagtaaataaatgac

SEQ ID NO: 118263 - DNA, 15 bp, Homo sapiens
gcagtaaataaatga

SEQ ID NO: 118264 - DNA, 15 bp, Homo sapiens
agcagtaaataaatg

SEQ ID NO: 118265 - DNA, 15 bp, Homo sapiens
aagcagtaaataaat

SEQ ID NO: 118266 - DNA, 15 bp, Homo sapiens
gaagcagtaaataaa

SEQ ID NO: 118267 - DNA, 15 bp, Homo sapiens
agaagcagtaaataa

SEQ ID NO: 118268 - DNA, 15 bp, Homo sapiens
aagaagcagtaaata

SEQ ID NO: 118269 - DNA, 15 bp, Homo sapiens
taagaagcagtaaat

SEQ ID NO: 118270 - DNA, 15 bp, Homo sapiens
ttaagaagcagtaaa

SEQ ID NO: 118271 - DNA, 15 bp, Homo sapiens
gttaagaagcagtaa

SEQ ID NO: 118272 - DNA, 15 bp, Homo sapiens
tgttaagaagcagta

SEQ ID NO: 118273 - DNA, 15 bp, Homo sapiens
ttgttaagaagcagt

SEQ ID NO: 118274 - DNA, 15 bp, Homo sapiens
attgttaagaagcag

SEQ ID NO: 118275 - DNA, 15 bp, Homo sapiens
aattgttaagaagca

SEQ ID NO: 118276 - DNA, 15 bp, Homo sapiens
gaattgttaagaagc

SEQ ID NO: 118277 - DNA, 15 bp, Homo sapiens
ggaattgttaagaag

SEQ ID NO: 118278 - DNA, 15 bp, Homo sapiens
aggaattgttaagaa

SEQ ID NO: 118279 - DNA, 15 bp, Homo sapiens
aaggaattgttaaga

SEQ ID NO: 118280 - DNA, 15 bp, Homo sapiens
taaggaattgttaag

SEQ ID NO: 118281 - DNA, 15 bp, Homo sapiens
ctaaggaattgttaa

SEQ ID NO: 118282 - DNA, 15 bp, Homo sapiens
cctaaggaattgtta

SEQ ID NO: 118283 - DNA, 15 bp, Homo sapiens
acctaaggaattgtt

SEQ ID NO: 118284 - DNA, 15 bp, Homo sapiens
aacctaaggaattgt

SEQ ID NO: 118285 - DNA, 15 bp, Homo sapiens
gaacctaaggaattg

SEQ ID NO: 118286 - DNA, 15 bp, Homo sapiens
agaacctaaggaatt

SEQ ID NO: 118287 - DNA, 15 bp, Homo sapiens
tagaacctaaggaat

SEQ ID NO: 118288 - DNA, 15 bp, Homo sapiens
atagaacctaaggaa

SEQ ID NO: 118289 - DNA, 15 bp, Homo sapiens
tatagaacctaagga

SEQ ID NO: 118290 - DNA, 15 bp, Homo sapiens
ctatagaacctaagg

SEQ ID NO: 118291 - DNA, 15 bp, Homo sapiens
actatagaacctaag

SEQ ID NO: 118292 - DNA, 15 bp, Homo sapiens
aactatagaacctaa

SEQ ID NO: 118293 - DNA, 15 bp, Homo sapiens
caactatagaaccta

SEQ ID NO: 118294 - DNA, 15 bp, Homo sapiens
ccaactatagaacct

SEQ ID NO: 118295 - DNA, 15 bp, Homo sapiens
tccaactatagaacc

SEQ ID NO: 118296 - DNA, 15 bp, Homo sapiens
ttccaactatagaac

SEQ ID NO: 118297 - DNA, 15 bp, Homo sapiens
tttccaactatagaa

SEQ ID NO: 118298 - DNA, 15 bp, Homo sapiens
ttttccaactataga

SEQ ID NO: 118299 - DNA, 15 bp, Homo sapiens
attttccaactatag

SEQ ID NO: 118300 - DNA, 15 bp, Homo sapiens
aattttccaactata

SEQ ID NO: 118301 - DNA, 15 bp, Homo sapiens
caattttccaactat

SEQ ID NO: 118302 - DNA, 15 bp, Homo sapiens
acaattttccaacta

SEQ ID NO: 118303 - DNA, 15 bp, Homo sapiens
tacaattttccaact

SEQ ID NO: 118304 - DNA, 15 bp, Homo sapiens
gtacaattttccaac

SEQ ID NO: 118305 - DNA, 15 bp, Homo sapiens
tgtacaattttccaa

SEQ ID NO: 118306 - DNA, 15 bp, Homo sapiens
ttgtacaattttcca

SEQ ID NO: 118307 - DNA, 15 bp, Homo sapiens
tttgtacaattttcc

SEQ ID NO: 118308 - DNA, 15 bp, Homo sapiens
ctttgtacaattttc

SEQ ID NO: 118309 - DNA, 15 bp, Homo sapiens
gctttgtacaatttt

SEQ ID NO: 118310 - DNA, 15 bp, Homo sapiens
tgctttgtacaattt

SEQ ID NO: 118311 - DNA, 15 bp, Homo sapiens
atgctttgtacaatt

SEQ ID NO: 118312 - DNA, 15 bp, Homo sapiens
tatgctttgtacaat

SEQ ID NO: 118313 - DNA, 15 bp, Homo sapiens
ttatgctttgtacaa

SEQ ID NO: 118314 - DNA, 15 bp, Homo sapiens
attatgctttgtaca

SEQ ID NO: 118315 - DNA, 15 bp, Homo sapiens
gattatgctttgtac

SEQ ID NO: 118316 - DNA, 15 bp, Homo sapiens
tgattatgctttgta

SEQ ID NO: 118317 - DNA, 15 bp, Homo sapiens
atgattatgctttgt

SEQ ID NO: 118318 - DNA, 15 bp, Homo sapiens
tatgattatgctttg

SEQ ID NO: 118319 - DNA, 15 bp, Homo sapiens
gtatgattatgcttt

SEQ ID NO: 118320 - DNA, 15 bp, Homo sapiens
agtatgattatgctt

SEQ ID NO: 118321 - DNA, 15 bp, Homo sapiens
tagtatgattatgct

SEQ ID NO: 118322 - DNA, 15 bp, Homo sapiens
ttagtatgattatgc

SEQ ID NO: 118323 - DNA, 15 bp, Homo sapiens
tttagtatgattatg

SEQ ID NO: 118324 - DNA, 15 bp, Homo sapiens
ctttagtatgattat

SEQ ID NO: 118325 - DNA, 15 bp, Homo sapiens
actttagtatgatta

SEQ ID NO: 118326 - DNA, 15 bp, Homo sapiens
ctagtaaaagtgaaa

SEQ ID NO: 118327 - DNA, 15 bp, Homo sapiens
tctagtaaaagtgaa

SEQ ID NO: 118328 - DNA, 15 bp, Homo sapiens
ttctagtaaaagtga

SEQ ID NO: 118329 - DNA, 15 bp, Homo sapiens
cttctagtaaaagtg

SEQ ID NO: 118330 - DNA, 15 bp, Homo sapiens
acttctagtaaaagt

SEQ ID NO: 118331 - DNA, 15 bp, Homo sapiens
aacttctagtaaaag

SEQ ID NO: 118332 - DNA, 15 bp, Homo sapiens
aaacttctagtaaaa

SEQ ID NO: 118333 - DNA, 15 bp, Homo sapiens
taaacttctagtaaa

SEQ ID NO: 118334 - DNA, 15 bp, Homo sapiens
ataaacttctagtaa

SEQ ID NO: 118335 - DNA, 15 bp, Homo sapiens
gataaacttctagta

SEQ ID NO: 118336 - DNA, 15 bp, Homo sapiens
tgataaacttctagt

SEQ ID NO: 118337 - DNA, 15 bp, Homo sapiens
ttgataaacttctag

SEQ ID NO: 118338 - DNA, 15 bp, Homo sapiens
tttgataaacttcta

SEQ ID NO: 118339 - DNA, 15 bp, Homo sapiens
ctttgataaacttct

SEQ ID NO: 118340 - DNA, 15 bp, Homo sapiens
actttgataaacttc

SEQ ID NO: 118341 - DNA, 15 bp, Homo sapiens
aactttgataaactt

SEQ ID NO: 118342 - DNA, 15 bp, Homo sapiens
caactttgataaact

SEQ ID NO: 118343 - DNA, 15 bp, Homo sapiens
gcaactttgataaac

SEQ ID NO: 118344 - DNA, 15 bp, Homo sapiens
agcaactttgataaa

SEQ ID NO: 118345 - DNA, 15 bp, Homo sapiens
tagcaactttgataa

SEQ ID NO: 118346 - DNA, 15 bp, Homo sapiens
ttagcaactttgata

SEQ ID NO: 118347 - DNA, 15 bp, Homo sapiens
attagcaactttgat

SEQ ID NO: 118348 - DNA, 15 bp, Homo sapiens
tattagcaactttga

SEQ ID NO: 118349 - DNA, 15 bp, Homo sapiens
ttattagcaactttg

SEQ ID NO: 118350 - DNA, 15 bp, Homo sapiens
tttattagcaacttt

SEQ ID NO: 118351 - DNA, 15 bp, Homo sapiens
ttttattagcaactt

SEQ ID NO: 118352 - DNA, 15 bp, Homo sapiens
attttattagcaact

SEQ ID NO: 118353 - DNA, 15 bp, Homo sapiens
cattttattagcaac

SEQ ID NO: 118354 - DNA, 15 bp, Homo sapiens
gcattttattagcaa

SEQ ID NO: 118355 - DNA, 15 bp, Homo sapiens
cgcattttattagca

SEQ ID NO: 118356 - DNA, 15 bp, Homo sapiens
ccgcattttattagc

SEQ ID NO: 118357 - DNA, 15 bp, Homo sapiens
gccgcattttattag

SEQ ID NO: 118358 - DNA, 15 bp, Homo sapiens
tgccgcattttatta

SEQ ID NO: 118359 - DNA, 15 bp, Homo sapiens
ttgccgcattttatt

SEQ ID NO: 118360 - DNA, 15 bp, Homo sapiens
attgccgcattttat

SEQ ID NO: 118361 - DNA, 15 bp, Homo sapiens
cattgccgcatttta

SEQ ID NO: 118362 - DNA, 15 bp, Homo sapiens
gcattgccgcatttt

SEQ ID NO: 118363 - DNA, 15 bp, Homo sapiens
agcattgccgcattt

SEQ ID NO: 118364 - DNA, 15 bp, Homo sapiens
aagcattgccgcatt

SEQ ID NO: 118365 - DNA, 15 bp, Homo sapiens
gaagcattgccgcat

SEQ ID NO: 118366 - DNA, 15 bp, Homo sapiens
agaagcattgccgca

SEQ ID NO: 118367 - DNA, 15 bp, Homo sapiens
aagaagcattgccgc

SEQ ID NO: 118368 - DNA, 15 bp, Homo sapiens
gaagaagcattgccg

SEQ ID NO: 118369 - DNA, 15 bp, Homo sapiens
ggaagaagcattgcc

SEQ ID NO: 118370 - DNA, 15 bp, Homo sapiens
tggaagaagcattgc

SEQ ID NO: 118371 - DNA, 15 bp, Homo sapiens
atggaagaagcattg

SEQ ID NO: 118372 - DNA, 15 bp, Homo sapiens
tatggaagaagcatt

SEQ ID NO: 118373 - DNA, 15 bp, Homo sapiens
atatggaagaagcat

SEQ ID NO: 118374 - DNA, 15 bp, Homo sapiens
tatatggaagaagca

SEQ ID NO: 118375 - DNA, 15 bp, Homo sapiens
ttatatggaagaagc

SEQ ID NO: 118376 - DNA, 15 bp, Homo sapiens
gttatatggaagaag

SEQ ID NO: 118377 - DNA, 15 bp, Homo sapiens
tgttatatggaagaa

SEQ ID NO: 118378 - DNA, 15 bp, Homo sapiens
atgttatatggaaga

SEQ ID NO: 118379 - DNA, 15 bp, Homo sapiens
catgttatatggaag

SEQ ID NO: 118380 - DNA, 15 bp, Homo sapiens
acatgttatatggaa

SEQ ID NO: 118381 - DNA, 15 bp, Homo sapiens
aacatgttatatgga

SEQ ID NO: 118382 - DNA, 15 bp, Homo sapiens
caacatgttatatgg

SEQ ID NO: 118383 - DNA, 15 bp, Homo sapiens
acaacatgttatatg

SEQ ID NO: 118384 - DNA, 15 bp, Homo sapiens
gacaacatgttatat

SEQ ID NO: 118385 - DNA, 15 bp, Homo sapiens
tgacaacatgttata

SEQ ID NO: 118386 - DNA, 15 bp, Homo sapiens
atgacaacatgttat

SEQ ID NO: 118387 - DNA, 15 bp, Homo sapiens
aatgacaacatgtta

SEQ ID NO: 118388 - DNA, 15 bp, Homo sapiens
taatgacaacatgtt

SEQ ID NO: 118389 - DNA, 15 bp, Homo sapiens
ttaatgacaacatgt

SEQ ID NO: 118390 - DNA, 15 bp, Homo sapiens
tttaatgacaacatg

SEQ ID NO: 118391 - DNA, 15 bp, Homo sapiens
ttttaatgacaacat

SEQ ID NO: 118392 - DNA, 15 bp, Homo sapiens
tttttaatgacaaca

SEQ ID NO: 118393 - DNA, 15 bp, Homo sapiens
atttttaatgacaac

SEQ ID NO: 118394 - DNA, 15 bp, Homo sapiens
tatttttaatgacaa

SEQ ID NO: 118395 - DNA, 15 bp, Homo sapiens
gtatttttaatgaca

SEQ ID NO: 118396 - DNA, 15 bp, Homo sapiens
agtatttttaatgac

SEQ ID NO: 118397 - DNA, 15 bp, Homo sapiens
tagtatttttaatga

SEQ ID NO: 118398 - DNA, 15 bp, Homo sapiens
ctagtatttttaatg

SEQ ID NO: 118399 - DNA, 15 bp, Homo sapiens
tctagtatttttaat

SEQ ID NO: 118400 - DNA, 15 bp, Homo sapiens
ctctagtatttttaa

SEQ ID NO: 118401 - DNA, 15 bp, Homo sapiens
tctctagtattttta

SEQ ID NO: 118402 - DNA, 15 bp, Homo sapiens
ttctctagtattttt

SEQ ID NO: 118403 - DNA, 15 bp, Homo sapiens
attctctagtatttt

SEQ ID NO: 118404 - DNA, 15 bp, Homo sapiens
tattctctagtattt

SEQ ID NO: 118405 - DNA, 15 bp, Homo sapiens
atattctctagtatt

SEQ ID NO: 118406 - DNA, 15 bp, Homo sapiens
aatattctctagtat

SEQ ID NO: 118407 - DNA, 15 bp, Homo sapiens
aaatattctctagta

SEQ ID NO: 118408 - DNA, 15 bp, Homo sapiens
taaatattctctagt

SEQ ID NO: 118409 - DNA, 15 bp, Homo sapiens
ttaaatattctctag

SEQ ID NO: 118410 - DNA, 15 bp, Homo sapiens
tttaaatattctcta

SEQ ID NO: 118411 - DNA, 15 bp, Homo sapiens
atttaaatattctct

SEQ ID NO: 118412 - DNA, 15 bp, Homo sapiens
tatttaaatattctc

SEQ ID NO: 118413 - DNA, 15 bp, Homo sapiens
atatttaaatattct

SEQ ID NO: 118414 - DNA, 15 bp, Homo sapiens
gatatttaaatattc

SEQ ID NO: 118415 - DNA, 15 bp, Homo sapiens
agatatttaaatatt

SEQ ID NO: 118416 - DNA, 15 bp, Homo sapiens
tagatatttaaatat

SEQ ID NO: 118417 - DNA, 15 bp, Homo sapiens
ttagatatttaaata

SEQ ID NO: 118418 - DNA, 15 bp, Homo sapiens
attagatatttaaat

SEQ ID NO: 118419 - DNA, 15 bp, Homo sapiens
gattagatatttaaa

SEQ ID NO: 118420 - DNA, 15 bp, Homo sapiens
tgattagatatttaa

SEQ ID NO: 118421 - DNA, 15 bp, Homo sapiens
atgattagatattta

SEQ ID NO: 118422 - DNA, 15 bp, Homo sapiens
tatgattagatattt

SEQ ID NO: 118423 - DNA, 15 bp, Homo sapiens
atatgattagatatt

SEQ ID NO: 118424 - DNA, 15 bp, Homo sapiens
aatatgattagatat

SEQ ID NO: 118425 - DNA, 15 bp, Homo sapiens
gaatatgattagata

SEQ ID NO: 118426 - DNA, 15 bp, Homo sapiens
ggaatatgattagat

SEQ ID NO: 118427 - DNA, 15 bp, Homo sapiens
aggaatatgattaga

SEQ ID NO: 118428 - DNA, 15 bp, Homo sapiens
gaggaatatgattag

SEQ ID NO: 118429 - DNA, 15 bp, Homo sapiens
agaggaatatgatta

SEQ ID NO: 118430 - DNA, 15 bp, Homo sapiens
gagaggaatatgatt

SEQ ID NO: 118431 - DNA, 15 bp, Homo sapiens
tgagaggaatatgat

SEQ ID NO: 118432 - DNA, 15 bp, Homo sapiens
atgagaggaatatga

SEQ ID NO: 118433 - DNA, 15 bp, Homo sapiens
aatgagaggaatatg

SEQ ID NO: 118434 - DNA, 15 bp, Homo sapiens
taatgagaggaatat

SEQ ID NO: 118435 - DNA, 15 bp, Homo sapiens
ataatgagaggaata

SEQ ID NO: 118436 - DNA, 15 bp, Homo sapiens
cataatgagaggaat

SEQ ID NO: 118437 - DNA, 15 bp, Homo sapiens
acataatgagaggaa

SEQ ID NO: 118438 - DNA, 15 bp, Homo sapiens
tacataatgagagga

SEQ ID NO: 118439 - DNA, 15 bp, Homo sapiens
atacataatgagagg

SEQ ID NO: 118440 - DNA, 15 bp, Homo sapiens
catacataatgagag

SEQ ID NO: 118441 - DNA, 15 bp, Homo sapiens
acatacataatgaga

SEQ ID NO: 118442 - DNA, 15 bp, Homo sapiens
aacatacataatgag

SEQ ID NO: 118443 - DNA, 15 bp, Homo sapiens
aaacatacataatga

SEQ ID NO: 118444 - DNA, 15 bp, Homo sapiens
taaacatacataatg

SEQ ID NO: 118445 - DNA, 15 bp, Homo sapiens
ataaacatacataat

SEQ ID NO: 118446 - DNA, 15 bp, Homo sapiens
gataaacatacataa

SEQ ID NO: 118447 - DNA, 15 bp, Homo sapiens
agataaacatacata

SEQ ID NO: 118448 - DNA, 15 bp, Homo sapiens
aagataaacatacat

SEQ ID NO: 118449 - DNA, 15 bp, Homo sapiens
aaagataaacataca

SEQ ID NO: 118450 - DNA, 15 bp, Homo sapiens
caaagataaacatac

SEQ ID NO: 118451 - DNA, 15 bp, Homo sapiens
acaaagataaacata

SEQ ID NO: 118452 - DNA, 15 bp, Homo sapiens
aacaaagataaacat

SEQ ID NO: 118453 - DNA, 15 bp, Homo sapiens
aaacaaagataaaca

SEQ ID NO: 118454 - DNA, 15 bp, Homo sapiens
taaacaaagataaac

SEQ ID NO: 118455 - DNA, 15 bp, Homo sapiens
ttaaacaaagataaa

SEQ ID NO: 118456 - DNA, 15 bp, Homo sapiens
tttaaacaaagataa

SEQ ID NO: 118457 - DNA, 15 bp, Homo sapiens
ttttaaacaaagata

SEQ ID NO: 118458 - DNA, 15 bp, Homo sapiens
cttttaaacaaagat

SEQ ID NO: 118459 - DNA, 15 bp, Homo sapiens
ccttttaaacaaaga

SEQ ID NO: 118460 - DNA, 15 bp, Homo sapiens
cccttttaaacaaag

SEQ ID NO: 118461 - DNA, 15 bp, Homo sapiens
acccttttaaacaaa

SEQ ID NO: 118462 - DNA, 15 bp, Homo sapiens
tacccttttaaacaa

SEQ ID NO: 118463 - DNA, 15 bp, Homo sapiens
atacccttttaaaca

SEQ ID NO: 118464 - DNA, 15 bp, Homo sapiens
tatacccttttaaac

SEQ ID NO: 118465 - DNA, 15 bp, Homo sapiens
ctatacccttttaaa

SEQ ID NO: 118466 - DNA, 15 bp, Homo sapiens
tctatacccttttaa

SEQ ID NO: 118467 - DNA, 15 bp, Homo sapiens
ttctataccctttta

SEQ ID NO: 118468 - DNA, 15 bp, Homo sapiens
gttctataccctttt

SEQ ID NO: 118469 - DNA, 15 bp, Homo sapiens
agttctatacccttt

SEQ ID NO: 118470 - DNA, 15 bp, Homo sapiens
aagttctataccctt

SEQ ID NO: 118471 - DNA, 15 bp, Homo sapiens
gaagttctataccct

SEQ ID NO: 118472 - DNA, 15 bp, Homo sapiens
agaagttctataccc

SEQ ID NO: 118473 - DNA, 15 bp, Homo sapiens
aagaagttctatacc

SEQ ID NO: 118474 - DNA, 15 bp, Homo sapiens
gaagaagttctatac

SEQ ID NO: 118475 - DNA, 15 bp, Homo sapiens
tgaagaagttctata

SEQ ID NO: 118476 - DNA, 15 bp, Homo sapiens
atgaagaagttctat

SEQ ID NO: 118477 - DNA, 15 bp, Homo sapiens
aatgaagaagttcta

SEQ ID NO: 118478 - DNA, 15 bp, Homo sapiens
gaatgaagaagttct

SEQ ID NO: 118479 - DNA, 15 bp, Homo sapiens
agaatgaagaagttc

SEQ ID NO: 118480 - DNA, 15 bp, Homo sapiens
tagaatgaagaagtt

SEQ ID NO: 118481 - DNA, 15 bp, Homo sapiens
ttagaatgaagaagt

SEQ ID NO: 118482 - DNA, 15 bp, Homo sapiens
attagaatgaagaag

SEQ ID NO: 118483 - DNA, 15 bp, Homo sapiens
aattagaatgaagaa

SEQ ID NO: 118484 - DNA, 15 bp, Homo sapiens
caattagaatgaaga

SEQ ID NO: 118485 - DNA, 15 bp, Homo sapiens
ccaattagaatgaag

SEQ ID NO: 118486 - DNA, 15 bp, Homo sapiens
accaattagaatgaa

SEQ ID NO: 118487 - DNA, 15 bp, Homo sapiens
aaccaattagaatga

SEQ ID NO: 118488 - DNA, 15 bp, Homo sapiens
caaccaattagaatg

SEQ ID NO: 118489 - DNA, 15 bp, Homo sapiens
acaaccaattagaat

SEQ ID NO: 118490 - DNA, 15 bp, Homo sapiens
gacaaccaattagaa

SEQ ID NO: 118491 - DNA, 15 bp, Homo sapiens
tgacaaccaattaga

SEQ ID NO: 118492 - DNA, 15 bp, Homo sapiens
atgacaaccaattag

SEQ ID NO: 118493 - DNA, 15 bp, Homo sapiens
aatgacaaccaatta

SEQ ID NO: 118494 - DNA, 15 bp, Homo sapiens
gaatgacaaccaatt

SEQ ID NO: 118495 - DNA, 15 bp, Homo sapiens
agaatgacaaccaat

SEQ ID NO: 118496 - DNA, 15 bp, Homo sapiens
aagaatgacaaccaa

SEQ ID NO: 118497 - DNA, 15 bp, Homo sapiens
aaagaatgacaacca

SEQ ID NO: 118498 - DNA, 15 bp, Homo sapiens
taaagaatgacaacc

SEQ ID NO: 118499 - DNA, 15 bp, Homo sapiens
ttaaagaatgacaac

SEQ ID NO: 118500 - DNA, 15 bp, Homo sapiens
tttaaagaatgacaa

SEQ ID NO: 118501 - DNA, 15 bp, Homo sapiens
ttttaaagaatgaca

SEQ ID NO: 118502 - DNA, 15 bp, Homo sapiens
gttttaaagaatgac

SEQ ID NO: 118503 - DNA, 15 bp, Homo sapiens
agttttaaagaatga

SEQ ID NO: 118504 - DNA, 15 bp, Homo sapiens
gagttttaaagaatg

SEQ ID NO: 118505 - DNA, 15 bp, Homo sapiens
ggagttttaaagaat

SEQ ID NO: 118506 - DNA, 15 bp, Homo sapiens
aggagttttaaagaa

SEQ ID NO: 118507 - DNA, 15 bp, Homo sapiens
caggagttttaaaga

SEQ ID NO: 118508 - DNA, 15 bp, Homo sapiens
acaggagttttaaag

SEQ ID NO: 118509 - DNA, 15 bp, Homo sapiens
gacaggagttttaaa

SEQ ID NO: 118510 - DNA, 15 bp, Homo sapiens
agacaggagttttaa

SEQ ID NO: 118511 - DNA, 15 bp, Homo sapiens
aagacaggagtttta

SEQ ID NO: 118512 - DNA, 15 bp, Homo sapiens
gaagacaggagtttt

SEQ ID NO: 118513 - DNA, 15 bp, Homo sapiens
tgaagacaggagttt

SEQ ID NO: 118514 - DNA, 15 bp, Homo sapiens
ctgaagacaggagtt

SEQ ID NO: 118515 - DNA, 15 bp, Homo sapiens
tctgaagacaggagt

SEQ ID NO: 118516 - DNA, 15 bp, Homo sapiens
atctgaagacaggag

SEQ ID NO: 118517 - DNA, 15 bp, Homo sapiens
aatctgaagacagga

SEQ ID NO: 118518 - DNA, 15 bp, Homo sapiens
gaatctgaagacagg

SEQ ID NO: 118519 - DNA, 15 bp, Homo sapiens
ggaatctgaagacag

SEQ ID NO: 118520 - DNA, 15 bp, Homo sapiens
gggaatctgaagaca

SEQ ID NO: 118521 - DNA, 15 bp, Homo sapiens
cgggaatctgaagac

SEQ ID NO: 118522 - DNA, 15 bp, Homo sapiens
gcgggaatctgaaga

SEQ ID NO: 118523 - DNA, 15 bp, Homo sapiens
ggcgggaatctgaag

SEQ ID NO: 118524 - DNA, 15 bp, Homo sapiens
tggcgggaatctgaa

SEQ ID NO: 118525 - DNA, 15 bp, Homo sapiens
ctggcgggaatctga

SEQ ID NO: 118526 - DNA, 15 bp, Homo sapiens
tctggcgggaatctg

SEQ ID NO: 118527 - DNA, 15 bp, Homo sapiens
ctctggcgggaatct

SEQ ID NO: 118528 - DNA, 15 bp, Homo sapiens
cctctggcgggaatc

SEQ ID NO: 118529 - DNA, 15 bp, Homo sapiens
gcctctggcgggaat

SEQ ID NO: 118530 - DNA, 15 bp, Homo sapiens
agcctctggcgggaa

SEQ ID NO: 118531 - DNA, 15 bp, Homo sapiens
tagcctctggcggga

SEQ ID NO: 118532 - DNA, 15 bp, Homo sapiens
atagcctctggcggg

SEQ ID NO: 118533 - DNA, 15 bp, Homo sapiens
aatagcctctggcgg

SEQ ID NO: 118534 - DNA, 15 bp, Homo sapiens
aaatagcctctggcg

SEQ ID NO: 118535 - DNA, 15 bp, Homo sapiens
gaaatagcctctggc

SEQ ID NO: 118536 - DNA, 15 bp, Homo sapiens
ggaaatagcctctgg

SEQ ID NO: 118537 - DNA, 15 bp, Homo sapiens
gggaaatagcctctg

SEQ ID NO: 118538 - DNA, 15 bp, Homo sapiens
agggaaatagcctct

SEQ ID NO: 118539 - DNA, 15 bp, Homo sapiens
tagggaaatagcctc

SEQ ID NO: 118540 - DNA, 15 bp, Homo sapiens
ttagggaaatagcct

SEQ ID NO: 118541 - DNA, 15 bp, Homo sapiens
gttagggaaatagcc

SEQ ID NO: 118542 - DNA, 15 bp, Homo sapiens
agttagggaaatagc

SEQ ID NO: 118543 - DNA, 15 bp, Homo sapiens
aagttagggaaatag

SEQ ID NO: 118544 - DNA, 15 bp, Homo sapiens
taagttagggaaata

SEQ ID NO: 118545 - DNA, 15 bp, Homo sapiens
gtaagttagggaaat

SEQ ID NO: 118546 - DNA, 15 bp, Homo sapiens
agtaagttagggaaa

SEQ ID NO: 118547 - DNA, 15 bp, Homo sapiens
tagtaagttagggaa

SEQ ID NO: 118548 - DNA, 15 bp, Homo sapiens
atagtaagttaggga

SEQ ID NO: 118549 - DNA, 15 bp, Homo sapiens
aatagtaagttaggg

SEQ ID NO: 118550 - DNA, 15 bp, Homo sapiens
aaatagtaagttagg

SEQ ID NO: 118551 - DNA, 15 bp, Homo sapiens
aaaatagtaagttag

SEQ ID NO: 118552 - DNA, 15 bp, Homo sapiens
caaaatagtaagtta

SEQ ID NO: 118553 - DNA, 15 bp, Homo sapiens
acaaaatagtaagtt

SEQ ID NO: 118554 - DNA, 15 bp, Homo sapiens
gacaaaatagtaagt

SEQ ID NO: 118555 - DNA, 15 bp, Homo sapiens
agacaaaatagtaag

SEQ ID NO: 118556 - DNA, 15 bp, Homo sapiens
gagacaaaatagtaa

SEQ ID NO: 118557 - DNA, 15 bp, Homo sapiens
agagacaaaatagta

SEQ ID NO: 118558 - DNA, 15 bp, Homo sapiens
aagagacaaaatagt

SEQ ID NO: 118559 - DNA, 15 bp, Homo sapiens
taagagacaaaatag

SEQ ID NO: 118560 - DNA, 15 bp, Homo sapiens
ttaagagacaaaata

SEQ ID NO: 118561 - DNA, 15 bp, Homo sapiens
cttaagagacaaaat

SEQ ID NO: 118562 - DNA, 15 bp, Homo sapiens
ccttaagagacaaaa

SEQ ID NO: 118563 - DNA, 15 bp, Homo sapiens
accttaagagacaaa

SEQ ID NO: 118564 - DNA, 15 bp, Homo sapiens
caccttaagagacaa

SEQ ID NO: 118565 - DNA, 15 bp, Homo sapiens
gcaccttaagagaca

SEQ ID NO: 118566 - DNA, 15 bp, Homo sapiens
tgcaccttaagagac

SEQ ID NO: 118567 - DNA, 15 bp, Homo sapiens
atgcaccttaagaga

SEQ ID NO: 118568 - DNA, 15 bp, Homo sapiens
aatgcaccttaagag

SEQ ID NO: 118569 - DNA, 15 bp, Homo sapiens
aaatgcaccttaaga

SEQ ID NO: 118570 - DNA, 15 bp, Homo sapiens
aaaatgcaccttaag

SEQ ID NO: 118571 - DNA, 15 bp, Homo sapiens
taaaatgcaccttaa

SEQ ID NO: 118572 - DNA, 15 bp, Homo sapiens
ataaaatgcacctta

SEQ ID NO: 118573 - DNA, 15 bp, Homo sapiens
gataaaatgcacctt

SEQ ID NO: 118574 - DNA, 15 bp, Homo sapiens
agataaaatgcacct

SEQ ID NO: 118575 - DNA, 15 bp, Homo sapiens
tagataaaatgcacc

SEQ ID NO: 118576 - DNA, 15 bp, Homo sapiens
gtagataaaatgcac

SEQ ID NO: 118577 - DNA, 15 bp, Homo sapiens
agtagataaaatgca

SEQ ID NO: 118578 - DNA, 15 bp, Homo sapiens
aagtagataaaatgc

SEQ ID NO: 118579 - DNA, 15 bp, Homo sapiens
aaagtagataaaatg

SEQ ID NO: 118580 - DNA, 15 bp, Homo sapiens
aaaagtagataaaat

SEQ ID NO: 118581 - DNA, 15 bp, Homo sapiens
taaaagtagataaaa

SEQ ID NO: 118582 - DNA, 15 bp, Homo sapiens
ataaaagtagataaa

SEQ ID NO: 118583 - DNA, 15 bp, Homo sapiens
aataaaagtagataa

SEQ ID NO: 118584 - DNA, 15 bp, Homo sapiens
taataaaagtagata

SEQ ID NO: 118585 - DNA, 15 bp, Homo sapiens
ttaataaaagtagat

SEQ ID NO: 118586 - DNA, 15 bp, Homo sapiens
attaataaaagtaga

SEQ ID NO: 118587 - DNA, 15 bp, Homo sapiens
gattaataaaagtag

SEQ ID NO: 118588 - DNA, 15 bp, Homo sapiens
ggattaataaaagta

SEQ ID NO: 118589 - DNA, 15 bp, Homo sapiens
aggattaataaaagt

SEQ ID NO: 118590 - DNA, 15 bp, Homo sapiens
gaggattaataaaag

SEQ ID NO: 118591 - DNA, 15 bp, Homo sapiens
ggaggattaataaaa

SEQ ID NO: 118592 - DNA, 15 bp, Homo sapiens
tggaggattaataaa

SEQ ID NO: 118593 - DNA, 15 bp, Homo sapiens
ttggaggattaataa

SEQ ID NO: 118594 - DNA, 15 bp, Homo sapiens
attggaggattaata

SEQ ID NO: 118595 - DNA, 15 bp, Homo sapiens
tattggaggattaat

SEQ ID NO: 118596 - DNA, 15 bp, Homo sapiens
ttattggaggattaa

SEQ ID NO: 118597 - DNA, 15 bp, Homo sapiens
attattggaggatta

SEQ ID NO: 118598 - DNA, 15 bp, Homo sapiens
aattattggaggatt

SEQ ID NO: 118599 - DNA, 15 bp, Homo sapiens
aaattattggaggat

SEQ ID NO: 118600 - DNA, 15 bp, Homo sapiens
aaaattattggagga

SEQ ID NO: 118601 - DNA, 15 bp, Homo sapiens
gaaaattattggagg

SEQ ID NO: 118602 - DNA, 15 bp, Homo sapiens
tgaaaattattggag

SEQ ID NO: 118603 - DNA, 15 bp, Homo sapiens
atgaaaattattgga

SEQ ID NO: 118604 - DNA, 15 bp, Homo sapiens
gatgaaaattattgg

SEQ ID NO: 118605 - DNA, 15 bp, Homo sapiens
tgatgaaaattattg

SEQ ID NO: 118606 - DNA, 15 bp, Homo sapiens
gtgatgaaaattatt

SEQ ID NO: 118607 - DNA, 15 bp, Homo sapiens
ggtgatgaaaattat

SEQ ID NO: 118608 - DNA, 15 bp, Homo sapiens
tggtgatgaaaatta

SEQ ID NO: 118609 - DNA, 15 bp, Homo sapiens
atggtgatgaaaatt

SEQ ID NO: 118610 - DNA, 15 bp, Homo sapiens
tatggtgatgaaaat

SEQ ID NO: 118611 - DNA, 15 bp, Homo sapiens
atatggtgatgaaaa

SEQ ID NO: 118612 - DNA, 15 bp, Homo sapiens
tatatggtgatgaaa

SEQ ID NO: 118613 - DNA, 15 bp, Homo sapiens
atatatggtgatgaa

SEQ ID NO: 118614 - DNA, 15 bp, Homo sapiens
aatatatggtgatga

SEQ ID NO: 118615 - DNA, 15 bp, Homo sapiens
aaatatatggtgatg

SEQ ID NO: 118616 - DNA, 15 bp, Homo sapiens
caaatatatggtgat

SEQ ID NO: 118617 - DNA, 15 bp, Homo sapiens
acaaatatatggtga

SEQ ID NO: 118618 - DNA, 15 bp, Homo sapiens
aacaaatatatggtg

SEQ ID NO: 118619 - DNA, 15 bp, Homo sapiens
aaacaaatatatggt

SEQ ID NO: 118620 - DNA, 15 bp, Homo sapiens
aaaacaaatatatgg

SEQ ID NO: 118621 - DNA, 15 bp, Homo sapiens
gaaaacaaatatatg

SEQ ID NO: 118622 - DNA, 15 bp, Homo sapiens
tgaaaacaaatatat

SEQ ID NO: 118623 - DNA, 15 bp, Homo sapiens
atgaaaacaaatata

SEQ ID NO: 118624 - DNA, 15 bp, Homo sapiens
aatgaaaacaaatat

SEQ ID NO: 118625 - DNA, 15 bp, Homo sapiens
caatgaaaacaaata

SEQ ID NO: 118626 - DNA, 15 bp, Homo sapiens
tcaatgaaaacaaat

SEQ ID NO: 118627 - DNA, 15 bp, Homo sapiens
atcaatgaaaacaaa

SEQ ID NO: 118628 - DNA, 15 bp, Homo sapiens
tatcaatgaaaacaa

SEQ ID NO: 118629 - DNA, 15 bp, Homo sapiens
ttatcaatgaaaaca

SEQ ID NO: 118630 - DNA, 15 bp, Homo sapiens
gttatcaatgaaaac

SEQ ID NO: 118631 - DNA, 15 bp, Homo sapiens
agttatcaatgaaaa

SEQ ID NO: 118632 - DNA, 15 bp, Homo sapiens
tagttatcaatgaaa

SEQ ID NO: 118633 - DNA, 15 bp, Homo sapiens
atagttatcaatgaa

SEQ ID NO: 118634 - DNA, 15 bp, Homo sapiens
gatagttatcaatga

SEQ ID NO: 118635 - DNA, 15 bp, Homo sapiens
tgatagttatcaatg

SEQ ID NO: 118636 - DNA, 15 bp, Homo sapiens
ttgatagttatcaat

SEQ ID NO: 118637 - DNA, 15 bp, Homo sapiens
cttgatagttatcaa

SEQ ID NO: 118638 - DNA, 15 bp, Homo sapiens
acttgatagttatca

SEQ ID NO: 118639 - DNA, 15 bp, Homo sapiens
tacttgatagttatc

SEQ ID NO: 118640 - DNA, 15 bp, Homo sapiens
gtacttgatagttat

SEQ ID NO: 118641 - DNA, 15 bp, Homo sapiens
cgtacttgatagtta

SEQ ID NO: 118642 - DNA, 15 bp, Homo sapiens
acgtacttgatagtt

SEQ ID NO: 118643 - DNA, 15 bp, Homo sapiens
gacgtacttgatagt

SEQ ID NO: 118644 - DNA, 15 bp, Homo sapiens
ggacgtacttgatag

SEQ ID NO: 118645 - DNA, 15 bp, Homo sapiens
tggacgtacttgata

SEQ ID NO: 118646 - DNA, 15 bp, Homo sapiens
atggacgtacttgat

SEQ ID NO: 118647 - DNA, 15 bp, Homo sapiens
gatggacgtacttga

SEQ ID NO: 118648 - DNA, 15 bp, Homo sapiens
ggatggacgtacttg

SEQ ID NO: 118649 - DNA, 15 bp, Homo sapiens
tggatggacgtactt

SEQ ID NO: 118650 - DNA, 15 bp, Homo sapiens
atggatggacgtact

SEQ ID NO: 118651 - DNA, 15 bp, Homo sapiens
aatggatggacgtac

SEQ ID NO: 118652 - DNA, 15 bp, Homo sapiens
taatggatggacgta

SEQ ID NO: 118653 - DNA, 15 bp, Homo sapiens
gtaatggatggacgt

SEQ ID NO: 118654 - DNA, 15 bp, Homo sapiens
agtaatggatggacg

SEQ ID NO: 118655 - DNA, 15 bp, Homo sapiens
tagtaatggatggac

SEQ ID NO: 118656 - DNA, 15 bp, Homo sapiens
atagtaatggatgga

SEQ ID NO: 118657 - DNA, 15 bp, Homo sapiens
tatagtaatggatgg

SEQ ID NO: 118658 - DNA, 15 bp, Homo sapiens
ctatagtaatggatg

SEQ ID NO: 118659 - DNA, 15 bp, Homo sapiens
tctatagtaatggat

SEQ ID NO: 118660 - DNA, 15 bp, Homo sapiens
ttctatagtaatgga

SEQ ID NO: 118661 - DNA, 15 bp, Homo sapiens
tttctatagtaatgg

SEQ ID NO: 118662 - DNA, 15 bp, Homo sapiens
gtttctatagtaatg

SEQ ID NO: 118663 - DNA, 15 bp, Homo sapiens
agtttctatagtaat

SEQ ID NO: 118664 - DNA, 15 bp, Homo sapiens
tagtttctatagtaa

SEQ ID NO: 118665 - DNA, 15 bp, Homo sapiens
ttagtttctatagta

SEQ ID NO: 118666 - DNA, 15 bp, Homo sapiens
cttagtttctatagt

SEQ ID NO: 118667 - DNA, 15 bp, Homo sapiens
acttagtttctatag

SEQ ID NO: 118668 - DNA, 15 bp, Homo sapiens
cacttagtttctata

SEQ ID NO: 118669 - DNA, 15 bp, Homo sapiens
ccacttagtttctat

SEQ ID NO: 118670 - DNA, 15 bp, Homo sapiens
tccacttagtttcta

SEQ ID NO: 118671 - DNA, 15 bp, Homo sapiens
atccacttagtttct

SEQ ID NO: 118672 - DNA, 15 bp, Homo sapiens
gatccacttagtttc

SEQ ID NO: 118673 - DNA, 15 bp, Homo sapiens
agatccacttagttt

SEQ ID NO: 118674 - DNA, 15 bp, Homo sapiens
aagatccacttagtt

SEQ ID NO: 118675 - DNA, 15 bp, Homo sapiens
taagatccacttagt

SEQ ID NO: 118676 - DNA, 15 bp, Homo sapiens
ctaagatccacttag

SEQ ID NO: 118677 - DNA, 15 bp, Homo sapiens
tctaagatccactta

SEQ ID NO: 118678 - DNA, 15 bp, Homo sapiens
atctaagatccactt

SEQ ID NO: 118679 - DNA, 15 bp, Homo sapiens
catctaagatccact

SEQ ID NO: 118680 - DNA, 15 bp, Homo sapiens
tcatctaagatccac

SEQ ID NO: 118681 - DNA, 15 bp, Homo sapiens
ttcatctaagatcca

SEQ ID NO: 118682 - DNA, 15 bp, Homo sapiens
attcatctaagatcc

SEQ ID NO: 118683 - DNA, 15 bp, Homo sapiens
cattcatctaagatc

SEQ ID NO: 118684 - DNA, 15 bp, Homo sapiens
acattcatctaagat

SEQ ID NO: 118685 - DNA, 15 bp, Homo sapiens
cacattcatctaaga

SEQ ID NO: 118686 - DNA, 15 bp, Homo sapiens
gcacattcatctaag

SEQ ID NO: 118687 - DNA, 15 bp, Homo sapiens
ggcacattcatctaa

SEQ ID NO: 118688 - DNA, 15 bp, Homo sapiens
tggcacattcatcta

SEQ ID NO: 118689 - DNA, 15 bp, Homo sapiens
ctggcacattcatct

SEQ ID NO: 118690 - DNA, 15 bp, Homo sapiens
gctggcacattcatc

SEQ ID NO: 118691 - DNA, 15 bp, Homo sapiens
agctggcacattcat

SEQ ID NO: 118692 - DNA, 15 bp, Homo sapiens
gagctggcacattca

SEQ ID NO: 118693 - DNA, 15 bp, Homo sapiens
agagctggcacattc

SEQ ID NO: 118694 - DNA, 15 bp, Homo sapiens
tagagctggcacatt

SEQ ID NO: 118695 - DNA, 15 bp, Homo sapiens
gtagagctggcacat

SEQ ID NO: 118696 - DNA, 15 bp, Homo sapiens
agtagagctggcaca

SEQ ID NO: 118697 - DNA, 15 bp, Homo sapiens
tagtagagctggcac

SEQ ID NO: 118698 - DNA, 15 bp, Homo sapiens
atagtagagctggca

SEQ ID NO: 118699 - DNA, 15 bp, Homo sapiens
tatagtagagctggc

SEQ ID NO: 118700 - DNA, 15 bp, Homo sapiens
atatagtagagctgg

SEQ ID NO: 118701 - DNA, 15 bp, Homo sapiens
aatatagtagagctg

SEQ ID NO: 118702 - DNA, 15 bp, Homo sapiens
gaatatagtagagct

SEQ ID NO: 118703 - DNA, 15 bp, Homo sapiens
ggaatatagtagagc

SEQ ID NO: 118704 - DNA, 15 bp, Homo sapiens
aggaatatagtagag

SEQ ID NO: 118705 - DNA, 15 bp, Homo sapiens
caggaatatagtaga

SEQ ID NO: 118706 - DNA, 15 bp, Homo sapiens
acaggaatatagtag

SEQ ID NO: 118707 - DNA, 15 bp, Homo sapiens
gacaggaatatagta

SEQ ID NO: 118708 - DNA, 15 bp, Homo sapiens
tgacaggaatatagt

SEQ ID NO: 118709 - DNA, 15 bp, Homo sapiens
ttgacaggaatatag

SEQ ID NO: 118710 - DNA, 15 bp, Homo sapiens
tttgacaggaatata

SEQ ID NO: 118711 - DNA, 15 bp, Homo sapiens
atttgacaggaatat

SEQ ID NO: 118712 - DNA, 15 bp, Homo sapiens
aatttgacaggaata

SEQ ID NO: 118713 - DNA, 15 bp, Homo sapiens
gaatttgacaggaat

SEQ ID NO: 118714 - DNA, 15 bp, Homo sapiens
ggaatttgacaggaa

SEQ ID NO: 118715 - DNA, 15 bp, Homo sapiens
tggaatttgacagga

SEQ ID NO: 118716 - DNA, 15 bp, Homo sapiens
ctggaatttgacagg

SEQ ID NO: 118717 - DNA, 15 bp, Homo sapiens
tctggaatttgacag

SEQ ID NO: 118718 - DNA, 15 bp, Homo sapiens
ctctggaatttgaca

SEQ ID NO: 118719 - DNA, 15 bp, Homo sapiens
actctggaatttgac

SEQ ID NO: 118720 - DNA, 15 bp, Homo sapiens
aactctggaatttga

SEQ ID NO: 118721 - DNA, 15 bp, Homo sapiens
gaactctggaatttg

SEQ ID NO: 118722 - DNA, 15 bp, Homo sapiens
cgaactctggaattt

SEQ ID NO: 118723 - DNA, 15 bp, Homo sapiens
acgaactctggaatt

SEQ ID NO: 118724 - DNA, 15 bp, Homo sapiens
gacgaactctggaat

SEQ ID NO: 118725 - DNA, 15 bp, Homo sapiens
tgacgaactctggaa

SEQ ID NO: 118726 - DNA, 15 bp, Homo sapiens
atgacgaactctgga

SEQ ID NO: 118727 - DNA, 15 bp, Homo sapiens
gatgacgaactctgg

SEQ ID NO: 118728 - DNA, 15 bp, Homo sapiens
tgatgacgaactctg

SEQ ID NO: 118729 - DNA, 15 bp, Homo sapiens
atgatgacgaactct

SEQ ID NO: 118730 - DNA, 15 bp, Homo sapiens
aatgatgacgaactc

SEQ ID NO: 118731 - DNA, 15 bp, Homo sapiens
taatgatgacgaact

SEQ ID NO: 118732 - DNA, 15 bp, Homo sapiens
ataatgatgacgaac

SEQ ID NO: 118733 - DNA, 15 bp, Homo sapiens
aataatgatgacgaa

SEQ ID NO: 118734 - DNA, 15 bp, Homo sapiens
gaataatgatgacga

SEQ ID NO: 118735 - DNA, 15 bp, Homo sapiens
tgaataatgatgacg

SEQ ID NO: 118736 - DNA, 15 bp, Homo sapiens
atgaataatgatgac

SEQ ID NO: 118737 - DNA, 15 bp, Homo sapiens
aatgaataatgatga

SEQ ID NO: 118738 - DNA, 15 bp, Homo sapiens
taatgaataatgatg

SEQ ID NO: 118739 - DNA, 15 bp, Homo sapiens
ctaatgaataatgat

SEQ ID NO: 118740 - DNA, 15 bp, Homo sapiens
tctaatgaataatga

SEQ ID NO: 118741 - DNA, 15 bp, Homo sapiens
ttctaatgaataatg

SEQ ID NO: 118742 - DNA, 15 bp, Homo sapiens
cttctaatgaataat

SEQ ID NO: 118743 - DNA, 15 bp, Homo sapiens
ccttctaatgaataa

SEQ ID NO: 118744 - DNA, 15 bp, Homo sapiens
tccttctaatgaata

SEQ ID NO: 118745 - DNA, 15 bp, Homo sapiens
ttccttctaatgaat

SEQ ID NO: 118746 - DNA, 15 bp, Homo sapiens
tttccttctaatgaa

SEQ ID NO: 118747 - DNA, 15 bp, Homo sapiens
ttttccttctaatga

SEQ ID NO: 118748 - DNA, 15 bp, Homo sapiens
gttttccttctaatg

SEQ ID NO: 118749 - DNA, 15 bp, Homo sapiens
tgttttccttctaat

SEQ ID NO: 118750 - DNA, 15 bp, Homo sapiens
gtgttttccttctaa

SEQ ID NO: 118751 - DNA, 15 bp, Homo sapiens
ggtgttttccttcta

SEQ ID NO: 118752 - DNA, 15 bp, Homo sapiens
tggtgttttccttct

SEQ ID NO: 118753 - DNA, 15 bp, Homo sapiens
gtggtgttttccttc

SEQ ID NO: 118754 - DNA, 15 bp, Homo sapiens
tgtggtgttttcctt

SEQ ID NO: 118755 - DNA, 15 bp, Homo sapiens
gtgtggtgttttcct

SEQ ID NO: 118756 - DNA, 15 bp, Homo sapiens
tgtgtggtgttttcc

SEQ ID NO: 118757 - DNA, 15 bp, Homo sapiens
atgtgtggtgttttc

SEQ ID NO: 118758 - DNA, 15 bp, Homo sapiens
aatgtgtggtgtttt

SEQ ID NO: 118759 - DNA, 15 bp, Homo sapiens
aaatgtgtggtgttt

SEQ ID NO: 118760 - DNA, 15 bp, Homo sapiens
caaatgtgtggtgtt

SEQ ID NO: 118761 - DNA, 15 bp, Homo sapiens
tcaaatgtgtggtgt

SEQ ID NO: 118762 - DNA, 15 bp, Homo sapiens
ttcaaatgtgtggtg

SEQ ID NO: 118763 - DNA, 15 bp, Homo sapiens
tttcaaatgtgtggt

SEQ ID NO: 118764 - DNA, 15 bp, Homo sapiens
atttcaaatgtgtgg

SEQ ID NO: 118765 - DNA, 15 bp, Homo sapiens
tatttcaaatgtgtg

SEQ ID NO: 118766 - DNA, 15 bp, Homo sapiens
ctatttcaaatgtgt

SEQ ID NO: 118767 - DNA, 15 bp, Homo sapiens
actatttcaaatgtg

SEQ ID NO: 118768 - DNA, 15 bp, Homo sapiens
tactatttcaaatgt

SEQ ID NO: 118769 - DNA, 15 bp, Homo sapiens
ttactatttcaaatg

SEQ ID NO: 118770 - DNA, 15 bp, Homo sapiens
tttactatttcaaat

SEQ ID NO: 118771 - DNA, 15 bp, Homo sapiens
ctttactatttcaaa

SEQ ID NO: 118772 - DNA, 15 bp, Homo sapiens
tctttactatttcaa

SEQ ID NO: 118773 - DNA, 15 bp, Homo sapiens
ttctttactatttca

SEQ ID NO: 118774 - DNA, 15 bp, Homo sapiens
tttctttactatttc

SEQ ID NO: 118775 - DNA, 15 bp, Homo sapiens
ttttctttactattt

SEQ ID NO: 118776 - DNA, 15 bp, Homo sapiens
tttttctttactatt

SEQ ID NO: 118777 - DNA, 15 bp, Homo sapiens
ttttttctttactat

SEQ ID NO: 118778 - DNA, 15 bp, Homo sapiens
tttttttctttacta

SEQ ID NO: 118779 - DNA, 15 bp, Homo sapiens
ctttttttctttact

SEQ ID NO: 118780 - DNA, 15 bp, Homo sapiens
cctttttttctttac

SEQ ID NO: 118781 - DNA, 15 bp, Homo sapiens
tcctttttttcttta

SEQ ID NO: 118782 - DNA, 15 bp, Homo sapiens
ctcctttttttcttt

SEQ ID NO: 118783 - DNA, 15 bp, Homo sapiens
actcctttttttctt

SEQ ID NO: 118784 - DNA, 15 bp, Homo sapiens
aactcctttttttct

SEQ ID NO: 118785 - DNA, 15 bp, Homo sapiens
gaactcctttttttc

SEQ ID NO: 118786 - DNA, 15 bp, Homo sapiens
ggaactccttttttt

SEQ ID NO: 118787 - DNA, 15 bp, Homo sapiens
tggaactcctttttt

SEQ ID NO: 118788 - DNA, 15 bp, Homo sapiens
ttggaactccttttt

SEQ ID NO: 118789 - DNA, 15 bp, Homo sapiens
tttggaactcctttt

SEQ ID NO: 118790 - DNA, 15 bp, Homo sapiens
gtttggaactccttt

SEQ ID NO: 118791 - DNA, 15 bp, Homo sapiens
agtttggaactcctt

SEQ ID NO: 118792 - DNA, 15 bp, Homo sapiens
cagtttggaactcct

SEQ ID NO: 118793 - DNA, 15 bp, Homo sapiens
gcagtttggaactcc

SEQ ID NO: 118794 - DNA, 15 bp, Homo sapiens
tgcagtttggaactc

SEQ ID NO: 118795 - DNA, 15 bp, Homo sapiens
atgcagtttggaact

SEQ ID NO: 118796 - DNA, 15 bp, Homo sapiens
aatgcagtttggaac

SEQ ID NO: 118797 - DNA, 15 bp, Homo sapiens
aaatgcagtttggaa

SEQ ID NO: 118798 - DNA, 15 bp, Homo sapiens
aaaatgcagtttgga

SEQ ID NO: 118799 - DNA, 15 bp, Homo sapiens
taaaatgcagtttgg

SEQ ID NO: 118800 - DNA, 15 bp, Homo sapiens
ctaaaatgcagtttg

SEQ ID NO: 118801 - DNA, 15 bp, Homo sapiens
cctaaaatgcagttt

SEQ ID NO: 118802 - DNA, 15 bp, Homo sapiens
tcctaaaatgcagtt

SEQ ID NO: 118803 - DNA, 15 bp, Homo sapiens
ctcctaaaatgcagt

SEQ ID NO: 118804 - DNA, 15 bp, Homo sapiens
tctcctaaaatgcag

SEQ ID NO: 118805 - DNA, 15 bp, Homo sapiens
ttctcctaaaatgca

SEQ ID NO: 118806 - DNA, 15 bp, Homo sapiens
tttctcctaaaatgc

SEQ ID NO: 118807 - DNA, 15 bp, Homo sapiens
ttttctcctaaaatg

SEQ ID NO: 118808 - DNA, 15 bp, Homo sapiens
cttttctcctaaaat

SEQ ID NO: 118809 - DNA, 15 bp, Homo sapiens
ccttttctcctaaaa

SEQ ID NO: 118810 - DNA, 15 bp, Homo sapiens
accttttctcctaaa

SEQ ID NO: 118811 - DNA, 15 bp, Homo sapiens
taccttttctcctaa

SEQ ID NO: 118812 - DNA, 15 bp, Homo sapiens
ctaccttttctccta

SEQ ID NO: 118813 - DNA, 15 bp, Homo sapiens
actaccttttctcct

SEQ ID NO: 118814 - DNA, 15 bp, Homo sapiens
gactaccttttctcc

SEQ ID NO: 118815 - DNA, 15 bp, Homo sapiens
tgactaccttttctc

SEQ ID NO: 118816 - DNA, 15 bp, Homo sapiens
ttgactaccttttct

SEQ ID NO: 118817 - DNA, 15 bp, Homo sapiens
cttgactaccttttc

SEQ ID NO: 118818 - DNA, 15 bp, Homo sapiens
tcttgactacctttt

SEQ ID NO: 118819 - DNA, 15 bp, Homo sapiens
gtcttgactaccttt

SEQ ID NO: 118820 - DNA, 15 bp, Homo sapiens
agtcttgactacctt

SEQ ID NO: 118821 - DNA, 15 bp, Homo sapiens
cagtcttgactacct

SEQ ID NO: 118822 - DNA, 15 bp, Homo sapiens
acagtcttgactacc

SEQ ID NO: 118823 - DNA, 15 bp, Homo sapiens
cacagtcttgactac

SEQ ID NO: 118824 - DNA, 15 bp, Homo sapiens
acacagtcttgacta

SEQ ID NO: 118825 - DNA, 15 bp, Homo sapiens
aacacagtcttgact

SEQ ID NO: 118826 - DNA, 15 bp, Homo sapiens
gaacacagtcttgac

SEQ ID NO: 118827 - DNA, 15 bp, Homo sapiens
agaacacagtcttga

SEQ ID NO: 118828 - DNA, 15 bp, Homo sapiens
aagaacacagtcttg

SEQ ID NO: 118829 - DNA, 15 bp, Homo sapiens
taagaacacagtctt

SEQ ID NO: 118830 - DNA, 15 bp, Homo sapiens
ataagaacacagtct

SEQ ID NO: 118831 - DNA, 15 bp, Homo sapiens
tataagaacacagtc

SEQ ID NO: 118832 - DNA, 15 bp, Homo sapiens
ttataagaacacagt

SEQ ID NO: 118833 - DNA, 15 bp, Homo sapiens
tttataagaacacag

SEQ ID NO: 118834 - DNA, 15 bp, Homo sapiens
ttttataagaacaca

SEQ ID NO: 118835 - DNA, 15 bp, Homo sapiens
tttttataagaacac

SEQ ID NO: 118836 - DNA, 15 bp, Homo sapiens
gtttttataagaaca

SEQ ID NO: 118837 - DNA, 15 bp, Homo sapiens
ggtttttataagaac

SEQ ID NO: 118838 - DNA, 15 bp, Homo sapiens
gggtttttataagaa

SEQ ID NO: 118839 - DNA, 15 bp, Homo sapiens
agggtttttataaga

SEQ ID NO: 118840 - DNA, 15 bp, Homo sapiens
cagggtttttataag

SEQ ID NO: 118841 - DNA, 15 bp, Homo sapiens
acagggtttttataa

SEQ ID NO: 118842 - DNA, 15 bp, Homo sapiens
cacagggtttttata

SEQ ID NO: 118843 - DNA, 15 bp, Homo sapiens
tcacagggtttttat

SEQ ID NO: 118844 - DNA, 15 bp, Homo sapiens
ttcacagggttttta

SEQ ID NO: 118845 - DNA, 15 bp, Homo sapiens
tttcacagggttttt

SEQ ID NO: 118846 - DNA, 15 bp, Homo sapiens
atttcacagggtttt

SEQ ID NO: 118847 - DNA, 15 bp, Homo sapiens
aatttcacagggttt

SEQ ID NO: 118848 - DNA, 15 bp, Homo sapiens
aaatttcacagggtt

SEQ ID NO: 118849 - DNA, 15 bp, Homo sapiens
caaatttcacagggt

SEQ ID NO: 118850 - DNA, 15 bp, Homo sapiens
gcaaatttcacaggg

SEQ ID NO: 118851 - DNA, 15 bp, Homo sapiens
ggcaaatttcacagg

SEQ ID NO: 118852 - DNA, 15 bp, Homo sapiens
tggcaaatttcacag

SEQ ID NO: 118853 - DNA, 15 bp, Homo sapiens
gtggcaaatttcaca

SEQ ID NO: 118854 - DNA, 15 bp, Homo sapiens
ggtggcaaatttcac

SEQ ID NO: 118855 - DNA, 15 bp, Homo sapiens
aggtggcaaatttca

SEQ ID NO: 118856 - DNA, 15 bp, Homo sapiens
caggtggcaaatttc

SEQ ID NO: 118857 - DNA, 15 bp, Homo sapiens
acaggtggcaaattt

SEQ ID NO: 118858 - DNA, 15 bp, Homo sapiens
gacaggtggcaaatt

SEQ ID NO: 118859 - DNA, 15 bp, Homo sapiens
tgacaggtggcaaat

SEQ ID NO: 118860 - DNA, 15 bp, Homo sapiens
ttgacaggtggcaaa

SEQ ID NO: 118861 - DNA, 15 bp, Homo sapiens
gttgacaggtggcaa

SEQ ID NO: 118862 - DNA, 15 bp, Homo sapiens
agttgacaggtggca

SEQ ID NO: 118863 - DNA, 15 bp, Homo sapiens
aagttgacaggtggc

SEQ ID NO: 118864 - DNA, 15 bp, Homo sapiens
caagttgacaggtgg

SEQ ID NO: 118865 - DNA, 15 bp, Homo sapiens
tcaagttgacaggtg

SEQ ID NO: 118866 - DNA, 15 bp, Homo sapiens
atcaagttgacaggt

SEQ ID NO: 118867 - DNA, 15 bp, Homo sapiens
catcaagttgacagg

SEQ ID NO: 118868 - DNA, 15 bp, Homo sapiens
acatcaagttgacag

SEQ ID NO: 118869 - DNA, 15 bp, Homo sapiens
tacatcaagttgaca

SEQ ID NO: 118870 - DNA, 15 bp, Homo sapiens
atacatcaagttgac

SEQ ID NO: 118871 - DNA, 15 bp, Homo sapiens
catacatcaagttga

SEQ ID NO: 118872 - DNA, 15 bp, Homo sapiens
tcatacatcaagttg

SEQ ID NO: 118873 - DNA, 15 bp, Homo sapiens
atcatacatcaagtt

SEQ ID NO: 118874 - DNA, 15 bp, Homo sapiens
catcatacatcaagt

SEQ ID NO: 118875 - DNA, 15 bp, Homo sapiens
gcatcatacatcaag

SEQ ID NO: 118876 - DNA, 15 bp, Homo sapiens
agcatcatacatcaa

SEQ ID NO: 118877 - DNA, 15 bp, Homo sapiens
cagcatcatacatca

SEQ ID NO: 118878 - DNA, 15 bp, Homo sapiens
tcagcatcatacatc

SEQ ID NO: 118879 - DNA, 15 bp, Homo sapiens
ttcagcatcatacat

SEQ ID NO: 118880 - DNA, 15 bp, Homo sapiens
gttcagcatcataca

SEQ ID NO: 118881 - DNA, 15 bp, Homo sapiens
agttcagcatcatac

SEQ ID NO: 118882 - DNA, 15 bp, Homo sapiens
gagttcagcatcata

SEQ ID NO: 118883 - DNA, 15 bp, Homo sapiens
agagttcagcatcat

SEQ ID NO: 118884 - DNA, 15 bp, Homo sapiens
aagagttcagcatca

SEQ ID NO: 118885 - DNA, 15 bp, Homo sapiens
taagagttcagcatc

SEQ ID NO: 118886 - DNA, 15 bp, Homo sapiens
ctaagagttcagcat

SEQ ID NO: 118887 - DNA, 15 bp, Homo sapiens
gctaagagttcagca

SEQ ID NO: 118888 - DNA, 15 bp, Homo sapiens
tgctaagagttcagc

SEQ ID NO: 118889 - DNA, 15 bp, Homo sapiens
ctgctaagagttcag

SEQ ID NO: 118890 - DNA, 15 bp, Homo sapiens
tctgctaagagttca

SEQ ID NO: 118891 - DNA, 15 bp, Homo sapiens
ttctgctaagagttc

SEQ ID NO: 118892 - DNA, 15 bp, Homo sapiens
cttctgctaagagtt

SEQ ID NO: 118893 - DNA, 15 bp, Homo sapiens
ccttctgctaagagt

SEQ ID NO: 118894 - DNA, 15 bp, Homo sapiens
cccttctgctaagag

SEQ ID NO: 118895 - DNA, 15 bp, Homo sapiens
ccccttctgctaaga

SEQ ID NO: 118896 - DNA, 15 bp, Homo sapiens
tccccttctgctaag

SEQ ID NO: 118897 - DNA, 15 bp, Homo sapiens
ttccccttctgctaa

SEQ ID NO: 118898 - DNA, 15 bp, Homo sapiens
tttccccttctgcta

SEQ ID NO: 118899 - DNA, 15 bp, Homo sapiens
ttttccccttctgct

SEQ ID NO: 118900 - DNA, 15 bp, Homo sapiens
cttttccccttctgc

SEQ ID NO: 118901 - DNA, 15 bp, Homo sapiens
acttttccccttctg

SEQ ID NO: 118902 - DNA, 15 bp, Homo sapiens
aacttttccccttct

SEQ ID NO: 118903 - DNA, 15 bp, Homo sapiens
aaacttttccccttc

SEQ ID NO: 118904 - DNA, 15 bp, Homo sapiens
taaacttttcccctt

SEQ ID NO: 118905 - DNA, 15 bp, Homo sapiens
ttaaacttttcccct

SEQ ID NO: 118906 - DNA, 15 bp, Homo sapiens
attaaacttttcccc

SEQ ID NO: 118907 - DNA, 15 bp, Homo sapiens
gattaaacttttccc

SEQ ID NO: 118908 - DNA, 15 bp, Homo sapiens
agattaaacttttcc

SEQ ID NO: 118909 - DNA, 15 bp, Homo sapiens
gagattaaacttttc

SEQ ID NO: 118910 - DNA, 15 bp, Homo sapiens
ggagattaaactttt

SEQ ID NO: 118911 - DNA, 15 bp, Homo sapiens
aggagattaaacttt

SEQ ID NO: 118912 - DNA, 15 bp, Homo sapiens
aaggagattaaactt

SEQ ID NO: 118913 - DNA, 15 bp, Homo sapiens
aaaggagattaaact

SEQ ID NO: 118914 - DNA, 15 bp, Homo sapiens
aaaaggagattaaac

SEQ ID NO: 118915 - DNA, 15 bp, Homo sapiens
caaaaggagattaaa

SEQ ID NO: 118916 - DNA, 15 bp, Homo sapiens
gcaaaaggagattaa

SEQ ID NO: 118917 - DNA, 15 bp, Homo sapiens
ggcaaaaggagatta

SEQ ID NO: 118918 - DNA, 15 bp, Homo sapiens
tggcaaaaggagatt

SEQ ID NO: 118919 - DNA, 15 bp, Homo sapiens
gtggcaaaaggagat

SEQ ID NO: 118920 - DNA, 15 bp, Homo sapiens
agtggcaaaaggaga

SEQ ID NO: 118921 - DNA, 15 bp, Homo sapiens
aagtggcaaaaggag

SEQ ID NO: 118922 - DNA, 15 bp, Homo sapiens
aaagtggcaaaagga

SEQ ID NO: 118923 - DNA, 15 bp, Homo sapiens
caaagtggcaaaagg

SEQ ID NO: 118924 - DNA, 15 bp, Homo sapiens
acaaagtggcaaaag

SEQ ID NO: 118925 - DNA, 15 bp, Homo sapiens
aacaaagtggcaaaa

SEQ ID NO: 118926 - DNA, 15 bp, Homo sapiens
aaacaaagtggcaaa

SEQ ID NO: 118927 - DNA, 15 bp, Homo sapiens
aaaacaaagtggcaa

SEQ ID NO: 118928 - DNA, 15 bp, Homo sapiens
aaaaacaaagtggca

SEQ ID NO: 118929 - DNA, 15 bp, Homo sapiens
aaaaaacaaagtggc

SEQ ID NO: 118930 - DNA, 15 bp, Homo sapiens
gaaaaaacaaagtgg

SEQ ID NO: 118931 - DNA, 15 bp, Homo sapiens
agaaaaaacaaagtg

SEQ ID NO: 118932 - DNA, 15 bp, Homo sapiens
aagaaaaaacaaagt

SEQ ID NO: 118933 - DNA, 15 bp, Homo sapiens
taagaaaaaacaaag

SEQ ID NO: 118934 - DNA, 15 bp, Homo sapiens
ttaagaaaaaacaaa

SEQ ID NO: 118935 - DNA, 15 bp, Homo sapiens
cttaagaaaaaacaa

SEQ ID NO: 118936 - DNA, 15 bp, Homo sapiens
ccttaagaaaaaaca

SEQ ID NO: 118937 - DNA, 15 bp, Homo sapiens
gccttaagaaaaaac

SEQ ID NO: 118938 - DNA, 15 bp, Homo sapiens
ggccttaagaaaaaa

SEQ ID NO: 118939 - DNA, 15 bp, Homo sapiens
tggccttaagaaaaa

SEQ ID NO: 118940 - DNA, 15 bp, Homo sapiens
atggccttaagaaaa

SEQ ID NO: 118941 - DNA, 15 bp, Homo sapiens
catggccttaagaaa

SEQ ID NO: 118942 - DNA, 15 bp, Homo sapiens
ccatggccttaagaa

SEQ ID NO: 118943 - DNA, 15 bp, Homo sapiens
tccatggccttaaga

SEQ ID NO: 118944 - DNA, 15 bp, Homo sapiens
ctccatggccttaag

SEQ ID NO: 118945 - DNA, 15 bp, Homo sapiens
cctccatggccttaa

SEQ ID NO: 118946 - DNA, 15 bp, Homo sapiens
acctccatggcctta

SEQ ID NO: 118947 - DNA, 15 bp, Homo sapiens
gacctccatggcctt

SEQ ID NO: 118948 - DNA, 15 bp, Homo sapiens
agacctccatggcct

SEQ ID NO: 118949 - DNA, 15 bp, Homo sapiens
cagacctccatggcc

SEQ ID NO: 118950 - DNA, 15 bp, Homo sapiens
acagacctccatggc

SEQ ID NO: 118951 - DNA, 15 bp, Homo sapiens
aacagacctccatgg

SEQ ID NO: 118952 - DNA, 15 bp, Homo sapiens
aaacagacctccatg

SEQ ID NO: 118953 - DNA, 15 bp, Homo sapiens
taaacagacctccat

SEQ ID NO: 118954 - DNA, 15 bp, Homo sapiens
ttaaacagacctcca

SEQ ID NO: 118955 - DNA, 15 bp, Homo sapiens
attaaacagacctcc

SEQ ID NO: 118956 - DNA, 15 bp, Homo sapiens
aattaaacagacctc

SEQ ID NO: 118957 - DNA, 15 bp, Homo sapiens
caattaaacagacct

SEQ ID NO: 118958 - DNA, 15 bp, Homo sapiens
ccaattaaacagacc

SEQ ID NO: 118959 - DNA, 15 bp, Homo sapiens
accaattaaacagac

SEQ ID NO: 118960 - DNA, 15 bp, Homo sapiens
gaccaattaaacaga

SEQ ID NO: 118961 - DNA, 15 bp, Homo sapiens
agaccaattaaacag

SEQ ID NO: 118962 - DNA, 15 bp, Homo sapiens
aagaccaattaaaca

SEQ ID NO: 118963 - DNA, 15 bp, Homo sapiens
aaagaccaattaaac

SEQ ID NO: 118964 - DNA, 15 bp, Homo sapiens
caaagaccaattaaa

SEQ ID NO: 118965 - DNA, 15 bp, Homo sapiens
gcaaagaccaattaa

SEQ ID NO: 118966 - DNA, 15 bp, Homo sapiens
agcaaagaccaatta

SEQ ID NO: 118967 - DNA, 15 bp, Homo sapiens
gagcaaagaccaatt

SEQ ID NO: 118968 - DNA, 15 bp, Homo sapiens
agagcaaagaccaat

SEQ ID NO: 118969 - DNA, 15 bp, Homo sapiens
gagagcaaagaccaa

SEQ ID NO: 118970 - DNA, 15 bp, Homo sapiens
tgagagcaaagacca

SEQ ID NO: 118971 - DNA, 15 bp, Homo sapiens
atgagagcaaagacc

SEQ ID NO: 118972 - DNA, 15 bp, Homo sapiens
aatgagagcaaagac

SEQ ID NO: 118973 - DNA, 15 bp, Homo sapiens
gaatgagagcaaaga

SEQ ID NO: 118974 - DNA, 15 bp, Homo sapiens
agaatgagagcaaag

SEQ ID NO: 118975 - DNA, 15 bp, Homo sapiens
aagaatgagagcaaa

SEQ ID NO: 118976 - DNA, 15 bp, Homo sapiens
aaagaatgagagcaa

SEQ ID NO: 118977 - DNA, 15 bp, Homo sapiens
gaaagaatgagagca

SEQ ID NO: 118978 - DNA, 15 bp, Homo sapiens
agaaagaatgagagc

SEQ ID NO: 118979 - DNA, 15 bp, Homo sapiens
aagaaagaatgagag

SEQ ID NO: 118980 - DNA, 15 bp, Homo sapiens
caagaaagaatgaga

SEQ ID NO: 118981 - DNA, 15 bp, Homo sapiens
tcaagaaagaatgag

SEQ ID NO: 118982 - DNA, 15 bp, Homo sapiens
atcaagaaagaatga

SEQ ID NO: 118983 - DNA, 15 bp, Homo sapiens
catcaagaaagaatg

SEQ ID NO: 118984 - DNA, 15 bp, Homo sapiens
acatcaagaaagaat

SEQ ID NO: 118985 - DNA, 15 bp, Homo sapiens
gacatcaagaaagaa

SEQ ID NO: 118986 - DNA, 15 bp, Homo sapiens
ggacatcaagaaaga

SEQ ID NO: 118987 - DNA, 15 bp, Homo sapiens
gggacatcaagaaag

SEQ ID NO: 118988 - DNA, 15 bp, Homo sapiens
agggacatcaagaaa

SEQ ID NO: 118989 - DNA, 15 bp, Homo sapiens
cagggacatcaagaa

SEQ ID NO: 118990 - DNA, 15 bp, Homo sapiens
acagggacatcaaga

SEQ ID NO: 118991 - DNA, 15 bp, Homo sapiens
cacagggacatcaag

SEQ ID NO: 118992 - DNA, 15 bp, Homo sapiens
acacagggacatcaa

SEQ ID NO: 118993 - DNA, 15 bp, Homo sapiens
aacacagggacatca

SEQ ID NO: 118994 - DNA, 15 bp, Homo sapiens
gaacacagggacatc

SEQ ID NO: 118995 - DNA, 15 bp, Homo sapiens
tgaacacagggacat

SEQ ID NO: 118996 - DNA, 15 bp, Homo sapiens
atgaacacagggaca

SEQ ID NO: 118997 - DNA, 15 bp, Homo sapiens
catgaacacagggac

SEQ ID NO: 118998 - DNA, 15 bp, Homo sapiens
tcatgaacacaggga

SEQ ID NO: 118999 - DNA, 15 bp, Homo sapiens
atcatgaacacaggg

SEQ ID NO: 119000 - DNA, 15 bp, Homo sapiens
aatcatgaacacagg

SEQ ID NO: 119001 - DNA, 15 bp, Homo sapiens
aaatcatgaacacag

SEQ ID NO: 119002 - DNA, 15 bp, Homo sapiens
aaaatcatgaacaca

SEQ ID NO: 119003 - DNA, 15 bp, Homo sapiens
caaaatcatgaacac

SEQ ID NO: 119004 - DNA, 15 bp, Homo sapiens
acaaaatcatgaaca

SEQ ID NO: 119005 - DNA, 15 bp, Homo sapiens
cacaaaatcatgaac

SEQ ID NO: 119006 - DNA, 15 bp, Homo sapiens
ccacaaaatcatgaa

SEQ ID NO: 119007 - DNA, 15 bp, Homo sapiens
accacaaaatcatga

SEQ ID NO: 119008 - DNA, 15 bp, Homo sapiens
aaccacaaaatcatg

SEQ ID NO: 119009 - DNA, 15 bp, Homo sapiens
gaaccacaaaatcat

SEQ ID NO: 119010 - DNA, 15 bp, Homo sapiens
ggaaccacaaaatca

SEQ ID NO: 119011 - DNA, 15 bp, Homo sapiens
aggaaccacaaaatc

SEQ ID NO: 119012 - DNA, 15 bp, Homo sapiens
aaggaaccacaaaat

SEQ ID NO: 119013 - DNA, 15 bp, Homo sapiens
gaaggaaccacaaaa

SEQ ID NO: 119014 - DNA, 15 bp, Homo sapiens
tgaaggaaccacaaa

SEQ ID NO: 119015 - DNA, 15 bp, Homo sapiens
ctgaaggaaccacaa

SEQ ID NO: 119016 - DNA, 15 bp, Homo sapiens
actgaaggaaccaca

SEQ ID NO: 119017 - DNA, 15 bp, Homo sapiens
cactgaaggaaccac

SEQ ID NO: 119018 - DNA, 15 bp, Homo sapiens
tcactgaaggaacca

SEQ ID NO: 119019 - DNA, 15 bp, Homo sapiens
atcactgaaggaacc

SEQ ID NO: 119020 - DNA, 15 bp, Homo sapiens
aatcactgaaggaac

SEQ ID NO: 119021 - DNA, 15 bp, Homo sapiens
gaatcactgaaggaa

SEQ ID NO: 119022 - DNA, 15 bp, Homo sapiens
agaatcactgaagga

SEQ ID NO: 119023 - DNA, 15 bp, Homo sapiens
gagaatcactgaagg

SEQ ID NO: 119024 - DNA, 15 bp, Homo sapiens
agagaatcactgaag

SEQ ID NO: 119025 - DNA, 15 bp, Homo sapiens
gagagaatcactgaa

SEQ ID NO: 119026 - DNA, 15 bp, Homo sapiens
tgagagaatcactga

SEQ ID NO: 119027 - DNA, 15 bp, Homo sapiens
atgagagaatcactg

SEQ ID NO: 119028 - DNA, 15 bp, Homo sapiens
tatgagagaatcact

SEQ ID NO: 119029 - DNA, 15 bp, Homo sapiens
ttatgagagaatcac

SEQ ID NO: 119030 - DNA, 15 bp, Homo sapiens
gttatgagagaatca

SEQ ID NO: 119031 - DNA, 15 bp, Homo sapiens
agttatgagagaatc

SEQ ID NO: 119032 - DNA, 15 bp, Homo sapiens
aagttatgagagaat

SEQ ID NO: 119033 - DNA, 15 bp, Homo sapiens
aaagttatgagagaa

SEQ ID NO: 119034 - DNA, 15 bp, Homo sapiens
aaaagttatgagaga

SEQ ID NO: 119035 - DNA, 15 bp, Homo sapiens
taaaagttatgagag

SEQ ID NO: 119036 - DNA, 15 bp, Homo sapiens
ctaaaagttatgaga

SEQ ID NO: 119037 - DNA, 15 bp, Homo sapiens
gctaaaagttatgag

SEQ ID NO: 119038 - DNA, 15 bp, Homo sapiens
ggctaaaagttatga

SEQ ID NO: 119039 - DNA, 15 bp, Homo sapiens
gggctaaaagttatg

SEQ ID NO: 119040 - DNA, 15 bp, Homo sapiens
tgggctaaaagttat

SEQ ID NO: 119041 - DNA, 15 bp, Homo sapiens
ctgggctaaaagtta

SEQ ID NO: 119042 - DNA, 15 bp, Homo sapiens
tctgggctaaaagtt

SEQ ID NO: 119043 - DNA, 15 bp, Homo sapiens
ctctgggctaaaagt

SEQ ID NO: 119044 - DNA, 15 bp, Homo sapiens
gctctgggctaaaag

SEQ ID NO: 119045 - DNA, 15 bp, Homo sapiens
agctctgggctaaaa

SEQ ID NO: 119046 - DNA, 15 bp, Homo sapiens
cagctctgggctaaa

SEQ ID NO: 119047 - DNA, 15 bp, Homo sapiens
gcagctctgggctaa

SEQ ID NO: 119048 - DNA, 15 bp, Homo sapiens
ggcagctctgggcta

SEQ ID NO: 119049 - DNA, 15 bp, Homo sapiens
aggcagctctgggct

SEQ ID NO: 119050 - DNA, 15 bp, Homo sapiens
gaggcagctctgggc

SEQ ID NO: 119051 - DNA, 15 bp, Homo sapiens
ggaggcagctctggg

SEQ ID NO: 119052 - DNA, 15 bp, Homo sapiens
aggaggcagctctgg

SEQ ID NO: 119053 - DNA, 15 bp, Homo sapiens
aaggaggcagctctg

SEQ ID NO: 119054 - DNA, 15 bp, Homo sapiens
taaggaggcagctct

SEQ ID NO: 119055 - DNA, 15 bp, Homo sapiens
gtaaggaggcagctc

SEQ ID NO: 119056 - DNA, 15 bp, Homo sapiens
agtaaggaggcagct

SEQ ID NO: 119057 - DNA, 15 bp, Homo sapiens
aagtaaggaggcagc

SEQ ID NO: 119058 - DNA, 15 bp, Homo sapiens
aaagtaaggaggcag

SEQ ID NO: 119059 - DNA, 15 bp, Homo sapiens
caaagtaaggaggca

SEQ ID NO: 119060 - DNA, 15 bp, Homo sapiens
tcaaagtaaggaggc

SEQ ID NO: 119061 - DNA, 15 bp, Homo sapiens
atcaaagtaaggagg

SEQ ID NO: 119062 - DNA, 15 bp, Homo sapiens
aatcaaagtaaggag

SEQ ID NO: 119063 - DNA, 15 bp, Homo sapiens
caatcaaagtaagga

SEQ ID NO: 119064 - DNA, 15 bp, Homo sapiens
acaatcaaagtaagg

SEQ ID NO: 119065 - DNA, 15 bp, Homo sapiens
cacaatcaaagtaag

SEQ ID NO: 119066 - DNA, 15 bp, Homo sapiens
tcacaatcaaagtaa

SEQ ID NO: 119067 - DNA, 15 bp, Homo sapiens
ctcacaatcaaagta

SEQ ID NO: 119068 - DNA, 15 bp, Homo sapiens
actcacaatcaaagt

SEQ ID NO: 119069 - DNA, 15 bp, Homo sapiens
tactcacaatcaaag

SEQ ID NO: 119070 - DNA, 15 bp, Homo sapiens
atactcacaatcaaa

SEQ ID NO: 119071 - DNA, 15 bp, Homo sapiens
aatactcacaatcaa

SEQ ID NO: 119072 - DNA, 15 bp, Homo sapiens
taatactcacaatca

SEQ ID NO: 119073 - DNA, 15 bp, Homo sapiens
ataatactcacaatc

SEQ ID NO: 119074 - DNA, 15 bp, Homo sapiens
cataatactcacaat

SEQ ID NO: 119075 - DNA, 15 bp, Homo sapiens
tcataatactcacaa

SEQ ID NO: 119076 - DNA, 15 bp, Homo sapiens
ttcataatactcaca

SEQ ID NO: 119077 - DNA, 15 bp, Homo sapiens
tttcataatactcac

SEQ ID NO: 119078 - DNA, 15 bp, Homo sapiens
ttttcataatactca

SEQ ID NO: 119079 - DNA, 15 bp, Homo sapiens
attttcataatactc

SEQ ID NO: 119080 - DNA, 15 bp, Homo sapiens
tattttcataatact

SEQ ID NO: 119081 - DNA, 15 bp, Homo sapiens
atattttcataatac

SEQ ID NO: 119082 - DNA, 15 bp, Homo sapiens
tatattttcataata

SEQ ID NO: 119083 - DNA, 15 bp, Homo sapiens
gtatattttcataat

SEQ ID NO: 119084 - DNA, 15 bp, Homo sapiens
agtatattttcataa

SEQ ID NO: 119085 - DNA, 15 bp, Homo sapiens
gagtatattttcata

SEQ ID NO: 119086 - DNA, 15 bp, Homo sapiens
tgagtatattttcat

SEQ ID NO: 119087 - DNA, 15 bp, Homo sapiens
atgagtatattttca

SEQ ID NO: 119088 - DNA, 15 bp, Homo sapiens
tatgagtatattttc

SEQ ID NO: 119089 - DNA, 15 bp, Homo sapiens
atatgagtatatttt

SEQ ID NO: 119090 - DNA, 15 bp, Homo sapiens
catatgagtatattt

SEQ ID NO: 119091 - DNA, 15 bp, Homo sapiens
gcatatgagtatatt

SEQ ID NO: 119092 - DNA, 15 bp, Homo sapiens
ggcatatgagtatat

SEQ ID NO: 119093 - DNA, 15 bp, Homo sapiens
aggcatatgagtata

SEQ ID NO: 119094 - DNA, 15 bp, Homo sapiens
gaggcatatgagtat

SEQ ID NO: 119095 - DNA, 15 bp, Homo sapiens
agaggcatatgagta

SEQ ID NO: 119096 - DNA, 15 bp, Homo sapiens
aagaggcatatgagt

SEQ ID NO: 119097 - DNA, 15 bp, Homo sapiens
taagaggcatatgag

SEQ ID NO: 119098 - DNA, 15 bp, Homo sapiens
ttaagaggcatatga

SEQ ID NO: 119099 - DNA, 15 bp, Homo sapiens
tttaagaggcatatg

SEQ ID NO: 119100 - DNA, 15 bp, Homo sapiens
gtttaagaggcatat

SEQ ID NO: 119101 - DNA, 15 bp, Homo sapiens
tgtttaagaggcata

SEQ ID NO: 119102 - DNA, 15 bp, Homo sapiens
atgtttaagaggcat

SEQ ID NO: 119103 - DNA, 15 bp, Homo sapiens
gatgtttaagaggca

SEQ ID NO: 119104 - DNA, 15 bp, Homo sapiens
cgatgtttaagaggc

SEQ ID NO: 119105 - DNA, 15 bp, Homo sapiens
tcgatgtttaagagg

SEQ ID NO: 119106 - DNA, 15 bp, Homo sapiens
ttcgatgtttaagag

SEQ ID NO: 119107 - DNA, 15 bp, Homo sapiens
attcgatgtttaaga

SEQ ID NO: 119108 - DNA, 15 bp, Homo sapiens
aattcgatgtttaag

SEQ ID NO: 119109 - DNA, 15 bp, Homo sapiens
taattcgatgtttaa

SEQ ID NO: 119110 - DNA, 15 bp, Homo sapiens
ataattcgatgttta

SEQ ID NO: 119111 - DNA, 15 bp, Homo sapiens
aataattcgatgttt

SEQ ID NO: 119112 - DNA, 15 bp, Homo sapiens
gaataattcgatgtt

SEQ ID NO: 119113 - DNA, 15 bp, Homo sapiens
agaataattcgatgt

SEQ ID NO: 119114 - DNA, 15 bp, Homo sapiens
aagaataattcgatg

SEQ ID NO: 119115 - DNA, 15 bp, Homo sapiens
taagaataattcgat

SEQ ID NO: 119116 - DNA, 15 bp, Homo sapiens
ttaagaataattcga

SEQ ID NO: 119117 - DNA, 15 bp, Homo sapiens
tttaagaataattcg

SEQ ID NO: 119118 - DNA, 15 bp, Homo sapiens
atttaagaataattc

SEQ ID NO: 119119 - DNA, 15 bp, Homo sapiens
catttaagaataatt

SEQ ID NO: 119120 - DNA, 15 bp, Homo sapiens
tcatttaagaataat

SEQ ID NO: 119121 - DNA, 15 bp, Homo sapiens
atcatttaagaataa

SEQ ID NO: 119122 - DNA, 15 bp, Homo sapiens
gatcatttaagaata

SEQ ID NO: 119123 - DNA, 15 bp, Homo sapiens
agatcatttaagaat

SEQ ID NO: 119124 - DNA, 15 bp, Homo sapiens
tagatcatttaagaa

SEQ ID NO: 119125 - DNA, 15 bp, Homo sapiens
atagatcatttaaga

SEQ ID NO: 119126 - DNA, 15 bp, Homo sapiens
gatagatcatttaag

SEQ ID NO: 119127 - DNA, 15 bp, Homo sapiens
tgatagatcatttaa

SEQ ID NO: 119128 - DNA, 15 bp, Homo sapiens
atgatagatcattta

SEQ ID NO: 119129 - DNA, 15 bp, Homo sapiens
tatgatagatcattt

SEQ ID NO: 119130 - DNA, 15 bp, Homo sapiens
gtatgatagatcatt

SEQ ID NO: 119131 - DNA, 15 bp, Homo sapiens
agtatgatagatcat

SEQ ID NO: 119132 - DNA, 15 bp, Homo sapiens
aagtatgatagatca

SEQ ID NO: 119133 - DNA, 15 bp, Homo sapiens
aaagtatgatagatc

SEQ ID NO: 119134 - DNA, 15 bp, Homo sapiens
aaaagtatgatagat

SEQ ID NO: 119135 - DNA, 15 bp, Homo sapiens
caaaagtatgataga

SEQ ID NO: 119136 - DNA, 15 bp, Homo sapiens
ccaaaagtatgatag

SEQ ID NO: 119137 - DNA, 15 bp, Homo sapiens
gccaaaagtatgata

SEQ ID NO: 119138 - DNA, 15 bp, Homo sapiens
agccaaaagtatgat

SEQ ID NO: 119139 - DNA, 15 bp, Homo sapiens
tagccaaaagtatga

SEQ ID NO: 119140 - DNA, 15 bp, Homo sapiens
ttagccaaaagtatg

SEQ ID NO: 119141 - DNA, 15 bp, Homo sapiens
gttagccaaaagtat

SEQ ID NO: 119142 - DNA, 15 bp, Homo sapiens
ggttagccaaaagta

SEQ ID NO: 119143 - DNA, 15 bp, Homo sapiens
tggttagccaaaagt

SEQ ID NO: 119144 - DNA, 15 bp, Homo sapiens
atggttagccaaaag

SEQ ID NO: 119145 - DNA, 15 bp, Homo sapiens
aatggttagccaaaa

SEQ ID NO: 119146 - DNA, 15 bp, Homo sapiens
aaatggttagccaaa

SEQ ID NO: 119147 - DNA, 15 bp, Homo sapiens
taaatggttagccaa

SEQ ID NO: 119148 - DNA, 15 bp, Homo sapiens
ataaatggttagcca

SEQ ID NO: 119149 - DNA, 15 bp, Homo sapiens
gataaatggttagcc

SEQ ID NO: 119150 - DNA, 15 bp, Homo sapiens
tgataaatggttagc

SEQ ID NO: 119151 - DNA, 15 bp, Homo sapiens
ctgataaatggttag

SEQ ID NO: 119152 - DNA, 15 bp, Homo sapiens
actgataaatggtta

SEQ ID NO: 119153 - DNA, 15 bp, Homo sapiens
cactgataaatggtt

SEQ ID NO: 119154 - DNA, 15 bp, Homo sapiens
tcactgataaatggt

SEQ ID NO: 119155 - DNA, 15 bp, Homo sapiens
ttcactgataaatgg

SEQ ID NO: 119156 - DNA, 15 bp, Homo sapiens
attcactgataaatg

SEQ ID NO: 119157 - DNA, 15 bp, Homo sapiens
aattcactgataaat

SEQ ID NO: 119158 - DNA, 15 bp, Homo sapiens
taattcactgataaa

SEQ ID NO: 119159 - DNA, 15 bp, Homo sapiens
ataattcactgataa

SEQ ID NO: 119160 - DNA, 15 bp, Homo sapiens
gataattcactgata

SEQ ID NO: 119161 - DNA, 15 bp, Homo sapiens
tgataattcactgat

SEQ ID NO: 119162 - DNA, 15 bp, Homo sapiens
ttgataattcactga

SEQ ID NO: 119163 - DNA, 15 bp, Homo sapiens
attgataattcactg

SEQ ID NO: 119164 - DNA, 15 bp, Homo sapiens
cattgataattcact

SEQ ID NO: 119165 - DNA, 15 bp, Homo sapiens
tcattgataattcac

SEQ ID NO: 119166 - DNA, 15 bp, Homo sapiens
ttcattgataattca

SEQ ID NO: 119167 - DNA, 15 bp, Homo sapiens
tttcattgataattc

SEQ ID NO: 119168 - DNA, 15 bp, Homo sapiens
ttttcattgataatt

SEQ ID NO: 119169 - DNA, 15 bp, Homo sapiens
tttttcattgataat

SEQ ID NO: 119170 - DNA, 15 bp, Homo sapiens
ctttttcattgataa

SEQ ID NO: 119171 - DNA, 15 bp, Homo sapiens
tctttttcattgata

SEQ ID NO: 119172 - DNA, 15 bp, Homo sapiens
ttctttttcattgat

SEQ ID NO: 119173 - DNA, 15 bp, Homo sapiens
gttctttttcattga

SEQ ID NO: 119174 - DNA, 15 bp, Homo sapiens
cgttctttttcattg

SEQ ID NO: 119175 - DNA, 15 bp, Homo sapiens
tcgttctttttcatt

SEQ ID NO: 119176 - DNA, 15 bp, Homo sapiens
ttcgttctttttcat

SEQ ID NO: 119177 - DNA, 15 bp, Homo sapiens
gttcgttctttttca

SEQ ID NO: 119178 - DNA, 15 bp, Homo sapiens
ggttcgttctttttc

SEQ ID NO: 119179 - DNA, 15 bp, Homo sapiens
tggttcgttcttttt

SEQ ID NO: 119180 - DNA, 15 bp, Homo sapiens
ctggttcgttctttt

SEQ ID NO: 119181 - DNA, 15 bp, Homo sapiens
tctggttcgttcttt

SEQ ID NO: 119182 - DNA, 15 bp, Homo sapiens
atctggttcgttctt

SEQ ID NO: 119183 - DNA, 15 bp, Homo sapiens
aatctggttcgttct

SEQ ID NO: 119184 - DNA, 15 bp, Homo sapiens
taatctggttcgttc

SEQ ID NO: 119185 - DNA, 15 bp, Homo sapiens
ttaatctggttcgtt

SEQ ID NO: 119186 - DNA, 15 bp, Homo sapiens
attaatctggttcgt

SEQ ID NO: 119187 - DNA, 15 bp, Homo sapiens
cattaatctggttcg

SEQ ID NO: 119188 - DNA, 15 bp, Homo sapiens
tcattaatctggttc

SEQ ID NO: 119189 - DNA, 15 bp, Homo sapiens
ttcattaatctggtt

SEQ ID NO: 119190 - DNA, 15 bp, Homo sapiens
gttcattaatctggt

SEQ ID NO: 119191 - DNA, 15 bp, Homo sapiens
ggttcattaatctgg

SEQ ID NO: 119192 - DNA, 15 bp, Homo sapiens
tggttcattaatctg

SEQ ID NO: 119193 - DNA, 15 bp, Homo sapiens
ctggttcattaatct

SEQ ID NO: 119194 - DNA, 15 bp, Homo sapiens
cctggttcattaatc

SEQ ID NO: 119195 - DNA, 15 bp, Homo sapiens
tcctggttcattaat

SEQ ID NO: 119196 - DNA, 15 bp, Homo sapiens
gtcctggttcattaa

SEQ ID NO: 119197 - DNA, 15 bp, Homo sapiens
agtcctggttcatta

SEQ ID NO: 119198 - DNA, 15 bp, Homo sapiens
gagtcctggttcatt

SEQ ID NO: 119199 - DNA, 15 bp, Homo sapiens
tgagtcctggttcat

SEQ ID NO: 119200 - DNA, 15 bp, Homo sapiens
ttgagtcctggttca

SEQ ID NO: 119201 - DNA, 15 bp, Homo sapiens
tttgagtcctggttc

SEQ ID NO: 119202 - DNA, 15 bp, Homo sapiens
ttttgagtcctggtt

SEQ ID NO: 119203 - DNA, 15 bp, Homo sapiens
tttttgagtcctggt

SEQ ID NO: 119204 - DNA, 15 bp, Homo sapiens
ttttttgagtcctgg

SEQ ID NO: 119205 - DNA, 15 bp, Homo sapiens
gttttttgagtcctg

SEQ ID NO: 119206 - DNA, 15 bp, Homo sapiens
tgttttttgagtcct

SEQ ID NO: 119207 - DNA, 15 bp, Homo sapiens
atgttttttgagtcc

SEQ ID NO: 119208 - DNA, 15 bp, Homo sapiens
catgttttttgagtc

SEQ ID NO: 119209 - DNA, 15 bp, Homo sapiens
tcatgttttttgagt

SEQ ID NO: 119210 - DNA, 15 bp, Homo sapiens
gtcatgttttttgag

SEQ ID NO: 119211 - DNA, 15 bp, Homo sapiens
agtcatgttttttga

SEQ ID NO: 119212 - DNA, 15 bp, Homo sapiens
aagtcatgttttttg

SEQ ID NO: 119213 - DNA, 15 bp, Homo sapiens
gaagtcatgtttttt

SEQ ID NO: 119214 - DNA, 15 bp, Homo sapiens
agaagtcatgttttt

SEQ ID NO: 119215 - DNA, 15 bp, Homo sapiens
aagaagtcatgtttt

SEQ ID NO: 119216 - DNA, 15 bp, Homo sapiens
caagaagtcatgttt

SEQ ID NO: 119217 - DNA, 15 bp, Homo sapiens
tcaagaagtcatgtt

SEQ ID NO: 119218 - DNA, 15 bp, Homo sapiens
ttcaagaagtcatgt

SEQ ID NO: 119219 - DNA, 15 bp, Homo sapiens
tttcaagaagtcatg

SEQ ID NO: 119220 - DNA, 15 bp, Homo sapiens
ttttcaagaagtcat

SEQ ID NO: 119221 - DNA, 15 bp, Homo sapiens
cttttcaagaagtca

SEQ ID NO: 119222 - DNA, 15 bp, Homo sapiens
acttttcaagaagtc

SEQ ID NO: 119223 - DNA, 15 bp, Homo sapiens
gacttttcaagaagt

SEQ ID NO: 119224 - DNA, 15 bp, Homo sapiens
ggacttttcaagaag

SEQ ID NO: 119225 - DNA, 15 bp, Homo sapiens
aggacttttcaagaa

SEQ ID NO: 119226 - DNA, 15 bp, Homo sapiens
taggacttttcaaga

SEQ ID NO: 119227 - DNA, 15 bp, Homo sapiens
ctaggacttttcaag

SEQ ID NO: 119228 - DNA, 15 bp, Homo sapiens
tctaggacttttcaa

SEQ ID NO: 119229 - DNA, 15 bp, Homo sapiens
ttctaggacttttca

SEQ ID NO: 119230 - DNA, 15 bp, Homo sapiens
attctaggacttttc

SEQ ID NO: 119231 - DNA, 15 bp, Homo sapiens
aattctaggactttt

SEQ ID NO: 119232 - DNA, 15 bp, Homo sapiens
taattctaggacttt

SEQ ID NO: 119233 - DNA, 15 bp, Homo sapiens
ataattctaggactt

SEQ ID NO: 119234 - DNA, 15 bp, Homo sapiens
aataattctaggact

SEQ ID NO: 119235 - DNA, 15 bp, Homo sapiens
aaataattctaggac

SEQ ID NO: 119236 - DNA, 15 bp, Homo sapiens
aaaataattctagga

SEQ ID NO: 119237 - DNA, 15 bp, Homo sapiens
taaaataattctagg

SEQ ID NO: 119238 - DNA, 15 bp, Homo sapiens
ataaaataattctag

SEQ ID NO: 119239 - DNA, 15 bp, Homo sapiens
tataaaataattcta

SEQ ID NO: 119240 - DNA, 15 bp, Homo sapiens
ctataaaataattct

SEQ ID NO: 119241 - DNA, 15 bp, Homo sapiens
tctataaaataattc

SEQ ID NO: 119242 - DNA, 15 bp, Homo sapiens
atctataaaataatt

SEQ ID NO: 119243 - DNA, 15 bp, Homo sapiens
aatctataaaataat

SEQ ID NO: 119244 - DNA, 15 bp, Homo sapiens
aaatctataaaataa

SEQ ID NO: 119245 - DNA, 15 bp, Homo sapiens
aaaatctataaaata

SEQ ID NO: 119246 - DNA, 15 bp, Homo sapiens
taaaatctataaaat

SEQ ID NO: 119247 - DNA, 15 bp, Homo sapiens
ataaaatctataaaa

SEQ ID NO: 119248 - DNA, 15 bp, Homo sapiens
aataaaatctataaa

SEQ ID NO: 119249 - DNA, 15 bp, Homo sapiens
taataaaatctataa

SEQ ID NO: 119250 - DNA, 15 bp, Homo sapiens
gtaataaaatctata

SEQ ID NO: 119251 - DNA, 15 bp, Homo sapiens
agtaataaaatctat

SEQ ID NO: 119252 - DNA, 15 bp, Homo sapiens
gagtaataaaatcta

SEQ ID NO: 119253 - DNA, 15 bp, Homo sapiens
agagtaataaaatct

SEQ ID NO: 119254 - DNA, 15 bp, Homo sapiens
tagagtaataaaatc

SEQ ID NO: 119255 - DNA, 15 bp, Homo sapiens
ctagagtaataaaat

SEQ ID NO: 119256 - DNA, 15 bp, Homo sapiens
actagagtaataaaa

SEQ ID NO: 119257 - DNA, 15 bp, Homo sapiens
gactagagtaataaa

SEQ ID NO: 119258 - DNA, 15 bp, Homo sapiens
agactagagtaataa

SEQ ID NO: 119259 - DNA, 15 bp, Homo sapiens
tagactagagtaata

SEQ ID NO: 119260 - DNA, 15 bp, Homo sapiens
ttagactagagtaat

SEQ ID NO: 119261 - DNA, 15 bp, Homo sapiens
tttagactagagtaa

SEQ ID NO: 119262 - DNA, 15 bp, Homo sapiens
ttttagactagagta

SEQ ID NO: 119263 - DNA, 15 bp, Homo sapiens
tttttagactagagt

SEQ ID NO: 119264 - DNA, 15 bp, Homo sapiens
ttttttagactagag

SEQ ID NO: 119265 - DNA, 15 bp, Homo sapiens
tttttttagactaga

SEQ ID NO: 119266 - DNA, 15 bp, Homo sapiens
ttttttttagactag

SEQ ID NO: 119267 - DNA, 15 bp, Homo sapiens
attttttttagacta

SEQ ID NO: 119268 - DNA, 15 bp, Homo sapiens
cattttttttagact

SEQ ID NO: 119269 - DNA, 15 bp, Homo sapiens
ccattttttttagac

SEQ ID NO: 119270 - DNA, 15 bp, Homo sapiens
cccattttttttaga

SEQ ID NO: 119271 - DNA, 15 bp, Homo sapiens
acccattttttttag

SEQ ID NO: 119272 - DNA, 15 bp, Homo sapiens
tacccatttttttta

SEQ ID NO: 119273 - DNA, 15 bp, Homo sapiens
atacccatttttttt

SEQ ID NO: 119274 - DNA, 15 bp, Homo sapiens
aatacccattttttt

SEQ ID NO: 119275 - DNA, 15 bp, Homo sapiens
caatacccatttttt

SEQ ID NO: 119276 - DNA, 15 bp, Homo sapiens
gcaatacccattttt

SEQ ID NO: 119277 - DNA, 15 bp, Homo sapiens
tgcaatacccatttt

SEQ ID NO: 119278 - DNA, 15 bp, Homo sapiens
gtgcaatacccattt

SEQ ID NO: 119279 - DNA, 15 bp, Homo sapiens
agtgcaatacccatt

SEQ ID NO: 119280 - DNA, 15 bp, Homo sapiens
aagtgcaatacccat

SEQ ID NO: 119281 - DNA, 15 bp, Homo sapiens
aaagtgcaataccca

SEQ ID NO: 119282 - DNA, 15 bp, Homo sapiens
aaaagtgcaataccc

SEQ ID NO: 119283 - DNA, 15 bp, Homo sapiens
taaaagtgcaatacc

SEQ ID NO: 119284 - DNA, 15 bp, Homo sapiens
ttaaaagtgcaatac

SEQ ID NO: 119285 - DNA, 15 bp, Homo sapiens
tttaaaagtgcaata

SEQ ID NO: 119286 - DNA, 15 bp, Homo sapiens
atttaaaagtgcaat

SEQ ID NO: 119287 - DNA, 15 bp, Homo sapiens
aatttaaaagtgcaa

SEQ ID NO: 119288 - DNA, 15 bp, Homo sapiens
taatttaaaagtgca

SEQ ID NO: 119289 - DNA, 15 bp, Homo sapiens
ataatttaaaagtgc

SEQ ID NO: 119290 - DNA, 15 bp, Homo sapiens
aataatttaaaagtg

SEQ ID NO: 119291 - DNA, 15 bp, Homo sapiens
aaataatttaaaagt

SEQ ID NO: 119292 - DNA, 15 bp, Homo sapiens
taaataatttaaaag

SEQ ID NO: 119293 - DNA, 15 bp, Homo sapiens
ataaataatttaaaa

SEQ ID NO: 119294 - DNA, 15 bp, Homo sapiens
cataaataatttaaa

SEQ ID NO: 119295 - DNA, 15 bp, Homo sapiens
gcataaataatttaa

SEQ ID NO: 119296 - DNA, 15 bp, Homo sapiens
agcataaataattta

SEQ ID NO: 119297 - DNA, 15 bp, Homo sapiens
tagcataaataattt

SEQ ID NO: 119298 - DNA, 15 bp, Homo sapiens
ctagcataaataatt

SEQ ID NO: 119299 - DNA, 15 bp, Homo sapiens
actagcataaataat

SEQ ID NO: 119300 - DNA, 15 bp, Homo sapiens
aactagcataaataa

SEQ ID NO: 119301 - DNA, 15 bp, Homo sapiens
caactagcataaata

SEQ ID NO: 119302 - DNA, 15 bp, Homo sapiens
acaactagcataaat

SEQ ID NO: 119303 - DNA, 15 bp, Homo sapiens
tacaactagcataaa

SEQ ID NO: 119304 - DNA, 15 bp, Homo sapiens
atacaactagcataa

SEQ ID NO: 119305 - DNA, 15 bp, Homo sapiens
aatacaactagcata

SEQ ID NO: 119306 - DNA, 15 bp, Homo sapiens
gaatacaactagcat

SEQ ID NO: 119307 - DNA, 15 bp, Homo sapiens
tgaatacaactagca

SEQ ID NO: 119308 - DNA, 15 bp, Homo sapiens
atgaatacaactagc

SEQ ID NO: 119309 - DNA, 15 bp, Homo sapiens
aatgaatacaactag

SEQ ID NO: 119310 - DNA, 15 bp, Homo sapiens
gaatgaatacaacta

SEQ ID NO: 119311 - DNA, 15 bp, Homo sapiens
tgaatgaatacaact

SEQ ID NO: 119312 - DNA, 15 bp, Homo sapiens
atgaatgaatacaac

SEQ ID NO: 119313 - DNA, 15 bp, Homo sapiens
aatgaatgaatacaa

SEQ ID NO: 119314 - DNA, 15 bp, Homo sapiens
gaatgaatgaataca

SEQ ID NO: 119315 - DNA, 15 bp, Homo sapiens
tgaatgaatgaatac

SEQ ID NO: 119316 - DNA, 15 bp, Homo sapiens
ttgaatgaatgaata

SEQ ID NO: 119317 - DNA, 15 bp, Homo sapiens
tttgaatgaatgaat

SEQ ID NO: 119318 - DNA, 15 bp, Homo sapiens
atttgaatgaatgaa

SEQ ID NO: 119319 - DNA, 15 bp, Homo sapiens
aatttgaatgaatga

SEQ ID NO: 119320 - DNA, 15 bp, Homo sapiens
taatttgaatgaatg

SEQ ID NO: 119321 - DNA, 15 bp, Homo sapiens
ataatttgaatgaat

SEQ ID NO: 119322 - DNA, 15 bp, Homo sapiens
gataatttgaatgaa

SEQ ID NO: 119323 - DNA, 15 bp, Homo sapiens
tgataatttgaatga

SEQ ID NO: 119324 - DNA, 15 bp, Homo sapiens
ctgataatttgaatg

SEQ ID NO: 119325 - DNA, 15 bp, Homo sapiens
cctgataatttgaat

SEQ ID NO: 119326 - DNA, 15 bp, Homo sapiens
acctgataatttgaa

SEQ ID NO: 119327 - DNA, 15 bp, Homo sapiens
gacctgataatttga

SEQ ID NO: 119328 - DNA, 15 bp, Homo sapiens
agacctgataatttg

SEQ ID NO: 119329 - DNA, 15 bp, Homo sapiens
cagacctgataattt

SEQ ID NO: 119330 - DNA, 15 bp, Homo sapiens
acagacctgataatt

SEQ ID NO: 119331 - DNA, 15 bp, Homo sapiens
aacagacctgataat

SEQ ID NO: 119332 - DNA, 15 bp, Homo sapiens
caacagacctgataa

SEQ ID NO: 119333 - DNA, 15 bp, Homo sapiens
tcaacagacctgata

SEQ ID NO: 119334 - DNA, 15 bp, Homo sapiens
ttcaacagacctgat

SEQ ID NO: 119335 - DNA, 15 bp, Homo sapiens
gttcaacagacctga

SEQ ID NO: 119336 - DNA, 15 bp, Homo sapiens
tgttcaacagacctg

SEQ ID NO: 119337 - DNA, 15 bp, Homo sapiens
ttgttcaacagacct

SEQ ID NO: 119338 - DNA, 15 bp, Homo sapiens
attgttcaacagacc

SEQ ID NO: 119339 - DNA, 15 bp, Homo sapiens
cattgttcaacagac

SEQ ID NO: 119340 - DNA, 15 bp, Homo sapiens
tcattgttcaacaga

SEQ ID NO: 119341 - DNA, 15 bp, Homo sapiens
ctcattgttcaacag

SEQ ID NO: 119342 - DNA, 15 bp, Homo sapiens
tctcattgttcaaca

SEQ ID NO: 119343 - DNA, 15 bp, Homo sapiens
ttctcattgttcaac

SEQ ID NO: 119344 - DNA, 15 bp, Homo sapiens
tttctcattgttcaa

SEQ ID NO: 119345 - DNA, 15 bp, Homo sapiens
gtttctcattgttca

SEQ ID NO: 119346 - DNA, 15 bp, Homo sapiens
agtttctcattgttc

SEQ ID NO: 119347 - DNA, 15 bp, Homo sapiens
tagtttctcattgtt

SEQ ID NO: 119348 - DNA, 15 bp, Homo sapiens
ctagtttctcattgt

SEQ ID NO: 119349 - DNA, 15 bp, Homo sapiens
actagtttctcattg

SEQ ID NO: 119350 - DNA, 15 bp, Homo sapiens
tactagtttctcatt

SEQ ID NO: 119351 - DNA, 15 bp, Homo sapiens
atactagtttctcat

SEQ ID NO: 119352 - DNA, 15 bp, Homo sapiens
catactagtttctca

SEQ ID NO: 119353 - DNA, 15 bp, Homo sapiens
gcatactagtttctc

SEQ ID NO: 119354 - DNA, 15 bp, Homo sapiens
tgcatactagtttct

SEQ ID NO: 119355 - DNA, 15 bp, Homo sapiens
atgcatactagtttc

SEQ ID NO: 119356 - DNA, 15 bp, Homo sapiens
catgcatactagttt

SEQ ID NO: 119357 - DNA, 15 bp, Homo sapiens
gcatgcatactagtt

SEQ ID NO: 119358 - DNA, 15 bp, Homo sapiens
ggcatgcatactagt

SEQ ID NO: 119359 - DNA, 15 bp, Homo sapiens
aggcatgcatactag

SEQ ID NO: 119360 - DNA, 15 bp, Homo sapiens
taggcatgcatacta

SEQ ID NO: 119361 - DNA, 15 bp, Homo sapiens
ataggcatgcatact

SEQ ID NO: 119362 - DNA, 15 bp, Homo sapiens
gataggcatgcatac

SEQ ID NO: 119363 - DNA, 15 bp, Homo sapiens
agataggcatgcata

SEQ ID NO: 119364 - DNA, 15 bp, Homo sapiens
aagataggcatgcat

SEQ ID NO: 119365 - DNA, 15 bp, Homo sapiens
aaagataggcatgca

SEQ ID NO: 119366 - DNA, 15 bp, Homo sapiens
gaaagataggcatgc

SEQ ID NO: 119367 - DNA, 15 bp, Homo sapiens
agaaagataggcatg

SEQ ID NO: 119368 - DNA, 15 bp, Homo sapiens
aagaaagataggcat

SEQ ID NO: 119369 - DNA, 15 bp, Homo sapiens
gaagaaagataggca

SEQ ID NO: 119370 - DNA, 15 bp, Homo sapiens
tgaagaaagataggc

SEQ ID NO: 119371 - DNA, 15 bp, Homo sapiens
gtgaagaaagatagg

SEQ ID NO: 119372 - DNA, 15 bp, Homo sapiens
agtgaagaaagatag

SEQ ID NO: 119373 - DNA, 15 bp, Homo sapiens
tagtgaagaaagata

SEQ ID NO: 119374 - DNA, 15 bp, Homo sapiens
gtagtgaagaaagat

SEQ ID NO: 119375 - DNA, 15 bp, Homo sapiens
agtagtgaagaaaga

SEQ ID NO: 119376 - DNA, 15 bp, Homo sapiens
tagtagtgaagaaag

SEQ ID NO: 119377 - DNA, 15 bp, Homo sapiens
ttagtagtgaagaaa

SEQ ID NO: 119378 - DNA, 15 bp, Homo sapiens
attagtagtgaagaa

SEQ ID NO: 119379 - DNA, 15 bp, Homo sapiens
tattagtagtgaaga

SEQ ID NO: 119380 - DNA, 15 bp, Homo sapiens
atattagtagtgaag

SEQ ID NO: 119381 - DNA, 15 bp, Homo sapiens
aatattagtagtgaa

SEQ ID NO: 119382 - DNA, 15 bp, Homo sapiens
taatattagtagtga

SEQ ID NO: 119383 - DNA, 15 bp, Homo sapiens
ttaatattagtagtg

SEQ ID NO: 119384 - DNA, 15 bp, Homo sapiens
tttaatattagtagt

SEQ ID NO: 119385 - DNA, 15 bp, Homo sapiens
ctttaatattagtag

SEQ ID NO: 119386 - DNA, 15 bp, Homo sapiens
tctttaatattagta

SEQ ID NO: 119387 - DNA, 15 bp, Homo sapiens
ctctttaatattagt

SEQ ID NO: 119388 - DNA, 15 bp, Homo sapiens
tctctttaatattag

SEQ ID NO: 119389 - DNA, 15 bp, Homo sapiens
atctctttaatatta

SEQ ID NO: 119390 - DNA, 15 bp, Homo sapiens
aatctctttaatatt

SEQ ID NO: 119391 - DNA, 15 bp, Homo sapiens
aaatctctttaatat

SEQ ID NO: 119392 - DNA, 15 bp, Homo sapiens
taaatctctttaata

SEQ ID NO: 119393 - DNA, 15 bp, Homo sapiens
gtaaatctctttaat

SEQ ID NO: 119394 - DNA, 15 bp, Homo sapiens
tgtaaatctctttaa

SEQ ID NO: 119395 - DNA, 15 bp, Homo sapiens
atgtaaatctcttta

SEQ ID NO: 119396 - DNA, 15 bp, Homo sapiens
catgtaaatctcttt

SEQ ID NO: 119397 - DNA, 15 bp, Homo sapiens
acatgtaaatctctt

SEQ ID NO: 119398 - DNA, 15 bp, Homo sapiens
aacatgtaaatctct

SEQ ID NO: 119399 - DNA, 15 bp, Homo sapiens
gaacatgtaaatctc

SEQ ID NO: 119400 - DNA, 15 bp, Homo sapiens
ggaacatgtaaatct

SEQ ID NO: 119401 - DNA, 15 bp, Homo sapiens
aggaacatgtaaatc

SEQ ID NO: 119402 - DNA, 15 bp, Homo sapiens
taggaacatgtaaat

SEQ ID NO: 119403 - DNA, 15 bp, Homo sapiens
ataggaacatgtaaa

SEQ ID NO: 119404 - DNA, 15 bp, Homo sapiens
tataggaacatgtaa

SEQ ID NO: 119405 - DNA, 15 bp, Homo sapiens
ttataggaacatgta

SEQ ID NO: 119406 - DNA, 15 bp, Homo sapiens
cttataggaacatgt

SEQ ID NO: 119407 - DNA, 15 bp, Homo sapiens
tcttataggaacatg

SEQ ID NO: 119408 - DNA, 15 bp, Homo sapiens
ttcttataggaacat

SEQ ID NO: 119409 - DNA, 15 bp, Homo sapiens
tttcttataggaaca

SEQ ID NO: 119410 - DNA, 15 bp, Homo sapiens
atttcttataggaac

SEQ ID NO: 119411 - DNA, 15 bp, Homo sapiens
aatttcttataggaa

SEQ ID NO: 119412 - DNA, 15 bp, Homo sapiens
gaatttcttatagga

SEQ ID NO: 119413 - DNA, 15 bp, Homo sapiens
ggaatttcttatagg

SEQ ID NO: 119414 - DNA, 15 bp, Homo sapiens
gggaatttcttatag

SEQ ID NO: 119415 - DNA, 15 bp, Homo sapiens
tgggaatttcttata

SEQ ID NO: 119416 - DNA, 15 bp, Homo sapiens
atgggaatttcttat

SEQ ID NO: 119417 - DNA, 15 bp, Homo sapiens
aatgggaatttctta

SEQ ID NO: 119418 - DNA, 15 bp, Homo sapiens
aaatgggaatttctt

SEQ ID NO: 119419 - DNA, 15 bp, Homo sapiens
aaaatgggaatttct

SEQ ID NO: 119420 - DNA, 15 bp, Homo sapiens
aaaaatgggaatttc

SEQ ID NO: 119421 - DNA, 15 bp, Homo sapiens
gaaaaatgggaattt

SEQ ID NO: 119422 - DNA, 15 bp, Homo sapiens
tgaaaaatgggaatt

SEQ ID NO: 119423 - DNA, 15 bp, Homo sapiens
ttgaaaaatgggaat

SEQ ID NO: 119424 - DNA, 15 bp, Homo sapiens
gttgaaaaatgggaa

SEQ ID NO: 119425 - DNA, 15 bp, Homo sapiens
tgttgaaaaatggga

SEQ ID NO: 119426 - DNA, 15 bp, Homo sapiens
atgttgaaaaatggg

SEQ ID NO: 119427 - DNA, 15 bp, Homo sapiens
catgttgaaaaatgg

SEQ ID NO: 119428 - DNA, 15 bp, Homo sapiens
tcatgttgaaaaatg

SEQ ID NO: 119429 - DNA, 15 bp, Homo sapiens
ctcatgttgaaaaat

SEQ ID NO: 119430 - DNA, 15 bp, Homo sapiens
gctcatgttgaaaaa

SEQ ID NO: 119431 - DNA, 15 bp, Homo sapiens
ggctcatgttgaaaa

SEQ ID NO: 119432 - DNA, 15 bp, Homo sapiens
tggctcatgttgaaa

SEQ ID NO: 119433 - DNA, 15 bp, Homo sapiens
gtggctcatgttgaa

SEQ ID NO: 119434 - DNA, 15 bp, Homo sapiens
agtggctcatgttga

SEQ ID NO: 119435 - DNA, 15 bp, Homo sapiens
tagtggctcatgttg

SEQ ID NO: 119436 - DNA, 15 bp, Homo sapiens
ttagtggctcatgtt

SEQ ID NO: 119437 - DNA, 15 bp, Homo sapiens
attagtggctcatgt

SEQ ID NO: 119438 - DNA, 15 bp, Homo sapiens
tattagtggctcatg

SEQ ID NO: 119439 - DNA, 15 bp, Homo sapiens
gtattagtggctcat

SEQ ID NO: 119440 - DNA, 15 bp, Homo sapiens
cgtattagtggctca

SEQ ID NO: 119441 - DNA, 15 bp, Homo sapiens
acgtattagtggctc

SEQ ID NO: 119442 - DNA, 15 bp, Homo sapiens
aacgtattagtggct

SEQ ID NO: 119443 - DNA, 15 bp, Homo sapiens
aaacgtattagtggc

SEQ ID NO: 119444 - DNA, 15 bp, Homo sapiens
caaacgtattagtgg

SEQ ID NO: 119445 - DNA, 15 bp, Homo sapiens
ccaaacgtattagtg

SEQ ID NO: 119446 - DNA, 15 bp, Homo sapiens
accaaacgtattagt

SEQ ID NO: 119447 - DNA, 15 bp, Homo sapiens
aaccaaacgtattag

SEQ ID NO: 119448 - DNA, 15 bp, Homo sapiens
aaaccaaacgtatta

SEQ ID NO: 119449 - DNA, 15 bp, Homo sapiens
aaaaccaaacgtatt

SEQ ID NO: 119450 - DNA, 15 bp, Homo sapiens
gaaaaccaaacgtat

SEQ ID NO: 119451 - DNA, 15 bp, Homo sapiens
tgaaaaccaaacgta

SEQ ID NO: 119452 - DNA, 15 bp, Homo sapiens
atgaaaaccaaacgt

SEQ ID NO: 119453 - DNA, 15 bp, Homo sapiens
aatgaaaaccaaacg

SEQ ID NO: 119454 - DNA, 15 bp, Homo sapiens
taatgaaaaccaaac

SEQ ID NO: 119455 - DNA, 15 bp, Homo sapiens
ttaatgaaaaccaaa

SEQ ID NO: 119456 - DNA, 15 bp, Homo sapiens
attaatgaaaaccaa

SEQ ID NO: 119457 - DNA, 15 bp, Homo sapiens
cattaatgaaaacca

SEQ ID NO: 119458 - DNA, 15 bp, Homo sapiens
ccattaatgaaaacc

SEQ ID NO: 119459 - DNA, 15 bp, Homo sapiens
gccattaatgaaaac

SEQ ID NO: 119460 - DNA, 15 bp, Homo sapiens
tgccattaatgaaaa

SEQ ID NO: 119461 - DNA, 15 bp, Homo sapiens
atgccattaatgaaa

SEQ ID NO: 119462 - DNA, 15 bp, Homo sapiens
catgccattaatgaa

SEQ ID NO: 119463 - DNA, 15 bp, Homo sapiens
gcatgccattaatga

SEQ ID NO: 119464 - DNA, 15 bp, Homo sapiens
agcatgccattaatg

SEQ ID NO: 119465 - DNA, 15 bp, Homo sapiens
tagcatgccattaat

SEQ ID NO: 119466 - DNA, 15 bp, Homo sapiens
ctagcatgccattaa

SEQ ID NO: 119467 - DNA, 15 bp, Homo sapiens
tctagcatgccatta

SEQ ID NO: 119468 - DNA, 15 bp, Homo sapiens
ttctagcatgccatt

SEQ ID NO: 119469 - DNA, 15 bp, Homo sapiens
gttctagcatgccat

SEQ ID NO: 119470 - DNA, 15 bp, Homo sapiens
agttctagcatgcca

SEQ ID NO: 119471 - DNA, 15 bp, Homo sapiens
cagttctagcatgcc

SEQ ID NO: 119472 - DNA, 15 bp, Homo sapiens
tcagttctagcatgc

SEQ ID NO: 119473 - DNA, 15 bp, Homo sapiens
ttcagttctagcatg

SEQ ID NO: 119474 - DNA, 15 bp, Homo sapiens
gttcagttctagcat

SEQ ID NO: 119475 - DNA, 15 bp, Homo sapiens
tgttcagttctagca

SEQ ID NO: 119476 - DNA, 15 bp, Homo sapiens
gtgttcagttctagc

SEQ ID NO: 119477 - DNA, 15 bp, Homo sapiens
agtgttcagttctag

SEQ ID NO: 119478 - DNA, 15 bp, Homo sapiens
tagtgttcagttcta

SEQ ID NO: 119479 - DNA, 15 bp, Homo sapiens
ttagtgttcagttct

SEQ ID NO: 119480 - DNA, 15 bp, Homo sapiens
tttagtgttcagttc

SEQ ID NO: 119481 - DNA, 15 bp, Homo sapiens
atttagtgttcagtt

SEQ ID NO: 119482 - DNA, 15 bp, Homo sapiens
aatttagtgttcagt

SEQ ID NO: 119483 - DNA, 15 bp, Homo sapiens
aaatttagtgttcag

SEQ ID NO: 119484 - DNA, 15 bp, Homo sapiens
aaaatttagtgttca

SEQ ID NO: 119485 - DNA, 15 bp, Homo sapiens
caaaatttagtgttc

SEQ ID NO: 119486 - DNA, 15 bp, Homo sapiens
tcaaaatttagtgtt

SEQ ID NO: 119487 - DNA, 15 bp, Homo sapiens
atcaaaatttagtgt

SEQ ID NO: 119488 - DNA, 15 bp, Homo sapiens
tatcaaaatttagtg

SEQ ID NO: 119489 - DNA, 15 bp, Homo sapiens
ttatcaaaatttagt

SEQ ID NO: 119490 - DNA, 15 bp, Homo sapiens
attatcaaaatttag

SEQ ID NO: 119491 - DNA, 15 bp, Homo sapiens
cattatcaaaattta

SEQ ID NO: 119492 - DNA, 15 bp, Homo sapiens
ccattatcaaaattt

SEQ ID NO: 119493 - DNA, 15 bp, Homo sapiens
accattatcaaaatt

SEQ ID NO: 119494 - DNA, 15 bp, Homo sapiens
taccattatcaaaat

SEQ ID NO: 119495 - DNA, 15 bp, Homo sapiens
ataccattatcaaaa

SEQ ID NO: 119496 - DNA, 15 bp, Homo sapiens
aataccattatcaaa

SEQ ID NO: 119497 - DNA, 15 bp, Homo sapiens
aaataccattatcaa

SEQ ID NO: 119498 - DNA, 15 bp, Homo sapiens
taaataccattatca

SEQ ID NO: 119499 - DNA, 15 bp, Homo sapiens
ttaaataccattatc

SEQ ID NO: 119500 - DNA, 15 bp, Homo sapiens
tttaaataccattat

SEQ ID NO: 119501 - DNA, 15 bp, Homo sapiens
ctttaaataccatta

SEQ ID NO: 119502 - DNA, 15 bp, Homo sapiens
tctttaaataccatt

SEQ ID NO: 119503 - DNA, 15 bp, Homo sapiens
gtctttaaataccat

SEQ ID NO: 119504 - DNA, 15 bp, Homo sapiens
tgtctttaaatacca

SEQ ID NO: 119505 - DNA, 15 bp, Homo sapiens
ctgtctttaaatacc

SEQ ID NO: 119506 - DNA, 15 bp, Homo sapiens
actgtctttaaatac

SEQ ID NO: 119507 - DNA, 15 bp, Homo sapiens
cactgtctttaaata

SEQ ID NO: 119508 - DNA, 15 bp, Homo sapiens
ccactgtctttaaat

SEQ ID NO: 119509 - DNA, 15 bp, Homo sapiens
accactgtctttaaa

SEQ ID NO: 119510 - DNA, 15 bp, Homo sapiens
aaccactgtctttaa

SEQ ID NO: 119511 - DNA, 15 bp, Homo sapiens
taaccactgtcttta

SEQ ID NO: 119512 - DNA, 15 bp, Homo sapiens
ataaccactgtcttt

SEQ ID NO: 119513 - DNA, 15 bp, Homo sapiens
gataaccactgtctt

SEQ ID NO: 119514 - DNA, 15 bp, Homo sapiens
ggataaccactgtct

SEQ ID NO: 119515 - DNA, 15 bp, Homo sapiens
tggataaccactgtc

SEQ ID NO: 119516 - DNA, 15 bp, Homo sapiens
gtggataaccactgt

SEQ ID NO: 119517 - DNA, 15 bp, Homo sapiens
tgtggataaccactg

SEQ ID NO: 119518 - DNA, 15 bp, Homo sapiens
ttgtggataaccact

SEQ ID NO: 119519 - DNA, 15 bp, Homo sapiens
cttgtggataaccac

SEQ ID NO: 119520 - DNA, 15 bp, Homo sapiens
acttgtggataacca

SEQ ID NO: 119521 - DNA, 15 bp, Homo sapiens
aacttgtggataacc

SEQ ID NO: 119522 - DNA, 15 bp, Homo sapiens
aaacttgtggataac

SEQ ID NO: 119523 - DNA, 15 bp, Homo sapiens
caaacttgtggataa

SEQ ID NO: 119524 - DNA, 15 bp, Homo sapiens
ccaaacttgtggata

SEQ ID NO: 119525 - DNA, 15 bp, Homo sapiens
cccaaacttgtggat

SEQ ID NO: 119526 - DNA, 15 bp, Homo sapiens
tcccaaacttgtgga

SEQ ID NO: 119527 - DNA, 15 bp, Homo sapiens
atcccaaacttgtgg

SEQ ID NO: 119528 - DNA, 15 bp, Homo sapiens
catcccaaacttgtg

SEQ ID NO: 119529 - DNA, 15 bp, Homo sapiens
acatcccaaacttgt

SEQ ID NO: 119530 - DNA, 15 bp, Homo sapiens
gacatcccaaacttg

SEQ ID NO: 119531 - DNA, 15 bp, Homo sapiens
tgacatcccaaactt

SEQ ID NO: 119532 - DNA, 15 bp, Homo sapiens
ctgacatcccaaact

SEQ ID NO: 119533 - DNA, 15 bp, Homo sapiens
actgacatcccaaac

SEQ ID NO: 119534 - DNA, 15 bp, Homo sapiens
cactgacatcccaaa

SEQ ID NO: 119535 - DNA, 15 bp, Homo sapiens
acactgacatcccaa

SEQ ID NO: 119536 - DNA, 15 bp, Homo sapiens
tacactgacatccca

SEQ ID NO: 119537 - DNA, 15 bp, Homo sapiens
ttacactgacatccc

SEQ ID NO: 119538 - DNA, 15 bp, Homo sapiens
gttacactgacatcc

SEQ ID NO: 119539 - DNA, 15 bp, Homo sapiens
agttacactgacatc

SEQ ID NO: 119540 - DNA, 15 bp, Homo sapiens
aagttacactgacat

SEQ ID NO: 119541 - DNA, 15 bp, Homo sapiens
taagttacactgaca

SEQ ID NO: 119542 - DNA, 15 bp, Homo sapiens
ctaagttacactgac

SEQ ID NO: 119543 - DNA, 15 bp, Homo sapiens
actaagttacactga

SEQ ID NO: 119544 - DNA, 15 bp, Homo sapiens
aactaagttacactg

SEQ ID NO: 119545 - DNA, 15 bp, Homo sapiens
aaactaagttacact

SEQ ID NO: 119546 - DNA, 15 bp, Homo sapiens
gaaactaagttacac

SEQ ID NO: 119547 - DNA, 15 bp, Homo sapiens
cgaaactaagttaca

SEQ ID NO: 119548 - DNA, 15 bp, Homo sapiens
acgaaactaagttac

SEQ ID NO: 119549 - DNA, 15 bp, Homo sapiens
gacgaaactaagtta

SEQ ID NO: 119550 - DNA, 15 bp, Homo sapiens
tgacgaaactaagtt

SEQ ID NO: 119551 - DNA, 15 bp, Homo sapiens
atgacgaaactaagt

SEQ ID NO: 119552 - DNA, 15 bp, Homo sapiens
gatgacgaaactaag

SEQ ID NO: 119553 - DNA, 15 bp, Homo sapiens
tgatgacgaaactaa

SEQ ID NO: 119554 - DNA, 15 bp, Homo sapiens
gtgatgacgaaacta

SEQ ID NO: 119555 - DNA, 15 bp, Homo sapiens
agtgatgacgaaact

SEQ ID NO: 119556 - DNA, 15 bp, Homo sapiens
cagtgatgacgaaac

SEQ ID NO: 119557 - DNA, 15 bp, Homo sapiens
ccagtgatgacgaaa

SEQ ID NO: 119558 - DNA, 15 bp, Homo sapiens
tccagtgatgacgaa

SEQ ID NO: 119559 - DNA, 15 bp, Homo sapiens
atccagtgatgacga

SEQ ID NO: 119560 - DNA, 15 bp, Homo sapiens
tatccagtgatgacg

SEQ ID NO: 119561 - DNA, 15 bp, Homo sapiens
atatccagtgatgac

SEQ ID NO: 119562 - DNA, 15 bp, Homo sapiens
aatatccagtgatga

SEQ ID NO: 119563 - DNA, 15 bp, Homo sapiens
aaatatccagtgatg

SEQ ID NO: 119564 - DNA, 15 bp, Homo sapiens
taaatatccagtgat

SEQ ID NO: 119565 - DNA, 15 bp, Homo sapiens
gtaaatatccagtga

SEQ ID NO: 119566 - DNA, 15 bp, Homo sapiens
tgtaaatatccagtg

SEQ ID NO: 119567 - DNA, 15 bp, Homo sapiens
ttgtaaatatccagt

SEQ ID NO: 119568 - DNA, 15 bp, Homo sapiens
cttgtaaatatccag

SEQ ID NO: 119569 - DNA, 15 bp, Homo sapiens
acttgtaaatatcca

SEQ ID NO: 119570 - DNA, 15 bp, Homo sapiens
cacttgtaaatatcc

SEQ ID NO: 119571 - DNA, 15 bp, Homo sapiens
gcacttgtaaatatc

SEQ ID NO: 119572 - DNA, 15 bp, Homo sapiens
agcacttgtaaatat

SEQ ID NO: 119573 - DNA, 15 bp, Homo sapiens
gagcacttgtaaata

SEQ ID NO: 119574 - DNA, 15 bp, Homo sapiens
tgagcacttgtaaat

SEQ ID NO: 119575 - DNA, 15 bp, Homo sapiens
atgagcacttgtaaa

SEQ ID NO: 119576 - DNA, 15 bp, Homo sapiens
gatgagcacttgtaa

SEQ ID NO: 119577 - DNA, 15 bp, Homo sapiens
tgatgagcacttgta

SEQ ID NO: 119578 - DNA, 15 bp, Homo sapiens
atgatgagcacttgt

SEQ ID NO: 119579 - DNA, 15 bp, Homo sapiens
tatgatgagcacttg

SEQ ID NO: 119580 - DNA, 15 bp, Homo sapiens
ttatgatgagcactt

SEQ ID NO: 119581 - DNA, 15 bp, Homo sapiens
attatgatgagcact

SEQ ID NO: 119582 - DNA, 15 bp, Homo sapiens
aattatgatgagcac

SEQ ID NO: 119583 - DNA, 15 bp, Homo sapiens
caattatgatgagca

SEQ ID NO: 119584 - DNA, 15 bp, Homo sapiens
acaattatgatgagc

SEQ ID NO: 119585 - DNA, 15 bp, Homo sapiens
cacaattatgatgag

SEQ ID NO: 119586 - DNA, 15 bp, Homo sapiens
ccacaattatgatga

SEQ ID NO: 119587 - DNA, 15 bp, Homo sapiens
tccacaattatgatg

SEQ ID NO: 119588 - DNA, 15 bp, Homo sapiens
atccacaattatgat

SEQ ID NO: 119589 - DNA, 15 bp, Homo sapiens
gatccacaattatga

SEQ ID NO: 119590 - DNA, 15 bp, Homo sapiens
ggatccacaattatg

SEQ ID NO: 119591 - DNA, 15 bp, Homo sapiens
tggatccacaattat

SEQ ID NO: 119592 - DNA, 15 bp, Homo sapiens
ctggatccacaatta

SEQ ID NO: 119593 - DNA, 15 bp, Homo sapiens
tctggatccacaatt

SEQ ID NO: 119594 - DNA, 15 bp, Homo sapiens
atctggatccacaat

SEQ ID NO: 119595 - DNA, 15 bp, Homo sapiens
gatctggatccacaa

SEQ ID NO: 119596 - DNA, 15 bp, Homo sapiens
tgatctggatccaca

SEQ ID NO: 119597 - DNA, 15 bp, Homo sapiens
gtgatctggatccac

SEQ ID NO: 119598 - DNA, 15 bp, Homo sapiens
tgtgatctggatcca

SEQ ID NO: 119599 - DNA, 15 bp, Homo sapiens
ttgtgatctggatcc

SEQ ID NO: 119600 - DNA, 15 bp, Homo sapiens
cttgtgatctggatc

SEQ ID NO: 119601 - DNA, 15 bp, Homo sapiens
ccttgtgatctggat

SEQ ID NO: 119602 - DNA, 15 bp, Homo sapiens
accttgtgatctgga

SEQ ID NO: 119603 - DNA, 15 bp, Homo sapiens
gaccttgtgatctgg

SEQ ID NO: 119604 - DNA, 15 bp, Homo sapiens
agaccttgtgatctg

SEQ ID NO: 119605 - DNA, 15 bp, Homo sapiens
aagaccttgtgatct

SEQ ID NO: 119606 - DNA, 15 bp, Homo sapiens
taagaccttgtgatc

SEQ ID NO: 119607 - DNA, 15 bp, Homo sapiens
gtaagaccttgtgat

SEQ ID NO: 119608 - DNA, 15 bp, Homo sapiens
cgtaagaccttgtga

SEQ ID NO: 119609 - DNA, 15 bp, Homo sapiens
ccgtaagaccttgtg

SEQ ID NO: 119610 - DNA, 15 bp, Homo sapiens
tccgtaagaccttgt

SEQ ID NO: 119611 - DNA, 15 bp, Homo sapiens
gtccgtaagaccttg

SEQ ID NO: 119612 - DNA, 15 bp, Homo sapiens
agtccgtaagacctt

SEQ ID NO: 119613 - DNA, 15 bp, Homo sapiens
gagtccgtaagacct

SEQ ID NO: 119614 - DNA, 15 bp, Homo sapiens
agagtccgtaagacc

SEQ ID NO: 119615 - DNA, 15 bp, Homo sapiens
cagagtccgtaagac

SEQ ID NO: 119616 - DNA, 15 bp, Homo sapiens
ccagagtccgtaaga

SEQ ID NO: 119617 - DNA, 15 bp, Homo sapiens
accagagtccgtaag

SEQ ID NO: 119618 - DNA, 15 bp, Homo sapiens
gaccagagtccgtaa

SEQ ID NO: 119619 - DNA, 15 bp, Homo sapiens
agaccagagtccgta

SEQ ID NO: 119620 - DNA, 15 bp, Homo sapiens
gagaccagagtccgt

SEQ ID NO: 119621 - DNA, 15 bp, Homo sapiens
tgagaccagagtccg

SEQ ID NO: 119622 - DNA, 15 bp, Homo sapiens
atgagaccagagtcc

SEQ ID NO: 119623 - DNA, 15 bp, Homo sapiens
catgagaccagagtc

SEQ ID NO: 119624 - DNA, 15 bp, Homo sapiens
acatgagaccagagt

SEQ ID NO: 119625 - DNA, 15 bp, Homo sapiens
aacatgagaccagag

SEQ ID NO: 119626 - DNA, 15 bp, Homo sapiens
taacatgagaccaga

SEQ ID NO: 119627 - DNA, 15 bp, Homo sapiens
ctaacatgagaccag

SEQ ID NO: 119628 - DNA, 15 bp, Homo sapiens
gctaacatgagacca

SEQ ID NO: 119629 - DNA, 15 bp, Homo sapiens
agctaacatgagacc

SEQ ID NO: 119630 - DNA, 15 bp, Homo sapiens
aagctaacatgagac

SEQ ID NO: 119631 - DNA, 15 bp, Homo sapiens
aaagctaacatgaga

SEQ ID NO: 119632 - DNA, 15 bp, Homo sapiens
gaaagctaacatgag

SEQ ID NO: 119633 - DNA, 15 bp, Homo sapiens
tgaaagctaacatga

SEQ ID NO: 119634 - DNA, 15 bp, Homo sapiens
ctgaaagctaacatg

SEQ ID NO: 119635 - DNA, 15 bp, Homo sapiens
tctgaaagctaacat

SEQ ID NO: 119636 - DNA, 15 bp, Homo sapiens
atctgaaagctaaca

SEQ ID NO: 119637 - DNA, 15 bp, Homo sapiens
catctgaaagctaac

SEQ ID NO: 119638 - DNA, 15 bp, Homo sapiens
gcatctgaaagctaa

SEQ ID NO: 119639 - DNA, 15 bp, Homo sapiens
agcatctgaaagcta

SEQ ID NO: 119640 - DNA, 15 bp, Homo sapiens
aagcatctgaaagct

SEQ ID NO: 119641 - DNA, 15 bp, Homo sapiens
taagcatctgaaagc

SEQ ID NO: 119642 - DNA, 15 bp, Homo sapiens
gtaagcatctgaaag

SEQ ID NO: 119643 - DNA, 15 bp, Homo sapiens
agtaagcatctgaaa

SEQ ID NO: 119644 - DNA, 15 bp, Homo sapiens
tagtaagcatctgaa

SEQ ID NO: 119645 - DNA, 15 bp, Homo sapiens
ttagtaagcatctga

SEQ ID NO: 119646 - DNA, 15 bp, Homo sapiens
cttagtaagcatctg

SEQ ID NO: 119647 - DNA, 15 bp, Homo sapiens
acttagtaagcatct

SEQ ID NO: 119648 - DNA, 15 bp, Homo sapiens
aacttagtaagcatc

SEQ ID NO: 119649 - DNA, 15 bp, Homo sapiens
aaacttagtaagcat

SEQ ID NO: 119650 - DNA, 15 bp, Homo sapiens
aaaacttagtaagca

SEQ ID NO: 119651 - DNA, 15 bp, Homo sapiens
aaaaacttagtaagc

SEQ ID NO: 119652 - DNA, 15 bp, Homo sapiens
taaaaacttagtaag

SEQ ID NO: 119653 - DNA, 15 bp, Homo sapiens
ttaaaaacttagtaa

SEQ ID NO: 119654 - DNA, 15 bp, Homo sapiens
attaaaaacttagta

SEQ ID NO: 119655 - DNA, 15 bp, Homo sapiens
aattaaaaacttagt

SEQ ID NO: 119656 - DNA, 15 bp, Homo sapiens
aaattaaaaacttag

SEQ ID NO: 119657 - DNA, 15 bp, Homo sapiens
aaaattaaaaactta

SEQ ID NO: 119658 - DNA, 15 bp, Homo sapiens
aaaaattaaaaactt

SEQ ID NO: 119659 - DNA, 15 bp, Homo sapiens
caaaaattaaaaact

SEQ ID NO: 119660 - DNA, 15 bp, Homo sapiens
tcaaaaattaaaaac

SEQ ID NO: 119661 - DNA, 15 bp, Homo sapiens
gtcaaaaattaaaaa

SEQ ID NO: 119662 - DNA, 15 bp, Homo sapiens
tgtcaaaaattaaaa

SEQ ID NO: 119663 - DNA, 15 bp, Homo sapiens
atgtcaaaaattaaa

SEQ ID NO: 119664 - DNA, 15 bp, Homo sapiens
aatgtcaaaaattaa

SEQ ID NO: 119665 - DNA, 15 bp, Homo sapiens
aaatgtcaaaaatta

SEQ ID NO: 119666 - DNA, 15 bp, Homo sapiens
aaaatgtcaaaaatt

SEQ ID NO: 119667 - DNA, 15 bp, Homo sapiens
aaaaatgtcaaaaat

SEQ ID NO: 119668 - DNA, 15 bp, Homo sapiens
aaaaaatgtcaaaaa

SEQ ID NO: 119669 - DNA, 15 bp, Homo sapiens
caaaaaatgtcaaaa

SEQ ID NO: 119670 - DNA, 15 bp, Homo sapiens
tcaaaaaatgtcaaa

SEQ ID NO: 119671 - DNA, 15 bp, Homo sapiens
atcaaaaaatgtcaa

SEQ ID NO: 119672 - DNA, 15 bp, Homo sapiens
aatcaaaaaatgtca

SEQ ID NO: 119673 - DNA, 15 bp, Homo sapiens
taatcaaaaaatgtc

SEQ ID NO: 119674 - DNA, 15 bp, Homo sapiens
ataatcaaaaaatgt

SEQ ID NO: 119675 - DNA, 15 bp, Homo sapiens
aataatcaaaaaatg

SEQ ID NO: 119676 - DNA, 15 bp, Homo sapiens
gaataatcaaaaaat

SEQ ID NO: 119677 - DNA, 15 bp, Homo sapiens
tgaataatcaaaaaa

SEQ ID NO: 119678 - DNA, 15 bp, Homo sapiens
ctgaataatcaaaaa

SEQ ID NO: 119679 - DNA, 15 bp, Homo sapiens
actgaataatcaaaa

SEQ ID NO: 119680 - DNA, 15 bp, Homo sapiens
aactgaataatcaaa

SEQ ID NO: 119681 - DNA, 15 bp, Homo sapiens
aaactgaataatcaa

SEQ ID NO: 119682 - DNA, 15 bp, Homo sapiens
taaactgaataatca

SEQ ID NO: 119683 - DNA, 15 bp, Homo sapiens
ttaaactgaataatc

SEQ ID NO: 119684 - DNA, 15 bp, Homo sapiens
gttaaactgaataat

SEQ ID NO: 119685 - DNA, 15 bp, Homo sapiens
agttaaactgaataa

SEQ ID NO: 119686 - DNA, 15 bp, Homo sapiens
tagttaaactgaata

SEQ ID NO: 119687 - DNA, 15 bp, Homo sapiens
gtagttaaactgaat

SEQ ID NO: 119688 - DNA, 15 bp, Homo sapiens
agtagttaaactgaa

SEQ ID NO: 119689 - DNA, 15 bp, Homo sapiens
cagtagttaaactga

SEQ ID NO: 119690 - DNA, 15 bp, Homo sapiens
acagtagttaaactg

SEQ ID NO: 119691 - DNA, 15 bp, Homo sapiens
tacagtagttaaact

SEQ ID NO: 119692 - DNA, 15 bp, Homo sapiens
gtacagtagttaaac

SEQ ID NO: 119693 - DNA, 15 bp, Homo sapiens
ggtacagtagttaaa

SEQ ID NO: 119694 - DNA, 15 bp, Homo sapiens
tggtacagtagttaa

SEQ ID NO: 119695 - DNA, 15 bp, Homo sapiens
ttggtacagtagtta

SEQ ID NO: 119696 - DNA, 15 bp, Homo sapiens
gttggtacagtagtt

SEQ ID NO: 119697 - DNA, 15 bp, Homo sapiens
tgttggtacagtagt

SEQ ID NO: 119698 - DNA, 15 bp, Homo sapiens
ttgttggtacagtag

SEQ ID NO: 119699 - DNA, 15 bp, Homo sapiens
attgttggtacagta

SEQ ID NO: 119700 - DNA, 15 bp, Homo sapiens
aattgttggtacagt

SEQ ID NO: 119701 - DNA, 15 bp, Homo sapiens
aaattgttggtacag

SEQ ID NO: 119702 - DNA, 15 bp, Homo sapiens
aaaattgttggtaca

SEQ ID NO: 119703 - DNA, 15 bp, Homo sapiens
aaaaattgttggtac

SEQ ID NO: 119704 - DNA, 15 bp, Homo sapiens
caaaaattgttggta

SEQ ID NO: 119705 - DNA, 15 bp, Homo sapiens
tcaaaaattgttggt

SEQ ID NO: 119706 - DNA, 15 bp, Homo sapiens
atcaaaaattgttgg

SEQ ID NO: 119707 - DNA, 15 bp, Homo sapiens
aatcaaaaattgttg

SEQ ID NO: 119708 - DNA, 15 bp, Homo sapiens
gaatcaaaaattgtt

SEQ ID NO: 119709 - DNA, 15 bp, Homo sapiens
ggaatcaaaaattgt

SEQ ID NO: 119710 - DNA, 15 bp, Homo sapiens
aggaatcaaaaattg

SEQ ID NO: 119711 - DNA, 15 bp, Homo sapiens
aaggaatcaaaaatt

SEQ ID NO: 119712 - DNA, 15 bp, Homo sapiens
taaggaatcaaaaat

SEQ ID NO: 119713 - DNA, 15 bp, Homo sapiens
ctaaggaatcaaaaa

SEQ ID NO: 119714 - DNA, 15 bp, Homo sapiens
cctaaggaatcaaaa

SEQ ID NO: 119715 - DNA, 15 bp, Homo sapiens
acctaaggaatcaaa

SEQ ID NO: 119716 - DNA, 15 bp, Homo sapiens
aacctaaggaatcaa

SEQ ID NO: 119717 - DNA, 15 bp, Homo sapiens
aaacctaaggaatca

SEQ ID NO: 119718 - DNA, 15 bp, Homo sapiens
aaaacctaaggaatc

SEQ ID NO: 119719 - DNA, 15 bp, Homo sapiens
caaaacctaaggaat

SEQ ID NO: 119720 - DNA, 15 bp, Homo sapiens
tcaaaacctaaggaa

SEQ ID NO: 119721 - DNA, 15 bp, Homo sapiens
ctcaaaacctaagga

SEQ ID NO: 119722 - DNA, 15 bp, Homo sapiens
cctcaaaacctaagg

SEQ ID NO: 119723 - DNA, 15 bp, Homo sapiens
ccctcaaaacctaag

SEQ ID NO: 119724 - DNA, 15 bp, Homo sapiens
tccctcaaaacctaa

SEQ ID NO: 119725 - DNA, 15 bp, Homo sapiens
ctccctcaaaaccta

SEQ ID NO: 119726 - DNA, 15 bp, Homo sapiens
cctccctcaaaacct

SEQ ID NO: 119727 - DNA, 15 bp, Homo sapiens
acctccctcaaaacc

SEQ ID NO: 119728 - DNA, 15 bp, Homo sapiens
cacctccctcaaaac

SEQ ID NO: 119729 - DNA, 15 bp, Homo sapiens
acacctccctcaaaa

SEQ ID NO: 119730 - DNA, 15 bp, Homo sapiens
gacacctccctcaaa

SEQ ID NO: 119731 - DNA, 15 bp, Homo sapiens
tgacacctccctcaa

SEQ ID NO: 119732 - DNA, 15 bp, Homo sapiens
atgacacctccctca

SEQ ID NO: 119733 - DNA, 15 bp, Homo sapiens
aatgacacctccctc

SEQ ID NO: 119734 - DNA, 15 bp, Homo sapiens
aaatgacacctccct

SEQ ID NO: 119735 - DNA, 15 bp, Homo sapiens
aaaatgacacctccc

SEQ ID NO: 119736 - DNA, 15 bp, Homo sapiens
taaaatgacacctcc

SEQ ID NO: 119737 - DNA, 15 bp, Homo sapiens
ttaaaatgacacctc

SEQ ID NO: 119738 - DNA, 15 bp, Homo sapiens
attaaaatgacacct

SEQ ID NO: 119739 - DNA, 15 bp, Homo sapiens
cattaaaatgacacc

SEQ ID NO: 119740 - DNA, 15 bp, Homo sapiens
acattaaaatgacac

SEQ ID NO: 119741 - DNA, 15 bp, Homo sapiens
gacattaaaatgaca

SEQ ID NO: 119742 - DNA, 15 bp, Homo sapiens
tgacattaaaatgac

SEQ ID NO: 119743 - DNA, 15 bp, Homo sapiens
atgacattaaaatga

SEQ ID NO: 119744 - DNA, 15 bp, Homo sapiens
aatgacattaaaatg

SEQ ID NO: 119745 - DNA, 15 bp, Homo sapiens
aaatgacattaaaat

SEQ ID NO: 119746 - DNA, 15 bp, Homo sapiens
gaaatgacattaaaa

SEQ ID NO: 119747 - DNA, 15 bp, Homo sapiens
tgaaatgacattaaa

SEQ ID NO: 119748 - DNA, 15 bp, Homo sapiens
ttgaaatgacattaa

SEQ ID NO: 119749 - DNA, 15 bp, Homo sapiens
gttgaaatgacatta

SEQ ID NO: 119750 - DNA, 15 bp, Homo sapiens
tgttgaaatgacatt

SEQ ID NO: 119751 - DNA, 15 bp, Homo sapiens
ctgttgaaatgacat

SEQ ID NO: 119752 - DNA, 15 bp, Homo sapiens
tctgttgaaatgaca

SEQ ID NO: 119753 - DNA, 15 bp, Homo sapiens
ctctgttgaaatgac

SEQ ID NO: 119754 - DNA, 15 bp, Homo sapiens
cctctgttgaaatga

SEQ ID NO: 119755 - DNA, 15 bp, Homo sapiens
tcctctgttgaaatg

SEQ ID NO: 119756 - DNA, 15 bp, Homo sapiens
ttcctctgttgaaat

SEQ ID NO: 119757 - DNA, 15 bp, Homo sapiens
attcctctgttgaaa

SEQ ID NO: 119758 - DNA, 15 bp, Homo sapiens
cattcctctgttgaa

SEQ ID NO: 119759 - DNA, 15 bp, Homo sapiens
acattcctctgttga

SEQ ID NO: 119760 - DNA, 15 bp, Homo sapiens
aacattcctctgttg

SEQ ID NO: 119761 - DNA, 15 bp, Homo sapiens
aaacattcctctgtt

SEQ ID NO: 119762 - DNA, 15 bp, Homo sapiens
taaacattcctctgt

SEQ ID NO: 119763 - DNA, 15 bp, Homo sapiens
ctaaacattcctctg

SEQ ID NO: 119764 - DNA, 15 bp, Homo sapiens
tctaaacattcctct

SEQ ID NO: 119765 - DNA, 15 bp, Homo sapiens
gtctaaacattcctc

SEQ ID NO: 119766 - DNA, 15 bp, Homo sapiens
ggtctaaacattcct

SEQ ID NO: 119767 - DNA, 15 bp, Homo sapiens
tggtctaaacattcc

SEQ ID NO: 119768 - DNA, 15 bp, Homo sapiens
gtggtctaaacattc

SEQ ID NO: 119769 - DNA, 15 bp, Homo sapiens
tgtggtctaaacatt

SEQ ID NO: 119770 - DNA, 15 bp, Homo sapiens
ctgtggtctaaacat

SEQ ID NO: 119771 - DNA, 15 bp, Homo sapiens
actgtggtctaaaca

SEQ ID NO: 119772 - DNA, 15 bp, Homo sapiens
tactgtggtctaaac

SEQ ID NO: 119773 - DNA, 15 bp, Homo sapiens
gtactgtggtctaaa

SEQ ID NO: 119774 - DNA, 15 bp, Homo sapiens
ggtactgtggtctaa

SEQ ID NO: 119775 - DNA, 15 bp, Homo sapiens
aggtactgtggtcta

SEQ ID NO: 119776 - DNA, 15 bp, Homo sapiens
taggtactgtggtct

SEQ ID NO: 119777 - DNA, 15 bp, Homo sapiens
ttaggtactgtggtc

SEQ ID NO: 119778 - DNA, 15 bp, Homo sapiens
attaggtactgtggt

SEQ ID NO: 119779 - DNA, 15 bp, Homo sapiens
cattaggtactgtgg

SEQ ID NO: 119780 - DNA, 15 bp, Homo sapiens
tcattaggtactgtg

SEQ ID NO: 119781 - DNA, 15 bp, Homo sapiens
atcattaggtactgt

SEQ ID NO: 119782 - DNA, 15 bp, Homo sapiens
catcattaggtactg

SEQ ID NO: 119783 - DNA, 15 bp, Homo sapiens
acatcattaggtact

SEQ ID NO: 119784 - DNA, 15 bp, Homo sapiens
aacatcattaggtac

SEQ ID NO: 119785 - DNA, 15 bp, Homo sapiens
taacatcattaggta

SEQ ID NO: 119786 - DNA, 15 bp, Homo sapiens
ataacatcattaggt

SEQ ID NO: 119787 - DNA, 15 bp, Homo sapiens
tataacatcattagg

SEQ ID NO: 119788 - DNA, 15 bp, Homo sapiens
ttataacatcattag

SEQ ID NO: 119789 - DNA, 15 bp, Homo sapiens
tttataacatcatta

SEQ ID NO: 119790 - DNA, 15 bp, Homo sapiens
ttttataacatcatt

SEQ ID NO: 119791 - DNA, 15 bp, Homo sapiens
tttttataacatcat

SEQ ID NO: 119792 - DNA, 15 bp, Homo sapiens
ttttttataacatca

SEQ ID NO: 119793 - DNA, 15 bp, Homo sapiens
attttttataacatc

SEQ ID NO: 119794 - DNA, 15 bp, Homo sapiens
cattttttataacat

SEQ ID NO: 119795 - DNA, 15 bp, Homo sapiens
ccattttttataaca

SEQ ID NO: 119796 - DNA, 15 bp, Homo sapiens
gccattttttataac

SEQ ID NO: 119797 - DNA, 15 bp, Homo sapiens
tgccattttttataa

SEQ ID NO: 119798 - DNA, 15 bp, Homo sapiens
gtgccattttttata

SEQ ID NO: 119799 - DNA, 15 bp, Homo sapiens
agtgccattttttat

SEQ ID NO: 119800 - DNA, 15 bp, Homo sapiens
cagtgccatttttta

SEQ ID NO: 119801 - DNA, 15 bp, Homo sapiens
acagtgccatttttt

SEQ ID NO: 119802 - DNA, 15 bp, Homo sapiens
aacagtgccattttt

SEQ ID NO: 119803 - DNA, 15 bp, Homo sapiens
aaacagtgccatttt

SEQ ID NO: 119804 - DNA, 15 bp, Homo sapiens
gaaacagtgccattt

SEQ ID NO: 119805 - DNA, 15 bp, Homo sapiens
ggaaacagtgccatt

SEQ ID NO: 119806 - DNA, 15 bp, Homo sapiens
tggaaacagtgccat

SEQ ID NO: 119807 - DNA, 15 bp, Homo sapiens
ctggaaacagtgcca

SEQ ID NO: 119808 - DNA, 15 bp, Homo sapiens
tctggaaacagtgcc

SEQ ID NO: 119809 - DNA, 15 bp, Homo sapiens
ttctggaaacagtgc

SEQ ID NO: 119810 - DNA, 15 bp, Homo sapiens
tttctggaaacagtg

SEQ ID NO: 119811 - DNA, 15 bp, Homo sapiens
ttttctggaaacagt

SEQ ID NO: 119812 - DNA, 15 bp, Homo sapiens
attttctggaaacag

SEQ ID NO: 119813 - DNA, 15 bp, Homo sapiens
tattttctggaaaca

SEQ ID NO: 119814 - DNA, 15 bp, Homo sapiens
atattttctggaaac

SEQ ID NO: 119815 - DNA, 15 bp, Homo sapiens
tatattttctggaaa

SEQ ID NO: 119816 - DNA, 15 bp, Homo sapiens
atatattttctggaa

SEQ ID NO: 119817 - DNA, 15 bp, Homo sapiens
tatatattttctgga

SEQ ID NO: 119818 - DNA, 15 bp, Homo sapiens
gtatatattttctgg

SEQ ID NO: 119819 - DNA, 15 bp, Homo sapiens
agtatatattttctg

SEQ ID NO: 119820 - DNA, 15 bp, Homo sapiens
cagtatatattttct

SEQ ID NO: 119821 - DNA, 15 bp, Homo sapiens
tcagtatatattttc

SEQ ID NO: 119822 - DNA, 15 bp, Homo sapiens
atcagtatatatttt

SEQ ID NO: 119823 - DNA, 15 bp, Homo sapiens
tatcagtatatattt

SEQ ID NO: 119824 - DNA, 15 bp, Homo sapiens
gtatcagtatatatt

SEQ ID NO: 119825 - DNA, 15 bp, Homo sapiens
ggtatcagtatatat

SEQ ID NO: 119826 - DNA, 15 bp, Homo sapiens
aggtatcagtatata

SEQ ID NO: 119827 - DNA, 15 bp, Homo sapiens
aaggtatcagtatat

SEQ ID NO: 119828 - DNA, 15 bp, Homo sapiens
aaaggtatcagtata

SEQ ID NO: 119829 - DNA, 15 bp, Homo sapiens
aaaaggtatcagtat

SEQ ID NO: 119830 - DNA, 15 bp, Homo sapiens
taaaaggtatcagta

SEQ ID NO: 119831 - DNA, 15 bp, Homo sapiens
ttaaaaggtatcagt

SEQ ID NO: 119832 - DNA, 15 bp, Homo sapiens
attaaaaggtatcag

SEQ ID NO: 119833 - DNA, 15 bp, Homo sapiens
tattaaaaggtatca

SEQ ID NO: 119834 - DNA, 15 bp, Homo sapiens
ttattaaaaggtatc

SEQ ID NO: 119835 - DNA, 15 bp, Homo sapiens
tttattaaaaggtat

SEQ ID NO: 119836 - DNA, 15 bp, Homo sapiens
ttttattaaaaggta

SEQ ID NO: 119837 - DNA, 15 bp, Homo sapiens
tttttattaaaaggt

SEQ ID NO: 119838 - DNA, 15 bp, Homo sapiens
atttttattaaaagg

SEQ ID NO: 119839 - DNA, 15 bp, Homo sapiens
catttttattaaaag

SEQ ID NO: 119840 - DNA, 15 bp, Homo sapiens
tcatttttattaaaa

SEQ ID NO: 119841 - DNA, 15 bp, Homo sapiens
ttcatttttattaaa

SEQ ID NO: 119842 - DNA, 15 bp, Homo sapiens
cttcatttttattaa

SEQ ID NO: 119843 - DNA, 15 bp, Homo sapiens
gcttcatttttatta

SEQ ID NO: 119844 - DNA, 15 bp, Homo sapiens
cgcttcatttttatt

SEQ ID NO: 119845 - DNA, 15 bp, Homo sapiens
tcgcttcatttttat

SEQ ID NO: 119846 - DNA, 15 bp, Homo sapiens
ttcgcttcattttta

SEQ ID NO: 119847 - DNA, 15 bp, Homo sapiens
attcgcttcattttt

SEQ ID NO: 119848 - DNA, 15 bp, Homo sapiens
tattcgcttcatttt

SEQ ID NO: 119849 - DNA, 15 bp, Homo sapiens
ttattcgcttcattt

SEQ ID NO: 119850 - DNA, 15 bp, Homo sapiens
tttattcgcttcatt

SEQ ID NO: 119851 - DNA, 15 bp, Homo sapiens
ttttattcgcttcat

SEQ ID NO: 119852 - DNA, 15 bp, Homo sapiens
attttattcgcttca

SEQ ID NO: 119853 - DNA, 15 bp, Homo sapiens
aattttattcgcttc

SEQ ID NO: 119854 - DNA, 15 bp, Homo sapiens
aaattttattcgctt

SEQ ID NO: 119855 - DNA, 15 bp, Homo sapiens
aaaattttattcgct

SEQ ID NO: 119856 - DNA, 15 bp, Homo sapiens
gaaaattttattcgc

SEQ ID NO: 119857 - DNA, 15 bp, Homo sapiens
agaaaattttattcg

SEQ ID NO: 119858 - DNA, 15 bp, Homo sapiens
tagaaaattttattc

SEQ ID NO: 119859 - DNA, 15 bp, Homo sapiens
atagaaaattttatt

SEQ ID NO: 119860 - DNA, 15 bp, Homo sapiens
tatagaaaattttat

SEQ ID NO: 119861 - DNA, 15 bp, Homo sapiens
ttatagaaaatttta

SEQ ID NO: 119862 - DNA, 15 bp, Homo sapiens
tttatagaaaatttt

SEQ ID NO: 119863 - DNA, 15 bp, Homo sapiens
ctttatagaaaattt

SEQ ID NO: 119864 - DNA, 15 bp, Homo sapiens
tctttatagaaaatt

SEQ ID NO: 119865 - DNA, 15 bp, Homo sapiens
atctttatagaaaat

SEQ ID NO: 119866 - DNA, 15 bp, Homo sapiens
catctttatagaaaa

SEQ ID NO: 119867 - DNA, 15 bp, Homo sapiens
tcatctttatagaaa

SEQ ID NO: 119868 - DNA, 15 bp, Homo sapiens
atcatctttatagaa

SEQ ID NO: 119869 - DNA, 15 bp, Homo sapiens
tatcatctttataga

SEQ ID NO: 119870 - DNA, 15 bp, Homo sapiens
atatcatctttatag

SEQ ID NO: 119871 - DNA, 15 bp, Homo sapiens
aatatcatctttata

SEQ ID NO: 119872 - DNA, 15 bp, Homo sapiens
aaatatcatctttat

SEQ ID NO: 119873 - DNA, 15 bp, Homo sapiens
taaatatcatcttta

SEQ ID NO: 119874 - DNA, 15 bp, Homo sapiens
ttaaatatcatcttt

SEQ ID NO: 119875 - DNA, 15 bp, Homo sapiens
tttaaatatcatctt

SEQ ID NO: 119876 - DNA, 15 bp, Homo sapiens
gtttaaatatcatct

SEQ ID NO: 119877 - DNA, 15 bp, Homo sapiens
tgtttaaatatcatc

SEQ ID NO: 119878 - DNA, 15 bp, Homo sapiens
atgtttaaatatcat

SEQ ID NO: 119879 - DNA, 15 bp, Homo sapiens
aatgtttaaatatca

SEQ ID NO: 119880 - DNA, 15 bp, Homo sapiens
aaatgtttaaatatc

SEQ ID NO: 119881 - DNA, 15 bp, Homo sapiens
aaaatgtttaaatat

SEQ ID NO: 119882 - DNA, 15 bp, Homo sapiens
aaaaatgtttaaata

SEQ ID NO: 119883 - DNA, 15 bp, Homo sapiens
aaaaaatgtttaaat

SEQ ID NO: 119884 - DNA, 15 bp, Homo sapiens
aaaaaaatgtttaaa

SEQ ID NO: 119885 - DNA, 15 bp, Homo sapiens
taaaaaaatgtttaa

SEQ ID NO: 119886 - DNA, 15 bp, Homo sapiens
gtaaaaaaatgttta

SEQ ID NO: 119887 - DNA, 15 bp, Homo sapiens
ggtaaaaaaatgttt

SEQ ID NO: 119888 - DNA, 15 bp, Homo sapiens
aggtaaaaaaatgtt

SEQ ID NO: 119889 - DNA, 15 bp, Homo sapiens
taggtaaaaaaatgt

SEQ ID NO: 119890 - DNA, 15 bp, Homo sapiens
ttaggtaaaaaaatg

SEQ ID NO: 119891 - DNA, 15 bp, Homo sapiens
tttaggtaaaaaaat

SEQ ID NO: 119892 - DNA, 15 bp, Homo sapiens
atttaggtaaaaaaa

SEQ ID NO: 119893 - DNA, 15 bp, Homo sapiens
tatttaggtaaaaaa

SEQ ID NO: 119894 - DNA, 15 bp, Homo sapiens
ttatttaggtaaaaa

SEQ ID NO: 119895 - DNA, 15 bp, Homo sapiens
cttatttaggtaaaa

SEQ ID NO: 119896 - DNA, 15 bp, Homo sapiens
acttatttaggtaaa

SEQ ID NO: 119897 - DNA, 15 bp, Homo sapiens
tacttatttaggtaa

SEQ ID NO: 119898 - DNA, 15 bp, Homo sapiens
ttacttatttaggta

SEQ ID NO: 119899 - DNA, 15 bp, Homo sapiens
gttacttatttaggt

SEQ ID NO: 119900 - DNA, 15 bp, Homo sapiens
tgttacttatttagg

SEQ ID NO: 119901 - DNA, 15 bp, Homo sapiens
atgttacttatttag

SEQ ID NO: 119902 - DNA, 15 bp, Homo sapiens
aatgttacttattta

SEQ ID NO: 119903 - DNA, 15 bp, Homo sapiens
caatgttacttattt

SEQ ID NO: 119904 - DNA, 15 bp, Homo sapiens
tcaatgttacttatt

SEQ ID NO: 119905 - DNA, 15 bp, Homo sapiens
ctcaatgttacttat

SEQ ID NO: 119906 - DNA, 15 bp, Homo sapiens
actcaatgttactta

SEQ ID NO: 119907 - DNA, 15 bp, Homo sapiens
aactcaatgttactt

SEQ ID NO: 119908 - DNA, 15 bp, Homo sapiens
aaactcaatgttact

SEQ ID NO: 119909 - DNA, 15 bp, Homo sapiens
caaactcaatgttac

SEQ ID NO: 119910 - DNA, 15 bp, Homo sapiens
acaaactcaatgtta

SEQ ID NO: 119911 - DNA, 15 bp, Homo sapiens
gacaaactcaatgtt

SEQ ID NO: 119912 - DNA, 15 bp, Homo sapiens
tgacaaactcaatgt

SEQ ID NO: 119913 - DNA, 15 bp, Homo sapiens
ctgacaaactcaatg

SEQ ID NO: 119914 - DNA, 15 bp, Homo sapiens
tctgacaaactcaat

SEQ ID NO: 119915 - DNA, 15 bp, Homo sapiens
gtctgacaaactcaa

SEQ ID NO: 119916 - DNA, 15 bp, Homo sapiens
ggtctgacaaactca

SEQ ID NO: 119917 - DNA, 15 bp, Homo sapiens
cggtctgacaaactc

SEQ ID NO: 119918 - DNA, 15 bp, Homo sapiens
tcggtctgacaaact

SEQ ID NO: 119919 - DNA, 15 bp, Homo sapiens
ctcggtctgacaaac

SEQ ID NO: 119920 - DNA, 15 bp, Homo sapiens
actcggtctgacaaa

SEQ ID NO: 119921 - DNA, 15 bp, Homo sapiens
cactcggtctgacaa

SEQ ID NO: 119922 - DNA, 15 bp, Homo sapiens
tcactcggtctgaca

SEQ ID NO: 119923 - DNA, 15 bp, Homo sapiens
ctcactcggtctgac

SEQ ID NO: 119924 - DNA, 15 bp, Homo sapiens
gctcactcggtctga

SEQ ID NO: 119925 - DNA, 15 bp, Homo sapiens
agctcactcggtctg

SEQ ID NO: 119926 - DNA, 15 bp, Homo sapiens
cagctcactcggtct

SEQ ID NO: 119927 - DNA, 15 bp, Homo sapiens
ccagctcactcggtc

SEQ ID NO: 119928 - DNA, 15 bp, Homo sapiens
accagctcactcggt

SEQ ID NO: 119929 - DNA, 15 bp, Homo sapiens
aaccagctcactcgg

SEQ ID NO: 119930 - DNA, 15 bp, Homo sapiens
aaaccagctcactcg

SEQ ID NO: 119931 - DNA, 15 bp, Homo sapiens
aaaaccagctcactc

SEQ ID NO: 119932 - DNA, 15 bp, Homo sapiens
aaaaaccagctcact

SEQ ID NO: 119933 - DNA, 15 bp, Homo sapiens
taaaaaccagctcac

SEQ ID NO: 119934 - DNA, 15 bp, Homo sapiens
gtaaaaaccagctca

SEQ ID NO: 119935 - DNA, 15 bp, Homo sapiens
agtaaaaaccagctc

SEQ ID NO: 119936 - DNA, 15 bp, Homo sapiens
cagtaaaaaccagct

SEQ ID NO: 119937 - DNA, 15 bp, Homo sapiens
ccagtaaaaaccagc

SEQ ID NO: 119938 - DNA, 15 bp, Homo sapiens
cccagtaaaaaccag

SEQ ID NO: 119939 - DNA, 15 bp, Homo sapiens
ccccagtaaaaacca

SEQ ID NO: 119940 - DNA, 15 bp, Homo sapiens
tccccagtaaaaacc

SEQ ID NO: 119941 - DNA, 15 bp, Homo sapiens
ttccccagtaaaaac

SEQ ID NO: 119942 - DNA, 15 bp, Homo sapiens
gttccccagtaaaaa

SEQ ID NO: 119943 - DNA, 15 bp, Homo sapiens
tgttccccagtaaaa

SEQ ID NO: 119944 - DNA, 15 bp, Homo sapiens
atgttccccagtaaa

SEQ ID NO: 119945 - DNA, 15 bp, Homo sapiens
aatgttccccagtaa

SEQ ID NO: 119946 - DNA, 15 bp, Homo sapiens
aaatgttccccagta

SEQ ID NO: 119947 - DNA, 15 bp, Homo sapiens
caaatgttccccagt

SEQ ID NO: 119948 - DNA, 15 bp, Homo sapiens
tcaaatgttccccag

SEQ ID NO: 119949 - DNA, 15 bp, Homo sapiens
gtcaaatgttcccca

SEQ ID NO: 119950 - DNA, 15 bp, Homo sapiens
ggtcaaatgttcccc

SEQ ID NO: 119951 - DNA, 15 bp, Homo sapiens
aggtcaaatgttccc

SEQ ID NO: 119952 - DNA, 15 bp, Homo sapiens
caggtcaaatgttcc

SEQ ID NO: 119953 - DNA, 15 bp, Homo sapiens
gcaggtcaaatgttc

SEQ ID NO: 119954 - DNA, 15 bp, Homo sapiens
agcaggtcaaatgtt

SEQ ID NO: 119955 - DNA, 15 bp, Homo sapiens
aagcaggtcaaatgt

SEQ ID NO: 119956 - DNA, 15 bp, Homo sapiens
gaagcaggtcaaatg

SEQ ID NO: 119957 - DNA, 15 bp, Homo sapiens
agaagcaggtcaaat

SEQ ID NO: 119958 - DNA, 15 bp, Homo sapiens
aagaagcaggtcaaa

SEQ ID NO: 119959 - DNA, 15 bp, Homo sapiens
taagaagcaggtcaa

SEQ ID NO: 119960 - DNA, 15 bp, Homo sapiens
ctaagaagcaggtca

SEQ ID NO: 119961 - DNA, 15 bp, Homo sapiens
actaagaagcaggtc

SEQ ID NO: 119962 - DNA, 15 bp, Homo sapiens
aactaagaagcaggt

SEQ ID NO: 119963 - DNA, 15 bp, Homo sapiens
taactaagaagcagg

SEQ ID NO: 119964 - DNA, 15 bp, Homo sapiens
ataactaagaagcag

SEQ ID NO: 119965 - DNA, 15 bp, Homo sapiens
aataactaagaagca

SEQ ID NO: 119966 - DNA, 15 bp, Homo sapiens
taataactaagaagc

SEQ ID NO: 119967 - DNA, 15 bp, Homo sapiens
ataataactaagaag

SEQ ID NO: 119968 - DNA, 15 bp, Homo sapiens
tataataactaagaa

SEQ ID NO: 119969 - DNA, 15 bp, Homo sapiens
atataataactaaga

SEQ ID NO: 119970 - DNA, 15 bp, Homo sapiens
aatataataactaag

SEQ ID NO: 119971 - DNA, 15 bp, Homo sapiens
caatataataactaa

SEQ ID NO: 119972 - DNA, 15 bp, Homo sapiens
gcaatataataacta

SEQ ID NO: 119973 - DNA, 15 bp, Homo sapiens
agcaatataataact

SEQ ID NO: 119974 - DNA, 15 bp, Homo sapiens
cagcaatataataac

SEQ ID NO: 119975 - DNA, 15 bp, Homo sapiens
tcagcaatataataa

SEQ ID NO: 119976 - DNA, 15 bp, Homo sapiens
atcagcaatataata

SEQ ID NO: 119977 - DNA, 15 bp, Homo sapiens
catcagcaatataat

SEQ ID NO: 119978 - DNA, 15 bp, Homo sapiens
acatcagcaatataa

SEQ ID NO: 119979 - DNA, 15 bp, Homo sapiens
gacatcagcaatata

SEQ ID NO: 119980 - DNA, 15 bp, Homo sapiens
tgacatcagcaatat

SEQ ID NO: 119981 - DNA, 15 bp, Homo sapiens
atgacatcagcaata

SEQ ID NO: 119982 - DNA, 15 bp, Homo sapiens
aatgacatcagcaat

SEQ ID NO: 119983 - DNA, 15 bp, Homo sapiens
caatgacatcagcaa

SEQ ID NO: 119984 - DNA, 15 bp, Homo sapiens
ccaatgacatcagca

SEQ ID NO: 119985 - DNA, 15 bp, Homo sapiens
accaatgacatcagc

SEQ ID NO: 119986 - DNA, 15 bp, Homo sapiens
aaccaatgacatcag

SEQ ID NO: 119987 - DNA, 15 bp, Homo sapiens
taaccaatgacatca

SEQ ID NO: 119988 - DNA, 15 bp, Homo sapiens
ttaaccaatgacatc

SEQ ID NO: 119989 - DNA, 15 bp, Homo sapiens
gttaaccaatgacat

SEQ ID NO: 119990 - DNA, 15 bp, Homo sapiens
agttaaccaatgaca

SEQ ID NO: 119991 - DNA, 15 bp, Homo sapiens
tagttaaccaatgac

SEQ ID NO: 119992 - DNA, 15 bp, Homo sapiens
ttagttaaccaatga

SEQ ID NO: 119993 - DNA, 15 bp, Homo sapiens
cttagttaaccaatg

SEQ ID NO: 119994 - DNA, 15 bp, Homo sapiens
ccttagttaaccaat

SEQ ID NO: 119995 - DNA, 15 bp, Homo sapiens
gccttagttaaccaa

SEQ ID NO: 119996 - DNA, 15 bp, Homo sapiens
tgccttagttaacca

SEQ ID NO: 119997 - DNA, 15 bp, Homo sapiens
ctgccttagttaacc

SEQ ID NO: 119998 - DNA, 15 bp, Homo sapiens
gctgccttagttaac

SEQ ID NO: 119999 - DNA, 15 bp, Homo sapiens
ggctgccttagttaa

SEQ ID NO: 120000 - DNA, 15 bp, Homo sapiens
aggctgccttagtta

SEQ ID NO: 120001 - DNA, 15 bp, Homo sapiens
aaggctgccttagtt

SEQ ID NO: 120002 - DNA, 15 bp, Homo sapiens
caaggctgccttagt

SEQ ID NO: 120003 - DNA, 15 bp, Homo sapiens
acaaggctgccttag

SEQ ID NO: 120004 - DNA, 15 bp, Homo sapiens
cacaaggctgcctta

SEQ ID NO: 120005 - DNA, 15 bp, Homo sapiens
tcacaaggctgcctt

SEQ ID NO: 120006 - DNA, 15 bp, Homo sapiens
atcacaaggctgcct

SEQ ID NO: 120007 - DNA, 15 bp, Homo sapiens
tatcacaaggctgcc

SEQ ID NO: 120008 - DNA, 15 bp, Homo sapiens
ttatcacaaggctgc

SEQ ID NO: 120009 - DNA, 15 bp, Homo sapiens
cttatcacaaggctg

SEQ ID NO: 120010 - DNA, 15 bp, Homo sapiens
acttatcacaaggct

SEQ ID NO: 120011 - DNA, 15 bp, Homo sapiens
aacttatcacaaggc

SEQ ID NO: 120012 - DNA, 15 bp, Homo sapiens
aaacttatcacaagg

SEQ ID NO: 120013 - DNA, 15 bp, Homo sapiens
aaaacttatcacaag

SEQ ID NO: 120014 - DNA, 15 bp, Homo sapiens
gaaaacttatcacaa

SEQ ID NO: 120015 - DNA, 15 bp, Homo sapiens
tgaaaacttatcaca

SEQ ID NO: 120016 - DNA, 15 bp, Homo sapiens
ctgaaaacttatcac

SEQ ID NO: 120017 - DNA, 15 bp, Homo sapiens
gctgaaaacttatca

SEQ ID NO: 120018 - DNA, 15 bp, Homo sapiens
tgctgaaaacttatc

SEQ ID NO: 120019 - DNA, 15 bp, Homo sapiens
ctgctgaaaacttat

SEQ ID NO: 120020 - DNA, 15 bp, Homo sapiens
actgctgaaaactta

SEQ ID NO: 120021 - DNA, 15 bp, Homo sapiens
aactgctgaaaactt

SEQ ID NO: 120022 - DNA, 15 bp, Homo sapiens
taactgctgaaaact

SEQ ID NO: 120023 - DNA, 15 bp, Homo sapiens
gtaactgctgaaaac

SEQ ID NO: 120024 - DNA, 15 bp, Homo sapiens
ggtaactgctgaaaa

SEQ ID NO: 120025 - DNA, 15 bp, Homo sapiens
aggtaactgctgaaa

SEQ ID NO: 120026 - DNA, 15 bp, Homo sapiens
aaggtaactgctgaa

SEQ ID NO: 120027 - DNA, 15 bp, Homo sapiens
caaggtaactgctga

SEQ ID NO: 120028 - DNA, 15 bp, Homo sapiens
ccaaggtaactgctg

SEQ ID NO: 120029 - DNA, 15 bp, Homo sapiens
tccaaggtaactgct

SEQ ID NO: 120030 - DNA, 15 bp, Homo sapiens
ttccaaggtaactgc

SEQ ID NO: 120031 - DNA, 15 bp, Homo sapiens
tttccaaggtaactg

SEQ ID NO: 120032 - DNA, 15 bp, Homo sapiens
ttttccaaggtaact

SEQ ID NO: 120033 - DNA, 15 bp, Homo sapiens
attttccaaggtaac

SEQ ID NO: 120034 - DNA, 15 bp, Homo sapiens
cattttccaaggtaa

SEQ ID NO: 120035 - DNA, 15 bp, Homo sapiens
acattttccaaggta

SEQ ID NO: 120036 - DNA, 15 bp, Homo sapiens
gacattttccaaggt

SEQ ID NO: 120037 - DNA, 15 bp, Homo sapiens
tgacattttccaagg

SEQ ID NO: 120038 - DNA, 15 bp, Homo sapiens
ttgacattttccaag

SEQ ID NO: 120039 - DNA, 15 bp, Homo sapiens
gttgacattttccaa

SEQ ID NO: 120040 - DNA, 15 bp, Homo sapiens
tgttgacattttcca

SEQ ID NO: 120041 - DNA, 15 bp, Homo sapiens
ttgttgacattttcc

SEQ ID NO: 120042 - DNA, 15 bp, Homo sapiens
cttgttgacattttc

SEQ ID NO: 120043 - DNA, 15 bp, Homo sapiens
acttgttgacatttt

SEQ ID NO: 120044 - DNA, 15 bp, Homo sapiens
aacttgttgacattt

SEQ ID NO: 120045 - DNA, 15 bp, Homo sapiens
gaacttgttgacatt

SEQ ID NO: 120046 - DNA, 15 bp, Homo sapiens
agaacttgttgacat

SEQ ID NO: 120047 - DNA, 15 bp, Homo sapiens
aagaacttgttgaca

SEQ ID NO: 120048 - DNA, 15 bp, Homo sapiens
aaagaacttgttgac

SEQ ID NO: 120049 - DNA, 15 bp, Homo sapiens
gaaagaacttgttga

SEQ ID NO: 120050 - DNA, 15 bp, Homo sapiens
ggaaagaacttgttg

SEQ ID NO: 120051 - DNA, 15 bp, Homo sapiens
aggaaagaacttgtt

SEQ ID NO: 120052 - DNA, 15 bp, Homo sapiens
taggaaagaacttgt

SEQ ID NO: 120053 - DNA, 15 bp, Homo sapiens
ataggaaagaacttg

SEQ ID NO: 120054 - DNA, 15 bp, Homo sapiens
aataggaaagaactt

SEQ ID NO: 120055 - DNA, 15 bp, Homo sapiens
taataggaaagaact

SEQ ID NO: 120056 - DNA, 15 bp, Homo sapiens
ttaataggaaagaac

SEQ ID NO: 120057 - DNA, 15 bp, Homo sapiens
gttaataggaaagaa

SEQ ID NO: 120058 - DNA, 15 bp, Homo sapiens
tgttaataggaaaga

SEQ ID NO: 120059 - DNA, 15 bp, Homo sapiens
ttgttaataggaaag

SEQ ID NO: 120060 - DNA, 15 bp, Homo sapiens
tttgttaataggaaa

SEQ ID NO: 120061 - DNA, 15 bp, Homo sapiens
ttttgttaataggaa

SEQ ID NO: 120062 - DNA, 15 bp, Homo sapiens
tttttgttaatagga

SEQ ID NO: 120063 - DNA, 15 bp, Homo sapiens
gtttttgttaatagg

SEQ ID NO: 120064 - DNA, 15 bp, Homo sapiens
tgtttttgttaatag

SEQ ID NO: 120065 - DNA, 15 bp, Homo sapiens
atgtttttgttaata

SEQ ID NO: 120066 - DNA, 15 bp, Homo sapiens
tatgtttttgttaat

SEQ ID NO: 120067 - DNA, 15 bp, Homo sapiens
atatgtttttgttaa

SEQ ID NO: 120068 - DNA, 15 bp, Homo sapiens
tatatgtttttgtta

SEQ ID NO: 120069 - DNA, 15 bp, Homo sapiens
ttatatgtttttgtt

SEQ ID NO: 120070 - DNA, 15 bp, Homo sapiens
tttatatgtttttgt

SEQ ID NO: 120071 - DNA, 15 bp, Homo sapiens
ttttatatgtttttg

SEQ ID NO: 120072 - DNA, 15 bp, Homo sapiens
attttatatgttttt

SEQ ID NO: 120073 - DNA, 15 bp, Homo sapiens
cattttatatgtttt

SEQ ID NO: 120074 - DNA, 15 bp, Homo sapiens
acattttatatgttt

SEQ ID NO: 120075 - DNA, 15 bp, Homo sapiens
gacattttatatgtt

SEQ ID NO: 120076 - DNA, 15 bp, Homo sapiens
tgacattttatatgt

SEQ ID NO: 120077 - DNA, 15 bp, Homo sapiens
atgacattttatatg

SEQ ID NO: 120078 - DNA, 15 bp, Homo sapiens
tatgacattttatat

SEQ ID NO: 120079 - DNA, 15 bp, Homo sapiens
ctatgacattttata

SEQ ID NO: 120080 - DNA, 15 bp, Homo sapiens
tctatgacattttat

SEQ ID NO: 120081 - DNA, 15 bp, Homo sapiens
gtctatgacatttta

SEQ ID NO: 120082 - DNA, 15 bp, Homo sapiens
ggtctatgacatttt

SEQ ID NO: 120083 - DNA, 15 bp, Homo sapiens
aggtctatgacattt

SEQ ID NO: 120084 - DNA, 15 bp, Homo sapiens
aaggtctatgacatt

SEQ ID NO: 120085 - DNA, 15 bp, Homo sapiens
aaaggtctatgacat

SEQ ID NO: 120086 - DNA, 15 bp, Homo sapiens
taaaggtctatgaca

SEQ ID NO: 120087 - DNA, 15 bp, Homo sapiens
ctaaaggtctatgac

SEQ ID NO: 120088 - DNA, 15 bp, Homo sapiens
actaaaggtctatga

SEQ ID NO: 120089 - DNA, 15 bp, Homo sapiens
tactaaaggtctatg

SEQ ID NO: 120090 - DNA, 15 bp, Homo sapiens
ttactaaaggtctat

SEQ ID NO: 120091 - DNA, 15 bp, Homo sapiens
gttactaaaggtcta

SEQ ID NO: 120092 - DNA, 15 bp, Homo sapiens
ggttactaaaggtct

SEQ ID NO: 120093 - DNA, 15 bp, Homo sapiens
aggttactaaaggtc

SEQ ID NO: 120094 - DNA, 15 bp, Homo sapiens
taggttactaaaggt

SEQ ID NO: 120095 - DNA, 15 bp, Homo sapiens
ttaggttactaaagg

SEQ ID NO: 120096 - DNA, 15 bp, Homo sapiens
tttaggttactaaag

SEQ ID NO: 120097 - DNA, 15 bp, Homo sapiens
ttttaggttactaaa

SEQ ID NO: 120098 - DNA, 15 bp, Homo sapiens
tttttaggttactaa

SEQ ID NO: 120099 - DNA, 15 bp, Homo sapiens
ctttttaggttacta

SEQ ID NO: 120100 - DNA, 15 bp, Homo sapiens
actttttaggttact

SEQ ID NO: 120101 - DNA, 15 bp, Homo sapiens
tactttttaggttac

SEQ ID NO: 120102 - DNA, 15 bp, Homo sapiens
gtactttttaggtta

SEQ ID NO: 120103 - DNA, 15 bp, Homo sapiens
agtactttttaggtt

SEQ ID NO: 120104 - DNA, 15 bp, Homo sapiens
aagtactttttaggt

SEQ ID NO: 120105 - DNA, 15 bp, Homo sapiens
taagtactttttagg

SEQ ID NO: 120106 - DNA, 15 bp, Homo sapiens
ctaagtactttttag

SEQ ID NO: 120107 - DNA, 15 bp, Homo sapiens
cctaagtacttttta

SEQ ID NO: 120108 - DNA, 15 bp, Homo sapiens
gcctaagtacttttt

SEQ ID NO: 120109 - DNA, 15 bp, Homo sapiens
agcctaagtactttt

SEQ ID NO: 120110 - DNA, 15 bp, Homo sapiens
cagcctaagtacttt

SEQ ID NO: 120111 - DNA, 15 bp, Homo sapiens
acagcctaagtactt

SEQ ID NO: 120112 - DNA, 15 bp, Homo sapiens
cacagcctaagtact

SEQ ID NO: 120113 - DNA, 15 bp, Homo sapiens
tcacagcctaagtac

SEQ ID NO: 120114 - DNA, 15 bp, Homo sapiens
ctcacagcctaagta

SEQ ID NO: 120115 - DNA, 15 bp, Homo sapiens
tctcacagcctaagt

SEQ ID NO: 120116 - DNA, 15 bp, Homo sapiens
ctctcacagcctaag

SEQ ID NO: 120117 - DNA, 15 bp, Homo sapiens
cctctcacagcctaa

SEQ ID NO: 120118 - DNA, 15 bp, Homo sapiens
acctctcacagccta

SEQ ID NO: 120119 - DNA, 15 bp, Homo sapiens
tacctctcacagcct

SEQ ID NO: 120120 - DNA, 15 bp, Homo sapiens
atacctctcacagcc

SEQ ID NO: 120121 - DNA, 15 bp, Homo sapiens
aatacctctcacagc

SEQ ID NO: 120122 - DNA, 15 bp, Homo sapiens
aaatacctctcacag

SEQ ID NO: 120123 - DNA, 15 bp, Homo sapiens
aaaatacctctcaca

SEQ ID NO: 120124 - DNA, 15 bp, Homo sapiens
gaaaatacctctcac

SEQ ID NO: 120125 - DNA, 15 bp, Homo sapiens
agaaaatacctctca

SEQ ID NO: 120126 - DNA, 15 bp, Homo sapiens
tagaaaatacctctc

SEQ ID NO: 120127 - DNA, 15 bp, Homo sapiens
ttagaaaatacctct

SEQ ID NO: 120128 - DNA, 15 bp, Homo sapiens
tttagaaaatacctc

SEQ ID NO: 120129 - DNA, 15 bp, Homo sapiens
ttttagaaaatacct

SEQ ID NO: 120130 - DNA, 15 bp, Homo sapiens
gttttagaaaatacc

SEQ ID NO: 120131 - DNA, 15 bp, Homo sapiens
ggttttagaaaatac

SEQ ID NO: 120132 - DNA, 15 bp, Homo sapiens
aggttttagaaaata

SEQ ID NO: 120133 - DNA, 15 bp, Homo sapiens
caggttttagaaaat

SEQ ID NO: 120134 - DNA, 15 bp, Homo sapiens
acaggttttagaaaa

SEQ ID NO: 120135 - DNA, 15 bp, Homo sapiens
aacaggttttagaaa

SEQ ID NO: 120136 - DNA, 15 bp, Homo sapiens
taacaggttttagaa

SEQ ID NO: 120137 - DNA, 15 bp, Homo sapiens
ctaacaggttttaga

SEQ ID NO: 120138 - DNA, 15 bp, Homo sapiens
actaacaggttttag

SEQ ID NO: 120139 - DNA, 15 bp, Homo sapiens
aactaacaggtttta

SEQ ID NO: 120140 - DNA, 15 bp, Homo sapiens
aaactaacaggtttt

SEQ ID NO: 120141 - DNA, 15 bp, Homo sapiens
aaaactaacaggttt

SEQ ID NO: 120142 - DNA, 15 bp, Homo sapiens
taaaactaacaggtt

SEQ ID NO: 120143 - DNA, 15 bp, Homo sapiens
ttaaaactaacaggt

SEQ ID NO: 120144 - DNA, 15 bp, Homo sapiens
gttaaaactaacagg

SEQ ID NO: 120145 - DNA, 15 bp, Homo sapiens
ggttaaaactaacag

SEQ ID NO: 120146 - DNA, 15 bp, Homo sapiens
aggttaaaactaaca

SEQ ID NO: 120147 - DNA, 15 bp, Homo sapiens
taggttaaaactaac

SEQ ID NO: 120148 - DNA, 15 bp, Homo sapiens
ttaggttaaaactaa

SEQ ID NO: 120149 - DNA, 15 bp, Homo sapiens
tttaggttaaaacta

SEQ ID NO: 120150 - DNA, 15 bp, Homo sapiens
ttttaggttaaaact

SEQ ID NO: 120151 - DNA, 15 bp, Homo sapiens
gttttaggttaaaac

SEQ ID NO: 120152 - DNA, 15 bp, Homo sapiens
agttttaggttaaaa

SEQ ID NO: 120153 - DNA, 15 bp, Homo sapiens
tagttttaggttaaa

SEQ ID NO: 120154 - DNA, 15 bp, Homo sapiens
atagttttaggttaa

SEQ ID NO: 120155 - DNA, 15 bp, Homo sapiens
aatagttttaggtta

SEQ ID NO: 120156 - DNA, 15 bp, Homo sapiens
taatagttttaggtt

SEQ ID NO: 120157 - DNA, 15 bp, Homo sapiens
ttaatagttttaggt

SEQ ID NO: 120158 - DNA, 15 bp, Homo sapiens
attaatagttttagg

SEQ ID NO: 120159 - DNA, 15 bp, Homo sapiens
tattaatagttttag

SEQ ID NO: 120160 - DNA, 15 bp, Homo sapiens
ttattaatagtttta

SEQ ID NO: 120161 - DNA, 15 bp, Homo sapiens
attattaatagtttt

SEQ ID NO: 120162 - DNA, 15 bp, Homo sapiens
aattattaatagttt

SEQ ID NO: 120163 - DNA, 15 bp, Homo sapiens
aaattattaatagtt

SEQ ID NO: 120164 - DNA, 15 bp, Homo sapiens
taaattattaatagt

SEQ ID NO: 120165 - DNA, 15 bp, Homo sapiens
ataaattattaatag

SEQ ID NO: 120166 - DNA, 15 bp, Homo sapiens
cataaattattaata

SEQ ID NO: 120167 - DNA, 15 bp, Homo sapiens
ccataaattattaat

SEQ ID NO: 120168 - DNA, 15 bp, Homo sapiens
tccataaattattaa

SEQ ID NO: 120169 - DNA, 15 bp, Homo sapiens
gtccataaattatta

SEQ ID NO: 120170 - DNA, 15 bp, Homo sapiens
ggtccataaattatt

SEQ ID NO: 120171 - DNA, 15 bp, Homo sapiens
gggtccataaattat

SEQ ID NO: 120172 - DNA, 15 bp, Homo sapiens
ggggtccataaatta

SEQ ID NO: 120173 - DNA, 15 bp, Homo sapiens
aggggtccataaatt

SEQ ID NO: 120174 - DNA, 15 bp, Homo sapiens
gaggggtccataaat

SEQ ID NO: 120175 - DNA, 15 bp, Homo sapiens
tgaggggtccataaa

SEQ ID NO: 120176 - DNA, 15 bp, Homo sapiens
atgaggggtccataa

SEQ ID NO: 120177 - DNA, 15 bp, Homo sapiens
tatgaggggtccata

SEQ ID NO: 120178 - DNA, 15 bp, Homo sapiens
atatgaggggtccat

SEQ ID NO: 120179 - DNA, 15 bp, Homo sapiens
tatatgaggggtcca

SEQ ID NO: 120180 - DNA, 15 bp, Homo sapiens
gtatatgaggggtcc

SEQ ID NO: 120181 - DNA, 15 bp, Homo sapiens
tgtatatgaggggtc

SEQ ID NO: 120182 - DNA, 15 bp, Homo sapiens
ctgtatatgaggggt

SEQ ID NO: 120183 - DNA, 15 bp, Homo sapiens
cctgtatatgagggg

SEQ ID NO: 120184 - DNA, 15 bp, Homo sapiens
ccctgtatatgaggg

SEQ ID NO: 120185 - DNA, 15 bp, Homo sapiens
accctgtatatgagg

SEQ ID NO: 120186 - DNA, 15 bp, Homo sapiens
gaccctgtatatgag

SEQ ID NO: 120187 - DNA, 15 bp, Homo sapiens
tgaccctgtatatga

SEQ ID NO: 120188 - DNA, 15 bp, Homo sapiens
ttgaccctgtatatg

SEQ ID NO: 120189 - DNA, 15 bp, Homo sapiens
cttgaccctgtatat

SEQ ID NO: 120190 - DNA, 15 bp, Homo sapiens
tcttgaccctgtata

SEQ ID NO: 120191 - DNA, 15 bp, Homo sapiens
atcttgaccctgtat

SEQ ID NO: 120192 - DNA, 15 bp, Homo sapiens
tatcttgaccctgta

SEQ ID NO: 120193 - DNA, 15 bp, Homo sapiens
ttatcttgaccctgt

SEQ ID NO: 120194 - DNA, 15 bp, Homo sapiens
attatcttgaccctg

SEQ ID NO: 120195 - DNA, 15 bp, Homo sapiens
aattatcttgaccct

SEQ ID NO: 120196 - DNA, 15 bp, Homo sapiens
aaattatcttgaccc

SEQ ID NO: 120197 - DNA, 15 bp, Homo sapiens
taaattatcttgacc

SEQ ID NO: 120198 - DNA, 15 bp, Homo sapiens
gtaaattatcttgac

SEQ ID NO: 120199 - DNA, 15 bp, Homo sapiens
tgtaaattatcttga

SEQ ID NO: 120200 - DNA, 15 bp, Homo sapiens
atgtaaattatcttg

SEQ ID NO: 120201 - DNA, 15 bp, Homo sapiens
catgtaaattatctt

SEQ ID NO: 120202 - DNA, 15 bp, Homo sapiens
ccatgtaaattatct

SEQ ID NO: 120203 - DNA, 15 bp, Homo sapiens
gccatgtaaattatc

SEQ ID NO: 120204 - DNA, 15 bp, Homo sapiens
agccatgtaaattat

SEQ ID NO: 120205 - DNA, 15 bp, Homo sapiens
cagccatgtaaatta

SEQ ID NO: 120206 - DNA, 15 bp, Homo sapiens
ccagccatgtaaatt

SEQ ID NO: 120207 - DNA, 15 bp, Homo sapiens
gccagccatgtaaat

SEQ ID NO: 120208 - DNA, 15 bp, Homo sapiens
ggccagccatgtaaa

SEQ ID NO: 120209 - DNA, 15 bp, Homo sapiens
aggccagccatgtaa

SEQ ID NO: 120210 - DNA, 15 bp, Homo sapiens
taggccagccatgta

SEQ ID NO: 120211 - DNA, 15 bp, Homo sapiens
ttaggccagccatgt

SEQ ID NO: 120212 - DNA, 15 bp, Homo sapiens
tttaggccagccatg

SEQ ID NO: 120213 - DNA, 15 bp, Homo sapiens
atttaggccagccat

SEQ ID NO: 120214 - DNA, 15 bp, Homo sapiens
tatttaggccagcca

SEQ ID NO: 120215 - DNA, 15 bp, Homo sapiens
gtatttaggccagcc

SEQ ID NO: 120216 - DNA, 15 bp, Homo sapiens
tgtatttaggccagc

SEQ ID NO: 120217 - DNA, 15 bp, Homo sapiens
ctgtatttaggccag

SEQ ID NO: 120218 - DNA, 15 bp, Homo sapiens
actgtatttaggcca

SEQ ID NO: 120219 - DNA, 15 bp, Homo sapiens
aactgtatttaggcc

SEQ ID NO: 120220 - DNA, 15 bp, Homo sapiens
caactgtatttaggc

SEQ ID NO: 120221 - DNA, 15 bp, Homo sapiens
acaactgtatttagg

SEQ ID NO: 120222 - DNA, 15 bp, Homo sapiens
gacaactgtatttag

SEQ ID NO: 120223 - DNA, 15 bp, Homo sapiens
cgacaactgtattta

SEQ ID NO: 120224 - DNA, 15 bp, Homo sapiens
acgacaactgtattt

SEQ ID NO: 120225 - DNA, 15 bp, Homo sapiens
tacgacaactgtatt

SEQ ID NO: 120226 - DNA, 15 bp, Homo sapiens
ttacgacaactgtat

SEQ ID NO: 120227 - DNA, 15 bp, Homo sapiens
attacgacaactgta

SEQ ID NO: 120228 - DNA, 15 bp, Homo sapiens
tattacgacaactgt

SEQ ID NO: 120229 - DNA, 15 bp, Homo sapiens
ctattacgacaactg

SEQ ID NO: 120230 - DNA, 15 bp, Homo sapiens
actattacgacaact

SEQ ID NO: 120231 - DNA, 15 bp, Homo sapiens
aactattacgacaac

SEQ ID NO: 120232 - DNA, 15 bp, Homo sapiens
caactattacgacaa

SEQ ID NO: 120233 - DNA, 15 bp, Homo sapiens
tcaactattacgaca

SEQ ID NO: 120234 - DNA, 15 bp, Homo sapiens
atcaactattacgac

SEQ ID NO: 120235 - DNA, 15 bp, Homo sapiens
tatcaactattacga

SEQ ID NO: 120236 - DNA, 15 bp, Homo sapiens
ttatcaactattacg

SEQ ID NO: 120237 - DNA, 15 bp, Homo sapiens
tttatcaactattac

SEQ ID NO: 120238 - DNA, 15 bp, Homo sapiens
ctttatcaactatta

SEQ ID NO: 120239 - DNA, 15 bp, Homo sapiens
actttatcaactatt

SEQ ID NO: 120240 - DNA, 15 bp, Homo sapiens
cactttatcaactat

SEQ ID NO: 120241 - DNA, 15 bp, Homo sapiens
acactttatcaacta

SEQ ID NO: 120242 - DNA, 15 bp, Homo sapiens
tacactttatcaact

SEQ ID NO: 120243 - DNA, 15 bp, Homo sapiens
atacactttatcaac

SEQ ID NO: 120244 - DNA, 15 bp, Homo sapiens
aatacactttatcaa

SEQ ID NO: 120245 - DNA, 15 bp, Homo sapiens
gaatacactttatca

SEQ ID NO: 120246 - DNA, 15 bp, Homo sapiens
tgaatacactttatc

SEQ ID NO: 120247 - DNA, 15 bp, Homo sapiens
atgaatacactttat

SEQ ID NO: 120248 - DNA, 15 bp, Homo sapiens
gatgaatacacttta

SEQ ID NO: 120249 - DNA, 15 bp, Homo sapiens
tgatgaatacacttt

SEQ ID NO: 120250 - DNA, 15 bp, Homo sapiens
ctgatgaatacactt

SEQ ID NO: 120251 - DNA, 15 bp, Homo sapiens
tctgatgaatacact

SEQ ID NO: 120252 - DNA, 15 bp, Homo sapiens
gtctgatgaatacac

SEQ ID NO: 120253 - DNA, 15 bp, Homo sapiens
cgtctgatgaataca

SEQ ID NO: 120254 - DNA, 15 bp, Homo sapiens
acgtctgatgaatac

SEQ ID NO: 120255 - DNA, 15 bp, Homo sapiens
gacgtctgatgaata

SEQ ID NO: 120256 - DNA, 15 bp, Homo sapiens
ggacgtctgatgaat

SEQ ID NO: 120257 - DNA, 15 bp, Homo sapiens
tggacgtctgatgaa

SEQ ID NO: 120258 - DNA, 15 bp, Homo sapiens
atggacgtctgatga

SEQ ID NO: 120259 - DNA, 15 bp, Homo sapiens
aatggacgtctgatg

SEQ ID NO: 120260 - DNA, 15 bp, Homo sapiens
aaatggacgtctgat

SEQ ID NO: 120261 - DNA, 15 bp, Homo sapiens
gaaatggacgtctga

SEQ ID NO: 120262 - DNA, 15 bp, Homo sapiens
agaaatggacgtctg

SEQ ID NO: 120263 - DNA, 15 bp, Homo sapiens
gagaaatggacgtct

SEQ ID NO: 120264 - DNA, 15 bp, Homo sapiens
agagaaatggacgtc

SEQ ID NO: 120265 - DNA, 15 bp, Homo sapiens
aagagaaatggacgt

SEQ ID NO: 120266 - DNA, 15 bp, Homo sapiens
gaagagaaatggacg

SEQ ID NO: 120267 - DNA, 15 bp, Homo sapiens
tgaagagaaatggac

SEQ ID NO: 120268 - DNA, 15 bp, Homo sapiens
ctgaagagaaatgga

SEQ ID NO: 120269 - DNA, 15 bp, Homo sapiens
tctgaagagaaatgg

SEQ ID NO: 120270 - DNA, 15 bp, Homo sapiens
ctctgaagagaaatg

SEQ ID NO: 120271 - DNA, 15 bp, Homo sapiens
actctgaagagaaat

SEQ ID NO: 120272 - DNA, 15 bp, Homo sapiens
aactctgaagagaaa

SEQ ID NO: 120273 - DNA, 15 bp, Homo sapiens
gaactctgaagagaa

SEQ ID NO: 120274 - DNA, 15 bp, Homo sapiens
tgaactctgaagaga

SEQ ID NO: 120275 - DNA, 15 bp, Homo sapiens
ttgaactctgaagag

SEQ ID NO: 120276 - DNA, 15 bp, Homo sapiens
cttgaactctgaaga

SEQ ID NO: 120277 - DNA, 15 bp, Homo sapiens
ccttgaactctgaag

SEQ ID NO: 120278 - DNA, 15 bp, Homo sapiens
gccttgaactctgaa

SEQ ID NO: 120279 - DNA, 15 bp, Homo sapiens
tgccttgaactctga

SEQ ID NO: 120280 - DNA, 15 bp, Homo sapiens
ctgccttgaactctg

SEQ ID NO: 120281 - DNA, 15 bp, Homo sapiens
gctgccttgaactct

SEQ ID NO: 120282 - DNA, 15 bp, Homo sapiens
agctgccttgaactc

SEQ ID NO: 120283 - DNA, 15 bp, Homo sapiens
aagctgccttgaact

SEQ ID NO: 120284 - DNA, 15 bp, Homo sapiens
caagctgccttgaac

SEQ ID NO: 120285 - DNA, 15 bp, Homo sapiens
gcaagctgccttgaa

SEQ ID NO: 120286 - DNA, 15 bp, Homo sapiens
ggcaagctgccttga

SEQ ID NO: 120287 - DNA, 15 bp, Homo sapiens
aggcaagctgccttg

SEQ ID NO: 120288 - DNA, 15 bp, Homo sapiens
gaggcaagctgcctt

SEQ ID NO: 120289 - DNA, 15 bp, Homo sapiens
cgaggcaagctgcct

SEQ ID NO: 120290 - DNA, 15 bp, Homo sapiens
tcgaggcaagctgcc

SEQ ID NO: 120291 - DNA, 15 bp, Homo sapiens
ctcgaggcaagctgc

SEQ ID NO: 120292 - DNA, 15 bp, Homo sapiens
tctcgaggcaagctg

SEQ ID NO: 120293 - DNA, 15 bp, Homo sapiens
atctcgaggcaagct

SEQ ID NO: 120294 - DNA, 15 bp, Homo sapiens
aatctcgaggcaagc

SEQ ID NO: 120295 - DNA, 15 bp, Homo sapiens
aaatctcgaggcaag

SEQ ID NO: 120296 - DNA, 15 bp, Homo sapiens
gaaatctcgaggcaa

SEQ ID NO: 120297 - DNA, 15 bp, Homo sapiens
tgaaatctcgaggca

SEQ ID NO: 120298 - DNA, 15 bp, Homo sapiens
atgaaatctcgaggc

SEQ ID NO: 120299 - DNA, 15 bp, Homo sapiens
catgaaatctcgagg

SEQ ID NO: 120300 - DNA, 15 bp, Homo sapiens
tcatgaaatctcgag

SEQ ID NO: 120301 - DNA, 15 bp, Homo sapiens
ttcatgaaatctcga

SEQ ID NO: 120302 - DNA, 15 bp, Homo sapiens
gttcatgaaatctcg

SEQ ID NO: 120303 - DNA, 15 bp, Homo sapiens
tgttcatgaaatctc

SEQ ID NO: 120304 - DNA, 15 bp, Homo sapiens
ctgttcatgaaatct

SEQ ID NO: 120305 - DNA, 15 bp, Homo sapiens
actgttcatgaaatc

SEQ ID NO: 120306 - DNA, 15 bp, Homo sapiens
aactgttcatgaaat

SEQ ID NO: 120307 - DNA, 15 bp, Homo sapiens
aaactgttcatgaaa

SEQ ID NO: 120308 - DNA, 15 bp, Homo sapiens
taaactgttcatgaa

SEQ ID NO: 120309 - DNA, 15 bp, Homo sapiens
ataaactgttcatga

SEQ ID NO: 120310 - DNA, 15 bp, Homo sapiens
gataaactgttcatg

SEQ ID NO: 120311 - DNA, 15 bp, Homo sapiens
cgataaactgttcat

SEQ ID NO: 120312 - DNA, 15 bp, Homo sapiens
acgataaactgttca

SEQ ID NO: 120313 - DNA, 15 bp, Homo sapiens
tacgataaactgttc

SEQ ID NO: 120314 - DNA, 15 bp, Homo sapiens
ttacgataaactgtt

SEQ ID NO: 120315 - DNA, 15 bp, Homo sapiens
cttacgataaactgt

SEQ ID NO: 120316 - DNA, 15 bp, Homo sapiens
tcttacgataaactg

SEQ ID NO: 120317 - DNA, 15 bp, Homo sapiens
ctcttacgataaact

SEQ ID NO: 120318 - DNA, 15 bp, Homo sapiens
tctcttacgataaac

SEQ ID NO: 120319 - DNA, 15 bp, Homo sapiens
ttctcttacgataaa

SEQ ID NO: 120320 - DNA, 15 bp, Homo sapiens
cttctcttacgataa

SEQ ID NO: 120321 - DNA, 15 bp, Homo sapiens
tcttctcttacgata

SEQ ID NO: 120322 - DNA, 15 bp, Homo sapiens
atcttctcttacgat

SEQ ID NO: 120323 - DNA, 15 bp, Homo sapiens
gatcttctcttacga

SEQ ID NO: 120324 - DNA, 15 bp, Homo sapiens
agatcttctcttacg

SEQ ID NO: 120325 - DNA, 15 bp, Homo sapiens
cagatcttctcttac

SEQ ID NO: 120326 - DNA, 15 bp, Homo sapiens
tcagatcttctctta

SEQ ID NO: 120327 - DNA, 15 bp, Homo sapiens
atcagatcttctctt

SEQ ID NO: 120328 - DNA, 15 bp, Homo sapiens
catcagatcttctct

SEQ ID NO: 120329 - DNA, 15 bp, Homo sapiens
ccatcagatcttctc

SEQ ID NO: 120330 - DNA, 15 bp, Homo sapiens
cccatcagatcttct

SEQ ID NO: 120331 - DNA, 15 bp, Homo sapiens
acccatcagatcttc

SEQ ID NO: 120332 - DNA, 15 bp, Homo sapiens
gacccatcagatctt

SEQ ID NO: 120333 - DNA, 15 bp, Homo sapiens
agacccatcagatct

SEQ ID NO: 120334 - DNA, 15 bp, Homo sapiens
tagacccatcagatc

SEQ ID NO: 120335 - DNA, 15 bp, Homo sapiens
ctagacccatcagat

SEQ ID NO: 120336 - DNA, 15 bp, Homo sapiens
gctagacccatcaga

SEQ ID NO: 120337 - DNA, 15 bp, Homo sapiens
agctagacccatcag

SEQ ID NO: 120338 - DNA, 15 bp, Homo sapiens
tagctagacccatca

SEQ ID NO: 120339 - DNA, 15 bp, Homo sapiens
atagctagacccatc

SEQ ID NO: 120340 - DNA, 15 bp, Homo sapiens
aatagctagacccat

SEQ ID NO: 120341 - DNA, 15 bp, Homo sapiens
caatagctagaccca

SEQ ID NO: 120342 - DNA, 15 bp, Homo sapiens
ccaatagctagaccc

SEQ ID NO: 120343 - DNA, 15 bp, Homo sapiens
accaatagctagacc

SEQ ID NO: 120344 - DNA, 15 bp, Homo sapiens
taccaatagctagac

SEQ ID NO: 120345 - DNA, 15 bp, Homo sapiens
gtaccaatagctaga

SEQ ID NO: 120346 - DNA, 15 bp, Homo sapiens
agtaccaatagctag

SEQ ID NO: 120347 - DNA, 15 bp, Homo sapiens
gagtaccaatagcta

SEQ ID NO: 120348 - DNA, 15 bp, Homo sapiens
tgagtaccaatagct

SEQ ID NO: 120349 - DNA, 15 bp, Homo sapiens
atgagtaccaatagc

SEQ ID NO: 120350 - DNA, 15 bp, Homo sapiens
catgagtaccaatag

SEQ ID NO: 120351 - DNA, 15 bp, Homo sapiens
ccatgagtaccaata

SEQ ID NO: 120352 - DNA, 15 bp, Homo sapiens
accatgagtaccaat

SEQ ID NO: 120353 - DNA, 15 bp, Homo sapiens
caccatgagtaccaa

SEQ ID NO: 120354 - DNA, 15 bp, Homo sapiens
gcaccatgagtacca

SEQ ID NO: 120355 - DNA, 15 bp, Homo sapiens
agcaccatgagtacc

SEQ ID NO: 120356 - DNA, 15 bp, Homo sapiens
tagcaccatgagtac

SEQ ID NO: 120357 - DNA, 15 bp, Homo sapiens
ttagcaccatgagta

SEQ ID NO: 120358 - DNA, 15 bp, Homo sapiens
attagcaccatgagt

SEQ ID NO: 120359 - DNA, 15 bp, Homo sapiens
tattagcaccatgag

SEQ ID NO: 120360 - DNA, 15 bp, Homo sapiens
atattagcaccatga

SEQ ID NO: 120361 - DNA, 15 bp, Homo sapiens
aatattagcaccatg

SEQ ID NO: 120362 - DNA, 15 bp, Homo sapiens
gaatattagcaccat

SEQ ID NO: 120363 - DNA, 15 bp, Homo sapiens
tgaatattagcacca

SEQ ID NO: 120364 - DNA, 15 bp, Homo sapiens
ctgaatattagcacc

SEQ ID NO: 120365 - DNA, 15 bp, Homo sapiens
gctgaatattagcac

SEQ ID NO: 120366 - DNA, 15 bp, Homo sapiens
tgctgaatattagca

SEQ ID NO: 120367 - DNA, 15 bp, Homo sapiens
ttgctgaatattagc

SEQ ID NO: 120368 - DNA, 15 bp, Homo sapiens
cttgctgaatattag

SEQ ID NO: 120369 - DNA, 15 bp, Homo sapiens
gcttgctgaatatta

SEQ ID NO: 120370 - DNA, 15 bp, Homo sapiens
agcttgctgaatatt

SEQ ID NO: 120371 - DNA, 15 bp, Homo sapiens
tagcttgctgaatat

SEQ ID NO: 120372 - DNA, 15 bp, Homo sapiens
ctagcttgctgaata

SEQ ID NO: 120373 - DNA, 15 bp, Homo sapiens
tctagcttgctgaat

SEQ ID NO: 120374 - DNA, 15 bp, Homo sapiens
ttctagcttgctgaa

SEQ ID NO: 120375 - DNA, 15 bp, Homo sapiens
tttctagcttgctga

SEQ ID NO: 120376 - DNA, 15 bp, Homo sapiens
ttttctagcttgctg

SEQ ID NO: 120377 - DNA, 15 bp, Homo sapiens
cttttctagcttgct

SEQ ID NO: 120378 - DNA, 15 bp, Homo sapiens
acttttctagcttgc

SEQ ID NO: 120379 - DNA, 15 bp, Homo sapiens
tacttttctagcttg

SEQ ID NO: 120380 - DNA, 15 bp, Homo sapiens
gtacttttctagctt

SEQ ID NO: 120381 - DNA, 15 bp, Homo sapiens
ggtacttttctagct

SEQ ID NO: 120382 - DNA, 15 bp, Homo sapiens
aggtacttttctagc

SEQ ID NO: 120383 - DNA, 15 bp, Homo sapiens
caggtacttttctag

SEQ ID NO: 120384 - DNA, 15 bp, Homo sapiens
ccaggtacttttcta

SEQ ID NO: 120385 - DNA, 15 bp, Homo sapiens
cccaggtacttttct

SEQ ID NO: 120386 - DNA, 15 bp, Homo sapiens
ccccaggtacttttc

SEQ ID NO: 120387 - DNA, 15 bp, Homo sapiens
accccaggtactttt

SEQ ID NO: 120388 - DNA, 15 bp, Homo sapiens
gaccccaggtacttt

SEQ ID NO: 120389 - DNA, 15 bp, Homo sapiens
tgaccccaggtactt

SEQ ID NO: 120390 - DNA, 15 bp, Homo sapiens
gtgaccccaggtact

SEQ ID NO: 120391 - DNA, 15 bp, Homo sapiens
agtgaccccaggtac

SEQ ID NO: 120392 - DNA, 15 bp, Homo sapiens
cagtgaccccaggta

SEQ ID NO: 120393 - DNA, 15 bp, Homo sapiens
gcagtgaccccaggt

SEQ ID NO: 120394 - DNA, 15 bp, Homo sapiens
agcagtgaccccagg

SEQ ID NO: 120395 - DNA, 15 bp, Homo sapiens
tagcagtgaccccag

SEQ ID NO: 120396 - DNA, 15 bp, Homo sapiens
atagcagtgacccca

SEQ ID NO: 120397 - DNA, 15 bp, Homo sapiens
aatagcagtgacccc

SEQ ID NO: 120398 - DNA, 15 bp, Homo sapiens
caatagcagtgaccc

SEQ ID NO: 120399 - DNA, 15 bp, Homo sapiens
tcaatagcagtgacc

SEQ ID NO: 120400 - DNA, 15 bp, Homo sapiens
atcaatagcagtgac

SEQ ID NO: 120401 - DNA, 15 bp, Homo sapiens
gatcaatagcagtga

SEQ ID NO: 120402 - DNA, 15 bp, Homo sapiens
agatcaatagcagtg

SEQ ID NO: 120403 - DNA, 15 bp, Homo sapiens
tagatcaatagcagt

SEQ ID NO: 120404 - DNA, 15 bp, Homo sapiens
ctagatcaatagcag

SEQ ID NO: 120405 - DNA, 15 bp, Homo sapiens
tctagatcaatagca

SEQ ID NO: 120406 - DNA, 15 bp, Homo sapiens
atctagatcaatagc

SEQ ID NO: 120407 - DNA, 15 bp, Homo sapiens
catctagatcaatag

SEQ ID NO: 120408 - DNA, 15 bp, Homo sapiens
tcatctagatcaata

SEQ ID NO: 120409 - DNA, 15 bp, Homo sapiens
ttcatctagatcaat

SEQ ID NO: 120410 - DNA, 15 bp, Homo sapiens
cttcatctagatcaa

SEQ ID NO: 120411 - DNA, 15 bp, Homo sapiens
tcttcatctagatca

SEQ ID NO: 120412 - DNA, 15 bp, Homo sapiens
atcttcatctagatc

SEQ ID NO: 120413 - DNA, 15 bp, Homo sapiens
tatcttcatctagat

SEQ ID NO: 120414 - DNA, 15 bp, Homo sapiens
gtatcttcatctaga

SEQ ID NO: 120415 - DNA, 15 bp, Homo sapiens
ggtatcttcatctag

SEQ ID NO: 120416 - DNA, 15 bp, Homo sapiens
aggtatcttcatcta

SEQ ID NO: 120417 - DNA, 15 bp, Homo sapiens
caggtatcttcatct

SEQ ID NO: 120418 - DNA, 15 bp, Homo sapiens
gcaggtatcttcatc

SEQ ID NO: 120419 - DNA, 15 bp, Homo sapiens
tgcaggtatcttcat

SEQ ID NO: 120420 - DNA, 15 bp, Homo sapiens
gtgcaggtatcttca

SEQ ID NO: 120421 - DNA, 15 bp, Homo sapiens
tgtgcaggtatcttc

SEQ ID NO: 120422 - DNA, 15 bp, Homo sapiens
atgtgcaggtatctt

SEQ ID NO: 120423 - DNA, 15 bp, Homo sapiens
aatgtgcaggtatct

SEQ ID NO: 120424 - DNA, 15 bp, Homo sapiens
aaatgtgcaggtatc

SEQ ID NO: 120425 - DNA, 15 bp, Homo sapiens
gaaatgtgcaggtat

SEQ ID NO: 120426 - DNA, 15 bp, Homo sapiens
tgaaatgtgcaggta

SEQ ID NO: 120427 - DNA, 15 bp, Homo sapiens
atgaaatgtgcaggt

SEQ ID NO: 120428 - DNA, 15 bp, Homo sapiens
tatgaaatgtgcagg

SEQ ID NO: 120429 - DNA, 15 bp, Homo sapiens
atatgaaatgtgcag

SEQ ID NO: 120430 - DNA, 15 bp, Homo sapiens
aatatgaaatgtgca

SEQ ID NO: 120431 - DNA, 15 bp, Homo sapiens
aaatatgaaatgtgc

SEQ ID NO: 120432 - DNA, 15 bp, Homo sapiens
taaatatgaaatgtg

SEQ ID NO: 120433 - DNA, 15 bp, Homo sapiens
ataaatatgaaatgt

SEQ ID NO: 120434 - DNA, 15 bp, Homo sapiens
cataaatatgaaatg

SEQ ID NO: 120435 - DNA, 15 bp, Homo sapiens
ccataaatatgaaat

SEQ ID NO: 120436 - DNA, 15 bp, Homo sapiens
tccataaatatgaaa

SEQ ID NO: 120437 - DNA, 15 bp, Homo sapiens
ctccataaatatgaa

SEQ ID NO: 120438 - DNA, 15 bp, Homo sapiens
tctccataaatatga

SEQ ID NO: 120439 - DNA, 15 bp, Homo sapiens
ctctccataaatatg

SEQ ID NO: 120440 - DNA, 15 bp, Homo sapiens
cctctccataaatat

SEQ ID NO: 120441 - DNA, 15 bp, Homo sapiens
acctctccataaata

SEQ ID NO: 120442 - DNA, 15 bp, Homo sapiens
tacctctccataaat

SEQ ID NO: 120443 - DNA, 15 bp, Homo sapiens
ttacctctccataaa

SEQ ID NO: 120444 - DNA, 15 bp, Homo sapiens
tttacctctccataa

SEQ ID NO: 120445 - DNA, 15 bp, Homo sapiens
atttacctctccata

SEQ ID NO: 120446 - DNA, 15 bp, Homo sapiens
tatttacctctccat

SEQ ID NO: 120447 - DNA, 15 bp, Homo sapiens
atatttacctctcca

SEQ ID NO: 120448 - DNA, 15 bp, Homo sapiens
aatatttacctctcc

SEQ ID NO: 120449 - DNA, 15 bp, Homo sapiens
aaatatttacctctc

SEQ ID NO: 120450 - DNA, 15 bp, Homo sapiens
aaaatatttacctct

SEQ ID NO: 120451 - DNA, 15 bp, Homo sapiens
taaaatatttacctc

SEQ ID NO: 120452 - DNA, 15 bp, Homo sapiens
gtaaaatatttacct

SEQ ID NO: 120453 - DNA, 15 bp, Homo sapiens
agtaaaatatttacc

SEQ ID NO: 120454 - DNA, 15 bp, Homo sapiens
cagtaaaatatttac

SEQ ID NO: 120455 - DNA, 15 bp, Homo sapiens
gcagtaaaatattta

SEQ ID NO: 120456 - DNA, 15 bp, Homo sapiens
tgcagtaaaatattt

SEQ ID NO: 120457 - DNA, 15 bp, Homo sapiens
atgcagtaaaatatt

SEQ ID NO: 120458 - DNA, 15 bp, Homo sapiens
tatgcagtaaaatat

SEQ ID NO: 120459 - DNA, 15 bp, Homo sapiens
ctatgcagtaaaata

SEQ ID NO: 120460 - DNA, 15 bp, Homo sapiens
actatgcagtaaaat

SEQ ID NO: 120461 - DNA, 15 bp, Homo sapiens
aactatgcagtaaaa

SEQ ID NO: 120462 - DNA, 15 bp, Homo sapiens
aaactatgcagtaaa

SEQ ID NO: 120463 - DNA, 15 bp, Homo sapiens
aaaactatgcagtaa

SEQ ID NO: 120464 - DNA, 15 bp, Homo sapiens
aaaaactatgcagta

SEQ ID NO: 120465 - DNA, 15 bp, Homo sapiens
aaaaaactatgcagt

SEQ ID NO: 120466 - DNA, 15 bp, Homo sapiens
aaaaaaactatgcag

SEQ ID NO: 120467 - DNA, 15 bp, Homo sapiens
aaaaaaaactatgca

SEQ ID NO: 120468 - DNA, 15 bp, Homo sapiens
aaaaaaaaactatgc

SEQ ID NO: 120469 - DNA, 15 bp, Homo sapiens
gaaaaaaaaactatg

SEQ ID NO: 120470 - DNA, 15 bp, Homo sapiens
ggaaaaaaaaactat

SEQ ID NO: 120471 - DNA, 15 bp, Homo sapiens
gggaaaaaaaaacta

SEQ ID NO: 120472 - DNA, 15 bp, Homo sapiens
ggggaaaaaaaaact

SEQ ID NO: 120473 - DNA, 15 bp, Homo sapiens
tggggaaaaaaaaac

SEQ ID NO: 120474 - DNA, 15 bp, Homo sapiens
ttggggaaaaaaaaa

SEQ ID NO: 120475 - DNA, 15 bp, Homo sapiens
tttggggaaaaaaaa

SEQ ID NO: 120476 - DNA, 15 bp, Homo sapiens
gtttggggaaaaaaa

SEQ ID NO: 120477 - DNA, 15 bp, Homo sapiens
tgtttggggaaaaaa

SEQ ID NO: 120478 - DNA, 15 bp, Homo sapiens
ttgtttggggaaaaa

SEQ ID NO: 120479 - DNA, 15 bp, Homo sapiens
cttgtttggggaaaa

SEQ ID NO: 120480 - DNA, 15 bp, Homo sapiens
acttgtttggggaaa

SEQ ID NO: 120481 - DNA, 15 bp, Homo sapiens
tacttgtttggggaa

SEQ ID NO: 120482 - DNA, 15 bp, Homo sapiens
atacttgtttgggga

SEQ ID NO: 120483 - DNA, 15 bp, Homo sapiens
aatacttgtttgggg

SEQ ID NO: 120484 - DNA, 15 bp, Homo sapiens
aaatacttgtttggg

SEQ ID NO: 120485 - DNA, 15 bp, Homo sapiens
gaaatacttgtttgg

SEQ ID NO: 120486 - DNA, 15 bp, Homo sapiens
tgaaatacttgtttg

SEQ ID NO: 120487 - DNA, 15 bp, Homo sapiens
ctgaaatacttgttt

SEQ ID NO: 120488 - DNA, 15 bp, Homo sapiens
gctgaaatacttgtt

SEQ ID NO: 120489 - DNA, 15 bp, Homo sapiens
agctgaaatacttgt

SEQ ID NO: 120490 - DNA, 15 bp, Homo sapiens
cagctgaaatacttg

SEQ ID NO: 120491 - DNA, 15 bp, Homo sapiens
ccagctgaaatactt

SEQ ID NO: 120492 - DNA, 15 bp, Homo sapiens
gccagctgaaatact

SEQ ID NO: 120493 - DNA, 15 bp, Homo sapiens
agccagctgaaatac

SEQ ID NO: 120494 - DNA, 15 bp, Homo sapiens
tagccagctgaaata

SEQ ID NO: 120495 - DNA, 15 bp, Homo sapiens
ttagccagctgaaat

SEQ ID NO: 120496 - DNA, 15 bp, Homo sapiens
attagccagctgaaa

SEQ ID NO: 120497 - DNA, 15 bp, Homo sapiens
gattagccagctgaa

SEQ ID NO: 120498 - DNA, 15 bp, Homo sapiens
agattagccagctga

SEQ ID NO: 120499 - DNA, 15 bp, Homo sapiens
aagattagccagctg

SEQ ID NO: 120500 - DNA, 15 bp, Homo sapiens
aaagattagccagct

SEQ ID NO: 120501 - DNA, 15 bp, Homo sapiens
aaaagattagccagc

SEQ ID NO: 120502 - DNA, 15 bp, Homo sapiens
caaaagattagccag

SEQ ID NO: 120503 - DNA, 15 bp, Homo sapiens
acaaaagattagcca

SEQ ID NO: 120504 - DNA, 15 bp, Homo sapiens
gacaaaagattagcc

SEQ ID NO: 120505 - DNA, 15 bp, Homo sapiens
agacaaaagattagc

SEQ ID NO: 120506 - DNA, 15 bp, Homo sapiens
aagacaaaagattag

SEQ ID NO: 120507 - DNA, 15 bp, Homo sapiens
taagacaaaagatta

SEQ ID NO: 120508 - DNA, 15 bp, Homo sapiens
ttaagacaaaagatt

SEQ ID NO: 120509 - DNA, 15 bp, Homo sapiens
tttaagacaaaagat

SEQ ID NO: 120510 - DNA, 15 bp, Homo sapiens
ttttaagacaaaaga

SEQ ID NO: 120511 - DNA, 15 bp, Homo sapiens
attttaagacaaaag

SEQ ID NO: 120512 - DNA, 15 bp, Homo sapiens
cattttaagacaaaa

SEQ ID NO: 120513 - DNA, 15 bp, Homo sapiens
acattttaagacaaa

SEQ ID NO: 120514 - DNA, 15 bp, Homo sapiens
aacattttaagacaa

SEQ ID NO: 120515 - DNA, 15 bp, Homo sapiens
aaacattttaagaca

SEQ ID NO: 120516 - DNA, 15 bp, Homo sapiens
gaaacattttaagac

SEQ ID NO: 120517 - DNA, 15 bp, Homo sapiens
ggaaacattttaaga

SEQ ID NO: 120518 - DNA, 15 bp, Homo sapiens
gggaaacattttaag

SEQ ID NO: 120519 - DNA, 15 bp, Homo sapiens
ggggaaacattttaa

SEQ ID NO: 120520 - DNA, 15 bp, Homo sapiens
aggggaaacatttta

SEQ ID NO: 120521 - DNA, 15 bp, Homo sapiens
aaggggaaacatttt

SEQ ID NO: 120522 - DNA, 15 bp, Homo sapiens
aaaggggaaacattt

SEQ ID NO: 120523 - DNA, 15 bp, Homo sapiens
aaaaggggaaacatt

SEQ ID NO: 120524 - DNA, 15 bp, Homo sapiens
taaaaggggaaacat

SEQ ID NO: 120525 - DNA, 15 bp, Homo sapiens
ataaaaggggaaaca

SEQ ID NO: 120526 - DNA, 15 bp, Homo sapiens
aataaaaggggaaac

SEQ ID NO: 120527 - DNA, 15 bp, Homo sapiens
taataaaaggggaaa

SEQ ID NO: 120528 - DNA, 15 bp, Homo sapiens
ctaataaaaggggaa

SEQ ID NO: 120529 - DNA, 15 bp, Homo sapiens
cctaataaaagggga

SEQ ID NO: 120530 - DNA, 15 bp, Homo sapiens
tcctaataaaagggg

SEQ ID NO: 120531 - DNA, 15 bp, Homo sapiens
atcctaataaaaggg

SEQ ID NO: 120532 - DNA, 15 bp, Homo sapiens
gatcctaataaaagg

SEQ ID NO: 120533 - DNA, 15 bp, Homo sapiens
tgatcctaataaaag

SEQ ID NO: 120534 - DNA, 15 bp, Homo sapiens
ctgatcctaataaaa

SEQ ID NO: 120535 - DNA, 15 bp, Homo sapiens
cctgatcctaataaa

SEQ ID NO: 120536 - DNA, 15 bp, Homo sapiens
tcctgatcctaataa

SEQ ID NO: 120537 - DNA, 15 bp, Homo sapiens
atcctgatcctaata

SEQ ID NO: 120538 - DNA, 15 bp, Homo sapiens
catcctgatcctaat

SEQ ID NO: 120539 - DNA, 15 bp, Homo sapiens
gcatcctgatcctaa

SEQ ID NO: 120540 - DNA, 15 bp, Homo sapiens
tgcatcctgatccta

SEQ ID NO: 120541 - DNA, 15 bp, Homo sapiens
ctgcatcctgatcct

SEQ ID NO: 120542 - DNA, 15 bp, Homo sapiens
actgcatcctgatcc

SEQ ID NO: 120543 - DNA, 15 bp, Homo sapiens
cactgcatcctgatc

SEQ ID NO: 120544 - DNA, 15 bp, Homo sapiens
tcactgcatcctgat

SEQ ID NO: 120545 - DNA, 15 bp, Homo sapiens
ttcactgcatcctga

SEQ ID NO: 120546 - DNA, 15 bp, Homo sapiens
tttcactgcatcctg

SEQ ID NO: 120547 - DNA, 15 bp, Homo sapiens
ttttcactgcatcct

SEQ ID NO: 120548 - DNA, 15 bp, Homo sapiens
tttttcactgcatcc

SEQ ID NO: 120549 - DNA, 15 bp, Homo sapiens
ttttttcactgcatc

SEQ ID NO: 120550 - DNA, 15 bp, Homo sapiens
cttttttcactgcat

SEQ ID NO: 120551 - DNA, 15 bp, Homo sapiens
gcttttttcactgca

SEQ ID NO: 120552 - DNA, 15 bp, Homo sapiens
agcttttttcactgc

SEQ ID NO: 120553 - DNA, 15 bp, Homo sapiens
tagcttttttcactg

SEQ ID NO: 120554 - DNA, 15 bp, Homo sapiens
ctagcttttttcact

SEQ ID NO: 120555 - DNA, 15 bp, Homo sapiens
tctagcttttttcac

SEQ ID NO: 120556 - DNA, 15 bp, Homo sapiens
ttctagcttttttca

SEQ ID NO: 120557 - DNA, 15 bp, Homo sapiens
cttctagcttttttc

SEQ ID NO: 120558 - DNA, 15 bp, Homo sapiens
gcttctagctttttt

SEQ ID NO: 120559 - DNA, 15 bp, Homo sapiens
agcttctagcttttt

SEQ ID NO: 120560 - DNA, 15 bp, Homo sapiens
aagcttctagctttt

SEQ ID NO: 120561 - DNA, 15 bp, Homo sapiens
aaagcttctagcttt

SEQ ID NO: 120562 - DNA, 15 bp, Homo sapiens
gaaagcttctagctt

SEQ ID NO: 120563 - DNA, 15 bp, Homo sapiens
agaaagcttctagct

SEQ ID NO: 120564 - DNA, 15 bp, Homo sapiens
gagaaagcttctagc

SEQ ID NO: 120565 - DNA, 15 bp, Homo sapiens
cgagaaagcttctag

SEQ ID NO: 120566 - DNA, 15 bp, Homo sapiens
tcgagaaagcttcta

SEQ ID NO: 120567 - DNA, 15 bp, Homo sapiens
ttcgagaaagcttct

SEQ ID NO: 120568 - DNA, 15 bp, Homo sapiens
attcgagaaagcttc

SEQ ID NO: 120569 - DNA, 15 bp, Homo sapiens
aattcgagaaagctt

SEQ ID NO: 120570 - DNA, 15 bp, Homo sapiens
aaattcgagaaagct

SEQ ID NO: 120571 - DNA, 15 bp, Homo sapiens
caaattcgagaaagc

SEQ ID NO: 120572 - DNA, 15 bp, Homo sapiens
gcaaattcgagaaag

SEQ ID NO: 120573 - DNA, 15 bp, Homo sapiens
agcaaattcgagaaa

SEQ ID NO: 120574 - DNA, 15 bp, Homo sapiens
cagcaaattcgagaa

SEQ ID NO: 120575 - DNA, 15 bp, Homo sapiens
tcagcaaattcgaga

SEQ ID NO: 120576 - DNA, 15 bp, Homo sapiens
ttcagcaaattcgag

SEQ ID NO: 120577 - DNA, 15 bp, Homo sapiens
cttcagcaaattcga

SEQ ID NO: 120578 - DNA, 15 bp, Homo sapiens
tcttcagcaaattcg

SEQ ID NO: 120579 - DNA, 15 bp, Homo sapiens
atcttcagcaaattc

SEQ ID NO: 120580 - DNA, 15 bp, Homo sapiens
catcttcagcaaatt

SEQ ID NO: 120581 - DNA, 15 bp, Homo sapiens
acatcttcagcaaat

SEQ ID NO: 120582 - DNA, 15 bp, Homo sapiens
tacatcttcagcaaa

SEQ ID NO: 120583 - DNA, 15 bp, Homo sapiens
ttacatcttcagcaa

SEQ ID NO: 120584 - DNA, 15 bp, Homo sapiens
attacatcttcagca

SEQ ID NO: 120585 - DNA, 15 bp, Homo sapiens
tattacatcttcagc

SEQ ID NO: 120586 - DNA, 15 bp, Homo sapiens
gtattacatcttcag

SEQ ID NO: 120587 - DNA, 15 bp, Homo sapiens
tgtattacatcttca

SEQ ID NO: 120588 - DNA, 15 bp, Homo sapiens
ttgtattacatcttc

SEQ ID NO: 120589 - DNA, 15 bp, Homo sapiens
cttgtattacatctt

SEQ ID NO: 120590 - DNA, 15 bp, Homo sapiens
acttgtattacatct

SEQ ID NO: 120591 - DNA, 15 bp, Homo sapiens
aacttgtattacatc

SEQ ID NO: 120592 - DNA, 15 bp, Homo sapiens
gaacttgtattacat

SEQ ID NO: 120593 - DNA, 15 bp, Homo sapiens
ggaacttgtattaca

SEQ ID NO: 120594 - DNA, 15 bp, Homo sapiens
tggaacttgtattac

SEQ ID NO: 120595 - DNA, 15 bp, Homo sapiens
ttggaacttgtatta

SEQ ID NO: 120596 - DNA, 15 bp, Homo sapiens
cttggaacttgtatt

SEQ ID NO: 120597 - DNA, 15 bp, Homo sapiens
ccttggaacttgtat

SEQ ID NO: 120598 - DNA, 15 bp, Homo sapiens
tccttggaacttgta

SEQ ID NO: 120599 - DNA, 15 bp, Homo sapiens
ttccttggaacttgt

SEQ ID NO: 120600 - DNA, 15 bp, Homo sapiens
gttccttggaacttg

SEQ ID NO: 120601 - DNA, 15 bp, Homo sapiens
agttccttggaactt

SEQ ID NO: 120602 - DNA, 15 bp, Homo sapiens
aagttccttggaact

SEQ ID NO: 120603 - DNA, 15 bp, Homo sapiens
taagttccttggaac

SEQ ID NO: 120604 - DNA, 15 bp, Homo sapiens
ctaagttccttggaa

SEQ ID NO: 120605 - DNA, 15 bp, Homo sapiens
actaagttccttgga

SEQ ID NO: 120606 - DNA, 15 bp, Homo sapiens
tactaagttccttgg

SEQ ID NO: 120607 - DNA, 15 bp, Homo sapiens
ctactaagttccttg

SEQ ID NO: 120608 - DNA, 15 bp, Homo sapiens
cctactaagttcctt

SEQ ID NO: 120609 - DNA, 15 bp, Homo sapiens
acctactaagttcct

SEQ ID NO: 120610 - DNA, 15 bp, Homo sapiens
tacctactaagttcc

SEQ ID NO: 120611 - DNA, 15 bp, Homo sapiens
ttacctactaagttc

SEQ ID NO: 120612 - DNA, 15 bp, Homo sapiens
cttacctactaagtt

SEQ ID NO: 120613 - DNA, 15 bp, Homo sapiens
acttacctactaagt

SEQ ID NO: 120614 - DNA, 15 bp, Homo sapiens
gacttacctactaag

SEQ ID NO: 120615 - DNA, 15 bp, Homo sapiens
tgacttacctactaa

SEQ ID NO: 120616 - DNA, 15 bp, Homo sapiens
ctgacttacctacta

SEQ ID NO: 120617 - DNA, 15 bp, Homo sapiens
tctgacttacctact

SEQ ID NO: 120618 - DNA, 15 bp, Homo sapiens
ttctgacttacctac

SEQ ID NO: 120619 - DNA, 15 bp, Homo sapiens
cttctgacttaccta

SEQ ID NO: 120620 - DNA, 15 bp, Homo sapiens
acttctgacttacct

SEQ ID NO: 120621 - DNA, 15 bp, Homo sapiens
tacttctgacttacc

SEQ ID NO: 120622 - DNA, 15 bp, Homo sapiens
atacttctgacttac

SEQ ID NO: 120623 - DNA, 15 bp, Homo sapiens
gatacttctgactta

SEQ ID NO: 120624 - DNA, 15 bp, Homo sapiens
agatacttctgactt

SEQ ID NO: 120625 - DNA, 15 bp, Homo sapiens
cagatacttctgact

SEQ ID NO: 120626 - DNA, 15 bp, Homo sapiens
acagatacttctgac

SEQ ID NO: 120627 - DNA, 15 bp, Homo sapiens
aacagatacttctga

SEQ ID NO: 120628 - DNA, 15 bp, Homo sapiens
caacagatacttctg

SEQ ID NO: 120629 - DNA, 15 bp, Homo sapiens
tcaacagatacttct

SEQ ID NO: 120630 - DNA, 15 bp, Homo sapiens
gtcaacagatacttc

SEQ ID NO: 120631 - DNA, 15 bp, Homo sapiens
tgtcaacagatactt

SEQ ID NO: 120632 - DNA, 15 bp, Homo sapiens
atgtcaacagatact

SEQ ID NO: 120633 - DNA, 15 bp, Homo sapiens
tatgtcaacagatac

SEQ ID NO: 120634 - DNA, 15 bp, Homo sapiens
atatgtcaacagata

SEQ ID NO: 120635 - DNA, 15 bp, Homo sapiens
tatatgtcaacagat

SEQ ID NO: 120636 - DNA, 15 bp, Homo sapiens
ctatatgtcaacaga

SEQ ID NO: 120637 - DNA, 15 bp, Homo sapiens
actatatgtcaacag

SEQ ID NO: 120638 - DNA, 15 bp, Homo sapiens
tactatatgtcaaca

SEQ ID NO: 120639 - DNA, 15 bp, Homo sapiens
gtactatatgtcaac

SEQ ID NO: 120640 - DNA, 15 bp, Homo sapiens
tgtactatatgtcaa

SEQ ID NO: 120641 - DNA, 15 bp, Homo sapiens
ttgtactatatgtca

SEQ ID NO: 120642 - DNA, 15 bp, Homo sapiens
gttgtactatatgtc

SEQ ID NO: 120643 - DNA, 15 bp, Homo sapiens
tgttgtactatatgt

SEQ ID NO: 120644 - DNA, 15 bp, Homo sapiens
ttgttgtactatatg

SEQ ID NO: 120645 - DNA, 15 bp, Homo sapiens
gttgttgtactatat

SEQ ID NO: 120646 - DNA, 15 bp, Homo sapiens
agttgttgtactata

SEQ ID NO: 120647 - DNA, 15 bp, Homo sapiens
tagttgttgtactat

SEQ ID NO: 120648 - DNA, 15 bp, Homo sapiens
ttagttgttgtacta

SEQ ID NO: 120649 - DNA, 15 bp, Homo sapiens
cttagttgttgtact

SEQ ID NO: 120650 - DNA, 15 bp, Homo sapiens
acttagttgttgtac

SEQ ID NO: 120651 - DNA, 15 bp, Homo sapiens
aacttagttgttgta

SEQ ID NO: 120652 - DNA, 15 bp, Homo sapiens
aaacttagttgttgt

SEQ ID NO: 120653 - DNA, 15 bp, Homo sapiens
taaacttagttgttg

SEQ ID NO: 120654 - DNA, 15 bp, Homo sapiens
ctaaacttagttgtt

SEQ ID NO: 120655 - DNA, 15 bp, Homo sapiens
cctaaacttagttgt

SEQ ID NO: 120656 - DNA, 15 bp, Homo sapiens
acctaaacttagttg

SEQ ID NO: 120657 - DNA, 15 bp, Homo sapiens
tacctaaacttagtt

SEQ ID NO: 120658 - DNA, 15 bp, Homo sapiens
ttacctaaacttagt

SEQ ID NO: 120659 - DNA, 15 bp, Homo sapiens
tttacctaaacttag

SEQ ID NO: 120660 - DNA, 15 bp, Homo sapiens
gtttacctaaactta

SEQ ID NO: 120661 - DNA, 15 bp, Homo sapiens
tgtttacctaaactt

SEQ ID NO: 120662 - DNA, 15 bp, Homo sapiens
ctgtttacctaaact

SEQ ID NO: 120663 - DNA, 15 bp, Homo sapiens
actgtttacctaaac

SEQ ID NO: 120664 - DNA, 15 bp, Homo sapiens
aactgtttacctaaa

SEQ ID NO: 120665 - DNA, 15 bp, Homo sapiens
aaactgtttacctaa

SEQ ID NO: 120666 - DNA, 15 bp, Homo sapiens
taaactgtttaccta

SEQ ID NO: 120667 - DNA, 15 bp, Homo sapiens
ataaactgtttacct

SEQ ID NO: 120668 - DNA, 15 bp, Homo sapiens
aataaactgtttacc

SEQ ID NO: 120669 - DNA, 15 bp, Homo sapiens
aaataaactgtttac

SEQ ID NO: 120670 - DNA, 15 bp, Homo sapiens
taaataaactgttta

SEQ ID NO: 120671 - DNA, 15 bp, Homo sapiens
ataaataaactgttt

SEQ ID NO: 120672 - DNA, 15 bp, Homo sapiens
tataaataaactgtt

SEQ ID NO: 120673 - DNA, 15 bp, Homo sapiens
ctataaataaactgt

SEQ ID NO: 120674 - DNA, 15 bp, Homo sapiens
actataaataaactg

SEQ ID NO: 120675 - DNA, 15 bp, Homo sapiens
cactataaataaact

SEQ ID NO: 120676 - DNA, 15 bp, Homo sapiens
tcactataaataaac

SEQ ID NO: 120677 - DNA, 15 bp, Homo sapiens
atcactataaataaa

SEQ ID NO: 120678 - DNA, 15 bp, Homo sapiens
tatcactataaataa

SEQ ID NO: 120679 - DNA, 15 bp, Homo sapiens
ctatcactataaata

SEQ ID NO: 120680 - DNA, 15 bp, Homo sapiens
tctatcactataaat

SEQ ID NO: 120681 - DNA, 15 bp, Homo sapiens
ttctatcactataaa

SEQ ID NO: 120682 - DNA, 15 bp, Homo sapiens
attctatcactataa

SEQ ID NO: 120683 - DNA, 15 bp, Homo sapiens
aattctatcactata

SEQ ID NO: 120684 - DNA, 15 bp, Homo sapiens
gaattctatcactat

SEQ ID NO: 120685 - DNA, 15 bp, Homo sapiens
ggaattctatcacta

SEQ ID NO: 120686 - DNA, 15 bp, Homo sapiens
tggaattctatcact

SEQ ID NO: 120687 - DNA, 15 bp, Homo sapiens
atggaattctatcac

SEQ ID NO: 120688 - DNA, 15 bp, Homo sapiens
aatggaattctatca

SEQ ID NO: 120689 - DNA, 15 bp, Homo sapiens
aaatggaattctatc

SEQ ID NO: 120690 - DNA, 15 bp, Homo sapiens
aaaatggaattctat

SEQ ID NO: 120691 - DNA, 15 bp, Homo sapiens
aaaaatggaattcta

SEQ ID NO: 120692 - DNA, 15 bp, Homo sapiens
aaaaaatggaattct

SEQ ID NO: 120693 - DNA, 15 bp, Homo sapiens
gaaaaaatggaattc

SEQ ID NO: 120694 - DNA, 15 bp, Homo sapiens
agaaaaaatggaatt

SEQ ID NO: 120695 - DNA, 15 bp, Homo sapiens
aagaaaaaatggaat

SEQ ID NO: 120696 - DNA, 15 bp, Homo sapiens
taagaaaaaatggaa

SEQ ID NO: 120697 - DNA, 15 bp, Homo sapiens
gtaagaaaaaatgga

SEQ ID NO: 120698 - DNA, 15 bp, Homo sapiens
agtaagaaaaaatgg

SEQ ID NO: 120699 - DNA, 15 bp, Homo sapiens
cagtaagaaaaaatg

SEQ ID NO: 120700 - DNA, 15 bp, Homo sapiens
ccagtaagaaaaaat

SEQ ID NO: 120701 - DNA, 15 bp, Homo sapiens
tccagtaagaaaaaa

SEQ ID NO: 120702 - DNA, 15 bp, Homo sapiens
ctccagtaagaaaaa

SEQ ID NO: 120703 - DNA, 15 bp, Homo sapiens
cctccagtaagaaaa

SEQ ID NO: 120704 - DNA, 15 bp, Homo sapiens
ccctccagtaagaaa

SEQ ID NO: 120705 - DNA, 15 bp, Homo sapiens
accctccagtaagaa

SEQ ID NO: 120706 - DNA, 15 bp, Homo sapiens
taccctccagtaaga

SEQ ID NO: 120707 - DNA, 15 bp, Homo sapiens
ataccctccagtaag

SEQ ID NO: 120708 - DNA, 15 bp, Homo sapiens
gataccctccagtaa

SEQ ID NO: 120709 - DNA, 15 bp, Homo sapiens
tgataccctccagta

SEQ ID NO: 120710 - DNA, 15 bp, Homo sapiens
atgataccctccagt

SEQ ID NO: 120711 - DNA, 15 bp, Homo sapiens
aatgataccctccag

SEQ ID NO: 120712 - DNA, 15 bp, Homo sapiens
aaatgataccctcca

SEQ ID NO: 120713 - DNA, 15 bp, Homo sapiens
taaatgataccctcc

SEQ ID NO: 120714 - DNA, 15 bp, Homo sapiens
ttaaatgataccctc

SEQ ID NO: 120715 - DNA, 15 bp, Homo sapiens
attaaatgataccct

SEQ ID NO: 120716 - DNA, 15 bp, Homo sapiens
aattaaatgataccc

SEQ ID NO: 120717 - DNA, 15 bp, Homo sapiens
caattaaatgatacc

SEQ ID NO: 120718 - DNA, 15 bp, Homo sapiens
tcaattaaatgatac

SEQ ID NO: 120719 - DNA, 15 bp, Homo sapiens
ttcaattaaatgata

SEQ ID NO: 120720 - DNA, 15 bp, Homo sapiens
tttcaattaaatgat

SEQ ID NO: 120721 - DNA, 15 bp, Homo sapiens
gtttcaattaaatga

SEQ ID NO: 120722 - DNA, 15 bp, Homo sapiens
tgtttcaattaaatg

SEQ ID NO: 120723 - DNA, 15 bp, Homo sapiens
atgtttcaattaaat

SEQ ID NO: 120724 - DNA, 15 bp, Homo sapiens
tatgtttcaattaaa

SEQ ID NO: 120725 - DNA, 15 bp, Homo sapiens
ctatgtttcaattaa

SEQ ID NO: 120726 - DNA, 15 bp, Homo sapiens
actatgtttcaatta

SEQ ID NO: 120727 - DNA, 15 bp, Homo sapiens
gactatgtttcaatt

SEQ ID NO: 120728 - DNA, 15 bp, Homo sapiens
agactatgtttcaat

SEQ ID NO: 120729 - DNA, 15 bp, Homo sapiens
aagactatgtttcaa

SEQ ID NO: 120730 - DNA, 15 bp, Homo sapiens
aaagactatgtttca

SEQ ID NO: 120731 - DNA, 15 bp, Homo sapiens
caaagactatgtttc

SEQ ID NO: 120732 - DNA, 15 bp, Homo sapiens
tcaaagactatgttt

SEQ ID NO: 120733 - DNA, 15 bp, Homo sapiens
ttcaaagactatgtt

SEQ ID NO: 120734 - DNA, 15 bp, Homo sapiens
tttcaaagactatgt

SEQ ID NO: 120735 - DNA, 15 bp, Homo sapiens
atttcaaagactatg

SEQ ID NO: 120736 - DNA, 15 bp, Homo sapiens
tatttcaaagactat

SEQ ID NO: 120737 - DNA, 15 bp, Homo sapiens
atatttcaaagacta

SEQ ID NO: 120738 - DNA, 15 bp, Homo sapiens
catatttcaaagact

SEQ ID NO: 120739 - DNA, 15 bp, Homo sapiens
tcatatttcaaagac

SEQ ID NO: 120740 - DNA, 15 bp, Homo sapiens
atcatatttcaaaga

SEQ ID NO: 120741 - DNA, 15 bp, Homo sapiens
gatcatatttcaaag

SEQ ID NO: 120742 - DNA, 15 bp, Homo sapiens
agatcatatttcaaa

SEQ ID NO: 120743 - DNA, 15 bp, Homo sapiens
cagatcatatttcaa

SEQ ID NO: 120744 - DNA, 15 bp, Homo sapiens
acagatcatatttca

SEQ ID NO: 120745 - DNA, 15 bp, Homo sapiens
aacagatcatatttc

SEQ ID NO: 120746 - DNA, 15 bp, Homo sapiens
gaacagatcatattt

SEQ ID NO: 120747 - DNA, 15 bp, Homo sapiens
agaacagatcatatt

SEQ ID NO: 120748 - DNA, 15 bp, Homo sapiens
aagaacagatcatat

SEQ ID NO: 120749 - DNA, 15 bp, Homo sapiens
aaagaacagatcata

SEQ ID NO: 120750 - DNA, 15 bp, Homo sapiens
aaaagaacagatcat

SEQ ID NO: 120751 - DNA, 15 bp, Homo sapiens
aaaaagaacagatca

SEQ ID NO: 120752 - DNA, 15 bp, Homo sapiens
aaaaaagaacagatc

SEQ ID NO: 120753 - DNA, 15 bp, Homo sapiens
aaaaaaagaacagat

SEQ ID NO: 120754 - DNA, 15 bp, Homo sapiens
aaaaaaaagaacaga

SEQ ID NO: 120755 - DNA, 15 bp, Homo sapiens
aaaaaaaaagaacag

SEQ ID NO: 120756 - DNA, 15 bp, Homo sapiens
taaaaaaaaagaaca

SEQ ID NO: 120757 - DNA, 15 bp, Homo sapiens
ataaaaaaaaagaac

SEQ ID NO: 120758 - DNA, 15 bp, Homo sapiens
aataaaaaaaaagaa

SEQ ID NO: 120759 - DNA, 15 bp, Homo sapiens
taataaaaaaaaaga

SEQ ID NO: 120760 - DNA, 15 bp, Homo sapiens
ataataaaaaaaaag

SEQ ID NO: 120761 - DNA, 15 bp, Homo sapiens
aataataaaaaaaaa

SEQ ID NO: 120762 - DNA, 15 bp, Homo sapiens
aaataataaaaaaaa

SEQ ID NO: 120763 - DNA, 15 bp, Homo sapiens
taaataataaaaaaa

SEQ ID NO: 120764 - DNA, 15 bp, Homo sapiens
ttaaataataaaaaa

SEQ ID NO: 120765 - DNA, 15 bp, Homo sapiens
cttaaataataaaaa

SEQ ID NO: 120766 - DNA, 15 bp, Homo sapiens
acttaaataataaaa

SEQ ID NO: 120767 - DNA, 15 bp, Homo sapiens
aacttaaataataaa

SEQ ID NO: 120768 - DNA, 15 bp, Homo sapiens
aaacttaaataataa

SEQ ID NO: 120769 - DNA, 15 bp, Homo sapiens
aaaacttaaataata

SEQ ID NO: 120770 - DNA, 15 bp, Homo sapiens
taaaacttaaataat

SEQ ID NO: 120771 - DNA, 15 bp, Homo sapiens
ctaaaacttaaataa

SEQ ID NO: 120772 - DNA, 15 bp, Homo sapiens
cctaaaacttaaata

SEQ ID NO: 120773 - DNA, 15 bp, Homo sapiens
ccctaaaacttaaat

SEQ ID NO: 120774 - DNA, 15 bp, Homo sapiens
accctaaaacttaaa

SEQ ID NO: 120775 - DNA, 15 bp, Homo sapiens
taccctaaaacttaa

SEQ ID NO: 120776 - DNA, 15 bp, Homo sapiens
gtaccctaaaactta

SEQ ID NO: 120777 - DNA, 15 bp, Homo sapiens
tgtaccctaaaactt

SEQ ID NO: 120778 - DNA, 15 bp, Homo sapiens
atgtaccctaaaact

SEQ ID NO: 120779 - DNA, 15 bp, Homo sapiens
catgtaccctaaaac

SEQ ID NO: 120780 - DNA, 15 bp, Homo sapiens
acatgtaccctaaaa

SEQ ID NO: 120781 - DNA, 15 bp, Homo sapiens
cacatgtaccctaaa

SEQ ID NO: 120782 - DNA, 15 bp, Homo sapiens
gcacatgtaccctaa

SEQ ID NO: 120783 - DNA, 15 bp, Homo sapiens
tgcacatgtacccta

SEQ ID NO: 120784 - DNA, 15 bp, Homo sapiens
gtgcacatgtaccct

SEQ ID NO: 120785 - DNA, 15 bp, Homo sapiens
tgtgcacatgtaccc

SEQ ID NO: 120786 - DNA, 15 bp, Homo sapiens
ttgtgcacatgtacc

SEQ ID NO: 120787 - DNA, 15 bp, Homo sapiens
attgtgcacatgtac

SEQ ID NO: 120788 - DNA, 15 bp, Homo sapiens
cattgtgcacatgta

SEQ ID NO: 120789 - DNA, 15 bp, Homo sapiens
acattgtgcacatgt

SEQ ID NO: 120790 - DNA, 15 bp, Homo sapiens
cacattgtgcacatg

SEQ ID NO: 120791 - DNA, 15 bp, Homo sapiens
gcacattgtgcacat

SEQ ID NO: 120792 - DNA, 15 bp, Homo sapiens
tgcacattgtgcaca

SEQ ID NO: 120793 - DNA, 15 bp, Homo sapiens
ctgcacattgtgcac

SEQ ID NO: 120794 - DNA, 15 bp, Homo sapiens
cctgcacattgtgca

SEQ ID NO: 120795 - DNA, 15 bp, Homo sapiens
acctgcacattgtgc

SEQ ID NO: 120796 - DNA, 15 bp, Homo sapiens
aacctgcacattgtg

SEQ ID NO: 120797 - DNA, 15 bp, Homo sapiens
taacctgcacattgt

SEQ ID NO: 120798 - DNA, 15 bp, Homo sapiens
ctaacctgcacattg

SEQ ID NO: 120799 - DNA, 15 bp, Homo sapiens
actaacctgcacatt

SEQ ID NO: 120800 - DNA, 15 bp, Homo sapiens
aactaacctgcacat

SEQ ID NO: 120801 - DNA, 15 bp, Homo sapiens
taactaacctgcaca

SEQ ID NO: 120802 - DNA, 15 bp, Homo sapiens
gtaactaacctgcac

SEQ ID NO: 120803 - DNA, 15 bp, Homo sapiens
tgtaactaacctgca

SEQ ID NO: 120804 - DNA, 15 bp, Homo sapiens
atgtaactaacctgc

SEQ ID NO: 120805 - DNA, 15 bp, Homo sapiens
tatgtaactaacctg

SEQ ID NO: 120806 - DNA, 15 bp, Homo sapiens
atatgtaactaacct

SEQ ID NO: 120807 - DNA, 15 bp, Homo sapiens
catatgtaactaacc

SEQ ID NO: 120808 - DNA, 15 bp, Homo sapiens
acatatgtaactaac

SEQ ID NO: 120809 - DNA, 15 bp, Homo sapiens
tacatatgtaactaa

SEQ ID NO: 120810 - DNA, 15 bp, Homo sapiens
atacatatgtaacta

SEQ ID NO: 120811 - DNA, 15 bp, Homo sapiens
tatacatatgtaact

SEQ ID NO: 120812 - DNA, 15 bp, Homo sapiens
gtatacatatgtaac

SEQ ID NO: 120813 - DNA, 15 bp, Homo sapiens
tgtatacatatgtaa

SEQ ID NO: 120814 - DNA, 15 bp, Homo sapiens
gtgtatacatatgta

SEQ ID NO: 120815 - DNA, 15 bp, Homo sapiens
cgtgtatacatatgt

SEQ ID NO: 120816 - DNA, 15 bp, Homo sapiens
acgtgtatacatatg

SEQ ID NO: 120817 - DNA, 15 bp, Homo sapiens
cacgtgtatacatat

SEQ ID NO: 120818 - DNA, 15 bp, Homo sapiens
tcacgtgtatacata

SEQ ID NO: 120819 - DNA, 15 bp, Homo sapiens
gtcacgtgtatacat

SEQ ID NO: 120820 - DNA, 15 bp, Homo sapiens
tgtcacgtgtataca

SEQ ID NO: 120821 - DNA, 15 bp, Homo sapiens
atgtcacgtgtatac

SEQ ID NO: 120822 - DNA, 15 bp, Homo sapiens
catgtcacgtgtata

SEQ ID NO: 120823 - DNA, 15 bp, Homo sapiens
gcatgtcacgtgtat

SEQ ID NO: 120824 - DNA, 15 bp, Homo sapiens
agcatgtcacgtgta

SEQ ID NO: 120825 - DNA, 15 bp, Homo sapiens
cagcatgtcacgtgt

SEQ ID NO: 120826 - DNA, 15 bp, Homo sapiens
ccagcatgtcacgtg

SEQ ID NO: 120827 - DNA, 15 bp, Homo sapiens
accagcatgtcacgt

SEQ ID NO: 120828 - DNA, 15 bp, Homo sapiens
caccagcatgtcacg

SEQ ID NO: 120829 - DNA, 15 bp, Homo sapiens
gcaccagcatgtcac

SEQ ID NO: 120830 - DNA, 15 bp, Homo sapiens
cgcaccagcatgtca

SEQ ID NO: 120831 - DNA, 15 bp, Homo sapiens
gcgcaccagcatgtc

SEQ ID NO: 120832 - DNA, 15 bp, Homo sapiens
agcgcaccagcatgt

SEQ ID NO: 120833 - DNA, 15 bp, Homo sapiens
cagcgcaccagcatg

SEQ ID NO: 120834 - DNA, 15 bp, Homo sapiens
gcagcgcaccagcat

SEQ ID NO: 120835 - DNA, 15 bp, Homo sapiens
tgcagcgcaccagca

SEQ ID NO: 120836 - DNA, 15 bp, Homo sapiens
gtgcagcgcaccagc

SEQ ID NO: 120837 - DNA, 15 bp, Homo sapiens
ggtgcagcgcaccag

SEQ ID NO: 120838 - DNA, 15 bp, Homo sapiens
gggtgcagcgcacca

SEQ ID NO: 120839 - DNA, 15 bp, Homo sapiens
tgggtgcagcgcacc

SEQ ID NO: 120840 - DNA, 15 bp, Homo sapiens
gtgggtgcagcgcac

SEQ ID NO: 120841 - DNA, 15 bp, Homo sapiens
agtgggtgcagcgca

SEQ ID NO: 120842 - DNA, 15 bp, Homo sapiens
tagtgggtgcagcgc

SEQ ID NO: 120843 - DNA, 15 bp, Homo sapiens
ttagtgggtgcagcg

SEQ ID NO: 120844 - DNA, 15 bp, Homo sapiens
gttagtgggtgcagc

SEQ ID NO: 120845 - DNA, 15 bp, Homo sapiens
agttagtgggtgcag

SEQ ID NO: 120846 - DNA, 15 bp, Homo sapiens
aagttagtgggtgca

SEQ ID NO: 120847 - DNA, 15 bp, Homo sapiens
caagttagtgggtgc

SEQ ID NO: 120848 - DNA, 15 bp, Homo sapiens
acaagttagtgggtg

SEQ ID NO: 120849 - DNA, 15 bp, Homo sapiens
gacaagttagtgggt

SEQ ID NO: 120850 - DNA, 15 bp, Homo sapiens
tgacaagttagtggg

SEQ ID NO: 120851 - DNA, 15 bp, Homo sapiens
atgacaagttagtgg

SEQ ID NO: 120852 - DNA, 15 bp, Homo sapiens
gatgacaagttagtg

SEQ ID NO: 120853 - DNA, 15 bp, Homo sapiens
agatgacaagttagt

SEQ ID NO: 120854 - DNA, 15 bp, Homo sapiens
tagatgacaagttag

SEQ ID NO: 120855 - DNA, 15 bp, Homo sapiens
ctagatgacaagtta

SEQ ID NO: 120856 - DNA, 15 bp, Homo sapiens
gctagatgacaagtt

SEQ ID NO: 120857 - DNA, 15 bp, Homo sapiens
tgctagatgacaagt

SEQ ID NO: 120858 - DNA, 15 bp, Homo sapiens
atgctagatgacaag

SEQ ID NO: 120859 - DNA, 15 bp, Homo sapiens
aatgctagatgacaa

SEQ ID NO: 120860 - DNA, 15 bp, Homo sapiens
taatgctagatgaca

SEQ ID NO: 120861 - DNA, 15 bp, Homo sapiens
ctaatgctagatgac

SEQ ID NO: 120862 - DNA, 15 bp, Homo sapiens
cctaatgctagatga

SEQ ID NO: 120863 - DNA, 15 bp, Homo sapiens
acctaatgctagatg

SEQ ID NO: 120864 - DNA, 15 bp, Homo sapiens
tacctaatgctagat

SEQ ID NO: 120865 - DNA, 15 bp, Homo sapiens
atacctaatgctaga

SEQ ID NO: 120866 - DNA, 15 bp, Homo sapiens
tatacctaatgctag

SEQ ID NO: 120867 - DNA, 15 bp, Homo sapiens
atatacctaatgcta

SEQ ID NO: 120868 - DNA, 15 bp, Homo sapiens
gatatacctaatgct

SEQ ID NO: 120869 - DNA, 15 bp, Homo sapiens
agatatacctaatgc

SEQ ID NO: 120870 - DNA, 15 bp, Homo sapiens
gagatatacctaatg

SEQ ID NO: 120871 - DNA, 15 bp, Homo sapiens
ggagatatacctaat

SEQ ID NO: 120872 - DNA, 15 bp, Homo sapiens
gggagatatacctaa

SEQ ID NO: 120873 - DNA, 15 bp, Homo sapiens
tgggagatataccta

SEQ ID NO: 120874 - DNA, 15 bp, Homo sapiens
ttgggagatatacct

SEQ ID NO: 120875 - DNA, 15 bp, Homo sapiens
gttgggagatatacc

SEQ ID NO: 120876 - DNA, 15 bp, Homo sapiens
cgttgggagatatac

SEQ ID NO: 120877 - DNA, 15 bp, Homo sapiens
gcgttgggagatata

SEQ ID NO: 120878 - DNA, 15 bp, Homo sapiens
agcgttgggagatat

SEQ ID NO: 120879 - DNA, 15 bp, Homo sapiens
tagcgttgggagata

SEQ ID NO: 120880 - DNA, 15 bp, Homo sapiens
atagcgttgggagat

SEQ ID NO: 120881 - DNA, 15 bp, Homo sapiens
gatagcgttgggaga

SEQ ID NO: 120882 - DNA, 15 bp, Homo sapiens
ggatagcgttgggag

SEQ ID NO: 120883 - DNA, 15 bp, Homo sapiens
gggatagcgttggga

SEQ ID NO: 120884 - DNA, 15 bp, Homo sapiens
agggatagcgttggg

SEQ ID NO: 120885 - DNA, 15 bp, Homo sapiens
gagggatagcgttgg

SEQ ID NO: 120886 - DNA, 15 bp, Homo sapiens
ggagggatagcgttg

SEQ ID NO: 120887 - DNA, 15 bp, Homo sapiens
gggagggatagcgtt

SEQ ID NO: 120888 - DNA, 15 bp, Homo sapiens
ggggagggatagcgt

SEQ ID NO: 120889 - DNA, 15 bp, Homo sapiens
gggggagggatagcg

SEQ ID NO: 120890 - DNA, 15 bp, Homo sapiens
ggggggagggatagc

SEQ ID NO: 120891 - DNA, 15 bp, Homo sapiens
aggggggagggatag

SEQ ID NO: 120892 - DNA, 15 bp, Homo sapiens
gaggggggagggata

SEQ ID NO: 120893 - DNA, 15 bp, Homo sapiens
ggaggggggagggat

SEQ ID NO: 120894 - DNA, 15 bp, Homo sapiens
gggaggggggaggga

SEQ ID NO: 120895 - DNA, 15 bp, Homo sapiens
ggggaggggggaggg

SEQ ID NO: 120896 - DNA, 15 bp, Homo sapiens
gggggaggggggagg

SEQ ID NO: 120897 - DNA, 15 bp, Homo sapiens
ggggggaggggggag

SEQ ID NO: 120898 - DNA, 15 bp, Homo sapiens
tggggggagggggga

SEQ ID NO: 120899 - DNA, 15 bp, Homo sapiens
gtggggggagggggg

SEQ ID NO: 120900 - DNA, 15 bp, Homo sapiens
ggtggggggaggggg

SEQ ID NO: 120901 - DNA, 15 bp, Homo sapiens
gggtggggggagggg

SEQ ID NO: 120902 - DNA, 15 bp, Homo sapiens
ggggtggggggaggg

SEQ ID NO: 120903 - DNA, 15 bp, Homo sapiens
tggggtggggggagg

SEQ ID NO: 120904 - DNA, 15 bp, Homo sapiens
gtggggtggggggag

SEQ ID NO: 120905 - DNA, 15 bp, Homo sapiens
tgtggggtgggggga

SEQ ID NO: 120906 - DNA, 15 bp, Homo sapiens
ttgtggggtgggggg

SEQ ID NO: 120907 - DNA, 15 bp, Homo sapiens
gttgtggggtggggg

SEQ ID NO: 120908 - DNA, 15 bp, Homo sapiens
tgttgtggggtgggg

SEQ ID NO: 120909 - DNA, 15 bp, Homo sapiens
ctgttgtggggtggg

SEQ ID NO: 120910 - DNA, 15 bp, Homo sapiens
actgttgtggggtgg

SEQ ID NO: 120911 - DNA, 15 bp, Homo sapiens
gactgttgtggggtg

SEQ ID NO: 120912 - DNA, 15 bp, Homo sapiens
ggactgttgtggggt

SEQ ID NO: 120913 - DNA, 15 bp, Homo sapiens
gggactgttgtgggg

SEQ ID NO: 120914 - DNA, 15 bp, Homo sapiens
ggggactgttgtggg

SEQ ID NO: 120915 - DNA, 15 bp, Homo sapiens
tggggactgttgtgg

SEQ ID NO: 120916 - DNA, 15 bp, Homo sapiens
ctggggactgttgtg

SEQ ID NO: 120917 - DNA, 15 bp, Homo sapiens
tctggggactgttgt

SEQ ID NO: 120918 - DNA, 15 bp, Homo sapiens
ctctggggactgttg

SEQ ID NO: 120919 - DNA, 15 bp, Homo sapiens
actctggggactgtt

SEQ ID NO: 120920 - DNA, 15 bp, Homo sapiens
cactctggggactgt

SEQ ID NO: 120921 - DNA, 15 bp, Homo sapiens
acactctggggactg

SEQ ID NO: 120922 - DNA, 15 bp, Homo sapiens
cacactctggggact

SEQ ID NO: 120923 - DNA, 15 bp, Homo sapiens
tcacactctggggac

SEQ ID NO: 120924 - DNA, 15 bp, Homo sapiens
atcacactctgggga

SEQ ID NO: 120925 - DNA, 15 bp, Homo sapiens
catcacactctgggg

SEQ ID NO: 120926 - DNA, 15 bp, Homo sapiens
acatcacactctggg

SEQ ID NO: 120927 - DNA, 15 bp, Homo sapiens
aacatcacactctgg

SEQ ID NO: 120928 - DNA, 15 bp, Homo sapiens
gaacatcacactctg

SEQ ID NO: 120929 - DNA, 15 bp, Homo sapiens
ggaacatcacactct

SEQ ID NO: 120930 - DNA, 15 bp, Homo sapiens
gggaacatcacactc

SEQ ID NO: 120931 - DNA, 15 bp, Homo sapiens
ggggaacatcacact

SEQ ID NO: 120932 - DNA, 15 bp, Homo sapiens
aggggaacatcacac

SEQ ID NO: 120933 - DNA, 15 bp, Homo sapiens
aaggggaacatcaca

SEQ ID NO: 120934 - DNA, 15 bp, Homo sapiens
gaaggggaacatcac

SEQ ID NO: 120935 - DNA, 15 bp, Homo sapiens
ggaaggggaacatca

SEQ ID NO: 120936 - DNA, 15 bp, Homo sapiens
aggaaggggaacatc

SEQ ID NO: 120937 - DNA, 15 bp, Homo sapiens
caggaaggggaacat

SEQ ID NO: 120938 - DNA, 15 bp, Homo sapiens
acaggaaggggaaca

SEQ ID NO: 120939 - DNA, 15 bp, Homo sapiens
cacaggaaggggaac

SEQ ID NO: 120940 - DNA, 15 bp, Homo sapiens
acacaggaaggggaa

SEQ ID NO: 120941 - DNA, 15 bp, Homo sapiens
gacacaggaagggga

SEQ ID NO: 120942 - DNA, 15 bp, Homo sapiens
ggacacaggaagggg

SEQ ID NO: 120943 - DNA, 15 bp, Homo sapiens
tggacacaggaaggg

SEQ ID NO: 120944 - DNA, 15 bp, Homo sapiens
atggacacaggaagg

SEQ ID NO: 120945 - DNA, 15 bp, Homo sapiens
catggacacaggaag

SEQ ID NO: 120946 - DNA, 15 bp, Homo sapiens
acatggacacaggaa

SEQ ID NO: 120947 - DNA, 15 bp, Homo sapiens
cacatggacacagga

SEQ ID NO: 120948 - DNA, 15 bp, Homo sapiens
acacatggacacagg

SEQ ID NO: 120949 - DNA, 15 bp, Homo sapiens
aacacatggacacag

SEQ ID NO: 120950 - DNA, 15 bp, Homo sapiens
gaacacatggacaca

SEQ ID NO: 120951 - DNA, 15 bp, Homo sapiens
agaacacatggacac

SEQ ID NO: 120952 - DNA, 15 bp, Homo sapiens
gagaacacatggaca

SEQ ID NO: 120953 - DNA, 15 bp, Homo sapiens
tgagaacacatggac

SEQ ID NO: 120954 - DNA, 15 bp, Homo sapiens
atgagaacacatgga

SEQ ID NO: 120955 - DNA, 15 bp, Homo sapiens
aatgagaacacatgg

SEQ ID NO: 120956 - DNA, 15 bp, Homo sapiens
caatgagaacacatg

SEQ ID NO: 120957 - DNA, 15 bp, Homo sapiens
acaatgagaacacat

SEQ ID NO: 120958 - DNA, 15 bp, Homo sapiens
aacaatgagaacaca

SEQ ID NO: 120959 - DNA, 15 bp, Homo sapiens
gaacaatgagaacac

SEQ ID NO: 120960 - DNA, 15 bp, Homo sapiens
tgaacaatgagaaca

SEQ ID NO: 120961 - DNA, 15 bp, Homo sapiens
ttgaacaatgagaac

SEQ ID NO: 120962 - DNA, 15 bp, Homo sapiens
attgaacaatgagaa

SEQ ID NO: 120963 - DNA, 15 bp, Homo sapiens
gattgaacaatgaga

SEQ ID NO: 120964 - DNA, 15 bp, Homo sapiens
cgattgaacaatgag

SEQ ID NO: 120965 - DNA, 15 bp, Homo sapiens
tcgattgaacaatga

SEQ ID NO: 120966 - DNA, 15 bp, Homo sapiens
atcgattgaacaatg

SEQ ID NO: 120967 - DNA, 15 bp, Homo sapiens
gatcgattgaacaat

SEQ ID NO: 120968 - DNA, 15 bp, Homo sapiens
agatcgattgaacaa

SEQ ID NO: 120969 - DNA, 15 bp, Homo sapiens
cagatcgattgaaca

SEQ ID NO: 120970 - DNA, 15 bp, Homo sapiens
acagatcgattgaac

SEQ ID NO: 120971 - DNA, 15 bp, Homo sapiens
aacagatcgattgaa

SEQ ID NO: 120972 - DNA, 15 bp, Homo sapiens
gaacagatcgattga

SEQ ID NO: 120973 - DNA, 15 bp, Homo sapiens
agaacagatcgattg

SEQ ID NO: 120974 - DNA, 15 bp, Homo sapiens
aagaacagatcgatt

SEQ ID NO: 120975 - DNA, 15 bp, Homo sapiens
taagaacagatcgat

SEQ ID NO: 120976 - DNA, 15 bp, Homo sapiens
gtaagaacagatcga

SEQ ID NO: 120977 - DNA, 15 bp, Homo sapiens
tgtaagaacagatcg

SEQ ID NO: 120978 - DNA, 15 bp, Homo sapiens
ctgtaagaacagatc

SEQ ID NO: 120979 - DNA, 15 bp, Homo sapiens
gctgtaagaacagat

SEQ ID NO: 120980 - DNA, 15 bp, Homo sapiens
tgctgtaagaacaga

SEQ ID NO: 120981 - DNA, 15 bp, Homo sapiens
atgctgtaagaacag

SEQ ID NO: 120982 - DNA, 15 bp, Homo sapiens
tatgctgtaagaaca

SEQ ID NO: 120983 - DNA, 15 bp, Homo sapiens
gtatgctgtaagaac

SEQ ID NO: 120984 - DNA, 15 bp, Homo sapiens
tgtatgctgtaagaa

SEQ ID NO: 120985 - DNA, 15 bp, Homo sapiens
ttgtatgctgtaaga

SEQ ID NO: 120986 - DNA, 15 bp, Homo sapiens
tttgtatgctgtaag

SEQ ID NO: 120987 - DNA, 15 bp, Homo sapiens
ttttgtatgctgtaa

SEQ ID NO: 120988 - DNA, 15 bp, Homo sapiens
tttttgtatgctgta

SEQ ID NO: 120989 - DNA, 15 bp, Homo sapiens
ttttttgtatgctgt

SEQ ID NO: 120990 - DNA, 15 bp, Homo sapiens
tttttttgtatgctg

SEQ ID NO: 120991 - DNA, 15 bp, Homo sapiens
atttttttgtatgct

SEQ ID NO: 120992 - DNA, 15 bp, Homo sapiens
tatttttttgtatgc

SEQ ID NO: 120993 - DNA, 15 bp, Homo sapiens
atatttttttgtatg

SEQ ID NO: 120994 - DNA, 15 bp, Homo sapiens
aatatttttttgtat

SEQ ID NO: 120995 - DNA, 15 bp, Homo sapiens
aaatatttttttgta

SEQ ID NO: 120996 - DNA, 15 bp, Homo sapiens
caaatatttttttgt

SEQ ID NO: 120997 - DNA, 15 bp, Homo sapiens
acaaatatttttttg

SEQ ID NO: 120998 - DNA, 15 bp, Homo sapiens
aacaaatattttttt

SEQ ID NO: 120999 - DNA, 15 bp, Homo sapiens
taacaaatatttttt

SEQ ID NO: 121000 - DNA, 15 bp, Homo sapiens
ttaacaaatattttt

SEQ ID NO: 121001 - DNA, 15 bp, Homo sapiens
cttaacaaatatttt

SEQ ID NO: 121002 - DNA, 15 bp, Homo sapiens
acttaacaaatattt

SEQ ID NO: 121003 - DNA, 15 bp, Homo sapiens
tacttaacaaatatt

SEQ ID NO: 121004 - DNA, 15 bp, Homo sapiens
atacttaacaaatat

SEQ ID NO: 121005 - DNA, 15 bp, Homo sapiens
catacttaacaaata

SEQ ID NO: 121006 - DNA, 15 bp, Homo sapiens
tcatacttaacaaat

SEQ ID NO: 121007 - DNA, 15 bp, Homo sapiens
atcatacttaacaaa

SEQ ID NO: 121008 - DNA, 15 bp, Homo sapiens
catcatacttaacaa

SEQ ID NO: 121009 - DNA, 15 bp, Homo sapiens
gcatcatacttaaca

SEQ ID NO: 121010 - DNA, 15 bp, Homo sapiens
agcatcatacttaac

SEQ ID NO: 121011 - DNA, 15 bp, Homo sapiens
gagcatcatacttaa

SEQ ID NO: 121012 - DNA, 15 bp, Homo sapiens
tgagcatcatactta

SEQ ID NO: 121013 - DNA, 15 bp, Homo sapiens
ttgagcatcatactt

SEQ ID NO: 121014 - DNA, 15 bp, Homo sapiens
tttgagcatcatact

SEQ ID NO: 121015 - DNA, 15 bp, Homo sapiens
ctttgagcatcatac

SEQ ID NO: 121016 - DNA, 15 bp, Homo sapiens
cctttgagcatcata

SEQ ID NO: 121017 - DNA, 15 bp, Homo sapiens
acctttgagcatcat

SEQ ID NO: 121018 - DNA, 15 bp, Homo sapiens
aacctttgagcatca

SEQ ID NO: 121019 - DNA, 15 bp, Homo sapiens
taacctttgagcatc

SEQ ID NO: 121020 - DNA, 15 bp, Homo sapiens
gtaacctttgagcat

SEQ ID NO: 121021 - DNA, 15 bp, Homo sapiens
tgtaacctttgagca

SEQ ID NO: 121022 - DNA, 15 bp, Homo sapiens
atgtaacctttgagc

SEQ ID NO: 121023 - DNA, 15 bp, Homo sapiens
aatgtaacctttgag

SEQ ID NO: 121024 - DNA, 15 bp, Homo sapiens
aaatgtaacctttga

SEQ ID NO: 121025 - DNA, 15 bp, Homo sapiens
aaaatgtaacctttg

SEQ ID NO: 121026 - DNA, 15 bp, Homo sapiens
gaaaatgtaaccttt

SEQ ID NO: 121027 - DNA, 15 bp, Homo sapiens
tgaaaatgtaacctt

SEQ ID NO: 121028 - DNA, 15 bp, Homo sapiens
ctgaaaatgtaacct

SEQ ID NO: 121029 - DNA, 15 bp, Homo sapiens
tctgaaaatgtaacc

SEQ ID NO: 121030 - DNA, 15 bp, Homo sapiens
ttctgaaaatgtaac

SEQ ID NO: 121031 - DNA, 15 bp, Homo sapiens
cttctgaaaatgtaa

SEQ ID NO: 121032 - DNA, 15 bp, Homo sapiens
ccttctgaaaatgta

SEQ ID NO: 121033 - DNA, 15 bp, Homo sapiens
accttctgaaaatgt

SEQ ID NO: 121034 - DNA, 15 bp, Homo sapiens
taccttctgaaaatg

SEQ ID NO: 121035 - DNA, 15 bp, Homo sapiens
ataccttctgaaaat

SEQ ID NO: 121036 - DNA, 15 bp, Homo sapiens
aataccttctgaaaa

SEQ ID NO: 121037 - DNA, 15 bp, Homo sapiens
gaataccttctgaaa

SEQ ID NO: 121038 - DNA, 15 bp, Homo sapiens
tgaataccttctgaa

SEQ ID NO: 121039 - DNA, 15 bp, Homo sapiens
ttgaataccttctga

SEQ ID NO: 121040 - DNA, 15 bp, Homo sapiens
tttgaataccttctg

SEQ ID NO: 121041 - DNA, 15 bp, Homo sapiens
ttttgaataccttct

SEQ ID NO: 121042 - DNA, 15 bp, Homo sapiens
cttttgaataccttc

SEQ ID NO: 121043 - DNA, 15 bp, Homo sapiens
tcttttgaatacctt

SEQ ID NO: 121044 - DNA, 15 bp, Homo sapiens
ctcttttgaatacct

SEQ ID NO: 121045 - DNA, 15 bp, Homo sapiens
tctcttttgaatacc

SEQ ID NO: 121046 - DNA, 15 bp, Homo sapiens
atctcttttgaatac

SEQ ID NO: 121047 - DNA, 15 bp, Homo sapiens
aatctcttttgaata

SEQ ID NO: 121048 - DNA, 15 bp, Homo sapiens
caatctcttttgaat

SEQ ID NO: 121049 - DNA, 15 bp, Homo sapiens
gcaatctcttttgaa

SEQ ID NO: 121050 - DNA, 15 bp, Homo sapiens
agcaatctcttttga

SEQ ID NO: 121051 - DNA, 15 bp, Homo sapiens
aagcaatctcttttg

SEQ ID NO: 121052 - DNA, 15 bp, Homo sapiens
aaagcaatctctttt

SEQ ID NO: 121053 - DNA, 15 bp, Homo sapiens
aaaagcaatctcttt

SEQ ID NO: 121054 - DNA, 15 bp, Homo sapiens
gaaaagcaatctctt

SEQ ID NO: 121055 - DNA, 15 bp, Homo sapiens
agaaaagcaatctct

SEQ ID NO: 121056 - DNA, 15 bp, Homo sapiens
tagaaaagcaatctc

SEQ ID NO: 121057 - DNA, 15 bp, Homo sapiens
ctagaaaagcaatct

SEQ ID NO: 121058 - DNA, 15 bp, Homo sapiens
actagaaaagcaatc

SEQ ID NO: 121059 - DNA, 15 bp, Homo sapiens
aactagaaaagcaat

SEQ ID NO: 121060 - DNA, 15 bp, Homo sapiens
gaactagaaaagcaa

SEQ ID NO: 121061 - DNA, 15 bp, Homo sapiens
tgaactagaaaagca

SEQ ID NO: 121062 - DNA, 15 bp, Homo sapiens
ttgaactagaaaagc

SEQ ID NO: 121063 - DNA, 15 bp, Homo sapiens
tttgaactagaaaag

SEQ ID NO: 121064 - DNA, 15 bp, Homo sapiens
gtttgaactagaaaa

SEQ ID NO: 121065 - DNA, 15 bp, Homo sapiens
ggtttgaactagaaa

SEQ ID NO: 121066 - DNA, 15 bp, Homo sapiens
aggtttgaactagaa

SEQ ID NO: 121067 - DNA, 15 bp, Homo sapiens
taggtttgaactaga

SEQ ID NO: 121068 - DNA, 15 bp, Homo sapiens
gtaggtttgaactag

SEQ ID NO: 121069 - DNA, 15 bp, Homo sapiens
agtaggtttgaacta

SEQ ID NO: 121070 - DNA, 15 bp, Homo sapiens
tagtaggtttgaact

SEQ ID NO: 121071 - DNA, 15 bp, Homo sapiens
ttagtaggtttgaac

SEQ ID NO: 121072 - DNA, 15 bp, Homo sapiens
attagtaggtttgaa

SEQ ID NO: 121073 - DNA, 15 bp, Homo sapiens
tattagtaggtttga

SEQ ID NO: 121074 - DNA, 15 bp, Homo sapiens
gtattagtaggtttg

SEQ ID NO: 121075 - DNA, 15 bp, Homo sapiens
ggtattagtaggttt

SEQ ID NO: 121076 - DNA, 15 bp, Homo sapiens
aggtattagtaggtt

SEQ ID NO: 121077 - DNA, 15 bp, Homo sapiens
caggtattagtaggt

SEQ ID NO: 121078 - DNA, 15 bp, Homo sapiens
tcaggtattagtagg

SEQ ID NO: 121079 - DNA, 15 bp, Homo sapiens
ttcaggtattagtag

SEQ ID NO: 121080 - DNA, 15 bp, Homo sapiens
tttcaggtattagta

SEQ ID NO: 121081 - DNA, 15 bp, Homo sapiens
ctttcaggtattagt

SEQ ID NO: 121082 - DNA, 15 bp, Homo sapiens
cctttcaggtattag

SEQ ID NO: 121083 - DNA, 15 bp, Homo sapiens
tcctttcaggtatta

SEQ ID NO: 121084 - DNA, 15 bp, Homo sapiens
atcctttcaggtatt

SEQ ID NO: 121085 - DNA, 15 bp, Homo sapiens
tatcctttcaggtat

SEQ ID NO: 121086 - DNA, 15 bp, Homo sapiens
ttatcctttcaggta

SEQ ID NO: 121087 - DNA, 15 bp, Homo sapiens
tttatcctttcaggt

SEQ ID NO: 121088 - DNA, 15 bp, Homo sapiens
atttatcctttcagg

SEQ ID NO: 121089 - DNA, 15 bp, Homo sapiens
gatttatcctttcag

SEQ ID NO: 121090 - DNA, 15 bp, Homo sapiens
agatttatcctttca

SEQ ID NO: 121091 - DNA, 15 bp, Homo sapiens
aagatttatcctttc

SEQ ID NO: 121092 - DNA, 15 bp, Homo sapiens
caagatttatccttt

SEQ ID NO: 121093 - DNA, 15 bp, Homo sapiens
gcaagatttatcctt

SEQ ID NO: 121094 - DNA, 15 bp, Homo sapiens
ggcaagatttatcct

SEQ ID NO: 121095 - DNA, 15 bp, Homo sapiens
gggcaagatttatcc

SEQ ID NO: 121096 - DNA, 15 bp, Homo sapiens
tgggcaagatttatc

SEQ ID NO: 121097 - DNA, 15 bp, Homo sapiens
ctgggcaagatttat

SEQ ID NO: 121098 - DNA, 15 bp, Homo sapiens
gctgggcaagattta

SEQ ID NO: 121099 - DNA, 15 bp, Homo sapiens
ggctgggcaagattt

SEQ ID NO: 121100 - DNA, 15 bp, Homo sapiens
gggctgggcaagatt

SEQ ID NO: 121101 - DNA, 15 bp, Homo sapiens
agggctgggcaagat

SEQ ID NO: 121102 - DNA, 15 bp, Homo sapiens
gagggctgggcaaga

SEQ ID NO: 121103 - DNA, 15 bp, Homo sapiens
ggagggctgggcaag

SEQ ID NO: 121104 - DNA, 15 bp, Homo sapiens
aggagggctgggcaa

SEQ ID NO: 121105 - DNA, 15 bp, Homo sapiens
caggagggctgggca

SEQ ID NO: 121106 - DNA, 15 bp, Homo sapiens
tcaggagggctgggc

SEQ ID NO: 121107 - DNA, 15 bp, Homo sapiens
gtcaggagggctggg

SEQ ID NO: 121108 - DNA, 15 bp, Homo sapiens
agtcaggagggctgg

SEQ ID NO: 121109 - DNA, 15 bp, Homo sapiens
cagtcaggagggctg

SEQ ID NO: 121110 - DNA, 15 bp, Homo sapiens
acagtcaggagggct

SEQ ID NO: 121111 - DNA, 15 bp, Homo sapiens
tacagtcaggagggc

SEQ ID NO: 121112 - DNA, 15 bp, Homo sapiens
atacagtcaggaggg

SEQ ID NO: 121113 - DNA, 15 bp, Homo sapiens
tatacagtcaggagg

SEQ ID NO: 121114 - DNA, 15 bp, Homo sapiens
gtatacagtcaggag

SEQ ID NO: 121115 - DNA, 15 bp, Homo sapiens
ggtatacagtcagga

SEQ ID NO: 121116 - DNA, 15 bp, Homo sapiens
aggtatacagtcagg

SEQ ID NO: 121117 - DNA, 15 bp, Homo sapiens
aaggtatacagtcag

SEQ ID NO: 121118 - DNA, 15 bp, Homo sapiens
aaaggtatacagtca

SEQ ID NO: 121119 - DNA, 15 bp, Homo sapiens
aaaaggtatacagtc

SEQ ID NO: 121120 - DNA, 15 bp, Homo sapiens
taaaaggtatacagt

SEQ ID NO: 121121 - DNA, 15 bp, Homo sapiens
ataaaaggtatacag

SEQ ID NO: 121122 - DNA, 15 bp, Homo sapiens
tataaaaggtataca

SEQ ID NO: 121123 - DNA, 15 bp, Homo sapiens
atataaaaggtatac

SEQ ID NO: 121124 - DNA, 15 bp, Homo sapiens
gatataaaaggtata

SEQ ID NO: 121125 - DNA, 15 bp, Homo sapiens
agatataaaaggtat

SEQ ID NO: 121126 - DNA, 15 bp, Homo sapiens
aagatataaaaggta

SEQ ID NO: 121127 - DNA, 15 bp, Homo sapiens
taagatataaaaggt

SEQ ID NO: 121128 - DNA, 15 bp, Homo sapiens
ttaagatataaaagg

SEQ ID NO: 121129 - DNA, 15 bp, Homo sapiens
tttaagatataaaag

SEQ ID NO: 121130 - DNA, 15 bp, Homo sapiens
ttttaagatataaaa

SEQ ID NO: 121131 - DNA, 15 bp, Homo sapiens
attttaagatataaa

SEQ ID NO: 121132 - DNA, 15 bp, Homo sapiens
aattttaagatataa

SEQ ID NO: 121133 - DNA, 15 bp, Homo sapiens
taattttaagatata

SEQ ID NO: 121134 - DNA, 15 bp, Homo sapiens
ttaattttaagatat

SEQ ID NO: 121135 - DNA, 15 bp, Homo sapiens
tttaattttaagata

SEQ ID NO: 121136 - DNA, 15 bp, Homo sapiens
atttaattttaagat

SEQ ID NO: 121137 - DNA, 15 bp, Homo sapiens
tatttaattttaaga

SEQ ID NO: 121138 - DNA, 15 bp, Homo sapiens
ttatttaattttaag

SEQ ID NO: 121139 - DNA, 15 bp, Homo sapiens
attatttaattttaa

SEQ ID NO: 121140 - DNA, 15 bp, Homo sapiens
aattatttaatttta

SEQ ID NO: 121141 - DNA, 15 bp, Homo sapiens
aaattatttaatttt

SEQ ID NO: 121142 - DNA, 15 bp, Homo sapiens
aaaattatttaattt

SEQ ID NO: 121143 - DNA, 15 bp, Homo sapiens
aaaaattatttaatt

SEQ ID NO: 121144 - DNA, 15 bp, Homo sapiens
gaaaaattatttaat

SEQ ID NO: 121145 - DNA, 15 bp, Homo sapiens
tgaaaaattatttaa

SEQ ID NO: 121146 - DNA, 15 bp, Homo sapiens
ttgaaaaattattta

SEQ ID NO: 121147 - DNA, 15 bp, Homo sapiens
tttgaaaaattattt

SEQ ID NO: 121148 - DNA, 15 bp, Homo sapiens
ttttgaaaaattatt

SEQ ID NO: 121149 - DNA, 15 bp, Homo sapiens
attttgaaaaattat

SEQ ID NO: 121150 - DNA, 15 bp, Homo sapiens
cattttgaaaaatta

SEQ ID NO: 121151 - DNA, 15 bp, Homo sapiens
tcattttgaaaaatt

SEQ ID NO: 121152 - DNA, 15 bp, Homo sapiens
ttcattttgaaaaat

SEQ ID NO: 121153 - DNA, 15 bp, Homo sapiens
attcattttgaaaaa

SEQ ID NO: 121154 - DNA, 15 bp, Homo sapiens
cattcattttgaaaa

SEQ ID NO: 121155 - DNA, 15 bp, Homo sapiens
tcattcattttgaaa

SEQ ID NO: 121156 - DNA, 15 bp, Homo sapiens
atcattcattttgaa

SEQ ID NO: 121157 - DNA, 15 bp, Homo sapiens
tatcattcattttga

SEQ ID NO: 121158 - DNA, 15 bp, Homo sapiens
atatcattcattttg

SEQ ID NO: 121159 - DNA, 15 bp, Homo sapiens
aatatcattcatttt

SEQ ID NO: 121160 - DNA, 15 bp, Homo sapiens
aaatatcattcattt

SEQ ID NO: 121161 - DNA, 15 bp, Homo sapiens
caaatatcattcatt

SEQ ID NO: 121162 - DNA, 15 bp, Homo sapiens
ccaaatatcattcat

SEQ ID NO: 121163 - DNA, 15 bp, Homo sapiens
cccaaatatcattca

SEQ ID NO: 121164 - DNA, 15 bp, Homo sapiens
ccccaaatatcattc

SEQ ID NO: 121165 - DNA, 15 bp, Homo sapiens
tccccaaatatcatt

SEQ ID NO: 121166 - DNA, 15 bp, Homo sapiens
gtccccaaatatcat

SEQ ID NO: 121167 - DNA, 15 bp, Homo sapiens
agtccccaaatatca

SEQ ID NO: 121168 - DNA, 15 bp, Homo sapiens
aagtccccaaatatc

SEQ ID NO: 121169 - DNA, 15 bp, Homo sapiens
aaagtccccaaatat

SEQ ID NO: 121170 - DNA, 15 bp, Homo sapiens
taaagtccccaaata

SEQ ID NO: 121171 - DNA, 15 bp, Homo sapiens
ataaagtccccaaat

SEQ ID NO: 121172 - DNA, 15 bp, Homo sapiens
cataaagtccccaaa

SEQ ID NO: 121173 - DNA, 15 bp, Homo sapiens
tcataaagtccccaa

SEQ ID NO: 121174 - DNA, 15 bp, Homo sapiens
atcataaagtcccca

SEQ ID NO: 121175 - DNA, 15 bp, Homo sapiens
aatcataaagtcccc

SEQ ID NO: 121176 - DNA, 15 bp, Homo sapiens
aaatcataaagtccc

SEQ ID NO: 121177 - DNA, 15 bp, Homo sapiens
caaatcataaagtcc

SEQ ID NO: 121178 - DNA, 15 bp, Homo sapiens
tcaaatcataaagtc

SEQ ID NO: 121179 - DNA, 15 bp, Homo sapiens
ttcaaatcataaagt

SEQ ID NO: 121180 - DNA, 15 bp, Homo sapiens
tttcaaatcataaag

SEQ ID NO: 121181 - DNA, 15 bp, Homo sapiens
atttcaaatcataaa

SEQ ID NO: 121182 - DNA, 15 bp, Homo sapiens
tatttcaaatcataa

SEQ ID NO: 121183 - DNA, 15 bp, Homo sapiens
ctatttcaaatcata

SEQ ID NO: 121184 - DNA, 15 bp, Homo sapiens
tctatttcaaatcat

SEQ ID NO: 121185 - DNA, 15 bp, Homo sapiens
atctatttcaaatca

SEQ ID NO: 121186 - DNA, 15 bp, Homo sapiens
aatctatttcaaatc

SEQ ID NO: 121187 - DNA, 15 bp, Homo sapiens
aaatctatttcaaat

SEQ ID NO: 121188 - DNA, 15 bp, Homo sapiens
caaatctatttcaaa

SEQ ID NO: 121189 - DNA, 15 bp, Homo sapiens
acaaatctatttcaa

SEQ ID NO: 121190 - DNA, 15 bp, Homo sapiens
tacaaatctatttca

SEQ ID NO: 121191 - DNA, 15 bp, Homo sapiens
atacaaatctatttc

SEQ ID NO: 121192 - DNA, 15 bp, Homo sapiens
aatacaaatctattt

SEQ ID NO: 121193 - DNA, 15 bp, Homo sapiens
aaatacaaatctatt

SEQ ID NO: 121194 - DNA, 15 bp, Homo sapiens
caaatacaaatctat

SEQ ID NO: 121195 - DNA, 15 bp, Homo sapiens
tcaaatacaaatcta

SEQ ID NO: 121196 - DNA, 15 bp, Homo sapiens
atcaaatacaaatct

SEQ ID NO: 121197 - DNA, 15 bp, Homo sapiens
gatcaaatacaaatc

SEQ ID NO: 121198 - DNA, 15 bp, Homo sapiens
agatcaaatacaaat

SEQ ID NO: 121199 - DNA, 15 bp, Homo sapiens
aagatcaaatacaaa

SEQ ID NO: 121200 - DNA, 15 bp, Homo sapiens
aaagatcaaatacaa

SEQ ID NO: 121201 - DNA, 15 bp, Homo sapiens
gaaagatcaaataca

SEQ ID NO: 121202 - DNA, 15 bp, Homo sapiens
agaaagatcaaatac

SEQ ID NO: 121203 - DNA, 15 bp, Homo sapiens
aagaaagatcaaata

SEQ ID NO: 121204 - DNA, 15 bp, Homo sapiens
taagaaagatcaaat

SEQ ID NO: 121205 - DNA, 15 bp, Homo sapiens
ataagaaagatcaaa

SEQ ID NO: 121206 - DNA, 15 bp, Homo sapiens
cataagaaagatcaa

SEQ ID NO: 121207 - DNA, 15 bp, Homo sapiens
ccataagaaagatca

SEQ ID NO: 121208 - DNA, 15 bp, Homo sapiens
cccataagaaagatc

SEQ ID NO: 121209 - DNA, 15 bp, Homo sapiens
tcccataagaaagat

SEQ ID NO: 121210 - DNA, 15 bp, Homo sapiens
gtcccataagaaaga

SEQ ID NO: 121211 - DNA, 15 bp, Homo sapiens
agtcccataagaaag

SEQ ID NO: 121212 - DNA, 15 bp, Homo sapiens
tagtcccataagaaa

SEQ ID NO: 121213 - DNA, 15 bp, Homo sapiens
atagtcccataagaa

SEQ ID NO: 121214 - DNA, 15 bp, Homo sapiens
tatagtcccataaga

SEQ ID NO: 121215 - DNA, 15 bp, Homo sapiens
ttatagtcccataag

SEQ ID NO: 121216 - DNA, 15 bp, Homo sapiens
tttatagtcccataa

SEQ ID NO: 121217 - DNA, 15 bp, Homo sapiens
ttttatagtcccata

SEQ ID NO: 121218 - DNA, 15 bp, Homo sapiens
attttatagtcccat

SEQ ID NO: 121219 - DNA, 15 bp, Homo sapiens
cattttatagtccca

SEQ ID NO: 121220 - DNA, 15 bp, Homo sapiens
tcattttatagtccc

SEQ ID NO: 121221 - DNA, 15 bp, Homo sapiens
atcattttatagtcc

SEQ ID NO: 121222 - DNA, 15 bp, Homo sapiens
tatcattttatagtc

SEQ ID NO: 121223 - DNA, 15 bp, Homo sapiens
ctatcattttatagt

SEQ ID NO: 121224 - DNA, 15 bp, Homo sapiens
gctatcattttatag

SEQ ID NO: 121225 - DNA, 15 bp, Homo sapiens
tgctatcattttata

SEQ ID NO: 121226 - DNA, 15 bp, Homo sapiens
atgctatcattttat

SEQ ID NO: 121227 - DNA, 15 bp, Homo sapiens
aatgctatcatttta

SEQ ID NO: 121228 - DNA, 15 bp, Homo sapiens
gaatgctatcatttt

SEQ ID NO: 121229 - DNA, 15 bp, Homo sapiens
tgaatgctatcattt

SEQ ID NO: 121230 - DNA, 15 bp, Homo sapiens
atgaatgctatcatt

SEQ ID NO: 121231 - DNA, 15 bp, Homo sapiens
aatgaatgctatcat

SEQ ID NO: 121232 - DNA, 15 bp, Homo sapiens
aaatgaatgctatca

SEQ ID NO: 121233 - DNA, 15 bp, Homo sapiens
aaaatgaatgctatc

SEQ ID NO: 121234 - DNA, 15 bp, Homo sapiens
taaaatgaatgctat

SEQ ID NO: 121235 - DNA, 15 bp, Homo sapiens
ttaaaatgaatgcta

SEQ ID NO: 121236 - DNA, 15 bp, Homo sapiens
attaaaatgaatgct

SEQ ID NO: 121237 - DNA, 15 bp, Homo sapiens
aattaaaatgaatgc

SEQ ID NO: 121238 - DNA, 15 bp, Homo sapiens
taattaaaatgaatg

SEQ ID NO: 121239 - DNA, 15 bp, Homo sapiens
ataattaaaatgaat

SEQ ID NO: 121240 - DNA, 15 bp, Homo sapiens
gataattaaaatgaa

SEQ ID NO: 121241 - DNA, 15 bp, Homo sapiens
agataattaaaatga

SEQ ID NO: 121242 - DNA, 15 bp, Homo sapiens
gagataattaaaatg

SEQ ID NO: 121243 - DNA, 15 bp, Homo sapiens
tgagataattaaaat

SEQ ID NO: 121244 - DNA, 15 bp, Homo sapiens
ctgagataattaaaa

SEQ ID NO: 121245 - DNA, 15 bp, Homo sapiens
cctgagataattaaa

SEQ ID NO: 121246 - DNA, 15 bp, Homo sapiens
ccctgagataattaa

SEQ ID NO: 121247 - DNA, 15 bp, Homo sapiens
accctgagataatta

SEQ ID NO: 121248 - DNA, 15 bp, Homo sapiens
aaccctgagataatt

SEQ ID NO: 121249 - DNA, 15 bp, Homo sapiens
caaccctgagataat

SEQ ID NO: 121250 - DNA, 15 bp, Homo sapiens
tcaaccctgagataa

SEQ ID NO: 121251 - DNA, 15 bp, Homo sapiens
ttcaaccctgagata

SEQ ID NO: 121252 - DNA, 15 bp, Homo sapiens
cttcaaccctgagat

SEQ ID NO: 121253 - DNA, 15 bp, Homo sapiens
tcttcaaccctgaga

SEQ ID NO: 121254 - DNA, 15 bp, Homo sapiens
atcttcaaccctgag

SEQ ID NO: 121255 - DNA, 15 bp, Homo sapiens
gatcttcaaccctga

SEQ ID NO: 121256 - DNA, 15 bp, Homo sapiens
agatcttcaaccctg

SEQ ID NO: 121257 - DNA, 15 bp, Homo sapiens
cagatcttcaaccct

SEQ ID NO: 121258 - DNA, 15 bp, Homo sapiens
tcagatcttcaaccc

SEQ ID NO: 121259 - DNA, 15 bp, Homo sapiens
ttcagatcttcaacc

SEQ ID NO: 121260 - DNA, 15 bp, Homo sapiens
gttcagatcttcaac

SEQ ID NO: 121261 - DNA, 15 bp, Homo sapiens
tgttcagatcttcaa

SEQ ID NO: 121262 - DNA, 15 bp, Homo sapiens
atgttcagatcttca

SEQ ID NO: 121263 - DNA, 15 bp, Homo sapiens
tatgttcagatcttc

SEQ ID NO: 121264 - DNA, 15 bp, Homo sapiens
ctatgttcagatctt

SEQ ID NO: 121265 - DNA, 15 bp, Homo sapiens
cctatgttcagatct

SEQ ID NO: 121266 - DNA, 15 bp, Homo sapiens
acctatgttcagatc

SEQ ID NO: 121267 - DNA, 15 bp, Homo sapiens
aacctatgttcagat

SEQ ID NO: 121268 - DNA, 15 bp, Homo sapiens
taacctatgttcaga

SEQ ID NO: 121269 - DNA, 15 bp, Homo sapiens
gtaacctatgttcag

SEQ ID NO: 121270 - DNA, 15 bp, Homo sapiens
agtaacctatgttca

SEQ ID NO: 121271 - DNA, 15 bp, Homo sapiens
aagtaacctatgttc

SEQ ID NO: 121272 - DNA, 15 bp, Homo sapiens
taagtaacctatgtt

SEQ ID NO: 121273 - DNA, 15 bp, Homo sapiens
ttaagtaacctatgt

SEQ ID NO: 121274 - DNA, 15 bp, Homo sapiens
tttaagtaacctatg

SEQ ID NO: 121275 - DNA, 15 bp, Homo sapiens
atttaagtaacctat

SEQ ID NO: 121276 - DNA, 15 bp, Homo sapiens
gatttaagtaaccta

SEQ ID NO: 121277 - DNA, 15 bp, Homo sapiens
agatttaagtaacct

SEQ ID NO: 121278 - DNA, 15 bp, Homo sapiens
tagatttaagtaacc

SEQ ID NO: 121279 - DNA, 15 bp, Homo sapiens
ttagatttaagtaac

SEQ ID NO: 121280 - DNA, 15 bp, Homo sapiens
tttagatttaagtaa

SEQ ID NO: 121281 - DNA, 15 bp, Homo sapiens
ttttagatttaagta

SEQ ID NO: 121282 - DNA, 15 bp, Homo sapiens
tttttagatttaagt

SEQ ID NO: 121283 - DNA, 15 bp, Homo sapiens
ctttttagatttaag

SEQ ID NO: 121284 - DNA, 15 bp, Homo sapiens
actttttagatttaa

SEQ ID NO: 121285 - DNA, 15 bp, Homo sapiens
gactttttagattta

SEQ ID NO: 121286 - DNA, 15 bp, Homo sapiens
ggactttttagattt

SEQ ID NO: 121287 - DNA, 15 bp, Homo sapiens
gggactttttagatt

SEQ ID NO: 121288 - DNA, 15 bp, Homo sapiens
tgggactttttagat

SEQ ID NO: 121289 - DNA, 15 bp, Homo sapiens
ttgggactttttaga

SEQ ID NO: 121290 - DNA, 15 bp, Homo sapiens
tttgggactttttag

SEQ ID NO: 121291 - DNA, 15 bp, Homo sapiens
ctttgggacttttta

SEQ ID NO: 121292 - DNA, 15 bp, Homo sapiens
gctttgggacttttt

SEQ ID NO: 121293 - DNA, 15 bp, Homo sapiens
agctttgggactttt

SEQ ID NO: 121294 - DNA, 15 bp, Homo sapiens
tagctttgggacttt

SEQ ID NO: 121295 - DNA, 15 bp, Homo sapiens
ctagctttgggactt

SEQ ID NO: 121296 - DNA, 15 bp, Homo sapiens
tctagctttgggact

SEQ ID NO: 121297 - DNA, 15 bp, Homo sapiens
ttctagctttgggac

SEQ ID NO: 121298 - DNA, 15 bp, Homo sapiens
cttctagctttggga

SEQ ID NO: 121299 - DNA, 15 bp, Homo sapiens
tcttctagctttggg

SEQ ID NO: 121300 - DNA, 15 bp, Homo sapiens
ttcttctagctttgg

SEQ ID NO: 121301 - DNA, 15 bp, Homo sapiens
tttcttctagctttg

SEQ ID NO: 121302 - DNA, 15 bp, Homo sapiens
gtttcttctagcttt

SEQ ID NO: 121303 - DNA, 15 bp, Homo sapiens
agtttcttctagctt

SEQ ID NO: 121304 - DNA, 15 bp, Homo sapiens
aagtttcttctagct

SEQ ID NO: 121305 - DNA, 15 bp, Homo sapiens
gaagtttcttctagc

SEQ ID NO: 121306 - DNA, 15 bp, Homo sapiens
tgaagtttcttctag

SEQ ID NO: 121307 - DNA, 15 bp, Homo sapiens
ctgaagtttcttcta

SEQ ID NO: 121308 - DNA, 15 bp, Homo sapiens
tctgaagtttcttct

SEQ ID NO: 121309 - DNA, 15 bp, Homo sapiens
atctgaagtttcttc

SEQ ID NO: 121310 - DNA, 15 bp, Homo sapiens
catctgaagtttctt

SEQ ID NO: 121311 - DNA, 15 bp, Homo sapiens
acatctgaagtttct

SEQ ID NO: 121312 - DNA, 15 bp, Homo sapiens
gacatctgaagtttc

SEQ ID NO: 121313 - DNA, 15 bp, Homo sapiens
agacatctgaagttt

SEQ ID NO: 121314 - DNA, 15 bp, Homo sapiens
gagacatctgaagtt

SEQ ID NO: 121315 - DNA, 15 bp, Homo sapiens
agagacatctgaagt

SEQ ID NO: 121316 - DNA, 15 bp, Homo sapiens
cagagacatctgaag

SEQ ID NO: 121317 - DNA, 15 bp, Homo sapiens
ccagagacatctgaa

SEQ ID NO: 121318 - DNA, 15 bp, Homo sapiens
cccagagacatctga

SEQ ID NO: 121319 - DNA, 15 bp, Homo sapiens
tcccagagacatctg

SEQ ID NO: 121320 - DNA, 15 bp, Homo sapiens
gtcccagagacatct

SEQ ID NO: 121321 - DNA, 15 bp, Homo sapiens
agtcccagagacatc

SEQ ID NO: 121322 - DNA, 15 bp, Homo sapiens
aagtcccagagacat

SEQ ID NO: 121323 - DNA, 15 bp, Homo sapiens
aaagtcccagagaca

SEQ ID NO: 121324 - DNA, 15 bp, Homo sapiens
gaaagtcccagagac

SEQ ID NO: 121325 - DNA, 15 bp, Homo sapiens
agaaagtcccagaga

SEQ ID NO: 121326 - DNA, 15 bp, Homo sapiens
cagaaagtcccagag

SEQ ID NO: 121327 - DNA, 15 bp, Homo sapiens
gcagaaagtcccaga

SEQ ID NO: 121328 - DNA, 15 bp, Homo sapiens
tgcagaaagtcccag

SEQ ID NO: 121329 - DNA, 15 bp, Homo sapiens
ttgcagaaagtccca

SEQ ID NO: 121330 - DNA, 15 bp, Homo sapiens
tttgcagaaagtccc

SEQ ID NO: 121331 - DNA, 15 bp, Homo sapiens
ctttgcagaaagtcc

SEQ ID NO: 121332 - DNA, 15 bp, Homo sapiens
actttgcagaaagtc

SEQ ID NO: 121333 - DNA, 15 bp, Homo sapiens
gactttgcagaaagt

SEQ ID NO: 121334 - DNA, 15 bp, Homo sapiens
tgactttgcagaaag

SEQ ID NO: 121335 - DNA, 15 bp, Homo sapiens
ttgactttgcagaaa

SEQ ID NO: 121336 - DNA, 15 bp, Homo sapiens
attgactttgcagaa

SEQ ID NO: 121337 - DNA, 15 bp, Homo sapiens
tattgactttgcaga

SEQ ID NO: 121338 - DNA, 15 bp, Homo sapiens
ctattgactttgcag

SEQ ID NO: 121339 - DNA, 15 bp, Homo sapiens
actattgactttgca

SEQ ID NO: 121340 - DNA, 15 bp, Homo sapiens
tactattgactttgc

SEQ ID NO: 121341 - DNA, 15 bp, Homo sapiens
ttactattgactttg

SEQ ID NO: 121342 - DNA, 15 bp, Homo sapiens
attactattgacttt

SEQ ID NO: 121343 - DNA, 15 bp, Homo sapiens
aattactattgactt

SEQ ID NO: 121344 - DNA, 15 bp, Homo sapiens
gaattactattgact

SEQ ID NO: 121345 - DNA, 15 bp, Homo sapiens
agaattactattgac

SEQ ID NO: 121346 - DNA, 15 bp, Homo sapiens
gagaattactattga

SEQ ID NO: 121347 - DNA, 15 bp, Homo sapiens
ggagaattactattg

SEQ ID NO: 121348 - DNA, 15 bp, Homo sapiens
tggagaattactatt

SEQ ID NO: 121349 - DNA, 15 bp, Homo sapiens
atggagaattactat

SEQ ID NO: 121350 - DNA, 15 bp, Homo sapiens
aatggagaattacta

SEQ ID NO: 121351 - DNA, 15 bp, Homo sapiens
aaatggagaattact

SEQ ID NO: 121352 - DNA, 15 bp, Homo sapiens
aaaatggagaattac

SEQ ID NO: 121353 - DNA, 15 bp, Homo sapiens
caaaatggagaatta

SEQ ID NO: 121354 - DNA, 15 bp, Homo sapiens
tcaaaatggagaatt

SEQ ID NO: 121355 - DNA, 15 bp, Homo sapiens
gtcaaaatggagaat

SEQ ID NO: 121356 - DNA, 15 bp, Homo sapiens
agtcaaaatggagaa

SEQ ID NO: 121357 - DNA, 15 bp, Homo sapiens
aagtcaaaatggaga

SEQ ID NO: 121358 - DNA, 15 bp, Homo sapiens
caagtcaaaatggag

SEQ ID NO: 121359 - DNA, 15 bp, Homo sapiens
tcaagtcaaaatgga

SEQ ID NO: 121360 - DNA, 15 bp, Homo sapiens
ctcaagtcaaaatgg

SEQ ID NO: 121361 - DNA, 15 bp, Homo sapiens
actcaagtcaaaatg

SEQ ID NO: 121362 - DNA, 15 bp, Homo sapiens
tactcaagtcaaaat

SEQ ID NO: 121363 - DNA, 15 bp, Homo sapiens
ctactcaagtcaaaa

SEQ ID NO: 121364 - DNA, 15 bp, Homo sapiens
actactcaagtcaaa

SEQ ID NO: 121365 - DNA, 15 bp, Homo sapiens
cactactcaagtcaa

SEQ ID NO: 121366 - DNA, 15 bp, Homo sapiens
acactactcaagtca

SEQ ID NO: 121367 - DNA, 15 bp, Homo sapiens
aacactactcaagtc

SEQ ID NO: 121368 - DNA, 15 bp, Homo sapiens
aaacactactcaagt

SEQ ID NO: 121369 - DNA, 15 bp, Homo sapiens
aaaacactactcaag

SEQ ID NO: 121370 - DNA, 15 bp, Homo sapiens
taaaacactactcaa

SEQ ID NO: 121371 - DNA, 15 bp, Homo sapiens
ataaaacactactca

SEQ ID NO: 121372 - DNA, 15 bp, Homo sapiens
gataaaacactactc

SEQ ID NO: 121373 - DNA, 15 bp, Homo sapiens
tgataaaacactact

SEQ ID NO: 121374 - DNA, 15 bp, Homo sapiens
gtgataaaacactac

SEQ ID NO: 121375 - DNA, 15 bp, Homo sapiens
ggtgataaaacacta

SEQ ID NO: 121376 - DNA, 15 bp, Homo sapiens
tggtgataaaacact

SEQ ID NO: 121377 - DNA, 15 bp, Homo sapiens
atggtgataaaacac

SEQ ID NO: 121378 - DNA, 15 bp, Homo sapiens
gatggtgataaaaca

SEQ ID NO: 121379 - DNA, 15 bp, Homo sapiens
tgatggtgataaaac

SEQ ID NO: 121380 - DNA, 15 bp, Homo sapiens
gtgatggtgataaaa

SEQ ID NO: 121381 - DNA, 15 bp, Homo sapiens
ggtgatggtgataaa

SEQ ID NO: 121382 - DNA, 15 bp, Homo sapiens
tggtgatggtgataa

SEQ ID NO: 121383 - DNA, 15 bp, Homo sapiens
atggtgatggtgata

SEQ ID NO: 121384 - DNA, 15 bp, Homo sapiens
gatggtgatggtgat

SEQ ID NO: 121385 - DNA, 15 bp, Homo sapiens
cgatggtgatggtga

SEQ ID NO: 121386 - DNA, 15 bp, Homo sapiens
acgatggtgatggtg

SEQ ID NO: 121387 - DNA, 15 bp, Homo sapiens
cacgatggtgatggt

SEQ ID NO: 121388 - DNA, 15 bp, Homo sapiens
tcacgatggtgatgg

SEQ ID NO: 121389 - DNA, 15 bp, Homo sapiens
ctcacgatggtgatg

SEQ ID NO: 121390 - DNA, 15 bp, Homo sapiens
actcacgatggtgat

SEQ ID NO: 121391 - DNA, 15 bp, Homo sapiens
tactcacgatggtga

SEQ ID NO: 121392 - DNA, 15 bp, Homo sapiens
atactcacgatggtg

SEQ ID NO: 121393 - DNA, 15 bp, Homo sapiens
gatactcacgatggt

SEQ ID NO: 121394 - DNA, 15 bp, Homo sapiens
tgatactcacgatgg

SEQ ID NO: 121395 - DNA, 15 bp, Homo sapiens
ctgatactcacgatg

SEQ ID NO: 121396 - DNA, 15 bp, Homo sapiens
gctgatactcacgat

SEQ ID NO: 121397 - DNA, 15 bp, Homo sapiens
tgctgatactcacga

SEQ ID NO: 121398 - DNA, 15 bp, Homo sapiens
ttgctgatactcacg

SEQ ID NO: 121399 - DNA, 15 bp, Homo sapiens
tttgctgatactcac

SEQ ID NO: 121400 - DNA, 15 bp, Homo sapiens
atttgctgatactca

SEQ ID NO: 121401 - DNA, 15 bp, Homo sapiens
tatttgctgatactc

SEQ ID NO: 121402 - DNA, 15 bp, Homo sapiens
atatttgctgatact

SEQ ID NO: 121403 - DNA, 15 bp, Homo sapiens
aatatttgctgatac

SEQ ID NO: 121404 - DNA, 15 bp, Homo sapiens
aaatatttgctgata

SEQ ID NO: 121405 - DNA, 15 bp, Homo sapiens
taaatatttgctgat

SEQ ID NO: 121406 - DNA, 15 bp, Homo sapiens
ctaaatatttgctga

SEQ ID NO: 121407 - DNA, 15 bp, Homo sapiens
cctaaatatttgctg

SEQ ID NO: 121408 - DNA, 15 bp, Homo sapiens
tcctaaatatttgct

SEQ ID NO: 121409 - DNA, 15 bp, Homo sapiens
ctcctaaatatttgc

SEQ ID NO: 121410 - DNA, 15 bp, Homo sapiens
gctcctaaatatttg

SEQ ID NO: 121411 - DNA, 15 bp, Homo sapiens
agctcctaaatattt

SEQ ID NO: 121412 - DNA, 15 bp, Homo sapiens
gagctcctaaatatt

SEQ ID NO: 121413 - DNA, 15 bp, Homo sapiens
agagctcctaaatat

SEQ ID NO: 121414 - DNA, 15 bp, Homo sapiens
aagagctcctaaata

SEQ ID NO: 121415 - DNA, 15 bp, Homo sapiens
gaagagctcctaaat

SEQ ID NO: 121416 - DNA, 15 bp, Homo sapiens
tgaagagctcctaaa

SEQ ID NO: 121417 - DNA, 15 bp, Homo sapiens
gtgaagagctcctaa

SEQ ID NO: 121418 - DNA, 15 bp, Homo sapiens
ggtgaagagctccta

SEQ ID NO: 121419 - DNA, 15 bp, Homo sapiens
tggtgaagagctcct

SEQ ID NO: 121420 - DNA, 15 bp, Homo sapiens
ttggtgaagagctcc

SEQ ID NO: 121421 - DNA, 15 bp, Homo sapiens
attggtgaagagctc

SEQ ID NO: 121422 - DNA, 15 bp, Homo sapiens
tattggtgaagagct

SEQ ID NO: 121423 - DNA, 15 bp, Homo sapiens
gtattggtgaagagc

SEQ ID NO: 121424 - DNA, 15 bp, Homo sapiens
agtattggtgaagag

SEQ ID NO: 121425 - DNA, 15 bp, Homo sapiens
gagtattggtgaaga

SEQ ID NO: 121426 - DNA, 15 bp, Homo sapiens
ggagtattggtgaag

SEQ ID NO: 121427 - DNA, 15 bp, Homo sapiens
aggagtattggtgaa

SEQ ID NO: 121428 - DNA, 15 bp, Homo sapiens
taggagtattggtga

SEQ ID NO: 121429 - DNA, 15 bp, Homo sapiens
ttaggagtattggtg

SEQ ID NO: 121430 - DNA, 15 bp, Homo sapiens
tttaggagtattggt

SEQ ID NO: 121431 - DNA, 15 bp, Homo sapiens
atttaggagtattgg

SEQ ID NO: 121432 - DNA, 15 bp, Homo sapiens
catttaggagtattg

SEQ ID NO: 121433 - DNA, 15 bp, Homo sapiens
gcatttaggagtatt

SEQ ID NO: 121434 - DNA, 15 bp, Homo sapiens
agcatttaggagtat

SEQ ID NO: 121435 - DNA, 15 bp, Homo sapiens
cagcatttaggagta

SEQ ID NO: 121436 - DNA, 15 bp, Homo sapiens
gcagcatttaggagt

SEQ ID NO: 121437 - DNA, 15 bp, Homo sapiens
tgcagcatttaggag

SEQ ID NO: 121438 - DNA, 15 bp, Homo sapiens
ctgcagcatttagga

SEQ ID NO: 121439 - DNA, 15 bp, Homo sapiens
tctgcagcatttagg

SEQ ID NO: 121440 - DNA, 15 bp, Homo sapiens
atctgcagcatttag

SEQ ID NO: 121441 - DNA, 15 bp, Homo sapiens
tatctgcagcattta

SEQ ID NO: 121442 - DNA, 15 bp, Homo sapiens
atatctgcagcattt

SEQ ID NO: 121443 - DNA, 15 bp, Homo sapiens
gatatctgcagcatt

SEQ ID NO: 121444 - DNA, 15 bp, Homo sapiens
agatatctgcagcat

SEQ ID NO: 121445 - DNA, 15 bp, Homo sapiens
aagatatctgcagca

SEQ ID NO: 121446 - DNA, 15 bp, Homo sapiens
aaagatatctgcagc

SEQ ID NO: 121447 - DNA, 15 bp, Homo sapiens
taaagatatctgcag

SEQ ID NO: 121448 - DNA, 15 bp, Homo sapiens
ctaaagatatctgca

SEQ ID NO: 121449 - DNA, 15 bp, Homo sapiens
actaaagatatctgc

SEQ ID NO: 121450 - DNA, 15 bp, Homo sapiens
tactaaagatatctg

SEQ ID NO: 121451 - DNA, 15 bp, Homo sapiens
ctactaaagatatct

SEQ ID NO: 121452 - DNA, 15 bp, Homo sapiens
tctactaaagatatc

SEQ ID NO: 121453 - DNA, 15 bp, Homo sapiens
ttctactaaagatat

SEQ ID NO: 121454 - DNA, 15 bp, Homo sapiens
gttctactaaagata

SEQ ID NO: 121455 - DNA, 15 bp, Homo sapiens
tgttctactaaagat

SEQ ID NO: 121456 - DNA, 15 bp, Homo sapiens
atgttctactaaaga

SEQ ID NO: 121457 - DNA, 15 bp, Homo sapiens
tatgttctactaaag

SEQ ID NO: 121458 - DNA, 15 bp, Homo sapiens
atatgttctactaaa

SEQ ID NO: 121459 - DNA, 15 bp, Homo sapiens
gatatgttctactaa

SEQ ID NO: 121460 - DNA, 15 bp, Homo sapiens
tgatatgttctacta

SEQ ID NO: 121461 - DNA, 15 bp, Homo sapiens
ttgatatgttctact

SEQ ID NO: 121462 - DNA, 15 bp, Homo sapiens
tttgatatgttctac

SEQ ID NO: 121463 - DNA, 15 bp, Homo sapiens
ttttgatatgttcta

SEQ ID NO: 121464 - DNA, 15 bp, Homo sapiens
gttttgatatgttct

SEQ ID NO: 121465 - DNA, 15 bp, Homo sapiens
ggttttgatatgttc

SEQ ID NO: 121466 - DNA, 15 bp, Homo sapiens
tggttttgatatgtt

SEQ ID NO: 121467 - DNA, 15 bp, Homo sapiens
ctggttttgatatgt

SEQ ID NO: 121468 - DNA, 15 bp, Homo sapiens
cctggttttgatatg

SEQ ID NO: 121469 - DNA, 15 bp, Homo sapiens
acctggttttgatat

SEQ ID NO: 121470 - DNA, 15 bp, Homo sapiens
cacctggttttgata

SEQ ID NO: 121471 - DNA, 15 bp, Homo sapiens
gcacctggttttgat

SEQ ID NO: 121472 - DNA, 15 bp, Homo sapiens
tgcacctggttttga

SEQ ID NO: 121473 - DNA, 15 bp, Homo sapiens
ctgcacctggttttg

SEQ ID NO: 121474 - DNA, 15 bp, Homo sapiens
actgcacctggtttt

SEQ ID NO: 121475 - DNA, 15 bp, Homo sapiens
aactgcacctggttt

SEQ ID NO: 121476 - DNA, 15 bp, Homo sapiens
aaactgcacctggtt

SEQ ID NO: 121477 - DNA, 15 bp, Homo sapiens
aaaactgcacctggt

SEQ ID NO: 121478 - DNA, 15 bp, Homo sapiens
taaaactgcacctgg

SEQ ID NO: 121479 - DNA, 15 bp, Homo sapiens
ataaaactgcacctg

SEQ ID NO: 121480 - DNA, 15 bp, Homo sapiens
gataaaactgcacct

SEQ ID NO: 121481 - DNA, 15 bp, Homo sapiens
tgataaaactgcacc

SEQ ID NO: 121482 - DNA, 15 bp, Homo sapiens
ttgataaaactgcac

SEQ ID NO: 121483 - DNA, 15 bp, Homo sapiens
cttgataaaactgca

SEQ ID NO: 121484 - DNA, 15 bp, Homo sapiens
tcttgataaaactgc

SEQ ID NO: 121485 - DNA, 15 bp, Homo sapiens
ttcttgataaaactg

SEQ ID NO: 121486 - DNA, 15 bp, Homo sapiens
tttcttgataaaact

SEQ ID NO: 121487 - DNA, 15 bp, Homo sapiens
ctttcttgataaaac

SEQ ID NO: 121488 - DNA, 15 bp, Homo sapiens
gctttcttgataaaa

SEQ ID NO: 121489 - DNA, 15 bp, Homo sapiens
agctttcttgataaa

SEQ ID NO: 121490 - DNA, 15 bp, Homo sapiens
tagctttcttgataa

SEQ ID NO: 121491 - DNA, 15 bp, Homo sapiens
gtagctttcttgata

SEQ ID NO: 121492 - DNA, 15 bp, Homo sapiens
tgtagctttcttgat

SEQ ID NO: 121493 - DNA, 15 bp, Homo sapiens
atgtagctttcttga

SEQ ID NO: 121494 - DNA, 15 bp, Homo sapiens
tatgtagctttcttg

SEQ ID NO: 121495 - DNA, 15 bp, Homo sapiens
atatgtagctttctt

SEQ ID NO: 121496 - DNA, 15 bp, Homo sapiens
catatgtagctttct

SEQ ID NO: 121497 - DNA, 15 bp, Homo sapiens
acatatgtagctttc

SEQ ID NO: 121498 - DNA, 15 bp, Homo sapiens
aacatatgtagcttt

SEQ ID NO: 121499 - DNA, 15 bp, Homo sapiens
aaacatatgtagctt

SEQ ID NO: 121500 - DNA, 15 bp, Homo sapiens
aaaacatatgtagct

SEQ ID NO: 121501 - DNA, 15 bp, Homo sapiens
aaaaacatatgtagc

SEQ ID NO: 121502 - DNA, 15 bp, Homo sapiens
taaaaacatatgtag

SEQ ID NO: 121503 - DNA, 15 bp, Homo sapiens
ttaaaaacatatgta

SEQ ID NO: 121504 - DNA, 15 bp, Homo sapiens
attaaaaacatatgt

SEQ ID NO: 121505 - DNA, 15 bp, Homo sapiens
aattaaaaacatatg

SEQ ID NO: 121506 - DNA, 15 bp, Homo sapiens
aaattaaaaacatat

SEQ ID NO: 121507 - DNA, 15 bp, Homo sapiens
caaattaaaaacata

SEQ ID NO: 121508 - DNA, 15 bp, Homo sapiens
acaaattaaaaacat

SEQ ID NO: 121509 - DNA, 15 bp, Homo sapiens
tacaaattaaaaaca

SEQ ID NO: 121510 - DNA, 15 bp, Homo sapiens
ttacaaattaaaaac

SEQ ID NO: 121511 - DNA, 15 bp, Homo sapiens
tttacaaattaaaaa

SEQ ID NO: 121512 - DNA, 15 bp, Homo sapiens
atttacaaattaaaa

SEQ ID NO: 121513 - DNA, 15 bp, Homo sapiens
tatttacaaattaaa

SEQ ID NO: 121514 - DNA, 15 bp, Homo sapiens
ttatttacaaattaa

SEQ ID NO: 121515 - DNA, 15 bp, Homo sapiens
tttatttacaaatta

SEQ ID NO: 121516 - DNA, 15 bp, Homo sapiens
ttttatttacaaatt

SEQ ID NO: 121517 - DNA, 15 bp, Homo sapiens
attttatttacaaat

SEQ ID NO: 121518 - DNA, 15 bp, Homo sapiens
aattttatttacaaa

SEQ ID NO: 121519 - DNA, 15 bp, Homo sapiens
caattttatttacaa

SEQ ID NO: 121520 - DNA, 15 bp, Homo sapiens
ccaattttatttaca

SEQ ID NO: 121521 - DNA, 15 bp, Homo sapiens
cccaattttatttac

SEQ ID NO: 121522 - DNA, 15 bp, Homo sapiens
tcccaattttattta

SEQ ID NO: 121523 - DNA, 15 bp, Homo sapiens
gtcccaattttattt

SEQ ID NO: 121524 - DNA, 15 bp, Homo sapiens
tgtcccaattttatt

SEQ ID NO: 121525 - DNA, 15 bp, Homo sapiens
atgtcccaattttat

SEQ ID NO: 121526 - DNA, 15 bp, Homo sapiens
tatgtcccaatttta

SEQ ID NO: 121527 - DNA, 15 bp, Homo sapiens
gtatgtcccaatttt

SEQ ID NO: 121528 - DNA, 15 bp, Homo sapiens
agtatgtcccaattt

SEQ ID NO: 121529 - DNA, 15 bp, Homo sapiens
cagtatgtcccaatt

SEQ ID NO: 121530 - DNA, 15 bp, Homo sapiens
gcagtatgtcccaat

SEQ ID NO: 121531 - DNA, 15 bp, Homo sapiens
ggcagtatgtcccaa

SEQ ID NO: 121532 - DNA, 15 bp, Homo sapiens
aggcagtatgtccca

SEQ ID NO: 121533 - DNA, 15 bp, Homo sapiens
taggcagtatgtccc

SEQ ID NO: 121534 - DNA, 15 bp, Homo sapiens
ataggcagtatgtcc

SEQ ID NO: 121535 - DNA, 15 bp, Homo sapiens
tataggcagtatgtc

SEQ ID NO: 121536 - DNA, 15 bp, Homo sapiens
atataggcagtatgt

SEQ ID NO: 121537 - DNA, 15 bp, Homo sapiens
catataggcagtatg

SEQ ID NO: 121538 - DNA, 15 bp, Homo sapiens
acatataggcagtat

SEQ ID NO: 121539 - DNA, 15 bp, Homo sapiens
aacatataggcagta

SEQ ID NO: 121540 - DNA, 15 bp, Homo sapiens
aaacatataggcagt

SEQ ID NO: 121541 - DNA, 15 bp, Homo sapiens
aaaacatataggcag

SEQ ID NO: 121542 - DNA, 15 bp, Homo sapiens
aaaaacatataggca

SEQ ID NO: 121543 - DNA, 15 bp, Homo sapiens
aaaaaacatataggc

SEQ ID NO: 121544 - DNA, 15 bp, Homo sapiens
taaaaaacatatagg

SEQ ID NO: 121545 - DNA, 15 bp, Homo sapiens
ataaaaaacatatag

SEQ ID NO: 121546 - DNA, 15 bp, Homo sapiens
gataaaaaacatata

SEQ ID NO: 121547 - DNA, 15 bp, Homo sapiens
agataaaaaacatat

SEQ ID NO: 121548 - DNA, 15 bp, Homo sapiens
aagataaaaaacata

SEQ ID NO: 121549 - DNA, 15 bp, Homo sapiens
aaagataaaaaacat

SEQ ID NO: 121550 - DNA, 15 bp, Homo sapiens
aaaagataaaaaaca

SEQ ID NO: 121551 - DNA, 15 bp, Homo sapiens
taaaagataaaaaac

SEQ ID NO: 121552 - DNA, 15 bp, Homo sapiens
ttaaaagataaaaaa

SEQ ID NO: 121553 - DNA, 15 bp, Homo sapiens
tttaaaagataaaaa

SEQ ID NO: 121554 - DNA, 15 bp, Homo sapiens
gtttaaaagataaaa

SEQ ID NO: 121555 - DNA, 15 bp, Homo sapiens
agtttaaaagataaa

SEQ ID NO: 121556 - DNA, 15 bp, Homo sapiens
aagtttaaaagataa

SEQ ID NO: 121557 - DNA, 15 bp, Homo sapiens
caagtttaaaagata

SEQ ID NO: 121558 - DNA, 15 bp, Homo sapiens
tcaagtttaaaagat

SEQ ID NO: 121559 - DNA, 15 bp, Homo sapiens
ctcaagtttaaaaga

SEQ ID NO: 121560 - DNA, 15 bp, Homo sapiens
tctcaagtttaaaag

SEQ ID NO: 121561 - DNA, 15 bp, Homo sapiens
atctcaagtttaaaa

SEQ ID NO: 121562 - DNA, 15 bp, Homo sapiens
gatctcaagtttaaa

SEQ ID NO: 121563 - DNA, 15 bp, Homo sapiens
tgatctcaagtttaa

SEQ ID NO: 121564 - DNA, 15 bp, Homo sapiens
atgatctcaagttta

SEQ ID NO: 121565 - DNA, 15 bp, Homo sapiens
catgatctcaagttt

SEQ ID NO: 121566 - DNA, 15 bp, Homo sapiens
ccatgatctcaagtt

SEQ ID NO: 121567 - DNA, 15 bp, Homo sapiens
gccatgatctcaagt

SEQ ID NO: 121568 - DNA, 15 bp, Homo sapiens
ggccatgatctcaag

SEQ ID NO: 121569 - DNA, 15 bp, Homo sapiens
tggccatgatctcaa

SEQ ID NO: 121570 - DNA, 15 bp, Homo sapiens
atggccatgatctca

SEQ ID NO: 121571 - DNA, 15 bp, Homo sapiens
aatggccatgatctc

SEQ ID NO: 121572 - DNA, 15 bp, Homo sapiens
aaatggccatgatct

SEQ ID NO: 121573 - DNA, 15 bp, Homo sapiens
aaaatggccatgatc

SEQ ID NO: 121574 - DNA, 15 bp, Homo sapiens
taaaatggccatgat

SEQ ID NO: 121575 - DNA, 15 bp, Homo sapiens
ataaaatggccatga

SEQ ID NO: 121576 - DNA, 15 bp, Homo sapiens
tataaaatggccatg

SEQ ID NO: 121577 - DNA, 15 bp, Homo sapiens
atataaaatggccat

SEQ ID NO: 121578 - DNA, 15 bp, Homo sapiens
tatataaaatggcca

SEQ ID NO: 121579 - DNA, 15 bp, Homo sapiens
ttatataaaatggcc

SEQ ID NO: 121580 - DNA, 15 bp, Homo sapiens
tttatataaaatggc

SEQ ID NO: 121581 - DNA, 15 bp, Homo sapiens
ctttatataaaatgg

SEQ ID NO: 121582 - DNA, 15 bp, Homo sapiens
actttatataaaatg

SEQ ID NO: 121583 - DNA, 15 bp, Homo sapiens
tactttatataaaat

SEQ ID NO: 121584 - DNA, 15 bp, Homo sapiens
ttactttatataaaa

SEQ ID NO: 121585 - DNA, 15 bp, Homo sapiens
attactttatataaa

SEQ ID NO: 121586 - DNA, 15 bp, Homo sapiens
tattactttatataa

SEQ ID NO: 121587 - DNA, 15 bp, Homo sapiens
gtattactttatata

SEQ ID NO: 121588 - DNA, 15 bp, Homo sapiens
tgtattactttatat

SEQ ID NO: 121589 - DNA, 15 bp, Homo sapiens
atgtattactttata

SEQ ID NO: 121590 - DNA, 15 bp, Homo sapiens
catgtattactttat

SEQ ID NO: 121591 - DNA, 15 bp, Homo sapiens
acatgtattacttta

SEQ ID NO: 121592 - DNA, 15 bp, Homo sapiens
aacatgtattacttt

SEQ ID NO: 121593 - DNA, 15 bp, Homo sapiens
gaacatgtattactt

SEQ ID NO: 121594 - DNA, 15 bp, Homo sapiens
agaacatgtattact

SEQ ID NO: 121595 - DNA, 15 bp, Homo sapiens
aagaacatgtattac

SEQ ID NO: 121596 - DNA, 15 bp, Homo sapiens
aaagaacatgtatta

SEQ ID NO: 121597 - DNA, 15 bp, Homo sapiens
caaagaacatgtatt

SEQ ID NO: 121598 - DNA, 15 bp, Homo sapiens
ccaaagaacatgtat

SEQ ID NO: 121599 - DNA, 15 bp, Homo sapiens
tccaaagaacatgta

SEQ ID NO: 121600 - DNA, 15 bp, Homo sapiens
ttccaaagaacatgt

SEQ ID NO: 121601 - DNA, 15 bp, Homo sapiens
tttccaaagaacatg

SEQ ID NO: 121602 - DNA, 15 bp, Homo sapiens
gtttccaaagaacat

SEQ ID NO: 121603 - DNA, 15 bp, Homo sapiens
agtttccaaagaaca

SEQ ID NO: 121604 - DNA, 15 bp, Homo sapiens
aagtttccaaagaac

SEQ ID NO: 121605 - DNA, 15 bp, Homo sapiens
aaagtttccaaagaa

SEQ ID NO: 121606 - DNA, 15 bp, Homo sapiens
taaagtttccaaaga

SEQ ID NO: 121607 - DNA, 15 bp, Homo sapiens
ttaaagtttccaaag

SEQ ID NO: 121608 - DNA, 15 bp, Homo sapiens
tttaaagtttccaaa

SEQ ID NO: 121609 - DNA, 15 bp, Homo sapiens
ctttaaagtttccaa

SEQ ID NO: 121610 - DNA, 15 bp, Homo sapiens
tctttaaagtttcca

SEQ ID NO: 121611 - DNA, 15 bp, Homo sapiens
ttctttaaagtttcc

SEQ ID NO: 121612 - DNA, 15 bp, Homo sapiens
cttctttaaagtttc

SEQ ID NO: 121613 - DNA, 15 bp, Homo sapiens
tcttctttaaagttt

SEQ ID NO: 121614 - DNA, 15 bp, Homo sapiens
ttcttctttaaagtt

SEQ ID NO: 121615 - DNA, 15 bp, Homo sapiens
tttcttctttaaagt

SEQ ID NO: 121616 - DNA, 15 bp, Homo sapiens
ctttcttctttaaag

SEQ ID NO: 121617 - DNA, 15 bp, Homo sapiens
gctttcttctttaaa

SEQ ID NO: 121618 - DNA, 15 bp, Homo sapiens
tgctttcttctttaa

SEQ ID NO: 121619 - DNA, 15 bp, Homo sapiens
ttgctttcttcttta

SEQ ID NO: 121620 - DNA, 15 bp, Homo sapiens
cttgctttcttcttt

SEQ ID NO: 121621 - DNA, 15 bp, Homo sapiens
ccttgctttcttctt

SEQ ID NO: 121622 - DNA, 15 bp, Homo sapiens
tccttgctttcttct

SEQ ID NO: 121623 - DNA, 15 bp, Homo sapiens
gtccttgctttcttc

SEQ ID NO: 121624 - DNA, 15 bp, Homo sapiens
agtccttgctttctt

SEQ ID NO: 121625 - DNA, 15 bp, Homo sapiens
aagtccttgctttct

SEQ ID NO: 121626 - DNA, 15 bp, Homo sapiens
gaagtccttgctttc

SEQ ID NO: 121627 - DNA, 15 bp, Homo sapiens
agaagtccttgcttt

SEQ ID NO: 121628 - DNA, 15 bp, Homo sapiens
gagaagtccttgctt

SEQ ID NO: 121629 - DNA, 15 bp, Homo sapiens
tgagaagtccttgct

SEQ ID NO: 121630 - DNA, 15 bp, Homo sapiens
atgagaagtccttgc

SEQ ID NO: 121631 - DNA, 15 bp, Homo sapiens
tatgagaagtccttg

SEQ ID NO: 121632 - DNA, 15 bp, Homo sapiens
gtatgagaagtcctt

SEQ ID NO: 121633 - DNA, 15 bp, Homo sapiens
tgtatgagaagtcct

SEQ ID NO: 121634 - DNA, 15 bp, Homo sapiens
atgtatgagaagtcc

SEQ ID NO: 121635 - DNA, 15 bp, Homo sapiens
aatgtatgagaagtc

SEQ ID NO: 121636 - DNA, 15 bp, Homo sapiens
gaatgtatgagaagt

SEQ ID NO: 121637 - DNA, 15 bp, Homo sapiens
agaatgtatgagaag

SEQ ID NO: 121638 - DNA, 15 bp, Homo sapiens
cagaatgtatgagaa

SEQ ID NO: 121639 - DNA, 15 bp, Homo sapiens
acagaatgtatgaga

SEQ ID NO: 121640 - DNA, 15 bp, Homo sapiens
aacagaatgtatgag

SEQ ID NO: 121641 - DNA, 15 bp, Homo sapiens
aaacagaatgtatga

SEQ ID NO: 121642 - DNA, 15 bp, Homo sapiens
taaacagaatgtatg

SEQ ID NO: 121643 - DNA, 15 bp, Homo sapiens
gtaaacagaatgtat

SEQ ID NO: 121644 - DNA, 15 bp, Homo sapiens
cgtaaacagaatgta

SEQ ID NO: 121645 - DNA, 15 bp, Homo sapiens
acgtaaacagaatgt

SEQ ID NO: 121646 - DNA, 15 bp, Homo sapiens
tacgtaaacagaatg

SEQ ID NO: 121647 - DNA, 15 bp, Homo sapiens
ctacgtaaacagaat

SEQ ID NO: 121648 - DNA, 15 bp, Homo sapiens
actacgtaaacagaa

SEQ ID NO: 121649 - DNA, 15 bp, Homo sapiens
aactacgtaaacaga

SEQ ID NO: 121650 - DNA, 15 bp, Homo sapiens
aaactacgtaaacag

SEQ ID NO: 121651 - DNA, 15 bp, Homo sapiens
gaaactacgtaaaca

SEQ ID NO: 121652 - DNA, 15 bp, Homo sapiens
tgaaactacgtaaac

SEQ ID NO: 121653 - DNA, 15 bp, Homo sapiens
ttgaaactacgtaaa

SEQ ID NO: 121654 - DNA, 15 bp, Homo sapiens
attgaaactacgtaa

SEQ ID NO: 121655 - DNA, 15 bp, Homo sapiens
cattgaaactacgta

SEQ ID NO: 121656 - DNA, 15 bp, Homo sapiens
gcattgaaactacgt

SEQ ID NO: 121657 - DNA, 15 bp, Homo sapiens
agcattgaaactacg

SEQ ID NO: 121658 - DNA, 15 bp, Homo sapiens
tagcattgaaactac

SEQ ID NO: 121659 - DNA, 15 bp, Homo sapiens
ttagcattgaaacta

SEQ ID NO: 121660 - DNA, 15 bp, Homo sapiens
attagcattgaaact

SEQ ID NO: 121661 - DNA, 15 bp, Homo sapiens
aattagcattgaaac

SEQ ID NO: 121662 - DNA, 15 bp, Homo sapiens
aaattagcattgaaa

SEQ ID NO: 121663 - DNA, 15 bp, Homo sapiens
taaattagcattgaa

SEQ ID NO: 121664 - DNA, 15 bp, Homo sapiens
ctaaattagcattga

SEQ ID NO: 121665 - DNA, 15 bp, Homo sapiens
gctaaattagcattg

SEQ ID NO: 121666 - DNA, 15 bp, Homo sapiens
ggctaaattagcatt

SEQ ID NO: 121667 - DNA, 15 bp, Homo sapiens
aggctaaattagcat

SEQ ID NO: 121668 - DNA, 15 bp, Homo sapiens
caggctaaattagca

SEQ ID NO: 121669 - DNA, 15 bp, Homo sapiens
gcaggctaaattagc

SEQ ID NO: 121670 - DNA, 15 bp, Homo sapiens
agcaggctaaattag

SEQ ID NO: 121671 - DNA, 15 bp, Homo sapiens
aagcaggctaaatta

SEQ ID NO: 121672 - DNA, 15 bp, Homo sapiens
aaagcaggctaaatt

SEQ ID NO: 121673 - DNA, 15 bp, Homo sapiens
aaaagcaggctaaat

SEQ ID NO: 121674 - DNA, 15 bp, Homo sapiens
aaaaagcaggctaaa

SEQ ID NO: 121675 - DNA, 15 bp, Homo sapiens
aaaaaagcaggctaa

SEQ ID NO: 121676 - DNA, 15 bp, Homo sapiens
caaaaaagcaggcta

SEQ ID NO: 121677 - DNA, 15 bp, Homo sapiens
acaaaaaagcaggct

SEQ ID NO: 121678 - DNA, 15 bp, Homo sapiens
gacaaaaaagcaggc

SEQ ID NO: 121679 - DNA, 15 bp, Homo sapiens
tgacaaaaaagcagg

SEQ ID NO: 121680 - DNA, 15 bp, Homo sapiens
ctgacaaaaaagcag

SEQ ID NO: 121681 - DNA, 15 bp, Homo sapiens
gctgacaaaaaagca

SEQ ID NO: 121682 - DNA, 15 bp, Homo sapiens
tgctgacaaaaaagc

SEQ ID NO: 121683 - DNA, 15 bp, Homo sapiens
atgctgacaaaaaag

SEQ ID NO: 121684 - DNA, 15 bp, Homo sapiens
tatgctgacaaaaaa

SEQ ID NO: 121685 - DNA, 15 bp, Homo sapiens
ctatgctgacaaaaa

SEQ ID NO: 121686 - DNA, 15 bp, Homo sapiens
tctatgctgacaaaa

SEQ ID NO: 121687 - DNA, 15 bp, Homo sapiens
gtctatgctgacaaa

SEQ ID NO: 121688 - DNA, 15 bp, Homo sapiens
agtctatgctgacaa

SEQ ID NO: 121689 - DNA, 15 bp, Homo sapiens
gagtctatgctgaca

SEQ ID NO: 121690 - DNA, 15 bp, Homo sapiens
tgagtctatgctgac

SEQ ID NO: 121691 - DNA, 15 bp, Homo sapiens
atgagtctatgctga

SEQ ID NO: 121692 - DNA, 15 bp, Homo sapiens
tatgagtctatgctg

SEQ ID NO: 121693 - DNA, 15 bp, Homo sapiens
ttatgagtctatgct

SEQ ID NO: 121694 - DNA, 15 bp, Homo sapiens
tttatgagtctatgc

SEQ ID NO: 121695 - DNA, 15 bp, Homo sapiens
gtttatgagtctatg

SEQ ID NO: 121696 - DNA, 15 bp, Homo sapiens
tgtttatgagtctat

SEQ ID NO: 121697 - DNA, 15 bp, Homo sapiens
atgtttatgagtcta

SEQ ID NO: 121698 - DNA, 15 bp, Homo sapiens
gatgtttatgagtct

SEQ ID NO: 121699 - DNA, 15 bp, Homo sapiens
agatgtttatgagtc

SEQ ID NO: 121700 - DNA, 15 bp, Homo sapiens
aagatgtttatgagt

SEQ ID NO: 121701 - DNA, 15 bp, Homo sapiens
gaagatgtttatgag

SEQ ID NO: 121702 - DNA, 15 bp, Homo sapiens
ggaagatgtttatga

SEQ ID NO: 121703 - DNA, 15 bp, Homo sapiens
aggaagatgtttatg

SEQ ID NO: 121704 - DNA, 15 bp, Homo sapiens
aaggaagatgtttat

SEQ ID NO: 121705 - DNA, 15 bp, Homo sapiens
caaggaagatgttta

SEQ ID NO: 121706 - DNA, 15 bp, Homo sapiens
acaaggaagatgttt

SEQ ID NO: 121707 - DNA, 15 bp, Homo sapiens
gacaaggaagatgtt

SEQ ID NO: 121708 - DNA, 15 bp, Homo sapiens
tgacaaggaagatgt

SEQ ID NO: 121709 - DNA, 15 bp, Homo sapiens
atgacaaggaagatg

SEQ ID NO: 121710 - DNA, 15 bp, Homo sapiens
aatgacaaggaagat

SEQ ID NO: 121711 - DNA, 15 bp, Homo sapiens
taatgacaaggaaga

SEQ ID NO: 121712 - DNA, 15 bp, Homo sapiens
ttaatgacaaggaag

SEQ ID NO: 121713 - DNA, 15 bp, Homo sapiens
gttaatgacaaggaa

SEQ ID NO: 121714 - DNA, 15 bp, Homo sapiens
tgttaatgacaagga

SEQ ID NO: 121715 - DNA, 15 bp, Homo sapiens
ttgttaatgacaagg

SEQ ID NO: 121716 - DNA, 15 bp, Homo sapiens
tttgttaatgacaag

SEQ ID NO: 121717 - DNA, 15 bp, Homo sapiens
gtttgttaatgacaa

SEQ ID NO: 121718 - DNA, 15 bp, Homo sapiens
tgtttgttaatgaca

SEQ ID NO: 121719 - DNA, 15 bp, Homo sapiens
gtgtttgttaatgac

SEQ ID NO: 121720 - DNA, 15 bp, Homo sapiens
agtgtttgttaatga

SEQ ID NO: 121721 - DNA, 15 bp, Homo sapiens
tagtgtttgttaatg

SEQ ID NO: 121722 - DNA, 15 bp, Homo sapiens
ctagtgtttgttaat

SEQ ID NO: 121723 - DNA, 15 bp, Homo sapiens
tctagtgtttgttaa

SEQ ID NO: 121724 - DNA, 15 bp, Homo sapiens
ttctagtgtttgtta

SEQ ID NO: 121725 - DNA, 15 bp, Homo sapiens
tttctagtgtttgtt

SEQ ID NO: 121726 - DNA, 15 bp, Homo sapiens
atttctagtgtttgt

SEQ ID NO: 121727 - DNA, 15 bp, Homo sapiens
catttctagtgtttg

SEQ ID NO: 121728 - DNA, 15 bp, Homo sapiens
tcatttctagtgttt

SEQ ID NO: 121729 - DNA, 15 bp, Homo sapiens
atcatttctagtgtt

SEQ ID NO: 121730 - DNA, 15 bp, Homo sapiens
tatcatttctagtgt

SEQ ID NO: 121731 - DNA, 15 bp, Homo sapiens
ttatcatttctagtg

SEQ ID NO: 121732 - DNA, 15 bp, Homo sapiens
tttatcatttctagt

SEQ ID NO: 121733 - DNA, 15 bp, Homo sapiens
atttatcatttctag

SEQ ID NO: 121734 - DNA, 15 bp, Homo sapiens
catttatcatttcta

SEQ ID NO: 121735 - DNA, 15 bp, Homo sapiens
acatttatcatttct

SEQ ID NO: 121736 - DNA, 15 bp, Homo sapiens
tacatttatcatttc

SEQ ID NO: 121737 - DNA, 15 bp, Homo sapiens
atacatttatcattt

SEQ ID NO: 121738 - DNA, 15 bp, Homo sapiens
gatacatttatcatt

SEQ ID NO: 121739 - DNA, 15 bp, Homo sapiens
agatacatttatcat

SEQ ID NO: 121740 - DNA, 15 bp, Homo sapiens
gagatacatttatca

SEQ ID NO: 121741 - DNA, 15 bp, Homo sapiens
ggagatacatttatc

SEQ ID NO: 121742 - DNA, 15 bp, Homo sapiens
gggagatacatttat

SEQ ID NO: 121743 - DNA, 15 bp, Homo sapiens
tgggagatacattta

SEQ ID NO: 121744 - DNA, 15 bp, Homo sapiens
ttgggagatacattt

SEQ ID NO: 121745 - DNA, 15 bp, Homo sapiens
tttgggagatacatt

SEQ ID NO: 121746 - DNA, 15 bp, Homo sapiens
ctttgggagatacat

SEQ ID NO: 121747 - DNA, 15 bp, Homo sapiens
tctttgggagataca

SEQ ID NO: 121748 - DNA, 15 bp, Homo sapiens
ttctttgggagatac

SEQ ID NO: 121749 - DNA, 15 bp, Homo sapiens
tttctttgggagata

SEQ ID NO: 121750 - DNA, 15 bp, Homo sapiens
ttttctttgggagat

SEQ ID NO: 121751 - DNA, 15 bp, Homo sapiens
attttctttgggaga

SEQ ID NO: 121752 - DNA, 15 bp, Homo sapiens
aattttctttgggag

SEQ ID NO: 121753 - DNA, 15 bp, Homo sapiens
taattttctttggga

SEQ ID NO: 121754 - DNA, 15 bp, Homo sapiens
ctaattttctttggg

SEQ ID NO: 121755 - DNA, 15 bp, Homo sapiens
gctaattttctttgg

SEQ ID NO: 121756 - DNA, 15 bp, Homo sapiens
agctaattttctttg

SEQ ID NO: 121757 - DNA, 15 bp, Homo sapiens
aagctaattttcttt

SEQ ID NO: 121758 - DNA, 15 bp, Homo sapiens
caagctaattttctt

SEQ ID NO: 121759 - DNA, 15 bp, Homo sapiens
tcaagctaattttct

SEQ ID NO: 121760 - DNA, 15 bp, Homo sapiens
ttcaagctaattttc

SEQ ID NO: 121761 - DNA, 15 bp, Homo sapiens
cttcaagctaatttt

SEQ ID NO: 121762 - DNA, 15 bp, Homo sapiens
tcttcaagctaattt

SEQ ID NO: 121763 - DNA, 15 bp, Homo sapiens
atcttcaagctaatt

SEQ ID NO: 121764 - DNA, 15 bp, Homo sapiens
tatcttcaagctaat

SEQ ID NO: 121765 - DNA, 15 bp, Homo sapiens
ttatcttcaagctaa

SEQ ID NO: 121766 - DNA, 15 bp, Homo sapiens
tttatcttcaagcta

SEQ ID NO: 121767 - DNA, 15 bp, Homo sapiens
ctttatcttcaagct

SEQ ID NO: 121768 - DNA, 15 bp, Homo sapiens
actttatcttcaagc

SEQ ID NO: 121769 - DNA, 15 bp, Homo sapiens
cactttatcttcaag

SEQ ID NO: 121770 - DNA, 15 bp, Homo sapiens
gcactttatcttcaa

SEQ ID NO: 121771 - DNA, 15 bp, Homo sapiens
tgcactttatcttca

SEQ ID NO: 121772 - DNA, 15 bp, Homo sapiens
ttgcactttatcttc

SEQ ID NO: 121773 - DNA, 15 bp, Homo sapiens
tttgcactttatctt

SEQ ID NO: 121774 - DNA, 15 bp, Homo sapiens
atttgcactttatct

SEQ ID NO: 121775 - DNA, 15 bp, Homo sapiens
tatttgcactttatc

SEQ ID NO: 121776 - DNA, 15 bp, Homo sapiens
ctatttgcactttat

SEQ ID NO: 121777 - DNA, 15 bp, Homo sapiens
actatttgcacttta

SEQ ID NO: 121778 - DNA, 15 bp, Homo sapiens
tactatttgcacttt

SEQ ID NO: 121779 - DNA, 15 bp, Homo sapiens
ctactatttgcactt

SEQ ID NO: 121780 - DNA, 15 bp, Homo sapiens
cctactatttgcact

SEQ ID NO: 121781 - DNA, 15 bp, Homo sapiens
tcctactatttgcac

SEQ ID NO: 121782 - DNA, 15 bp, Homo sapiens
ttcctactatttgca

SEQ ID NO: 121783 - DNA, 15 bp, Homo sapiens
tttcctactatttgc

SEQ ID NO: 121784 - DNA, 15 bp, Homo sapiens
ttttcctactatttg

SEQ ID NO: 121785 - DNA, 15 bp, Homo sapiens
attttcctactattt

SEQ ID NO: 121786 - DNA, 15 bp, Homo sapiens
tattttcctactatt

SEQ ID NO: 121787 - DNA, 15 bp, Homo sapiens
ttattttcctactat

SEQ ID NO: 121788 - DNA, 15 bp, Homo sapiens
attattttcctacta

SEQ ID NO: 121789 - DNA, 15 bp, Homo sapiens
cattattttcctact

SEQ ID NO: 121790 - DNA, 15 bp, Homo sapiens
gcattattttcctac

SEQ ID NO: 121791 - DNA, 15 bp, Homo sapiens
tgcattattttccta

SEQ ID NO: 121792 - DNA, 15 bp, Homo sapiens
ctgcattattttcct

SEQ ID NO: 121793 - DNA, 15 bp, Homo sapiens
tctgcattattttcc

SEQ ID NO: 121794 - DNA, 15 bp, Homo sapiens
ttctgcattattttc

SEQ ID NO: 121795 - DNA, 15 bp, Homo sapiens
cttctgcattatttt

SEQ ID NO: 121796 - DNA, 15 bp, Homo sapiens
acttctgcattattt

SEQ ID NO: 121797 - DNA, 15 bp, Homo sapiens
cacttctgcattatt

SEQ ID NO: 121798 - DNA, 15 bp, Homo sapiens
acacttctgcattat

SEQ ID NO: 121799 - DNA, 15 bp, Homo sapiens
aacacttctgcatta

SEQ ID NO: 121800 - DNA, 15 bp, Homo sapiens
taacacttctgcatt

SEQ ID NO: 121801 - DNA, 15 bp, Homo sapiens
ctaacacttctgcat

SEQ ID NO: 121802 - DNA, 15 bp, Homo sapiens
gctaacacttctgca

SEQ ID NO: 121803 - DNA, 15 bp, Homo sapiens
agctaacacttctgc

SEQ ID NO: 121804 - DNA, 15 bp, Homo sapiens
gagctaacacttctg

SEQ ID NO: 121805 - DNA, 15 bp, Homo sapiens
tgagctaacacttct

SEQ ID NO: 121806 - DNA, 15 bp, Homo sapiens
ttgagctaacacttc

SEQ ID NO: 121807 - DNA, 15 bp, Homo sapiens
gttgagctaacactt

SEQ ID NO: 121808 - DNA, 15 bp, Homo sapiens
agttgagctaacact

SEQ ID NO: 121809 - DNA, 15 bp, Homo sapiens
cagttgagctaacac

SEQ ID NO: 121810 - DNA, 15 bp, Homo sapiens
acagttgagctaaca

SEQ ID NO: 121811 - DNA, 15 bp, Homo sapiens
cacagttgagctaac

SEQ ID NO: 121812 - DNA, 15 bp, Homo sapiens
acacagttgagctaa

SEQ ID NO: 121813 - DNA, 15 bp, Homo sapiens
tacacagttgagcta

SEQ ID NO: 121814 - DNA, 15 bp, Homo sapiens
gtacacagttgagct

SEQ ID NO: 121815 - DNA, 15 bp, Homo sapiens
agtacacagttgagc

SEQ ID NO: 121816 - DNA, 15 bp, Homo sapiens
tagtacacagttgag

SEQ ID NO: 121817 - DNA, 15 bp, Homo sapiens
gtagtacacagttga

SEQ ID NO: 121818 - DNA, 15 bp, Homo sapiens
tgtagtacacagttg

SEQ ID NO: 121819 - DNA, 15 bp, Homo sapiens
ctgtagtacacagtt

SEQ ID NO: 121820 - DNA, 15 bp, Homo sapiens
tctgtagtacacagt

SEQ ID NO: 121821 - DNA, 15 bp, Homo sapiens
gtctgtagtacacag

SEQ ID NO: 121822 - DNA, 15 bp, Homo sapiens
tgtctgtagtacaca

SEQ ID NO: 121823 - DNA, 15 bp, Homo sapiens
ttgtctgtagtacac

SEQ ID NO: 121824 - DNA, 15 bp, Homo sapiens
gttgtctgtagtaca

SEQ ID NO: 121825 - DNA, 15 bp, Homo sapiens
agttgtctgtagtac

SEQ ID NO: 121826 - DNA, 15 bp, Homo sapiens
cagttgtctgtagta

SEQ ID NO: 121827 - DNA, 15 bp, Homo sapiens
ccagttgtctgtagt

SEQ ID NO: 121828 - DNA, 15 bp, Homo sapiens
tccagttgtctgtag

SEQ ID NO: 121829 - DNA, 15 bp, Homo sapiens
ctccagttgtctgta

SEQ ID NO: 121830 - DNA, 15 bp, Homo sapiens
tctccagttgtctgt

SEQ ID NO: 121831 - DNA, 15 bp, Homo sapiens
ttctccagttgtctg

SEQ ID NO: 121832 - DNA, 15 bp, Homo sapiens
tttctccagttgtct

SEQ ID NO: 121833 - DNA, 15 bp, Homo sapiens
atttctccagttgtc

SEQ ID NO: 121834 - DNA, 15 bp, Homo sapiens
catttctccagttgt

SEQ ID NO: 121835 - DNA, 15 bp, Homo sapiens
acatttctccagttg

SEQ ID NO: 121836 - DNA, 15 bp, Homo sapiens
cacatttctccagtt

SEQ ID NO: 121837 - DNA, 15 bp, Homo sapiens
acacatttctccagt

SEQ ID NO: 121838 - DNA, 15 bp, Homo sapiens
aacacatttctccag

SEQ ID NO: 121839 - DNA, 15 bp, Homo sapiens
aaacacatttctcca

SEQ ID NO: 121840 - DNA, 15 bp, Homo sapiens
caaacacatttctcc

SEQ ID NO: 121841 - DNA, 15 bp, Homo sapiens
acaaacacatttctc

SEQ ID NO: 121842 - DNA, 15 bp, Homo sapiens
tacaaacacatttct

SEQ ID NO: 121843 - DNA, 15 bp, Homo sapiens
ttacaaacacatttc

SEQ ID NO: 121844 - DNA, 15 bp, Homo sapiens
attacaaacacattt

SEQ ID NO: 121845 - DNA, 15 bp, Homo sapiens
cattacaaacacatt

SEQ ID NO: 121846 - DNA, 15 bp, Homo sapiens
acattacaaacacat

SEQ ID NO: 121847 - DNA, 15 bp, Homo sapiens
aacattacaaacaca

SEQ ID NO: 121848 - DNA, 15 bp, Homo sapiens
taacattacaaacac

SEQ ID NO: 121849 - DNA, 15 bp, Homo sapiens
gtaacattacaaaca

SEQ ID NO: 121850 - DNA, 15 bp, Homo sapiens
agtaacattacaaac

SEQ ID NO: 121851 - DNA, 15 bp, Homo sapiens
tagtaacattacaaa

SEQ ID NO: 121852 - DNA, 15 bp, Homo sapiens
ttagtaacattacaa

SEQ ID NO: 121853 - DNA, 15 bp, Homo sapiens
cttagtaacattaca

SEQ ID NO: 121854 - DNA, 15 bp, Homo sapiens
ccttagtaacattac

SEQ ID NO: 121855 - DNA, 15 bp, Homo sapiens
accttagtaacatta

SEQ ID NO: 121856 - DNA, 15 bp, Homo sapiens
taccttagtaacatt

SEQ ID NO: 121857 - DNA, 15 bp, Homo sapiens
ttaccttagtaacat

SEQ ID NO: 121858 - DNA, 15 bp, Homo sapiens
gttaccttagtaaca

SEQ ID NO: 121859 - DNA, 15 bp, Homo sapiens
agttaccttagtaac

SEQ ID NO: 121860 - DNA, 15 bp, Homo sapiens
aagttaccttagtaa

SEQ ID NO: 121861 - DNA, 15 bp, Homo sapiens
caagttaccttagta

SEQ ID NO: 121862 - DNA, 15 bp, Homo sapiens
gcaagttaccttagt

SEQ ID NO: 121863 - DNA, 15 bp, Homo sapiens
tgcaagttaccttag

SEQ ID NO: 121864 - DNA, 15 bp, Homo sapiens
atgcaagttacctta

SEQ ID NO: 121865 - DNA, 15 bp, Homo sapiens
tatgcaagttacctt

SEQ ID NO: 121866 - DNA, 15 bp, Homo sapiens
gtatgcaagttacct

SEQ ID NO: 121867 - DNA, 15 bp, Homo sapiens
ggtatgcaagttacc

SEQ ID NO: 121868 - DNA, 15 bp, Homo sapiens
tggtatgcaagttac

SEQ ID NO: 121869 - DNA, 15 bp, Homo sapiens
ttggtatgcaagtta

SEQ ID NO: 121870 - DNA, 15 bp, Homo sapiens
attggtatgcaagtt

SEQ ID NO: 121871 - DNA, 15 bp, Homo sapiens
aattggtatgcaagt

SEQ ID NO: 121872 - DNA, 15 bp, Homo sapiens
caattggtatgcaag

SEQ ID NO: 121873 - DNA, 15 bp, Homo sapiens
acaattggtatgcaa

SEQ ID NO: 121874 - DNA, 15 bp, Homo sapiens
tacaattggtatgca

SEQ ID NO: 121875 - DNA, 15 bp, Homo sapiens
atacaattggtatgc

SEQ ID NO: 121876 - DNA, 15 bp, Homo sapiens
catacaattggtatg

SEQ ID NO: 121877 - DNA, 15 bp, Homo sapiens
acatacaattggtat

SEQ ID NO: 121878 - DNA, 15 bp, Homo sapiens
cacatacaattggta

SEQ ID NO: 121879 - DNA, 15 bp, Homo sapiens
acacatacaattggt

SEQ ID NO: 121880 - DNA, 15 bp, Homo sapiens
tacacatacaattgg

SEQ ID NO: 121881 - DNA, 15 bp, Homo sapiens
gtacacatacaattg

SEQ ID NO: 121882 - DNA, 15 bp, Homo sapiens
tgtacacatacaatt

SEQ ID NO: 121883 - DNA, 15 bp, Homo sapiens
ctgtacacatacaat

SEQ ID NO: 121884 - DNA, 15 bp, Homo sapiens
tctgtacacatacaa

SEQ ID NO: 121885 - DNA, 15 bp, Homo sapiens
ttctgtacacataca

SEQ ID NO: 121886 - DNA, 15 bp, Homo sapiens
attctgtacacatac

SEQ ID NO: 121887 - DNA, 15 bp, Homo sapiens
cattctgtacacata

SEQ ID NO: 121888 - DNA, 15 bp, Homo sapiens
acattctgtacacat

SEQ ID NO: 121889 - DNA, 15 bp, Homo sapiens
tacattctgtacaca

SEQ ID NO: 121890 - DNA, 15 bp, Homo sapiens
atacattctgtacac

SEQ ID NO: 121891 - DNA, 15 bp, Homo sapiens
catacattctgtaca

SEQ ID NO: 121892 - DNA, 15 bp, Homo sapiens
gcatacattctgtac

SEQ ID NO: 121893 - DNA, 15 bp, Homo sapiens
tgcatacattctgta

SEQ ID NO: 121894 - DNA, 15 bp, Homo sapiens
atgcatacattctgt

SEQ ID NO: 121895 - DNA, 15 bp, Homo sapiens
tatgcatacattctg

SEQ ID NO: 121896 - DNA, 15 bp, Homo sapiens
ctatgcatacattct

SEQ ID NO: 121897 - DNA, 15 bp, Homo sapiens
gctatgcatacattc

SEQ ID NO: 121898 - DNA, 15 bp, Homo sapiens
cgctatgcatacatt

SEQ ID NO: 121899 - DNA, 15 bp, Homo sapiens
gcgctatgcatacat

SEQ ID NO: 121900 - DNA, 15 bp, Homo sapiens
tgcgctatgcataca

SEQ ID NO: 121901 - DNA, 15 bp, Homo sapiens
ttgcgctatgcatac

SEQ ID NO: 121902 - DNA, 15 bp, Homo sapiens
cttgcgctatgcata

SEQ ID NO: 121903 - DNA, 15 bp, Homo sapiens
tcttgcgctatgcat

SEQ ID NO: 121904 - DNA, 15 bp, Homo sapiens
atcttgcgctatgca

SEQ ID NO: 121905 - DNA, 15 bp, Homo sapiens
tatcttgcgctatgc

SEQ ID NO: 121906 - DNA, 15 bp, Homo sapiens
ttatcttgcgctatg

SEQ ID NO: 121907 - DNA, 15 bp, Homo sapiens
tttatcttgcgctat

SEQ ID NO: 121908 - DNA, 15 bp, Homo sapiens
ctttatcttgcgcta

SEQ ID NO: 121909 - DNA, 15 bp, Homo sapiens
actttatcttgcgct

SEQ ID NO: 121910 - DNA, 15 bp, Homo sapiens
cactttatcttgcgc

SEQ ID NO: 121911 - DNA, 15 bp, Homo sapiens
gcactttatcttgcg

SEQ ID NO: 121912 - DNA, 15 bp, Homo sapiens
agcactttatcttgc

SEQ ID NO: 121913 - DNA, 15 bp, Homo sapiens
tagcactttatcttg

SEQ ID NO: 121914 - DNA, 15 bp, Homo sapiens
ttagcactttatctt

SEQ ID NO: 121915 - DNA, 15 bp, Homo sapiens
attagcactttatct

SEQ ID NO: 121916 - DNA, 15 bp, Homo sapiens
gattagcactttatc

SEQ ID NO: 121917 - DNA, 15 bp, Homo sapiens
agattagcactttat

SEQ ID NO: 121918 - DNA, 15 bp, Homo sapiens
gagattagcacttta

SEQ ID NO: 121919 - DNA, 15 bp, Homo sapiens
tgagattagcacttt

SEQ ID NO: 121920 - DNA, 15 bp, Homo sapiens
ttgagattagcactt

SEQ ID NO: 121921 - DNA, 15 bp, Homo sapiens
cttgagattagcact

SEQ ID NO: 121922 - DNA, 15 bp, Homo sapiens
tcttgagattagcac

SEQ ID NO: 121923 - DNA, 15 bp, Homo sapiens
gtcttgagattagca

SEQ ID NO: 121924 - DNA, 15 bp, Homo sapiens
tgtcttgagattagc

SEQ ID NO: 121925 - DNA, 15 bp, Homo sapiens
ctgtcttgagattag

SEQ ID NO: 121926 - DNA, 15 bp, Homo sapiens
actgtcttgagatta

SEQ ID NO: 121927 - DNA, 15 bp, Homo sapiens
aactgtcttgagatt

SEQ ID NO: 121928 - DNA, 15 bp, Homo sapiens
caactgtcttgagat

SEQ ID NO: 121929 - DNA, 15 bp, Homo sapiens
ccaactgtcttgaga

SEQ ID NO: 121930 - DNA, 15 bp, Homo sapiens
cccaactgtcttgag

SEQ ID NO: 121931 - DNA, 15 bp, Homo sapiens
acccaactgtcttga

SEQ ID NO: 121932 - DNA, 15 bp, Homo sapiens
cacccaactgtcttg

SEQ ID NO: 121933 - DNA, 15 bp, Homo sapiens
tcacccaactgtctt

SEQ ID NO: 121934 - DNA, 15 bp, Homo sapiens
atcacccaactgtct

SEQ ID NO: 121935 - DNA, 15 bp, Homo sapiens
catcacccaactgtc

SEQ ID NO: 121936 - DNA, 15 bp, Homo sapiens
tcatcacccaactgt

SEQ ID NO: 121937 - DNA, 15 bp, Homo sapiens
ttcatcacccaactg

SEQ ID NO: 121938 - DNA, 15 bp, Homo sapiens
attcatcacccaact

SEQ ID NO: 121939 - DNA, 15 bp, Homo sapiens
tattcatcacccaac

SEQ ID NO: 121940 - DNA, 15 bp, Homo sapiens
ttattcatcacccaa

SEQ ID NO: 121941 - DNA, 15 bp, Homo sapiens
attattcatcaccca

SEQ ID NO: 121942 - DNA, 15 bp, Homo sapiens
tattattcatcaccc

SEQ ID NO: 121943 - DNA, 15 bp, Homo sapiens
atattattcatcacc

SEQ ID NO: 121944 - DNA, 15 bp, Homo sapiens
aatattattcatcac

SEQ ID NO: 121945 - DNA, 15 bp, Homo sapiens
aaatattattcatca

SEQ ID NO: 121946 - DNA, 15 bp, Homo sapiens
taaatattattcatc

SEQ ID NO: 121947 - DNA, 15 bp, Homo sapiens
ataaatattattcat

SEQ ID NO: 121948 - DNA, 15 bp, Homo sapiens
aataaatattattca

SEQ ID NO: 121949 - DNA, 15 bp, Homo sapiens
aaataaatattattc

SEQ ID NO: 121950 - DNA, 15 bp, Homo sapiens
aaaataaatattatt

SEQ ID NO: 121951 - DNA, 15 bp, Homo sapiens
gaaaataaatattat

SEQ ID NO: 121952 - DNA, 15 bp, Homo sapiens
agaaaataaatatta

SEQ ID NO: 121953 - DNA, 15 bp, Homo sapiens
aagaaaataaatatt

SEQ ID NO: 121954 - DNA, 15 bp, Homo sapiens
gaagaaaataaatat

SEQ ID NO: 121955 - DNA, 15 bp, Homo sapiens
agaagaaaataaata

SEQ ID NO: 121956 - DNA, 15 bp, Homo sapiens
aagaagaaaataaat

SEQ ID NO: 121957 - DNA, 15 bp, Homo sapiens
aaagaagaaaataaa

SEQ ID NO: 121958 - DNA, 15 bp, Homo sapiens
taaagaagaaaataa

SEQ ID NO: 121959 - DNA, 15 bp, Homo sapiens
gtaaagaagaaaata

SEQ ID NO: 121960 - DNA, 15 bp, Homo sapiens
tgtaaagaagaaaat

SEQ ID NO: 121961 - DNA, 15 bp, Homo sapiens
ctgtaaagaagaaaa

SEQ ID NO: 121962 - DNA, 15 bp, Homo sapiens
gctgtaaagaagaaa

SEQ ID NO: 121963 - DNA, 15 bp, Homo sapiens
agctgtaaagaagaa

SEQ ID NO: 121964 - DNA, 15 bp, Homo sapiens
aagctgtaaagaaga

SEQ ID NO: 121965 - DNA, 15 bp, Homo sapiens
caagctgtaaagaag

SEQ ID NO: 121966 - DNA, 15 bp, Homo sapiens
acaagctgtaaagaa

SEQ ID NO: 121967 - DNA, 15 bp, Homo sapiens
gacaagctgtaaaga

SEQ ID NO: 121968 - DNA, 15 bp, Homo sapiens
tgacaagctgtaaag

SEQ ID NO: 121969 - DNA, 15 bp, Homo sapiens
ttgacaagctgtaaa

SEQ ID NO: 121970 - DNA, 15 bp, Homo sapiens
cttgacaagctgtaa

SEQ ID NO: 121971 - DNA, 15 bp, Homo sapiens
gcttgacaagctgta

SEQ ID NO: 121972 - DNA, 15 bp, Homo sapiens
tgcttgacaagctgt

SEQ ID NO: 121973 - DNA, 15 bp, Homo sapiens
ttgcttgacaagctg

SEQ ID NO: 121974 - DNA, 15 bp, Homo sapiens
attgcttgacaagct

SEQ ID NO: 121975 - DNA, 15 bp, Homo sapiens
aattgcttgacaagc

SEQ ID NO: 121976 - DNA, 15 bp, Homo sapiens
caattgcttgacaag

SEQ ID NO: 121977 - DNA, 15 bp, Homo sapiens
gcaattgcttgacaa

SEQ ID NO: 121978 - DNA, 15 bp, Homo sapiens
tgcaattgcttgaca

SEQ ID NO: 121979 - DNA, 15 bp, Homo sapiens
atgcaattgcttgac

SEQ ID NO: 121980 - DNA, 15 bp, Homo sapiens
tatgcaattgcttga

SEQ ID NO: 121981 - DNA, 15 bp, Homo sapiens
gtatgcaattgcttg

SEQ ID NO: 121982 - DNA, 15 bp, Homo sapiens
ggtatgcaattgctt

SEQ ID NO: 121983 - DNA, 15 bp, Homo sapiens
aggtatgcaattgct

SEQ ID NO: 121984 - DNA, 15 bp, Homo sapiens
aaggtatgcaattgc

SEQ ID NO: 121985 - DNA, 15 bp, Homo sapiens
aaaggtatgcaattg

SEQ ID NO: 121986 - DNA, 15 bp, Homo sapiens
aaaaggtatgcaatt

SEQ ID NO: 121987 - DNA, 15 bp, Homo sapiens
caaaaggtatgcaat

SEQ ID NO: 121988 - DNA, 15 bp, Homo sapiens
acaaaaggtatgcaa

SEQ ID NO: 121989 - DNA, 15 bp, Homo sapiens
tacaaaaggtatgca

SEQ ID NO: 121990 - DNA, 15 bp, Homo sapiens
ctacaaaaggtatgc

SEQ ID NO: 121991 - DNA, 15 bp, Homo sapiens
actacaaaaggtatg

SEQ ID NO: 121992 - DNA, 15 bp, Homo sapiens
aactacaaaaggtat

SEQ ID NO: 121993 - DNA, 15 bp, Homo sapiens
taactacaaaaggta

SEQ ID NO: 121994 - DNA, 15 bp, Homo sapiens
ctaactacaaaaggt

SEQ ID NO: 121995 - DNA, 15 bp, Homo sapiens
tctaactacaaaagg

SEQ ID NO: 121996 - DNA, 15 bp, Homo sapiens
ttctaactacaaaag

SEQ ID NO: 121997 - DNA, 15 bp, Homo sapiens
tttctaactacaaaa

SEQ ID NO: 121998 - DNA, 15 bp, Homo sapiens
ctttctaactacaaa

SEQ ID NO: 121999 - DNA, 15 bp, Homo sapiens
cctttctaactacaa

SEQ ID NO: 122000 - DNA, 15 bp, Homo sapiens
acctttctaactaca

SEQ ID NO: 122001 - DNA, 15 bp, Homo sapiens
aacctttctaactac

SEQ ID NO: 122002 - DNA, 15 bp, Homo sapiens
taacctttctaacta

SEQ ID NO: 122003 - DNA, 15 bp, Homo sapiens
ataacctttctaact

SEQ ID NO: 122004 - DNA, 15 bp, Homo sapiens
aataacctttctaac

SEQ ID NO: 122005 - DNA, 15 bp, Homo sapiens
caataacctttctaa

SEQ ID NO: 122006 - DNA, 15 bp, Homo sapiens
acaataacctttcta

SEQ ID NO: 122007 - DNA, 15 bp, Homo sapiens
tacaataacctttct

SEQ ID NO: 122008 - DNA, 15 bp, Homo sapiens
ttacaataacctttc

SEQ ID NO: 122009 - DNA, 15 bp, Homo sapiens
tttacaataaccttt

SEQ ID NO: 122010 - DNA, 15 bp, Homo sapiens
atttacaataacctt

SEQ ID NO: 122011 - DNA, 15 bp, Homo sapiens
aatttacaataacct

SEQ ID NO: 122012 - DNA, 15 bp, Homo sapiens
aaatttacaataacc

SEQ ID NO: 122013 - DNA, 15 bp, Homo sapiens
taaatttacaataac

SEQ ID NO: 122014 - DNA, 15 bp, Homo sapiens
ctaaatttacaataa

SEQ ID NO: 122015 - DNA, 15 bp, Homo sapiens
cctaaatttacaata

SEQ ID NO: 122016 - DNA, 15 bp, Homo sapiens
tcctaaatttacaat

SEQ ID NO: 122017 - DNA, 15 bp, Homo sapiens
ttcctaaatttacaa

SEQ ID NO: 122018 - DNA, 15 bp, Homo sapiens
attcctaaatttaca

SEQ ID NO: 122019 - DNA, 15 bp, Homo sapiens
aattcctaaatttac

SEQ ID NO: 122020 - DNA, 15 bp, Homo sapiens
gaattcctaaattta

SEQ ID NO: 122021 - DNA, 15 bp, Homo sapiens
agaattcctaaattt

SEQ ID NO: 122022 - DNA, 15 bp, Homo sapiens
aagaattcctaaatt

SEQ ID NO: 122023 - DNA, 15 bp, Homo sapiens
taagaattcctaaat

SEQ ID NO: 122024 - DNA, 15 bp, Homo sapiens
ataagaattcctaaa

SEQ ID NO: 122025 - DNA, 15 bp, Homo sapiens
cataagaattcctaa

SEQ ID NO: 122026 - DNA, 15 bp, Homo sapiens
ccataagaattccta

SEQ ID NO: 122027 - DNA, 15 bp, Homo sapiens
tccataagaattcct

SEQ ID NO: 122028 - DNA, 15 bp, Homo sapiens
ttccataagaattcc

SEQ ID NO: 122029 - DNA, 15 bp, Homo sapiens
tttccataagaattc

SEQ ID NO: 122030 - DNA, 15 bp, Homo sapiens
ttttccataagaatt

SEQ ID NO: 122031 - DNA, 15 bp, Homo sapiens
tttttccataagaat

SEQ ID NO: 122032 - DNA, 15 bp, Homo sapiens
ctttttccataagaa

SEQ ID NO: 122033 - DNA, 15 bp, Homo sapiens
tctttttccataaga

SEQ ID NO: 122034 - DNA, 15 bp, Homo sapiens
ctctttttccataag

SEQ ID NO: 122035 - DNA, 15 bp, Homo sapiens
gctctttttccataa

SEQ ID NO: 122036 - DNA, 15 bp, Homo sapiens
agctctttttccata

SEQ ID NO: 122037 - DNA, 15 bp, Homo sapiens
cagctctttttccat

SEQ ID NO: 122038 - DNA, 15 bp, Homo sapiens
ccagctctttttcca

SEQ ID NO: 122039 - DNA, 15 bp, Homo sapiens
accagctctttttcc

SEQ ID NO: 122040 - DNA, 15 bp, Homo sapiens
taccagctctttttc

SEQ ID NO: 122041 - DNA, 15 bp, Homo sapiens
ctaccagctcttttt

SEQ ID NO: 122042 - DNA, 15 bp, Homo sapiens
actaccagctctttt

SEQ ID NO: 122043 - DNA, 15 bp, Homo sapiens
aactaccagctcttt

SEQ ID NO: 122044 - DNA, 15 bp, Homo sapiens
caactaccagctctt

SEQ ID NO: 122045 - DNA, 15 bp, Homo sapiens
acaactaccagctct

SEQ ID NO: 122046 - DNA, 15 bp, Homo sapiens
aacaactaccagctc

SEQ ID NO: 122047 - DNA, 15 bp, Homo sapiens
aaacaactaccagct

SEQ ID NO: 122048 - DNA, 15 bp, Homo sapiens
aaaacaactaccagc

SEQ ID NO: 122049 - DNA, 15 bp, Homo sapiens
caaaacaactaccag

SEQ ID NO: 122050 - DNA, 15 bp, Homo sapiens
acaaaacaactacca

SEQ ID NO: 122051 - DNA, 15 bp, Homo sapiens
aacaaaacaactacc

SEQ ID NO: 122052 - DNA, 15 bp, Homo sapiens
aaacaaaacaactac

SEQ ID NO: 122053 - DNA, 15 bp, Homo sapiens
aaaacaaaacaacta

SEQ ID NO: 122054 - DNA, 15 bp, Homo sapiens
aaaaacaaaacaact

SEQ ID NO: 122055 - DNA, 15 bp, Homo sapiens
aaaaaacaaaacaac

SEQ ID NO: 122056 - DNA, 15 bp, Homo sapiens
aaaaaaacaaaacaa

SEQ ID NO: 122057 - DNA, 15 bp, Homo sapiens
aaaaaaaacaaaaca

SEQ ID NO: 122058 - DNA, 15 bp, Homo sapiens
aaaaaaaaacaaaac

SEQ ID NO: 122059 - DNA, 15 bp, Homo sapiens
aaaaaaaaaacaaaa

SEQ ID NO: 122060 - DNA, 15 bp, Homo sapiens
aaaaaaaaaaacaaa

SEQ ID NO: 122061 - DNA, 15 bp, Homo sapiens
aaaaaaaaaaaacaa

SEQ ID NO: 122062 - DNA, 15 bp, Homo sapiens
taaaaaaaaaaaaca

SEQ ID NO: 122063 - DNA, 15 bp, Homo sapiens
ttaaaaaaaaaaaac

SEQ ID NO: 122064 - DNA, 15 bp, Homo sapiens
ctattaaaaaaaaaa

SEQ ID NO: 122065 - DNA, 15 bp, Homo sapiens
gctattaaaaaaaaa

SEQ ID NO: 122066 - DNA, 15 bp, Homo sapiens
tgctattaaaaaaaa

SEQ ID NO: 122067 - DNA, 15 bp, Homo sapiens
ttgctattaaaaaaa

SEQ ID NO: 122068 - DNA, 15 bp, Homo sapiens
tttgctattaaaaaa

SEQ ID NO: 122069 - DNA, 15 bp, Homo sapiens
atttgctattaaaaa

SEQ ID NO: 122070 - DNA, 15 bp, Homo sapiens
catttgctattaaaa

SEQ ID NO: 122071 - DNA, 15 bp, Homo sapiens
tcatttgctattaaa

SEQ ID NO: 122072 - DNA, 15 bp, Homo sapiens
ctcatttgctattaa

SEQ ID NO: 122073 - DNA, 15 bp, Homo sapiens
actcatttgctatta

SEQ ID NO: 122074 - DNA, 15 bp, Homo sapiens
tactcatttgctatt

SEQ ID NO: 122075 - DNA, 15 bp, Homo sapiens
ctactcatttgctat

SEQ ID NO: 122076 - DNA, 15 bp, Homo sapiens
tctactcatttgcta

SEQ ID NO: 122077 - DNA, 15 bp, Homo sapiens
ctctactcatttgct

SEQ ID NO: 122078 - DNA, 15 bp, Homo sapiens
tctctactcatttgc

SEQ ID NO: 122079 - DNA, 15 bp, Homo sapiens
ttctctactcatttg

SEQ ID NO: 122080 - DNA, 15 bp, Homo sapiens
attctctactcattt

SEQ ID NO: 122081 - DNA, 15 bp, Homo sapiens
aattctctactcatt

SEQ ID NO: 122082 - DNA, 15 bp, Homo sapiens
taattctctactcat

SEQ ID NO: 122083 - DNA, 15 bp, Homo sapiens
ataattctctactca

SEQ ID NO: 122084 - DNA, 15 bp, Homo sapiens
cataattctctactc

SEQ ID NO: 122085 - DNA, 15 bp, Homo sapiens
acataattctctact

SEQ ID NO: 122086 - DNA, 15 bp, Homo sapiens
cacataattctctac

SEQ ID NO: 122087 - DNA, 15 bp, Homo sapiens
acacataattctcta

SEQ ID NO: 122088 - DNA, 15 bp, Homo sapiens
gacacataattctct

SEQ ID NO: 122089 - DNA, 15 bp, Homo sapiens
tgacacataattctc

SEQ ID NO: 122090 - DNA, 15 bp, Homo sapiens
ctgacacataattct

SEQ ID NO: 122091 - DNA, 15 bp, Homo sapiens
tctgacacataattc

SEQ ID NO: 122092 - DNA, 15 bp, Homo sapiens
atctgacacataatt

SEQ ID NO: 122093 - DNA, 15 bp, Homo sapiens
aatctgacacataat

SEQ ID NO: 122094 - DNA, 15 bp, Homo sapiens
gaatctgacacataa

SEQ ID NO: 122095 - DNA, 15 bp, Homo sapiens
tgaatctgacacata

SEQ ID NO: 122096 - DNA, 15 bp, Homo sapiens
atgaatctgacacat

SEQ ID NO: 122097 - DNA, 15 bp, Homo sapiens
aatgaatctgacaca

SEQ ID NO: 122098 - DNA, 15 bp, Homo sapiens
taatgaatctgacac

SEQ ID NO: 122099 - DNA, 15 bp, Homo sapiens
ttaatgaatctgaca

SEQ ID NO: 122100 - DNA, 15 bp, Homo sapiens
tttaatgaatctgac

SEQ ID NO: 122101 - DNA, 15 bp, Homo sapiens
ctttaatgaatctga

SEQ ID NO: 122102 - DNA, 15 bp, Homo sapiens
actttaatgaatctg

SEQ ID NO: 122103 - DNA, 15 bp, Homo sapiens
aactttaatgaatct

SEQ ID NO: 122104 - DNA, 15 bp, Homo sapiens
caactttaatgaatc

SEQ ID NO: 122105 - DNA, 15 bp, Homo sapiens
ccaactttaatgaat

SEQ ID NO: 122106 - DNA, 15 bp, Homo sapiens
accaactttaatgaa

SEQ ID NO: 122107 - DNA, 15 bp, Homo sapiens
aaccaactttaatga

SEQ ID NO: 122108 - DNA, 15 bp, Homo sapiens
aaaccaactttaatg

SEQ ID NO: 122109 - DNA, 15 bp, Homo sapiens
aaaaccaactttaat

SEQ ID NO: 122110 - DNA, 15 bp, Homo sapiens
caaaaccaactttaa

SEQ ID NO: 122111 - DNA, 15 bp, Homo sapiens
tcaaaaccaacttta

SEQ ID NO: 122112 - DNA, 15 bp, Homo sapiens
ttcaaaaccaacttt

SEQ ID NO: 122113 - DNA, 15 bp, Homo sapiens
cttcaaaaccaactt

SEQ ID NO: 122114 - DNA, 15 bp, Homo sapiens
tcttcaaaaccaact

SEQ ID NO: 122115 - DNA, 15 bp, Homo sapiens
atcttcaaaaccaac

SEQ ID NO: 122116 - DNA, 15 bp, Homo sapiens
catcttcaaaaccaa

SEQ ID NO: 122117 - DNA, 15 bp, Homo sapiens
ccatcttcaaaacca

SEQ ID NO: 122118 - DNA, 15 bp, Homo sapiens
gccatcttcaaaacc

SEQ ID NO: 122119 - DNA, 15 bp, Homo sapiens
tgccatcttcaaaac

SEQ ID NO: 122120 - DNA, 15 bp, Homo sapiens
atgccatcttcaaaa

SEQ ID NO: 122121 - DNA, 15 bp, Homo sapiens
catgccatcttcaaa

SEQ ID NO: 122122 - DNA, 15 bp, Homo sapiens
tcatgccatcttcaa

SEQ ID NO: 122123 - DNA, 15 bp, Homo sapiens
atcatgccatcttca

SEQ ID NO: 122124 - DNA, 15 bp, Homo sapiens
catcatgccatcttc

SEQ ID NO: 122125 - DNA, 15 bp, Homo sapiens
ccatcatgccatctt

SEQ ID NO: 122126 - DNA, 15 bp, Homo sapiens
accatcatgccatct

SEQ ID NO: 122127 - DNA, 15 bp, Homo sapiens
taccatcatgccatc

SEQ ID NO: 122128 - DNA, 15 bp, Homo sapiens
ctaccatcatgccat

SEQ ID NO: 122129 - DNA, 15 bp, Homo sapiens
actaccatcatgcca

SEQ ID NO: 122130 - DNA, 15 bp, Homo sapiens
cactaccatcatgcc

SEQ ID NO: 122131 - DNA, 15 bp, Homo sapiens
ccactaccatcatgc

SEQ ID NO: 122132 - DNA, 15 bp, Homo sapiens
cccactaccatcatg

SEQ ID NO: 122133 - DNA, 15 bp, Homo sapiens
ccccactaccatcat

SEQ ID NO: 122134 - DNA, 15 bp, Homo sapiens
tccccactaccatca

SEQ ID NO: 122135 - DNA, 15 bp, Homo sapiens
ttccccactaccatc

SEQ ID NO: 122136 - DNA, 15 bp, Homo sapiens
tttccccactaccat

SEQ ID NO: 122137 - DNA, 15 bp, Homo sapiens
ctttccccactacca

SEQ ID NO: 122138 - DNA, 15 bp, Homo sapiens
actttccccactacc

SEQ ID NO: 122139 - DNA, 15 bp, Homo sapiens
cactttccccactac

SEQ ID NO: 122140 - DNA, 15 bp, Homo sapiens
gcactttccccacta

SEQ ID NO: 122141 - DNA, 15 bp, Homo sapiens
agcactttccccact

SEQ ID NO: 122142 - DNA, 15 bp, Homo sapiens
aagcactttccccac

SEQ ID NO: 122143 - DNA, 15 bp, Homo sapiens
caagcactttcccca

SEQ ID NO: 122144 - DNA, 15 bp, Homo sapiens
ccaagcactttcccc

SEQ ID NO: 122145 - DNA, 15 bp, Homo sapiens
cccaagcactttccc

SEQ ID NO: 122146 - DNA, 15 bp, Homo sapiens
gcccaagcactttcc

SEQ ID NO: 122147 - DNA, 15 bp, Homo sapiens
tgcccaagcactttc

SEQ ID NO: 122148 - DNA, 15 bp, Homo sapiens
atgcccaagcacttt

SEQ ID NO: 122149 - DNA, 15 bp, Homo sapiens
aatgcccaagcactt

SEQ ID NO: 122150 - DNA, 15 bp, Homo sapiens
caatgcccaagcact

SEQ ID NO: 122151 - DNA, 15 bp, Homo sapiens
ccaatgcccaagcac

SEQ ID NO: 122152 - DNA, 15 bp, Homo sapiens
tccaatgcccaagca

SEQ ID NO: 122153 - DNA, 15 bp, Homo sapiens
ctccaatgcccaagc

SEQ ID NO: 122154 - DNA, 15 bp, Homo sapiens
actccaatgcccaag

SEQ ID NO: 122155 - DNA, 15 bp, Homo sapiens
aactccaatgcccaa

SEQ ID NO: 122156 - DNA, 15 bp, Homo sapiens
caactccaatgccca

SEQ ID NO: 122157 - DNA, 15 bp, Homo sapiens
ccaactccaatgccc

SEQ ID NO: 122158 - DNA, 15 bp, Homo sapiens
tccaactccaatgcc

SEQ ID NO: 122159 - DNA, 15 bp, Homo sapiens
atccaactccaatgc

SEQ ID NO: 122160 - DNA, 15 bp, Homo sapiens
gatccaactccaatg

SEQ ID NO: 122161 - DNA, 15 bp, Homo sapiens
agatccaactccaat

SEQ ID NO: 122162 - DNA, 15 bp, Homo sapiens
cagatccaactccaa

SEQ ID NO: 122163 - DNA, 15 bp, Homo sapiens
ccagatccaactcca

SEQ ID NO: 122164 - DNA, 15 bp, Homo sapiens
tccagatccaactcc

SEQ ID NO: 122165 - DNA, 15 bp, Homo sapiens
atccagatccaactc

SEQ ID NO: 122166 - DNA, 15 bp, Homo sapiens
aatccagatccaact

SEQ ID NO: 122167 - DNA, 15 bp, Homo sapiens
aaatccagatccaac

SEQ ID NO: 122168 - DNA, 15 bp, Homo sapiens
gaaatccagatccaa

SEQ ID NO: 122169 - DNA, 15 bp, Homo sapiens
tgaaatccagatcca

SEQ ID NO: 122170 - DNA, 15 bp, Homo sapiens
ctgaaatccagatcc

SEQ ID NO: 122171 - DNA, 15 bp, Homo sapiens
actgaaatccagatc

SEQ ID NO: 122172 - DNA, 15 bp, Homo sapiens
gactgaaatccagat

SEQ ID NO: 122173 - DNA, 15 bp, Homo sapiens
ggactgaaatccaga

SEQ ID NO: 122174 - DNA, 15 bp, Homo sapiens
aggactgaaatccag

SEQ ID NO: 122175 - DNA, 15 bp, Homo sapiens
taggactgaaatcca

SEQ ID NO: 122176 - DNA, 15 bp, Homo sapiens
gtaggactgaaatcc

SEQ ID NO: 122177 - DNA, 15 bp, Homo sapiens
agtaggactgaaatc

SEQ ID NO: 122178 - DNA, 15 bp, Homo sapiens
aagtaggactgaaat

SEQ ID NO: 122179 - DNA, 15 bp, Homo sapiens
aaagtaggactgaaa

SEQ ID NO: 122180 - DNA, 15 bp, Homo sapiens
taaagtaggactgaa

SEQ ID NO: 122181 - DNA, 15 bp, Homo sapiens
ataaagtaggactga

SEQ ID NO: 122182 - DNA, 15 bp, Homo sapiens
aataaagtaggactg

SEQ ID NO: 122183 - DNA, 15 bp, Homo sapiens
gaataaagtaggact

SEQ ID NO: 122184 - DNA, 15 bp, Homo sapiens
agaataaagtaggac

SEQ ID NO: 122185 - DNA, 15 bp, Homo sapiens
aagaataaagtagga

SEQ ID NO: 122186 - DNA, 15 bp, Homo sapiens
aaagaataaagtagg

SEQ ID NO: 122187 - DNA, 15 bp, Homo sapiens
caaagaataaagtag

SEQ ID NO: 122188 - DNA, 15 bp, Homo sapiens
ccaaagaataaagta

SEQ ID NO: 122189 - DNA, 15 bp, Homo sapiens
accaaagaataaagt

SEQ ID NO: 122190 - DNA, 15 bp, Homo sapiens
caccaaagaataaag

SEQ ID NO: 122191 - DNA, 15 bp, Homo sapiens
ccaccaaagaataaa

SEQ ID NO: 122192 - DNA, 15 bp, Homo sapiens
gccaccaaagaataa

SEQ ID NO: 122193 - DNA, 15 bp, Homo sapiens
tgccaccaaagaata

SEQ ID NO: 122194 - DNA, 15 bp, Homo sapiens
ttgccaccaaagaat

SEQ ID NO: 122195 - DNA, 15 bp, Homo sapiens
attgccaccaaagaa

SEQ ID NO: 122196 - DNA, 15 bp, Homo sapiens
cattgccaccaaaga

SEQ ID NO: 122197 - DNA, 15 bp, Homo sapiens
acattgccaccaaag

SEQ ID NO: 122198 - DNA, 15 bp, Homo sapiens
cacattgccaccaaa

SEQ ID NO: 122199 - DNA, 15 bp, Homo sapiens
tcacattgccaccaa

SEQ ID NO: 122200 - DNA, 15 bp, Homo sapiens
ctcacattgccacca

SEQ ID NO: 122201 - DNA, 15 bp, Homo sapiens
gctcacattgccacc

SEQ ID NO: 122202 - DNA, 15 bp, Homo sapiens
cgctcacattgccac

SEQ ID NO: 122203 - DNA, 15 bp, Homo sapiens
acgctcacattgcca

SEQ ID NO: 122204 - DNA, 15 bp, Homo sapiens
cacgctcacattgcc

SEQ ID NO: 122205 - DNA, 15 bp, Homo sapiens
ccacgctcacattgc

SEQ ID NO: 122206 - DNA, 15 bp, Homo sapiens
cccacgctcacattg

SEQ ID NO: 122207 - DNA, 15 bp, Homo sapiens
acccacgctcacatt

SEQ ID NO: 122208 - DNA, 15 bp, Homo sapiens
gacccacgctcacat

SEQ ID NO: 122209 - DNA, 15 bp, Homo sapiens
tgacccacgctcaca

SEQ ID NO: 122210 - DNA, 15 bp, Homo sapiens
gtgacccacgctcac

SEQ ID NO: 122211 - DNA, 15 bp, Homo sapiens
agtgacccacgctca

SEQ ID NO: 122212 - DNA, 15 bp, Homo sapiens
cagtgacccacgctc

SEQ ID NO: 122213 - DNA, 15 bp, Homo sapiens
acagtgacccacgct

SEQ ID NO: 122214 - DNA, 15 bp, Homo sapiens
gacagtgacccacgc

SEQ ID NO: 122215 - DNA, 15 bp, Homo sapiens
agacagtgacccacg

SEQ ID NO: 122216 - DNA, 15 bp, Homo sapiens
aagacagtgacccac

SEQ ID NO: 122217 - DNA, 15 bp, Homo sapiens
taagacagtgaccca

SEQ ID NO: 122218 - DNA, 15 bp, Homo sapiens
ctaagacagtgaccc

SEQ ID NO: 122219 - DNA, 15 bp, Homo sapiens
gctaagacagtgacc

SEQ ID NO: 122220 - DNA, 15 bp, Homo sapiens
ggctaagacagtgac

SEQ ID NO: 122221 - DNA, 15 bp, Homo sapiens
gggctaagacagtga

SEQ ID NO: 122222 - DNA, 15 bp, Homo sapiens
ggggctaagacagtg

SEQ ID NO: 122223 - DNA, 15 bp, Homo sapiens
gggggctaagacagt

SEQ ID NO: 122224 - DNA, 15 bp, Homo sapiens
ggggggctaagacag

SEQ ID NO: 122225 - DNA, 15 bp, Homo sapiens
aggggggctaagaca

SEQ ID NO: 122226 - DNA, 15 bp, Homo sapiens
caggggggctaagac

SEQ ID NO: 122227 - DNA, 15 bp, Homo sapiens
tcaggggggctaaga

SEQ ID NO: 122228 - DNA, 15 bp, Homo sapiens
ctcaggggggctaag

SEQ ID NO: 122229 - DNA, 15 bp, Homo sapiens
tctcaggggggctaa

SEQ ID NO: 122230 - DNA, 15 bp, Homo sapiens
ttctcaggggggcta

SEQ ID NO: 122231 - DNA, 15 bp, Homo sapiens
attctcaggggggct

SEQ ID NO: 122232 - DNA, 15 bp, Homo sapiens
aattctcaggggggc

SEQ ID NO: 122233 - DNA, 15 bp, Homo sapiens
taattctcagggggg

SEQ ID NO: 122234 - DNA, 15 bp, Homo sapiens
ataattctcaggggg

SEQ ID NO: 122235 - DNA, 15 bp, Homo sapiens
aataattctcagggg

SEQ ID NO: 122236 - DNA, 15 bp, Homo sapiens
aaataattctcaggg

SEQ ID NO: 122237 - DNA, 15 bp, Homo sapiens
aaaataattctcagg

SEQ ID NO: 122238 - DNA, 15 bp, Homo sapiens
aaaaataattctcag

SEQ ID NO: 122239 - DNA, 15 bp, Homo sapiens
gaaaaataattctca

SEQ ID NO: 122240 - DNA, 15 bp, Homo sapiens
agaaaaataattctc

SEQ ID NO: 122241 - DNA, 15 bp, Homo sapiens
aagaaaaataattct

SEQ ID NO: 122242 - DNA, 15 bp, Homo sapiens
taagaaaaataattc

SEQ ID NO: 122243 - DNA, 15 bp, Homo sapiens
gtaagaaaaataatt

SEQ ID NO: 122244 - DNA, 15 bp, Homo sapiens
ggtaagaaaaataat

SEQ ID NO: 122245 - DNA, 15 bp, Homo sapiens
aggtaagaaaaataa

SEQ ID NO: 122246 - DNA, 15 bp, Homo sapiens
taggtaagaaaaata

SEQ ID NO: 122247 - DNA, 15 bp, Homo sapiens
ataggtaagaaaaat

SEQ ID NO: 122248 - DNA, 15 bp, Homo sapiens
gataggtaagaaaaa

SEQ ID NO: 122249 - DNA, 15 bp, Homo sapiens
tgataggtaagaaaa

SEQ ID NO: 122250 - DNA, 15 bp, Homo sapiens
ttgataggtaagaaa

SEQ ID NO: 122251 - DNA, 15 bp, Homo sapiens
tttgataggtaagaa

SEQ ID NO: 122252 - DNA, 15 bp, Homo sapiens
atttgataggtaaga

SEQ ID NO: 122253 - DNA, 15 bp, Homo sapiens
catttgataggtaag

SEQ ID NO: 122254 - DNA, 15 bp, Homo sapiens
acatttgataggtaa

SEQ ID NO: 122255 - DNA, 15 bp, Homo sapiens
cacatttgataggta

SEQ ID NO: 122256 - DNA, 15 bp, Homo sapiens
tcacatttgataggt

SEQ ID NO: 122257 - DNA, 15 bp, Homo sapiens
atcacatttgatagg

SEQ ID NO: 122258 - DNA, 15 bp, Homo sapiens
tatcacatttgatag

SEQ ID NO: 122259 - DNA, 15 bp, Homo sapiens
ttatcacatttgata

SEQ ID NO: 122260 - DNA, 15 bp, Homo sapiens
attatcacatttgat

SEQ ID NO: 122261 - DNA, 15 bp, Homo sapiens
tattatcacatttga

SEQ ID NO: 122262 - DNA, 15 bp, Homo sapiens
ctattatcacatttg

SEQ ID NO: 122263 - DNA, 15 bp, Homo sapiens
cctattatcacattt

SEQ ID NO: 122264 - DNA, 15 bp, Homo sapiens
tcctattatcacatt

SEQ ID NO: 122265 - DNA, 15 bp, Homo sapiens
atcctattatcacat

SEQ ID NO: 122266 - DNA, 15 bp, Homo sapiens
gatcctattatcaca

SEQ ID NO: 122267 - DNA, 15 bp, Homo sapiens
ggatcctattatcac

SEQ ID NO: 122268 - DNA, 15 bp, Homo sapiens
tggatcctattatca

SEQ ID NO: 122269 - DNA, 15 bp, Homo sapiens
gtggatcctattatc

SEQ ID NO: 122270 - DNA, 15 bp, Homo sapiens
ggtggatcctattat

SEQ ID NO: 122271 - DNA, 15 bp, Homo sapiens
aggtggatcctatta

SEQ ID NO: 122272 - DNA, 15 bp, Homo sapiens
gaggtggatcctatt

SEQ ID NO: 122273 - DNA, 15 bp, Homo sapiens
tgaggtggatcctat

SEQ ID NO: 122274 - DNA, 15 bp, Homo sapiens
atgaggtggatccta

SEQ ID NO: 122275 - DNA, 15 bp, Homo sapiens
tatgaggtggatcct

SEQ ID NO: 122276 - DNA, 15 bp, Homo sapiens
ctatgaggtggatcc

SEQ ID NO: 122277 - DNA, 15 bp, Homo sapiens
tctatgaggtggatc

SEQ ID NO: 122278 - DNA, 15 bp, Homo sapiens
ctctatgaggtggat

SEQ ID NO: 122279 - DNA, 15 bp, Homo sapiens
actctatgaggtgga

SEQ ID NO: 122280 - DNA, 15 bp, Homo sapiens
aactctatgaggtgg

SEQ ID NO: 122281 - DNA, 15 bp, Homo sapiens
caactctatgaggtg

SEQ ID NO: 122282 - DNA, 15 bp, Homo sapiens
tcaactctatgaggt

SEQ ID NO: 122283 - DNA, 15 bp, Homo sapiens
atcaactctatgagg

SEQ ID NO: 122284 - DNA, 15 bp, Homo sapiens
catcaactctatgag

SEQ ID NO: 122285 - DNA, 15 bp, Homo sapiens
acatcaactctatga

SEQ ID NO: 122286 - DNA, 15 bp, Homo sapiens
cacatcaactctatg

SEQ ID NO: 122287 - DNA, 15 bp, Homo sapiens
tcacatcaactctat

SEQ ID NO: 122288 - DNA, 15 bp, Homo sapiens
atcacatcaactcta

SEQ ID NO: 122289 - DNA, 15 bp, Homo sapiens
tatcacatcaactct

SEQ ID NO: 122290 - DNA, 15 bp, Homo sapiens
ttatcacatcaactc

SEQ ID NO: 122291 - DNA, 15 bp, Homo sapiens
attatcacatcaact

SEQ ID NO: 122292 - DNA, 15 bp, Homo sapiens
aattatcacatcaac

SEQ ID NO: 122293 - DNA, 15 bp, Homo sapiens
taattatcacatcaa

SEQ ID NO: 122294 - DNA, 15 bp, Homo sapiens
ttaattatcacatca

SEQ ID NO: 122295 - DNA, 15 bp, Homo sapiens
tttaattatcacatc

SEQ ID NO: 122296 - DNA, 15 bp, Homo sapiens
atttaattatcacat

SEQ ID NO: 122297 - DNA, 15 bp, Homo sapiens
aatttaattatcaca

SEQ ID NO: 122298 - DNA, 15 bp, Homo sapiens
caatttaattatcac

SEQ ID NO: 122299 - DNA, 15 bp, Homo sapiens
ccaatttaattatca

SEQ ID NO: 122300 - DNA, 15 bp, Homo sapiens
tccaatttaattatc

SEQ ID NO: 122301 - DNA, 15 bp, Homo sapiens
ttccaatttaattat

SEQ ID NO: 122302 - DNA, 15 bp, Homo sapiens
cttccaatttaatta

SEQ ID NO: 122303 - DNA, 15 bp, Homo sapiens
tcttccaatttaatt

SEQ ID NO: 122304 - DNA, 15 bp, Homo sapiens
atcttccaatttaat

SEQ ID NO: 122305 - DNA, 15 bp, Homo sapiens
tatcttccaatttaa

SEQ ID NO: 122306 - DNA, 15 bp, Homo sapiens
atatcttccaattta

SEQ ID NO: 122307 - DNA, 15 bp, Homo sapiens
tatatcttccaattt

SEQ ID NO: 122308 - DNA, 15 bp, Homo sapiens
ctatatcttccaatt

SEQ ID NO: 122309 - DNA, 15 bp, Homo sapiens
actatatcttccaat

SEQ ID NO: 122310 - DNA, 15 bp, Homo sapiens
tactatatcttccaa

SEQ ID NO: 122311 - DNA, 15 bp, Homo sapiens
ctactatatcttcca

SEQ ID NO: 122312 - DNA, 15 bp, Homo sapiens
cctactatatcttcc

SEQ ID NO: 122313 - DNA, 15 bp, Homo sapiens
ccctactatatcttc

SEQ ID NO: 122314 - DNA, 15 bp, Homo sapiens
cccctactatatctt

SEQ ID NO: 122315 - DNA, 15 bp, Homo sapiens
tcccctactatatct

SEQ ID NO: 122316 - DNA, 15 bp, Homo sapiens
gtcccctactatatc

SEQ ID NO: 122317 - DNA, 15 bp, Homo sapiens
tgtcccctactatat

SEQ ID NO: 122318 - DNA, 15 bp, Homo sapiens
ttgtcccctactata

SEQ ID NO: 122319 - DNA, 15 bp, Homo sapiens
attgtcccctactat

SEQ ID NO: 122320 - DNA, 15 bp, Homo sapiens
aattgtcccctacta

SEQ ID NO: 122321 - DNA, 15 bp, Homo sapiens
gaattgtcccctact

SEQ ID NO: 122322 - DNA, 15 bp, Homo sapiens
agaattgtcccctac

SEQ ID NO: 122323 - DNA, 15 bp, Homo sapiens
cagaattgtccccta

SEQ ID NO: 122324 - DNA, 15 bp, Homo sapiens
ccagaattgtcccct

SEQ ID NO: 122325 - DNA, 15 bp, Homo sapiens
tccagaattgtcccc

SEQ ID NO: 122326 - DNA, 15 bp, Homo sapiens
gtccagaattgtccc

SEQ ID NO: 122327 - DNA, 15 bp, Homo sapiens
tgtccagaattgtcc

SEQ ID NO: 122328 - DNA, 15 bp, Homo sapiens
gtgtccagaattgtc

SEQ ID NO: 122329 - DNA, 15 bp, Homo sapiens
tgtgtccagaattgt

SEQ ID NO: 122330 - DNA, 15 bp, Homo sapiens
ctgtgtccagaattg

SEQ ID NO: 122331 - DNA, 15 bp, Homo sapiens
actgtgtccagaatt

SEQ ID NO: 122332 - DNA, 15 bp, Homo sapiens
tactgtgtccagaat

SEQ ID NO: 122333 - DNA, 15 bp, Homo sapiens
ctactgtgtccagaa

SEQ ID NO: 122334 - DNA, 15 bp, Homo sapiens
cctactgtgtccaga

SEQ ID NO: 122335 - DNA, 15 bp, Homo sapiens
ccctactgtgtccag

SEQ ID NO: 122336 - DNA, 15 bp, Homo sapiens
cccctactgtgtcca

SEQ ID NO: 122337 - DNA, 15 bp, Homo sapiens
tcccctactgtgtcc

SEQ ID NO: 122338 - DNA, 15 bp, Homo sapiens
gtcccctactgtgtc

SEQ ID NO: 122339 - DNA, 15 bp, Homo sapiens
agtcccctactgtgt

SEQ ID NO: 122340 - DNA, 15 bp, Homo sapiens
gagtcccctactgtg

SEQ ID NO: 122341 - DNA, 15 bp, Homo sapiens
agagtcccctactgt

SEQ ID NO: 122342 - DNA, 15 bp, Homo sapiens
cagagtcccctactg

SEQ ID NO: 122343 - DNA, 15 bp, Homo sapiens
acagagtcccctact

SEQ ID NO: 122344 - DNA, 15 bp, Homo sapiens
aacagagtcccctac

SEQ ID NO: 122345 - DNA, 15 bp, Homo sapiens
gaacagagtccccta

SEQ ID NO: 122346 - DNA, 15 bp, Homo sapiens
agaacagagtcccct

SEQ ID NO: 122347 - DNA, 15 bp, Homo sapiens
aagaacagagtcccc

SEQ ID NO: 122348 - DNA, 15 bp, Homo sapiens
gaagaacagagtccc

SEQ ID NO: 122349 - DNA, 15 bp, Homo sapiens
tgaagaacagagtcc

SEQ ID NO: 122350 - DNA, 15 bp, Homo sapiens
gtgaagaacagagtc

SEQ ID NO: 122351 - DNA, 15 bp, Homo sapiens
ggtgaagaacagagt

SEQ ID NO: 122352 - DNA, 15 bp, Homo sapiens
aggtgaagaacagag

SEQ ID NO: 122353 - DNA, 15 bp, Homo sapiens
aaggtgaagaacaga

SEQ ID NO: 122354 - DNA, 15 bp, Homo sapiens
taaggtgaagaacag

SEQ ID NO: 122355 - DNA, 15 bp, Homo sapiens
ataaggtgaagaaca

SEQ ID NO: 122356 - DNA, 15 bp, Homo sapiens
aataaggtgaagaac

SEQ ID NO: 122357 - DNA, 15 bp, Homo sapiens
gaataaggtgaagaa

SEQ ID NO: 122358 - DNA, 15 bp, Homo sapiens
tgaataaggtgaaga

SEQ ID NO: 122359 - DNA, 15 bp, Homo sapiens
ttgaataaggtgaag

SEQ ID NO: 122360 - DNA, 15 bp, Homo sapiens
tttgaataaggtgaa

SEQ ID NO: 122361 - DNA, 15 bp, Homo sapiens
ttttgaataaggtga

SEQ ID NO: 122362 - DNA, 15 bp, Homo sapiens
gttttgaataaggtg

SEQ ID NO: 122363 - DNA, 15 bp, Homo sapiens
tgttttgaataaggt

SEQ ID NO: 122364 - DNA, 15 bp, Homo sapiens
ttgttttgaataagg

SEQ ID NO: 122365 - DNA, 15 bp, Homo sapiens
gttgttttgaataag

SEQ ID NO: 122366 - DNA, 15 bp, Homo sapiens
agttgttttgaataa

SEQ ID NO: 122367 - DNA, 15 bp, Homo sapiens
gagttgttttgaata

SEQ ID NO: 122368 - DNA, 15 bp, Homo sapiens
ggagttgttttgaat

SEQ ID NO: 122369 - DNA, 15 bp, Homo sapiens
tggagttgttttgaa

SEQ ID NO: 122370 - DNA, 15 bp, Homo sapiens
atggagttgttttga

SEQ ID NO: 122371 - DNA, 15 bp, Homo sapiens
aatggagttgttttg

SEQ ID NO: 122372 - DNA, 15 bp, Homo sapiens
aaatggagttgtttt

SEQ ID NO: 122373 - DNA, 15 bp, Homo sapiens
gaaatggagttgttt

SEQ ID NO: 122374 - DNA, 15 bp, Homo sapiens
tgaaatggagttgtt

SEQ ID NO: 122375 - DNA, 15 bp, Homo sapiens
ctgaaatggagttgt

SEQ ID NO: 122376 - DNA, 15 bp, Homo sapiens
actgaaatggagttg

SEQ ID NO: 122377 - DNA, 15 bp, Homo sapiens
tactgaaatggagtt

SEQ ID NO: 122378 - DNA, 15 bp, Homo sapiens
ctactgaaatggagt

SEQ ID NO: 122379 - DNA, 15 bp, Homo sapiens
tctactgaaatggag

SEQ ID NO: 122380 - DNA, 15 bp, Homo sapiens
ttctactgaaatgga

SEQ ID NO: 122381 - DNA, 15 bp, Homo sapiens
gttctactgaaatgg

SEQ ID NO: 122382 - DNA, 15 bp, Homo sapiens
tgttctactgaaatg

SEQ ID NO: 122383 - DNA, 15 bp, Homo sapiens
ctgttctactgaaat

SEQ ID NO: 122384 - DNA, 15 bp, Homo sapiens
tctgttctactgaaa

SEQ ID NO: 122385 - DNA, 15 bp, Homo sapiens
ttctgttctactgaa

SEQ ID NO: 122386 - DNA, 15 bp, Homo sapiens
attctgttctactga

SEQ ID NO: 122387 - DNA, 15 bp, Homo sapiens
gattctgttctactg

SEQ ID NO: 122388 - DNA, 15 bp, Homo sapiens
tgattctgttctact

SEQ ID NO: 122389 - DNA, 15 bp, Homo sapiens
gtgattctgttctac

SEQ ID NO: 122390 - DNA, 15 bp, Homo sapiens
tgtgattctgttcta

SEQ ID NO: 122391 - DNA, 15 bp, Homo sapiens
ctgtgattctgttct

SEQ ID NO: 122392 - DNA, 15 bp, Homo sapiens
actgtgattctgttc

SEQ ID NO: 122393 - DNA, 15 bp, Homo sapiens
tactgtgattctgtt

SEQ ID NO: 122394 - DNA, 15 bp, Homo sapiens
ttactgtgattctgt

SEQ ID NO: 122395 - DNA, 15 bp, Homo sapiens
tttactgtgattctg

SEQ ID NO: 122396 - DNA, 15 bp, Homo sapiens
atttactgtgattct

SEQ ID NO: 122397 - DNA, 15 bp, Homo sapiens
aatttactgtgattc

SEQ ID NO: 122398 - DNA, 15 bp, Homo sapiens
caatttactgtgatt

SEQ ID NO: 122399 - DNA, 15 bp, Homo sapiens
gcaatttactgtgat

SEQ ID NO: 122400 - DNA, 15 bp, Homo sapiens
agcaatttactgtga

SEQ ID NO: 122401 - DNA, 15 bp, Homo sapiens
gagcaatttactgtg

SEQ ID NO: 122402 - DNA, 15 bp, Homo sapiens
agagcaatttactgt

SEQ ID NO: 122403 - DNA, 15 bp, Homo sapiens
aagagcaatttactg

SEQ ID NO: 122404 - DNA, 15 bp, Homo sapiens
aaagagcaatttact

SEQ ID NO: 122405 - DNA, 15 bp, Homo sapiens
caaagagcaatttac

SEQ ID NO: 122406 - DNA, 15 bp, Homo sapiens
ccaaagagcaattta

SEQ ID NO: 122407 - DNA, 15 bp, Homo sapiens
cccaaagagcaattt

SEQ ID NO: 122408 - DNA, 15 bp, Homo sapiens
tcccaaagagcaatt

SEQ ID NO: 122409 - DNA, 15 bp, Homo sapiens
atcccaaagagcaat

SEQ ID NO: 122410 - DNA, 15 bp, Homo sapiens
aatcccaaagagcaa

SEQ ID NO: 122411 - DNA, 15 bp, Homo sapiens
aaatcccaaagagca

SEQ ID NO: 122412 - DNA, 15 bp, Homo sapiens
caaatcccaaagagc

SEQ ID NO: 122413 - DNA, 15 bp, Homo sapiens
ccaaatcccaaagag

SEQ ID NO: 122414 - DNA, 15 bp, Homo sapiens
tccaaatcccaaaga

SEQ ID NO: 122415 - DNA, 15 bp, Homo sapiens
ttccaaatcccaaag

SEQ ID NO: 122416 - DNA, 15 bp, Homo sapiens
tttccaaatcccaaa

SEQ ID NO: 122417 - DNA, 15 bp, Homo sapiens
atttccaaatcccaa

SEQ ID NO: 122418 - DNA, 15 bp, Homo sapiens
tatttccaaatccca

SEQ ID NO: 122419 - DNA, 15 bp, Homo sapiens
ttatttccaaatccc

SEQ ID NO: 122420 - DNA, 15 bp, Homo sapiens
cttatttccaaatcc

SEQ ID NO: 122421 - DNA, 15 bp, Homo sapiens
acttatttccaaatc

SEQ ID NO: 122422 - DNA, 15 bp, Homo sapiens
cacttatttccaaat

SEQ ID NO: 122423 - DNA, 15 bp, Homo sapiens
acacttatttccaaa

SEQ ID NO: 122424 - DNA, 15 bp, Homo sapiens
tacacttatttccaa

SEQ ID NO: 122425 - DNA, 15 bp, Homo sapiens
ttacacttatttcca

SEQ ID NO: 122426 - DNA, 15 bp, Homo sapiens
attacacttatttcc

SEQ ID NO: 122427 - DNA, 15 bp, Homo sapiens
cattacacttatttc

SEQ ID NO: 122428 - DNA, 15 bp, Homo sapiens
acattacacttattt

SEQ ID NO: 122429 - DNA, 15 bp, Homo sapiens
tacattacacttatt

SEQ ID NO: 122430 - DNA, 15 bp, Homo sapiens
ctacattacacttat

SEQ ID NO: 122431 - DNA, 15 bp, Homo sapiens
tctacattacactta

SEQ ID NO: 122432 - DNA, 15 bp, Homo sapiens
ttctacattacactt

SEQ ID NO: 122433 - DNA, 15 bp, Homo sapiens
attctacattacact

SEQ ID NO: 122434 - DNA, 15 bp, Homo sapiens
aattctacattacac

SEQ ID NO: 122435 - DNA, 15 bp, Homo sapiens
caattctacattaca

SEQ ID NO: 122436 - DNA, 15 bp, Homo sapiens
ccaattctacattac

SEQ ID NO: 122437 - DNA, 15 bp, Homo sapiens
tccaattctacatta

SEQ ID NO: 122438 - DNA, 15 bp, Homo sapiens
atccaattctacatt

SEQ ID NO: 122439 - DNA, 15 bp, Homo sapiens
aatccaattctacat

SEQ ID NO: 122440 - DNA, 15 bp, Homo sapiens
taatccaattctaca

SEQ ID NO: 122441 - DNA, 15 bp, Homo sapiens
ataatccaattctac

SEQ ID NO: 122442 - DNA, 15 bp, Homo sapiens
aataatccaattcta

SEQ ID NO: 122443 - DNA, 15 bp, Homo sapiens
aaataatccaattct

SEQ ID NO: 122444 - DNA, 15 bp, Homo sapiens
caaataatccaattc

SEQ ID NO: 122445 - DNA, 15 bp, Homo sapiens
gcaaataatccaatt

SEQ ID NO: 122446 - DNA, 15 bp, Homo sapiens
agcaaataatccaat

SEQ ID NO: 122447 - DNA, 15 bp, Homo sapiens
tagcaaataatccaa

SEQ ID NO: 122448 - DNA, 15 bp, Homo sapiens
atagcaaataatcca

SEQ ID NO: 122449 - DNA, 15 bp, Homo sapiens
aatagcaaataatcc

SEQ ID NO: 122450 - DNA, 15 bp, Homo sapiens
taatagcaaataatc

SEQ ID NO: 122451 - DNA, 15 bp, Homo sapiens
ttaatagcaaataat

SEQ ID NO: 122452 - DNA, 15 bp, Homo sapiens
tttaatagcaaataa

SEQ ID NO: 122453 - DNA, 15 bp, Homo sapiens
atttaatagcaaata

SEQ ID NO: 122454 - DNA, 15 bp, Homo sapiens
tatttaatagcaaat

SEQ ID NO: 122455 - DNA, 15 bp, Homo sapiens
atatttaatagcaaa

SEQ ID NO: 122456 - DNA, 15 bp, Homo sapiens
aatatttaatagcaa

SEQ ID NO: 122457 - DNA, 15 bp, Homo sapiens
taatatttaatagca

SEQ ID NO: 122458 - DNA, 15 bp, Homo sapiens
ttaatatttaatagc

SEQ ID NO: 122459 - DNA, 15 bp, Homo sapiens
tttaatatttaatag

SEQ ID NO: 122460 - DNA, 15 bp, Homo sapiens
ttttaatatttaata

SEQ ID NO: 122461 - DNA, 15 bp, Homo sapiens
cttttaatatttaat

SEQ ID NO: 122462 - DNA, 15 bp, Homo sapiens
acttttaatatttaa

SEQ ID NO: 122463 - DNA, 15 bp, Homo sapiens
tacttttaatattta

SEQ ID NO: 122464 - DNA, 15 bp, Homo sapiens
ctacttttaatattt

SEQ ID NO: 122465 - DNA, 15 bp, Homo sapiens
tctacttttaatatt

SEQ ID NO: 122466 - DNA, 15 bp, Homo sapiens
atctacttttaatat

SEQ ID NO: 122467 - DNA, 15 bp, Homo sapiens
aatctacttttaata

SEQ ID NO: 122468 - DNA, 15 bp, Homo sapiens
gaatctacttttaat

SEQ ID NO: 122469 - DNA, 15 bp, Homo sapiens
agaatctacttttaa

SEQ ID NO: 122470 - DNA, 15 bp, Homo sapiens
tagaatctactttta

SEQ ID NO: 122471 - DNA, 15 bp, Homo sapiens
gtagaatctactttt

SEQ ID NO: 122472 - DNA, 15 bp, Homo sapiens
ggtagaatctacttt

SEQ ID NO: 122473 - DNA, 15 bp, Homo sapiens
aggtagaatctactt

SEQ ID NO: 122474 - DNA, 15 bp, Homo sapiens
caggtagaatctact

SEQ ID NO: 122475 - DNA, 15 bp, Homo sapiens
acaggtagaatctac

SEQ ID NO: 122476 - DNA, 15 bp, Homo sapiens
cacaggtagaatcta

SEQ ID NO: 122477 - DNA, 15 bp, Homo sapiens
ccacaggtagaatct

SEQ ID NO: 122478 - DNA, 15 bp, Homo sapiens
accacaggtagaatc

SEQ ID NO: 122479 - DNA, 15 bp, Homo sapiens
aaccacaggtagaat

SEQ ID NO: 122480 - DNA, 15 bp, Homo sapiens
taaccacaggtagaa

SEQ ID NO: 122481 - DNA, 15 bp, Homo sapiens
gtaaccacaggtaga

SEQ ID NO: 122482 - DNA, 15 bp, Homo sapiens
ggtaaccacaggtag

SEQ ID NO: 122483 - DNA, 15 bp, Homo sapiens
aggtaaccacaggta

SEQ ID NO: 122484 - DNA, 15 bp, Homo sapiens
caggtaaccacaggt

SEQ ID NO: 122485 - DNA, 15 bp, Homo sapiens
ccaggtaaccacagg

SEQ ID NO: 122486 - DNA, 15 bp, Homo sapiens
tccaggtaaccacag

SEQ ID NO: 122487 - DNA, 15 bp, Homo sapiens
ttccaggtaaccaca

SEQ ID NO: 122488 - DNA, 15 bp, Homo sapiens
tttccaggtaaccac

SEQ ID NO: 122489 - DNA, 15 bp, Homo sapiens
ctttccaggtaacca

SEQ ID NO: 122490 - DNA, 15 bp, Homo sapiens
tctttccaggtaacc

SEQ ID NO: 122491 - DNA, 15 bp, Homo sapiens
ttctttccaggtaac

SEQ ID NO: 122492 - DNA, 15 bp, Homo sapiens
cttctttccaggtaa

SEQ ID NO: 122493 - DNA, 15 bp, Homo sapiens
tcttctttccaggta

SEQ ID NO: 122494 - DNA, 15 bp, Homo sapiens
ctcttctttccaggt

SEQ ID NO: 122495 - DNA, 15 bp, Homo sapiens
cctcttctttccagg

SEQ ID NO: 122496 - DNA, 15 bp, Homo sapiens
tcctcttctttccag

SEQ ID NO: 122497 - DNA, 15 bp, Homo sapiens
atcctcttctttcca

SEQ ID NO: 122498 - DNA, 15 bp, Homo sapiens
gatcctcttctttcc

SEQ ID NO: 122499 - DNA, 15 bp, Homo sapiens
agatcctcttctttc

SEQ ID NO: 122500 - DNA, 15 bp, Homo sapiens
gagatcctcttcttt

SEQ ID NO: 122501 - DNA, 15 bp, Homo sapiens
tgagatcctcttctt

SEQ ID NO: 122502 - DNA, 15 bp, Homo sapiens
ctgagatcctcttct

SEQ ID NO: 122503 - DNA, 15 bp, Homo sapiens
tctgagatcctcttc

SEQ ID NO: 122504 - DNA, 15 bp, Homo sapiens
ttctgagatcctctt

SEQ ID NO: 122505 - DNA, 15 bp, Homo sapiens
tttctgagatcctct

SEQ ID NO: 122506 - DNA, 15 bp, Homo sapiens
atttctgagatcctc

SEQ ID NO: 122507 - DNA, 15 bp, Homo sapiens
tatttctgagatcct

SEQ ID NO: 122508 - DNA, 15 bp, Homo sapiens
ttatttctgagatcc

SEQ ID NO: 122509 - DNA, 15 bp, Homo sapiens
gttatttctgagatc

SEQ ID NO: 122510 - DNA, 15 bp, Homo sapiens
ggttatttctgagat

SEQ ID NO: 122511 - DNA, 15 bp, Homo sapiens
tggttatttctgaga

SEQ ID NO: 122512 - DNA, 15 bp, Homo sapiens
ctggttatttctgag

SEQ ID NO: 122513 - DNA, 15 bp, Homo sapiens
tctggttatttctga

SEQ ID NO: 122514 - DNA, 15 bp, Homo sapiens
ttctggttatttctg

SEQ ID NO: 122515 - DNA, 15 bp, Homo sapiens
tttctggttatttct

SEQ ID NO: 122516 - DNA, 15 bp, Homo sapiens
ctttctggttatttc

SEQ ID NO: 122517 - DNA, 15 bp, Homo sapiens
tctttctggttattt

SEQ ID NO: 122518 - DNA, 15 bp, Homo sapiens
gtctttctggttatt

SEQ ID NO: 122519 - DNA, 15 bp, Homo sapiens
agtctttctggttat

SEQ ID NO: 122520 - DNA, 15 bp, Homo sapiens
cagtctttctggtta

SEQ ID NO: 122521 - DNA, 15 bp, Homo sapiens
gcagtctttctggtt

SEQ ID NO: 122522 - DNA, 15 bp, Homo sapiens
agcagtctttctggt

SEQ ID NO: 122523 - DNA, 15 bp, Homo sapiens
tagcagtctttctgg

SEQ ID NO: 122524 - DNA, 15 bp, Homo sapiens
ttagcagtctttctg

SEQ ID NO: 122525 - DNA, 15 bp, Homo sapiens
tttagcagtctttct

SEQ ID NO: 122526 - DNA, 15 bp, Homo sapiens
ttttagcagtctttc

SEQ ID NO: 122527 - DNA, 15 bp, Homo sapiens
cttttagcagtcttt

SEQ ID NO: 122528 - DNA, 15 bp, Homo sapiens
acttttagcagtctt

SEQ ID NO: 122529 - DNA, 15 bp, Homo sapiens
tacttttagcagtct

SEQ ID NO: 122530 - DNA, 15 bp, Homo sapiens
ttacttttagcagtc

SEQ ID NO: 122531 - DNA, 15 bp, Homo sapiens
tttacttttagcagt

SEQ ID NO: 122532 - DNA, 15 bp, Homo sapiens
atttacttttagcag

SEQ ID NO: 122533 - DNA, 15 bp, Homo sapiens
gatttacttttagca

SEQ ID NO: 122534 - DNA, 15 bp, Homo sapiens
tgatttacttttagc

SEQ ID NO: 122535 - DNA, 15 bp, Homo sapiens
ctgatttacttttag

SEQ ID NO: 122536 - DNA, 15 bp, Homo sapiens
gctgatttactttta

SEQ ID NO: 122537 - DNA, 15 bp, Homo sapiens
ggctgatttactttt

SEQ ID NO: 122538 - DNA, 15 bp, Homo sapiens
aggctgatttacttt

SEQ ID NO: 122539 - DNA, 15 bp, Homo sapiens
aaggctgatttactt

SEQ ID NO: 122540 - DNA, 15 bp, Homo sapiens
caaggctgatttact

SEQ ID NO: 122541 - DNA, 15 bp, Homo sapiens
acaaggctgatttac

SEQ ID NO: 122542 - DNA, 15 bp, Homo sapiens
aacaaggctgattta

SEQ ID NO: 122543 - DNA, 15 bp, Homo sapiens
aaacaaggctgattt

SEQ ID NO: 122544 - DNA, 15 bp, Homo sapiens
aaaacaaggctgatt

SEQ ID NO: 122545 - DNA, 15 bp, Homo sapiens
aaaaacaaggctgat

SEQ ID NO: 122546 - DNA, 15 bp, Homo sapiens
caaaaacaaggctga

SEQ ID NO: 122547 - DNA, 15 bp, Homo sapiens
acaaaaacaaggctg

SEQ ID NO: 122548 - DNA, 15 bp, Homo sapiens
aacaaaaacaaggct

SEQ ID NO: 122549 - DNA, 15 bp, Homo sapiens
aaacaaaaacaaggc

SEQ ID NO: 122550 - DNA, 15 bp, Homo sapiens
aaaacaaaaacaagg

SEQ ID NO: 122551 - DNA, 15 bp, Homo sapiens
caaaacaaaaacaag

SEQ ID NO: 122552 - DNA, 15 bp, Homo sapiens
acaaaacaaaaacaa

SEQ ID NO: 122553 - DNA, 15 bp, Homo sapiens
aacaaaacaaaaaca

SEQ ID NO: 122554 - DNA, 15 bp, Homo sapiens
caacaaaacaaaaac

SEQ ID NO: 122555 - DNA, 15 bp, Homo sapiens
acaacaaaacaaaaa

SEQ ID NO: 122556 - DNA, 15 bp, Homo sapiens
aacaacaaaacaaaa

SEQ ID NO: 122557 - DNA, 15 bp, Homo sapiens
aaacaacaaaacaaa

SEQ ID NO: 122558 - DNA, 15 bp, Homo sapiens
gaaacaacaaaacaa

SEQ ID NO: 122559 - DNA, 15 bp, Homo sapiens
agaaacaacaaaaca

SEQ ID NO: 122560 - DNA, 15 bp, Homo sapiens
tagaaacaacaaaac

SEQ ID NO: 122561 - DNA, 15 bp, Homo sapiens
ctagaaacaacaaaa

SEQ ID NO: 122562 - DNA, 15 bp, Homo sapiens
actagaaacaacaaa

SEQ ID NO: 122563 - DNA, 15 bp, Homo sapiens
aactagaaacaacaa

SEQ ID NO: 122564 - DNA, 15 bp, Homo sapiens
taactagaaacaaca

SEQ ID NO: 122565 - DNA, 15 bp, Homo sapiens
ctaactagaaacaac

SEQ ID NO: 122566 - DNA, 15 bp, Homo sapiens
actaactagaaacaa

SEQ ID NO: 122567 - DNA, 15 bp, Homo sapiens
tactaactagaaaca

SEQ ID NO: 122568 - DNA, 15 bp, Homo sapiens
ttactaactagaaac

SEQ ID NO: 122569 - DNA, 15 bp, Homo sapiens
tttactaactagaaa

SEQ ID NO: 122570 - DNA, 15 bp, Homo sapiens
ttttactaactagaa

SEQ ID NO: 122571 - DNA, 15 bp, Homo sapiens
attttactaactaga

SEQ ID NO: 122572 - DNA, 15 bp, Homo sapiens
cattttactaactag

SEQ ID NO: 122573 - DNA, 15 bp, Homo sapiens
tcattttactaacta

SEQ ID NO: 122574 - DNA, 15 bp, Homo sapiens
ctcattttactaact

SEQ ID NO: 122575 - DNA, 15 bp, Homo sapiens
tctcattttactaac

SEQ ID NO: 122576 - DNA, 15 bp, Homo sapiens
atctcattttactaa

SEQ ID NO: 122577 - DNA, 15 bp, Homo sapiens
tatctcattttacta

SEQ ID NO: 122578 - DNA, 15 bp, Homo sapiens
ttatctcattttact

SEQ ID NO: 122579 - DNA, 15 bp, Homo sapiens
attatctcattttac

SEQ ID NO: 122580 - DNA, 15 bp, Homo sapiens
aattatctcatttta

SEQ ID NO: 122581 - DNA, 15 bp, Homo sapiens
gaattatctcatttt

SEQ ID NO: 122582 - DNA, 15 bp, Homo sapiens
agaattatctcattt

SEQ ID NO: 122583 - DNA, 15 bp, Homo sapiens
cagaattatctcatt

SEQ ID NO: 122584 - DNA, 15 bp, Homo sapiens
acagaattatctcat

SEQ ID NO: 122585 - DNA, 15 bp, Homo sapiens
aacagaattatctca

SEQ ID NO: 122586 - DNA, 15 bp, Homo sapiens
aaacagaattatctc

SEQ ID NO: 122587 - DNA, 15 bp, Homo sapiens
aaaacagaattatct

SEQ ID NO: 122588 - DNA, 15 bp, Homo sapiens
taaaacagaattatc

SEQ ID NO: 122589 - DNA, 15 bp, Homo sapiens
ctaaaacagaattat

SEQ ID NO: 122590 - DNA, 15 bp, Homo sapiens
tctaaaacagaatta

SEQ ID NO: 122591 - DNA, 15 bp, Homo sapiens
ctctaaaacagaatt

SEQ ID NO: 122592 - DNA, 15 bp, Homo sapiens
tctctaaaacagaat

SEQ ID NO: 122593 - DNA, 15 bp, Homo sapiens
atctctaaaacagaa

SEQ ID NO: 122594 - DNA, 15 bp, Homo sapiens
catctctaaaacaga

SEQ ID NO: 122595 - DNA, 15 bp, Homo sapiens
ccatctctaaaacag

SEQ ID NO: 122596 - DNA, 15 bp, Homo sapiens
accatctctaaaaca

SEQ ID NO: 122597 - DNA, 15 bp, Homo sapiens
gaccatctctaaaac

SEQ ID NO: 122598 - DNA, 15 bp, Homo sapiens
ggaccatctctaaaa

SEQ ID NO: 122599 - DNA, 15 bp, Homo sapiens
tggaccatctctaaa

SEQ ID NO: 122600 - DNA, 15 bp, Homo sapiens
gtggaccatctctaa

SEQ ID NO: 122601 - DNA, 15 bp, Homo sapiens
agtggaccatctcta

SEQ ID NO: 122602 - DNA, 15 bp, Homo sapiens
cagtggaccatctct

SEQ ID NO: 122603 - DNA, 15 bp, Homo sapiens
gcagtggaccatctc

SEQ ID NO: 122604 - DNA, 15 bp, Homo sapiens
tgcagtggaccatct

SEQ ID NO: 122605 - DNA, 15 bp, Homo sapiens
ttgcagtggaccatc

SEQ ID NO: 122606 - DNA, 15 bp, Homo sapiens
gttgcagtggaccat

SEQ ID NO: 122607 - DNA, 15 bp, Homo sapiens
tgttgcagtggacca

SEQ ID NO: 122608 - DNA, 15 bp, Homo sapiens
gtgttgcagtggacc

SEQ ID NO: 122609 - DNA, 15 bp, Homo sapiens
agtgttgcagtggac

SEQ ID NO: 122610 - DNA, 15 bp, Homo sapiens
cagtgttgcagtgga

SEQ ID NO: 122611 - DNA, 15 bp, Homo sapiens
ccagtgttgcagtgg

SEQ ID NO: 122612 - DNA, 15 bp, Homo sapiens
cccagtgttgcagtg

SEQ ID NO: 122613 - DNA, 15 bp, Homo sapiens
tcccagtgttgcagt

SEQ ID NO: 122614 - DNA, 15 bp, Homo sapiens
ttcccagtgttgcag

SEQ ID NO: 122615 - DNA, 15 bp, Homo sapiens
gttcccagtgttgca

SEQ ID NO: 122616 - DNA, 15 bp, Homo sapiens
cgttcccagtgttgc

SEQ ID NO: 122617 - DNA, 15 bp, Homo sapiens
acgttcccagtgttg

SEQ ID NO: 122618 - DNA, 15 bp, Homo sapiens
aacgttcccagtgtt

SEQ ID NO: 122619 - DNA, 15 bp, Homo sapiens
caacgttcccagtgt

SEQ ID NO: 122620 - DNA, 15 bp, Homo sapiens
ccaacgttcccagtg

SEQ ID NO: 122621 - DNA, 15 bp, Homo sapiens
tccaacgttcccagt

SEQ ID NO: 122622 - DNA, 15 bp, Homo sapiens
ttccaacgttcccag

SEQ ID NO: 122623 - DNA, 15 bp, Homo sapiens
gttccaacgttccca

SEQ ID NO: 122624 - DNA, 15 bp, Homo sapiens
agttccaacgttccc

SEQ ID NO: 122625 - DNA, 15 bp, Homo sapiens
aagttccaacgttcc

SEQ ID NO: 122626 - DNA, 15 bp, Homo sapiens
aaagttccaacgttc

SEQ ID NO: 122627 - DNA, 15 bp, Homo sapiens
aaaagttccaacgtt

SEQ ID NO: 122628 - DNA, 15 bp, Homo sapiens
gaaaagttccaacgt

SEQ ID NO: 122629 - DNA, 15 bp, Homo sapiens
tgaaaagttccaacg

SEQ ID NO: 122630 - DNA, 15 bp, Homo sapiens
ctgaaaagttccaac

SEQ ID NO: 122631 - DNA, 15 bp, Homo sapiens
tctgaaaagttccaa

SEQ ID NO: 122632 - DNA, 15 bp, Homo sapiens
ttctgaaaagttcca

SEQ ID NO: 122633 - DNA, 15 bp, Homo sapiens
tttctgaaaagttcc

SEQ ID NO: 122634 - DNA, 15 bp, Homo sapiens
ctttctgaaaagttc

SEQ ID NO: 122635 - DNA, 15 bp, Homo sapiens
gctttctgaaaagtt

SEQ ID NO: 122636 - DNA, 15 bp, Homo sapiens
tgctttctgaaaagt

SEQ ID NO: 122637 - DNA, 15 bp, Homo sapiens
atgctttctgaaaag

SEQ ID NO: 122638 - DNA, 15 bp, Homo sapiens
aatgctttctgaaaa

SEQ ID NO: 122639 - DNA, 15 bp, Homo sapiens
aaatgctttctgaaa

SEQ ID NO: 122640 - DNA, 15 bp, Homo sapiens
aaaatgctttctgaa

SEQ ID NO: 122641 - DNA, 15 bp, Homo sapiens
aaaaatgctttctga

SEQ ID NO: 122642 - DNA, 15 bp, Homo sapiens
caaaaatgctttctg

SEQ ID NO: 122643 - DNA, 15 bp, Homo sapiens
acaaaaatgctttct

SEQ ID NO: 122644 - DNA, 15 bp, Homo sapiens
cacaaaaatgctttc

SEQ ID NO: 122645 - DNA, 15 bp, Homo sapiens
acacaaaaatgcttt

SEQ ID NO: 122646 - DNA, 15 bp, Homo sapiens
tacacaaaaatgctt

SEQ ID NO: 122647 - DNA, 15 bp, Homo sapiens
ttacacaaaaatgct

SEQ ID NO: 122648 - DNA, 15 bp, Homo sapiens
cttacacaaaaatgc

SEQ ID NO: 122649 - DNA, 15 bp, Homo sapiens
tcttacacaaaaatg

SEQ ID NO: 122650 - DNA, 15 bp, Homo sapiens
atcttacacaaaaat

SEQ ID NO: 122651 - DNA, 15 bp, Homo sapiens
aatcttacacaaaaa

SEQ ID NO: 122652 - DNA, 15 bp, Homo sapiens
gaatcttacacaaaa

SEQ ID NO: 122653 - DNA, 15 bp, Homo sapiens
agaatcttacacaaa

SEQ ID NO: 122654 - DNA, 15 bp, Homo sapiens
cagaatcttacacaa

SEQ ID NO: 122655 - DNA, 15 bp, Homo sapiens
gcagaatcttacaca

SEQ ID NO: 122656 - DNA, 15 bp, Homo sapiens
tgcagaatcttacac

SEQ ID NO: 122657 - DNA, 15 bp, Homo sapiens
ttgcagaatcttaca

SEQ ID NO: 122658 - DNA, 15 bp, Homo sapiens
cttgcagaatcttac

SEQ ID NO: 122659 - DNA, 15 bp, Homo sapiens
ccttgcagaatctta

SEQ ID NO: 122660 - DNA, 15 bp, Homo sapiens
gccttgcagaatctt

SEQ ID NO: 122661 - DNA, 15 bp, Homo sapiens
tgccttgcagaatct

SEQ ID NO: 122662 - DNA, 15 bp, Homo sapiens
ctgccttgcagaatc

SEQ ID NO: 122663 - DNA, 15 bp, Homo sapiens
tctgccttgcagaat

SEQ ID NO: 122664 - DNA, 15 bp, Homo sapiens
atctgccttgcagaa

SEQ ID NO: 122665 - DNA, 15 bp, Homo sapiens
gatctgccttgcaga

SEQ ID NO: 122666 - DNA, 15 bp, Homo sapiens
agatctgccttgcag

SEQ ID NO: 122667 - DNA, 15 bp, Homo sapiens
aagatctgccttgca

SEQ ID NO: 122668 - DNA, 15 bp, Homo sapiens
aaagatctgccttgc

SEQ ID NO: 122669 - DNA, 15 bp, Homo sapiens
taaagatctgccttg

SEQ ID NO: 122670 - DNA, 15 bp, Homo sapiens
ctaaagatctgcctt

SEQ ID NO: 122671 - DNA, 15 bp, Homo sapiens
tctaaagatctgcct

SEQ ID NO: 122672 - DNA, 15 bp, Homo sapiens
ctctaaagatctgcc

SEQ ID NO: 122673 - DNA, 15 bp, Homo sapiens
tctctaaagatctgc

SEQ ID NO: 122674 - DNA, 15 bp, Homo sapiens
ctctctaaagatctg

SEQ ID NO: 122675 - DNA, 15 bp, Homo sapiens
cctctctaaagatct

SEQ ID NO: 122676 - DNA, 15 bp, Homo sapiens
acctctctaaagatc

SEQ ID NO: 122677 - DNA, 15 bp, Homo sapiens
cacctctctaaagat

SEQ ID NO: 122678 - DNA, 15 bp, Homo sapiens
acacctctctaaaga

SEQ ID NO: 122679 - DNA, 15 bp, Homo sapiens
gacacctctctaaag

SEQ ID NO: 122680 - DNA, 15 bp, Homo sapiens
tgacacctctctaaa

SEQ ID NO: 122681 - DNA, 15 bp, Homo sapiens
atgacacctctctaa

SEQ ID NO: 122682 - DNA, 15 bp, Homo sapiens
tatgacacctctcta

SEQ ID NO: 122683 - DNA, 15 bp, Homo sapiens
ttatgacacctctct

SEQ ID NO: 122684 - DNA, 15 bp, Homo sapiens
attatgacacctctc

SEQ ID NO: 122685 - DNA, 15 bp, Homo sapiens
gattatgacacctct

SEQ ID NO: 122686 - DNA, 15 bp, Homo sapiens
tgattatgacacctc

SEQ ID NO: 122687 - DNA, 15 bp, Homo sapiens
ctgattatgacacct

SEQ ID NO: 122688 - DNA, 15 bp, Homo sapiens
actgattatgacacc

SEQ ID NO: 122689 - DNA, 15 bp, Homo sapiens
aactgattatgacac

SEQ ID NO: 122690 - DNA, 15 bp, Homo sapiens
aaactgattatgaca

SEQ ID NO: 122691 - DNA, 15 bp, Homo sapiens
aaaactgattatgac

SEQ ID NO: 122692 - DNA, 15 bp, Homo sapiens
caaaactgattatga

SEQ ID NO: 122693 - DNA, 15 bp, Homo sapiens
gcaaaactgattatg

SEQ ID NO: 122694 - DNA, 15 bp, Homo sapiens
tgcaaaactgattat

SEQ ID NO: 122695 - DNA, 15 bp, Homo sapiens
atgcaaaactgatta

SEQ ID NO: 122696 - DNA, 15 bp, Homo sapiens
catgcaaaactgatt

SEQ ID NO: 122697 - DNA, 15 bp, Homo sapiens
acatgcaaaactgat

SEQ ID NO: 122698 - DNA, 15 bp, Homo sapiens
cacatgcaaaactga

SEQ ID NO: 122699 - DNA, 15 bp, Homo sapiens
acacatgcaaaactg

SEQ ID NO: 122700 - DNA, 15 bp, Homo sapiens
aacacatgcaaaact

SEQ ID NO: 122701 - DNA, 15 bp, Homo sapiens
aaacacatgcaaaac

SEQ ID NO: 122702 - DNA, 15 bp, Homo sapiens
aaaacacatgcaaaa

SEQ ID NO: 122703 - DNA, 15 bp, Homo sapiens
caaaacacatgcaaa

SEQ ID NO: 122704 - DNA, 15 bp, Homo sapiens
acaaaacacatgcaa

SEQ ID NO: 122705 - DNA, 15 bp, Homo sapiens
aacaaaacacatgca

SEQ ID NO: 122706 - DNA, 15 bp, Homo sapiens
aaacaaaacacatgc

SEQ ID NO: 122707 - DNA, 15 bp, Homo sapiens
caaacaaaacacatg

SEQ ID NO: 122708 - DNA, 15 bp, Homo sapiens
tcaaacaaaacacat

SEQ ID NO: 122709 - DNA, 15 bp, Homo sapiens
ctcaaacaaaacaca

SEQ ID NO: 122710 - DNA, 15 bp, Homo sapiens
actcaaacaaaacac

SEQ ID NO: 122711 - DNA, 15 bp, Homo sapiens
gactcaaacaaaaca

SEQ ID NO: 122712 - DNA, 15 bp, Homo sapiens
tgactcaaacaaaac

SEQ ID NO: 122713 - DNA, 15 bp, Homo sapiens
ttgactcaaacaaaa

SEQ ID NO: 122714 - DNA, 15 bp, Homo sapiens
gttgactcaaacaaa

SEQ ID NO: 122715 - DNA, 15 bp, Homo sapiens
ggttgactcaaacaa

SEQ ID NO: 122716 - DNA, 15 bp, Homo sapiens
tggttgactcaaaca

SEQ ID NO: 122717 - DNA, 15 bp, Homo sapiens
ttggttgactcaaac

SEQ ID NO: 122718 - DNA, 15 bp, Homo sapiens
gttggttgactcaaa

SEQ ID NO: 122719 - DNA, 15 bp, Homo sapiens
cgttggttgactcaa

SEQ ID NO: 122720 - DNA, 15 bp, Homo sapiens
acgttggttgactca

SEQ ID NO: 122721 - DNA, 15 bp, Homo sapiens
aacgttggttgactc

SEQ ID NO: 122722 - DNA, 15 bp, Homo sapiens
taacgttggttgact

SEQ ID NO: 122723 - DNA, 15 bp, Homo sapiens
ataacgttggttgac

SEQ ID NO: 122724 - DNA, 15 bp, Homo sapiens
aataacgttggttga

SEQ ID NO: 122725 - DNA, 15 bp, Homo sapiens
aaataacgttggttg

SEQ ID NO: 122726 - DNA, 15 bp, Homo sapiens
caaataacgttggtt

SEQ ID NO: 122727 - DNA, 15 bp, Homo sapiens
acaaataacgttggt

SEQ ID NO: 122728 - DNA, 15 bp, Homo sapiens
cacaaataacgttgg

SEQ ID NO: 122729 - DNA, 15 bp, Homo sapiens
tcacaaataacgttg

SEQ ID NO: 122730 - DNA, 15 bp, Homo sapiens
atcacaaataacgtt

SEQ ID NO: 122731 - DNA, 15 bp, Homo sapiens
gatcacaaataacgt

SEQ ID NO: 122732 - DNA, 15 bp, Homo sapiens
agatcacaaataacg

SEQ ID NO: 122733 - DNA, 15 bp, Homo sapiens
gagatcacaaataac

SEQ ID NO: 122734 - DNA, 15 bp, Homo sapiens
agagatcacaaataa

SEQ ID NO: 122735 - DNA, 15 bp, Homo sapiens
tagagatcacaaata

SEQ ID NO: 122736 - DNA, 15 bp, Homo sapiens
atagagatcacaaat

SEQ ID NO: 122737 - DNA, 15 bp, Homo sapiens
aatagagatcacaaa

SEQ ID NO: 122738 - DNA, 15 bp, Homo sapiens
aaatagagatcacaa

SEQ ID NO: 122739 - DNA, 15 bp, Homo sapiens
aaaatagagatcaca

SEQ ID NO: 122740 - DNA, 15 bp, Homo sapiens
aaaaatagagatcac

SEQ ID NO: 122741 - DNA, 15 bp, Homo sapiens
gaaaaatagagatca

SEQ ID NO: 122742 - DNA, 15 bp, Homo sapiens
tgaaaaatagagatc

SEQ ID NO: 122743 - DNA, 15 bp, Homo sapiens
gtgaaaaatagagat

SEQ ID NO: 122744 - DNA, 15 bp, Homo sapiens
tgtgaaaaatagaga

SEQ ID NO: 122745 - DNA, 15 bp, Homo sapiens
ttgtgaaaaatagag

SEQ ID NO: 122746 - DNA, 15 bp, Homo sapiens
tttgtgaaaaataga

SEQ ID NO: 122747 - DNA, 15 bp, Homo sapiens
gtttgtgaaaaatag

SEQ ID NO: 122748 - DNA, 15 bp, Homo sapiens
agtttgtgaaaaata

SEQ ID NO: 122749 - DNA, 15 bp, Homo sapiens
gagtttgtgaaaaat

SEQ ID NO: 122750 - DNA, 15 bp, Homo sapiens
agagtttgtgaaaaa

SEQ ID NO: 122751 - DNA, 15 bp, Homo sapiens
gagagtttgtgaaaa

SEQ ID NO: 122752 - DNA, 15 bp, Homo sapiens
agagagtttgtgaaa

SEQ ID NO: 122753 - DNA, 15 bp, Homo sapiens
aagagagtttgtgaa

SEQ ID NO: 122754 - DNA, 15 bp, Homo sapiens
aaagagagtttgtga

SEQ ID NO: 122755 - DNA, 15 bp, Homo sapiens
caaagagagtttgtg

SEQ ID NO: 122756 - DNA, 15 bp, Homo sapiens
ccaaagagagtttgt

SEQ ID NO: 122757 - DNA, 15 bp, Homo sapiens
accaaagagagtttg

SEQ ID NO: 122758 - DNA, 15 bp, Homo sapiens
taccaaagagagttt

SEQ ID NO: 122759 - DNA, 15 bp, Homo sapiens
ataccaaagagagtt

SEQ ID NO: 122760 - DNA, 15 bp, Homo sapiens
cataccaaagagagt

SEQ ID NO: 122761 - DNA, 15 bp, Homo sapiens
acataccaaagagag

SEQ ID NO: 122762 - DNA, 15 bp, Homo sapiens
cacataccaaagaga

SEQ ID NO: 122763 - DNA, 15 bp, Homo sapiens
gcacataccaaagag

SEQ ID NO: 122764 - DNA, 15 bp, Homo sapiens
tgcacataccaaaga

SEQ ID NO: 122765 - DNA, 15 bp, Homo sapiens
gtgcacataccaaag

SEQ ID NO: 122766 - DNA, 15 bp, Homo sapiens
agtgcacataccaaa

SEQ ID NO: 122767 - DNA, 15 bp, Homo sapiens
tagtgcacataccaa

SEQ ID NO: 122768 - DNA, 15 bp, Homo sapiens
ttagtgcacatacca

SEQ ID NO: 122769 - DNA, 15 bp, Homo sapiens
attagtgcacatacc

SEQ ID NO: 122770 - DNA, 15 bp, Homo sapiens
aattagtgcacatac

SEQ ID NO: 122771 - DNA, 15 bp, Homo sapiens
aaattagtgcacata

SEQ ID NO: 122772 - DNA, 15 bp, Homo sapiens
taaattagtgcacat

SEQ ID NO: 122773 - DNA, 15 bp, Homo sapiens
ataaattagtgcaca

SEQ ID NO: 122774 - DNA, 15 bp, Homo sapiens
gataaattagtgcac

SEQ ID NO: 122775 - DNA, 15 bp, Homo sapiens
agataaattagtgca

SEQ ID NO: 122776 - DNA, 15 bp, Homo sapiens
aagataaattagtgc

SEQ ID NO: 122777 - DNA, 15 bp, Homo sapiens
aaagataaattagtg

SEQ ID NO: 122778 - DNA, 15 bp, Homo sapiens
aaaagataaattagt

SEQ ID NO: 122779 - DNA, 15 bp, Homo sapiens
gaaaagataaattag

SEQ ID NO: 122780 - DNA, 15 bp, Homo sapiens
tgaaaagataaatta

SEQ ID NO: 122781 - DNA, 15 bp, Homo sapiens
atgaaaagataaatt

SEQ ID NO: 122782 - DNA, 15 bp, Homo sapiens
aatgaaaagataaat

SEQ ID NO: 122783 - DNA, 15 bp, Homo sapiens
taatgaaaagataaa

SEQ ID NO: 122784 - DNA, 15 bp, Homo sapiens
ttaatgaaaagataa

SEQ ID NO: 122785 - DNA, 15 bp, Homo sapiens
tttaatgaaaagata

SEQ ID NO: 122786 - DNA, 15 bp, Homo sapiens
ttttaatgaaaagat

SEQ ID NO: 122787 - DNA, 15 bp, Homo sapiens
attttaatgaaaaga

SEQ ID NO: 122788 - DNA, 15 bp, Homo sapiens
aattttaatgaaaag

SEQ ID NO: 122789 - DNA, 15 bp, Homo sapiens
caattttaatgaaaa

SEQ ID NO: 122790 - DNA, 15 bp, Homo sapiens
ccaattttaatgaaa

SEQ ID NO: 122791 - DNA, 15 bp, Homo sapiens
tccaattttaatgaa

SEQ ID NO: 122792 - DNA, 15 bp, Homo sapiens
atccaattttaatga

SEQ ID NO: 122793 - DNA, 15 bp, Homo sapiens
aatccaattttaatg

SEQ ID NO: 122794 - DNA, 15 bp, Homo sapiens
gaatccaattttaat

SEQ ID NO: 122795 - DNA, 15 bp, Homo sapiens
agaatccaattttaa

SEQ ID NO: 122796 - DNA, 15 bp, Homo sapiens
aagaatccaatttta

SEQ ID NO: 122797 - DNA, 15 bp, Homo sapiens
gaagaatccaatttt

SEQ ID NO: 122798 - DNA, 15 bp, Homo sapiens
tgaagaatccaattt

SEQ ID NO: 122799 - DNA, 15 bp, Homo sapiens
gtgaagaatccaatt

SEQ ID NO: 122800 - DNA, 15 bp, Homo sapiens
agtgaagaatccaat

SEQ ID NO: 122801 - DNA, 15 bp, Homo sapiens
gagtgaagaatccaa

SEQ ID NO: 122802 - DNA, 15 bp, Homo sapiens
tgagtgaagaatcca

SEQ ID NO: 122803 - DNA, 15 bp, Homo sapiens
gtgagtgaagaatcc

SEQ ID NO: 122804 - DNA, 15 bp, Homo sapiens
agtgagtgaagaatc

SEQ ID NO: 122805 - DNA, 15 bp, Homo sapiens
tagtgagtgaagaat

SEQ ID NO: 122806 - DNA, 15 bp, Homo sapiens
ttagtgagtgaagaa

SEQ ID NO: 122807 - DNA, 15 bp, Homo sapiens
cttagtgagtgaaga

SEQ ID NO: 122808 - DNA, 15 bp, Homo sapiens
tcttagtgagtgaag

SEQ ID NO: 122809 - DNA, 15 bp, Homo sapiens
ttcttagtgagtgaa

SEQ ID NO: 122810 - DNA, 15 bp, Homo sapiens
attcttagtgagtga

SEQ ID NO: 122811 - DNA, 15 bp, Homo sapiens
cattcttagtgagtg

SEQ ID NO: 122812 - DNA, 15 bp, Homo sapiens
tcattcttagtgagt

SEQ ID NO: 122813 - DNA, 15 bp, Homo sapiens
ttcattcttagtgag

SEQ ID NO: 122814 - DNA, 15 bp, Homo sapiens
attcattcttagtga

SEQ ID NO: 122815 - DNA, 15 bp, Homo sapiens
aattcattcttagtg

SEQ ID NO: 122816 - DNA, 15 bp, Homo sapiens
caattcattcttagt

SEQ ID NO: 122817 - DNA, 15 bp, Homo sapiens
ccaattcattcttag

SEQ ID NO: 122818 - DNA, 15 bp, Homo sapiens
accaattcattctta

SEQ ID NO: 122819 - DNA, 15 bp, Homo sapiens
taccaattcattctt

SEQ ID NO: 122820 - DNA, 15 bp, Homo sapiens
ataccaattcattct

SEQ ID NO: 122821 - DNA, 15 bp, Homo sapiens
cataccaattcattc

SEQ ID NO: 122822 - DNA, 15 bp, Homo sapiens
tcataccaattcatt

SEQ ID NO: 122823 - DNA, 15 bp, Homo sapiens
gtcataccaattcat

SEQ ID NO: 122824 - DNA, 15 bp, Homo sapiens
agtcataccaattca

SEQ ID NO: 122825 - DNA, 15 bp, Homo sapiens
tagtcataccaattc

SEQ ID NO: 122826 - DNA, 15 bp, Homo sapiens
atagtcataccaatt

SEQ ID NO: 122827 - DNA, 15 bp, Homo sapiens
aatagtcataccaat

SEQ ID NO: 122828 - DNA, 15 bp, Homo sapiens
gaatagtcataccaa

SEQ ID NO: 122829 - DNA, 15 bp, Homo sapiens
tgaatagtcatacca

SEQ ID NO: 122830 - DNA, 15 bp, Homo sapiens
ctgaatagtcatacc

SEQ ID NO: 122831 - DNA, 15 bp, Homo sapiens
actgaatagtcatac

SEQ ID NO: 122832 - DNA, 15 bp, Homo sapiens
gactgaatagtcata

SEQ ID NO: 122833 - DNA, 15 bp, Homo sapiens
tgactgaatagtcat

SEQ ID NO: 122834 - DNA, 15 bp, Homo sapiens
ctgactgaatagtca

SEQ ID NO: 122835 - DNA, 15 bp, Homo sapiens
gctgactgaatagtc

SEQ ID NO: 122836 - DNA, 15 bp, Homo sapiens
agctgactgaatagt

SEQ ID NO: 122837 - DNA, 15 bp, Homo sapiens
tagctgactgaatag

SEQ ID NO: 122838 - DNA, 15 bp, Homo sapiens
atagctgactgaata

SEQ ID NO: 122839 - DNA, 15 bp, Homo sapiens
tatagctgactgaat

SEQ ID NO: 122840 - DNA, 15 bp, Homo sapiens
ctatagctgactgaa

SEQ ID NO: 122841 - DNA, 15 bp, Homo sapiens
actatagctgactga

SEQ ID NO: 122842 - DNA, 15 bp, Homo sapiens
aactatagctgactg

SEQ ID NO: 122843 - DNA, 15 bp, Homo sapiens
taactatagctgact

SEQ ID NO: 122844 - DNA, 15 bp, Homo sapiens
ttaactatagctgac

SEQ ID NO: 122845 - DNA, 15 bp, Homo sapiens
gttaactatagctga

SEQ ID NO: 122846 - DNA, 15 bp, Homo sapiens
tgttaactatagctg

SEQ ID NO: 122847 - DNA, 15 bp, Homo sapiens
gtgttaactatagct

SEQ ID NO: 122848 - DNA, 15 bp, Homo sapiens
tgtgttaactatagc

SEQ ID NO: 122849 - DNA, 15 bp, Homo sapiens
gtgtgttaactatag

SEQ ID NO: 122850 - DNA, 15 bp, Homo sapiens
tgtgtgttaactata

SEQ ID NO: 122851 - DNA, 15 bp, Homo sapiens
ctgtgtgttaactat

SEQ ID NO: 122852 - DNA, 15 bp, Homo sapiens
actgtgtgttaacta

SEQ ID NO: 122853 - DNA, 15 bp, Homo sapiens
tactgtgtgttaact

SEQ ID NO: 122854 - DNA, 15 bp, Homo sapiens
gtactgtgtgttaac

SEQ ID NO: 122855 - DNA, 15 bp, Homo sapiens
agtactgtgtgttaa

SEQ ID NO: 122856 - DNA, 15 bp, Homo sapiens
aagtactgtgtgtta

SEQ ID NO: 122857 - DNA, 15 bp, Homo sapiens
taagtactgtgtgtt

SEQ ID NO: 122858 - DNA, 15 bp, Homo sapiens
ctaagtactgtgtgt

SEQ ID NO: 122859 - DNA, 15 bp, Homo sapiens
cctaagtactgtgtg

SEQ ID NO: 122860 - DNA, 15 bp, Homo sapiens
tcctaagtactgtgt

SEQ ID NO: 122861 - DNA, 15 bp, Homo sapiens
atcctaagtactgtg

SEQ ID NO: 122862 - DNA, 15 bp, Homo sapiens
tatcctaagtactgt

SEQ ID NO: 122863 - DNA, 15 bp, Homo sapiens
ttatcctaagtactg

SEQ ID NO: 122864 - DNA, 15 bp, Homo sapiens
attatcctaagtact

SEQ ID NO: 122865 - DNA, 15 bp, Homo sapiens
aattatcctaagtac

SEQ ID NO: 122866 - DNA, 15 bp, Homo sapiens
taattatcctaagta

SEQ ID NO: 122867 - DNA, 15 bp, Homo sapiens
ttaattatcctaagt

SEQ ID NO: 122868 - DNA, 15 bp, Homo sapiens
cttaattatcctaag

SEQ ID NO: 122869 - DNA, 15 bp, Homo sapiens
tcttaattatcctaa

SEQ ID NO: 122870 - DNA, 15 bp, Homo sapiens
atcttaattatccta

SEQ ID NO: 122871 - DNA, 15 bp, Homo sapiens
tatcttaattatcct

SEQ ID NO: 122872 - DNA, 15 bp, Homo sapiens
atatcttaattatcc

SEQ ID NO: 122873 - DNA, 15 bp, Homo sapiens
aatatcttaattatc

SEQ ID NO: 122874 - DNA, 15 bp, Homo sapiens
taatatcttaattat

SEQ ID NO: 122875 - DNA, 15 bp, Homo sapiens
ataatatcttaatta

SEQ ID NO: 122876 - DNA, 15 bp, Homo sapiens
gataatatcttaatt

SEQ ID NO: 122877 - DNA, 15 bp, Homo sapiens
agataatatcttaat

SEQ ID NO: 122878 - DNA, 15 bp, Homo sapiens
aagataatatcttaa

SEQ ID NO: 122879 - DNA, 15 bp, Homo sapiens
taagataatatctta

SEQ ID NO: 122880 - DNA, 15 bp, Homo sapiens
ttaagataatatctt

SEQ ID NO: 122881 - DNA, 15 bp, Homo sapiens
attaagataatatct

SEQ ID NO: 122882 - DNA, 15 bp, Homo sapiens
tattaagataatatc

SEQ ID NO: 122883 - DNA, 15 bp, Homo sapiens
ttattaagataatat

SEQ ID NO: 122884 - DNA, 15 bp, Homo sapiens
tttattaagataata

SEQ ID NO: 122885 - DNA, 15 bp, Homo sapiens
ttttattaagataat

SEQ ID NO: 122886 - DNA, 15 bp, Homo sapiens
tttttattaagataa

SEQ ID NO: 122887 - DNA, 15 bp, Homo sapiens
gtttttattaagata

SEQ ID NO: 122888 - DNA, 15 bp, Homo sapiens
tgtttttattaagat

SEQ ID NO: 122889 - DNA, 15 bp, Homo sapiens
atgtttttattaaga

SEQ ID NO: 122890 - DNA, 15 bp, Homo sapiens
gatgtttttattaag

SEQ ID NO: 122891 - DNA, 15 bp, Homo sapiens
ggatgtttttattaa

SEQ ID NO: 122892 - DNA, 15 bp, Homo sapiens
gggatgtttttatta

SEQ ID NO: 122893 - DNA, 15 bp, Homo sapiens
ggggatgtttttatt

SEQ ID NO: 122894 - DNA, 15 bp, Homo sapiens
tggggatgtttttat

SEQ ID NO: 122895 - DNA, 15 bp, Homo sapiens
ttggggatgttttta

SEQ ID NO: 122896 - DNA, 15 bp, Homo sapiens
tttggggatgttttt

SEQ ID NO: 122897 - DNA, 15 bp, Homo sapiens
atttggggatgtttt

SEQ ID NO: 122898 - DNA, 15 bp, Homo sapiens
gatttggggatgttt

SEQ ID NO: 122899 - DNA, 15 bp, Homo sapiens
agatttggggatgtt

SEQ ID NO: 122900 - DNA, 15 bp, Homo sapiens
gagatttggggatgt

SEQ ID NO: 122901 - DNA, 15 bp, Homo sapiens
tgagatttggggatg

SEQ ID NO: 122902 - DNA, 15 bp, Homo sapiens
atgagatttggggat

SEQ ID NO: 122903 - DNA, 15 bp, Homo sapiens
aatgagatttgggga

SEQ ID NO: 122904 - DNA, 15 bp, Homo sapiens
aaatgagatttgggg

SEQ ID NO: 122905 - DNA, 15 bp, Homo sapiens
aaaatgagatttggg

SEQ ID NO: 122906 - DNA, 15 bp, Homo sapiens
aaaaatgagatttgg

SEQ ID NO: 122907 - DNA, 15 bp, Homo sapiens
gaaaaatgagatttg

SEQ ID NO: 122908 - DNA, 15 bp, Homo sapiens
tgaaaaatgagattt

SEQ ID NO: 122909 - DNA, 15 bp, Homo sapiens
atgaaaaatgagatt

SEQ ID NO: 122910 - DNA, 15 bp, Homo sapiens
aatgaaaaatgagat

SEQ ID NO: 122911 - DNA, 15 bp, Homo sapiens
aaatgaaaaatgaga

SEQ ID NO: 122912 - DNA, 15 bp, Homo sapiens
aaaatgaaaaatgag

SEQ ID NO: 122913 - DNA, 15 bp, Homo sapiens
caaaatgaaaaatga

SEQ ID NO: 122914 - DNA, 15 bp, Homo sapiens
acaaaatgaaaaatg

SEQ ID NO: 122915 - DNA, 15 bp, Homo sapiens
aacaaaatgaaaaat

SEQ ID NO: 122916 - DNA, 15 bp, Homo sapiens
taacaaaatgaaaaa

SEQ ID NO: 122917 - DNA, 15 bp, Homo sapiens
ttaacaaaatgaaaa

SEQ ID NO: 122918 - DNA, 15 bp, Homo sapiens
gttaacaaaatgaaa

SEQ ID NO: 122919 - DNA, 15 bp, Homo sapiens
agttaacaaaatgaa

SEQ ID NO: 122920 - DNA, 15 bp, Homo sapiens
gagttaacaaaatga

SEQ ID NO: 122921 - DNA, 15 bp, Homo sapiens
tgagttaacaaaatg

SEQ ID NO: 122922 - DNA, 15 bp, Homo sapiens
gtgagttaacaaaat

SEQ ID NO: 122923 - DNA, 15 bp, Homo sapiens
agtgagttaacaaaa

SEQ ID NO: 122924 - DNA, 15 bp, Homo sapiens
aagtgagttaacaaa

SEQ ID NO: 122925 - DNA, 15 bp, Homo sapiens
taagtgagttaacaa

SEQ ID NO: 122926 - DNA, 15 bp, Homo sapiens
ctaagtgagttaaca

SEQ ID NO: 122927 - DNA, 15 bp, Homo sapiens
tctaagtgagttaac

SEQ ID NO: 122928 - DNA, 15 bp, Homo sapiens
atctaagtgagttaa

SEQ ID NO: 122929 - DNA, 15 bp, Homo sapiens
gatctaagtgagtta

SEQ ID NO: 122930 - DNA, 15 bp, Homo sapiens
agatctaagtgagtt

SEQ ID NO: 122931 - DNA, 15 bp, Homo sapiens
aagatctaagtgagt

SEQ ID NO: 122932 - DNA, 15 bp, Homo sapiens
aaagatctaagtgag

SEQ ID NO: 122933 - DNA, 15 bp, Homo sapiens
taaagatctaagtga

SEQ ID NO: 122934 - DNA, 15 bp, Homo sapiens
ataaagatctaagtg

SEQ ID NO: 122935 - DNA, 15 bp, Homo sapiens
aataaagatctaagt

SEQ ID NO: 122936 - DNA, 15 bp, Homo sapiens
taataaagatctaag

SEQ ID NO: 122937 - DNA, 15 bp, Homo sapiens
ttaataaagatctaa

SEQ ID NO: 122938 - DNA, 15 bp, Homo sapiens
tttaataaagatcta

SEQ ID NO: 122939 - DNA, 15 bp, Homo sapiens
ctttaataaagatct

SEQ ID NO: 122940 - DNA, 15 bp, Homo sapiens
actttaataaagatc

SEQ ID NO: 122941 - DNA, 15 bp, Homo sapiens
gactttaataaagat

SEQ ID NO: 122942 - DNA, 15 bp, Homo sapiens
tgactttaataaaga

SEQ ID NO: 122943 - DNA, 15 bp, Homo sapiens
ttgactttaataaag

SEQ ID NO: 122944 - DNA, 15 bp, Homo sapiens
gttgactttaataaa

SEQ ID NO: 122945 - DNA, 15 bp, Homo sapiens
tgttgactttaataa

SEQ ID NO: 122946 - DNA, 15 bp, Homo sapiens
atgttgactttaata

SEQ ID NO: 122947 - DNA, 15 bp, Homo sapiens
aatgttgactttaat

SEQ ID NO: 122948 - DNA, 15 bp, Homo sapiens
taatgttgactttaa

SEQ ID NO: 122949 - DNA, 15 bp, Homo sapiens
ttaatgttgacttta

SEQ ID NO: 122950 - DNA, 15 bp, Homo sapiens
attaatgttgacttt

SEQ ID NO: 122951 - DNA, 15 bp, Homo sapiens
aattaatgttgactt

SEQ ID NO: 122952 - DNA, 15 bp, Homo sapiens
gaattaatgttgact

SEQ ID NO: 122953 - DNA, 15 bp, Homo sapiens
tgaattaatgttgac

SEQ ID NO: 122954 - DNA, 15 bp, Homo sapiens
atgaattaatgttga

SEQ ID NO: 122955 - DNA, 15 bp, Homo sapiens
catgaattaatgttg

SEQ ID NO: 122956 - DNA, 15 bp, Homo sapiens
tcatgaattaatgtt

SEQ ID NO: 122957 - DNA, 15 bp, Homo sapiens
ttcatgaattaatgt

SEQ ID NO: 122958 - DNA, 15 bp, Homo sapiens
tttcatgaattaatg

SEQ ID NO: 122959 - DNA, 15 bp, Homo sapiens
ttttcatgaattaat

SEQ ID NO: 122960 - DNA, 15 bp, Homo sapiens
attttcatgaattaa

SEQ ID NO: 122961 - DNA, 15 bp, Homo sapiens
cattttcatgaatta

SEQ ID NO: 122962 - DNA, 15 bp, Homo sapiens
acattttcatgaatt

SEQ ID NO: 122963 - DNA, 15 bp, Homo sapiens
tacattttcatgaat

SEQ ID NO: 122964 - DNA, 15 bp, Homo sapiens
ttacattttcatgaa

SEQ ID NO: 122965 - DNA, 15 bp, Homo sapiens
cttacattttcatga

SEQ ID NO: 122966 - DNA, 15 bp, Homo sapiens
acttacattttcatg

SEQ ID NO: 122967 - DNA, 15 bp, Homo sapiens
cacttacattttcat

SEQ ID NO: 122968 - DNA, 15 bp, Homo sapiens
acacttacattttca

SEQ ID NO: 122969 - DNA, 15 bp, Homo sapiens
aacacttacattttc

SEQ ID NO: 122970 - DNA, 15 bp, Homo sapiens
caacacttacatttt

SEQ ID NO: 122971 - DNA, 15 bp, Homo sapiens
gcaacacttacattt

SEQ ID NO: 122972 - DNA, 15 bp, Homo sapiens
tgcaacacttacatt

SEQ ID NO: 122973 - DNA, 15 bp, Homo sapiens
ctgcaacacttacat

SEQ ID NO: 122974 - DNA, 15 bp, Homo sapiens
actgcaacacttaca

SEQ ID NO: 122975 - DNA, 15 bp, Homo sapiens
aactgcaacacttac

SEQ ID NO: 122976 - DNA, 15 bp, Homo sapiens
aaactgcaacactta

SEQ ID NO: 122977 - DNA, 15 bp, Homo sapiens
taaactgcaacactt

SEQ ID NO: 122978 - DNA, 15 bp, Homo sapiens
ttaaactgcaacact

SEQ ID NO: 122979 - DNA, 15 bp, Homo sapiens
tttaaactgcaacac

SEQ ID NO: 122980 - DNA, 15 bp, Homo sapiens
ttttaaactgcaaca

SEQ ID NO: 122981 - DNA, 15 bp, Homo sapiens
attttaaactgcaac

SEQ ID NO: 122982 - DNA, 15 bp, Homo sapiens
gattttaaactgcaa

SEQ ID NO: 122983 - DNA, 15 bp, Homo sapiens
tgattttaaactgca

SEQ ID NO: 122984 - DNA, 15 bp, Homo sapiens
ttgattttaaactgc

SEQ ID NO: 122985 - DNA, 15 bp, Homo sapiens
tttgattttaaactg

SEQ ID NO: 122986 - DNA, 15 bp, Homo sapiens
gtttgattttaaact

SEQ ID NO: 122987 - DNA, 15 bp, Homo sapiens
agtttgattttaaac

SEQ ID NO: 122988 - DNA, 15 bp, Homo sapiens
cagtttgattttaaa

SEQ ID NO: 122989 - DNA, 15 bp, Homo sapiens
acagtttgattttaa

SEQ ID NO: 122990 - DNA, 15 bp, Homo sapiens
cacagtttgatttta

SEQ ID NO: 122991 - DNA, 15 bp, Homo sapiens
acacagtttgatttt

SEQ ID NO: 122992 - DNA, 15 bp, Homo sapiens
cacacagtttgattt

SEQ ID NO: 122993 - DNA, 15 bp, Homo sapiens
tcacacagtttgatt

SEQ ID NO: 122994 - DNA, 15 bp, Homo sapiens
ttcacacagtttgat

SEQ ID NO: 122995 - DNA, 15 bp, Homo sapiens
cttcacacagtttga

SEQ ID NO: 122996 - DNA, 15 bp, Homo sapiens
tcttcacacagtttg

SEQ ID NO: 122997 - DNA, 15 bp, Homo sapiens
gtcttcacacagttt

SEQ ID NO: 122998 - DNA, 15 bp, Homo sapiens
agtcttcacacagtt

SEQ ID NO: 122999 - DNA, 15 bp, Homo sapiens
gagtcttcacacagt

SEQ ID NO: 123000 - DNA, 15 bp, Homo sapiens
ggagtcttcacacag

SEQ ID NO: 123001 - DNA, 15 bp, Homo sapiens
tggagtcttcacaca

SEQ ID NO: 123002 - DNA, 15 bp, Homo sapiens
ttggagtcttcacac

SEQ ID NO: 123003 - DNA, 15 bp, Homo sapiens
cttggagtcttcaca

SEQ ID NO: 123004 - DNA, 15 bp, Homo sapiens
acttggagtcttcac

SEQ ID NO: 123005 - DNA, 15 bp, Homo sapiens
tacttggagtcttca

SEQ ID NO: 123006 - DNA, 15 bp, Homo sapiens
ctacttggagtcttc

SEQ ID NO: 123007 - DNA, 15 bp, Homo sapiens
gctacttggagtctt

SEQ ID NO: 123008 - DNA, 15 bp, Homo sapiens
agctacttggagtct

SEQ ID NO: 123009 - DNA, 15 bp, Homo sapiens
aagctacttggagtc

SEQ ID NO: 123010 - DNA, 15 bp, Homo sapiens
gaagctacttggagt

SEQ ID NO: 123011 - DNA, 15 bp, Homo sapiens
agaagctacttggag

SEQ ID NO: 123012 - DNA, 15 bp, Homo sapiens
gagaagctacttgga

SEQ ID NO: 123013 - DNA, 15 bp, Homo sapiens
agagaagctacttgg

SEQ ID NO: 123014 - DNA, 15 bp, Homo sapiens
gagagaagctacttg

SEQ ID NO: 123015 - DNA, 15 bp, Homo sapiens
tgagagaagctactt

SEQ ID NO: 123016 - DNA, 15 bp, Homo sapiens
gtgagagaagctact

SEQ ID NO: 123017 - DNA, 15 bp, Homo sapiens
ggtgagagaagctac

SEQ ID NO: 123018 - DNA, 15 bp, Homo sapiens
aggtgagagaagcta

SEQ ID NO: 123019 - DNA, 15 bp, Homo sapiens
gaggtgagagaagct

SEQ ID NO: 123020 - DNA, 15 bp, Homo sapiens
tgaggtgagagaagc

SEQ ID NO: 123021 - DNA, 15 bp, Homo sapiens
gtgaggtgagagaag

SEQ ID NO: 123022 - DNA, 15 bp, Homo sapiens
ggtgaggtgagagaa

SEQ ID NO: 123023 - DNA, 15 bp, Homo sapiens
aggtgaggtgagaga

SEQ ID NO: 123024 - DNA, 15 bp, Homo sapiens
aaggtgaggtgagag

SEQ ID NO: 123025 - DNA, 15 bp, Homo sapiens
aaaggtgaggtgaga

SEQ ID NO: 123026 - DNA, 15 bp, Homo sapiens
gaaaggtgaggtgag

SEQ ID NO: 123027 - DNA, 15 bp, Homo sapiens
ggaaaggtgaggtga

SEQ ID NO: 123028 - DNA, 15 bp, Homo sapiens
gggaaaggtgaggtg

SEQ ID NO: 123029 - DNA, 15 bp, Homo sapiens
ggggaaaggtgaggt

SEQ ID NO: 123030 - DNA, 15 bp, Homo sapiens
aggggaaaggtgagg

SEQ ID NO: 123031 - DNA, 15 bp, Homo sapiens
aaggggaaaggtgag

SEQ ID NO: 123032 - DNA, 15 bp, Homo sapiens
aaaggggaaaggtga

SEQ ID NO: 123033 - DNA, 15 bp, Homo sapiens
aaaaggggaaaggtg

SEQ ID NO: 123034 - DNA, 15 bp, Homo sapiens
gaaaaggggaaaggt

SEQ ID NO: 123035 - DNA, 15 bp, Homo sapiens
cgaaaaggggaaagg

SEQ ID NO: 123036 - DNA, 15 bp, Homo sapiens
acgaaaaggggaaag

SEQ ID NO: 123037 - DNA, 15 bp, Homo sapiens
aacgaaaaggggaaa

SEQ ID NO: 123038 - DNA, 15 bp, Homo sapiens
taacgaaaaggggaa

SEQ ID NO: 123039 - DNA, 15 bp, Homo sapiens
ataacgaaaagggga

SEQ ID NO: 123040 - DNA, 15 bp, Homo sapiens
tataacgaaaagggg

SEQ ID NO: 123041 - DNA, 15 bp, Homo sapiens
ctataacgaaaaggg

SEQ ID NO: 123042 - DNA, 15 bp, Homo sapiens
tctataacgaaaagg

SEQ ID NO: 123043 - DNA, 15 bp, Homo sapiens
ttctataacgaaaag

SEQ ID NO: 123044 - DNA, 15 bp, Homo sapiens
cttctataacgaaaa

SEQ ID NO: 123045 - DNA, 15 bp, Homo sapiens
tcttctataacgaaa

SEQ ID NO: 123046 - DNA, 15 bp, Homo sapiens
ttcttctataacgaa

SEQ ID NO: 123047 - DNA, 15 bp, Homo sapiens
gttcttctataacga

SEQ ID NO: 123048 - DNA, 15 bp, Homo sapiens
tgttcttctataacg

SEQ ID NO: 123049 - DNA, 15 bp, Homo sapiens
ctgttcttctataac

SEQ ID NO: 123050 - DNA, 15 bp, Homo sapiens
tctgttcttctataa

SEQ ID NO: 123051 - DNA, 15 bp, Homo sapiens
ttctgttcttctata

SEQ ID NO: 123052 - DNA, 15 bp, Homo sapiens
tttctgttcttctat

SEQ ID NO: 123053 - DNA, 15 bp, Homo sapiens
atttctgttcttcta

SEQ ID NO: 123054 - DNA, 15 bp, Homo sapiens
tatttctgttcttct

SEQ ID NO: 123055 - DNA, 15 bp, Homo sapiens
ttatttctgttcttc

SEQ ID NO: 123056 - DNA, 15 bp, Homo sapiens
attatttctgttctt

SEQ ID NO: 123057 - DNA, 15 bp, Homo sapiens
aattatttctgttct

SEQ ID NO: 123058 - DNA, 15 bp, Homo sapiens
caattatttctgttc

SEQ ID NO: 123059 - DNA, 15 bp, Homo sapiens
tcaattatttctgtt

SEQ ID NO: 123060 - DNA, 15 bp, Homo sapiens
gtcaattatttctgt

SEQ ID NO: 123061 - DNA, 15 bp, Homo sapiens
tgtcaattatttctg

SEQ ID NO: 123062 - DNA, 15 bp, Homo sapiens
ctgtcaattatttct

SEQ ID NO: 123063 - DNA, 15 bp, Homo sapiens
tctgtcaattatttc

SEQ ID NO: 123064 - DNA, 15 bp, Homo sapiens
ttctgtcaattattt

SEQ ID NO: 123065 - DNA, 15 bp, Homo sapiens
cttctgtcaattatt

SEQ ID NO: 123066 - DNA, 15 bp, Homo sapiens
ccttctgtcaattat

SEQ ID NO: 123067 - DNA, 15 bp, Homo sapiens
tccttctgtcaatta

SEQ ID NO: 123068 - DNA, 15 bp, Homo sapiens
gtccttctgtcaatt

SEQ ID NO: 123069 - DNA, 15 bp, Homo sapiens
ggtccttctgtcaat

SEQ ID NO: 123070 - DNA, 15 bp, Homo sapiens
aggtccttctgtcaa

SEQ ID NO: 123071 - DNA, 15 bp, Homo sapiens
taggtccttctgtca

SEQ ID NO: 123072 - DNA, 15 bp, Homo sapiens
ctaggtccttctgtc

SEQ ID NO: 123073 - DNA, 15 bp, Homo sapiens
tctaggtccttctgt

SEQ ID NO: 123074 - DNA, 15 bp, Homo sapiens
gtctaggtccttctg

SEQ ID NO: 123075 - DNA, 15 bp, Homo sapiens
ggtctaggtccttct

SEQ ID NO: 123076 - DNA, 15 bp, Homo sapiens
tggtctaggtccttc

SEQ ID NO: 123077 - DNA, 15 bp, Homo sapiens
ttggtctaggtcctt

SEQ ID NO: 123078 - DNA, 15 bp, Homo sapiens
cttggtctaggtcct

SEQ ID NO: 123079 - DNA, 15 bp, Homo sapiens
tcttggtctaggtcc

SEQ ID NO: 123080 - DNA, 15 bp, Homo sapiens
ttcttggtctaggtc

SEQ ID NO: 123081 - DNA, 15 bp, Homo sapiens
attcttggtctaggt

SEQ ID NO: 123082 - DNA, 15 bp, Homo sapiens
gattcttggtctagg

SEQ ID NO: 123083 - DNA, 15 bp, Homo sapiens
ggattcttggtctag

SEQ ID NO: 123084 - DNA, 15 bp, Homo sapiens
aggattcttggtcta

SEQ ID NO: 123085 - DNA, 15 bp, Homo sapiens
caggattcttggtct

SEQ ID NO: 123086 - DNA, 15 bp, Homo sapiens
tcaggattcttggtc

SEQ ID NO: 123087 - DNA, 15 bp, Homo sapiens
atcaggattcttggt

SEQ ID NO: 123088 - DNA, 15 bp, Homo sapiens
aatcaggattcttgg

SEQ ID NO: 123089 - DNA, 15 bp, Homo sapiens
aaatcaggattcttg

SEQ ID NO: 123090 - DNA, 15 bp, Homo sapiens
taaatcaggattctt

SEQ ID NO: 123091 - DNA, 15 bp, Homo sapiens
ttaaatcaggattct

SEQ ID NO: 123092 - DNA, 15 bp, Homo sapiens
attaaatcaggattc

SEQ ID NO: 123093 - DNA, 15 bp, Homo sapiens
cattaaatcaggatt

SEQ ID NO: 123094 - DNA, 15 bp, Homo sapiens
ccattaaatcaggat

SEQ ID NO: 123095 - DNA, 15 bp, Homo sapiens
accattaaatcagga

SEQ ID NO: 123096 - DNA, 15 bp, Homo sapiens
caccattaaatcagg

SEQ ID NO: 123097 - DNA, 15 bp, Homo sapiens
acaccattaaatcag

SEQ ID NO: 123098 - DNA, 15 bp, Homo sapiens
gacaccattaaatca

SEQ ID NO: 123099 - DNA, 15 bp, Homo sapiens
tgacaccattaaatc

SEQ ID NO: 123100 - DNA, 15 bp, Homo sapiens
ctgacaccattaaat

SEQ ID NO: 123101 - DNA, 15 bp, Homo sapiens
tctgacaccattaaa

SEQ ID NO: 123102 - DNA, 15 bp, Homo sapiens
atctgacaccattaa

SEQ ID NO: 123103 - DNA, 15 bp, Homo sapiens
gatctgacaccatta

SEQ ID NO: 123104 - DNA, 15 bp, Homo sapiens
agatctgacaccatt

SEQ ID NO: 123105 - DNA, 15 bp, Homo sapiens
cagatctgacaccat

SEQ ID NO: 123106 - DNA, 15 bp, Homo sapiens
acagatctgacacca

SEQ ID NO: 123107 - DNA, 15 bp, Homo sapiens
aacagatctgacacc

SEQ ID NO: 123108 - DNA, 15 bp, Homo sapiens
gaacagatctgacac

SEQ ID NO: 123109 - DNA, 15 bp, Homo sapiens
agaacagatctgaca

SEQ ID NO: 123110 - DNA, 15 bp, Homo sapiens
tagaacagatctgac

SEQ ID NO: 123111 - DNA, 15 bp, Homo sapiens
atagaacagatctga

SEQ ID NO: 123112 - DNA, 15 bp, Homo sapiens
catagaacagatctg

SEQ ID NO: 123113 - DNA, 15 bp, Homo sapiens
tcatagaacagatct

SEQ ID NO: 123114 - DNA, 15 bp, Homo sapiens
gtcatagaacagatc

SEQ ID NO: 123115 - DNA, 15 bp, Homo sapiens
ggtcatagaacagat

SEQ ID NO: 123116 - DNA, 15 bp, Homo sapiens
tggtcatagaacaga

SEQ ID NO: 123117 - DNA, 15 bp, Homo sapiens
ctggtcatagaacag

SEQ ID NO: 123118 - DNA, 15 bp, Homo sapiens
actggtcatagaaca

SEQ ID NO: 123119 - DNA, 15 bp, Homo sapiens
gactggtcatagaac

SEQ ID NO: 123120 - DNA, 15 bp, Homo sapiens
tgactggtcatagaa

SEQ ID NO: 123121 - DNA, 15 bp, Homo sapiens
ttgactggtcataga

SEQ ID NO: 123122 - DNA, 15 bp, Homo sapiens
tttgactggtcatag

SEQ ID NO: 123123 - DNA, 15 bp, Homo sapiens
ctttgactggtcata

SEQ ID NO: 123124 - DNA, 15 bp, Homo sapiens
tctttgactggtcat

SEQ ID NO: 123125 - DNA, 15 bp, Homo sapiens
ctctttgactggtca

SEQ ID NO: 123126 - DNA, 15 bp, Homo sapiens
actctttgactggtc

SEQ ID NO: 123127 - DNA, 15 bp, Homo sapiens
aactctttgactggt

SEQ ID NO: 123128 - DNA, 15 bp, Homo sapiens
aaactctttgactgg

SEQ ID NO: 123129 - DNA, 15 bp, Homo sapiens
gaaactctttgactg

SEQ ID NO: 123130 - DNA, 15 bp, Homo sapiens
agaaactctttgact

SEQ ID NO: 123131 - DNA, 15 bp, Homo sapiens
tagaaactctttgac

SEQ ID NO: 123132 - DNA, 15 bp, Homo sapiens
ctagaaactctttga

SEQ ID NO: 123133 - DNA, 15 bp, Homo sapiens
cctagaaactctttg

SEQ ID NO: 123134 - DNA, 15 bp, Homo sapiens
ccctagaaactcttt

SEQ ID NO: 123135 - DNA, 15 bp, Homo sapiens
cccctagaaactctt

SEQ ID NO: 123136 - DNA, 15 bp, Homo sapiens
acccctagaaactct

SEQ ID NO: 123137 - DNA, 15 bp, Homo sapiens
cacccctagaaactc

SEQ ID NO: 123138 - DNA, 15 bp, Homo sapiens
tcacccctagaaact

SEQ ID NO: 123139 - DNA, 15 bp, Homo sapiens
ttcacccctagaaac

SEQ ID NO: 123140 - DNA, 15 bp, Homo sapiens
attcacccctagaaa

SEQ ID NO: 123141 - DNA, 15 bp, Homo sapiens
cattcacccctagaa

SEQ ID NO: 123142 - DNA, 15 bp, Homo sapiens
tcattcacccctaga

SEQ ID NO: 123143 - DNA, 15 bp, Homo sapiens
ctcattcacccctag

SEQ ID NO: 123144 - DNA, 15 bp, Homo sapiens
cctcattcaccccta

SEQ ID NO: 123145 - DNA, 15 bp, Homo sapiens
gcctcattcacccct

SEQ ID NO: 123146 - DNA, 15 bp, Homo sapiens
tgcctcattcacccc

SEQ ID NO: 123147 - DNA, 15 bp, Homo sapiens
ctgcctcattcaccc

SEQ ID NO: 123148 - DNA, 15 bp, Homo sapiens
gctgcctcattcacc

SEQ ID NO: 123149 - DNA, 15 bp, Homo sapiens
ggctgcctcattcac

SEQ ID NO: 123150 - DNA, 15 bp, Homo sapiens
tggctgcctcattca

SEQ ID NO: 123151 - DNA, 15 bp, Homo sapiens
gtggctgcctcattc

SEQ ID NO: 123152 - DNA, 15 bp, Homo sapiens
tgtggctgcctcatt

SEQ ID NO: 123153 - DNA, 15 bp, Homo sapiens
gtgtggctgcctcat

SEQ ID NO: 123154 - DNA, 15 bp, Homo sapiens
tgtgtggctgcctca

SEQ ID NO: 123155 - DNA, 15 bp, Homo sapiens
gtgtgtggctgcctc

SEQ ID NO: 123156 - DNA, 15 bp, Homo sapiens
tgtgtgtggctgcct

SEQ ID NO: 123157 - DNA, 15 bp, Homo sapiens
ctgtgtgtggctgcc

SEQ ID NO: 123158 - DNA, 15 bp, Homo sapiens
gctgtgtgtggctgc

SEQ ID NO: 123159 - DNA, 15 bp, Homo sapiens
tgctgtgtgtggctg

SEQ ID NO: 123160 - DNA, 15 bp, Homo sapiens
ttgctgtgtgtggct

SEQ ID NO: 123161 - DNA, 15 bp, Homo sapiens
cttgctgtgtgtggc

SEQ ID NO: 123162 - DNA, 15 bp, Homo sapiens
tcttgctgtgtgtgg

SEQ ID NO: 123163 - DNA, 15 bp, Homo sapiens
ttcttgctgtgtgtg

SEQ ID NO: 123164 - DNA, 15 bp, Homo sapiens
attcttgctgtgtgt

SEQ ID NO: 123165 - DNA, 15 bp, Homo sapiens
cattcttgctgtgtg

SEQ ID NO: 123166 - DNA, 15 bp, Homo sapiens
acattcttgctgtgt

SEQ ID NO: 123167 - DNA, 15 bp, Homo sapiens
gacattcttgctgtg

SEQ ID NO: 123168 - DNA, 15 bp, Homo sapiens
tgacattcttgctgt

SEQ ID NO: 123169 - DNA, 15 bp, Homo sapiens
ttgacattcttgctg

SEQ ID NO: 123170 - DNA, 15 bp, Homo sapiens
tttgacattcttgct

SEQ ID NO: 123171 - DNA, 15 bp, Homo sapiens
ctttgacattcttgc

SEQ ID NO: 123172 - DNA, 15 bp, Homo sapiens
gctttgacattcttg

SEQ ID NO: 123173 - DNA, 15 bp, Homo sapiens
agctttgacattctt

SEQ ID NO: 123174 - DNA, 15 bp, Homo sapiens
tagctttgacattct

SEQ ID NO: 123175 - DNA, 15 bp, Homo sapiens
atagctttgacattc

SEQ ID NO: 123176 - DNA, 15 bp, Homo sapiens
catagctttgacatt

SEQ ID NO: 123177 - DNA, 15 bp, Homo sapiens
gcatagctttgacat

SEQ ID NO: 123178 - DNA, 15 bp, Homo sapiens
agcatagctttgaca

SEQ ID NO: 123179 - DNA, 15 bp, Homo sapiens
gagcatagctttgac

SEQ ID NO: 123180 - DNA, 15 bp, Homo sapiens
agagcatagctttga

SEQ ID NO: 123181 - DNA, 15 bp, Homo sapiens
cagagcatagctttg

SEQ ID NO: 123182 - DNA, 15 bp, Homo sapiens
tcagagcatagcttt

SEQ ID NO: 123183 - DNA, 15 bp, Homo sapiens
atcagagcatagctt

SEQ ID NO: 123184 - DNA, 15 bp, Homo sapiens
aatcagagcatagct

SEQ ID NO: 123185 - DNA, 15 bp, Homo sapiens
taatcagagcatagc

SEQ ID NO: 123186 - DNA, 15 bp, Homo sapiens
gtaatcagagcatag

SEQ ID NO: 123187 - DNA, 15 bp, Homo sapiens
tgtaatcagagcata

SEQ ID NO: 123188 - DNA, 15 bp, Homo sapiens
ttgtaatcagagcat

SEQ ID NO: 123189 - DNA, 15 bp, Homo sapiens
cttgtaatcagagca

SEQ ID NO: 123190 - DNA, 15 bp, Homo sapiens
tcttgtaatcagagc

SEQ ID NO: 123191 - DNA, 15 bp, Homo sapiens
ctcttgtaatcagag

SEQ ID NO: 123192 - DNA, 15 bp, Homo sapiens
gctcttgtaatcaga

SEQ ID NO: 123193 - DNA, 15 bp, Homo sapiens
ggctcttgtaatcag

SEQ ID NO: 123194 - DNA, 15 bp, Homo sapiens
tggctcttgtaatca

SEQ ID NO: 123195 - DNA, 15 bp, Homo sapiens
gtggctcttgtaatc

SEQ ID NO: 123196 - DNA, 15 bp, Homo sapiens
tgtggctcttgtaat

SEQ ID NO: 123197 - DNA, 15 bp, Homo sapiens
ttgtggctcttgtaa

SEQ ID NO: 123198 - DNA, 15 bp, Homo sapiens
cttgtggctcttgta

SEQ ID NO: 123199 - DNA, 15 bp, Homo sapiens
tcttgtggctcttgt

SEQ ID NO: 123200 - DNA, 15 bp, Homo sapiens
ttcttgtggctcttg

SEQ ID NO: 123201 - DNA, 15 bp, Homo sapiens
attcttgtggctctt

SEQ ID NO: 123202 - DNA, 15 bp, Homo sapiens
aattcttgtggctct

SEQ ID NO: 123203 - DNA, 15 bp, Homo sapiens
aaattcttgtggctc

SEQ ID NO: 123204 - DNA, 15 bp, Homo sapiens
aaaattcttgtggct

SEQ ID NO: 123205 - DNA, 15 bp, Homo sapiens
aaaaattcttgtggc

SEQ ID NO: 123206 - DNA, 15 bp, Homo sapiens
aaaaaattcttgtgg

SEQ ID NO: 123207 - DNA, 15 bp, Homo sapiens
caaaaaattcttgtg

SEQ ID NO: 123208 - DNA, 15 bp, Homo sapiens
acaaaaaattcttgt

SEQ ID NO: 123209 - DNA, 15 bp, Homo sapiens
cacaaaaaattcttg

SEQ ID NO: 123210 - DNA, 15 bp, Homo sapiens
tcacaaaaaattctt

SEQ ID NO: 123211 - DNA, 15 bp, Homo sapiens
ctcacaaaaaattct

SEQ ID NO: 123212 - DNA, 15 bp, Homo sapiens
tctcacaaaaaattc

SEQ ID NO: 123213 - DNA, 15 bp, Homo sapiens
ttctcacaaaaaatt

SEQ ID NO: 123214 - DNA, 15 bp, Homo sapiens
cttctcacaaaaaat

SEQ ID NO: 123215 - DNA, 15 bp, Homo sapiens
ccttctcacaaaaaa

SEQ ID NO: 123216 - DNA, 15 bp, Homo sapiens
gccttctcacaaaaa

SEQ ID NO: 123217 - DNA, 15 bp, Homo sapiens
agccttctcacaaaa

SEQ ID NO: 123218 - DNA, 15 bp, Homo sapiens
aagccttctcacaaa

SEQ ID NO: 123219 - DNA, 15 bp, Homo sapiens
aaagccttctcacaa

SEQ ID NO: 123220 - DNA, 15 bp, Homo sapiens
aaaagccttctcaca

SEQ ID NO: 123221 - DNA, 15 bp, Homo sapiens
gaaaagccttctcac

SEQ ID NO: 123222 - DNA, 15 bp, Homo sapiens
tgaaaagccttctca

SEQ ID NO: 123223 - DNA, 15 bp, Homo sapiens
gtgaaaagccttctc

SEQ ID NO: 123224 - DNA, 15 bp, Homo sapiens
agtgaaaagccttct

SEQ ID NO: 123225 - DNA, 15 bp, Homo sapiens
cagtgaaaagccttc

SEQ ID NO: 123226 - DNA, 15 bp, Homo sapiens
tcagtgaaaagcctt

SEQ ID NO: 123227 - DNA, 15 bp, Homo sapiens
ctcagtgaaaagcct

SEQ ID NO: 123228 - DNA, 15 bp, Homo sapiens
actcagtgaaaagcc

SEQ ID NO: 123229 - DNA, 15 bp, Homo sapiens
aactcagtgaaaagc

SEQ ID NO: 123230 - DNA, 15 bp, Homo sapiens
gaactcagtgaaaag

SEQ ID NO: 123231 - DNA, 15 bp, Homo sapiens
agaactcagtgaaaa

SEQ ID NO: 123232 - DNA, 15 bp, Homo sapiens
aagaactcagtgaaa

SEQ ID NO: 123233 - DNA, 15 bp, Homo sapiens
taagaactcagtgaa

SEQ ID NO: 123234 - DNA, 15 bp, Homo sapiens
ataagaactcagtga

SEQ ID NO: 123235 - DNA, 15 bp, Homo sapiens
gataagaactcagtg

SEQ ID NO: 123236 - DNA, 15 bp, Homo sapiens
agataagaactcagt

SEQ ID NO: 123237 - DNA, 15 bp, Homo sapiens
tagataagaactcag

SEQ ID NO: 123238 - DNA, 15 bp, Homo sapiens
ctagataagaactca

SEQ ID NO: 123239 - DNA, 15 bp, Homo sapiens
gctagataagaactc

SEQ ID NO: 123240 - DNA, 15 bp, Homo sapiens
tgctagataagaact

SEQ ID NO: 123241 - DNA, 15 bp, Homo sapiens
atgctagataagaac

SEQ ID NO: 123242 - DNA, 15 bp, Homo sapiens
aatgctagataagaa

SEQ ID NO: 123243 - DNA, 15 bp, Homo sapiens
caatgctagataaga

SEQ ID NO: 123244 - DNA, 15 bp, Homo sapiens
ccaatgctagataag

SEQ ID NO: 123245 - DNA, 15 bp, Homo sapiens
gccaatgctagataa

SEQ ID NO: 123246 - DNA, 15 bp, Homo sapiens
agccaatgctagata

SEQ ID NO: 123247 - DNA, 15 bp, Homo sapiens
gagccaatgctagat

SEQ ID NO: 123248 - DNA, 15 bp, Homo sapiens
tgagccaatgctaga

SEQ ID NO: 123249 - DNA, 15 bp, Homo sapiens
ttgagccaatgctag

SEQ ID NO: 123250 - DNA, 15 bp, Homo sapiens
tttgagccaatgcta

SEQ ID NO: 123251 - DNA, 15 bp, Homo sapiens
ctttgagccaatgct

SEQ ID NO: 123252 - DNA, 15 bp, Homo sapiens
gctttgagccaatgc

SEQ ID NO: 123253 - DNA, 15 bp, Homo sapiens
tgctttgagccaatg

SEQ ID NO: 123254 - DNA, 15 bp, Homo sapiens
ttgctttgagccaat

SEQ ID NO: 123255 - DNA, 15 bp, Homo sapiens
tttgctttgagccaa

SEQ ID NO: 123256 - DNA, 15 bp, Homo sapiens
atttgctttgagcca

SEQ ID NO: 123257 - DNA, 15 bp, Homo sapiens
aatttgctttgagcc

SEQ ID NO: 123258 - DNA, 15 bp, Homo sapiens
aaatttgctttgagc

SEQ ID NO: 123259 - DNA, 15 bp, Homo sapiens
aaaatttgctttgag

SEQ ID NO: 123260 - DNA, 15 bp, Homo sapiens
aaaaatttgctttga

SEQ ID NO: 123261 - DNA, 15 bp, Homo sapiens
caaaaatttgctttg

SEQ ID NO: 123262 - DNA, 15 bp, Homo sapiens
gcaaaaatttgcttt

SEQ ID NO: 123263 - DNA, 15 bp, Homo sapiens
agcaaaaatttgctt

SEQ ID NO: 123264 - DNA, 15 bp, Homo sapiens
aagcaaaaatttgct

SEQ ID NO: 123265 - DNA, 15 bp, Homo sapiens
gaagcaaaaatttgc

SEQ ID NO: 123266 - DNA, 15 bp, Homo sapiens
ggaagcaaaaatttg

SEQ ID NO: 123267 - DNA, 15 bp, Homo sapiens
tggaagcaaaaattt

SEQ ID NO: 123268 - DNA, 15 bp, Homo sapiens
atggaagcaaaaatt

SEQ ID NO: 123269 - DNA, 15 bp, Homo sapiens
gatggaagcaaaaat

SEQ ID NO: 123270 - DNA, 15 bp, Homo sapiens
agatggaagcaaaaa

SEQ ID NO: 123271 - DNA, 15 bp, Homo sapiens
aagatggaagcaaaa

SEQ ID NO: 123272 - DNA, 15 bp, Homo sapiens
aaagatggaagcaaa

SEQ ID NO: 123273 - DNA, 15 bp, Homo sapiens
aaaagatggaagcaa

SEQ ID NO: 123274 - DNA, 15 bp, Homo sapiens
gaaaagatggaagca

SEQ ID NO: 123275 - DNA, 15 bp, Homo sapiens
ggaaaagatggaagc

SEQ ID NO: 123276 - DNA, 15 bp, Homo sapiens
gggaaaagatggaag

SEQ ID NO: 123277 - DNA, 15 bp, Homo sapiens
ggggaaaagatggaa

SEQ ID NO: 123278 - DNA, 15 bp, Homo sapiens
gggggaaaagatgga

SEQ ID NO: 123279 - DNA, 15 bp, Homo sapiens
tgggggaaaagatgg

SEQ ID NO: 123280 - DNA, 15 bp, Homo sapiens
ttgggggaaaagatg

SEQ ID NO: 123281 - DNA, 15 bp, Homo sapiens
gttgggggaaaagat

SEQ ID NO: 123282 - DNA, 15 bp, Homo sapiens
agttgggggaaaaga

SEQ ID NO: 123283 - DNA, 15 bp, Homo sapiens
aagttgggggaaaag

SEQ ID NO: 123284 - DNA, 15 bp, Homo sapiens
aaagttgggggaaaa

SEQ ID NO: 123285 - DNA, 15 bp, Homo sapiens
caaagttgggggaaa

SEQ ID NO: 123286 - DNA, 15 bp, Homo sapiens
gcaaagttgggggaa

SEQ ID NO: 123287 - DNA, 15 bp, Homo sapiens
ggcaaagttggggga

SEQ ID NO: 123288 - DNA, 15 bp, Homo sapiens
aggcaaagttggggg

SEQ ID NO: 123289 - DNA, 15 bp, Homo sapiens
aaggcaaagttgggg

SEQ ID NO: 123290 - DNA, 15 bp, Homo sapiens
caaggcaaagttggg

SEQ ID NO: 123291 - DNA, 15 bp, Homo sapiens
tcaaggcaaagttgg

SEQ ID NO: 123292 - DNA, 15 bp, Homo sapiens
ctcaaggcaaagttg

SEQ ID NO: 123293 - DNA, 15 bp, Homo sapiens
gctcaaggcaaagtt

SEQ ID NO: 123294 - DNA, 15 bp, Homo sapiens
agctcaaggcaaagt

SEQ ID NO: 123295 - DNA, 15 bp, Homo sapiens
aagctcaaggcaaag

SEQ ID NO: 123296 - DNA, 15 bp, Homo sapiens
aaagctcaaggcaaa

SEQ ID NO: 123297 - DNA, 15 bp, Homo sapiens
caaagctcaaggcaa

SEQ ID NO: 123298 - DNA, 15 bp, Homo sapiens
gcaaagctcaaggca

SEQ ID NO: 123299 - DNA, 15 bp, Homo sapiens
ggcaaagctcaaggc

SEQ ID NO: 123300 - DNA, 15 bp, Homo sapiens
aggcaaagctcaagg

SEQ ID NO: 123301 - DNA, 15 bp, Homo sapiens
aaggcaaagctcaag

SEQ ID NO: 123302 - DNA, 15 bp, Homo sapiens
aaaggcaaagctcaa

SEQ ID NO: 123303 - DNA, 15 bp, Homo sapiens
taaaggcaaagctca

SEQ ID NO: 123304 - DNA, 15 bp, Homo sapiens
ttaaaggcaaagctc

SEQ ID NO: 123305 - DNA, 15 bp, Homo sapiens
tttaaaggcaaagct

SEQ ID NO: 123306 - DNA, 15 bp, Homo sapiens
ctttaaaggcaaagc

SEQ ID NO: 123307 - DNA, 15 bp, Homo sapiens
cctttaaaggcaaag

SEQ ID NO: 123308 - DNA, 15 bp, Homo sapiens
gcctttaaaggcaaa

SEQ ID NO: 123309 - DNA, 15 bp, Homo sapiens
cgcctttaaaggcaa

SEQ ID NO: 123310 - DNA, 15 bp, Homo sapiens
tcgcctttaaaggca

SEQ ID NO: 123311 - DNA, 15 bp, Homo sapiens
ttcgcctttaaaggc

SEQ ID NO: 123312 - DNA, 15 bp, Homo sapiens
tttcgcctttaaagg

SEQ ID NO: 123313 - DNA, 15 bp, Homo sapiens
ttttcgcctttaaag

SEQ ID NO: 123314 - DNA, 15 bp, Homo sapiens
cttttcgcctttaaa

SEQ ID NO: 123315 - DNA, 15 bp, Homo sapiens
ccttttcgcctttaa

SEQ ID NO: 123316 - DNA, 15 bp, Homo sapiens
tccttttcgccttta

SEQ ID NO: 123317 - DNA, 15 bp, Homo sapiens
ttccttttcgccttt

SEQ ID NO: 123318 - DNA, 15 bp, Homo sapiens
tttccttttcgcctt

SEQ ID NO: 123319 - DNA, 15 bp, Homo sapiens
ttttccttttcgcct

SEQ ID NO: 123320 - DNA, 15 bp, Homo sapiens
tttttccttttcgcc

SEQ ID NO: 123321 - DNA, 15 bp, Homo sapiens
ttttttccttttcgc

SEQ ID NO: 123322 - DNA, 15 bp, Homo sapiens
attttttccttttcg

SEQ ID NO: 123323 - DNA, 15 bp, Homo sapiens
cattttttccttttc

SEQ ID NO: 123324 - DNA, 15 bp, Homo sapiens
ccattttttcctttt

SEQ ID NO: 123325 - DNA, 15 bp, Homo sapiens
tccattttttccttt

SEQ ID NO: 123326 - DNA, 15 bp, Homo sapiens
ttccattttttcctt

SEQ ID NO: 123327 - DNA, 15 bp, Homo sapiens
cttccattttttcct

SEQ ID NO: 123328 - DNA, 15 bp, Homo sapiens
tcttccattttttcc

SEQ ID NO: 123329 - DNA, 15 bp, Homo sapiens
atcttccattttttc

SEQ ID NO: 123330 - DNA, 15 bp, Homo sapiens
catcttccatttttt

SEQ ID NO: 123331 - DNA, 15 bp, Homo sapiens
tcatcttccattttt

SEQ ID NO: 123332 - DNA, 15 bp, Homo sapiens
ctcatcttccatttt

SEQ ID NO: 123333 - DNA, 15 bp, Homo sapiens
tctcatcttccattt

SEQ ID NO: 123334 - DNA, 15 bp, Homo sapiens
atctcatcttccatt

SEQ ID NO: 123335 - DNA, 15 bp, Homo sapiens
catctcatcttccat

SEQ ID NO: 123336 - DNA, 15 bp, Homo sapiens
ccatctcatcttcca

SEQ ID NO: 123337 - DNA, 15 bp, Homo sapiens
accatctcatcttcc

SEQ ID NO: 123338 - DNA, 15 bp, Homo sapiens
caccatctcatcttc

SEQ ID NO: 123339 - DNA, 15 bp, Homo sapiens
tcaccatctcatctt

SEQ ID NO: 123340 - DNA, 15 bp, Homo sapiens
ctcaccatctcatct

SEQ ID NO: 123341 - DNA, 15 bp, Homo sapiens
cctcaccatctcatc

SEQ ID NO: 123342 - DNA, 15 bp, Homo sapiens
ccctcaccatctcat

SEQ ID NO: 123343 - DNA, 15 bp, Homo sapiens
gccctcaccatctca

SEQ ID NO: 123344 - DNA, 15 bp, Homo sapiens
tgccctcaccatctc

SEQ ID NO: 123345 - DNA, 15 bp, Homo sapiens
ttgccctcaccatct

SEQ ID NO: 123346 - DNA, 15 bp, Homo sapiens
cttgccctcaccatc

SEQ ID NO: 123347 - DNA, 15 bp, Homo sapiens
gcttgccctcaccat

SEQ ID NO: 123348 - DNA, 15 bp, Homo sapiens
tgcttgccctcacca

SEQ ID NO: 123349 - DNA, 15 bp, Homo sapiens
gtgcttgccctcacc

SEQ ID NO: 123350 - DNA, 15 bp, Homo sapiens
tgtgcttgccctcac

SEQ ID NO: 123351 - DNA, 15 bp, Homo sapiens
atgtgcttgccctca

SEQ ID NO: 123352 - DNA, 15 bp, Homo sapiens
catgtgcttgccctc

SEQ ID NO: 123353 - DNA, 15 bp, Homo sapiens
ccatgtgcttgccct

SEQ ID NO: 123354 - DNA, 15 bp, Homo sapiens
accatgtgcttgccc

SEQ ID NO: 123355 - DNA, 15 bp, Homo sapiens
caccatgtgcttgcc

SEQ ID NO: 123356 - DNA, 15 bp, Homo sapiens
ccaccatgtgcttgc

SEQ ID NO: 123357 - DNA, 15 bp, Homo sapiens
tccaccatgtgcttg

SEQ ID NO: 123358 - DNA, 15 bp, Homo sapiens
atccaccatgtgctt

SEQ ID NO: 123359 - DNA, 15 bp, Homo sapiens
catccaccatgtgct

SEQ ID NO: 123360 - DNA, 15 bp, Homo sapiens
acatccaccatgtgc

SEQ ID NO: 123361 - DNA, 15 bp, Homo sapiens
cacatccaccatgtg

SEQ ID NO: 123362 - DNA, 15 bp, Homo sapiens
ccacatccaccatgt

SEQ ID NO: 123363 - DNA, 15 bp, Homo sapiens
gccacatccaccatg

SEQ ID NO: 123364 - DNA, 15 bp, Homo sapiens
ggccacatccaccat

SEQ ID NO: 123365 - DNA, 15 bp, Homo sapiens
tggccacatccacca

SEQ ID NO: 123366 - DNA, 15 bp, Homo sapiens
ttggccacatccacc

SEQ ID NO: 123367 - DNA, 15 bp, Homo sapiens
attggccacatccac

SEQ ID NO: 123368 - DNA, 15 bp, Homo sapiens
cattggccacatcca

SEQ ID NO: 123369 - DNA, 15 bp, Homo sapiens
acattggccacatcc

SEQ ID NO: 123370 - DNA, 15 bp, Homo sapiens
tacattggccacatc

SEQ ID NO: 123371 - DNA, 15 bp, Homo sapiens
ttacattggccacat

SEQ ID NO: 123372 - DNA, 15 bp, Homo sapiens
cttacattggccaca

SEQ ID NO: 123373 - DNA, 15 bp, Homo sapiens
ccttacattggccac

SEQ ID NO: 123374 - DNA, 15 bp, Homo sapiens
cccttacattggcca

SEQ ID NO: 123375 - DNA, 15 bp, Homo sapiens
acccttacattggcc

SEQ ID NO: 123376 - DNA, 15 bp, Homo sapiens
tacccttacattggc

SEQ ID NO: 123377 - DNA, 15 bp, Homo sapiens
gtacccttacattgg

SEQ ID NO: 123378 - DNA, 15 bp, Homo sapiens
agtacccttacattg

SEQ ID NO: 123379 - DNA, 15 bp, Homo sapiens
aagtacccttacatt

SEQ ID NO: 123380 - DNA, 15 bp, Homo sapiens
taagtacccttacat

SEQ ID NO: 123381 - DNA, 15 bp, Homo sapiens
ctaagtacccttaca

SEQ ID NO: 123382 - DNA, 15 bp, Homo sapiens
cctaagtacccttac

SEQ ID NO: 123383 - DNA, 15 bp, Homo sapiens
acctaagtaccctta

SEQ ID NO: 123384 - DNA, 15 bp, Homo sapiens
tacctaagtaccctt

SEQ ID NO: 123385 - DNA, 15 bp, Homo sapiens
gtacctaagtaccct

SEQ ID NO: 123386 - DNA, 15 bp, Homo sapiens
ggtacctaagtaccc

SEQ ID NO: 123387 - DNA, 15 bp, Homo sapiens
aggtacctaagtacc

SEQ ID NO: 123388 - DNA, 15 bp, Homo sapiens
aaggtacctaagtac

SEQ ID NO: 123389 - DNA, 15 bp, Homo sapiens
caaggtacctaagta

SEQ ID NO: 123390 - DNA, 15 bp, Homo sapiens
ccaaggtacctaagt

SEQ ID NO: 123391 - DNA, 15 bp, Homo sapiens
cccaaggtacctaag

SEQ ID NO: 123392 - DNA, 15 bp, Homo sapiens
acccaaggtacctaa

SEQ ID NO: 123393 - DNA, 15 bp, Homo sapiens
cacccaaggtaccta

SEQ ID NO: 123394 - DNA, 15 bp, Homo sapiens
tcacccaaggtacct

SEQ ID NO: 123395 - DNA, 15 bp, Homo sapiens
ctcacccaaggtacc

SEQ ID NO: 123396 - DNA, 15 bp, Homo sapiens
gctcacccaaggtac

SEQ ID NO: 123397 - DNA, 15 bp, Homo sapiens
ggctcacccaaggta

SEQ ID NO: 123398 - DNA, 15 bp, Homo sapiens
gggctcacccaaggt

SEQ ID NO: 123399 - DNA, 15 bp, Homo sapiens
agggctcacccaagg

SEQ ID NO: 123400 - DNA, 15 bp, Homo sapiens
gagggctcacccaag

SEQ ID NO: 123401 - DNA, 15 bp, Homo sapiens
tgagggctcacccaa

SEQ ID NO: 123402 - DNA, 15 bp, Homo sapiens
ctgagggctcaccca

SEQ ID NO: 123403 - DNA, 15 bp, Homo sapiens
tctgagggctcaccc

SEQ ID NO: 123404 - DNA, 15 bp, Homo sapiens
ttctgagggctcacc

SEQ ID NO: 123405 - DNA, 15 bp, Homo sapiens
attctgagggctcac

SEQ ID NO: 123406 - DNA, 15 bp, Homo sapiens
gattctgagggctca

SEQ ID NO: 123407 - DNA, 15 bp, Homo sapiens
tgattctgagggctc

SEQ ID NO: 123408 - DNA, 15 bp, Homo sapiens
ctgattctgagggct

SEQ ID NO: 123409 - DNA, 15 bp, Homo sapiens
tctgattctgagggc

SEQ ID NO: 123410 - DNA, 15 bp, Homo sapiens
atctgattctgaggg

SEQ ID NO: 123411 - DNA, 15 bp, Homo sapiens
catctgattctgagg

SEQ ID NO: 123412 - DNA, 15 bp, Homo sapiens
acatctgattctgag

SEQ ID NO: 123413 - DNA, 15 bp, Homo sapiens
tacatctgattctga

SEQ ID NO: 123414 - DNA, 15 bp, Homo sapiens
ctacatctgattctg

SEQ ID NO: 123415 - DNA, 15 bp, Homo sapiens
actacatctgattct

SEQ ID NO: 123416 - DNA, 15 bp, Homo sapiens
aactacatctgattc

SEQ ID NO: 123417 - DNA, 15 bp, Homo sapiens
gaactacatctgatt

SEQ ID NO: 123418 - DNA, 15 bp, Homo sapiens
tgaactacatctgat

SEQ ID NO: 123419 - DNA, 15 bp, Homo sapiens
gtgaactacatctga

SEQ ID NO: 123420 - DNA, 15 bp, Homo sapiens
tgtgaactacatctg

SEQ ID NO: 123421 - DNA, 15 bp, Homo sapiens
atgtgaactacatct

SEQ ID NO: 123422 - DNA, 15 bp, Homo sapiens
catgtgaactacatc

SEQ ID NO: 123423 - DNA, 15 bp, Homo sapiens
acatgtgaactacat

SEQ ID NO: 123424 - DNA, 15 bp, Homo sapiens
tacatgtgaactaca

SEQ ID NO: 123425 - DNA, 15 bp, Homo sapiens
gtacatgtgaactac

SEQ ID NO: 123426 - DNA, 15 bp, Homo sapiens
tgtacatgtgaacta

SEQ ID NO: 123427 - DNA, 15 bp, Homo sapiens
atgtacatgtgaact

SEQ ID NO: 123428 - DNA, 15 bp, Homo sapiens
aatgtacatgtgaac

SEQ ID NO: 123429 - DNA, 15 bp, Homo sapiens
aaatgtacatgtgaa

SEQ ID NO: 123430 - DNA, 15 bp, Homo sapiens
gaaatgtacatgtga

SEQ ID NO: 123431 - DNA, 15 bp, Homo sapiens
ggaaatgtacatgtg

SEQ ID NO: 123432 - DNA, 15 bp, Homo sapiens
tggaaatgtacatgt

SEQ ID NO: 123433 - DNA, 15 bp, Homo sapiens
ctggaaatgtacatg

SEQ ID NO: 123434 - DNA, 15 bp, Homo sapiens
tctggaaatgtacat

SEQ ID NO: 123435 - DNA, 15 bp, Homo sapiens
ttctggaaatgtaca

SEQ ID NO: 123436 - DNA, 15 bp, Homo sapiens
attctggaaatgtac

SEQ ID NO: 123437 - DNA, 15 bp, Homo sapiens
aattctggaaatgta

SEQ ID NO: 123438 - DNA, 15 bp, Homo sapiens
taattctggaaatgt

SEQ ID NO: 123439 - DNA, 15 bp, Homo sapiens
ctaattctggaaatg

SEQ ID NO: 123440 - DNA, 15 bp, Homo sapiens
actaattctggaaat

SEQ ID NO: 123441 - DNA, 15 bp, Homo sapiens
tactaattctggaaa

SEQ ID NO: 123442 - DNA, 15 bp, Homo sapiens
ttactaattctggaa

SEQ ID NO: 123443 - DNA, 15 bp, Homo sapiens
attactaattctgga

SEQ ID NO: 123444 - DNA, 15 bp, Homo sapiens
aattactaattctgg

SEQ ID NO: 123445 - DNA, 15 bp, Homo sapiens
gaattactaattctg

SEQ ID NO: 123446 - DNA, 15 bp, Homo sapiens
agaattactaattct

SEQ ID NO: 123447 - DNA, 15 bp, Homo sapiens
aagaattactaattc

SEQ ID NO: 123448 - DNA, 15 bp, Homo sapiens
taagaattactaatt

SEQ ID NO: 123449 - DNA, 15 bp, Homo sapiens
ttaagaattactaat

SEQ ID NO: 123450 - DNA, 15 bp, Homo sapiens
cttaagaattactaa

SEQ ID NO: 123451 - DNA, 15 bp, Homo sapiens
acttaagaattacta

SEQ ID NO: 123452 - DNA, 15 bp, Homo sapiens
aacttaagaattact

SEQ ID NO: 123453 - DNA, 15 bp, Homo sapiens
aaacttaagaattac

SEQ ID NO: 123454 - DNA, 15 bp, Homo sapiens
caaacttaagaatta

SEQ ID NO: 123455 - DNA, 15 bp, Homo sapiens
acaaacttaagaatt

SEQ ID NO: 123456 - DNA, 15 bp, Homo sapiens
tacaaacttaagaat

SEQ ID NO: 123457 - DNA, 15 bp, Homo sapiens
ttacaaacttaagaa

SEQ ID NO: 123458 - DNA, 15 bp, Homo sapiens
attacaaacttaaga

SEQ ID NO: 123459 - DNA, 15 bp, Homo sapiens
cattacaaacttaag

SEQ ID NO: 123460 - DNA, 15 bp, Homo sapiens
acattacaaacttaa

SEQ ID NO: 123461 - DNA, 15 bp, Homo sapiens
gacattacaaactta

SEQ ID NO: 123462 - DNA, 15 bp, Homo sapiens
agacattacaaactt

SEQ ID NO: 123463 - DNA, 15 bp, Homo sapiens
aagacattacaaact

SEQ ID NO: 123464 - DNA, 15 bp, Homo sapiens
caagacattacaaac

SEQ ID NO: 123465 - DNA, 15 bp, Homo sapiens
gcaagacattacaaa

SEQ ID NO: 123466 - DNA, 15 bp, Homo sapiens
agcaagacattacaa

SEQ ID NO: 123467 - DNA, 15 bp, Homo sapiens
aagcaagacattaca

SEQ ID NO: 123468 - DNA, 15 bp, Homo sapiens
aaagcaagacattac

SEQ ID NO: 123469 - DNA, 15 bp, Homo sapiens
taaagcaagacatta

SEQ ID NO: 123470 - DNA, 15 bp, Homo sapiens
gtaaagcaagacatt

SEQ ID NO: 123471 - DNA, 15 bp, Homo sapiens
ggtaaagcaagacat

SEQ ID NO: 123472 - DNA, 15 bp, Homo sapiens
tggtaaagcaagaca

SEQ ID NO: 123473 - DNA, 15 bp, Homo sapiens
gtggtaaagcaagac

SEQ ID NO: 123474 - DNA, 15 bp, Homo sapiens
agtggtaaagcaaga

SEQ ID NO: 123475 - DNA, 15 bp, Homo sapiens
gagtggtaaagcaag

SEQ ID NO: 123476 - DNA, 15 bp, Homo sapiens
cgagtggtaaagcaa

SEQ ID NO: 123477 - DNA, 15 bp, Homo sapiens
acgagtggtaaagca

SEQ ID NO: 123478 - DNA, 15 bp, Homo sapiens
cacgagtggtaaagc

SEQ ID NO: 123479 - DNA, 15 bp, Homo sapiens
acacgagtggtaaag

SEQ ID NO: 123480 - DNA, 15 bp, Homo sapiens
gacacgagtggtaaa

SEQ ID NO: 123481 - DNA, 15 bp, Homo sapiens
tgacacgagtggtaa

SEQ ID NO: 123482 - DNA, 15 bp, Homo sapiens
atgacacgagtggta

SEQ ID NO: 123483 - DNA, 15 bp, Homo sapiens
catgacacgagtggt

SEQ ID NO: 123484 - DNA, 15 bp, Homo sapiens
tcatgacacgagtgg

SEQ ID NO: 123485 - DNA, 15 bp, Homo sapiens
atcatgacacgagtg

SEQ ID NO: 123486 - DNA, 15 bp, Homo sapiens
catcatgacacgagt

SEQ ID NO: 123487 - DNA, 15 bp, Homo sapiens
gcatcatgacacgag

SEQ ID NO: 123488 - DNA, 15 bp, Homo sapiens
tgcatcatgacacga

SEQ ID NO: 123489 - DNA, 15 bp, Homo sapiens
ttgcatcatgacacg

SEQ ID NO: 123490 - DNA, 15 bp, Homo sapiens
tttgcatcatgacac

SEQ ID NO: 123491 - DNA, 15 bp, Homo sapiens
atttgcatcatgaca

SEQ ID NO: 123492 - DNA, 15 bp, Homo sapiens
catttgcatcatgac

SEQ ID NO: 123493 - DNA, 15 bp, Homo sapiens
tcatttgcatcatga

SEQ ID NO: 123494 - DNA, 15 bp, Homo sapiens
ttcatttgcatcatg

SEQ ID NO: 123495 - DNA, 15 bp, Homo sapiens
tttcatttgcatcat

SEQ ID NO: 123496 - DNA, 15 bp, Homo sapiens
ctttcatttgcatca

SEQ ID NO: 123497 - DNA, 15 bp, Homo sapiens
gctttcatttgcatc

SEQ ID NO: 123498 - DNA, 15 bp, Homo sapiens
tgctttcatttgcat

SEQ ID NO: 123499 - DNA, 15 bp, Homo sapiens
ctgctttcatttgca

SEQ ID NO: 123500 - DNA, 15 bp, Homo sapiens
actgctttcatttgc

SEQ ID NO: 123501 - DNA, 15 bp, Homo sapiens
gactgctttcatttg

SEQ ID NO: 123502 - DNA, 15 bp, Homo sapiens
tgactgctttcattt

SEQ ID NO: 123503 - DNA, 15 bp, Homo sapiens
atgactgctttcatt

SEQ ID NO: 123504 - DNA, 15 bp, Homo sapiens
aatgactgctttcat

SEQ ID NO: 123505 - DNA, 15 bp, Homo sapiens
aaatgactgctttca

SEQ ID NO: 123506 - DNA, 15 bp, Homo sapiens
aaaatgactgctttc

SEQ ID NO: 123507 - DNA, 15 bp, Homo sapiens
gaaaatgactgcttt

SEQ ID NO: 123508 - DNA, 15 bp, Homo sapiens
ggaaaatgactgctt

SEQ ID NO: 123509 - DNA, 15 bp, Homo sapiens
tggaaaatgactgct

SEQ ID NO: 123510 - DNA, 15 bp, Homo sapiens
ctggaaaatgactgc

SEQ ID NO: 123511 - DNA, 15 bp, Homo sapiens
actggaaaatgactg

SEQ ID NO: 123512 - DNA, 15 bp, Homo sapiens
tactggaaaatgact

SEQ ID NO: 123513 - DNA, 15 bp, Homo sapiens
ttactggaaaatgac

SEQ ID NO: 123514 - DNA, 15 bp, Homo sapiens
attactggaaaatga

SEQ ID NO: 123515 - DNA, 15 bp, Homo sapiens
cattactggaaaatg

SEQ ID NO: 123516 - DNA, 15 bp, Homo sapiens
acattactggaaaat

SEQ ID NO: 123517 - DNA, 15 bp, Homo sapiens
tacattactggaaaa

SEQ ID NO: 123518 - DNA, 15 bp, Homo sapiens
atacattactggaaa

SEQ ID NO: 123519 - DNA, 15 bp, Homo sapiens
tatacattactggaa

SEQ ID NO: 123520 - DNA, 15 bp, Homo sapiens
atatacattactgga

SEQ ID NO: 123521 - DNA, 15 bp, Homo sapiens
catatacattactgg

SEQ ID NO: 123522 - DNA, 15 bp, Homo sapiens
tcatatacattactg

SEQ ID NO: 123523 - DNA, 15 bp, Homo sapiens
atcatatacattact

SEQ ID NO: 123524 - DNA, 15 bp, Homo sapiens
aatcatatacattac

SEQ ID NO: 123525 - DNA, 15 bp, Homo sapiens
caatcatatacatta

SEQ ID NO: 123526 - DNA, 15 bp, Homo sapiens
acaatcatatacatt

SEQ ID NO: 123527 - DNA, 15 bp, Homo sapiens
tacaatcatatacat

SEQ ID NO: 123528 - DNA, 15 bp, Homo sapiens
ttacaatcatataca

SEQ ID NO: 123529 - DNA, 15 bp, Homo sapiens
tttacaatcatatac

SEQ ID NO: 123530 - DNA, 15 bp, Homo sapiens
ttttacaatcatata

SEQ ID NO: 123531 - DNA, 15 bp, Homo sapiens
attttacaatcatat

SEQ ID NO: 123532 - DNA, 15 bp, Homo sapiens
tattttacaatcata

SEQ ID NO: 123533 - DNA, 15 bp, Homo sapiens
ttattttacaatcat

SEQ ID NO: 123534 - DNA, 15 bp, Homo sapiens
tttattttacaatca

SEQ ID NO: 123535 - DNA, 15 bp, Homo sapiens
atttattttacaatc

SEQ ID NO: 123536 - DNA, 15 bp, Homo sapiens
tatttattttacaat

SEQ ID NO: 123537 - DNA, 15 bp, Homo sapiens
ttatttattttacaa

SEQ ID NO: 123538 - DNA, 15 bp, Homo sapiens
cttatttattttaca

SEQ ID NO: 123539 - DNA, 15 bp, Homo sapiens
ccttatttattttac

SEQ ID NO: 123540 - DNA, 15 bp, Homo sapiens
tccttatttatttta

SEQ ID NO: 123541 - DNA, 15 bp, Homo sapiens
ttccttatttatttt

SEQ ID NO: 123542 - DNA, 15 bp, Homo sapiens
tttccttatttattt

SEQ ID NO: 123543 - DNA, 15 bp, Homo sapiens
atttccttatttatt

SEQ ID NO: 123544 - DNA, 15 bp, Homo sapiens
catttccttatttat

SEQ ID NO: 123545 - DNA, 15 bp, Homo sapiens
tcatttccttattta

SEQ ID NO: 123546 - DNA, 15 bp, Homo sapiens
atcatttccttattt

SEQ ID NO: 123547 - DNA, 15 bp, Homo sapiens
gatcatttccttatt

SEQ ID NO: 123548 - DNA, 15 bp, Homo sapiens
tgatcatttccttat

SEQ ID NO: 123549 - DNA, 15 bp, Homo sapiens
ttgatcatttcctta

SEQ ID NO: 123550 - DNA, 15 bp, Homo sapiens
cttgatcatttcctt

SEQ ID NO: 123551 - DNA, 15 bp, Homo sapiens
acttgatcatttcct

SEQ ID NO: 123552 - DNA, 15 bp, Homo sapiens
tacttgatcatttcc

SEQ ID NO: 123553 - DNA, 15 bp, Homo sapiens
gtacttgatcatttc

SEQ ID NO: 123554 - DNA, 15 bp, Homo sapiens
ggtacttgatcattt

SEQ ID NO: 123555 - DNA, 15 bp, Homo sapiens
aggtacttgatcatt

SEQ ID NO: 123556 - DNA, 15 bp, Homo sapiens
taggtacttgatcat

SEQ ID NO: 123557 - DNA, 15 bp, Homo sapiens
ataggtacttgatca

SEQ ID NO: 123558 - DNA, 15 bp, Homo sapiens
aataggtacttgatc

SEQ ID NO: 123559 - DNA, 15 bp, Homo sapiens
aaataggtacttgat

SEQ ID NO: 123560 - DNA, 15 bp, Homo sapiens
aaaataggtacttga

SEQ ID NO: 123561 - DNA, 15 bp, Homo sapiens
aaaaataggtacttg

SEQ ID NO: 123562 - DNA, 15 bp, Homo sapiens
aaaaaataggtactt

SEQ ID NO: 123563 - DNA, 15 bp, Homo sapiens
taaaaaataggtact

SEQ ID NO: 123564 - DNA, 15 bp, Homo sapiens
gtaaaaaataggtac

SEQ ID NO: 123565 - DNA, 15 bp, Homo sapiens
agtaaaaaataggta

SEQ ID NO: 123566 - DNA, 15 bp, Homo sapiens
cagtaaaaaataggt

SEQ ID NO: 123567 - DNA, 15 bp, Homo sapiens
ccagtaaaaaatagg

SEQ ID NO: 123568 - DNA, 15 bp, Homo sapiens
accagtaaaaaatag

SEQ ID NO: 123569 - DNA, 15 bp, Homo sapiens
taccagtaaaaaata

SEQ ID NO: 123570 - DNA, 15 bp, Homo sapiens
gtaccagtaaaaaat

SEQ ID NO: 123571 - DNA, 15 bp, Homo sapiens
agtaccagtaaaaaa

SEQ ID NO: 123572 - DNA, 15 bp, Homo sapiens
aagtaccagtaaaaa

SEQ ID NO: 123573 - DNA, 15 bp, Homo sapiens
caagtaccagtaaaa

SEQ ID NO: 123574 - DNA, 15 bp, Homo sapiens
tcaagtaccagtaaa

SEQ ID NO: 123575 - DNA, 15 bp, Homo sapiens
ttcaagtaccagtaa

SEQ ID NO: 123576 - DNA, 15 bp, Homo sapiens
tttcaagtaccagta

SEQ ID NO: 123577 - DNA, 15 bp, Homo sapiens
atttcaagtaccagt

SEQ ID NO: 123578 - DNA, 15 bp, Homo sapiens
gatttcaagtaccag

SEQ ID NO: 123579 - DNA, 15 bp, Homo sapiens
ggatttcaagtacca

SEQ ID NO: 123580 - DNA, 15 bp, Homo sapiens
gggatttcaagtacc

SEQ ID NO: 123581 - DNA, 15 bp, Homo sapiens
tgggatttcaagtac

SEQ ID NO: 123582 - DNA, 15 bp, Homo sapiens
ttgggatttcaagta

SEQ ID NO: 123583 - DNA, 15 bp, Homo sapiens
cttgggatttcaagt

SEQ ID NO: 123584 - DNA, 15 bp, Homo sapiens
acttgggatttcaag

SEQ ID NO: 123585 - DNA, 15 bp, Homo sapiens
aacttgggatttcaa

SEQ ID NO: 123586 - DNA, 15 bp, Homo sapiens
aaacttgggatttca

SEQ ID NO: 123587 - DNA, 15 bp, Homo sapiens
aaaacttgggatttc

SEQ ID NO: 123588 - DNA, 15 bp, Homo sapiens
taaaacttgggattt

SEQ ID NO: 123589 - DNA, 15 bp, Homo sapiens
ttaaaacttgggatt

SEQ ID NO: 123590 - DNA, 15 bp, Homo sapiens
attaaaacttgggat

SEQ ID NO: 123591 - DNA, 15 bp, Homo sapiens
tattaaaacttggga

SEQ ID NO: 123592 - DNA, 15 bp, Homo sapiens
ctattaaaacttggg

SEQ ID NO: 123593 - DNA, 15 bp, Homo sapiens
tctattaaaacttgg

SEQ ID NO: 123594 - DNA, 15 bp, Homo sapiens
atctattaaaacttg

SEQ ID NO: 123595 - DNA, 15 bp, Homo sapiens
catctattaaaactt

SEQ ID NO: 123596 - DNA, 15 bp, Homo sapiens
acatctattaaaact

SEQ ID NO: 123597 - DNA, 15 bp, Homo sapiens
aacatctattaaaac

SEQ ID NO: 123598 - DNA, 15 bp, Homo sapiens
taacatctattaaaa

SEQ ID NO: 123599 - DNA, 15 bp, Homo sapiens
gtaacatctattaaa

SEQ ID NO: 123600 - DNA, 15 bp, Homo sapiens
agtaacatctattaa

SEQ ID NO: 123601 - DNA, 15 bp, Homo sapiens
cagtaacatctatta

SEQ ID NO: 123602 - DNA, 15 bp, Homo sapiens
tcagtaacatctatt

SEQ ID NO: 123603 - DNA, 15 bp, Homo sapiens
ttcagtaacatctat

SEQ ID NO: 123604 - DNA, 15 bp, Homo sapiens
tttcagtaacatcta

SEQ ID NO: 123605 - DNA, 15 bp, Homo sapiens
ttttcagtaacatct

SEQ ID NO: 123606 - DNA, 15 bp, Homo sapiens
tttttcagtaacatc

SEQ ID NO: 123607 - DNA, 15 bp, Homo sapiens
atttttcagtaacat

SEQ ID NO: 123608 - DNA, 15 bp, Homo sapiens
tatttttcagtaaca

SEQ ID NO: 123609 - DNA, 15 bp, Homo sapiens
gtatttttcagtaac

SEQ ID NO: 123610 - DNA, 15 bp, Homo sapiens
agtatttttcagtaa

SEQ ID NO: 123611 - DNA, 15 bp, Homo sapiens
aagtatttttcagta

SEQ ID NO: 123612 - DNA, 15 bp, Homo sapiens
taagtatttttcagt

SEQ ID NO: 123613 - DNA, 15 bp, Homo sapiens
ttaagtatttttcag

SEQ ID NO: 123614 - DNA, 15 bp, Homo sapiens
tttaagtatttttca

SEQ ID NO: 123615 - DNA, 15 bp, Homo sapiens
atttaagtatttttc

SEQ ID NO: 123616 - DNA, 15 bp, Homo sapiens
aatttaagtattttt

SEQ ID NO: 123617 - DNA, 15 bp, Homo sapiens
caatttaagtatttt

SEQ ID NO: 123618 - DNA, 15 bp, Homo sapiens
ccaatttaagtattt

SEQ ID NO: 123619 - DNA, 15 bp, Homo sapiens
accaatttaagtatt

SEQ ID NO: 123620 - DNA, 15 bp, Homo sapiens
aaccaatttaagtat

SEQ ID NO: 123621 - DNA, 15 bp, Homo sapiens
aaaccaatttaagta

SEQ ID NO: 123622 - DNA, 15 bp, Homo sapiens
taaaccaatttaagt

SEQ ID NO: 123623 - DNA, 15 bp, Homo sapiens
ttaaaccaatttaag

SEQ ID NO: 123624 - DNA, 15 bp, Homo sapiens
tttaaaccaatttaa

SEQ ID NO: 123625 - DNA, 15 bp, Homo sapiens
ctttaaaccaattta

SEQ ID NO: 123626 - DNA, 15 bp, Homo sapiens
gctttaaaccaattt

SEQ ID NO: 123627 - DNA, 15 bp, Homo sapiens
agctttaaaccaatt

SEQ ID NO: 123628 - DNA, 15 bp, Homo sapiens
aagctttaaaccaat

SEQ ID NO: 123629 - DNA, 15 bp, Homo sapiens
aaagctttaaaccaa

SEQ ID NO: 123630 - DNA, 15 bp, Homo sapiens
aaaagctttaaacca

SEQ ID NO: 123631 - DNA, 15 bp, Homo sapiens
aaaaagctttaaacc

SEQ ID NO: 123632 - DNA, 15 bp, Homo sapiens
gaaaaagctttaaac

SEQ ID NO: 123633 - DNA, 15 bp, Homo sapiens
tgaaaaagctttaaa

SEQ ID NO: 123634 - DNA, 15 bp, Homo sapiens
atgaaaaagctttaa

SEQ ID NO: 123635 - DNA, 15 bp, Homo sapiens
aatgaaaaagcttta

SEQ ID NO: 123636 - DNA, 15 bp, Homo sapiens
caatgaaaaagcttt

SEQ ID NO: 123637 - DNA, 15 bp, Homo sapiens
acaatgaaaaagctt

SEQ ID NO: 123638 - DNA, 15 bp, Homo sapiens
cacaatgaaaaagct

SEQ ID NO: 123639 - DNA, 15 bp, Homo sapiens
ccacaatgaaaaagc

SEQ ID NO: 123640 - DNA, 15 bp, Homo sapiens
accacaatgaaaaag

SEQ ID NO: 123641 - DNA, 15 bp, Homo sapiens
aaccacaatgaaaaa

SEQ ID NO: 123642 - DNA, 15 bp, Homo sapiens
aaaccacaatgaaaa

SEQ ID NO: 123643 - DNA, 15 bp, Homo sapiens
aaaaccacaatgaaa

SEQ ID NO: 123644 - DNA, 15 bp, Homo sapiens
caaaaccacaatgaa

SEQ ID NO: 123645 - DNA, 15 bp, Homo sapiens
tcaaaaccacaatga

SEQ ID NO: 123646 - DNA, 15 bp, Homo sapiens
ctcaaaaccacaatg

SEQ ID NO: 123647 - DNA, 15 bp, Homo sapiens
actcaaaaccacaat

SEQ ID NO: 123648 - DNA, 15 bp, Homo sapiens
aactcaaaaccacaa

SEQ ID NO: 123649 - DNA, 15 bp, Homo sapiens
taactcaaaaccaca

SEQ ID NO: 123650 - DNA, 15 bp, Homo sapiens
ataactcaaaaccac

SEQ ID NO: 123651 - DNA, 15 bp, Homo sapiens
gataactcaaaacca

SEQ ID NO: 123652 - DNA, 15 bp, Homo sapiens
agataactcaaaacc

SEQ ID NO: 123653 - DNA, 15 bp, Homo sapiens
aagataactcaaaac

SEQ ID NO: 123654 - DNA, 15 bp, Homo sapiens
taagataactcaaaa

SEQ ID NO: 123655 - DNA, 15 bp, Homo sapiens
ttaagataactcaaa

SEQ ID NO: 123656 - DNA, 15 bp, Homo sapiens
tttaagataactcaa

SEQ ID NO: 123657 - DNA, 15 bp, Homo sapiens
ctttaagataactca

SEQ ID NO: 123658 - DNA, 15 bp, Homo sapiens
actttaagataactc

SEQ ID NO: 123659 - DNA, 15 bp, Homo sapiens
cactttaagataact

SEQ ID NO: 123660 - DNA, 15 bp, Homo sapiens
ccactttaagataac

SEQ ID NO: 123661 - DNA, 15 bp, Homo sapiens
cccactttaagataa

SEQ ID NO: 123662 - DNA, 15 bp, Homo sapiens
acccactttaagata

SEQ ID NO: 123663 - DNA, 15 bp, Homo sapiens
aacccactttaagat

SEQ ID NO: 123664 - DNA, 15 bp, Homo sapiens
aaacccactttaaga

SEQ ID NO: 123665 - DNA, 15 bp, Homo sapiens
aaaacccactttaag

SEQ ID NO: 123666 - DNA, 15 bp, Homo sapiens
gaaaacccactttaa

SEQ ID NO: 123667 - DNA, 15 bp, Homo sapiens
agaaaacccacttta

SEQ ID NO: 123668 - DNA, 15 bp, Homo sapiens
aagaaaacccacttt

SEQ ID NO: 123669 - DNA, 15 bp, Homo sapiens
taagaaaacccactt

SEQ ID NO: 123670 - DNA, 15 bp, Homo sapiens
ttaagaaaacccact

SEQ ID NO: 123671 - DNA, 15 bp, Homo sapiens
attaagaaaacccac

SEQ ID NO: 123672 - DNA, 15 bp, Homo sapiens
gattaagaaaaccca

SEQ ID NO: 123673 - DNA, 15 bp, Homo sapiens
agattaagaaaaccc

SEQ ID NO: 123674 - DNA, 15 bp, Homo sapiens
aagattaagaaaacc

SEQ ID NO: 123675 - DNA, 15 bp, Homo sapiens
aaagattaagaaaac

SEQ ID NO: 123676 - DNA, 15 bp, Homo sapiens
aaaagattaagaaaa

SEQ ID NO: 123677 - DNA, 15 bp, Homo sapiens
taaaagattaagaaa

SEQ ID NO: 123678 - DNA, 15 bp, Homo sapiens
gtaaaagattaagaa

SEQ ID NO: 123679 - DNA, 15 bp, Homo sapiens
agtaaaagattaaga

SEQ ID NO: 123680 - DNA, 15 bp, Homo sapiens
gagtaaaagattaag

SEQ ID NO: 123681 - DNA, 15 bp, Homo sapiens
agagtaaaagattaa

SEQ ID NO: 123682 - DNA, 15 bp, Homo sapiens
cagagtaaaagatta

SEQ ID NO: 123683 - DNA, 15 bp, Homo sapiens
acagagtaaaagatt

SEQ ID NO: 123684 - DNA, 15 bp, Homo sapiens
cacagagtaaaagat

SEQ ID NO: 123685 - DNA, 15 bp, Homo sapiens
tcacagagtaaaaga

SEQ ID NO: 123686 - DNA, 15 bp, Homo sapiens
gtcacagagtaaaag

SEQ ID NO: 123687 - DNA, 15 bp, Homo sapiens
agtcacagagtaaaa

SEQ ID NO: 123688 - DNA, 15 bp, Homo sapiens
tagtcacagagtaaa

SEQ ID NO: 123689 - DNA, 15 bp, Homo sapiens
ttagtcacagagtaa

SEQ ID NO: 123690 - DNA, 15 bp, Homo sapiens
attagtcacagagta

SEQ ID NO: 123691 - DNA, 15 bp, Homo sapiens
gattagtcacagagt

SEQ ID NO: 123692 - DNA, 15 bp, Homo sapiens
ggattagtcacagag

SEQ ID NO: 123693 - DNA, 15 bp, Homo sapiens
gggattagtcacaga

SEQ ID NO: 123694 - DNA, 15 bp, Homo sapiens
agggattagtcacag

SEQ ID NO: 123695 - DNA, 15 bp, Homo sapiens
aagggattagtcaca

SEQ ID NO: 123696 - DNA, 15 bp, Homo sapiens
gaagggattagtcac

SEQ ID NO: 123697 - DNA, 15 bp, Homo sapiens
tgaagggattagtca

SEQ ID NO: 123698 - DNA, 15 bp, Homo sapiens
gtgaagggattagtc

SEQ ID NO: 123699 - DNA, 15 bp, Homo sapiens
agtgaagggattagt

SEQ ID NO: 123700 - DNA, 15 bp, Homo sapiens
aagtgaagggattag

SEQ ID NO: 123701 - DNA, 15 bp, Homo sapiens
aaagtgaagggatta

SEQ ID NO: 123702 - DNA, 15 bp, Homo sapiens
aaaagtgaagggatt

SEQ ID NO: 123703 - DNA, 15 bp, Homo sapiens
aaaaagtgaagggat

SEQ ID NO: 123704 - DNA, 15 bp, Homo sapiens
taaaaagtgaaggga

SEQ ID NO: 123705 - DNA, 15 bp, Homo sapiens
ttaaaaagtgaaggg

SEQ ID NO: 123706 - DNA, 15 bp, Homo sapiens
attaaaaagtgaagg

SEQ ID NO: 123707 - DNA, 15 bp, Homo sapiens
tattaaaaagtgaag

SEQ ID NO: 123708 - DNA, 15 bp, Homo sapiens
gtattaaaaagtgaa

SEQ ID NO: 123709 - DNA, 15 bp, Homo sapiens
tgtattaaaaagtga

SEQ ID NO: 123710 - DNA, 15 bp, Homo sapiens
atgtattaaaaagtg

SEQ ID NO: 123711 - DNA, 15 bp, Homo sapiens
aatgtattaaaaagt

SEQ ID NO: 123712 - DNA, 15 bp, Homo sapiens
caatgtattaaaaag

SEQ ID NO: 123713 - DNA, 15 bp, Homo sapiens
gcaatgtattaaaaa

SEQ ID NO: 123714 - DNA, 15 bp, Homo sapiens
agcaatgtattaaaa

SEQ ID NO: 123715 - DNA, 15 bp, Homo sapiens
tagcaatgtattaaa

SEQ ID NO: 123716 - DNA, 15 bp, Homo sapiens
ttagcaatgtattaa

SEQ ID NO: 123717 - DNA, 15 bp, Homo sapiens
tttagcaatgtatta

SEQ ID NO: 123718 - DNA, 15 bp, Homo sapiens
ctttagcaatgtatt

SEQ ID NO: 123719 - DNA, 15 bp, Homo sapiens
actttagcaatgtat

SEQ ID NO: 123720 - DNA, 15 bp, Homo sapiens
aactttagcaatgta

SEQ ID NO: 123721 - DNA, 15 bp, Homo sapiens
aaactttagcaatgt

SEQ ID NO: 123722 - DNA, 15 bp, Homo sapiens
caaactttagcaatg

SEQ ID NO: 123723 - DNA, 15 bp, Homo sapiens
acaaactttagcaat

SEQ ID NO: 123724 - DNA, 15 bp, Homo sapiens
tacaaactttagcaa

SEQ ID NO: 123725 - DNA, 15 bp, Homo sapiens
ttacaaactttagca

SEQ ID NO: 123726 - DNA, 15 bp, Homo sapiens
cttacaaactttagc

SEQ ID NO: 123727 - DNA, 15 bp, Homo sapiens
acttacaaactttag

SEQ ID NO: 123728 - DNA, 15 bp, Homo sapiens
tacttacaaacttta

SEQ ID NO: 123729 - DNA, 15 bp, Homo sapiens
ttacttacaaacttt

SEQ ID NO: 123730 - DNA, 15 bp, Homo sapiens
attacttacaaactt

SEQ ID NO: 123731 - DNA, 15 bp, Homo sapiens
cattacttacaaact

SEQ ID NO: 123732 - DNA, 15 bp, Homo sapiens
gcattacttacaaac

SEQ ID NO: 123733 - DNA, 15 bp, Homo sapiens
tgcattacttacaaa

SEQ ID NO: 123734 - DNA, 15 bp, Homo sapiens
gtgcattacttacaa

SEQ ID NO: 123735 - DNA, 15 bp, Homo sapiens
tgtgcattacttaca

SEQ ID NO: 123736 - DNA, 15 bp, Homo sapiens
ctgtgcattacttac

SEQ ID NO: 123737 - DNA, 15 bp, Homo sapiens
cctgtgcattactta

SEQ ID NO: 123738 - DNA, 15 bp, Homo sapiens
tcctgtgcattactt

SEQ ID NO: 123739 - DNA, 15 bp, Homo sapiens
ctcctgtgcattact

SEQ ID NO: 123740 - DNA, 15 bp, Homo sapiens
actcctgtgcattac

SEQ ID NO: 123741 - DNA, 15 bp, Homo sapiens
cactcctgtgcatta

SEQ ID NO: 123742 - DNA, 15 bp, Homo sapiens
tcactcctgtgcatt

SEQ ID NO: 123743 - DNA, 15 bp, Homo sapiens
atcactcctgtgcat

SEQ ID NO: 123744 - DNA, 15 bp, Homo sapiens
tatcactcctgtgca

SEQ ID NO: 123745 - DNA, 15 bp, Homo sapiens
gtatcactcctgtgc

SEQ ID NO: 123746 - DNA, 15 bp, Homo sapiens
agtatcactcctgtg

SEQ ID NO: 123747 - DNA, 15 bp, Homo sapiens
gagtatcactcctgt

SEQ ID NO: 123748 - DNA, 15 bp, Homo sapiens
agagtatcactcctg

SEQ ID NO: 123749 - DNA, 15 bp, Homo sapiens
cagagtatcactcct

SEQ ID NO: 123750 - DNA, 15 bp, Homo sapiens
acagagtatcactcc

SEQ ID NO: 123751 - DNA, 15 bp, Homo sapiens
aacagagtatcactc

SEQ ID NO: 123752 - DNA, 15 bp, Homo sapiens
taacagagtatcact

SEQ ID NO: 123753 - DNA, 15 bp, Homo sapiens
ttaacagagtatcac

SEQ ID NO: 123754 - DNA, 15 bp, Homo sapiens
gttaacagagtatca

SEQ ID NO: 123755 - DNA, 15 bp, Homo sapiens
tgttaacagagtatc

SEQ ID NO: 123756 - DNA, 15 bp, Homo sapiens
gtgttaacagagtat

SEQ ID NO: 123757 - DNA, 15 bp, Homo sapiens
tgtgttaacagagta

SEQ ID NO: 123758 - DNA, 15 bp, Homo sapiens
atgtgttaacagagt

SEQ ID NO: 123759 - DNA, 15 bp, Homo sapiens
aatgtgttaacagag

SEQ ID NO: 123760 - DNA, 15 bp, Homo sapiens
caatgtgttaacaga

SEQ ID NO: 123761 - DNA, 15 bp, Homo sapiens
tcaatgtgttaacag

SEQ ID NO: 123762 - DNA, 15 bp, Homo sapiens
gtcaatgtgttaaca

SEQ ID NO: 123763 - DNA, 15 bp, Homo sapiens
ggtcaatgtgttaac

SEQ ID NO: 123764 - DNA, 15 bp, Homo sapiens
aggtcaatgtgttaa

SEQ ID NO: 123765 - DNA, 15 bp, Homo sapiens
aaggtcaatgtgtta

SEQ ID NO: 123766 - DNA, 15 bp, Homo sapiens
caaggtcaatgtgtt

SEQ ID NO: 123767 - DNA, 15 bp, Homo sapiens
tcaaggtcaatgtgt

SEQ ID NO: 123768 - DNA, 15 bp, Homo sapiens
ttcaaggtcaatgtg

SEQ ID NO: 123769 - DNA, 15 bp, Homo sapiens
cttcaaggtcaatgt

SEQ ID NO: 123770 - DNA, 15 bp, Homo sapiens
tcttcaaggtcaatg

SEQ ID NO: 123771 - DNA, 15 bp, Homo sapiens
ttcttcaaggtcaat

SEQ ID NO: 123772 - DNA, 15 bp, Homo sapiens
attcttcaaggtcaa

SEQ ID NO: 123773 - DNA, 15 bp, Homo sapiens
aattcttcaaggtca

SEQ ID NO: 123774 - DNA, 15 bp, Homo sapiens
aaattcttcaaggtc

SEQ ID NO: 123775 - DNA, 15 bp, Homo sapiens
caaattcttcaaggt

SEQ ID NO: 123776 - DNA, 15 bp, Homo sapiens
acaaattcttcaagg

SEQ ID NO: 123777 - DNA, 15 bp, Homo sapiens
tacaaattcttcaag

SEQ ID NO: 123778 - DNA, 15 bp, Homo sapiens
atacaaattcttcaa

SEQ ID NO: 123779 - DNA, 15 bp, Homo sapiens
aatacaaattcttca

SEQ ID NO: 123780 - DNA, 15 bp, Homo sapiens
gaatacaaattcttc

SEQ ID NO: 123781 - DNA, 15 bp, Homo sapiens
ggaatacaaattctt

SEQ ID NO: 123782 - DNA, 15 bp, Homo sapiens
aggaatacaaattct

SEQ ID NO: 123783 - DNA, 15 bp, Homo sapiens
aaggaatacaaattc

SEQ ID NO: 123784 - DNA, 15 bp, Homo sapiens
aaaggaatacaaatt

SEQ ID NO: 123785 - DNA, 15 bp, Homo sapiens
aaaaggaatacaaat

SEQ ID NO: 123786 - DNA, 15 bp, Homo sapiens
caaaaggaatacaaa

SEQ ID NO: 123787 - DNA, 15 bp, Homo sapiens
ccaaaaggaatacaa

SEQ ID NO: 123788 - DNA, 15 bp, Homo sapiens
tccaaaaggaataca

SEQ ID NO: 123789 - DNA, 15 bp, Homo sapiens
atccaaaaggaatac

SEQ ID NO: 123790 - DNA, 15 bp, Homo sapiens
catccaaaaggaata

SEQ ID NO: 123791 - DNA, 15 bp, Homo sapiens
acatccaaaaggaat

SEQ ID NO: 123792 - DNA, 15 bp, Homo sapiens
tacatccaaaaggaa

SEQ ID NO: 123793 - DNA, 15 bp, Homo sapiens
atacatccaaaagga

SEQ ID NO: 123794 - DNA, 15 bp, Homo sapiens
catacatccaaaagg

SEQ ID NO: 123795 - DNA, 15 bp, Homo sapiens
acatacatccaaaag

SEQ ID NO: 123796 - DNA, 15 bp, Homo sapiens
tacatacatccaaaa

SEQ ID NO: 123797 - DNA, 15 bp, Homo sapiens
atacatacatccaaa

SEQ ID NO: 123798 - DNA, 15 bp, Homo sapiens
tatacatacatccaa

SEQ ID NO: 123799 - DNA, 15 bp, Homo sapiens
ctatacatacatcca

SEQ ID NO: 123800 - DNA, 15 bp, Homo sapiens
gctatacatacatcc

SEQ ID NO: 123801 - DNA, 15 bp, Homo sapiens
agctatacatacatc

SEQ ID NO: 123802 - DNA, 15 bp, Homo sapiens
cagctatacatacat

SEQ ID NO: 123803 - DNA, 15 bp, Homo sapiens
gcagctatacataca

SEQ ID NO: 123804 - DNA, 15 bp, Homo sapiens
agcagctatacatac

SEQ ID NO: 123805 - DNA, 15 bp, Homo sapiens
aagcagctatacata

SEQ ID NO: 123806 - DNA, 15 bp, Homo sapiens
taagcagctatacat

SEQ ID NO: 123807 - DNA, 15 bp, Homo sapiens
ttaagcagctataca

SEQ ID NO: 123808 - DNA, 15 bp, Homo sapiens
cttaagcagctatac

SEQ ID NO: 123809 - DNA, 15 bp, Homo sapiens
gcttaagcagctata

SEQ ID NO: 123810 - DNA, 15 bp, Homo sapiens
ggcttaagcagctat

SEQ ID NO: 123811 - DNA, 15 bp, Homo sapiens
tggcttaagcagcta

SEQ ID NO: 123812 - DNA, 15 bp, Homo sapiens
gtggcttaagcagct

SEQ ID NO: 123813 - DNA, 15 bp, Homo sapiens
agtggcttaagcagc

SEQ ID NO: 123814 - DNA, 15 bp, Homo sapiens
aagtggcttaagcag

SEQ ID NO: 123815 - DNA, 15 bp, Homo sapiens
aaagtggcttaagca

SEQ ID NO: 123816 - DNA, 15 bp, Homo sapiens
gaaagtggcttaagc

SEQ ID NO: 123817 - DNA, 15 bp, Homo sapiens
tgaaagtggcttaag

SEQ ID NO: 123818 - DNA, 15 bp, Homo sapiens
ctgaaagtggcttaa

SEQ ID NO: 123819 - DNA, 15 bp, Homo sapiens
tctgaaagtggctta

SEQ ID NO: 123820 - DNA, 15 bp, Homo sapiens
gtctgaaagtggctt

SEQ ID NO: 123821 - DNA, 15 bp, Homo sapiens
agtctgaaagtggct

SEQ ID NO: 123822 - DNA, 15 bp, Homo sapiens
aagtctgaaagtggc

SEQ ID NO: 123823 - DNA, 15 bp, Homo sapiens
taagtctgaaagtgg

SEQ ID NO: 123824 - DNA, 15 bp, Homo sapiens
ctaagtctgaaagtg

SEQ ID NO: 123825 - DNA, 15 bp, Homo sapiens
tctaagtctgaaagt

SEQ ID NO: 123826 - DNA, 15 bp, Homo sapiens
atctaagtctgaaag

SEQ ID NO: 123827 - DNA, 15 bp, Homo sapiens
aatctaagtctgaaa

SEQ ID NO: 123828 - DNA, 15 bp, Homo sapiens
taatctaagtctgaa

SEQ ID NO: 123829 - DNA, 15 bp, Homo sapiens
ataatctaagtctga

SEQ ID NO: 123830 - DNA, 15 bp, Homo sapiens
gataatctaagtctg

SEQ ID NO: 123831 - DNA, 15 bp, Homo sapiens
agataatctaagtct

SEQ ID NO: 123832 - DNA, 15 bp, Homo sapiens
aagataatctaagtc

SEQ ID NO: 123833 - DNA, 15 bp, Homo sapiens
aaagataatctaagt

SEQ ID NO: 123834 - DNA, 15 bp, Homo sapiens
aaaagataatctaag

SEQ ID NO: 123835 - DNA, 15 bp, Homo sapiens
taaaagataatctaa

SEQ ID NO: 123836 - DNA, 15 bp, Homo sapiens
ataaaagataatcta

SEQ ID NO: 123837 - DNA, 15 bp, Homo sapiens
tataaaagataatct

SEQ ID NO: 123838 - DNA, 15 bp, Homo sapiens
ttataaaagataatc

SEQ ID NO: 123839 - DNA, 15 bp, Homo sapiens
tttataaaagataat

SEQ ID NO: 123840 - DNA, 15 bp, Homo sapiens
atttataaaagataa

SEQ ID NO: 123841 - DNA, 15 bp, Homo sapiens
catttataaaagata

SEQ ID NO: 123842 - DNA, 15 bp, Homo sapiens
acatttataaaagat

SEQ ID NO: 123843 - DNA, 15 bp, Homo sapiens
cacatttataaaaga

SEQ ID NO: 123844 - DNA, 15 bp, Homo sapiens
gcacatttataaaag

SEQ ID NO: 123845 - DNA, 15 bp, Homo sapiens
ggcacatttataaaa

SEQ ID NO: 123846 - DNA, 15 bp, Homo sapiens
aggcacatttataaa

SEQ ID NO: 123847 - DNA, 15 bp, Homo sapiens
aaggcacatttataa

SEQ ID NO: 123848 - DNA, 15 bp, Homo sapiens
gaaggcacatttata

SEQ ID NO: 123849 - DNA, 15 bp, Homo sapiens
ggaaggcacatttat

SEQ ID NO: 123850 - DNA, 15 bp, Homo sapiens
tggaaggcacattta

SEQ ID NO: 123851 - DNA, 15 bp, Homo sapiens
atggaaggcacattt

SEQ ID NO: 123852 - DNA, 15 bp, Homo sapiens
tatggaaggcacatt

SEQ ID NO: 123853 - DNA, 15 bp, Homo sapiens
gtatggaaggcacat

SEQ ID NO: 123854 - DNA, 15 bp, Homo sapiens
tgtatggaaggcaca

SEQ ID NO: 123855 - DNA, 15 bp, Homo sapiens
ctgtatggaaggcac

SEQ ID NO: 123856 - DNA, 15 bp, Homo sapiens
tctgtatggaaggca

SEQ ID NO: 123857 - DNA, 15 bp, Homo sapiens
ttctgtatggaaggc

SEQ ID NO: 123858 - DNA, 15 bp, Homo sapiens
attctgtatggaagg

SEQ ID NO: 123859 - DNA, 15 bp, Homo sapiens
aattctgtatggaag

SEQ ID NO: 123860 - DNA, 15 bp, Homo sapiens
gaattctgtatggaa

SEQ ID NO: 123861 - DNA, 15 bp, Homo sapiens
agaattctgtatgga

SEQ ID NO: 123862 - DNA, 15 bp, Homo sapiens
cagaattctgtatgg

SEQ ID NO: 123863 - DNA, 15 bp, Homo sapiens
tcagaattctgtatg

SEQ ID NO: 123864 - DNA, 15 bp, Homo sapiens
ttcagaattctgtat

SEQ ID NO: 123865 - DNA, 15 bp, Homo sapiens
tttcagaattctgta

SEQ ID NO: 123866 - DNA, 15 bp, Homo sapiens
ttttcagaattctgt

SEQ ID NO: 123867 - DNA, 15 bp, Homo sapiens
attttcagaattctg

SEQ ID NO: 123868 - DNA, 15 bp, Homo sapiens
tattttcagaattct

SEQ ID NO: 123869 - DNA, 15 bp, Homo sapiens
atattttcagaattc

SEQ ID NO: 123870 - DNA, 15 bp, Homo sapiens
aatattttcagaatt

SEQ ID NO: 123871 - DNA, 15 bp, Homo sapiens
aaatattttcagaat

SEQ ID NO: 123872 - DNA, 15 bp, Homo sapiens
taaatattttcagaa

SEQ ID NO: 123873 - DNA, 15 bp, Homo sapiens
gtaaatattttcaga

SEQ ID NO: 123874 - DNA, 15 bp, Homo sapiens
ggtaaatattttcag

SEQ ID NO: 123875 - DNA, 15 bp, Homo sapiens
tggtaaatattttca

SEQ ID NO: 123876 - DNA, 15 bp, Homo sapiens
atggtaaatattttc

SEQ ID NO: 123877 - DNA, 15 bp, Homo sapiens
catggtaaatatttt

SEQ ID NO: 123878 - DNA, 15 bp, Homo sapiens
ccatggtaaatattt

SEQ ID NO: 123879 - DNA, 15 bp, Homo sapiens
tccatggtaaatatt

SEQ ID NO: 123880 - DNA, 15 bp, Homo sapiens
gtccatggtaaatat

SEQ ID NO: 123881 - DNA, 15 bp, Homo sapiens
tgtccatggtaaata

SEQ ID NO: 123882 - DNA, 15 bp, Homo sapiens
ttgtccatggtaaat

SEQ ID NO: 123883 - DNA, 15 bp, Homo sapiens
tttgtccatggtaaa

SEQ ID NO: 123884 - DNA, 15 bp, Homo sapiens
ctttgtccatggtaa

SEQ ID NO: 123885 - DNA, 15 bp, Homo sapiens
tctttgtccatggta

SEQ ID NO: 123886 - DNA, 15 bp, Homo sapiens
ttctttgtccatggt

SEQ ID NO: 123887 - DNA, 15 bp, Homo sapiens
cttctttgtccatgg

SEQ ID NO: 123888 - DNA, 15 bp, Homo sapiens
gcttctttgtccatg

SEQ ID NO: 123889 - DNA, 15 bp, Homo sapiens
tgcttctttgtccat

SEQ ID NO: 123890 - DNA, 15 bp, Homo sapiens
ctgcttctttgtcca

SEQ ID NO: 123891 - DNA, 15 bp, Homo sapiens
tctgcttctttgtcc

SEQ ID NO: 123892 - DNA, 15 bp, Homo sapiens
atctgcttctttgtc

SEQ ID NO: 123893 - DNA, 15 bp, Homo sapiens
aatctgcttctttgt

SEQ ID NO: 123894 - DNA, 15 bp, Homo sapiens
aaatctgcttctttg

SEQ ID NO: 123895 - DNA, 15 bp, Homo sapiens
taaatctgcttcttt

SEQ ID NO: 123896 - DNA, 15 bp, Homo sapiens
ttaaatctgcttctt

SEQ ID NO: 123897 - DNA, 15 bp, Homo sapiens
tttaaatctgcttct

SEQ ID NO: 123898 - DNA, 15 bp, Homo sapiens
atttaaatctgcttc

SEQ ID NO: 123899 - DNA, 15 bp, Homo sapiens
gatttaaatctgctt

SEQ ID NO: 123900 - DNA, 15 bp, Homo sapiens
tgatttaaatctgct

SEQ ID NO: 123901 - DNA, 15 bp, Homo sapiens
ctgatttaaatctgc

SEQ ID NO: 123902 - DNA, 15 bp, Homo sapiens
cctgatttaaatctg

SEQ ID NO: 123903 - DNA, 15 bp, Homo sapiens
acctgatttaaatct

SEQ ID NO: 123904 - DNA, 15 bp, Homo sapiens
tacctgatttaaatc

SEQ ID NO: 123905 - DNA, 15 bp, Homo sapiens
gtacctgatttaaat

SEQ ID NO: 123906 - DNA, 15 bp, Homo sapiens
tgtacctgatttaaa

SEQ ID NO: 123907 - DNA, 15 bp, Homo sapiens
ctgtacctgatttaa

SEQ ID NO: 123908 - DNA, 15 bp, Homo sapiens
tctgtacctgattta

SEQ ID NO: 123909 - DNA, 15 bp, Homo sapiens
gtctgtacctgattt

SEQ ID NO: 123910 - DNA, 15 bp, Homo sapiens
tgtctgtacctgatt

SEQ ID NO: 123911 - DNA, 15 bp, Homo sapiens
ttgtctgtacctgat

SEQ ID NO: 123912 - DNA, 15 bp, Homo sapiens
cttgtctgtacctga

SEQ ID NO: 123913 - DNA, 15 bp, Homo sapiens
tcttgtctgtacctg

SEQ ID NO: 123914 - DNA, 15 bp, Homo sapiens
ttcttgtctgtacct

SEQ ID NO: 123915 - DNA, 15 bp, Homo sapiens
attcttgtctgtacc

SEQ ID NO: 123916 - DNA, 15 bp, Homo sapiens
aattcttgtctgtac

SEQ ID NO: 123917 - DNA, 15 bp, Homo sapiens
caattcttgtctgta

SEQ ID NO: 123918 - DNA, 15 bp, Homo sapiens
tcaattcttgtctgt

SEQ ID NO: 123919 - DNA, 15 bp, Homo sapiens
ttcaattcttgtctg

SEQ ID NO: 123920 - DNA, 15 bp, Homo sapiens
tttcaattcttgtct

SEQ ID NO: 123921 - DNA, 15 bp, Homo sapiens
ctttcaattcttgtc

SEQ ID NO: 123922 - DNA, 15 bp, Homo sapiens
actttcaattcttgt

SEQ ID NO: 123923 - DNA, 15 bp, Homo sapiens
cactttcaattcttg

SEQ ID NO: 123924 - DNA, 15 bp, Homo sapiens
acactttcaattctt

SEQ ID NO: 123925 - DNA, 15 bp, Homo sapiens
aacactttcaattct

SEQ ID NO: 123926 - DNA, 15 bp, Homo sapiens
caacactttcaattc

SEQ ID NO: 123927 - DNA, 15 bp, Homo sapiens
tcaacactttcaatt

SEQ ID NO: 123928 - DNA, 15 bp, Homo sapiens
ttcaacactttcaat

SEQ ID NO: 123929 - DNA, 15 bp, Homo sapiens
attcaacactttcaa

SEQ ID NO: 123930 - DNA, 15 bp, Homo sapiens
tattcaacactttca

SEQ ID NO: 123931 - DNA, 15 bp, Homo sapiens
ttattcaacactttc

SEQ ID NO: 123932 - DNA, 15 bp, Homo sapiens
cttattcaacacttt

SEQ ID NO: 123933 - DNA, 15 bp, Homo sapiens
acttattcaacactt

SEQ ID NO: 123934 - DNA, 15 bp, Homo sapiens
cacttattcaacact

SEQ ID NO: 123935 - DNA, 15 bp, Homo sapiens
tcacttattcaacac

SEQ ID NO: 123936 - DNA, 15 bp, Homo sapiens
ttcacttattcaaca

SEQ ID NO: 123937 - DNA, 15 bp, Homo sapiens
attcacttattcaac

SEQ ID NO: 123938 - DNA, 15 bp, Homo sapiens
tattcacttattcaa

SEQ ID NO: 123939 - DNA, 15 bp, Homo sapiens
atattcacttattca

SEQ ID NO: 123940 - DNA, 15 bp, Homo sapiens
tatattcacttattc

SEQ ID NO: 123941 - DNA, 15 bp, Homo sapiens
atatattcacttatt

SEQ ID NO: 123942 - DNA, 15 bp, Homo sapiens
aatatattcacttat

SEQ ID NO: 123943 - DNA, 15 bp, Homo sapiens
aaatatattcactta

SEQ ID NO: 123944 - DNA, 15 bp, Homo sapiens
gaaatatattcactt

SEQ ID NO: 123945 - DNA, 15 bp, Homo sapiens
ggaaatatattcact

SEQ ID NO: 123946 - DNA, 15 bp, Homo sapiens
gggaaatatattcac

SEQ ID NO: 123947 - DNA, 15 bp, Homo sapiens
tgggaaatatattca

SEQ ID NO: 123948 - DNA, 15 bp, Homo sapiens
atgggaaatatattc

SEQ ID NO: 123949 - DNA, 15 bp, Homo sapiens
aatgggaaatatatt

SEQ ID NO: 123950 - DNA, 15 bp, Homo sapiens
gaatgggaaatatat

SEQ ID NO: 123951 - DNA, 15 bp, Homo sapiens
agaatgggaaatata

SEQ ID NO: 123952 - DNA, 15 bp, Homo sapiens
gagaatgggaaatat

SEQ ID NO: 123953 - DNA, 15 bp, Homo sapiens
agagaatgggaaata

SEQ ID NO: 123954 - DNA, 15 bp, Homo sapiens
gagagaatgggaaat

SEQ ID NO: 123955 - DNA, 15 bp, Homo sapiens
agagagaatgggaaa

SEQ ID NO: 123956 - DNA, 15 bp, Homo sapiens
tagagagaatgggaa

SEQ ID NO: 123957 - DNA, 15 bp, Homo sapiens
gtagagagaatggga

SEQ ID NO: 123958 - DNA, 15 bp, Homo sapiens
agtagagagaatggg

SEQ ID NO: 123959 - DNA, 15 bp, Homo sapiens
aagtagagagaatgg

SEQ ID NO: 123960 - DNA, 15 bp, Homo sapiens
aaagtagagagaatg

SEQ ID NO: 123961 - DNA, 15 bp, Homo sapiens
aaaagtagagagaat

SEQ ID NO: 123962 - DNA, 15 bp, Homo sapiens
aaaaagtagagagaa

SEQ ID NO: 123963 - DNA, 15 bp, Homo sapiens
aaaaaagtagagaga

SEQ ID NO: 123964 - DNA, 15 bp, Homo sapiens
gaaaaaagtagagag

SEQ ID NO: 123965 - DNA, 15 bp, Homo sapiens
agaaaaaagtagaga

SEQ ID NO: 123966 - DNA, 15 bp, Homo sapiens
aagaaaaaagtagag

SEQ ID NO: 123967 - DNA, 15 bp, Homo sapiens
taagaaaaaagtaga

SEQ ID NO: 123968 - DNA, 15 bp, Homo sapiens
ttaagaaaaaagtag

SEQ ID NO: 123969 - DNA, 15 bp, Homo sapiens
attaagaaaaaagta

SEQ ID NO: 123970 - DNA, 15 bp, Homo sapiens
aattaagaaaaaagt

SEQ ID NO: 123971 - DNA, 15 bp, Homo sapiens
gaattaagaaaaaag

SEQ ID NO: 123972 - DNA, 15 bp, Homo sapiens
agaattaagaaaaaa

SEQ ID NO: 123973 - DNA, 15 bp, Homo sapiens
aagaattaagaaaaa

SEQ ID NO: 123974 - DNA, 15 bp, Homo sapiens
taagaattaagaaaa

SEQ ID NO: 123975 - DNA, 15 bp, Homo sapiens
ataagaattaagaaa

SEQ ID NO: 123976 - DNA, 15 bp, Homo sapiens
tataagaattaagaa

SEQ ID NO: 123977 - DNA, 15 bp, Homo sapiens
ctataagaattaaga

SEQ ID NO: 123978 - DNA, 15 bp, Homo sapiens
tctataagaattaag

SEQ ID NO: 123979 - DNA, 15 bp, Homo sapiens
ttctataagaattaa

SEQ ID NO: 123980 - DNA, 15 bp, Homo sapiens
gttctataagaatta

SEQ ID NO: 123981 - DNA, 15 bp, Homo sapiens
agttctataagaatt

SEQ ID NO: 123982 - DNA, 15 bp, Homo sapiens
aagttctataagaat

SEQ ID NO: 123983 - DNA, 15 bp, Homo sapiens
aaagttctataagaa

SEQ ID NO: 123984 - DNA, 15 bp, Homo sapiens
caaagttctataaga

SEQ ID NO: 123985 - DNA, 15 bp, Homo sapiens
gcaaagttctataag

SEQ ID NO: 123986 - DNA, 15 bp, Homo sapiens
tgcaaagttctataa

SEQ ID NO: 123987 - DNA, 15 bp, Homo sapiens
ctgcaaagttctata

SEQ ID NO: 123988 - DNA, 15 bp, Homo sapiens
tctgcaaagttctat

SEQ ID NO: 123989 - DNA, 15 bp, Homo sapiens
ttctgcaaagttcta

SEQ ID NO: 123990 - DNA, 15 bp, Homo sapiens
tttctgcaaagttct

SEQ ID NO: 123991 - DNA, 15 bp, Homo sapiens
ctttctgcaaagttc

SEQ ID NO: 123992 - DNA, 15 bp, Homo sapiens
tctttctgcaaagtt

SEQ ID NO: 123993 - DNA, 15 bp, Homo sapiens
ttctttctgcaaagt

SEQ ID NO: 123994 - DNA, 15 bp, Homo sapiens
attctttctgcaaag

SEQ ID NO: 123995 - DNA, 15 bp, Homo sapiens
cattctttctgcaaa

SEQ ID NO: 123996 - DNA, 15 bp, Homo sapiens
tcattctttctgcaa

SEQ ID NO: 123997 - DNA, 15 bp, Homo sapiens
atcattctttctgca

SEQ ID NO: 123998 - DNA, 15 bp, Homo sapiens
tatcattctttctgc

SEQ ID NO: 123999 - DNA, 15 bp, Homo sapiens
gtatcattctttctg

SEQ ID NO: 124000 - DNA, 15 bp, Homo sapiens
tgtatcattctttct

SEQ ID NO: 124001 - DNA, 15 bp, Homo sapiens
atgtatcattctttc

SEQ ID NO: 124002 - DNA, 15 bp, Homo sapiens
tatgtatcattcttt

SEQ ID NO: 124003 - DNA, 15 bp, Homo sapiens
gtatgtatcattctt

SEQ ID NO: 124004 - DNA, 15 bp, Homo sapiens
ggtatgtatcattct

SEQ ID NO: 124005 - DNA, 15 bp, Homo sapiens
tggtatgtatcattc

SEQ ID NO: 124006 - DNA, 15 bp, Homo sapiens
gtggtatgtatcatt

SEQ ID NO: 124007 - DNA, 15 bp, Homo sapiens
tgtggtatgtatcat

SEQ ID NO: 124008 - DNA, 15 bp, Homo sapiens
ctgtggtatgtatca

SEQ ID NO: 124009 - DNA, 15 bp, Homo sapiens
actgtggtatgtatc

SEQ ID NO: 124010 - DNA, 15 bp, Homo sapiens
tactgtggtatgtat

SEQ ID NO: 124011 - DNA, 15 bp, Homo sapiens
gtactgtggtatgta

SEQ ID NO: 124012 - DNA, 15 bp, Homo sapiens
ggtactgtggtatgt

SEQ ID NO: 124013 - DNA, 15 bp, Homo sapiens
tggtactgtggtatg

SEQ ID NO: 124014 - DNA, 15 bp, Homo sapiens
ctggtactgtggtat

SEQ ID NO: 124015 - DNA, 15 bp, Homo sapiens
gctggtactgtggta

SEQ ID NO: 124016 - DNA, 15 bp, Homo sapiens
tgctggtactgtggt

SEQ ID NO: 124017 - DNA, 15 bp, Homo sapiens
ttgctggtactgtgg

SEQ ID NO: 124018 - DNA, 15 bp, Homo sapiens
cttgctggtactgtg

SEQ ID NO: 124019 - DNA, 15 bp, Homo sapiens
acttgctggtactgt

SEQ ID NO: 124020 - DNA, 15 bp, Homo sapiens
aacttgctggtactg

SEQ ID NO: 124021 - DNA, 15 bp, Homo sapiens
aaacttgctggtact

SEQ ID NO: 124022 - DNA, 15 bp, Homo sapiens
taaacttgctggtac

SEQ ID NO: 124023 - DNA, 15 bp, Homo sapiens
ttaaacttgctggta

SEQ ID NO: 124024 - DNA, 15 bp, Homo sapiens
tttaaacttgctggt

SEQ ID NO: 124025 - DNA, 15 bp, Homo sapiens
ctttaaacttgctgg

SEQ ID NO: 124026 - DNA, 15 bp, Homo sapiens
gctttaaacttgctg

SEQ ID NO: 124027 - DNA, 15 bp, Homo sapiens
cgctttaaacttgct

SEQ ID NO: 124028 - DNA, 15 bp, Homo sapiens
acgctttaaacttgc

SEQ ID NO: 124029 - DNA, 15 bp, Homo sapiens
tacgctttaaacttg

SEQ ID NO: 124030 - DNA, 15 bp, Homo sapiens
gtacgctttaaactt

SEQ ID NO: 124031 - DNA, 15 bp, Homo sapiens
ggtacgctttaaact

SEQ ID NO: 124032 - DNA, 15 bp, Homo sapiens
gggtacgctttaaac

SEQ ID NO: 124033 - DNA, 15 bp, Homo sapiens
agggtacgctttaaa

SEQ ID NO: 124034 - DNA, 15 bp, Homo sapiens
aagggtacgctttaa

SEQ ID NO: 124035 - DNA, 15 bp, Homo sapiens
aaagggtacgcttta

SEQ ID NO: 124036 - DNA, 15 bp, Homo sapiens
aaaagggtacgcttt

SEQ ID NO: 124037 - DNA, 15 bp, Homo sapiens
caaaagggtacgctt

SEQ ID NO: 124038 - DNA, 15 bp, Homo sapiens
acaaaagggtacgct

SEQ ID NO: 124039 - DNA, 15 bp, Homo sapiens
cacaaaagggtacgc

SEQ ID NO: 124040 - DNA, 15 bp, Homo sapiens
gcacaaaagggtacg

SEQ ID NO: 124041 - DNA, 15 bp, Homo sapiens
tgcacaaaagggtac

SEQ ID NO: 124042 - DNA, 15 bp, Homo sapiens
ttgcacaaaagggta

SEQ ID NO: 124043 - DNA, 15 bp, Homo sapiens
tttgcacaaaagggt

SEQ ID NO: 124044 - DNA, 15 bp, Homo sapiens
ttttgcacaaaaggg

SEQ ID NO: 124045 - DNA, 15 bp, Homo sapiens
tttttgcacaaaagg

SEQ ID NO: 124046 - DNA, 15 bp, Homo sapiens
atttttgcacaaaag

SEQ ID NO: 124047 - DNA, 15 bp, Homo sapiens
tatttttgcacaaaa

SEQ ID NO: 124048 - DNA, 15 bp, Homo sapiens
ttatttttgcacaaa

SEQ ID NO: 124049 - DNA, 15 bp, Homo sapiens
cttatttttgcacaa

SEQ ID NO: 124050 - DNA, 15 bp, Homo sapiens
tcttatttttgcaca

SEQ ID NO: 124051 - DNA, 15 bp, Homo sapiens
ctcttatttttgcac

SEQ ID NO: 124052 - DNA, 15 bp, Homo sapiens
cctcttatttttgca

SEQ ID NO: 124053 - DNA, 15 bp, Homo sapiens
acctcttatttttgc

SEQ ID NO: 124054 - DNA, 15 bp, Homo sapiens
aacctcttatttttg

SEQ ID NO: 124055 - DNA, 15 bp, Homo sapiens
taacctcttattttt

SEQ ID NO: 124056 - DNA, 15 bp, Homo sapiens
ataacctcttatttt

SEQ ID NO: 124057 - DNA, 15 bp, Homo sapiens
gataacctcttattt

SEQ ID NO: 124058 - DNA, 15 bp, Homo sapiens
agataacctcttatt

SEQ ID NO: 124059 - DNA, 15 bp, Homo sapiens
aagataacctcttat

SEQ ID NO: 124060 - DNA, 15 bp, Homo sapiens
aaagataacctctta

SEQ ID NO: 124061 - DNA, 15 bp, Homo sapiens
caaagataacctctt

SEQ ID NO: 124062 - DNA, 15 bp, Homo sapiens
tcaaagataacctct

SEQ ID NO: 124063 - DNA, 15 bp, Homo sapiens
ttcaaagataacctc

SEQ ID NO: 124064 - DNA, 15 bp, Homo sapiens
gttcaaagataacct

SEQ ID NO: 124065 - DNA, 15 bp, Homo sapiens
agttcaaagataacc

SEQ ID NO: 124066 - DNA, 15 bp, Homo sapiens
cagttcaaagataac

SEQ ID NO: 124067 - DNA, 15 bp, Homo sapiens
gcagttcaaagataa

SEQ ID NO: 124068 - DNA, 15 bp, Homo sapiens
ggcagttcaaagata

SEQ ID NO: 124069 - DNA, 15 bp, Homo sapiens
aggcagttcaaagat

SEQ ID NO: 124070 - DNA, 15 bp, Homo sapiens
aaggcagttcaaaga

SEQ ID NO: 124071 - DNA, 15 bp, Homo sapiens
taaggcagttcaaag

SEQ ID NO: 124072 - DNA, 15 bp, Homo sapiens
ttaaggcagttcaaa

SEQ ID NO: 124073 - DNA, 15 bp, Homo sapiens
tttaaggcagttcaa

SEQ ID NO: 124074 - DNA, 15 bp, Homo sapiens
ttttaaggcagttca

SEQ ID NO: 124075 - DNA, 15 bp, Homo sapiens
tttttaaggcagttc

SEQ ID NO: 124076 - DNA, 15 bp, Homo sapiens
atttttaaggcagtt

SEQ ID NO: 124077 - DNA, 15 bp, Homo sapiens
gatttttaaggcagt

SEQ ID NO: 124078 - DNA, 15 bp, Homo sapiens
ggatttttaaggcag

SEQ ID NO: 124079 - DNA, 15 bp, Homo sapiens
tggatttttaaggca

SEQ ID NO: 124080 - DNA, 15 bp, Homo sapiens
ttggatttttaaggc

SEQ ID NO: 124081 - DNA, 15 bp, Homo sapiens
tttggatttttaagg

SEQ ID NO: 124082 - DNA, 15 bp, Homo sapiens
ttttggatttttaag

SEQ ID NO: 124083 - DNA, 15 bp, Homo sapiens
attttggatttttaa

SEQ ID NO: 124084 - DNA, 15 bp, Homo sapiens
aattttggattttta

SEQ ID NO: 124085 - DNA, 15 bp, Homo sapiens
taattttggattttt

SEQ ID NO: 124086 - DNA, 15 bp, Homo sapiens
gtaattttggatttt

SEQ ID NO: 124087 - DNA, 15 bp, Homo sapiens
ggtaattttggattt

SEQ ID NO: 124088 - DNA, 15 bp, Homo sapiens
gggtaattttggatt

SEQ ID NO: 124089 - DNA, 15 bp, Homo sapiens
agggtaattttggat

SEQ ID NO: 124090 - DNA, 15 bp, Homo sapiens
tagggtaattttgga

SEQ ID NO: 124091 - DNA, 15 bp, Homo sapiens
atagggtaattttgg

SEQ ID NO: 124092 - DNA, 15 bp, Homo sapiens
gatagggtaattttg

SEQ ID NO: 124093 - DNA, 15 bp, Homo sapiens
tgatagggtaatttt

SEQ ID NO: 124094 - DNA, 15 bp, Homo sapiens
ctgatagggtaattt

SEQ ID NO: 124095 - DNA, 15 bp, Homo sapiens
actgatagggtaatt

SEQ ID NO: 124096 - DNA, 15 bp, Homo sapiens
aactgatagggtaat

SEQ ID NO: 124097 - DNA, 15 bp, Homo sapiens
aaactgatagggtaa

SEQ ID NO: 124098 - DNA, 15 bp, Homo sapiens
caaactgatagggta

SEQ ID NO: 124099 - DNA, 15 bp, Homo sapiens
gcaaactgatagggt

SEQ ID NO: 124100 - DNA, 15 bp, Homo sapiens
tgcaaactgataggg

SEQ ID NO: 124101 - DNA, 15 bp, Homo sapiens
ttgcaaactgatagg

SEQ ID NO: 124102 - DNA, 15 bp, Homo sapiens
cttgcaaactgatag

SEQ ID NO: 124103 - DNA, 15 bp, Homo sapiens
acttgcaaactgata

SEQ ID NO: 124104 - DNA, 15 bp, Homo sapiens
tacttgcaaactgat

SEQ ID NO: 124105 - DNA, 15 bp, Homo sapiens
atacttgcaaactga

SEQ ID NO: 124106 - DNA, 15 bp, Homo sapiens
aatacttgcaaactg

SEQ ID NO: 124107 - DNA, 15 bp, Homo sapiens
taatacttgcaaact

SEQ ID NO: 124108 - DNA, 15 bp, Homo sapiens
ttaatacttgcaaac

SEQ ID NO: 124109 - DNA, 15 bp, Homo sapiens
attaatacttgcaaa

SEQ ID NO: 124110 - DNA, 15 bp, Homo sapiens
gattaatacttgcaa

SEQ ID NO: 124111 - DNA, 15 bp, Homo sapiens
tgattaatacttgca

SEQ ID NO: 124112 - DNA, 15 bp, Homo sapiens
ttgattaatacttgc

SEQ ID NO: 124113 - DNA, 15 bp, Homo sapiens
gttgattaatacttg

SEQ ID NO: 124114 - DNA, 15 bp, Homo sapiens
agttgattaatactt

SEQ ID NO: 124115 - DNA, 15 bp, Homo sapiens
gagttgattaatact

SEQ ID NO: 124116 - DNA, 15 bp, Homo sapiens
agagttgattaatac

SEQ ID NO: 124117 - DNA, 15 bp, Homo sapiens
cagagttgattaata

SEQ ID NO: 124118 - DNA, 15 bp, Homo sapiens
ccagagttgattaat

SEQ ID NO: 124119 - DNA, 15 bp, Homo sapiens
accagagttgattaa

SEQ ID NO: 124120 - DNA, 15 bp, Homo sapiens
taccagagttgatta

SEQ ID NO: 124121 - DNA, 15 bp, Homo sapiens
gtaccagagttgatt

SEQ ID NO: 124122 - DNA, 15 bp, Homo sapiens
ggtaccagagttgat

SEQ ID NO: 124123 - DNA, 15 bp, Homo sapiens
aggtaccagagttga

SEQ ID NO: 124124 - DNA, 15 bp, Homo sapiens
caggtaccagagttg

SEQ ID NO: 124125 - DNA, 15 bp, Homo sapiens
tcaggtaccagagtt

SEQ ID NO: 124126 - DNA, 15 bp, Homo sapiens
gtcaggtaccagagt

SEQ ID NO: 124127 - DNA, 15 bp, Homo sapiens
ggtcaggtaccagag

SEQ ID NO: 124128 - DNA, 15 bp, Homo sapiens
tggtcaggtaccaga

SEQ ID NO: 124129 - DNA, 15 bp, Homo sapiens
ttggtcaggtaccag

SEQ ID NO: 124130 - DNA, 15 bp, Homo sapiens
tttggtcaggtacca

SEQ ID NO: 124131 - DNA, 15 bp, Homo sapiens
ctttggtcaggtacc

SEQ ID NO: 124132 - DNA, 15 bp, Homo sapiens
cctttggtcaggtac

SEQ ID NO: 124133 - DNA, 15 bp, Homo sapiens
tcctttggtcaggta

SEQ ID NO: 124134 - DNA, 15 bp, Homo sapiens
ctcctttggtcaggt

SEQ ID NO: 124135 - DNA, 15 bp, Homo sapiens
actcctttggtcagg

SEQ ID NO: 124136 - DNA, 15 bp, Homo sapiens
aactcctttggtcag

SEQ ID NO: 124137 - DNA, 15 bp, Homo sapiens
aaactcctttggtca

SEQ ID NO: 124138 - DNA, 15 bp, Homo sapiens
taaactcctttggtc

SEQ ID NO: 124139 - DNA, 15 bp, Homo sapiens
ttaaactcctttggt

SEQ ID NO: 124140 - DNA, 15 bp, Homo sapiens
tttaaactcctttgg

SEQ ID NO: 124141 - DNA, 15 bp, Homo sapiens
gtttaaactcctttg

SEQ ID NO: 124142 - DNA, 15 bp, Homo sapiens
tgtttaaactccttt

SEQ ID NO: 124143 - DNA, 15 bp, Homo sapiens
ttgtttaaactcctt

SEQ ID NO: 124144 - DNA, 15 bp, Homo sapiens
attgtttaaactcct

SEQ ID NO: 124145 - DNA, 15 bp, Homo sapiens
cattgtttaaactcc

SEQ ID NO: 124146 - DNA, 15 bp, Homo sapiens
tcattgtttaaactc

SEQ ID NO: 124147 - DNA, 15 bp, Homo sapiens
atcattgtttaaact

SEQ ID NO: 124148 - DNA, 15 bp, Homo sapiens
catcattgtttaaac

SEQ ID NO: 124149 - DNA, 15 bp, Homo sapiens
acatcattgtttaaa

SEQ ID NO: 124150 - DNA, 15 bp, Homo sapiens
gacatcattgtttaa

SEQ ID NO: 124151 - DNA, 15 bp, Homo sapiens
ggacatcattgttta

SEQ ID NO: 124152 - DNA, 15 bp, Homo sapiens
aggacatcattgttt

SEQ ID NO: 124153 - DNA, 15 bp, Homo sapiens
taggacatcattgtt

SEQ ID NO: 124154 - DNA, 15 bp, Homo sapiens
ttaggacatcattgt

SEQ ID NO: 124155 - DNA, 15 bp, Homo sapiens
attaggacatcattg

SEQ ID NO: 124156 - DNA, 15 bp, Homo sapiens
aattaggacatcatt

SEQ ID NO: 124157 - DNA, 15 bp, Homo sapiens
taattaggacatcat

SEQ ID NO: 124158 - DNA, 15 bp, Homo sapiens
ttaattaggacatca

SEQ ID NO: 124159 - DNA, 15 bp, Homo sapiens
tttaattaggacatc

SEQ ID NO: 124160 - DNA, 15 bp, Homo sapiens
gtttaattaggacat

SEQ ID NO: 124161 - DNA, 15 bp, Homo sapiens
tgtttaattaggaca

SEQ ID NO: 124162 - DNA, 15 bp, Homo sapiens
ctgtttaattaggac

SEQ ID NO: 124163 - DNA, 15 bp, Homo sapiens
tctgtttaattagga

SEQ ID NO: 124164 - DNA, 15 bp, Homo sapiens
ttctgtttaattagg

SEQ ID NO: 124165 - DNA, 15 bp, Homo sapiens
tttctgtttaattag

SEQ ID NO: 124166 - DNA, 15 bp, Homo sapiens
ttttctgtttaatta

SEQ ID NO: 124167 - DNA, 15 bp, Homo sapiens
gttttctgtttaatt

SEQ ID NO: 124168 - DNA, 15 bp, Homo sapiens
ggttttctgtttaat

SEQ ID NO: 124169 - DNA, 15 bp, Homo sapiens
tggttttctgtttaa

SEQ ID NO: 124170 - DNA, 15 bp, Homo sapiens
ctggttttctgttta

SEQ ID NO: 124171 - DNA, 15 bp, Homo sapiens
tctggttttctgttt

SEQ ID NO: 124172 - DNA, 15 bp, Homo sapiens
atctggttttctgtt

SEQ ID NO: 124173 - DNA, 15 bp, Homo sapiens
aatctggttttctgt

SEQ ID NO: 124174 - DNA, 15 bp, Homo sapiens
taatctggttttctg

SEQ ID NO: 124175 - DNA, 15 bp, Homo sapiens
ttaatctggttttct

SEQ ID NO: 124176 - DNA, 15 bp, Homo sapiens
gttaatctggttttc

SEQ ID NO: 124177 - DNA, 15 bp, Homo sapiens
ggttaatctggtttt

SEQ ID NO: 124178 - DNA, 15 bp, Homo sapiens
tggttaatctggttt

SEQ ID NO: 124179 - DNA, 15 bp, Homo sapiens
atggttaatctggtt

SEQ ID NO: 124180 - DNA, 15 bp, Homo sapiens
gatggttaatctggt

SEQ ID NO: 124181 - DNA, 15 bp, Homo sapiens
agatggttaatctgg

SEQ ID NO: 124182 - DNA, 15 bp, Homo sapiens
aagatggttaatctg

SEQ ID NO: 124183 - DNA, 15 bp, Homo sapiens
caagatggttaatct

SEQ ID NO: 124184 - DNA, 15 bp, Homo sapiens
acaagatggttaatc

SEQ ID NO: 124185 - DNA, 15 bp, Homo sapiens
aacaagatggttaat

SEQ ID NO: 124186 - DNA, 15 bp, Homo sapiens
caacaagatggttaa

SEQ ID NO: 124187 - DNA, 15 bp, Homo sapiens
tcaacaagatggtta

SEQ ID NO: 124188 - DNA, 15 bp, Homo sapiens
ttcaacaagatggtt

SEQ ID NO: 124189 - DNA, 15 bp, Homo sapiens
tttcaacaagatggt

SEQ ID NO: 124190 - DNA, 15 bp, Homo sapiens
ttttcaacaagatgg

SEQ ID NO: 124191 - DNA, 15 bp, Homo sapiens
cttttcaacaagatg

SEQ ID NO: 124192 - DNA, 15 bp, Homo sapiens
tcttttcaacaagat

SEQ ID NO: 124193 - DNA, 15 bp, Homo sapiens
ctcttttcaacaaga

SEQ ID NO: 124194 - DNA, 15 bp, Homo sapiens
actcttttcaacaag

SEQ ID NO: 124195 - DNA, 15 bp, Homo sapiens
gactcttttcaacaa

SEQ ID NO: 124196 - DNA, 15 bp, Homo sapiens
agactcttttcaaca

SEQ ID NO: 124197 - DNA, 15 bp, Homo sapiens
gagactcttttcaac

SEQ ID NO: 124198 - DNA, 15 bp, Homo sapiens
agagactcttttcaa

SEQ ID NO: 124199 - DNA, 15 bp, Homo sapiens
tagagactcttttca

SEQ ID NO: 124200 - DNA, 15 bp, Homo sapiens
gtagagactcttttc

SEQ ID NO: 124201 - DNA, 15 bp, Homo sapiens
agtagagactctttt

SEQ ID NO: 124202 - DNA, 15 bp, Homo sapiens
aagtagagactcttt

SEQ ID NO: 124203 - DNA, 15 bp, Homo sapiens
aaagtagagactctt

SEQ ID NO: 124204 - DNA, 15 bp, Homo sapiens
caaagtagagactct

SEQ ID NO: 124205 - DNA, 15 bp, Homo sapiens
ccaaagtagagactc

SEQ ID NO: 124206 - DNA, 15 bp, Homo sapiens
accaaagtagagact

SEQ ID NO: 124207 - DNA, 15 bp, Homo sapiens
aaccaaagtagagac

SEQ ID NO: 124208 - DNA, 15 bp, Homo sapiens
aaaccaaagtagaga

SEQ ID NO: 124209 - DNA, 15 bp, Homo sapiens
aaaaccaaagtagag

SEQ ID NO: 124210 - DNA, 15 bp, Homo sapiens
caaaaccaaagtaga

SEQ ID NO: 124211 - DNA, 15 bp, Homo sapiens
tcaaaaccaaagtag

SEQ ID NO: 124212 - DNA, 15 bp, Homo sapiens
ttcaaaaccaaagta

SEQ ID NO: 124213 - DNA, 15 bp, Homo sapiens
tttcaaaaccaaagt

SEQ ID NO: 124214 - DNA, 15 bp, Homo sapiens
atttcaaaaccaaag

SEQ ID NO: 124215 - DNA, 15 bp, Homo sapiens
gatttcaaaaccaaa

SEQ ID NO: 124216 - DNA, 15 bp, Homo sapiens
agatttcaaaaccaa

SEQ ID NO: 124217 - DNA, 15 bp, Homo sapiens
aagatttcaaaacca

SEQ ID NO: 124218 - DNA, 15 bp, Homo sapiens
taagatttcaaaacc

SEQ ID NO: 124219 - DNA, 15 bp, Homo sapiens
gtaagatttcaaaac

SEQ ID NO: 124220 - DNA, 15 bp, Homo sapiens
tgtaagatttcaaaa

SEQ ID NO: 124221 - DNA, 15 bp, Homo sapiens
ttgtaagatttcaaa

SEQ ID NO: 124222 - DNA, 15 bp, Homo sapiens
attgtaagatttcaa

SEQ ID NO: 124223 - DNA, 15 bp, Homo sapiens
aattgtaagatttca

SEQ ID NO: 124224 - DNA, 15 bp, Homo sapiens
gaattgtaagatttc

SEQ ID NO: 124225 - DNA, 15 bp, Homo sapiens
tgaattgtaagattt

SEQ ID NO: 124226 - DNA, 15 bp, Homo sapiens
ttgaattgtaagatt

SEQ ID NO: 124227 - DNA, 15 bp, Homo sapiens
attgaattgtaagat

SEQ ID NO: 124228 - DNA, 15 bp, Homo sapiens
tattgaattgtaaga

SEQ ID NO: 124229 - DNA, 15 bp, Homo sapiens
gtattgaattgtaag

SEQ ID NO: 124230 - DNA, 15 bp, Homo sapiens
tgtattgaattgtaa

SEQ ID NO: 124231 - DNA, 15 bp, Homo sapiens
atgtattgaattgta

SEQ ID NO: 124232 - DNA, 15 bp, Homo sapiens
tatgtattgaattgt

SEQ ID NO: 124233 - DNA, 15 bp, Homo sapiens
gtatgtattgaattg

SEQ ID NO: 124234 - DNA, 15 bp, Homo sapiens
tgtatgtattgaatt

SEQ ID NO: 124235 - DNA, 15 bp, Homo sapiens
gtgtatgtattgaat

SEQ ID NO: 124236 - DNA, 15 bp, Homo sapiens
tgtgtatgtattgaa

SEQ ID NO: 124237 - DNA, 15 bp, Homo sapiens
atgtgtatgtattga

SEQ ID NO: 124238 - DNA, 15 bp, Homo sapiens
tatgtgtatgtattg

SEQ ID NO: 124239 - DNA, 15 bp, Homo sapiens
gtatgtgtatgtatt

SEQ ID NO: 124240 - DNA, 15 bp, Homo sapiens
tgtatgtgtatgtat

SEQ ID NO: 124241 - DNA, 15 bp, Homo sapiens
gtgtatgtgtatgta

SEQ ID NO: 124242 - DNA, 15 bp, Homo sapiens
tgtgtatgtgtatgt

SEQ ID NO: 124243 - DNA, 15 bp, Homo sapiens
atgtgtatgtgtatg

SEQ ID NO: 124244 - DNA, 15 bp, Homo sapiens
tatgtgtatgtgtat

SEQ ID NO: 124245 - DNA, 15 bp, Homo sapiens
ttatgtgtatgtgta

SEQ ID NO: 124246 - DNA, 15 bp, Homo sapiens
tttatgtgtatgtgt

SEQ ID NO: 124247 - DNA, 15 bp, Homo sapiens
ttttatgtgtatgtg

SEQ ID NO: 124248 - DNA, 15 bp, Homo sapiens
tttttatgtgtatgt

SEQ ID NO: 124249 - DNA, 15 bp, Homo sapiens
atttttatgtgtatg

SEQ ID NO: 124250 - DNA, 15 bp, Homo sapiens
tatttttatgtgtat

SEQ ID NO: 124251 - DNA, 15 bp, Homo sapiens
atatttttatgtgta

SEQ ID NO: 124252 - DNA, 15 bp, Homo sapiens
gatatttttatgtgt

SEQ ID NO: 124253 - DNA, 15 bp, Homo sapiens
agatatttttatgtg

SEQ ID NO: 124254 - DNA, 15 bp, Homo sapiens
tagatatttttatgt

SEQ ID NO: 124255 - DNA, 15 bp, Homo sapiens
atagatatttttatg

SEQ ID NO: 124256 - DNA, 15 bp, Homo sapiens
gatagatatttttat

SEQ ID NO: 124257 - DNA, 15 bp, Homo sapiens
agatagatattttta

SEQ ID NO: 124258 - DNA, 15 bp, Homo sapiens
tagatagatattttt

SEQ ID NO: 124259 - DNA, 15 bp, Homo sapiens
atagatagatatttt

SEQ ID NO: 124260 - DNA, 15 bp, Homo sapiens
tatagatagatattt

SEQ ID NO: 124261 - DNA, 15 bp, Homo sapiens
atatagatagatatt

SEQ ID NO: 124262 - DNA, 15 bp, Homo sapiens
catatagatagatat

SEQ ID NO: 124263 - DNA, 15 bp, Homo sapiens
tcatatagatagata

SEQ ID NO: 124264 - DNA, 15 bp, Homo sapiens
ttcatatagatagat

SEQ ID NO: 124265 - DNA, 15 bp, Homo sapiens
attcatatagataga

SEQ ID NO: 124266 - DNA, 15 bp, Homo sapiens
cattcatatagatag

SEQ ID NO: 124267 - DNA, 15 bp, Homo sapiens
acattcatatagata

SEQ ID NO: 124268 - DNA, 15 bp, Homo sapiens
tacattcatatagat

SEQ ID NO: 124269 - DNA, 15 bp, Homo sapiens
ttacattcatataga

SEQ ID NO: 124270 - DNA, 15 bp, Homo sapiens
attacattcatatag

SEQ ID NO: 124271 - DNA, 15 bp, Homo sapiens
tattacattcatata

SEQ ID NO: 124272 - DNA, 15 bp, Homo sapiens
ctattacattcatat

SEQ ID NO: 124273 - DNA, 15 bp, Homo sapiens
actattacattcata

SEQ ID NO: 124274 - DNA, 15 bp, Homo sapiens
aactattacattcat

SEQ ID NO: 124275 - DNA, 15 bp, Homo sapiens
aaactattacattca

SEQ ID NO: 124276 - DNA, 15 bp, Homo sapiens
taaactattacattc

SEQ ID NO: 124277 - DNA, 15 bp, Homo sapiens
gtaaactattacatt

SEQ ID NO: 124278 - DNA, 15 bp, Homo sapiens
tgtaaactattacat

SEQ ID NO: 124279 - DNA, 15 bp, Homo sapiens
ctgtaaactattaca

SEQ ID NO: 124280 - DNA, 15 bp, Homo sapiens
actgtaaactattac

SEQ ID NO: 124281 - DNA, 15 bp, Homo sapiens
tactgtaaactatta

SEQ ID NO: 124282 - DNA, 15 bp, Homo sapiens
ctactgtaaactatt

SEQ ID NO: 124283 - DNA, 15 bp, Homo sapiens
cctactgtaaactat

SEQ ID NO: 124284 - DNA, 15 bp, Homo sapiens
ccctactgtaaacta

SEQ ID NO: 124285 - DNA, 15 bp, Homo sapiens
gccctactgtaaact

SEQ ID NO: 124286 - DNA, 15 bp, Homo sapiens
agccctactgtaaac

SEQ ID NO: 124287 - DNA, 15 bp, Homo sapiens
cagccctactgtaaa

SEQ ID NO: 124288 - DNA, 15 bp, Homo sapiens
acagccctactgtaa

SEQ ID NO: 124289 - DNA, 15 bp, Homo sapiens
cacagccctactgta

SEQ ID NO: 124290 - DNA, 15 bp, Homo sapiens
gcacagccctactgt

SEQ ID NO: 124291 - DNA, 15 bp, Homo sapiens
agcacagccctactg

SEQ ID NO: 124292 - DNA, 15 bp, Homo sapiens
aagcacagccctact

SEQ ID NO: 124293 - DNA, 15 bp, Homo sapiens
taagcacagccctac

SEQ ID NO: 124294 - DNA, 15 bp, Homo sapiens
gtaagcacagcccta

SEQ ID NO: 124295 - DNA, 15 bp, Homo sapiens
agtaagcacagccct

SEQ ID NO: 124296 - DNA, 15 bp, Homo sapiens
cagtaagcacagccc

SEQ ID NO: 124297 - DNA, 15 bp, Homo sapiens
gcagtaagcacagcc

SEQ ID NO: 124298 - DNA, 15 bp, Homo sapiens
agcagtaagcacagc

SEQ ID NO: 124299 - DNA, 15 bp, Homo sapiens
aagcagtaagcacag

SEQ ID NO: 124300 - DNA, 15 bp, Homo sapiens
aaagcagtaagcaca

SEQ ID NO: 124301 - DNA, 15 bp, Homo sapiens
caaagcagtaagcac

SEQ ID NO: 124302 - DNA, 15 bp, Homo sapiens
tcaaagcagtaagca

SEQ ID NO: 124303 - DNA, 15 bp, Homo sapiens
ctcaaagcagtaagc

SEQ ID NO: 124304 - DNA, 15 bp, Homo sapiens
cctcaaagcagtaag

SEQ ID NO: 124305 - DNA, 15 bp, Homo sapiens
acctcaaagcagtaa

SEQ ID NO: 124306 - DNA, 15 bp, Homo sapiens
tacctcaaagcagta

SEQ ID NO: 124307 - DNA, 15 bp, Homo sapiens
atacctcaaagcagt

SEQ ID NO: 124308 - DNA, 15 bp, Homo sapiens
catacctcaaagcag

SEQ ID NO: 124309 - DNA, 15 bp, Homo sapiens
acatacctcaaagca

SEQ ID NO: 124310 - DNA, 15 bp, Homo sapiens
cacatacctcaaagc

SEQ ID NO: 124311 - DNA, 15 bp, Homo sapiens
acacatacctcaaag

SEQ ID NO: 124312 - DNA, 15 bp, Homo sapiens
aacacatacctcaaa

SEQ ID NO: 124313 - DNA, 15 bp, Homo sapiens
aaacacatacctcaa

SEQ ID NO: 124314 - DNA, 15 bp, Homo sapiens
aaaacacatacctca

SEQ ID NO: 124315 - DNA, 15 bp, Homo sapiens
aaaaacacatacctc

SEQ ID NO: 124316 - DNA, 15 bp, Homo sapiens
taaaaacacatacct

SEQ ID NO: 124317 - DNA, 15 bp, Homo sapiens
ttaaaaacacatacc

SEQ ID NO: 124318 - DNA, 15 bp, Homo sapiens
tttaaaaacacatac

SEQ ID NO: 124319 - DNA, 15 bp, Homo sapiens
ttttaaaaacacata

SEQ ID NO: 124320 - DNA, 15 bp, Homo sapiens
gttttaaaaacacat

SEQ ID NO: 124321 - DNA, 15 bp, Homo sapiens
ggttttaaaaacaca

SEQ ID NO: 124322 - DNA, 15 bp, Homo sapiens
tggttttaaaaacac

SEQ ID NO: 124323 - DNA, 15 bp, Homo sapiens
ttggttttaaaaaca

SEQ ID NO: 124324 - DNA, 15 bp, Homo sapiens
tttggttttaaaaac

SEQ ID NO: 124325 - DNA, 15 bp, Homo sapiens
gtttggttttaaaaa

SEQ ID NO: 124326 - DNA, 15 bp, Homo sapiens
agtttggttttaaaa

SEQ ID NO: 124327 - DNA, 15 bp, Homo sapiens
aagtttggttttaaa

SEQ ID NO: 124328 - DNA, 15 bp, Homo sapiens
caagtttggttttaa

SEQ ID NO: 124329 - DNA, 15 bp, Homo sapiens
tcaagtttggtttta

SEQ ID NO: 124330 - DNA, 15 bp, Homo sapiens
atcaagtttggtttt

SEQ ID NO: 124331 - DNA, 15 bp, Homo sapiens
aatcaagtttggttt

SEQ ID NO: 124332 - DNA, 15 bp, Homo sapiens
aaatcaagtttggtt

SEQ ID NO: 124333 - DNA, 15 bp, Homo sapiens
taaatcaagtttggt

SEQ ID NO: 124334 - DNA, 15 bp, Homo sapiens
ataaatcaagtttgg

SEQ ID NO: 124335 - DNA, 15 bp, Homo sapiens
aataaatcaagtttg

SEQ ID NO: 124336 - DNA, 15 bp, Homo sapiens
aaataaatcaagttt

SEQ ID NO: 124337 - DNA, 15 bp, Homo sapiens
taaataaatcaagtt

SEQ ID NO: 124338 - DNA, 15 bp, Homo sapiens
ataaataaatcaagt

SEQ ID NO: 124339 - DNA, 15 bp, Homo sapiens
aataaataaatcaag

SEQ ID NO: 124340 - DNA, 15 bp, Homo sapiens
aaataaataaatcaa

SEQ ID NO: 124341 - DNA, 15 bp, Homo sapiens
gaaataaataaatca

SEQ ID NO: 124342 - DNA, 15 bp, Homo sapiens
agaaataaataaatc

SEQ ID NO: 124343 - DNA, 15 bp, Homo sapiens
aagaaataaataaat

SEQ ID NO: 124344 - DNA, 15 bp, Homo sapiens
taagaaataaataaa

SEQ ID NO: 124345 - DNA, 15 bp, Homo sapiens
ctaagaaataaataa

SEQ ID NO: 124346 - DNA, 15 bp, Homo sapiens
cctaagaaataaata

SEQ ID NO: 124347 - DNA, 15 bp, Homo sapiens
gcctaagaaataaat

SEQ ID NO: 124348 - DNA, 15 bp, Homo sapiens
tgcctaagaaataaa

SEQ ID NO: 124349 - DNA, 15 bp, Homo sapiens
ttgcctaagaaataa

SEQ ID NO: 124350 - DNA, 15 bp, Homo sapiens
tttgcctaagaaata

SEQ ID NO: 124351 - DNA, 15 bp, Homo sapiens
ctttgcctaagaaat

SEQ ID NO: 124352 - DNA, 15 bp, Homo sapiens
actttgcctaagaaa

SEQ ID NO: 124353 - DNA, 15 bp, Homo sapiens
tactttgcctaagaa

SEQ ID NO: 124354 - DNA, 15 bp, Homo sapiens
ttactttgcctaaga

SEQ ID NO: 124355 - DNA, 15 bp, Homo sapiens
attactttgcctaag

SEQ ID NO: 124356 - DNA, 15 bp, Homo sapiens
tattactttgcctaa

SEQ ID NO: 124357 - DNA, 15 bp, Homo sapiens
ctattactttgccta

SEQ ID NO: 124358 - DNA, 15 bp, Homo sapiens
cctattactttgcct

SEQ ID NO: 124359 - DNA, 15 bp, Homo sapiens
tcctattactttgcc

SEQ ID NO: 124360 - DNA, 15 bp, Homo sapiens
ttcctattactttgc

SEQ ID NO: 124361 - DNA, 15 bp, Homo sapiens
tttcctattactttg

SEQ ID NO: 124362 - DNA, 15 bp, Homo sapiens
ttttcctattacttt

SEQ ID NO: 124363 - DNA, 15 bp, Homo sapiens
tttttcctattactt

SEQ ID NO: 124364 - DNA, 15 bp, Homo sapiens
ttttttcctattact

SEQ ID NO: 124365 - DNA, 15 bp, Homo sapiens
attttttcctattac

SEQ ID NO: 124366 - DNA, 15 bp, Homo sapiens
cattttttcctatta

SEQ ID NO: 124367 - DNA, 15 bp, Homo sapiens
ccattttttcctatt

SEQ ID NO: 124368 - DNA, 15 bp, Homo sapiens
tccattttttcctat

SEQ ID NO: 124369 - DNA, 15 bp, Homo sapiens
ttccattttttccta

SEQ ID NO: 124370 - DNA, 15 bp, Homo sapiens
tttccattttttcct

SEQ ID NO: 124371 - DNA, 15 bp, Homo sapiens
ctttccattttttcc

SEQ ID NO: 124372 - DNA, 15 bp, Homo sapiens
gctttccattttttc

SEQ ID NO: 124373 - DNA, 15 bp, Homo sapiens
agctttccatttttt

SEQ ID NO: 124374 - DNA, 15 bp, Homo sapiens
cagctttccattttt

SEQ ID NO: 124375 - DNA, 15 bp, Homo sapiens
tcagctttccatttt

SEQ ID NO: 124376 - DNA, 15 bp, Homo sapiens
atcagctttccattt

SEQ ID NO: 124377 - DNA, 15 bp, Homo sapiens
aatcagctttccatt

SEQ ID NO: 124378 - DNA, 15 bp, Homo sapiens
gaatcagctttccat

SEQ ID NO: 124379 - DNA, 15 bp, Homo sapiens
tgaatcagctttcca

SEQ ID NO: 124380 - DNA, 15 bp, Homo sapiens
ctgaatcagctttcc

SEQ ID NO: 124381 - DNA, 15 bp, Homo sapiens
cctgaatcagctttc

SEQ ID NO: 124382 - DNA, 15 bp, Homo sapiens
tcctgaatcagcttt

SEQ ID NO: 124383 - DNA, 15 bp, Homo sapiens
ctcctgaatcagctt

SEQ ID NO: 124384 - DNA, 15 bp, Homo sapiens
tctcctgaatcagct

SEQ ID NO: 124385 - DNA, 15 bp, Homo sapiens
atctcctgaatcagc

SEQ ID NO: 124386 - DNA, 15 bp, Homo sapiens
aatctcctgaatcag

SEQ ID NO: 124387 - DNA, 15 bp, Homo sapiens
caatctcctgaatca

SEQ ID NO: 124388 - DNA, 15 bp, Homo sapiens
acaatctcctgaatc

SEQ ID NO: 124389 - DNA, 15 bp, Homo sapiens
cacaatctcctgaat

SEQ ID NO: 124390 - DNA, 15 bp, Homo sapiens
ccacaatctcctgaa

SEQ ID NO: 124391 - DNA, 15 bp, Homo sapiens
tccacaatctcctga

SEQ ID NO: 124392 - DNA, 15 bp, Homo sapiens
gtccacaatctcctg

SEQ ID NO: 124393 - DNA, 15 bp, Homo sapiens
tgtccacaatctcct

SEQ ID NO: 124394 - DNA, 15 bp, Homo sapiens
ttgtccacaatctcc

SEQ ID NO: 124395 - DNA, 15 bp, Homo sapiens
cttgtccacaatctc

SEQ ID NO: 124396 - DNA, 15 bp, Homo sapiens
acttgtccacaatct

SEQ ID NO: 124397 - DNA, 15 bp, Homo sapiens
gacttgtccacaatc

SEQ ID NO: 124398 - DNA, 15 bp, Homo sapiens
tgacttgtccacaat

SEQ ID NO: 124399 - DNA, 15 bp, Homo sapiens
ctgacttgtccacaa

SEQ ID NO: 124400 - DNA, 15 bp, Homo sapiens
cctgacttgtccaca

SEQ ID NO: 124401 - DNA, 15 bp, Homo sapiens
tcctgacttgtccac

SEQ ID NO: 124402 - DNA, 15 bp, Homo sapiens
ctcctgacttgtcca

SEQ ID NO: 124403 - DNA, 15 bp, Homo sapiens
actcctgacttgtcc

SEQ ID NO: 124404 - DNA, 15 bp, Homo sapiens
aactcctgacttgtc

SEQ ID NO: 124405 - DNA, 15 bp, Homo sapiens
caactcctgacttgt

SEQ ID NO: 124406 - DNA, 15 bp, Homo sapiens
acaactcctgacttg

SEQ ID NO: 124407 - DNA, 15 bp, Homo sapiens
cacaactcctgactt

SEQ ID NO: 124408 - DNA, 15 bp, Homo sapiens
tcacaactcctgact

SEQ ID NO: 124409 - DNA, 15 bp, Homo sapiens
ctcacaactcctgac

SEQ ID NO: 124410 - DNA, 15 bp, Homo sapiens
cctcacaactcctga

SEQ ID NO: 124411 - DNA, 15 bp, Homo sapiens
ccctcacaactcctg

SEQ ID NO: 124412 - DNA, 15 bp, Homo sapiens
accctcacaactcct

SEQ ID NO: 124413 - DNA, 15 bp, Homo sapiens
caccctcacaactcc

SEQ ID NO: 124414 - DNA, 15 bp, Homo sapiens
tcaccctcacaactc

SEQ ID NO: 124415 - DNA, 15 bp, Homo sapiens
ctcaccctcacaact

SEQ ID NO: 124416 - DNA, 15 bp, Homo sapiens
cctcaccctcacaac

SEQ ID NO: 124417 - DNA, 15 bp, Homo sapiens
tcctcaccctcacaa

SEQ ID NO: 124418 - DNA, 15 bp, Homo sapiens
atcctcaccctcaca

SEQ ID NO: 124419 - DNA, 15 bp, Homo sapiens
aatcctcaccctcac

SEQ ID NO: 124420 - DNA, 15 bp, Homo sapiens
caatcctcaccctca

SEQ ID NO: 124421 - DNA, 15 bp, Homo sapiens
tcaatcctcaccctc

SEQ ID NO: 124422 - DNA, 15 bp, Homo sapiens
ctcaatcctcaccct

SEQ ID NO: 124423 - DNA, 15 bp, Homo sapiens
cctcaatcctcaccc

SEQ ID NO: 124424 - DNA, 15 bp, Homo sapiens
gcctcaatcctcacc

SEQ ID NO: 124425 - DNA, 15 bp, Homo sapiens
agcctcaatcctcac

SEQ ID NO: 124426 - DNA, 15 bp, Homo sapiens
cagcctcaatcctca

SEQ ID NO: 124427 - DNA, 15 bp, Homo sapiens
tcagcctcaatcctc

SEQ ID NO: 124428 - DNA, 15 bp, Homo sapiens
ttcagcctcaatcct

SEQ ID NO: 124429 - DNA, 15 bp, Homo sapiens
tttcagcctcaatcc

SEQ ID NO: 124430 - DNA, 15 bp, Homo sapiens
ttttcagcctcaatc

SEQ ID NO: 124431 - DNA, 15 bp, Homo sapiens
attttcagcctcaat

SEQ ID NO: 124432 - DNA, 15 bp, Homo sapiens
cattttcagcctcaa

SEQ ID NO: 124433 - DNA, 15 bp, Homo sapiens
tcattttcagcctca

SEQ ID NO: 124434 - DNA, 15 bp, Homo sapiens
ctcattttcagcctc

SEQ ID NO: 124435 - DNA, 15 bp, Homo sapiens
tctcattttcagcct

SEQ ID NO: 124436 - DNA, 15 bp, Homo sapiens
ttctcattttcagcc

SEQ ID NO: 124437 - DNA, 15 bp, Homo sapiens
tttctcattttcagc

SEQ ID NO: 124438 - DNA, 15 bp, Homo sapiens
ttttctcattttcag

SEQ ID NO: 124439 - DNA, 15 bp, Homo sapiens
tttttctcattttca

SEQ ID NO: 124440 - DNA, 15 bp, Homo sapiens
atttttctcattttc

SEQ ID NO: 124441 - DNA, 15 bp, Homo sapiens
catttttctcatttt

SEQ ID NO: 124442 - DNA, 15 bp, Homo sapiens
acatttttctcattt

SEQ ID NO: 124443 - DNA, 15 bp, Homo sapiens
aacatttttctcatt

SEQ ID NO: 124444 - DNA, 15 bp, Homo sapiens
gaacatttttctcat

SEQ ID NO: 124445 - DNA, 15 bp, Homo sapiens
ggaacatttttctca

SEQ ID NO: 124446 - DNA, 15 bp, Homo sapiens
tggaacatttttctc

SEQ ID NO: 124447 - DNA, 15 bp, Homo sapiens
gtggaacatttttct

SEQ ID NO: 124448 - DNA, 15 bp, Homo sapiens
tgtggaacatttttc

SEQ ID NO: 124449 - DNA, 15 bp, Homo sapiens
ttgtggaacattttt

SEQ ID NO: 124450 - DNA, 15 bp, Homo sapiens
cttgtggaacatttt

SEQ ID NO: 124451 - DNA, 15 bp, Homo sapiens
tcttgtggaacattt

SEQ ID NO: 124452 - DNA, 15 bp, Homo sapiens
ttcttgtggaacatt

SEQ ID NO: 124453 - DNA, 15 bp, Homo sapiens
cttcttgtggaacat

SEQ ID NO: 124454 - DNA, 15 bp, Homo sapiens
tcttcttgtggaaca

SEQ ID NO: 124455 - DNA, 15 bp, Homo sapiens
ctcttcttgtggaac

SEQ ID NO: 124456 - DNA, 15 bp, Homo sapiens
cctcttcttgtggaa

SEQ ID NO: 124457 - DNA, 15 bp, Homo sapiens
acctcttcttgtgga

SEQ ID NO: 124458 - DNA, 15 bp, Homo sapiens
tacctcttcttgtgg

SEQ ID NO: 124459 - DNA, 15 bp, Homo sapiens
atacctcttcttgtg

SEQ ID NO: 124460 - DNA, 15 bp, Homo sapiens
catacctcttcttgt

SEQ ID NO: 124461 - DNA, 15 bp, Homo sapiens
acatacctcttcttg

SEQ ID NO: 124462 - DNA, 15 bp, Homo sapiens
aacatacctcttctt

SEQ ID NO: 124463 - DNA, 15 bp, Homo sapiens
taacatacctcttct

SEQ ID NO: 124464 - DNA, 15 bp, Homo sapiens
gtaacatacctcttc

SEQ ID NO: 124465 - DNA, 15 bp, Homo sapiens
tgtaacatacctctt

SEQ ID NO: 124466 - DNA, 15 bp, Homo sapiens
ctgtaacatacctct

SEQ ID NO: 124467 - DNA, 15 bp, Homo sapiens
actgtaacatacctc

SEQ ID NO: 124468 - DNA, 15 bp, Homo sapiens
cactgtaacatacct

SEQ ID NO: 124469 - DNA, 15 bp, Homo sapiens
gcactgtaacatacc

SEQ ID NO: 124470 - DNA, 15 bp, Homo sapiens
cgcactgtaacatac

SEQ ID NO: 124471 - DNA, 15 bp, Homo sapiens
tcgcactgtaacata

SEQ ID NO: 124472 - DNA, 15 bp, Homo sapiens
ttcgcactgtaacat

SEQ ID NO: 124473 - DNA, 15 bp, Homo sapiens
attcgcactgtaaca

SEQ ID NO: 124474 - DNA, 15 bp, Homo sapiens
tattcgcactgtaac

SEQ ID NO: 124475 - DNA, 15 bp, Homo sapiens
atattcgcactgtaa

SEQ ID NO: 124476 - DNA, 15 bp, Homo sapiens
aatattcgcactgta

SEQ ID NO: 124477 - DNA, 15 bp, Homo sapiens
aaatattcgcactgt

SEQ ID NO: 124478 - DNA, 15 bp, Homo sapiens
aaaatattcgcactg

SEQ ID NO: 124479 - DNA, 15 bp, Homo sapiens
caaaatattcgcact

SEQ ID NO: 124480 - DNA, 15 bp, Homo sapiens
acaaaatattcgcac

SEQ ID NO: 124481 - DNA, 15 bp, Homo sapiens
cacaaaatattcgca

SEQ ID NO: 124482 - DNA, 15 bp, Homo sapiens
ccacaaaatattcgc

SEQ ID NO: 124483 - DNA, 15 bp, Homo sapiens
gccacaaaatattcg

SEQ ID NO: 124484 - DNA, 15 bp, Homo sapiens
tgccacaaaatattc

SEQ ID NO: 124485 - DNA, 15 bp, Homo sapiens
gtgccacaaaatatt

SEQ ID NO: 124486 - DNA, 15 bp, Homo sapiens
tgtgccacaaaatat

SEQ ID NO: 124487 - DNA, 15 bp, Homo sapiens
atgtgccacaaaata

SEQ ID NO: 124488 - DNA, 15 bp, Homo sapiens
tatgtgccacaaaat

SEQ ID NO: 124489 - DNA, 15 bp, Homo sapiens
atatgtgccacaaaa

SEQ ID NO: 124490 - DNA, 15 bp, Homo sapiens
tatatgtgccacaaa

SEQ ID NO: 124491 - DNA, 15 bp, Homo sapiens
ttatatgtgccacaa

SEQ ID NO: 124492 - DNA, 15 bp, Homo sapiens
attatatgtgccaca

SEQ ID NO: 124493 - DNA, 15 bp, Homo sapiens
tattatatgtgccac

SEQ ID NO: 124494 - DNA, 15 bp, Homo sapiens
ttattatatgtgcca

SEQ ID NO: 124495 - DNA, 15 bp, Homo sapiens
tttattatatgtgcc

SEQ ID NO: 124496 - DNA, 15 bp, Homo sapiens
ttttattatatgtgc

SEQ ID NO: 124497 - DNA, 15 bp, Homo sapiens
cttttattatatgtg

SEQ ID NO: 124498 - DNA, 15 bp, Homo sapiens
acttttattatatgt

SEQ ID NO: 124499 - DNA, 15 bp, Homo sapiens
tacttttattatatg

SEQ ID NO: 124500 - DNA, 15 bp, Homo sapiens
ttacttttattatat

SEQ ID NO: 124501 - DNA, 15 bp, Homo sapiens
tttacttttattata

SEQ ID NO: 124502 - DNA, 15 bp, Homo sapiens
ttttacttttattat

SEQ ID NO: 124503 - DNA, 15 bp, Homo sapiens
cttttacttttatta

SEQ ID NO: 124504 - DNA, 15 bp, Homo sapiens
acttttacttttatt

SEQ ID NO: 124505 - DNA, 15 bp, Homo sapiens
aacttttacttttat

SEQ ID NO: 124506 - DNA, 15 bp, Homo sapiens
aaacttttactttta

SEQ ID NO: 124507 - DNA, 15 bp, Homo sapiens
aaaacttttactttt

SEQ ID NO: 124508 - DNA, 15 bp, Homo sapiens
aaaaacttttacttt

SEQ ID NO: 124509 - DNA, 15 bp, Homo sapiens
aaaaaacttttactt

SEQ ID NO: 124510 - DNA, 15 bp, Homo sapiens
taaaaaacttttact

SEQ ID NO: 124511 - DNA, 15 bp, Homo sapiens
ataaaaaacttttac

SEQ ID NO: 124512 - DNA, 15 bp, Homo sapiens
cataaaaaactttta

SEQ ID NO: 124513 - DNA, 15 bp, Homo sapiens
acataaaaaactttt

SEQ ID NO: 124514 - DNA, 15 bp, Homo sapiens
cacataaaaaacttt

SEQ ID NO: 124515 - DNA, 15 bp, Homo sapiens
tcacataaaaaactt

SEQ ID NO: 124516 - DNA, 15 bp, Homo sapiens
atcacataaaaaact

SEQ ID NO: 124517 - DNA, 15 bp, Homo sapiens
tatcacataaaaaac

SEQ ID NO: 124518 - DNA, 15 bp, Homo sapiens
atatcacataaaaaa

SEQ ID NO: 124519 - DNA, 15 bp, Homo sapiens
catatcacataaaaa

SEQ ID NO: 124520 - DNA, 15 bp, Homo sapiens
acatatcacataaaa

SEQ ID NO: 124521 - DNA, 15 bp, Homo sapiens
aacatatcacataaa

SEQ ID NO: 124522 - DNA, 15 bp, Homo sapiens
caacatatcacataa

SEQ ID NO: 124523 - DNA, 15 bp, Homo sapiens
tcaacatatcacata

SEQ ID NO: 124524 - DNA, 15 bp, Homo sapiens
ctcaacatatcacat

SEQ ID NO: 124525 - DNA, 15 bp, Homo sapiens
cctcaacatatcaca

SEQ ID NO: 124526 - DNA, 15 bp, Homo sapiens
tcctcaacatatcac

SEQ ID NO: 124527 - DNA, 15 bp, Homo sapiens
gtcctcaacatatca

SEQ ID NO: 124528 - DNA, 15 bp, Homo sapiens
ggtcctcaacatatc

SEQ ID NO: 124529 - DNA, 15 bp, Homo sapiens
aggtcctcaacatat

SEQ ID NO: 124530 - DNA, 15 bp, Homo sapiens
gaggtcctcaacata

SEQ ID NO: 124531 - DNA, 15 bp, Homo sapiens
agaggtcctcaacat

SEQ ID NO: 124532 - DNA, 15 bp, Homo sapiens
tagaggtcctcaaca

SEQ ID NO: 124533 - DNA, 15 bp, Homo sapiens
ttagaggtcctcaac

SEQ ID NO: 124534 - DNA, 15 bp, Homo sapiens
attagaggtcctcaa

SEQ ID NO: 124535 - DNA, 15 bp, Homo sapiens
tattagaggtcctca

SEQ ID NO: 124536 - DNA, 15 bp, Homo sapiens
atattagaggtcctc

SEQ ID NO: 124537 - DNA, 15 bp, Homo sapiens
catattagaggtcct

SEQ ID NO: 124538 - DNA, 15 bp, Homo sapiens
acatattagaggtcc

SEQ ID NO: 124539 - DNA, 15 bp, Homo sapiens
cacatattagaggtc

SEQ ID NO: 124540 - DNA, 15 bp, Homo sapiens
gcacatattagaggt

SEQ ID NO: 124541 - DNA, 15 bp, Homo sapiens
tgcacatattagagg

SEQ ID NO: 124542 - DNA, 15 bp, Homo sapiens
atgcacatattagag

SEQ ID NO: 124543 - DNA, 15 bp, Homo sapiens
tatgcacatattaga

SEQ ID NO: 124544 - DNA, 15 bp, Homo sapiens
ttatgcacatattag

SEQ ID NO: 124545 - DNA, 15 bp, Homo sapiens
tttatgcacatatta

SEQ ID NO: 124546 - DNA, 15 bp, Homo sapiens
ctttatgcacatatt

SEQ ID NO: 124547 - DNA, 15 bp, Homo sapiens
actttatgcacatat

SEQ ID NO: 124548 - DNA, 15 bp, Homo sapiens
cactttatgcacata

SEQ ID NO: 124549 - DNA, 15 bp, Homo sapiens
tcactttatgcacat

SEQ ID NO: 124550 - DNA, 15 bp, Homo sapiens
ttcactttatgcaca

SEQ ID NO: 124551 - DNA, 15 bp, Homo sapiens
attcactttatgcac

SEQ ID NO: 124552 - DNA, 15 bp, Homo sapiens
cattcactttatgca

SEQ ID NO: 124553 - DNA, 15 bp, Homo sapiens
gcattcactttatgc

SEQ ID NO: 124554 - DNA, 15 bp, Homo sapiens
tgcattcactttatg

SEQ ID NO: 124555 - DNA, 15 bp, Homo sapiens
ttgcattcactttat

SEQ ID NO: 124556 - DNA, 15 bp, Homo sapiens
tttgcattcacttta

SEQ ID NO: 124557 - DNA, 15 bp, Homo sapiens
atttgcattcacttt

SEQ ID NO: 124558 - DNA, 15 bp, Homo sapiens
tatttgcattcactt

SEQ ID NO: 124559 - DNA, 15 bp, Homo sapiens
atatttgcattcact

SEQ ID NO: 124560 - DNA, 15 bp, Homo sapiens
aatatttgcattcac

SEQ ID NO: 124561 - DNA, 15 bp, Homo sapiens
gaatatttgcattca

SEQ ID NO: 124562 - DNA, 15 bp, Homo sapiens
agaatatttgcattc

SEQ ID NO: 124563 - DNA, 15 bp, Homo sapiens
cagaatatttgcatt

SEQ ID NO: 124564 - DNA, 15 bp, Homo sapiens
tcagaatatttgcat

SEQ ID NO: 124565 - DNA, 15 bp, Homo sapiens
atcagaatatttgca

SEQ ID NO: 124566 - DNA, 15 bp, Homo sapiens
aatcagaatatttgc

SEQ ID NO: 124567 - DNA, 15 bp, Homo sapiens
taatcagaatatttg

SEQ ID NO: 124568 - DNA, 15 bp, Homo sapiens
ataatcagaatattt

SEQ ID NO: 124569 - DNA, 15 bp, Homo sapiens
gataatcagaatatt

SEQ ID NO: 124570 - DNA, 15 bp, Homo sapiens
tgataatcagaatat

SEQ ID NO: 124571 - DNA, 15 bp, Homo sapiens
ttgataatcagaata

SEQ ID NO: 124572 - DNA, 15 bp, Homo sapiens
cttgataatcagaat

SEQ ID NO: 124573 - DNA, 15 bp, Homo sapiens
gcttgataatcagaa

SEQ ID NO: 124574 - DNA, 15 bp, Homo sapiens
tgcttgataatcaga

SEQ ID NO: 124575 - DNA, 15 bp, Homo sapiens
atgcttgataatcag

SEQ ID NO: 124576 - DNA, 15 bp, Homo sapiens
catgcttgataatca

SEQ ID NO: 124577 - DNA, 15 bp, Homo sapiens
gcatgcttgataatc

SEQ ID NO: 124578 - DNA, 15 bp, Homo sapiens
ggcatgcttgataat

SEQ ID NO: 124579 - DNA, 15 bp, Homo sapiens
aggcatgcttgataa

SEQ ID NO: 124580 - DNA, 15 bp, Homo sapiens
caggcatgcttgata

SEQ ID NO: 124581 - DNA, 15 bp, Homo sapiens
gcaggcatgcttgat

SEQ ID NO: 124582 - DNA, 15 bp, Homo sapiens
agcaggcatgcttga

SEQ ID NO: 124583 - DNA, 15 bp, Homo sapiens
cagcaggcatgcttg

SEQ ID NO: 124584 - DNA, 15 bp, Homo sapiens
acagcaggcatgctt

SEQ ID NO: 124585 - DNA, 15 bp, Homo sapiens
tacagcaggcatgct

SEQ ID NO: 124586 - DNA, 15 bp, Homo sapiens
ttacagcaggcatgc

SEQ ID NO: 124587 - DNA, 15 bp, Homo sapiens
attacagcaggcatg

SEQ ID NO: 124588 - DNA, 15 bp, Homo sapiens
aattacagcaggcat

SEQ ID NO: 124589 - DNA, 15 bp, Homo sapiens
taattacagcaggca

SEQ ID NO: 124590 - DNA, 15 bp, Homo sapiens
ttaattacagcaggc

SEQ ID NO: 124591 - DNA, 15 bp, Homo sapiens
attaattacagcagg

SEQ ID NO: 124592 - DNA, 15 bp, Homo sapiens
cattaattacagcag

SEQ ID NO: 124593 - DNA, 15 bp, Homo sapiens
acattaattacagca

SEQ ID NO: 124594 - DNA, 15 bp, Homo sapiens
aacattaattacagc

SEQ ID NO: 124595 - DNA, 15 bp, Homo sapiens
taacattaattacag

SEQ ID NO: 124596 - DNA, 15 bp, Homo sapiens
ataacattaattaca

SEQ ID NO: 124597 - DNA, 15 bp, Homo sapiens
tataacattaattac

SEQ ID NO: 124598 - DNA, 15 bp, Homo sapiens
ttataacattaatta

SEQ ID NO: 124599 - DNA, 15 bp, Homo sapiens
attataacattaatt

SEQ ID NO: 124600 - DNA, 15 bp, Homo sapiens
aattataacattaat

SEQ ID NO: 124601 - DNA, 15 bp, Homo sapiens
caattataacattaa

SEQ ID NO: 124602 - DNA, 15 bp, Homo sapiens
acaattataacatta

SEQ ID NO: 124603 - DNA, 15 bp, Homo sapiens
tacaattataacatt

SEQ ID NO: 124604 - DNA, 15 bp, Homo sapiens
ctacaattataacat

SEQ ID NO: 124605 - DNA, 15 bp, Homo sapiens
tctacaattataaca

SEQ ID NO: 124606 - DNA, 15 bp, Homo sapiens
atctacaattataac

SEQ ID NO: 124607 - DNA, 15 bp, Homo sapiens
tatctacaattataa

SEQ ID NO: 124608 - DNA, 15 bp, Homo sapiens
ttatctacaattata

SEQ ID NO: 124609 - DNA, 15 bp, Homo sapiens
attatctacaattat

SEQ ID NO: 124610 - DNA, 15 bp, Homo sapiens
cattatctacaatta

SEQ ID NO: 124611 - DNA, 15 bp, Homo sapiens
ccattatctacaatt

SEQ ID NO: 124612 - DNA, 15 bp, Homo sapiens
gccattatctacaat

SEQ ID NO: 124613 - DNA, 15 bp, Homo sapiens
ggccattatctacaa

SEQ ID NO: 124614 - DNA, 15 bp, Homo sapiens
gggccattatctaca

SEQ ID NO: 124615 - DNA, 15 bp, Homo sapiens
agggccattatctac

SEQ ID NO: 124616 - DNA, 15 bp, Homo sapiens
aagggccattatcta

SEQ ID NO: 124617 - DNA, 15 bp, Homo sapiens
gaagggccattatct

SEQ ID NO: 124618 - DNA, 15 bp, Homo sapiens
agaagggccattatc

SEQ ID NO: 124619 - DNA, 15 bp, Homo sapiens
gagaagggccattat

SEQ ID NO: 124620 - DNA, 15 bp, Homo sapiens
agagaagggccatta

SEQ ID NO: 124621 - DNA, 15 bp, Homo sapiens
cagagaagggccatt

SEQ ID NO: 124622 - DNA, 15 bp, Homo sapiens
acagagaagggccat

SEQ ID NO: 124623 - DNA, 15 bp, Homo sapiens
gacagagaagggcca

SEQ ID NO: 124624 - DNA, 15 bp, Homo sapiens
ggacagagaagggcc

SEQ ID NO: 124625 - DNA, 15 bp, Homo sapiens
aggacagagaagggc

SEQ ID NO: 124626 - DNA, 15 bp, Homo sapiens
gaggacagagaaggg

SEQ ID NO: 124627 - DNA, 15 bp, Homo sapiens
agaggacagagaagg

SEQ ID NO: 124628 - DNA, 15 bp, Homo sapiens
tagaggacagagaag

SEQ ID NO: 124629 - DNA, 15 bp, Homo sapiens
ttagaggacagagaa

SEQ ID NO: 124630 - DNA, 15 bp, Homo sapiens
attagaggacagaga

SEQ ID NO: 124631 - DNA, 15 bp, Homo sapiens
cattagaggacagag

SEQ ID NO: 124632 - DNA, 15 bp, Homo sapiens
gcattagaggacaga

SEQ ID NO: 124633 - DNA, 15 bp, Homo sapiens
tgcattagaggacag

SEQ ID NO: 124634 - DNA, 15 bp, Homo sapiens
ctgcattagaggaca

SEQ ID NO: 124635 - DNA, 15 bp, Homo sapiens
actgcattagaggac

SEQ ID NO: 124636 - DNA, 15 bp, Homo sapiens
cactgcattagagga

SEQ ID NO: 124637 - DNA, 15 bp, Homo sapiens
tcactgcattagagg

SEQ ID NO: 124638 - DNA, 15 bp, Homo sapiens
ctcactgcattagag

SEQ ID NO: 124639 - DNA, 15 bp, Homo sapiens
actcactgcattaga

SEQ ID NO: 124640 - DNA, 15 bp, Homo sapiens
aactcactgcattag

SEQ ID NO: 124641 - DNA, 15 bp, Homo sapiens
aaactcactgcatta

SEQ ID NO: 124642 - DNA, 15 bp, Homo sapiens
caaactcactgcatt

SEQ ID NO: 124643 - DNA, 15 bp, Homo sapiens
ccaaactcactgcat

SEQ ID NO: 124644 - DNA, 15 bp, Homo sapiens
tccaaactcactgca

SEQ ID NO: 124645 - DNA, 15 bp, Homo sapiens
atccaaactcactgc

SEQ ID NO: 124646 - DNA, 15 bp, Homo sapiens
aatccaaactcactg

SEQ ID NO: 124647 - DNA, 15 bp, Homo sapiens
taatccaaactcact

SEQ ID NO: 124648 - DNA, 15 bp, Homo sapiens
ctaatccaaactcac

SEQ ID NO: 124649 - DNA, 15 bp, Homo sapiens
actaatccaaactca

SEQ ID NO: 124650 - DNA, 15 bp, Homo sapiens
gactaatccaaactc

SEQ ID NO: 124651 - DNA, 15 bp, Homo sapiens
tgactaatccaaact

SEQ ID NO: 124652 - DNA, 15 bp, Homo sapiens
gtgactaatccaaac

SEQ ID NO: 124653 - DNA, 15 bp, Homo sapiens
agtgactaatccaaa

SEQ ID NO: 124654 - DNA, 15 bp, Homo sapiens
aagtgactaatccaa

SEQ ID NO: 124655 - DNA, 15 bp, Homo sapiens
aaagtgactaatcca

SEQ ID NO: 124656 - DNA, 15 bp, Homo sapiens
taaagtgactaatcc

SEQ ID NO: 124657 - DNA, 15 bp, Homo sapiens
ataaagtgactaatc

SEQ ID NO: 124658 - DNA, 15 bp, Homo sapiens
aataaagtgactaat

SEQ ID NO: 124659 - DNA, 15 bp, Homo sapiens
caataaagtgactaa

SEQ ID NO: 124660 - DNA, 15 bp, Homo sapiens
tcaataaagtgacta

SEQ ID NO: 124661 - DNA, 15 bp, Homo sapiens
ttcaataaagtgact

SEQ ID NO: 124662 - DNA, 15 bp, Homo sapiens
attcaataaagtgac

SEQ ID NO: 124663 - DNA, 15 bp, Homo sapiens
aattcaataaagtga

SEQ ID NO: 124664 - DNA, 15 bp, Homo sapiens
gaattcaataaagtg

SEQ ID NO: 124665 - DNA, 15 bp, Homo sapiens
agaattcaataaagt

SEQ ID NO: 124666 - DNA, 15 bp, Homo sapiens
aagaattcaataaag

SEQ ID NO: 124667 - DNA, 15 bp, Homo sapiens
aaagaattcaataaa

SEQ ID NO: 124668 - DNA, 15 bp, Homo sapiens
aaaagaattcaataa

SEQ ID NO: 124669 - DNA, 15 bp, Homo sapiens
aaaaagaattcaata

SEQ ID NO: 124670 - DNA, 15 bp, Homo sapiens
aaaaaagaattcaat

SEQ ID NO: 124671 - DNA, 15 bp, Homo sapiens
gaaaaaagaattcaa

SEQ ID NO: 124672 - DNA, 15 bp, Homo sapiens
ggaaaaaagaattca

SEQ ID NO: 124673 - DNA, 15 bp, Homo sapiens
aggaaaaaagaattc

SEQ ID NO: 124674 - DNA, 15 bp, Homo sapiens
caggaaaaaagaatt

SEQ ID NO: 124675 - DNA, 15 bp, Homo sapiens
tcaggaaaaaagaat

SEQ ID NO: 124676 - DNA, 15 bp, Homo sapiens
atcaggaaaaaagaa

SEQ ID NO: 124677 - DNA, 15 bp, Homo sapiens
gatcaggaaaaaaga

SEQ ID NO: 124678 - DNA, 15 bp, Homo sapiens
agatcaggaaaaaag

SEQ ID NO: 124679 - DNA, 15 bp, Homo sapiens
aagatcaggaaaaaa

SEQ ID NO: 124680 - DNA, 15 bp, Homo sapiens
aaagatcaggaaaaa

SEQ ID NO: 124681 - DNA, 15 bp, Homo sapiens
taaagatcaggaaaa

SEQ ID NO: 124682 - DNA, 15 bp, Homo sapiens
ttaaagatcaggaaa

SEQ ID NO: 124683 - DNA, 15 bp, Homo sapiens
tttaaagatcaggaa

SEQ ID NO: 124684 - DNA, 15 bp, Homo sapiens
ttttaaagatcagga

SEQ ID NO: 124685 - DNA, 15 bp, Homo sapiens
attttaaagatcagg

SEQ ID NO: 124686 - DNA, 15 bp, Homo sapiens
cattttaaagatcag

SEQ ID NO: 124687 - DNA, 15 bp, Homo sapiens
ccattttaaagatca

SEQ ID NO: 124688 - DNA, 15 bp, Homo sapiens
cccattttaaagatc

SEQ ID NO: 124689 - DNA, 15 bp, Homo sapiens
acccattttaaagat

SEQ ID NO: 124690 - DNA, 15 bp, Homo sapiens
tacccattttaaaga

SEQ ID NO: 124691 - DNA, 15 bp, Homo sapiens
ctacccattttaaag

SEQ ID NO: 124692 - DNA, 15 bp, Homo sapiens
actacccattttaaa

SEQ ID NO: 124693 - DNA, 15 bp, Homo sapiens
aactacccattttaa

SEQ ID NO: 124694 - DNA, 15 bp, Homo sapiens
taactacccatttta

SEQ ID NO: 124695 - DNA, 15 bp, Homo sapiens
ataactacccatttt

SEQ ID NO: 124696 - DNA, 15 bp, Homo sapiens
tataactacccattt

SEQ ID NO: 124697 - DNA, 15 bp, Homo sapiens
ttataactacccatt

SEQ ID NO: 124698 - DNA, 15 bp, Homo sapiens
tttataactacccat

SEQ ID NO: 124699 - DNA, 15 bp, Homo sapiens
atttataactaccca

SEQ ID NO: 124700 - DNA, 15 bp, Homo sapiens
aatttataactaccc

SEQ ID NO: 124701 - DNA, 15 bp, Homo sapiens
aaatttataactacc

SEQ ID NO: 124702 - DNA, 15 bp, Homo sapiens
aaaatttataactac

SEQ ID NO: 124703 - DNA, 15 bp, Homo sapiens
aaaaatttataacta

SEQ ID NO: 124704 - DNA, 15 bp, Homo sapiens
taaaaatttataact

SEQ ID NO: 124705 - DNA, 15 bp, Homo sapiens
ttaaaaatttataac

SEQ ID NO: 124706 - DNA, 15 bp, Homo sapiens
tttaaaaatttataa

SEQ ID NO: 124707 - DNA, 15 bp, Homo sapiens
atttaaaaatttata

SEQ ID NO: 124708 - DNA, 15 bp, Homo sapiens
tatttaaaaatttat

SEQ ID NO: 124709 - DNA, 15 bp, Homo sapiens
atatttaaaaattta

SEQ ID NO: 124710 - DNA, 15 bp, Homo sapiens
catatttaaaaattt

SEQ ID NO: 124711 - DNA, 15 bp, Homo sapiens
tcatatttaaaaatt

SEQ ID NO: 124712 - DNA, 15 bp, Homo sapiens
ctcatatttaaaaat

SEQ ID NO: 124713 - DNA, 15 bp, Homo sapiens
tctcatatttaaaaa

SEQ ID NO: 124714 - DNA, 15 bp, Homo sapiens
gtctcatatttaaaa

SEQ ID NO: 124715 - DNA, 15 bp, Homo sapiens
tgtctcatatttaaa

SEQ ID NO: 124716 - DNA, 15 bp, Homo sapiens
atgtctcatatttaa

SEQ ID NO: 124717 - DNA, 15 bp, Homo sapiens
tatgtctcatattta

SEQ ID NO: 124718 - DNA, 15 bp, Homo sapiens
gtatgtctcatattt

SEQ ID NO: 124719 - DNA, 15 bp, Homo sapiens
tgtatgtctcatatt

SEQ ID NO: 124720 - DNA, 15 bp, Homo sapiens
atgtatgtctcatat

SEQ ID NO: 124721 - DNA, 15 bp, Homo sapiens
gatgtatgtctcata

SEQ ID NO: 124722 - DNA, 15 bp, Homo sapiens
tgatgtatgtctcat

SEQ ID NO: 124723 - DNA, 15 bp, Homo sapiens
gtgatgtatgtctca

SEQ ID NO: 124724 - DNA, 15 bp, Homo sapiens
agtgatgtatgtctc

SEQ ID NO: 124725 - DNA, 15 bp, Homo sapiens
cagtgatgtatgtct

SEQ ID NO: 124726 - DNA, 15 bp, Homo sapiens
ccagtgatgtatgtc

SEQ ID NO: 124727 - DNA, 15 bp, Homo sapiens
cccagtgatgtatgt

SEQ ID NO: 124728 - DNA, 15 bp, Homo sapiens
acccagtgatgtatg

SEQ ID NO: 124729 - DNA, 15 bp, Homo sapiens
gacccagtgatgtat

SEQ ID NO: 124730 - DNA, 15 bp, Homo sapiens
cgacccagtgatgta

SEQ ID NO: 124731 - DNA, 15 bp, Homo sapiens
tcgacccagtgatgt

SEQ ID NO: 124732 - DNA, 15 bp, Homo sapiens
ctcgacccagtgatg

SEQ ID NO: 124733 - DNA, 15 bp, Homo sapiens
actcgacccagtgat

SEQ ID NO: 124734 - DNA, 15 bp, Homo sapiens
cactcgacccagtga

SEQ ID NO: 124735 - DNA, 15 bp, Homo sapiens
acactcgacccagtg

SEQ ID NO: 124736 - DNA, 15 bp, Homo sapiens
aacactcgacccagt

SEQ ID NO: 124737 - DNA, 15 bp, Homo sapiens
taacactcgacccag

SEQ ID NO: 124738 - DNA, 15 bp, Homo sapiens
ttaacactcgaccca

SEQ ID NO: 124739 - DNA, 15 bp, Homo sapiens
attaacactcgaccc

SEQ ID NO: 124740 - DNA, 15 bp, Homo sapiens
cattaacactcgacc

SEQ ID NO: 124741 - DNA, 15 bp, Homo sapiens
ccattaacactcgac

SEQ ID NO: 124742 - DNA, 15 bp, Homo sapiens
gccattaacactcga

SEQ ID NO: 124743 - DNA, 15 bp, Homo sapiens
tgccattaacactcg

SEQ ID NO: 124744 - DNA, 15 bp, Homo sapiens
ttgccattaacactc

SEQ ID NO: 124745 - DNA, 15 bp, Homo sapiens
attgccattaacact

SEQ ID NO: 124746 - DNA, 15 bp, Homo sapiens
aattgccattaacac

SEQ ID NO: 124747 - DNA, 15 bp, Homo sapiens
aaattgccattaaca

SEQ ID NO: 124748 - DNA, 15 bp, Homo sapiens
taaattgccattaac

SEQ ID NO: 124749 - DNA, 15 bp, Homo sapiens
ttaaattgccattaa

SEQ ID NO: 124750 - DNA, 15 bp, Homo sapiens
attaaattgccatta

SEQ ID NO: 124751 - DNA, 15 bp, Homo sapiens
tattaaattgccatt

SEQ ID NO: 124752 - DNA, 15 bp, Homo sapiens
ttattaaattgccat

SEQ ID NO: 124753 - DNA, 15 bp, Homo sapiens
tttattaaattgcca

SEQ ID NO: 124754 - DNA, 15 bp, Homo sapiens
ttttattaaattgcc

SEQ ID NO: 124755 - DNA, 15 bp, Homo sapiens
attttattaaattgc

SEQ ID NO: 124756 - DNA, 15 bp, Homo sapiens
tattttattaaattg

SEQ ID NO: 124757 - DNA, 15 bp, Homo sapiens
ttattttattaaatt

SEQ ID NO: 124758 - DNA, 15 bp, Homo sapiens
attattttattaaat

SEQ ID NO: 124759 - DNA, 15 bp, Homo sapiens
tattattttattaaa

SEQ ID NO: 124760 - DNA, 15 bp, Homo sapiens
atattattttattaa

SEQ ID NO: 124761 - DNA, 15 bp, Homo sapiens
tatattattttatta

SEQ ID NO: 124762 - DNA, 15 bp, Homo sapiens
atatattattttatt

SEQ ID NO: 124763 - DNA, 15 bp, Homo sapiens
tatatattattttat

SEQ ID NO: 124764 - DNA, 15 bp, Homo sapiens
atatatattatttta

SEQ ID NO: 124765 - DNA, 15 bp, Homo sapiens
catatatattatttt

SEQ ID NO: 124766 - DNA, 15 bp, Homo sapiens
acatatatattattt

SEQ ID NO: 124767 - DNA, 15 bp, Homo sapiens
tacatatatattatt

SEQ ID NO: 124768 - DNA, 15 bp, Homo sapiens
ttacatatatattat

SEQ ID NO: 124769 - DNA, 15 bp, Homo sapiens
tttacatatatatta

SEQ ID NO: 124770 - DNA, 15 bp, Homo sapiens
atttacatatatatt

SEQ ID NO: 124771 - DNA, 15 bp, Homo sapiens
catttacatatatat

SEQ ID NO: 124772 - DNA, 15 bp, Homo sapiens
gcatttacatatata

SEQ ID NO: 124773 - DNA, 15 bp, Homo sapiens
agcatttacatatat

SEQ ID NO: 124774 - DNA, 15 bp, Homo sapiens
aagcatttacatata

SEQ ID NO: 124775 - DNA, 15 bp, Homo sapiens
gaagcatttacatat

SEQ ID NO: 124776 - DNA, 15 bp, Homo sapiens
cgaagcatttacata

SEQ ID NO: 124777 - DNA, 15 bp, Homo sapiens
acgaagcatttacat

SEQ ID NO: 124778 - DNA, 15 bp, Homo sapiens
tacgaagcatttaca

SEQ ID NO: 124779 - DNA, 15 bp, Homo sapiens
ttacgaagcatttac

SEQ ID NO: 124780 - DNA, 15 bp, Homo sapiens
tttacgaagcattta

SEQ ID NO: 124781 - DNA, 15 bp, Homo sapiens
ctttacgaagcattt

SEQ ID NO: 124782 - DNA, 15 bp, Homo sapiens
gctttacgaagcatt

SEQ ID NO: 124783 - DNA, 15 bp, Homo sapiens
tgctttacgaagcat

SEQ ID NO: 124784 - DNA, 15 bp, Homo sapiens
gtgctttacgaagca

SEQ ID NO: 124785 - DNA, 15 bp, Homo sapiens
agtgctttacgaagc

SEQ ID NO: 124786 - DNA, 15 bp, Homo sapiens
aagtgctttacgaag

SEQ ID NO: 124787 - DNA, 15 bp, Homo sapiens
aaagtgctttacgaa

SEQ ID NO: 124788 - DNA, 15 bp, Homo sapiens
caaagtgctttacga

SEQ ID NO: 124789 - DNA, 15 bp, Homo sapiens
acaaagtgctttacg

SEQ ID NO: 124790 - DNA, 15 bp, Homo sapiens
tacaaagtgctttac

SEQ ID NO: 124791 - DNA, 15 bp, Homo sapiens
ttacaaagtgcttta

SEQ ID NO: 124792 - DNA, 15 bp, Homo sapiens
tttacaaagtgcttt

SEQ ID NO: 124793 - DNA, 15 bp, Homo sapiens
atttacaaagtgctt

SEQ ID NO: 124794 - DNA, 15 bp, Homo sapiens
catttacaaagtgct

SEQ ID NO: 124795 - DNA, 15 bp, Homo sapiens
acatttacaaagtgc

SEQ ID NO: 124796 - DNA, 15 bp, Homo sapiens
aacatttacaaagtg

SEQ ID NO: 124797 - DNA, 15 bp, Homo sapiens
taacatttacaaagt

SEQ ID NO: 124798 - DNA, 15 bp, Homo sapiens
ttaacatttacaaag

SEQ ID NO: 124799 - DNA, 15 bp, Homo sapiens
attaacatttacaaa

SEQ ID NO: 124800 - DNA, 15 bp, Homo sapiens
cattaacatttacaa

SEQ ID NO: 124801 - DNA, 15 bp, Homo sapiens
acattaacatttaca

SEQ ID NO: 124802 - DNA, 15 bp, Homo sapiens
aacattaacatttac

SEQ ID NO: 124803 - DNA, 15 bp, Homo sapiens
caacattaacattta

SEQ ID NO: 124804 - DNA, 15 bp, Homo sapiens
gcaacattaacattt

SEQ ID NO: 124805 - DNA, 15 bp, Homo sapiens
agcaacattaacatt

SEQ ID NO: 124806 - DNA, 15 bp, Homo sapiens
cagcaacattaacat

SEQ ID NO: 124807 - DNA, 15 bp, Homo sapiens
tcagcaacattaaca

SEQ ID NO: 124808 - DNA, 15 bp, Homo sapiens
gtcagcaacattaac

SEQ ID NO: 124809 - DNA, 15 bp, Homo sapiens
tgtcagcaacattaa

SEQ ID NO: 124810 - DNA, 15 bp, Homo sapiens
ttgtcagcaacatta

SEQ ID NO: 124811 - DNA, 15 bp, Homo sapiens
tttgtcagcaacatt

SEQ ID NO: 124812 - DNA, 15 bp, Homo sapiens
ttttgtcagcaacat

SEQ ID NO: 124813 - DNA, 15 bp, Homo sapiens
cttttgtcagcaaca

SEQ ID NO: 124814 - DNA, 15 bp, Homo sapiens
gcttttgtcagcaac

SEQ ID NO: 124815 - DNA, 15 bp, Homo sapiens
tgcttttgtcagcaa

SEQ ID NO: 124816 - DNA, 15 bp, Homo sapiens
ttgcttttgtcagca

SEQ ID NO: 124817 - DNA, 15 bp, Homo sapiens
tttgcttttgtcagc

SEQ ID NO: 124818 - DNA, 15 bp, Homo sapiens
ttttgcttttgtcag

SEQ ID NO: 124819 - DNA, 15 bp, Homo sapiens
attttgcttttgtca

SEQ ID NO: 124820 - DNA, 15 bp, Homo sapiens
aattttgcttttgtc

SEQ ID NO: 124821 - DNA, 15 bp, Homo sapiens
caattttgcttttgt

SEQ ID NO: 124822 - DNA, 15 bp, Homo sapiens
ccaattttgcttttg

SEQ ID NO: 124823 - DNA, 15 bp, Homo sapiens
tccaattttgctttt

SEQ ID NO: 124824 - DNA, 15 bp, Homo sapiens
ttccaattttgcttt

SEQ ID NO: 124825 - DNA, 15 bp, Homo sapiens
gttccaattttgctt

SEQ ID NO: 124826 - DNA, 15 bp, Homo sapiens
tgttccaattttgct

SEQ ID NO: 124827 - DNA, 15 bp, Homo sapiens
gtgttccaattttgc

SEQ ID NO: 124828 - DNA, 15 bp, Homo sapiens
tgtgttccaattttg

SEQ ID NO: 124829 - DNA, 15 bp, Homo sapiens
ctgtgttccaatttt

SEQ ID NO: 124830 - DNA, 15 bp, Homo sapiens
cctgtgttccaattt

SEQ ID NO: 124831 - DNA, 15 bp, Homo sapiens
acctgtgttccaatt

SEQ ID NO: 124832 - DNA, 15 bp, Homo sapiens
aacctgtgttccaat

SEQ ID NO: 124833 - DNA, 15 bp, Homo sapiens
aaacctgtgttccaa

SEQ ID NO: 124834 - DNA, 15 bp, Homo sapiens
aaaacctgtgttcca

SEQ ID NO: 124835 - DNA, 15 bp, Homo sapiens
gaaaacctgtgttcc

SEQ ID NO: 124836 - DNA, 15 bp, Homo sapiens
agaaaacctgtgttc

SEQ ID NO: 124837 - DNA, 15 bp, Homo sapiens
cagaaaacctgtgtt

SEQ ID NO: 124838 - DNA, 15 bp, Homo sapiens
ccagaaaacctgtgt

SEQ ID NO: 124839 - DNA, 15 bp, Homo sapiens
gccagaaaacctgtg

SEQ ID NO: 124840 - DNA, 15 bp, Homo sapiens
agccagaaaacctgt

SEQ ID NO: 124841 - DNA, 15 bp, Homo sapiens
aagccagaaaacctg

SEQ ID NO: 124842 - DNA, 15 bp, Homo sapiens
aaagccagaaaacct

SEQ ID NO: 124843 - DNA, 15 bp, Homo sapiens
gaaagccagaaaacc

SEQ ID NO: 124844 - DNA, 15 bp, Homo sapiens
tgaaagccagaaaac

SEQ ID NO: 124845 - DNA, 15 bp, Homo sapiens
atgaaagccagaaaa

SEQ ID NO: 124846 - DNA, 15 bp, Homo sapiens
gatgaaagccagaaa

SEQ ID NO: 124847 - DNA, 15 bp, Homo sapiens
agatgaaagccagaa

SEQ ID NO: 124848 - DNA, 15 bp, Homo sapiens
aagatgaaagccaga

SEQ ID NO: 124849 - DNA, 15 bp, Homo sapiens
aaagatgaaagccag

SEQ ID NO: 124850 - DNA, 15 bp, Homo sapiens
aaaagatgaaagcca

SEQ ID NO: 124851 - DNA, 15 bp, Homo sapiens
gaaaagatgaaagcc

SEQ ID NO: 124852 - DNA, 15 bp, Homo sapiens
tgaaaagatgaaagc

SEQ ID NO: 124853 - DNA, 15 bp, Homo sapiens
gtgaaaagatgaaag

SEQ ID NO: 124854 - DNA, 15 bp, Homo sapiens
agtgaaaagatgaaa

SEQ ID NO: 124855 - DNA, 15 bp, Homo sapiens
aagtgaaaagatgaa

SEQ ID NO: 124856 - DNA, 15 bp, Homo sapiens
aaagtgaaaagatga

SEQ ID NO: 124857 - DNA, 15 bp, Homo sapiens
aaaagtgaaaagatg

SEQ ID NO: 124858 - DNA, 15 bp, Homo sapiens
aaaaagtgaaaagat

SEQ ID NO: 124859 - DNA, 15 bp, Homo sapiens
aaaaaagtgaaaaga

SEQ ID NO: 124860 - DNA, 15 bp, Homo sapiens
taaaaaagtgaaaag

SEQ ID NO: 124861 - DNA, 15 bp, Homo sapiens
ctaaaaaagtgaaaa

SEQ ID NO: 124862 - DNA, 15 bp, Homo sapiens
actaaaaaagtgaaa

SEQ ID NO: 124863 - DNA, 15 bp, Homo sapiens
cactaaaaaagtgaa

SEQ ID NO: 124864 - DNA, 15 bp, Homo sapiens
acactaaaaaagtga

SEQ ID NO: 124865 - DNA, 15 bp, Homo sapiens
cacactaaaaaagtg

SEQ ID NO: 124866 - DNA, 15 bp, Homo sapiens
ccacactaaaaaagt

SEQ ID NO: 124867 - DNA, 15 bp, Homo sapiens
cccacactaaaaaag

SEQ ID NO: 124868 - DNA, 15 bp, Homo sapiens
ccccacactaaaaaa

SEQ ID NO: 124869 - DNA, 15 bp, Homo sapiens
tccccacactaaaaa

SEQ ID NO: 124870 - DNA, 15 bp, Homo sapiens
atccccacactaaaa

SEQ ID NO: 124871 - DNA, 15 bp, Homo sapiens
aatccccacactaaa

SEQ ID NO: 124872 - DNA, 15 bp, Homo sapiens
caatccccacactaa

SEQ ID NO: 124873 - DNA, 15 bp, Homo sapiens
acaatccccacacta

SEQ ID NO: 124874 - DNA, 15 bp, Homo sapiens
cacaatccccacact

SEQ ID NO: 124875 - DNA, 15 bp, Homo sapiens
acacaatccccacac

SEQ ID NO: 124876 - DNA, 15 bp, Homo sapiens
tacacaatccccaca

SEQ ID NO: 124877 - DNA, 15 bp, Homo sapiens
ctacacaatccccac

SEQ ID NO: 124878 - DNA, 15 bp, Homo sapiens
actacacaatcccca

SEQ ID NO: 124879 - DNA, 15 bp, Homo sapiens
tactacacaatcccc

SEQ ID NO: 124880 - DNA, 15 bp, Homo sapiens
atactacacaatccc

SEQ ID NO: 124881 - DNA, 15 bp, Homo sapiens
catactacacaatcc

SEQ ID NO: 124882 - DNA, 15 bp, Homo sapiens
acatactacacaatc

SEQ ID NO: 124883 - DNA, 15 bp, Homo sapiens
cacatactacacaat

SEQ ID NO: 124884 - DNA, 15 bp, Homo sapiens
acacatactacacaa

SEQ ID NO: 124885 - DNA, 15 bp, Homo sapiens
cacacatactacaca

SEQ ID NO: 124886 - DNA, 15 bp, Homo sapiens
acacacatactacac

SEQ ID NO: 124887 - DNA, 15 bp, Homo sapiens
aacacacatactaca

SEQ ID NO: 124888 - DNA, 15 bp, Homo sapiens
aaacacacatactac

SEQ ID NO: 124889 - DNA, 15 bp, Homo sapiens
taaacacacatacta

SEQ ID NO: 124890 - DNA, 15 bp, Homo sapiens
ataaacacacatact

SEQ ID NO: 124891 - DNA, 15 bp, Homo sapiens
aataaacacacatac

SEQ ID NO: 124892 - DNA, 15 bp, Homo sapiens
gaataaacacacata

SEQ ID NO: 124893 - DNA, 15 bp, Homo sapiens
agaataaacacacat

SEQ ID NO: 124894 - DNA, 15 bp, Homo sapiens
cagaataaacacaca

SEQ ID NO: 124895 - DNA, 15 bp, Homo sapiens
acagaataaacacac

SEQ ID NO: 124896 - DNA, 15 bp, Homo sapiens
cacagaataaacaca

SEQ ID NO: 124897 - DNA, 15 bp, Homo sapiens
acacagaataaacac

SEQ ID NO: 124898 - DNA, 15 bp, Homo sapiens
cacacagaataaaca

SEQ ID NO: 124899 - DNA, 15 bp, Homo sapiens
gcacacagaataaac

SEQ ID NO: 124900 - DNA, 15 bp, Homo sapiens
agcacacagaataaa

SEQ ID NO: 124901 - DNA, 15 bp, Homo sapiens
aagcacacagaataa

SEQ ID NO: 124902 - DNA, 15 bp, Homo sapiens
aaagcacacagaata

SEQ ID NO: 124903 - DNA, 15 bp, Homo sapiens
taaagcacacagaat

SEQ ID NO: 124904 - DNA, 15 bp, Homo sapiens
ttaaagcacacagaa

SEQ ID NO: 124905 - DNA, 15 bp, Homo sapiens
tttaaagcacacaga

SEQ ID NO: 124906 - DNA, 15 bp, Homo sapiens
atttaaagcacacag

SEQ ID NO: 124907 - DNA, 15 bp, Homo sapiens
aatttaaagcacaca

SEQ ID NO: 124908 - DNA, 15 bp, Homo sapiens
aaatttaaagcacac

SEQ ID NO: 124909 - DNA, 15 bp, Homo sapiens
taaatttaaagcaca

SEQ ID NO: 124910 - DNA, 15 bp, Homo sapiens
ataaatttaaagcac

SEQ ID NO: 124911 - DNA, 15 bp, Homo sapiens
aataaatttaaagca

SEQ ID NO: 124912 - DNA, 15 bp, Homo sapiens
aaataaatttaaagc

SEQ ID NO: 124913 - DNA, 15 bp, Homo sapiens
gaaataaatttaaag

SEQ ID NO: 124914 - DNA, 15 bp, Homo sapiens
agaaataaatttaaa

SEQ ID NO: 124915 - DNA, 15 bp, Homo sapiens
cagaaataaatttaa

SEQ ID NO: 124916 - DNA, 15 bp, Homo sapiens
acagaaataaattta

SEQ ID NO: 124917 - DNA, 15 bp, Homo sapiens
cacagaaataaattt

SEQ ID NO: 124918 - DNA, 15 bp, Homo sapiens
gcacagaaataaatt

SEQ ID NO: 124919 - DNA, 15 bp, Homo sapiens
agcacagaaataaat

SEQ ID NO: 124920 - DNA, 15 bp, Homo sapiens
aagcacagaaataaa

SEQ ID NO: 124921 - DNA, 15 bp, Homo sapiens
taagcacagaaataa

SEQ ID NO: 124922 - DNA, 15 bp, Homo sapiens
ttaagcacagaaata

SEQ ID NO: 124923 - DNA, 15 bp, Homo sapiens
attaagcacagaaat

SEQ ID NO: 124924 - DNA, 15 bp, Homo sapiens
tattaagcacagaaa

SEQ ID NO: 124925 - DNA, 15 bp, Homo sapiens
atattaagcacagaa

SEQ ID NO: 124926 - DNA, 15 bp, Homo sapiens
gatattaagcacaga

SEQ ID NO: 124927 - DNA, 15 bp, Homo sapiens
agatattaagcacag

SEQ ID NO: 124928 - DNA, 15 bp, Homo sapiens
gagatattaagcaca

SEQ ID NO: 124929 - DNA, 15 bp, Homo sapiens
agagatattaagcac

SEQ ID NO: 124930 - DNA, 15 bp, Homo sapiens
aagagatattaagca

SEQ ID NO: 124931 - DNA, 15 bp, Homo sapiens
gaagagatattaagc

SEQ ID NO: 124932 - DNA, 15 bp, Homo sapiens
ggaagagatattaag

SEQ ID NO: 124933 - DNA, 15 bp, Homo sapiens
gggaagagatattaa

SEQ ID NO: 124934 - DNA, 15 bp, Homo sapiens
ggggaagagatatta

SEQ ID NO: 124935 - DNA, 15 bp, Homo sapiens
tggggaagagatatt

SEQ ID NO: 124936 - DNA, 15 bp, Homo sapiens
atggggaagagatat

SEQ ID NO: 124937 - DNA, 15 bp, Homo sapiens
gatggggaagagata

SEQ ID NO: 124938 - DNA, 15 bp, Homo sapiens
ggatggggaagagat

SEQ ID NO: 124939 - DNA, 15 bp, Homo sapiens
aggatggggaagaga

SEQ ID NO: 124940 - DNA, 15 bp, Homo sapiens
gaggatggggaagag

SEQ ID NO: 124941 - DNA, 15 bp, Homo sapiens
ggaggatggggaaga

SEQ ID NO: 124942 - DNA, 15 bp, Homo sapiens
aggaggatggggaag

SEQ ID NO: 124943 - DNA, 15 bp, Homo sapiens
aaggaggatggggaa

SEQ ID NO: 124944 - DNA, 15 bp, Homo sapiens
taaggaggatgggga

SEQ ID NO: 124945 - DNA, 15 bp, Homo sapiens
gtaaggaggatgggg

SEQ ID NO: 124946 - DNA, 15 bp, Homo sapiens
ggtaaggaggatggg

SEQ ID NO: 124947 - DNA, 15 bp, Homo sapiens
aggtaaggaggatgg

SEQ ID NO: 124948 - DNA, 15 bp, Homo sapiens
aaggtaaggaggatg

SEQ ID NO: 124949 - DNA, 15 bp, Homo sapiens
aaaggtaaggaggat

SEQ ID NO: 124950 - DNA, 15 bp, Homo sapiens
taaaggtaaggagga

SEQ ID NO: 124951 - DNA, 15 bp, Homo sapiens
ttaaaggtaaggagg

SEQ ID NO: 124952 - DNA, 15 bp, Homo sapiens
tttaaaggtaaggag

SEQ ID NO: 124953 - DNA, 15 bp, Homo sapiens
atttaaaggtaagga

SEQ ID NO: 124954 - DNA, 15 bp, Homo sapiens
aatttaaaggtaagg

SEQ ID NO: 124955 - DNA, 15 bp, Homo sapiens
gaatttaaaggtaag

SEQ ID NO: 124956 - DNA, 15 bp, Homo sapiens
agaatttaaaggtaa

SEQ ID NO: 124957 - DNA, 15 bp, Homo sapiens
cagaatttaaaggta

SEQ ID NO: 124958 - DNA, 15 bp, Homo sapiens
acagaatttaaaggt

SEQ ID NO: 124959 - DNA, 15 bp, Homo sapiens
tacagaatttaaagg

SEQ ID NO: 124960 - DNA, 15 bp, Homo sapiens
ttacagaatttaaag

SEQ ID NO: 124961 - DNA, 15 bp, Homo sapiens
gttacagaatttaaa

SEQ ID NO: 124962 - DNA, 15 bp, Homo sapiens
ggttacagaatttaa

SEQ ID NO: 124963 - DNA, 15 bp, Homo sapiens
gggttacagaattta

SEQ ID NO: 124964 - DNA, 15 bp, Homo sapiens
agggttacagaattt

SEQ ID NO: 124965 - DNA, 15 bp, Homo sapiens
aagggttacagaatt

SEQ ID NO: 124966 - DNA, 15 bp, Homo sapiens
aaagggttacagaat

SEQ ID NO: 124967 - DNA, 15 bp, Homo sapiens
aaaagggttacagaa

SEQ ID NO: 124968 - DNA, 15 bp, Homo sapiens
taaaagggttacaga

SEQ ID NO: 124969 - DNA, 15 bp, Homo sapiens
ataaaagggttacag

SEQ ID NO: 124970 - DNA, 15 bp, Homo sapiens
gataaaagggttaca

SEQ ID NO: 124971 - DNA, 15 bp, Homo sapiens
agataaaagggttac

SEQ ID NO: 124972 - DNA, 15 bp, Homo sapiens
aagataaaagggtta

SEQ ID NO: 124973 - DNA, 15 bp, Homo sapiens
gaagataaaagggtt

SEQ ID NO: 124974 - DNA, 15 bp, Homo sapiens
tgaagataaaagggt

SEQ ID NO: 124975 - DNA, 15 bp, Homo sapiens
atgaagataaaaggg

SEQ ID NO: 124976 - DNA, 15 bp, Homo sapiens
tatgaagataaaagg

SEQ ID NO: 124977 - DNA, 15 bp, Homo sapiens
ttatgaagataaaag

SEQ ID NO: 124978 - DNA, 15 bp, Homo sapiens
tttatgaagataaaa

SEQ ID NO: 124979 - DNA, 15 bp, Homo sapiens
atttatgaagataaa

SEQ ID NO: 124980 - DNA, 15 bp, Homo sapiens
tatttatgaagataa

SEQ ID NO: 124981 - DNA, 15 bp, Homo sapiens
atatttatgaagata

SEQ ID NO: 124982 - DNA, 15 bp, Homo sapiens
tatatttatgaagat

SEQ ID NO: 124983 - DNA, 15 bp, Homo sapiens
atatatttatgaaga

SEQ ID NO: 124984 - DNA, 15 bp, Homo sapiens
catatatttatgaag

SEQ ID NO: 124985 - DNA, 15 bp, Homo sapiens
gcatatatttatgaa

SEQ ID NO: 124986 - DNA, 15 bp, Homo sapiens
agcatatatttatga

SEQ ID NO: 124987 - DNA, 15 bp, Homo sapiens
aagcatatatttatg

SEQ ID NO: 124988 - DNA, 15 bp, Homo sapiens
aaagcatatatttat

SEQ ID NO: 124989 - DNA, 15 bp, Homo sapiens
aaaagcatatattta

SEQ ID NO: 124990 - DNA, 15 bp, Homo sapiens
aaaaagcatatattt

SEQ ID NO: 124991 - DNA, 15 bp, Homo sapiens
caaaaagcatatatt

SEQ ID NO: 124992 - DNA, 15 bp, Homo sapiens
acaaaaagcatatat

SEQ ID NO: 124993 - DNA, 15 bp, Homo sapiens
tacaaaaagcatata

SEQ ID NO: 124994 - DNA, 15 bp, Homo sapiens
ctacaaaaagcatat

SEQ ID NO: 124995 - DNA, 15 bp, Homo sapiens
gctacaaaaagcata

SEQ ID NO: 124996 - DNA, 15 bp, Homo sapiens
tgctacaaaaagcat

SEQ ID NO: 124997 - DNA, 15 bp, Homo sapiens
ctgctacaaaaagca

SEQ ID NO: 124998 - DNA, 15 bp, Homo sapiens
gctgctacaaaaagc

SEQ ID NO: 124999 - DNA, 15 bp, Homo sapiens
agctgctacaaaaag

SEQ ID NO: 125000 - DNA, 15 bp, Homo sapiens
aagctgctacaaaaa

SEQ ID NO: 125001 - DNA, 15 bp, Homo sapiens
aaagctgctacaaaa

SEQ ID NO: 125002 - DNA, 15 bp, Homo sapiens
aaaagctgctacaaa

SEQ ID NO: 125003 - DNA, 15 bp, Homo sapiens
taaaagctgctacaa

SEQ ID NO: 125004 - DNA, 15 bp, Homo sapiens
ttaaaagctgctaca

SEQ ID NO: 125005 - DNA, 15 bp, Homo sapiens
tttaaaagctgctac

SEQ ID NO: 125006 - DNA, 15 bp, Homo sapiens
ctttaaaagctgcta

SEQ ID NO: 125007 - DNA, 15 bp, Homo sapiens
actttaaaagctgct

SEQ ID NO: 125008 - DNA, 15 bp, Homo sapiens
tactttaaaagctgc

SEQ ID NO: 125009 - DNA, 15 bp, Homo sapiens
atactttaaaagctg

SEQ ID NO: 125010 - DNA, 15 bp, Homo sapiens
aatactttaaaagct

SEQ ID NO: 125011 - DNA, 15 bp, Homo sapiens
aaatactttaaaagc

SEQ ID NO: 125012 - DNA, 15 bp, Homo sapiens
caaatactttaaaag

SEQ ID NO: 125013 - DNA, 15 bp, Homo sapiens
gcaaatactttaaaa

SEQ ID NO: 125014 - DNA, 15 bp, Homo sapiens
tgcaaatactttaaa

SEQ ID NO: 125015 - DNA, 15 bp, Homo sapiens
atgcaaatactttaa

SEQ ID NO: 125016 - DNA, 15 bp, Homo sapiens
catgcaaatacttta

SEQ ID NO: 125017 - DNA, 15 bp, Homo sapiens
ccatgcaaatacttt

SEQ ID NO: 125018 - DNA, 15 bp, Homo sapiens
cccatgcaaatactt

SEQ ID NO: 125019 - DNA, 15 bp, Homo sapiens
ccccatgcaaatact

SEQ ID NO: 125020 - DNA, 15 bp, Homo sapiens
accccatgcaaatac

SEQ ID NO: 125021 - DNA, 15 bp, Homo sapiens
taccccatgcaaata

SEQ ID NO: 125022 - DNA, 15 bp, Homo sapiens
ctaccccatgcaaat

SEQ ID NO: 125023 - DNA, 15 bp, Homo sapiens
tctaccccatgcaaa

SEQ ID NO: 125024 - DNA, 15 bp, Homo sapiens
ctctaccccatgcaa

SEQ ID NO: 125025 - DNA, 15 bp, Homo sapiens
tctctaccccatgca

SEQ ID NO: 125026 - DNA, 15 bp, Homo sapiens
ctctctaccccatgc

SEQ ID NO: 125027 - DNA, 15 bp, Homo sapiens
cctctctaccccatg

SEQ ID NO: 125028 - DNA, 15 bp, Homo sapiens
acctctctaccccat

SEQ ID NO: 125029 - DNA, 15 bp, Homo sapiens
cacctctctacccca

SEQ ID NO: 125030 - DNA, 15 bp, Homo sapiens
tcacctctctacccc

SEQ ID NO: 125031 - DNA, 15 bp, Homo sapiens
ctcacctctctaccc

SEQ ID NO: 125032 - DNA, 15 bp, Homo sapiens
cctcacctctctacc

SEQ ID NO: 125033 - DNA, 15 bp, Homo sapiens
tcctcacctctctac

SEQ ID NO: 125034 - DNA, 15 bp, Homo sapiens
atcctcacctctcta

SEQ ID NO: 125035 - DNA, 15 bp, Homo sapiens
catcctcacctctct

SEQ ID NO: 125036 - DNA, 15 bp, Homo sapiens
gcatcctcacctctc

SEQ ID NO: 125037 - DNA, 15 bp, Homo sapiens
tgcatcctcacctct

SEQ ID NO: 125038 - DNA, 15 bp, Homo sapiens
gtgcatcctcacctc

SEQ ID NO: 125039 - DNA, 15 bp, Homo sapiens
ggtgcatcctcacct

SEQ ID NO: 125040 - DNA, 15 bp, Homo sapiens
aggtgcatcctcacc

SEQ ID NO: 125041 - DNA, 15 bp, Homo sapiens
aaggtgcatcctcac

SEQ ID NO: 125042 - DNA, 15 bp, Homo sapiens
aaaggtgcatcctca

SEQ ID NO: 125043 - DNA, 15 bp, Homo sapiens
gaaaggtgcatcctc

SEQ ID NO: 125044 - DNA, 15 bp, Homo sapiens
agaaaggtgcatcct

SEQ ID NO: 125045 - DNA, 15 bp, Homo sapiens
cagaaaggtgcatcc

SEQ ID NO: 125046 - DNA, 15 bp, Homo sapiens
acagaaaggtgcatc

SEQ ID NO: 125047 - DNA, 15 bp, Homo sapiens
cacagaaaggtgcat

SEQ ID NO: 125048 - DNA, 15 bp, Homo sapiens
gcacagaaaggtgca

SEQ ID NO: 125049 - DNA, 15 bp, Homo sapiens
tgcacagaaaggtgc

SEQ ID NO: 125050 - DNA, 15 bp, Homo sapiens
ttgcacagaaaggtg

SEQ ID NO: 125051 - DNA, 15 bp, Homo sapiens
attgcacagaaaggt

SEQ ID NO: 125052 - DNA, 15 bp, Homo sapiens
tattgcacagaaagg

SEQ ID NO: 125053 - DNA, 15 bp, Homo sapiens
ctattgcacagaaag

SEQ ID NO: 125054 - DNA, 15 bp, Homo sapiens
actattgcacagaaa

SEQ ID NO: 125055 - DNA, 15 bp, Homo sapiens
tactattgcacagaa

SEQ ID NO: 125056 - DNA, 15 bp, Homo sapiens
gtactattgcacaga

SEQ ID NO: 125057 - DNA, 15 bp, Homo sapiens
agtactattgcacag

SEQ ID NO: 125058 - DNA, 15 bp, Homo sapiens
gagtactattgcaca

SEQ ID NO: 125059 - DNA, 15 bp, Homo sapiens
agagtactattgcac

SEQ ID NO: 125060 - DNA, 15 bp, Homo sapiens
aagagtactattgca

SEQ ID NO: 125061 - DNA, 15 bp, Homo sapiens
taagagtactattgc

SEQ ID NO: 125062 - DNA, 15 bp, Homo sapiens
ttaagagtactattg

SEQ ID NO: 125063 - DNA, 15 bp, Homo sapiens
cttaagagtactatt

SEQ ID NO: 125064 - DNA, 15 bp, Homo sapiens
tcttaagagtactat

SEQ ID NO: 125065 - DNA, 15 bp, Homo sapiens
atcttaagagtacta

SEQ ID NO: 125066 - DNA, 15 bp, Homo sapiens
tatcttaagagtact

SEQ ID NO: 125067 - DNA, 15 bp, Homo sapiens
gtatcttaagagtac

SEQ ID NO: 125068 - DNA, 15 bp, Homo sapiens
agtatcttaagagta

SEQ ID NO: 125069 - DNA, 15 bp, Homo sapiens
cagtatcttaagagt

SEQ ID NO: 125070 - DNA, 15 bp, Homo sapiens
acagtatcttaagag

SEQ ID NO: 125071 - DNA, 15 bp, Homo sapiens
gacagtatcttaaga

SEQ ID NO: 125072 - DNA, 15 bp, Homo sapiens
agacagtatcttaag

SEQ ID NO: 125073 - DNA, 15 bp, Homo sapiens
gagacagtatcttaa

SEQ ID NO: 125074 - DNA, 15 bp, Homo sapiens
tgagacagtatctta

SEQ ID NO: 125075 - DNA, 15 bp, Homo sapiens
atgagacagtatctt

SEQ ID NO: 125076 - DNA, 15 bp, Homo sapiens
gatgagacagtatct

SEQ ID NO: 125077 - DNA, 15 bp, Homo sapiens
tgatgagacagtatc

SEQ ID NO: 125078 - DNA, 15 bp, Homo sapiens
ttgatgagacagtat

SEQ ID NO: 125079 - DNA, 15 bp, Homo sapiens
tttgatgagacagta

SEQ ID NO: 125080 - DNA, 15 bp, Homo sapiens
ctttgatgagacagt

SEQ ID NO: 125081 - DNA, 15 bp, Homo sapiens
tctttgatgagacag

SEQ ID NO: 125082 - DNA, 15 bp, Homo sapiens
ctctttgatgagaca

SEQ ID NO: 125083 - DNA, 15 bp, Homo sapiens
gctctttgatgagac

SEQ ID NO: 125084 - DNA, 15 bp, Homo sapiens
ggctctttgatgaga

SEQ ID NO: 125085 - DNA, 15 bp, Homo sapiens
cggctctttgatgag

SEQ ID NO: 125086 - DNA, 15 bp, Homo sapiens
acggctctttgatga

SEQ ID NO: 125087 - DNA, 15 bp, Homo sapiens
tacggctctttgatg

SEQ ID NO: 125088 - DNA, 15 bp, Homo sapiens
ttacggctctttgat

SEQ ID NO: 125089 - DNA, 15 bp, Homo sapiens
attacggctctttga

SEQ ID NO: 125090 - DNA, 15 bp, Homo sapiens
aattacggctctttg

SEQ ID NO: 125091 - DNA, 15 bp, Homo sapiens
aaattacggctcttt

SEQ ID NO: 125092 - DNA, 15 bp, Homo sapiens
aaaattacggctctt

SEQ ID NO: 125093 - DNA, 15 bp, Homo sapiens
gaaaattacggctct

SEQ ID NO: 125094 - DNA, 15 bp, Homo sapiens
tgaaaattacggctc

SEQ ID NO: 125095 - DNA, 15 bp, Homo sapiens
gtgaaaattacggct

SEQ ID NO: 125096 - DNA, 15 bp, Homo sapiens
tgtgaaaattacggc

SEQ ID NO: 125097 - DNA, 15 bp, Homo sapiens
atgtgaaaattacgg

SEQ ID NO: 125098 - DNA, 15 bp, Homo sapiens
tatgtgaaaattacg

SEQ ID NO: 125099 - DNA, 15 bp, Homo sapiens
atatgtgaaaattac

SEQ ID NO: 125100 - DNA, 15 bp, Homo sapiens
aatatgtgaaaatta

SEQ ID NO: 125101 - DNA, 15 bp, Homo sapiens
caatatgtgaaaatt

SEQ ID NO: 125102 - DNA, 15 bp, Homo sapiens
acaatatgtgaaaat

SEQ ID NO: 125103 - DNA, 15 bp, Homo sapiens
gacaatatgtgaaaa

SEQ ID NO: 125104 - DNA, 15 bp, Homo sapiens
agacaatatgtgaaa

SEQ ID NO: 125105 - DNA, 15 bp, Homo sapiens
tagacaatatgtgaa

SEQ ID NO: 125106 - DNA, 15 bp, Homo sapiens
ctagacaatatgtga

SEQ ID NO: 125107 - DNA, 15 bp, Homo sapiens
gctagacaatatgtg

SEQ ID NO: 125108 - DNA, 15 bp, Homo sapiens
agctagacaatatgt

SEQ ID NO: 125109 - DNA, 15 bp, Homo sapiens
aagctagacaatatg

SEQ ID NO: 125110 - DNA, 15 bp, Homo sapiens
aaagctagacaatat

SEQ ID NO: 125111 - DNA, 15 bp, Homo sapiens
gaaagctagacaata

SEQ ID NO: 125112 - DNA, 15 bp, Homo sapiens
agaaagctagacaat

SEQ ID NO: 125113 - DNA, 15 bp, Homo sapiens
aagaaagctagacaa

SEQ ID NO: 125114 - DNA, 15 bp, Homo sapiens
aaagaaagctagaca

SEQ ID NO: 125115 - DNA, 15 bp, Homo sapiens
aaaagaaagctagac

SEQ ID NO: 125116 - DNA, 15 bp, Homo sapiens
aaaaagaaagctaga

SEQ ID NO: 125117 - DNA, 15 bp, Homo sapiens
caaaaagaaagctag

SEQ ID NO: 125118 - DNA, 15 bp, Homo sapiens
tcaaaaagaaagcta

SEQ ID NO: 125119 - DNA, 15 bp, Homo sapiens
ttcaaaaagaaagct

SEQ ID NO: 125120 - DNA, 15 bp, Homo sapiens
tttcaaaaagaaagc

SEQ ID NO: 125121 - DNA, 15 bp, Homo sapiens
ctttcaaaaagaaag

SEQ ID NO: 125122 - DNA, 15 bp, Homo sapiens
tctttcaaaaagaaa

SEQ ID NO: 125123 - DNA, 15 bp, Homo sapiens
atctttcaaaaagaa

SEQ ID NO: 125124 - DNA, 15 bp, Homo sapiens
aatctttcaaaaaga

SEQ ID NO: 125125 - DNA, 15 bp, Homo sapiens
gaatctttcaaaaag

SEQ ID NO: 125126 - DNA, 15 bp, Homo sapiens
agaatctttcaaaaa

SEQ ID NO: 125127 - DNA, 15 bp, Homo sapiens
aagaatctttcaaaa

SEQ ID NO: 125128 - DNA, 15 bp, Homo sapiens
aaagaatctttcaaa

SEQ ID NO: 125129 - DNA, 15 bp, Homo sapiens
aaaagaatctttcaa

SEQ ID NO: 125130 - DNA, 15 bp, Homo sapiens
taaaagaatctttca

SEQ ID NO: 125131 - DNA, 15 bp, Homo sapiens
ctaaaagaatctttc

SEQ ID NO: 125132 - DNA, 15 bp, Homo sapiens
gctaaaagaatcttt

SEQ ID NO: 125133 - DNA, 15 bp, Homo sapiens
agctaaaagaatctt

SEQ ID NO: 125134 - DNA, 15 bp, Homo sapiens
tagctaaaagaatct

SEQ ID NO: 125135 - DNA, 15 bp, Homo sapiens
ttagctaaaagaatc

SEQ ID NO: 125136 - DNA, 15 bp, Homo sapiens
tttagctaaaagaat

SEQ ID NO: 125137 - DNA, 15 bp, Homo sapiens
ctttagctaaaagaa

SEQ ID NO: 125138 - DNA, 15 bp, Homo sapiens
actttagctaaaaga

SEQ ID NO: 125139 - DNA, 15 bp, Homo sapiens
aactttagctaaaag

SEQ ID NO: 125140 - DNA, 15 bp, Homo sapiens
taactttagctaaaa

SEQ ID NO: 125141 - DNA, 15 bp, Homo sapiens
ttaactttagctaaa

SEQ ID NO: 125142 - DNA, 15 bp, Homo sapiens
tttaactttagctaa

SEQ ID NO: 125143 - DNA, 15 bp, Homo sapiens
atttaactttagcta

SEQ ID NO: 125144 - DNA, 15 bp, Homo sapiens
gatttaactttagct

SEQ ID NO: 125145 - DNA, 15 bp, Homo sapiens
agatttaactttagc

SEQ ID NO: 125146 - DNA, 15 bp, Homo sapiens
aagatttaactttag

SEQ ID NO: 125147 - DNA, 15 bp, Homo sapiens
aaagatttaacttta

SEQ ID NO: 125148 - DNA, 15 bp, Homo sapiens
aaaagatttaacttt

SEQ ID NO: 125149 - DNA, 15 bp, Homo sapiens
aaaaagatttaactt

SEQ ID NO: 125150 - DNA, 15 bp, Homo sapiens
aaaaaagatttaact

SEQ ID NO: 125151 - DNA, 15 bp, Homo sapiens
aaaaaaagatttaac

SEQ ID NO: 125152 - DNA, 15 bp, Homo sapiens
aaaaaaaagatttaa

SEQ ID NO: 125153 - DNA, 15 bp, Homo sapiens
gaaaaaaaagattta

SEQ ID NO: 125154 - DNA, 15 bp, Homo sapiens
agaaaaaaaagattt

SEQ ID NO: 125155 - DNA, 15 bp, Homo sapiens
cagaaaaaaaagatt

SEQ ID NO: 125156 - DNA, 15 bp, Homo sapiens
gcagaaaaaaaagat

SEQ ID NO: 125157 - DNA, 15 bp, Homo sapiens
cgcagaaaaaaaaga

SEQ ID NO: 125158 - DNA, 15 bp, Homo sapiens
acgcagaaaaaaaag

SEQ ID NO: 125159 - DNA, 15 bp, Homo sapiens
tacgcagaaaaaaaa

SEQ ID NO: 125160 - DNA, 15 bp, Homo sapiens
gtacgcagaaaaaaa

SEQ ID NO: 125161 - DNA, 15 bp, Homo sapiens
tgtacgcagaaaaaa

SEQ ID NO: 125162 - DNA, 15 bp, Homo sapiens
ttgtacgcagaaaaa

SEQ ID NO: 125163 - DNA, 15 bp, Homo sapiens
attgtacgcagaaaa

SEQ ID NO: 125164 - DNA, 15 bp, Homo sapiens
aattgtacgcagaaa

SEQ ID NO: 125165 - DNA, 15 bp, Homo sapiens
aaattgtacgcagaa

SEQ ID NO: 125166 - DNA, 15 bp, Homo sapiens
caaattgtacgcaga

SEQ ID NO: 125167 - DNA, 15 bp, Homo sapiens
acaaattgtacgcag

SEQ ID NO: 125168 - DNA, 15 bp, Homo sapiens
tacaaattgtacgca

SEQ ID NO: 125169 - DNA, 15 bp, Homo sapiens
atacaaattgtacgc

SEQ ID NO: 125170 - DNA, 15 bp, Homo sapiens
aatacaaattgtacg

SEQ ID NO: 125171 - DNA, 15 bp, Homo sapiens
gaatacaaattgtac

SEQ ID NO: 125172 - DNA, 15 bp, Homo sapiens
cgaatacaaattgta

SEQ ID NO: 125173 - DNA, 15 bp, Homo sapiens
ccgaatacaaattgt

SEQ ID NO: 125174 - DNA, 15 bp, Homo sapiens
accgaatacaaattg

SEQ ID NO: 125175 - DNA, 15 bp, Homo sapiens
taccgaatacaaatt

SEQ ID NO: 125176 - DNA, 15 bp, Homo sapiens
ttaccgaatacaaat

SEQ ID NO: 125177 - DNA, 15 bp, Homo sapiens
attaccgaatacaaa

SEQ ID NO: 125178 - DNA, 15 bp, Homo sapiens
aattaccgaatacaa

SEQ ID NO: 125179 - DNA, 15 bp, Homo sapiens
aaattaccgaataca

SEQ ID NO: 125180 - DNA, 15 bp, Homo sapiens
aaaattaccgaatac

SEQ ID NO: 125181 - DNA, 15 bp, Homo sapiens
taaaattaccgaata

SEQ ID NO: 125182 - DNA, 15 bp, Homo sapiens
ataaaattaccgaat

SEQ ID NO: 125183 - DNA, 15 bp, Homo sapiens
tataaaattaccgaa

SEQ ID NO: 125184 - DNA, 15 bp, Homo sapiens
ttataaaattaccga

SEQ ID NO: 125185 - DNA, 15 bp, Homo sapiens
tttataaaattaccg

SEQ ID NO: 125186 - DNA, 15 bp, Homo sapiens
gtttataaaattacc

SEQ ID NO: 125187 - DNA, 15 bp, Homo sapiens
ggtttataaaattac

SEQ ID NO: 125188 - DNA, 15 bp, Homo sapiens
tggtttataaaatta

SEQ ID NO: 125189 - DNA, 15 bp, Homo sapiens
ttggtttataaaatt

SEQ ID NO: 125190 - DNA, 15 bp, Homo sapiens
tttggtttataaaat

SEQ ID NO: 125191 - DNA, 15 bp, Homo sapiens
ttttggtttataaaa

SEQ ID NO: 125192 - DNA, 15 bp, Homo sapiens
gttttggtttataaa

SEQ ID NO: 125193 - DNA, 15 bp, Homo sapiens
agttttggtttataa

SEQ ID NO: 125194 - DNA, 15 bp, Homo sapiens
cagttttggtttata

SEQ ID NO: 125195 - DNA, 15 bp, Homo sapiens
acagttttggtttat

SEQ ID NO: 125196 - DNA, 15 bp, Homo sapiens
aacagttttggttta

SEQ ID NO: 125197 - DNA, 15 bp, Homo sapiens
aaacagttttggttt

SEQ ID NO: 125198 - DNA, 15 bp, Homo sapiens
taaacagttttggtt

SEQ ID NO: 125199 - DNA, 15 bp, Homo sapiens
ataaacagttttggt

SEQ ID NO: 125200 - DNA, 15 bp, Homo sapiens
tataaacagttttgg

SEQ ID NO: 125201 - DNA, 15 bp, Homo sapiens
ttataaacagttttg

SEQ ID NO: 125202 - DNA, 15 bp, Homo sapiens
attataaacagtttt

SEQ ID NO: 125203 - DNA, 15 bp, Homo sapiens
tattataaacagttt

SEQ ID NO: 125204 - DNA, 15 bp, Homo sapiens
ttattataaacagtt

SEQ ID NO: 125205 - DNA, 15 bp, Homo sapiens
gttattataaacagt

SEQ ID NO: 125206 - DNA, 15 bp, Homo sapiens
agttattataaacag

SEQ ID NO: 125207 - DNA, 15 bp, Homo sapiens
aagttattataaaca

SEQ ID NO: 125208 - DNA, 15 bp, Homo sapiens
taagttattataaac

SEQ ID NO: 125209 - DNA, 15 bp, Homo sapiens
gtaagttattataaa

SEQ ID NO: 125210 - DNA, 15 bp, Homo sapiens
tgtaagttattataa

SEQ ID NO: 125211 - DNA, 15 bp, Homo sapiens
atgtaagttattata

SEQ ID NO: 125212 - DNA, 15 bp, Homo sapiens
aatgtaagttattat

SEQ ID NO: 125213 - DNA, 15 bp, Homo sapiens
aaatgtaagttatta

SEQ ID NO: 125214 - DNA, 15 bp, Homo sapiens
aaaatgtaagttatt

SEQ ID NO: 125215 - DNA, 15 bp, Homo sapiens
aaaaatgtaagttat

SEQ ID NO: 125216 - DNA, 15 bp, Homo sapiens
aaaaaatgtaagtta

SEQ ID NO: 125217 - DNA, 15 bp, Homo sapiens
taaaaaatgtaagtt

SEQ ID NO: 125218 - DNA, 15 bp, Homo sapiens
ttaaaaaatgtaagt

SEQ ID NO: 125219 - DNA, 15 bp, Homo sapiens
tttaaaaaatgtaag

SEQ ID NO: 125220 - DNA, 15 bp, Homo sapiens
ttttaaaaaatgtaa

SEQ ID NO: 125221 - DNA, 15 bp, Homo sapiens
tttttaaaaaatgta

SEQ ID NO: 125222 - DNA, 15 bp, Homo sapiens
atttttaaaaaatgt

SEQ ID NO: 125223 - DNA, 15 bp, Homo sapiens
tatttttaaaaaatg

SEQ ID NO: 125224 - DNA, 15 bp, Homo sapiens
atatttttaaaaaat

SEQ ID NO: 125225 - DNA, 15 bp, Homo sapiens
catatttttaaaaaa

SEQ ID NO: 125226 - DNA, 15 bp, Homo sapiens
tcatatttttaaaaa

SEQ ID NO: 125227 - DNA, 15 bp, Homo sapiens
atcatatttttaaaa

SEQ ID NO: 125228 - DNA, 15 bp, Homo sapiens
catcatatttttaaa

SEQ ID NO: 125229 - DNA, 15 bp, Homo sapiens
tcatcatatttttaa

SEQ ID NO: 125230 - DNA, 15 bp, Homo sapiens
atcatcatattttta

SEQ ID NO: 125231 - DNA, 15 bp, Homo sapiens
aatcatcatattttt

SEQ ID NO: 125232 - DNA, 15 bp, Homo sapiens
caatcatcatatttt

SEQ ID NO: 125233 - DNA, 15 bp, Homo sapiens
tcaatcatcatattt

SEQ ID NO: 125234 - DNA, 15 bp, Homo sapiens
atcaatcatcatatt

SEQ ID NO: 125235 - DNA, 15 bp, Homo sapiens
tatcaatcatcatat

SEQ ID NO: 125236 - DNA, 15 bp, Homo sapiens
ttatcaatcatcata

SEQ ID NO: 125237 - DNA, 15 bp, Homo sapiens
gttatcaatcatcat

SEQ ID NO: 125238 - DNA, 15 bp, Homo sapiens
tgttatcaatcatca

SEQ ID NO: 125239 - DNA, 15 bp, Homo sapiens
gtgttatcaatcatc

SEQ ID NO: 125240 - DNA, 15 bp, Homo sapiens
agtgttatcaatcat

SEQ ID NO: 125241 - DNA, 15 bp, Homo sapiens
tagtgttatcaatca

SEQ ID NO: 125242 - DNA, 15 bp, Homo sapiens
ttagtgttatcaatc

SEQ ID NO: 125243 - DNA, 15 bp, Homo sapiens
attagtgttatcaat

SEQ ID NO: 125244 - DNA, 15 bp, Homo sapiens
tattagtgttatcaa

SEQ ID NO: 125245 - DNA, 15 bp, Homo sapiens
ctattagtgttatca

SEQ ID NO: 125246 - DNA, 15 bp, Homo sapiens
tctattagtgttatc

SEQ ID NO: 125247 - DNA, 15 bp, Homo sapiens
ctctattagtgttat

SEQ ID NO: 125248 - DNA, 15 bp, Homo sapiens
gctctattagtgtta

SEQ ID NO: 125249 - DNA, 15 bp, Homo sapiens
agctctattagtgtt

SEQ ID NO: 125250 - DNA, 15 bp, Homo sapiens
tagctctattagtgt

SEQ ID NO: 125251 - DNA, 15 bp, Homo sapiens
ttagctctattagtg

SEQ ID NO: 125252 - DNA, 15 bp, Homo sapiens
tttagctctattagt

SEQ ID NO: 125253 - DNA, 15 bp, Homo sapiens
atttagctctattag

SEQ ID NO: 125254 - DNA, 15 bp, Homo sapiens
tatttagctctatta

SEQ ID NO: 125255 - DNA, 15 bp, Homo sapiens
ttatttagctctatt

SEQ ID NO: 125256 - DNA, 15 bp, Homo sapiens
tttatttagctctat

SEQ ID NO: 125257 - DNA, 15 bp, Homo sapiens
ctttatttagctcta

SEQ ID NO: 125258 - DNA, 15 bp, Homo sapiens
actttatttagctct

SEQ ID NO: 125259 - DNA, 15 bp, Homo sapiens
gactttatttagctc

SEQ ID NO: 125260 - DNA, 15 bp, Homo sapiens
agactttatttagct

SEQ ID NO: 125261 - DNA, 15 bp, Homo sapiens
aagactttatttagc

SEQ ID NO: 125262 - DNA, 15 bp, Homo sapiens
taagactttatttag

SEQ ID NO: 125263 - DNA, 15 bp, Homo sapiens
ttaagactttattta

SEQ ID NO: 125264 - DNA, 15 bp, Homo sapiens
tttaagactttattt

SEQ ID NO: 125265 - DNA, 15 bp, Homo sapiens
atttaagactttatt

SEQ ID NO: 125266 - DNA, 15 bp, Homo sapiens
aatttaagactttat

SEQ ID NO: 125267 - DNA, 15 bp, Homo sapiens
caatttaagacttta

SEQ ID NO: 125268 - DNA, 15 bp, Homo sapiens
ccaatttaagacttt

SEQ ID NO: 125269 - DNA, 15 bp, Homo sapiens
accaatttaagactt

SEQ ID NO: 125270 - DNA, 15 bp, Homo sapiens
gaccaatttaagact

SEQ ID NO: 125271 - DNA, 15 bp, Homo sapiens
ggaccaatttaagac

SEQ ID NO: 125272 - DNA, 15 bp, Homo sapiens
aggaccaatttaaga

SEQ ID NO: 125273 - DNA, 15 bp, Homo sapiens
aaggaccaatttaag

SEQ ID NO: 125274 - DNA, 15 bp, Homo sapiens
aaaggaccaatttaa

SEQ ID NO: 125275 - DNA, 15 bp, Homo sapiens
aaaaggaccaattta

SEQ ID NO: 125276 - DNA, 15 bp, Homo sapiens
aaaaaggaccaattt

SEQ ID NO: 125277 - DNA, 15 bp, Homo sapiens
aaaaaaggaccaatt

SEQ ID NO: 125278 - DNA, 15 bp, Homo sapiens
aaaaaaaggaccaat

SEQ ID NO: 125279 - DNA, 15 bp, Homo sapiens
gaaaaaaaggaccaa

SEQ ID NO: 125280 - DNA, 15 bp, Homo sapiens
agaaaaaaaggacca

SEQ ID NO: 125281 - DNA, 15 bp, Homo sapiens
gagaaaaaaaggacc

SEQ ID NO: 125282 - DNA, 15 bp, Homo sapiens
agagaaaaaaaggac

SEQ ID NO: 125283 - DNA, 15 bp, Homo sapiens
aagagaaaaaaagga

SEQ ID NO: 125284 - DNA, 15 bp, Homo sapiens
aaagagaaaaaaagg

SEQ ID NO: 125285 - DNA, 15 bp, Homo sapiens
aaaagagaaaaaaag

SEQ ID NO: 125286 - DNA, 15 bp, Homo sapiens
caaaagagaaaaaaa

SEQ ID NO: 125287 - DNA, 15 bp, Homo sapiens
acaaaagagaaaaaa

SEQ ID NO: 125288 - DNA, 15 bp, Homo sapiens
cacaaaagagaaaaa

SEQ ID NO: 125289 - DNA, 15 bp, Homo sapiens
acacaaaagagaaaa

SEQ ID NO: 125290 - DNA, 15 bp, Homo sapiens
aacacaaaagagaaa

SEQ ID NO: 125291 - DNA, 15 bp, Homo sapiens
aaacacaaaagagaa

SEQ ID NO: 125292 - DNA, 15 bp, Homo sapiens
aaaacacaaaagaga

SEQ ID NO: 125293 - DNA, 15 bp, Homo sapiens
gaaaacacaaaagag

SEQ ID NO: 125294 - DNA, 15 bp, Homo sapiens
agaaaacacaaaaga

SEQ ID NO: 125295 - DNA, 15 bp, Homo sapiens
cagaaaacacaaaag

SEQ ID NO: 125296 - DNA, 15 bp, Homo sapiens
acagaaaacacaaaa

SEQ ID NO: 125297 - DNA, 15 bp, Homo sapiens
aacagaaaacacaaa

SEQ ID NO: 125298 - DNA, 15 bp, Homo sapiens
aaacagaaaacacaa

SEQ ID NO: 125299 - DNA, 15 bp, Homo sapiens
aaaacagaaaacaca

SEQ ID NO: 125300 - DNA, 15 bp, Homo sapiens
aaaaacagaaaacac

SEQ ID NO: 125301 - DNA, 15 bp, Homo sapiens
aaaaaacagaaaaca

SEQ ID NO: 125302 - DNA, 15 bp, Homo sapiens
taaaaaacagaaaac

SEQ ID NO: 125303 - DNA, 15 bp, Homo sapiens
gtaaaaaacagaaaa

SEQ ID NO: 125304 - DNA, 15 bp, Homo sapiens
ggtaaaaaacagaaa

SEQ ID NO: 125305 - DNA, 15 bp, Homo sapiens
tggtaaaaaacagaa

SEQ ID NO: 125306 - DNA, 15 bp, Homo sapiens
ttggtaaaaaacaga

SEQ ID NO: 125307 - DNA, 15 bp, Homo sapiens
cttggtaaaaaacag

SEQ ID NO: 125308 - DNA, 15 bp, Homo sapiens
ccttggtaaaaaaca

SEQ ID NO: 125309 - DNA, 15 bp, Homo sapiens
tccttggtaaaaaac

SEQ ID NO: 125310 - DNA, 15 bp, Homo sapiens
ttccttggtaaaaaa

SEQ ID NO: 125311 - DNA, 15 bp, Homo sapiens
tttccttggtaaaaa

SEQ ID NO: 125312 - DNA, 15 bp, Homo sapiens
atttccttggtaaaa

SEQ ID NO: 125313 - DNA, 15 bp, Homo sapiens
aatttccttggtaaa

SEQ ID NO: 125314 - DNA, 15 bp, Homo sapiens
taatttccttggtaa

SEQ ID NO: 125315 - DNA, 15 bp, Homo sapiens
ataatttccttggta

SEQ ID NO: 125316 - DNA, 15 bp, Homo sapiens
cataatttccttggt

SEQ ID NO: 125317 - DNA, 15 bp, Homo sapiens
gcataatttccttgg

SEQ ID NO: 125318 - DNA, 15 bp, Homo sapiens
ggcataatttccttg

SEQ ID NO: 125319 - DNA, 15 bp, Homo sapiens
tggcataatttcctt

SEQ ID NO: 125320 - DNA, 15 bp, Homo sapiens
gtggcataatttcct

SEQ ID NO: 125321 - DNA, 15 bp, Homo sapiens
ggtggcataatttcc

SEQ ID NO: 125322 - DNA, 15 bp, Homo sapiens
tggtggcataatttc

SEQ ID NO: 125323 - DNA, 15 bp, Homo sapiens
ttggtggcataattt

SEQ ID NO: 125324 - DNA, 15 bp, Homo sapiens
tttggtggcataatt

SEQ ID NO: 125325 - DNA, 15 bp, Homo sapiens
atttggtggcataat

SEQ ID NO: 125326 - DNA, 15 bp, Homo sapiens
aatttggtggcataa

SEQ ID NO: 125327 - DNA, 15 bp, Homo sapiens
gaatttggtggcata

SEQ ID NO: 125328 - DNA, 15 bp, Homo sapiens
ggaatttggtggcat

SEQ ID NO: 125329 - DNA, 15 bp, Homo sapiens
gggaatttggtggca

SEQ ID NO: 125330 - DNA, 15 bp, Homo sapiens
agggaatttggtggc

SEQ ID NO: 125331 - DNA, 15 bp, Homo sapiens
aagggaatttggtgg

SEQ ID NO: 125332 - DNA, 15 bp, Homo sapiens
gaagggaatttggtg

SEQ ID NO: 125333 - DNA, 15 bp, Homo sapiens
ggaagggaatttggt

SEQ ID NO: 125334 - DNA, 15 bp, Homo sapiens
aggaagggaatttgg

SEQ ID NO: 125335 - DNA, 15 bp, Homo sapiens
aaggaagggaatttg

SEQ ID NO: 125336 - DNA, 15 bp, Homo sapiens
gaaggaagggaattt

SEQ ID NO: 125337 - DNA, 15 bp, Homo sapiens
ggaaggaagggaatt

SEQ ID NO: 125338 - DNA, 15 bp, Homo sapiens
tggaaggaagggaat

SEQ ID NO: 125339 - DNA, 15 bp, Homo sapiens
ttggaaggaagggaa

SEQ ID NO: 125340 - DNA, 15 bp, Homo sapiens
attggaaggaaggga

SEQ ID NO: 125341 - DNA, 15 bp, Homo sapiens
tattggaaggaaggg

SEQ ID NO: 125342 - DNA, 15 bp, Homo sapiens
ttattggaaggaagg

SEQ ID NO: 125343 - DNA, 15 bp, Homo sapiens
attattggaaggaag

SEQ ID NO: 125344 - DNA, 15 bp, Homo sapiens
aattattggaaggaa

SEQ ID NO: 125345 - DNA, 15 bp, Homo sapiens
gaattattggaagga

SEQ ID NO: 125346 - DNA, 15 bp, Homo sapiens
tgaattattggaagg

SEQ ID NO: 125347 - DNA, 15 bp, Homo sapiens
ttgaattattggaag

SEQ ID NO: 125348 - DNA, 15 bp, Homo sapiens
cttgaattattggaa

SEQ ID NO: 125349 - DNA, 15 bp, Homo sapiens
ccttgaattattgga

SEQ ID NO: 125350 - DNA, 15 bp, Homo sapiens
cccttgaattattgg

SEQ ID NO: 125351 - DNA, 15 bp, Homo sapiens
acccttgaattattg

SEQ ID NO: 125352 - DNA, 15 bp, Homo sapiens
aacccttgaattatt

SEQ ID NO: 125353 - DNA, 15 bp, Homo sapiens
caacccttgaattat

SEQ ID NO: 125354 - DNA, 15 bp, Homo sapiens
ccaacccttgaatta

SEQ ID NO: 125355 - DNA, 15 bp, Homo sapiens
tccaacccttgaatt

SEQ ID NO: 125356 - DNA, 15 bp, Homo sapiens
gtccaacccttgaat

SEQ ID NO: 125357 - DNA, 15 bp, Homo sapiens
ggtccaacccttgaa

SEQ ID NO: 125358 - DNA, 15 bp, Homo sapiens
aggtccaacccttga

SEQ ID NO: 125359 - DNA, 15 bp, Homo sapiens
taggtccaacccttg

SEQ ID NO: 125360 - DNA, 15 bp, Homo sapiens
ttaggtccaaccctt

SEQ ID NO: 125361 - DNA, 15 bp, Homo sapiens
attaggtccaaccct

SEQ ID NO: 125362 - DNA, 15 bp, Homo sapiens
cattaggtccaaccc

SEQ ID NO: 125363 - DNA, 15 bp, Homo sapiens
gcattaggtccaacc

SEQ ID NO: 125364 - DNA, 15 bp, Homo sapiens
ggcattaggtccaac

SEQ ID NO: 125365 - DNA, 15 bp, Homo sapiens
gggcattaggtccaa

SEQ ID NO: 125366 - DNA, 15 bp, Homo sapiens
ggggcattaggtcca

SEQ ID NO: 125367 - DNA, 15 bp, Homo sapiens
tggggcattaggtcc

SEQ ID NO: 125368 - DNA, 15 bp, Homo sapiens
ctggggcattaggtc

SEQ ID NO: 125369 - DNA, 15 bp, Homo sapiens
tctggggcattaggt

SEQ ID NO: 125370 - DNA, 15 bp, Homo sapiens
ttctggggcattagg

SEQ ID NO: 125371 - DNA, 15 bp, Homo sapiens
cttctggggcattag

SEQ ID NO: 125372 - DNA, 15 bp, Homo sapiens
tcttctggggcatta

SEQ ID NO: 125373 - DNA, 15 bp, Homo sapiens
ttcttctggggcatt

SEQ ID NO: 125374 - DNA, 15 bp, Homo sapiens
tttcttctggggcat

SEQ ID NO: 125375 - DNA, 15 bp, Homo sapiens
ttttcttctggggca

SEQ ID NO: 125376 - DNA, 15 bp, Homo sapiens
tttttcttctggggc

SEQ ID NO: 125377 - DNA, 15 bp, Homo sapiens
ttttttcttctgggg

SEQ ID NO: 125378 - DNA, 15 bp, Homo sapiens
tttttttcttctggg

SEQ ID NO: 125379 - DNA, 15 bp, Homo sapiens
ttttttttcttctgg

SEQ ID NO: 125380 - DNA, 15 bp, Homo sapiens
gttttttttcttctg

SEQ ID NO: 125381 - DNA, 15 bp, Homo sapiens
tgttttttttcttct

SEQ ID NO: 125382 - DNA, 15 bp, Homo sapiens
atgttttttttcttc

SEQ ID NO: 125383 - DNA, 15 bp, Homo sapiens
aatgttttttttctt

SEQ ID NO: 125384 - DNA, 15 bp, Homo sapiens
aaatgttttttttct

SEQ ID NO: 125385 - DNA, 15 bp, Homo sapiens
taaatgttttttttc

SEQ ID NO: 125386 - DNA, 15 bp, Homo sapiens
ctaaatgtttttttt

SEQ ID NO: 125387 - DNA, 15 bp, Homo sapiens
tctaaatgttttttt

SEQ ID NO: 125388 - DNA, 15 bp, Homo sapiens
atctaaatgtttttt

SEQ ID NO: 125389 - DNA, 15 bp, Homo sapiens
tatctaaatgttttt

SEQ ID NO: 125390 - DNA, 15 bp, Homo sapiens
atatctaaatgtttt

SEQ ID NO: 125391 - DNA, 15 bp, Homo sapiens
tatatctaaatgttt

SEQ ID NO: 125392 - DNA, 15 bp, Homo sapiens
ttatatctaaatgtt

SEQ ID NO: 125393 - DNA, 15 bp, Homo sapiens
tttatatctaaatgt

SEQ ID NO: 125394 - DNA, 15 bp, Homo sapiens
ctttatatctaaatg

SEQ ID NO: 125395 - DNA, 15 bp, Homo sapiens
cctttatatctaaat

SEQ ID NO: 125396 - DNA, 15 bp, Homo sapiens
tcctttatatctaaa

SEQ ID NO: 125397 - DNA, 15 bp, Homo sapiens
ttcctttatatctaa

SEQ ID NO: 125398 - DNA, 15 bp, Homo sapiens
tttcctttatatcta

SEQ ID NO: 125399 - DNA, 15 bp, Homo sapiens
ttttcctttatatct

SEQ ID NO: 125400 - DNA, 15 bp, Homo sapiens
gttttcctttatatc

SEQ ID NO: 125401 - DNA, 15 bp, Homo sapiens
tgttttcctttatat

SEQ ID NO: 125402 - DNA, 15 bp, Homo sapiens
ctgttttcctttata

SEQ ID NO: 125403 - DNA, 15 bp, Homo sapiens
gctgttttcctttat

SEQ ID NO: 125404 - DNA, 15 bp, Homo sapiens
tgctgttttccttta

SEQ ID NO: 125405 - DNA, 15 bp, Homo sapiens
gtgctgttttccttt

SEQ ID NO: 125406 - DNA, 15 bp, Homo sapiens
ggtgctgttttcctt

SEQ ID NO: 125407 - DNA, 15 bp, Homo sapiens
gggtgctgttttcct

SEQ ID NO: 125408 - DNA, 15 bp, Homo sapiens
tgggtgctgttttcc

SEQ ID NO: 125409 - DNA, 15 bp, Homo sapiens
atgggtgctgttttc

SEQ ID NO: 125410 - DNA, 15 bp, Homo sapiens
aatgggtgctgtttt

SEQ ID NO: 125411 - DNA, 15 bp, Homo sapiens
aaatgggtgctgttt

SEQ ID NO: 125412 - DNA, 15 bp, Homo sapiens
aaaatgggtgctgtt

SEQ ID NO: 125413 - DNA, 15 bp, Homo sapiens
aaaaatgggtgctgt

SEQ ID NO: 125414 - DNA, 15 bp, Homo sapiens
gaaaaatgggtgctg

SEQ ID NO: 125415 - DNA, 15 bp, Homo sapiens
agaaaaatgggtgct

SEQ ID NO: 125416 - DNA, 15 bp, Homo sapiens
gagaaaaatgggtgc

SEQ ID NO: 125417 - DNA, 15 bp, Homo sapiens
tgagaaaaatgggtg

SEQ ID NO: 125418 - DNA, 15 bp, Homo sapiens
ttgagaaaaatgggt

SEQ ID NO: 125419 - DNA, 15 bp, Homo sapiens
gttgagaaaaatggg

SEQ ID NO: 125420 - DNA, 15 bp, Homo sapiens
ggttgagaaaaatgg

SEQ ID NO: 125421 - DNA, 15 bp, Homo sapiens
aggttgagaaaaatg

SEQ ID NO: 125422 - DNA, 15 bp, Homo sapiens
taggttgagaaaaat

SEQ ID NO: 125423 - DNA, 15 bp, Homo sapiens
ttaggttgagaaaaa

SEQ ID NO: 125424 - DNA, 15 bp, Homo sapiens
gttaggttgagaaaa

SEQ ID NO: 125425 - DNA, 15 bp, Homo sapiens
tgttaggttgagaaa

SEQ ID NO: 125426 - DNA, 15 bp, Homo sapiens
ctgttaggttgagaa

SEQ ID NO: 125427 - DNA, 15 bp, Homo sapiens
actgttaggttgaga

SEQ ID NO: 125428 - DNA, 15 bp, Homo sapiens
tactgttaggttgag

SEQ ID NO: 125429 - DNA, 15 bp, Homo sapiens
gtactgttaggttga

SEQ ID NO: 125430 - DNA, 15 bp, Homo sapiens
tgtactgttaggttg

SEQ ID NO: 125431 - DNA, 15 bp, Homo sapiens
ttgtactgttaggtt

SEQ ID NO: 125432 - DNA, 15 bp, Homo sapiens
tttgtactgttaggt

SEQ ID NO: 125433 - DNA, 15 bp, Homo sapiens
ttttgtactgttagg

SEQ ID NO: 125434 - DNA, 15 bp, Homo sapiens
cttttgtactgttag

SEQ ID NO: 125435 - DNA, 15 bp, Homo sapiens
acttttgtactgtta

SEQ ID NO: 125436 - DNA, 15 bp, Homo sapiens
gacttttgtactgtt

SEQ ID NO: 125437 - DNA, 15 bp, Homo sapiens
ggacttttgtactgt

SEQ ID NO: 125438 - DNA, 15 bp, Homo sapiens
tggacttttgtactg

SEQ ID NO: 125439 - DNA, 15 bp, Homo sapiens
ctggacttttgtact

SEQ ID NO: 125440 - DNA, 15 bp, Homo sapiens
tctggacttttgtac

SEQ ID NO: 125441 - DNA, 15 bp, Homo sapiens
ctctggacttttgta

SEQ ID NO: 125442 - DNA, 15 bp, Homo sapiens
cctctggacttttgt

SEQ ID NO: 125443 - DNA, 15 bp, Homo sapiens
ccctctggacttttg

SEQ ID NO: 125444 - DNA, 15 bp, Homo sapiens
accctctggactttt

SEQ ID NO: 125445 - DNA, 15 bp, Homo sapiens
taccctctggacttt

SEQ ID NO: 125446 - DNA, 15 bp, Homo sapiens
ttaccctctggactt

SEQ ID NO: 125447 - DNA, 15 bp, Homo sapiens
cttaccctctggact

SEQ ID NO: 125448 - DNA, 15 bp, Homo sapiens
tcttaccctctggac

SEQ ID NO: 125449 - DNA, 15 bp, Homo sapiens
ttcttaccctctgga

SEQ ID NO: 125450 - DNA, 15 bp, Homo sapiens
attcttaccctctgg

SEQ ID NO: 125451 - DNA, 15 bp, Homo sapiens
aattcttaccctctg

SEQ ID NO: 125452 - DNA, 15 bp, Homo sapiens
taattcttaccctct

SEQ ID NO: 125453 - DNA, 15 bp, Homo sapiens
gtaattcttaccctc

SEQ ID NO: 125454 - DNA, 15 bp, Homo sapiens
agtaattcttaccct

SEQ ID NO: 125455 - DNA, 15 bp, Homo sapiens
aagtaattcttaccc

SEQ ID NO: 125456 - DNA, 15 bp, Homo sapiens
caagtaattcttacc

SEQ ID NO: 125457 - DNA, 15 bp, Homo sapiens
acaagtaattcttac

SEQ ID NO: 125458 - DNA, 15 bp, Homo sapiens
gacaagtaattctta

SEQ ID NO: 125459 - DNA, 15 bp, Homo sapiens
tgacaagtaattctt

SEQ ID NO: 125460 - DNA, 15 bp, Homo sapiens
gtgacaagtaattct

SEQ ID NO: 125461 - DNA, 15 bp, Homo sapiens
agtgacaagtaattc

SEQ ID NO: 125462 - DNA, 15 bp, Homo sapiens
aagtgacaagtaatt

SEQ ID NO: 125463 - DNA, 15 bp, Homo sapiens
aaagtgacaagtaat

SEQ ID NO: 125464 - DNA, 15 bp, Homo sapiens
caaagtgacaagtaa

SEQ ID NO: 125465 - DNA, 15 bp, Homo sapiens
tcaaagtgacaagta

SEQ ID NO: 125466 - DNA, 15 bp, Homo sapiens
ttcaaagtgacaagt

SEQ ID NO: 125467 - DNA, 15 bp, Homo sapiens
attcaaagtgacaag

SEQ ID NO: 125468 - DNA, 15 bp, Homo sapiens
aattcaaagtgacaa

SEQ ID NO: 125469 - DNA, 15 bp, Homo sapiens
taattcaaagtgaca

SEQ ID NO: 125470 - DNA, 15 bp, Homo sapiens
gtaattcaaagtgac

SEQ ID NO: 125471 - DNA, 15 bp, Homo sapiens
tgtaattcaaagtga

SEQ ID NO: 125472 - DNA, 15 bp, Homo sapiens
ttgtaattcaaagtg

SEQ ID NO: 125473 - DNA, 15 bp, Homo sapiens
attgtaattcaaagt

SEQ ID NO: 125474 - DNA, 15 bp, Homo sapiens
tattgtaattcaaag

SEQ ID NO: 125475 - DNA, 15 bp, Homo sapiens
gtattgtaattcaaa

SEQ ID NO: 125476 - DNA, 15 bp, Homo sapiens
tgtattgtaattcaa

SEQ ID NO: 125477 - DNA, 15 bp, Homo sapiens
ttgtattgtaattca

SEQ ID NO: 125478 - DNA, 15 bp, Homo sapiens
cttgtattgtaattc

SEQ ID NO: 125479 - DNA, 15 bp, Homo sapiens
acttgtattgtaatt

SEQ ID NO: 125480 - DNA, 15 bp, Homo sapiens
tacttgtattgtaat

SEQ ID NO: 125481 - DNA, 15 bp, Homo sapiens
ttacttgtattgtaa

SEQ ID NO: 125482 - DNA, 15 bp, Homo sapiens
attacttgtattgta

SEQ ID NO: 125483 - DNA, 15 bp, Homo sapiens
aattacttgtattgt

SEQ ID NO: 125484 - DNA, 15 bp, Homo sapiens
aaattacttgtattg

SEQ ID NO: 125485 - DNA, 15 bp, Homo sapiens
caaattacttgtatt

SEQ ID NO: 125486 - DNA, 15 bp, Homo sapiens
acaaattacttgtat

SEQ ID NO: 125487 - DNA, 15 bp, Homo sapiens
gacaaattacttgta

SEQ ID NO: 125488 - DNA, 15 bp, Homo sapiens
agacaaattacttgt

SEQ ID NO: 125489 - DNA, 15 bp, Homo sapiens
gagacaaattacttg

SEQ ID NO: 125490 - DNA, 15 bp, Homo sapiens
tgagacaaattactt

SEQ ID NO: 125491 - DNA, 15 bp, Homo sapiens
ctgagacaaattact

SEQ ID NO: 125492 - DNA, 15 bp, Homo sapiens
tctgagacaaattac

SEQ ID NO: 125493 - DNA, 15 bp, Homo sapiens
atctgagacaaatta

SEQ ID NO: 125494 - DNA, 15 bp, Homo sapiens
catctgagacaaatt

SEQ ID NO: 125495 - DNA, 15 bp, Homo sapiens
acatctgagacaaat

SEQ ID NO: 125496 - DNA, 15 bp, Homo sapiens
gacatctgagacaaa

SEQ ID NO: 125497 - DNA, 15 bp, Homo sapiens
tgacatctgagacaa

SEQ ID NO: 125498 - DNA, 15 bp, Homo sapiens
gtgacatctgagaca

SEQ ID NO: 125499 - DNA, 15 bp, Homo sapiens
tgtgacatctgagac

SEQ ID NO: 125500 - DNA, 15 bp, Homo sapiens
ttgtgacatctgaga

SEQ ID NO: 125501 - DNA, 15 bp, Homo sapiens
attgtgacatctgag

SEQ ID NO: 125502 - DNA, 15 bp, Homo sapiens
aattgtgacatctga

SEQ ID NO: 125503 - DNA, 15 bp, Homo sapiens
caattgtgacatctg

SEQ ID NO: 125504 - DNA, 15 bp, Homo sapiens
ccaattgtgacatct

SEQ ID NO: 125505 - DNA, 15 bp, Homo sapiens
accaattgtgacatc

SEQ ID NO: 125506 - DNA, 15 bp, Homo sapiens
taccaattgtgacat

SEQ ID NO: 125507 - DNA, 15 bp, Homo sapiens
ataccaattgtgaca

SEQ ID NO: 125508 - DNA, 15 bp, Homo sapiens
aataccaattgtgac

SEQ ID NO: 125509 - DNA, 15 bp, Homo sapiens
aaataccaattgtga

SEQ ID NO: 125510 - DNA, 15 bp, Homo sapiens
aaaataccaattgtg

SEQ ID NO: 125511 - DNA, 15 bp, Homo sapiens
caaaataccaattgt

SEQ ID NO: 125512 - DNA, 15 bp, Homo sapiens
ccaaaataccaattg

SEQ ID NO: 125513 - DNA, 15 bp, Homo sapiens
tccaaaataccaatt

SEQ ID NO: 125514 - DNA, 15 bp, Homo sapiens
atccaaaataccaat

SEQ ID NO: 125515 - DNA, 15 bp, Homo sapiens
catccaaaataccaa

SEQ ID NO: 125516 - DNA, 15 bp, Homo sapiens
acatccaaaatacca

SEQ ID NO: 125517 - DNA, 15 bp, Homo sapiens
aacatccaaaatacc

SEQ ID NO: 125518 - DNA, 15 bp, Homo sapiens
aaacatccaaaatac

SEQ ID NO: 125519 - DNA, 15 bp, Homo sapiens
aaaacatccaaaata

SEQ ID NO: 125520 - DNA, 15 bp, Homo sapiens
gaaaacatccaaaat

SEQ ID NO: 125521 - DNA, 15 bp, Homo sapiens
agaaaacatccaaaa

SEQ ID NO: 125522 - DNA, 15 bp, Homo sapiens
gagaaaacatccaaa

SEQ ID NO: 125523 - DNA, 15 bp, Homo sapiens
agagaaaacatccaa

SEQ ID NO: 125524 - DNA, 15 bp, Homo sapiens
cagagaaaacatcca

SEQ ID NO: 125525 - DNA, 15 bp, Homo sapiens
ccagagaaaacatcc

SEQ ID NO: 125526 - DNA, 15 bp, Homo sapiens
accagagaaaacatc

SEQ ID NO: 125527 - DNA, 15 bp, Homo sapiens
aaccagagaaaacat

SEQ ID NO: 125528 - DNA, 15 bp, Homo sapiens
taaccagagaaaaca

SEQ ID NO: 125529 - DNA, 15 bp, Homo sapiens
ctaaccagagaaaac

SEQ ID NO: 125530 - DNA, 15 bp, Homo sapiens
tctaaccagagaaaa

SEQ ID NO: 125531 - DNA, 15 bp, Homo sapiens
gtctaaccagagaaa

SEQ ID NO: 125532 - DNA, 15 bp, Homo sapiens
agtctaaccagagaa

SEQ ID NO: 125533 - DNA, 15 bp, Homo sapiens
aagtctaaccagaga

SEQ ID NO: 125534 - DNA, 15 bp, Homo sapiens
caagtctaaccagag

SEQ ID NO: 125535 - DNA, 15 bp, Homo sapiens
acaagtctaaccaga

SEQ ID NO: 125536 - DNA, 15 bp, Homo sapiens
tacaagtctaaccag

SEQ ID NO: 125537 - DNA, 15 bp, Homo sapiens
ctacaagtctaacca

SEQ ID NO: 125538 - DNA, 15 bp, Homo sapiens
cctacaagtctaacc

SEQ ID NO: 125539 - DNA, 15 bp, Homo sapiens
gcctacaagtctaac

SEQ ID NO: 125540 - DNA, 15 bp, Homo sapiens
agcctacaagtctaa

SEQ ID NO: 125541 - DNA, 15 bp, Homo sapiens
tagcctacaagtcta

SEQ ID NO: 125542 - DNA, 15 bp, Homo sapiens
gtagcctacaagtct

SEQ ID NO: 125543 - DNA, 15 bp, Homo sapiens
agtagcctacaagtc

SEQ ID NO: 125544 - DNA, 15 bp, Homo sapiens
aagtagcctacaagt

SEQ ID NO: 125545 - DNA, 15 bp, Homo sapiens
taagtagcctacaag

SEQ ID NO: 125546 - DNA, 15 bp, Homo sapiens
ataagtagcctacaa

SEQ ID NO: 125547 - DNA, 15 bp, Homo sapiens
cataagtagcctaca

SEQ ID NO: 125548 - DNA, 15 bp, Homo sapiens
acataagtagcctac

SEQ ID NO: 125549 - DNA, 15 bp, Homo sapiens
aacataagtagccta

SEQ ID NO: 125550 - DNA, 15 bp, Homo sapiens
gaacataagtagcct

SEQ ID NO: 125551 - DNA, 15 bp, Homo sapiens
agaacataagtagcc

SEQ ID NO: 125552 - DNA, 15 bp, Homo sapiens
tagaacataagtagc

SEQ ID NO: 125553 - DNA, 15 bp, Homo sapiens
atagaacataagtag

SEQ ID NO: 125554 - DNA, 15 bp, Homo sapiens
aatagaacataagta

SEQ ID NO: 125555 - DNA, 15 bp, Homo sapiens
aaatagaacataagt

SEQ ID NO: 125556 - DNA, 15 bp, Homo sapiens
aaaatagaacataag

SEQ ID NO: 125557 - DNA, 15 bp, Homo sapiens
aaaaatagaacataa

SEQ ID NO: 125558 - DNA, 15 bp, Homo sapiens
aaaaaatagaacata

SEQ ID NO: 125559 - DNA, 15 bp, Homo sapiens
aaaaaaatagaacat

SEQ ID NO: 125560 - DNA, 15 bp, Homo sapiens
aaaaaaaatagaaca

SEQ ID NO: 125561 - DNA, 15 bp, Homo sapiens
gaaaaaaaatagaac

SEQ ID NO: 125562 - DNA, 15 bp, Homo sapiens
ggaaaaaaaatagaa

SEQ ID NO: 125563 - DNA, 15 bp, Homo sapiens
tggaaaaaaaataga

SEQ ID NO: 125564 - DNA, 15 bp, Homo sapiens
ttggaaaaaaaatag

SEQ ID NO: 125565 - DNA, 15 bp, Homo sapiens
tttggaaaaaaaata

SEQ ID NO: 125566 - DNA, 15 bp, Homo sapiens
atttggaaaaaaaat

SEQ ID NO: 125567 - DNA, 15 bp, Homo sapiens
catttggaaaaaaaa

SEQ ID NO: 125568 - DNA, 15 bp, Homo sapiens
acatttggaaaaaaa

SEQ ID NO: 125569 - DNA, 15 bp, Homo sapiens
tacatttggaaaaaa

SEQ ID NO: 125570 - DNA, 15 bp, Homo sapiens
ttacatttggaaaaa

SEQ ID NO: 125571 - DNA, 15 bp, Homo sapiens
attacatttggaaaa

SEQ ID NO: 125572 - DNA, 15 bp, Homo sapiens
aattacatttggaaa

SEQ ID NO: 125573 - DNA, 15 bp, Homo sapiens
caattacatttggaa

SEQ ID NO: 125574 - DNA, 15 bp, Homo sapiens
gcaattacatttgga

SEQ ID NO: 125575 - DNA, 15 bp, Homo sapiens
ggcaattacatttgg

SEQ ID NO: 125576 - DNA, 15 bp, Homo sapiens
tggcaattacatttg

SEQ ID NO: 125577 - DNA, 15 bp, Homo sapiens
ctggcaattacattt

SEQ ID NO: 125578 - DNA, 15 bp, Homo sapiens
gctggcaattacatt

SEQ ID NO: 125579 - DNA, 15 bp, Homo sapiens
agctggcaattacat

SEQ ID NO: 125580 - DNA, 15 bp, Homo sapiens
aagctggcaattaca

SEQ ID NO: 125581 - DNA, 15 bp, Homo sapiens
taagctggcaattac

SEQ ID NO: 125582 - DNA, 15 bp, Homo sapiens
ataagctggcaatta

SEQ ID NO: 125583 - DNA, 15 bp, Homo sapiens
cataagctggcaatt

SEQ ID NO: 125584 - DNA, 15 bp, Homo sapiens
tcataagctggcaat

SEQ ID NO: 125585 - DNA, 15 bp, Homo sapiens
ctcataagctggcaa

SEQ ID NO: 125586 - DNA, 15 bp, Homo sapiens
tctcataagctggca

SEQ ID NO: 125587 - DNA, 15 bp, Homo sapiens
atctcataagctggc

SEQ ID NO: 125588 - DNA, 15 bp, Homo sapiens
tatctcataagctgg

SEQ ID NO: 125589 - DNA, 15 bp, Homo sapiens
gtatctcataagctg

SEQ ID NO: 125590 - DNA, 15 bp, Homo sapiens
agtatctcataagct

SEQ ID NO: 125591 - DNA, 15 bp, Homo sapiens
tagtatctcataagc

SEQ ID NO: 125592 - DNA, 15 bp, Homo sapiens
gtagtatctcataag

SEQ ID NO: 125593 - DNA, 15 bp, Homo sapiens
tgtagtatctcataa

SEQ ID NO: 125594 - DNA, 15 bp, Homo sapiens
ttgtagtatctcata

SEQ ID NO: 125595 - DNA, 15 bp, Homo sapiens
tttgtagtatctcat

SEQ ID NO: 125596 - DNA, 15 bp, Homo sapiens
atttgtagtatctca

SEQ ID NO: 125597 - DNA, 15 bp, Homo sapiens
aatttgtagtatctc

SEQ ID NO: 125598 - DNA, 15 bp, Homo sapiens
taatttgtagtatct

SEQ ID NO: 125599 - DNA, 15 bp, Homo sapiens
ctaatttgtagtatc

SEQ ID NO: 125600 - DNA, 15 bp, Homo sapiens
actaatttgtagtat

SEQ ID NO: 125601 - DNA, 15 bp, Homo sapiens
cactaatttgtagta

SEQ ID NO: 125602 - DNA, 15 bp, Homo sapiens
acactaatttgtagt

SEQ ID NO: 125603 - DNA, 15 bp, Homo sapiens
cacactaatttgtag

SEQ ID NO: 125604 - DNA, 15 bp, Homo sapiens
tcacactaatttgta

SEQ ID NO: 125605 - DNA, 15 bp, Homo sapiens
atcacactaatttgt

SEQ ID NO: 125606 - DNA, 15 bp, Homo sapiens
tatcacactaatttg

SEQ ID NO: 125607 - DNA, 15 bp, Homo sapiens
gtatcacactaattt

SEQ ID NO: 125608 - DNA, 15 bp, Homo sapiens
tgtatcacactaatt

SEQ ID NO: 125609 - DNA, 15 bp, Homo sapiens
atgtatcacactaat

SEQ ID NO: 125610 - DNA, 15 bp, Homo sapiens
tatgtatcacactaa

SEQ ID NO: 125611 - DNA, 15 bp, Homo sapiens
gtatgtatcacacta

SEQ ID NO: 125612 - DNA, 15 bp, Homo sapiens
agtatgtatcacact

SEQ ID NO: 125613 - DNA, 15 bp, Homo sapiens
aagtatgtatcacac

SEQ ID NO: 125614 - DNA, 15 bp, Homo sapiens
aaagtatgtatcaca

SEQ ID NO: 125615 - DNA, 15 bp, Homo sapiens
aaaagtatgtatcac

SEQ ID NO: 125616 - DNA, 15 bp, Homo sapiens
gaaaagtatgtatca

SEQ ID NO: 125617 - DNA, 15 bp, Homo sapiens
tgaaaagtatgtatc

SEQ ID NO: 125618 - DNA, 15 bp, Homo sapiens
ttgaaaagtatgtat

SEQ ID NO: 125619 - DNA, 15 bp, Homo sapiens
attgaaaagtatgta

SEQ ID NO: 125620 - DNA, 15 bp, Homo sapiens
aattgaaaagtatgt

SEQ ID NO: 125621 - DNA, 15 bp, Homo sapiens
aaattgaaaagtatg

SEQ ID NO: 125622 - DNA, 15 bp, Homo sapiens
taaattgaaaagtat

SEQ ID NO: 125623 - DNA, 15 bp, Homo sapiens
ataaattgaaaagta

SEQ ID NO: 125624 - DNA, 15 bp, Homo sapiens
aataaattgaaaagt

SEQ ID NO: 125625 - DNA, 15 bp, Homo sapiens
gaataaattgaaaag

SEQ ID NO: 125626 - DNA, 15 bp, Homo sapiens
tgaataaattgaaaa

SEQ ID NO: 125627 - DNA, 15 bp, Homo sapiens
gtgaataaattgaaa

SEQ ID NO: 125628 - DNA, 15 bp, Homo sapiens
tgtgaataaattgaa

SEQ ID NO: 125629 - DNA, 15 bp, Homo sapiens
ctgtgaataaattga

SEQ ID NO: 125630 - DNA, 15 bp, Homo sapiens
actgtgaataaattg

SEQ ID NO: 125631 - DNA, 15 bp, Homo sapiens
tactgtgaataaatt

SEQ ID NO: 125632 - DNA, 15 bp, Homo sapiens
ttactgtgaataaat

SEQ ID NO: 125633 - DNA, 15 bp, Homo sapiens
gttactgtgaataaa

SEQ ID NO: 125634 - DNA, 15 bp, Homo sapiens
tgttactgtgaataa

SEQ ID NO: 125635 - DNA, 15 bp, Homo sapiens
ttgttactgtgaata

SEQ ID NO: 125636 - DNA, 15 bp, Homo sapiens
gttgttactgtgaat

SEQ ID NO: 125637 - DNA, 15 bp, Homo sapiens
agttgttactgtgaa

SEQ ID NO: 125638 - DNA, 15 bp, Homo sapiens
gagttgttactgtga

SEQ ID NO: 125639 - DNA, 15 bp, Homo sapiens
agagttgttactgtg

SEQ ID NO: 125640 - DNA, 15 bp, Homo sapiens
aagagttgttactgt

SEQ ID NO: 125641 - DNA, 15 bp, Homo sapiens
taagagttgttactg

SEQ ID NO: 125642 - DNA, 15 bp, Homo sapiens
ataagagttgttact

SEQ ID NO: 125643 - DNA, 15 bp, Homo sapiens
cataagagttgttac

SEQ ID NO: 125644 - DNA, 15 bp, Homo sapiens
gcataagagttgtta

SEQ ID NO: 125645 - DNA, 15 bp, Homo sapiens
ggcataagagttgtt

SEQ ID NO: 125646 - DNA, 15 bp, Homo sapiens
tggcataagagttgt

SEQ ID NO: 125647 - DNA, 15 bp, Homo sapiens
atggcataagagttg

SEQ ID NO: 125648 - DNA, 15 bp, Homo sapiens
tatggcataagagtt

SEQ ID NO: 125649 - DNA, 15 bp, Homo sapiens
ttatggcataagagt

SEQ ID NO: 125650 - DNA, 15 bp, Homo sapiens
tttatggcataagag

SEQ ID NO: 125651 - DNA, 15 bp, Homo sapiens
gtttatggcataaga

SEQ ID NO: 125652 - DNA, 15 bp, Homo sapiens
tgtttatggcataag

SEQ ID NO: 125653 - DNA, 15 bp, Homo sapiens
gtgtttatggcataa

SEQ ID NO: 125654 - DNA, 15 bp, Homo sapiens
tgtgtttatggcata

SEQ ID NO: 125655 - DNA, 15 bp, Homo sapiens
ttgtgtttatggcat

SEQ ID NO: 125656 - DNA, 15 bp, Homo sapiens
tttgtgtttatggca

SEQ ID NO: 125657 - DNA, 15 bp, Homo sapiens
ttttgtgtttatggc

SEQ ID NO: 125658 - DNA, 15 bp, Homo sapiens
attttgtgtttatgg

SEQ ID NO: 125659 - DNA, 15 bp, Homo sapiens
tattttgtgtttatg

SEQ ID NO: 125660 - DNA, 15 bp, Homo sapiens
ttattttgtgtttat

SEQ ID NO: 125661 - DNA, 15 bp, Homo sapiens
attattttgtgttta

SEQ ID NO: 125662 - DNA, 15 bp, Homo sapiens
cattattttgtgttt

SEQ ID NO: 125663 - DNA, 15 bp, Homo sapiens
ccattattttgtgtt

SEQ ID NO: 125664 - DNA, 15 bp, Homo sapiens
cccattattttgtgt

SEQ ID NO: 125665 - DNA, 15 bp, Homo sapiens
ccccattattttgtg

SEQ ID NO: 125666 - DNA, 15 bp, Homo sapiens
accccattattttgt

SEQ ID NO: 125667 - DNA, 15 bp, Homo sapiens
aaccccattattttg

SEQ ID NO: 125668 - DNA, 15 bp, Homo sapiens
caaccccattatttt

SEQ ID NO: 125669 - DNA, 15 bp, Homo sapiens
gcaaccccattattt

SEQ ID NO: 125670 - DNA, 15 bp, Homo sapiens
tgcaaccccattatt

SEQ ID NO: 125671 - DNA, 15 bp, Homo sapiens
atgcaaccccattat

SEQ ID NO: 125672 - DNA, 15 bp, Homo sapiens
aatgcaaccccatta

SEQ ID NO: 125673 - DNA, 15 bp, Homo sapiens
aaatgcaaccccatt

SEQ ID NO: 125674 - DNA, 15 bp, Homo sapiens
taaatgcaaccccat

SEQ ID NO: 125675 - DNA, 15 bp, Homo sapiens
ctaaatgcaacccca

SEQ ID NO: 125676 - DNA, 15 bp, Homo sapiens
actaaatgcaacccc

SEQ ID NO: 125677 - DNA, 15 bp, Homo sapiens
cactaaatgcaaccc

SEQ ID NO: 125678 - DNA, 15 bp, Homo sapiens
ccactaaatgcaacc

SEQ ID NO: 125679 - DNA, 15 bp, Homo sapiens
accactaaatgcaac

SEQ ID NO: 125680 - DNA, 15 bp, Homo sapiens
gaccactaaatgcaa

SEQ ID NO: 125681 - DNA, 15 bp, Homo sapiens
tgaccactaaatgca

SEQ ID NO: 125682 - DNA, 15 bp, Homo sapiens
gtgaccactaaatgc

SEQ ID NO: 125683 - DNA, 15 bp, Homo sapiens
tgtgaccactaaatg

SEQ ID NO: 125684 - DNA, 15 bp, Homo sapiens
atgtgaccactaaat

SEQ ID NO: 125685 - DNA, 15 bp, Homo sapiens
aatgtgaccactaaa

SEQ ID NO: 125686 - DNA, 15 bp, Homo sapiens
aaatgtgaccactaa

SEQ ID NO: 125687 - DNA, 15 bp, Homo sapiens
aaaatgtgaccacta

SEQ ID NO: 125688 - DNA, 15 bp, Homo sapiens
aaaaatgtgaccact

SEQ ID NO: 125689 - DNA, 15 bp, Homo sapiens
gaaaaatgtgaccac

SEQ ID NO: 125690 - DNA, 15 bp, Homo sapiens
agaaaaatgtgacca

SEQ ID NO: 125691 - DNA, 15 bp, Homo sapiens
aagaaaaatgtgacc

SEQ ID NO: 125692 - DNA, 15 bp, Homo sapiens
aaagaaaaatgtgac

SEQ ID NO: 125693 - DNA, 15 bp, Homo sapiens
aaaagaaaaatgtga

SEQ ID NO: 125694 - DNA, 15 bp, Homo sapiens
caaaagaaaaatgtg

SEQ ID NO: 125695 - DNA, 15 bp, Homo sapiens
tcaaaagaaaaatgt

SEQ ID NO: 125696 - DNA, 15 bp, Homo sapiens
gtcaaaagaaaaatg

SEQ ID NO: 125697 - DNA, 15 bp, Homo sapiens
tgtcaaaagaaaaat

SEQ ID NO: 125698 - DNA, 15 bp, Homo sapiens
ctgtcaaaagaaaaa

SEQ ID NO: 125699 - DNA, 15 bp, Homo sapiens
actgtcaaaagaaaa

SEQ ID NO: 125700 - DNA, 15 bp, Homo sapiens
cactgtcaaaagaaa

SEQ ID NO: 125701 - DNA, 15 bp, Homo sapiens
ccactgtcaaaagaa

SEQ ID NO: 125702 - DNA, 15 bp, Homo sapiens
tccactgtcaaaaga

SEQ ID NO: 125703 - DNA, 15 bp, Homo sapiens
gtccactgtcaaaag

SEQ ID NO: 125704 - DNA, 15 bp, Homo sapiens
agtccactgtcaaaa

SEQ ID NO: 125705 - DNA, 15 bp, Homo sapiens
gagtccactgtcaaa

SEQ ID NO: 125706 - DNA, 15 bp, Homo sapiens
agagtccactgtcaa

SEQ ID NO: 125707 - DNA, 15 bp, Homo sapiens
gagagtccactgtca

SEQ ID NO: 125708 - DNA, 15 bp, Homo sapiens
agagagtccactgtc

SEQ ID NO: 125709 - DNA, 15 bp, Homo sapiens
aagagagtccactgt

SEQ ID NO: 125710 - DNA, 15 bp, Homo sapiens
aaagagagtccactg

SEQ ID NO: 125711 - DNA, 15 bp, Homo sapiens
aaaagagagtccact

SEQ ID NO: 125712 - DNA, 15 bp, Homo sapiens
aaaaagagagtccac

SEQ ID NO: 125713 - DNA, 15 bp, Homo sapiens
aaaaaagagagtcca

SEQ ID NO: 125714 - DNA, 15 bp, Homo sapiens
gaaaaaagagagtcc

SEQ ID NO: 125715 - DNA, 15 bp, Homo sapiens
ggaaaaaagagagtc

SEQ ID NO: 125716 - DNA, 15 bp, Homo sapiens
tggaaaaaagagagt

SEQ ID NO: 125717 - DNA, 15 bp, Homo sapiens
atggaaaaaagagag

SEQ ID NO: 125718 - DNA, 15 bp, Homo sapiens
catggaaaaaagaga

SEQ ID NO: 125719 - DNA, 15 bp, Homo sapiens
gcatggaaaaaagag

SEQ ID NO: 125720 - DNA, 15 bp, Homo sapiens
ggcatggaaaaaaga

SEQ ID NO: 125721 - DNA, 15 bp, Homo sapiens
aggcatggaaaaaag

SEQ ID NO: 125722 - DNA, 15 bp, Homo sapiens
aaggcatggaaaaaa

SEQ ID NO: 125723 - DNA, 15 bp, Homo sapiens
gaaggcatggaaaaa

SEQ ID NO: 125724 - DNA, 15 bp, Homo sapiens
agaaggcatggaaaa

SEQ ID NO: 125725 - DNA, 15 bp, Homo sapiens
gagaaggcatggaaa

SEQ ID NO: 125726 - DNA, 15 bp, Homo sapiens
agagaaggcatggaa

SEQ ID NO: 125727 - DNA, 15 bp, Homo sapiens
gagagaaggcatgga

SEQ ID NO: 125728 - DNA, 15 bp, Homo sapiens
agagagaaggcatgg

SEQ ID NO: 125729 - DNA, 15 bp, Homo sapiens
aagagagaaggcatg

SEQ ID NO: 125730 - DNA, 15 bp, Homo sapiens
aaagagagaaggcat

SEQ ID NO: 125731 - DNA, 15 bp, Homo sapiens
taaagagagaaggca

SEQ ID NO: 125732 - DNA, 15 bp, Homo sapiens
ttaaagagagaaggc

SEQ ID NO: 125733 - DNA, 15 bp, Homo sapiens
tttaaagagagaagg

SEQ ID NO: 125734 - DNA, 15 bp, Homo sapiens
atttaaagagagaag

SEQ ID NO: 125735 - DNA, 15 bp, Homo sapiens
aatttaaagagagaa

SEQ ID NO: 125736 - DNA, 15 bp, Homo sapiens
aaatttaaagagaga

SEQ ID NO: 125737 - DNA, 15 bp, Homo sapiens
aaaatttaaagagag

SEQ ID NO: 125738 - DNA, 15 bp, Homo sapiens
caaaatttaaagaga

SEQ ID NO: 125739 - DNA, 15 bp, Homo sapiens
gcaaaatttaaagag

SEQ ID NO: 125740 - DNA, 15 bp, Homo sapiens
tgcaaaatttaaaga

SEQ ID NO: 125741 - DNA, 15 bp, Homo sapiens
ctgcaaaatttaaag

SEQ ID NO: 125742 - DNA, 15 bp, Homo sapiens
cctgcaaaatttaaa

SEQ ID NO: 125743 - DNA, 15 bp, Homo sapiens
acctgcaaaatttaa

SEQ ID NO: 125744 - DNA, 15 bp, Homo sapiens
tacctgcaaaattta

SEQ ID NO: 125745 - DNA, 15 bp, Homo sapiens
atacctgcaaaattt

SEQ ID NO: 125746 - DNA, 15 bp, Homo sapiens
gatacctgcaaaatt

SEQ ID NO: 125747 - DNA, 15 bp, Homo sapiens
cgatacctgcaaaat

SEQ ID NO: 125748 - DNA, 15 bp, Homo sapiens
acgatacctgcaaaa

SEQ ID NO: 125749 - DNA, 15 bp, Homo sapiens
tacgatacctgcaaa

SEQ ID NO: 125750 - DNA, 15 bp, Homo sapiens
ctacgatacctgcaa

SEQ ID NO: 125751 - DNA, 15 bp, Homo sapiens
gctacgatacctgca

SEQ ID NO: 125752 - DNA, 15 bp, Homo sapiens
agctacgatacctgc

SEQ ID NO: 125753 - DNA, 15 bp, Homo sapiens
gagctacgatacctg

SEQ ID NO: 125754 - DNA, 15 bp, Homo sapiens
tgagctacgatacct

SEQ ID NO: 125755 - DNA, 15 bp, Homo sapiens
ttgagctacgatacc

SEQ ID NO: 125756 - DNA, 15 bp, Homo sapiens
tttgagctacgatac

SEQ ID NO: 125757 - DNA, 15 bp, Homo sapiens
ttttgagctacgata

SEQ ID NO: 125758 - DNA, 15 bp, Homo sapiens
attttgagctacgat

SEQ ID NO: 125759 - DNA, 15 bp, Homo sapiens
tattttgagctacga

SEQ ID NO: 125760 - DNA, 15 bp, Homo sapiens
gtattttgagctacg

SEQ ID NO: 125761 - DNA, 15 bp, Homo sapiens
tgtattttgagctac

SEQ ID NO: 125762 - DNA, 15 bp, Homo sapiens
gtgtattttgagcta

SEQ ID NO: 125763 - DNA, 15 bp, Homo sapiens
ggtgtattttgagct

SEQ ID NO: 125764 - DNA, 15 bp, Homo sapiens
aggtgtattttgagc

SEQ ID NO: 125765 - DNA, 15 bp, Homo sapiens
aaggtgtattttgag

SEQ ID NO: 125766 - DNA, 15 bp, Homo sapiens
gaaggtgtattttga

SEQ ID NO: 125767 - DNA, 15 bp, Homo sapiens
agaaggtgtattttg

SEQ ID NO: 125768 - DNA, 15 bp, Homo sapiens
cagaaggtgtatttt

SEQ ID NO: 125769 - DNA, 15 bp, Homo sapiens
acagaaggtgtattt

SEQ ID NO: 125770 - DNA, 15 bp, Homo sapiens
aacagaaggtgtatt

SEQ ID NO: 125771 - DNA, 15 bp, Homo sapiens
taacagaaggtgtat

SEQ ID NO: 125772 - DNA, 15 bp, Homo sapiens
ctaacagaaggtgta

SEQ ID NO: 125773 - DNA, 15 bp, Homo sapiens
actaacagaaggtgt

SEQ ID NO: 125774 - DNA, 15 bp, Homo sapiens
aactaacagaaggtg

SEQ ID NO: 125775 - DNA, 15 bp, Homo sapiens
caactaacagaaggt

SEQ ID NO: 125776 - DNA, 15 bp, Homo sapiens
gcaactaacagaagg

SEQ ID NO: 125777 - DNA, 15 bp, Homo sapiens
tgcaactaacagaag

SEQ ID NO: 125778 - DNA, 15 bp, Homo sapiens
atgcaactaacagaa

SEQ ID NO: 125779 - DNA, 15 bp, Homo sapiens
aatgcaactaacaga

SEQ ID NO: 125780 - DNA, 15 bp, Homo sapiens
taatgcaactaacag

SEQ ID NO: 125781 - DNA, 15 bp, Homo sapiens
ctaatgcaactaaca

SEQ ID NO: 125782 - DNA, 15 bp, Homo sapiens
actaatgcaactaac

SEQ ID NO: 125783 - DNA, 15 bp, Homo sapiens
aactaatgcaactaa

SEQ ID NO: 125784 - DNA, 15 bp, Homo sapiens
taactaatgcaacta

SEQ ID NO: 125785 - DNA, 15 bp, Homo sapiens
gtaactaatgcaact

SEQ ID NO: 125786 - DNA, 15 bp, Homo sapiens
agtaactaatgcaac

SEQ ID NO: 125787 - DNA, 15 bp, Homo sapiens
tagtaactaatgcaa

SEQ ID NO: 125788 - DNA, 15 bp, Homo sapiens
gtagtaactaatgca

SEQ ID NO: 125789 - DNA, 15 bp, Homo sapiens
agtagtaactaatgc

SEQ ID NO: 125790 - DNA, 15 bp, Homo sapiens
aagtagtaactaatg

SEQ ID NO: 125791 - DNA, 15 bp, Homo sapiens
caagtagtaactaat

SEQ ID NO: 125792 - DNA, 15 bp, Homo sapiens
tcaagtagtaactaa

SEQ ID NO: 125793 - DNA, 15 bp, Homo sapiens
ttcaagtagtaacta

SEQ ID NO: 125794 - DNA, 15 bp, Homo sapiens
gttcaagtagtaact

SEQ ID NO: 125795 - DNA, 15 bp, Homo sapiens
ggttcaagtagtaac

SEQ ID NO: 125796 - DNA, 15 bp, Homo sapiens
tggttcaagtagtaa

SEQ ID NO: 125797 - DNA, 15 bp, Homo sapiens
atggttcaagtagta

SEQ ID NO: 125798 - DNA, 15 bp, Homo sapiens
tatggttcaagtagt

SEQ ID NO: 125799 - DNA, 15 bp, Homo sapiens
atatggttcaagtag

SEQ ID NO: 125800 - DNA, 15 bp, Homo sapiens
aatatggttcaagta

SEQ ID NO: 125801 - DNA, 15 bp, Homo sapiens
aaatatggttcaagt

SEQ ID NO: 125802 - DNA, 15 bp, Homo sapiens
aaaatatggttcaag

SEQ ID NO: 125803 - DNA, 15 bp, Homo sapiens
taaaatatggttcaa

SEQ ID NO: 125804 - DNA, 15 bp, Homo sapiens
ctaaaatatggttca

SEQ ID NO: 125805 - DNA, 15 bp, Homo sapiens
tctaaaatatggttc

SEQ ID NO: 125806 - DNA, 15 bp, Homo sapiens
ttctaaaatatggtt

SEQ ID NO: 125807 - DNA, 15 bp, Homo sapiens
tttctaaaatatggt

SEQ ID NO: 125808 - DNA, 15 bp, Homo sapiens
gtttctaaaatatgg

SEQ ID NO: 125809 - DNA, 15 bp, Homo sapiens
agtttctaaaatatg

SEQ ID NO: 125810 - DNA, 15 bp, Homo sapiens
tagtttctaaaatat

SEQ ID NO: 125811 - DNA, 15 bp, Homo sapiens
ttagtttctaaaata

SEQ ID NO: 125812 - DNA, 15 bp, Homo sapiens
attagtttctaaaat

SEQ ID NO: 125813 - DNA, 15 bp, Homo sapiens
aattagtttctaaaa

SEQ ID NO: 125814 - DNA, 15 bp, Homo sapiens
aaattagtttctaaa

SEQ ID NO: 125815 - DNA, 15 bp, Homo sapiens
aaaattagtttctaa

SEQ ID NO: 125816 - DNA, 15 bp, Homo sapiens
gaaaattagtttcta

SEQ ID NO: 125817 - DNA, 15 bp, Homo sapiens
agaaaattagtttct

SEQ ID NO: 125818 - DNA, 15 bp, Homo sapiens
gagaaaattagtttc

SEQ ID NO: 125819 - DNA, 15 bp, Homo sapiens
agagaaaattagttt

SEQ ID NO: 125820 - DNA, 15 bp, Homo sapiens
cagagaaaattagtt

SEQ ID NO: 125821 - DNA, 15 bp, Homo sapiens
acagagaaaattagt

SEQ ID NO: 125822 - DNA, 15 bp, Homo sapiens
aacagagaaaattag

SEQ ID NO: 125823 - DNA, 15 bp, Homo sapiens
aaacagagaaaatta

SEQ ID NO: 125824 - DNA, 15 bp, Homo sapiens
caaacagagaaaatt

SEQ ID NO: 125825 - DNA, 15 bp, Homo sapiens
tcaaacagagaaaat

SEQ ID NO: 125826 - DNA, 15 bp, Homo sapiens
ttcaaacagagaaaa

SEQ ID NO: 125827 - DNA, 15 bp, Homo sapiens
gttcaaacagagaaa

SEQ ID NO: 125828 - DNA, 15 bp, Homo sapiens
agttcaaacagagaa

SEQ ID NO: 125829 - DNA, 15 bp, Homo sapiens
tagttcaaacagaga

SEQ ID NO: 125830 - DNA, 15 bp, Homo sapiens
ttagttcaaacagag

SEQ ID NO: 125831 - DNA, 15 bp, Homo sapiens
attagttcaaacaga

SEQ ID NO: 125832 - DNA, 15 bp, Homo sapiens
gattagttcaaacag

SEQ ID NO: 125833 - DNA, 15 bp, Homo sapiens
agattagttcaaaca

SEQ ID NO: 125834 - DNA, 15 bp, Homo sapiens
cagattagttcaaac

SEQ ID NO: 125835 - DNA, 15 bp, Homo sapiens
acagattagttcaaa

SEQ ID NO: 125836 - DNA, 15 bp, Homo sapiens
aacagattagttcaa

SEQ ID NO: 125837 - DNA, 15 bp, Homo sapiens
aaacagattagttca

SEQ ID NO: 125838 - DNA, 15 bp, Homo sapiens
taaacagattagttc

SEQ ID NO: 125839 - DNA, 15 bp, Homo sapiens
ctaaacagattagtt

SEQ ID NO: 125840 - DNA, 15 bp, Homo sapiens
tctaaacagattagt

SEQ ID NO: 125841 - DNA, 15 bp, Homo sapiens
ttctaaacagattag

SEQ ID NO: 125842 - DNA, 15 bp, Homo sapiens
tttctaaacagatta

SEQ ID NO: 125843 - DNA, 15 bp, Homo sapiens
atttctaaacagatt

SEQ ID NO: 125844 - DNA, 15 bp, Homo sapiens
catttctaaacagat

SEQ ID NO: 125845 - DNA, 15 bp, Homo sapiens
ccatttctaaacaga

SEQ ID NO: 125846 - DNA, 15 bp, Homo sapiens
cccatttctaaacag

SEQ ID NO: 125847 - DNA, 15 bp, Homo sapiens
acccatttctaaaca

SEQ ID NO: 125848 - DNA, 15 bp, Homo sapiens
aacccatttctaaac

SEQ ID NO: 125849 - DNA, 15 bp, Homo sapiens
aaacccatttctaaa

SEQ ID NO: 125850 - DNA, 15 bp, Homo sapiens
taaacccatttctaa

SEQ ID NO: 125851 - DNA, 15 bp, Homo sapiens
ttaaacccatttcta

SEQ ID NO: 125852 - DNA, 15 bp, Homo sapiens
tttaaacccatttct

SEQ ID NO: 125853 - DNA, 15 bp, Homo sapiens
ttttaaacccatttc

SEQ ID NO: 125854 - DNA, 15 bp, Homo sapiens
cttttaaacccattt

SEQ ID NO: 125855 - DNA, 15 bp, Homo sapiens
acttttaaacccatt

SEQ ID NO: 125856 - DNA, 15 bp, Homo sapiens
gacttttaaacccat

SEQ ID NO: 125857 - DNA, 15 bp, Homo sapiens
ggacttttaaaccca

SEQ ID NO: 125858 - DNA, 15 bp, Homo sapiens
aggacttttaaaccc

SEQ ID NO: 125859 - DNA, 15 bp, Homo sapiens
caggacttttaaacc

SEQ ID NO: 125860 - DNA, 15 bp, Homo sapiens
gcaggacttttaaac

SEQ ID NO: 125861 - DNA, 15 bp, Homo sapiens
tgcaggacttttaaa

SEQ ID NO: 125862 - DNA, 15 bp, Homo sapiens
ctgcaggacttttaa

SEQ ID NO: 125863 - DNA, 15 bp, Homo sapiens
actgcaggactttta

SEQ ID NO: 125864 - DNA, 15 bp, Homo sapiens
cactgcaggactttt

SEQ ID NO: 125865 - DNA, 15 bp, Homo sapiens
tcactgcaggacttt

SEQ ID NO: 125866 - DNA, 15 bp, Homo sapiens
ttcactgcaggactt

SEQ ID NO: 125867 - DNA, 15 bp, Homo sapiens
tttcactgcaggact

SEQ ID NO: 125868 - DNA, 15 bp, Homo sapiens
ctttcactgcaggac

SEQ ID NO: 125869 - DNA, 15 bp, Homo sapiens
actttcactgcagga

SEQ ID NO: 125870 - DNA, 15 bp, Homo sapiens
gactttcactgcagg

SEQ ID NO: 125871 - DNA, 15 bp, Homo sapiens
ggactttcactgcag

SEQ ID NO: 125872 - DNA, 15 bp, Homo sapiens
aggactttcactgca

SEQ ID NO: 125873 - DNA, 15 bp, Homo sapiens
caggactttcactgc

SEQ ID NO: 125874 - DNA, 15 bp, Homo sapiens
gcaggactttcactg

SEQ ID NO: 125875 - DNA, 15 bp, Homo sapiens
cgcaggactttcact

SEQ ID NO: 125876 - DNA, 15 bp, Homo sapiens
acgcaggactttcac

SEQ ID NO: 125877 - DNA, 15 bp, Homo sapiens
aacgcaggactttca

SEQ ID NO: 125878 - DNA, 15 bp, Homo sapiens
gaacgcaggactttc

SEQ ID NO: 125879 - DNA, 15 bp, Homo sapiens
tgaacgcaggacttt

SEQ ID NO: 125880 - DNA, 15 bp, Homo sapiens
ctgaacgcaggactt

SEQ ID NO: 125881 - DNA, 15 bp, Homo sapiens
cctgaacgcaggact

SEQ ID NO: 125882 - DNA, 15 bp, Homo sapiens
gcctgaacgcaggac

SEQ ID NO: 125883 - DNA, 15 bp, Homo sapiens
agcctgaacgcagga

SEQ ID NO: 125884 - DNA, 15 bp, Homo sapiens
aagcctgaacgcagg

SEQ ID NO: 125885 - DNA, 15 bp, Homo sapiens
gaagcctgaacgcag

SEQ ID NO: 125886 - DNA, 15 bp, Homo sapiens
agaagcctgaacgca

SEQ ID NO: 125887 - DNA, 15 bp, Homo sapiens
cagaagcctgaacgc

SEQ ID NO: 125888 - DNA, 15 bp, Homo sapiens
acagaagcctgaacg

SEQ ID NO: 125889 - DNA, 15 bp, Homo sapiens
cacagaagcctgaac

SEQ ID NO: 125890 - DNA, 15 bp, Homo sapiens
acacagaagcctgaa

SEQ ID NO: 125891 - DNA, 15 bp, Homo sapiens
tacacagaagcctga

SEQ ID NO: 125892 - DNA, 15 bp, Homo sapiens
atacacagaagcctg

SEQ ID NO: 125893 - DNA, 15 bp, Homo sapiens
gatacacagaagcct

SEQ ID NO: 125894 - DNA, 15 bp, Homo sapiens
cgatacacagaagcc

SEQ ID NO: 125895 - DNA, 15 bp, Homo sapiens
acgatacacagaagc

SEQ ID NO: 125896 - DNA, 15 bp, Homo sapiens
aacgatacacagaag

SEQ ID NO: 125897 - DNA, 15 bp, Homo sapiens
aaacgatacacagaa

SEQ ID NO: 125898 - DNA, 15 bp, Homo sapiens
caaacgatacacaga

SEQ ID NO: 125899 - DNA, 15 bp, Homo sapiens
acaaacgatacacag

SEQ ID NO: 125900 - DNA, 15 bp, Homo sapiens
aacaaacgatacaca

SEQ ID NO: 125901 - DNA, 15 bp, Homo sapiens
taacaaacgatacac

SEQ ID NO: 125902 - DNA, 15 bp, Homo sapiens
ataacaaacgataca

SEQ ID NO: 125903 - DNA, 15 bp, Homo sapiens
tataacaaacgatac

SEQ ID NO: 125904 - DNA, 15 bp, Homo sapiens
ctataacaaacgata

SEQ ID NO: 125905 - DNA, 15 bp, Homo sapiens
actataacaaacgat

SEQ ID NO: 125906 - DNA, 15 bp, Homo sapiens
aactataacaaacga

SEQ ID NO: 125907 - DNA, 15 bp, Homo sapiens
taactataacaaacg

SEQ ID NO: 125908 - DNA, 15 bp, Homo sapiens
ttaactataacaaac

SEQ ID NO: 125909 - DNA, 15 bp, Homo sapiens
attaactataacaaa

SEQ ID NO: 125910 - DNA, 15 bp, Homo sapiens
cattaactataacaa

SEQ ID NO: 125911 - DNA, 15 bp, Homo sapiens
tcattaactataaca

SEQ ID NO: 125912 - DNA, 15 bp, Homo sapiens
gtcattaactataac

SEQ ID NO: 125913 - DNA, 15 bp, Homo sapiens
tgtcattaactataa

SEQ ID NO: 125914 - DNA, 15 bp, Homo sapiens
atgtcattaactata

SEQ ID NO: 125915 - DNA, 15 bp, Homo sapiens
gatgtcattaactat

SEQ ID NO: 125916 - DNA, 15 bp, Homo sapiens
ggatgtcattaacta

SEQ ID NO: 125917 - DNA, 15 bp, Homo sapiens
gggatgtcattaact

SEQ ID NO: 125918 - DNA, 15 bp, Homo sapiens
agggatgtcattaac

SEQ ID NO: 125919 - DNA, 15 bp, Homo sapiens
aagggatgtcattaa

SEQ ID NO: 125920 - DNA, 15 bp, Homo sapiens
caagggatgtcatta

SEQ ID NO: 125921 - DNA, 15 bp, Homo sapiens
gcaagggatgtcatt

SEQ ID NO: 125922 - DNA, 15 bp, Homo sapiens
tgcaagggatgtcat

SEQ ID NO: 125923 - DNA, 15 bp, Homo sapiens
atgcaagggatgtca

SEQ ID NO: 125924 - DNA, 15 bp, Homo sapiens
aatgcaagggatgtc

SEQ ID NO: 125925 - DNA, 15 bp, Homo sapiens
gaatgcaagggatgt

SEQ ID NO: 125926 - DNA, 15 bp, Homo sapiens
ggaatgcaagggatg

SEQ ID NO: 125927 - DNA, 15 bp, Homo sapiens
aggaatgcaagggat

SEQ ID NO: 125928 - DNA, 15 bp, Homo sapiens
aaggaatgcaaggga

SEQ ID NO: 125929 - DNA, 15 bp, Homo sapiens
taaggaatgcaaggg

SEQ ID NO: 125930 - DNA, 15 bp, Homo sapiens
ataaggaatgcaagg

SEQ ID NO: 125931 - DNA, 15 bp, Homo sapiens
tataaggaatgcaag

SEQ ID NO: 125932 - DNA, 15 bp, Homo sapiens
gtataaggaatgcaa

SEQ ID NO: 125933 - DNA, 15 bp, Homo sapiens
agtataaggaatgca

SEQ ID NO: 125934 - DNA, 15 bp, Homo sapiens
cagtataaggaatgc

SEQ ID NO: 125935 - DNA, 15 bp, Homo sapiens
gcagtataaggaatg

SEQ ID NO: 125936 - DNA, 15 bp, Homo sapiens
agcagtataaggaat

SEQ ID NO: 125937 - DNA, 15 bp, Homo sapiens
aagcagtataaggaa

SEQ ID NO: 125938 - DNA, 15 bp, Homo sapiens
aaagcagtataagga

SEQ ID NO: 125939 - DNA, 15 bp, Homo sapiens
taaagcagtataagg

SEQ ID NO: 125940 - DNA, 15 bp, Homo sapiens
ctaaagcagtataag

SEQ ID NO: 125941 - DNA, 15 bp, Homo sapiens
cctaaagcagtataa

SEQ ID NO: 125942 - DNA, 15 bp, Homo sapiens
acctaaagcagtata

SEQ ID NO: 125943 - DNA, 15 bp, Homo sapiens
cacctaaagcagtat

SEQ ID NO: 125944 - DNA, 15 bp, Homo sapiens
acacctaaagcagta

SEQ ID NO: 125945 - DNA, 15 bp, Homo sapiens
aacacctaaagcagt

SEQ ID NO: 125946 - DNA, 15 bp, Homo sapiens
taacacctaaagcag

SEQ ID NO: 125947 - DNA, 15 bp, Homo sapiens
ctaacacctaaagca

SEQ ID NO: 125948 - DNA, 15 bp, Homo sapiens
actaacacctaaagc

SEQ ID NO: 125949 - DNA, 15 bp, Homo sapiens
cactaacacctaaag

SEQ ID NO: 125950 - DNA, 15 bp, Homo sapiens
ccactaacacctaaa

SEQ ID NO: 125951 - DNA, 15 bp, Homo sapiens
gccactaacacctaa

SEQ ID NO: 125952 - DNA, 15 bp, Homo sapiens
agccactaacaccta

SEQ ID NO: 125953 - DNA, 15 bp, Homo sapiens
aagccactaacacct

SEQ ID NO: 125954 - DNA, 15 bp, Homo sapiens
gaagccactaacacc

SEQ ID NO: 125955 - DNA, 15 bp, Homo sapiens
tgaagccactaacac

SEQ ID NO: 125956 - DNA, 15 bp, Homo sapiens
atgaagccactaaca

SEQ ID NO: 125957 - DNA, 15 bp, Homo sapiens
gatgaagccactaac

SEQ ID NO: 125958 - DNA, 15 bp, Homo sapiens
tgatgaagccactaa

SEQ ID NO: 125959 - DNA, 15 bp, Homo sapiens
ctgatgaagccacta

SEQ ID NO: 125960 - DNA, 15 bp, Homo sapiens
actgatgaagccact

SEQ ID NO: 125961 - DNA, 15 bp, Homo sapiens
aactgatgaagccac

SEQ ID NO: 125962 - DNA, 15 bp, Homo sapiens
caactgatgaagcca

SEQ ID NO: 125963 - DNA, 15 bp, Homo sapiens
acaactgatgaagcc

SEQ ID NO: 125964 - DNA, 15 bp, Homo sapiens
tacaactgatgaagc

SEQ ID NO: 125965 - DNA, 15 bp, Homo sapiens
ctacaactgatgaag

SEQ ID NO: 125966 - DNA, 15 bp, Homo sapiens
gctacaactgatgaa

SEQ ID NO: 125967 - DNA, 15 bp, Homo sapiens
tgctacaactgatga

SEQ ID NO: 125968 - DNA, 15 bp, Homo sapiens
ctgctacaactgatg

SEQ ID NO: 125969 - DNA, 15 bp, Homo sapiens
cctgctacaactgat

SEQ ID NO: 125970 - DNA, 15 bp, Homo sapiens
ccctgctacaactga

SEQ ID NO: 125971 - DNA, 15 bp, Homo sapiens
cccctgctacaactg

SEQ ID NO: 125972 - DNA, 15 bp, Homo sapiens
tcccctgctacaact

SEQ ID NO: 125973 - DNA, 15 bp, Homo sapiens
ttcccctgctacaac

SEQ ID NO: 125974 - DNA, 15 bp, Homo sapiens
attcccctgctacaa

SEQ ID NO: 125975 - DNA, 15 bp, Homo sapiens
gattcccctgctaca

SEQ ID NO: 125976 - DNA, 15 bp, Homo sapiens
ggattcccctgctac

SEQ ID NO: 125977 - DNA, 15 bp, Homo sapiens
gggattcccctgcta

SEQ ID NO: 125978 - DNA, 15 bp, Homo sapiens
tgggattcccctgct

SEQ ID NO: 125979 - DNA, 15 bp, Homo sapiens
ctgggattcccctgc

SEQ ID NO: 125980 - DNA, 15 bp, Homo sapiens
tctgggattcccctg

SEQ ID NO: 125981 - DNA, 15 bp, Homo sapiens
ttctgggattcccct

SEQ ID NO: 125982 - DNA, 15 bp, Homo sapiens
tttctgggattcccc

SEQ ID NO: 125983 - DNA, 15 bp, Homo sapiens
gtttctgggattccc

SEQ ID NO: 125984 - DNA, 15 bp, Homo sapiens
ggtttctgggattcc

SEQ ID NO: 125985 - DNA, 15 bp, Homo sapiens
aggtttctgggattc

SEQ ID NO: 125986 - DNA, 15 bp, Homo sapiens
caggtttctgggatt

SEQ ID NO: 125987 - DNA, 15 bp, Homo sapiens
tcaggtttctgggat

SEQ ID NO: 125988 - DNA, 15 bp, Homo sapiens
ttcaggtttctggga

SEQ ID NO: 125989 - DNA, 15 bp, Homo sapiens
gttcaggtttctggg

SEQ ID NO: 125990 - DNA, 15 bp, Homo sapiens
agttcaggtttctgg

SEQ ID NO: 125991 - DNA, 15 bp, Homo sapiens
gagttcaggtttctg

SEQ ID NO: 125992 - DNA, 15 bp, Homo sapiens
tgagttcaggtttct

SEQ ID NO: 125993 - DNA, 15 bp, Homo sapiens
ttgagttcaggtttc

SEQ ID NO: 125994 - DNA, 15 bp, Homo sapiens
cttgagttcaggttt

SEQ ID NO: 125995 - DNA, 15 bp, Homo sapiens
ccttgagttcaggtt

SEQ ID NO: 125996 - DNA, 15 bp, Homo sapiens
gccttgagttcaggt

SEQ ID NO: 125997 - DNA, 15 bp, Homo sapiens
agccttgagttcagg

SEQ ID NO: 125998 - DNA, 15 bp, Homo sapiens
aagccttgagttcag

SEQ ID NO: 125999 - DNA, 15 bp, Homo sapiens
caagccttgagttca

SEQ ID NO: 126000 - DNA, 15 bp, Homo sapiens
ccaagccttgagttc

SEQ ID NO: 126001 - DNA, 15 bp, Homo sapiens
gccaagccttgagtt

SEQ ID NO: 126002 - DNA, 15 bp, Homo sapiens
tgccaagccttgagt

SEQ ID NO: 126003 - DNA, 15 bp, Homo sapiens
ctgccaagccttgag

SEQ ID NO: 126004 - DNA, 15 bp, Homo sapiens
cctgccaagccttga

SEQ ID NO: 126005 - DNA, 15 bp, Homo sapiens
acctgccaagccttg

SEQ ID NO: 126006 - DNA, 15 bp, Homo sapiens
tacctgccaagcctt

SEQ ID NO: 126007 - DNA, 15 bp, Homo sapiens
ctacctgccaagcct

SEQ ID NO: 126008 - DNA, 15 bp, Homo sapiens
cctacctgccaagcc

SEQ ID NO: 126009 - DNA, 15 bp, Homo sapiens
tcctacctgccaagc

SEQ ID NO: 126010 - DNA, 15 bp, Homo sapiens
ttcctacctgccaag

SEQ ID NO: 126011 - DNA, 15 bp, Homo sapiens
tttcctacctgccaa

SEQ ID NO: 126012 - DNA, 15 bp, Homo sapiens
ttttcctacctgcca

SEQ ID NO: 126013 - DNA, 15 bp, Homo sapiens
gttttcctacctgcc

SEQ ID NO: 126014 - DNA, 15 bp, Homo sapiens
tgttttcctacctgc

SEQ ID NO: 126015 - DNA, 15 bp, Homo sapiens
atgttttcctacctg

SEQ ID NO: 126016 - DNA, 15 bp, Homo sapiens
aatgttttcctacct

SEQ ID NO: 126017 - DNA, 15 bp, Homo sapiens
gaatgttttcctacc

SEQ ID NO: 126018 - DNA, 15 bp, Homo sapiens
ggaatgttttcctac

SEQ ID NO: 126019 - DNA, 15 bp, Homo sapiens
aggaatgttttccta

SEQ ID NO: 126020 - DNA, 15 bp, Homo sapiens
aaggaatgttttcct

SEQ ID NO: 126021 - DNA, 15 bp, Homo sapiens
caaggaatgttttcc

SEQ ID NO: 126022 - DNA, 15 bp, Homo sapiens
tcaaggaatgttttc

SEQ ID NO: 126023 - DNA, 15 bp, Homo sapiens
ctcaaggaatgtttt

SEQ ID NO: 126024 - DNA, 15 bp, Homo sapiens
tctcaaggaatgttt

SEQ ID NO: 126025 - DNA, 15 bp, Homo sapiens
ttctcaaggaatgtt

SEQ ID NO: 126026 - DNA, 15 bp, Homo sapiens
tttctcaaggaatgt

SEQ ID NO: 126027 - DNA, 15 bp, Homo sapiens
atttctcaaggaatg

SEQ ID NO: 126028 - DNA, 15 bp, Homo sapiens
tatttctcaaggaat

SEQ ID NO: 126029 - DNA, 15 bp, Homo sapiens
gtatttctcaaggaa

SEQ ID NO: 126030 - DNA, 15 bp, Homo sapiens
tgtatttctcaagga

SEQ ID NO: 126031 - DNA, 15 bp, Homo sapiens
gtgtatttctcaagg

SEQ ID NO: 126032 - DNA, 15 bp, Homo sapiens
agtgtatttctcaag

SEQ ID NO: 126033 - DNA, 15 bp, Homo sapiens
aagtgtatttctcaa

SEQ ID NO: 126034 - DNA, 15 bp, Homo sapiens
aaagtgtatttctca

SEQ ID NO: 126035 - DNA, 15 bp, Homo sapiens
gaaagtgtatttctc

SEQ ID NO: 126036 - DNA, 15 bp, Homo sapiens
tgaaagtgtatttct

SEQ ID NO: 126037 - DNA, 15 bp, Homo sapiens
ctgaaagtgtatttc

SEQ ID NO: 126038 - DNA, 15 bp, Homo sapiens
actgaaagtgtattt

SEQ ID NO: 126039 - DNA, 15 bp, Homo sapiens
aactgaaagtgtatt

SEQ ID NO: 126040 - DNA, 15 bp, Homo sapiens
aaactgaaagtgtat

SEQ ID NO: 126041 - DNA, 15 bp, Homo sapiens
taaactgaaagtgta

SEQ ID NO: 126042 - DNA, 15 bp, Homo sapiens
ataaactgaaagtgt

SEQ ID NO: 126043 - DNA, 15 bp, Homo sapiens
tataaactgaaagtg

SEQ ID NO: 126044 - DNA, 15 bp, Homo sapiens
atataaactgaaagt

SEQ ID NO: 126045 - DNA, 15 bp, Homo sapiens
aatataaactgaaag

SEQ ID NO: 126046 - DNA, 15 bp, Homo sapiens
aaatataaactgaaa

SEQ ID NO: 126047 - DNA, 15 bp, Homo sapiens
aaaatataaactgaa

SEQ ID NO: 126048 - DNA, 15 bp, Homo sapiens
taaaatataaactga

SEQ ID NO: 126049 - DNA, 15 bp, Homo sapiens
ttaaaatataaactg

SEQ ID NO: 126050 - DNA, 15 bp, Homo sapiens
attaaaatataaact

SEQ ID NO: 126051 - DNA, 15 bp, Homo sapiens
cattaaaatataaac

SEQ ID NO: 126052 - DNA, 15 bp, Homo sapiens
acattaaaatataaa

SEQ ID NO: 126053 - DNA, 15 bp, Homo sapiens
aacattaaaatataa

SEQ ID NO: 126054 - DNA, 15 bp, Homo sapiens
aaacattaaaatata

SEQ ID NO: 126055 - DNA, 15 bp, Homo sapiens
taaacattaaaatat

SEQ ID NO: 126056 - DNA, 15 bp, Homo sapiens
ataaacattaaaata

SEQ ID NO: 126057 - DNA, 15 bp, Homo sapiens
aataaacattaaaat

SEQ ID NO: 126058 - DNA, 15 bp, Homo sapiens
gaataaacattaaaa

SEQ ID NO: 126059 - DNA, 15 bp, Homo sapiens
ggaataaacattaaa

SEQ ID NO: 126060 - DNA, 15 bp, Homo sapiens
gggaataaacattaa

SEQ ID NO: 126061 - DNA, 15 bp, Homo sapiens
ggggaataaacatta

SEQ ID NO: 126062 - DNA, 15 bp, Homo sapiens
aggggaataaacatt

SEQ ID NO: 126063 - DNA, 15 bp, Homo sapiens
aaggggaataaacat

SEQ ID NO: 126064 - DNA, 15 bp, Homo sapiens
caaggggaataaaca

SEQ ID NO: 126065 - DNA, 15 bp, Homo sapiens
acaaggggaataaac

SEQ ID NO: 126066 - DNA, 15 bp, Homo sapiens
aacaaggggaataaa

SEQ ID NO: 126067 - DNA, 15 bp, Homo sapiens
taacaaggggaataa

SEQ ID NO: 126068 - DNA, 15 bp, Homo sapiens
ttaacaaggggaata

SEQ ID NO: 126069 - DNA, 15 bp, Homo sapiens
gttaacaaggggaat

SEQ ID NO: 126070 - DNA, 15 bp, Homo sapiens
tgttaacaaggggaa

SEQ ID NO: 126071 - DNA, 15 bp, Homo sapiens
ttgttaacaagggga

SEQ ID NO: 126072 - DNA, 15 bp, Homo sapiens
tttgttaacaagggg

SEQ ID NO: 126073 - DNA, 15 bp, Homo sapiens
ctttgttaacaaggg

SEQ ID NO: 126074 - DNA, 15 bp, Homo sapiens
tctttgttaacaagg

SEQ ID NO: 126075 - DNA, 15 bp, Homo sapiens
atctttgttaacaag

SEQ ID NO: 126076 - DNA, 15 bp, Homo sapiens
aatctttgttaacaa

SEQ ID NO: 126077 - DNA, 15 bp, Homo sapiens
taatctttgttaaca

SEQ ID NO: 126078 - DNA, 15 bp, Homo sapiens
gtaatctttgttaac

SEQ ID NO: 126079 - DNA, 15 bp, Homo sapiens
tgtaatctttgttaa

SEQ ID NO: 126080 - DNA, 15 bp, Homo sapiens
ttgtaatctttgtta

SEQ ID NO: 126081 - DNA, 15 bp, Homo sapiens
tttgtaatctttgtt

SEQ ID NO: 126082 - DNA, 15 bp, Homo sapiens
atttgtaatctttgt

SEQ ID NO: 126083 - DNA, 15 bp, Homo sapiens
catttgtaatctttg

SEQ ID NO: 126084 - DNA, 15 bp, Homo sapiens
tcatttgtaatcttt

SEQ ID NO: 126085 - DNA, 15 bp, Homo sapiens
atcatttgtaatctt

SEQ ID NO: 126086 - DNA, 15 bp, Homo sapiens
gatcatttgtaatct

SEQ ID NO: 126087 - DNA, 15 bp, Homo sapiens
ggatcatttgtaatc

SEQ ID NO: 126088 - DNA, 15 bp, Homo sapiens
aggatcatttgtaat

SEQ ID NO: 126089 - DNA, 15 bp, Homo sapiens
gaggatcatttgtaa

SEQ ID NO: 126090 - DNA, 15 bp, Homo sapiens
tgaggatcatttgta

SEQ ID NO: 126091 - DNA, 15 bp, Homo sapiens
ctgaggatcatttgt

SEQ ID NO: 126092 - DNA, 15 bp, Homo sapiens
cctgaggatcatttg

SEQ ID NO: 126093 - DNA, 15 bp, Homo sapiens
tcctgaggatcattt

SEQ ID NO: 126094 - DNA, 15 bp, Homo sapiens
atcctgaggatcatt

SEQ ID NO: 126095 - DNA, 15 bp, Homo sapiens
aatcctgaggatcat

SEQ ID NO: 126096 - DNA, 15 bp, Homo sapiens
taatcctgaggatca

SEQ ID NO: 126097 - DNA, 15 bp, Homo sapiens
ctaatcctgaggatc

SEQ ID NO: 126098 - DNA, 15 bp, Homo sapiens
cctaatcctgaggat

SEQ ID NO: 126099 - DNA, 15 bp, Homo sapiens
ccctaatcctgagga

SEQ ID NO: 126100 - DNA, 15 bp, Homo sapiens
tccctaatcctgagg

SEQ ID NO: 126101 - DNA, 15 bp, Homo sapiens
gtccctaatcctgag

SEQ ID NO: 126102 - DNA, 15 bp, Homo sapiens
agtccctaatcctga

SEQ ID NO: 126103 - DNA, 15 bp, Homo sapiens
cagtccctaatcctg

SEQ ID NO: 126104 - DNA, 15 bp, Homo sapiens
ccagtccctaatcct

SEQ ID NO: 126105 - DNA, 15 bp, Homo sapiens
tccagtccctaatcc

SEQ ID NO: 126106 - DNA, 15 bp, Homo sapiens
ctccagtccctaatc

SEQ ID NO: 126107 - DNA, 15 bp, Homo sapiens
cctccagtccctaat

SEQ ID NO: 126108 - DNA, 15 bp, Homo sapiens
ccctccagtccctaa

SEQ ID NO: 126109 - DNA, 15 bp, Homo sapiens
tccctccagtcccta

SEQ ID NO: 126110 - DNA, 15 bp, Homo sapiens
ctccctccagtccct

SEQ ID NO: 126111 - DNA, 15 bp, Homo sapiens
cctccctccagtccc

SEQ ID NO: 126112 - DNA, 15 bp, Homo sapiens
tcctccctccagtcc

SEQ ID NO: 126113 - DNA, 15 bp, Homo sapiens
ctcctccctccagtc

SEQ ID NO: 126114 - DNA, 15 bp, Homo sapiens
actcctccctccagt

SEQ ID NO: 126115 - DNA, 15 bp, Homo sapiens
cactcctccctccag

SEQ ID NO: 126116 - DNA, 15 bp, Homo sapiens
acactcctccctcca

SEQ ID NO: 126117 - DNA, 15 bp, Homo sapiens
aacactcctccctcc

SEQ ID NO: 126118 - DNA, 15 bp, Homo sapiens
aaacactcctccctc

SEQ ID NO: 126119 - DNA, 15 bp, Homo sapiens
caaacactcctccct

SEQ ID NO: 126120 - DNA, 15 bp, Homo sapiens
acaaacactcctccc

SEQ ID NO: 126121 - DNA, 15 bp, Homo sapiens
cacaaacactcctcc

SEQ ID NO: 126122 - DNA, 15 bp, Homo sapiens
ccacaaacactcctc

SEQ ID NO: 126123 - DNA, 15 bp, Homo sapiens
cccacaaacactcct

SEQ ID NO: 126124 - DNA, 15 bp, Homo sapiens
acccacaaacactcc

SEQ ID NO: 126125 - DNA, 15 bp, Homo sapiens
tacccacaaacactc

SEQ ID NO: 126126 - DNA, 15 bp, Homo sapiens
atacccacaaacact

SEQ ID NO: 126127 - DNA, 15 bp, Homo sapiens
catacccacaaacac

SEQ ID NO: 126128 - DNA, 15 bp, Homo sapiens
acatacccacaaaca

SEQ ID NO: 126129 - DNA, 15 bp, Homo sapiens
cacatacccacaaac

SEQ ID NO: 126130 - DNA, 15 bp, Homo sapiens
ccacatacccacaaa

SEQ ID NO: 126131 - DNA, 15 bp, Homo sapiens
tccacatacccacaa

SEQ ID NO: 126132 - DNA, 15 bp, Homo sapiens
atccacatacccaca

SEQ ID NO: 126133 - DNA, 15 bp, Homo sapiens
gatccacatacccac

SEQ ID NO: 126134 - DNA, 15 bp, Homo sapiens
ggatccacataccca

SEQ ID NO: 126135 - DNA, 15 bp, Homo sapiens
tggatccacataccc

SEQ ID NO: 126136 - DNA, 15 bp, Homo sapiens
atggatccacatacc

SEQ ID NO: 126137 - DNA, 15 bp, Homo sapiens
aatggatccacatac

SEQ ID NO: 126138 - DNA, 15 bp, Homo sapiens
caatggatccacata

SEQ ID NO: 126139 - DNA, 15 bp, Homo sapiens
gcaatggatccacat

SEQ ID NO: 126140 - DNA, 15 bp, Homo sapiens
ggcaatggatccaca

SEQ ID NO: 126141 - DNA, 15 bp, Homo sapiens
gggcaatggatccac

SEQ ID NO: 126142 - DNA, 15 bp, Homo sapiens
agggcaatggatcca

SEQ ID NO: 126143 - DNA, 15 bp, Homo sapiens
cagggcaatggatcc

SEQ ID NO: 126144 - DNA, 15 bp, Homo sapiens
ccagggcaatggatc

SEQ ID NO: 126145 - DNA, 15 bp, Homo sapiens
tccagggcaatggat

SEQ ID NO: 126146 - DNA, 15 bp, Homo sapiens
ctccagggcaatgga

SEQ ID NO: 126147 - DNA, 15 bp, Homo sapiens
actccagggcaatgg

SEQ ID NO: 126148 - DNA, 15 bp, Homo sapiens
aactccagggcaatg

SEQ ID NO: 126149 - DNA, 15 bp, Homo sapiens
taactccagggcaat

SEQ ID NO: 126150 - DNA, 15 bp, Homo sapiens
ttaactccagggcaa

SEQ ID NO: 126151 - DNA, 15 bp, Homo sapiens
tttaactccagggca

SEQ ID NO: 126152 - DNA, 15 bp, Homo sapiens
ctttaactccagggc

SEQ ID NO: 126153 - DNA, 15 bp, Homo sapiens
gctttaactccaggg

SEQ ID NO: 126154 - DNA, 15 bp, Homo sapiens
agctttaactccagg

SEQ ID NO: 126155 - DNA, 15 bp, Homo sapiens
aagctttaactccag

SEQ ID NO: 126156 - DNA, 15 bp, Homo sapiens
taagctttaactcca

SEQ ID NO: 126157 - DNA, 15 bp, Homo sapiens
ttaagctttaactcc

SEQ ID NO: 126158 - DNA, 15 bp, Homo sapiens
tttaagctttaactc

SEQ ID NO: 126159 - DNA, 15 bp, Homo sapiens
gtttaagctttaact

SEQ ID NO: 126160 - DNA, 15 bp, Homo sapiens
tgtttaagctttaac

SEQ ID NO: 126161 - DNA, 15 bp, Homo sapiens
gtgtttaagctttaa

SEQ ID NO: 126162 - DNA, 15 bp, Homo sapiens
ggtgtttaagcttta

SEQ ID NO: 126163 - DNA, 15 bp, Homo sapiens
aggtgtttaagcttt

SEQ ID NO: 126164 - DNA, 15 bp, Homo sapiens
aaggtgtttaagctt

SEQ ID NO: 126165 - DNA, 15 bp, Homo sapiens
gaaggtgtttaagct

SEQ ID NO: 126166 - DNA, 15 bp, Homo sapiens
tgaaggtgtttaagc

SEQ ID NO: 126167 - DNA, 15 bp, Homo sapiens
atgaaggtgtttaag

SEQ ID NO: 126168 - DNA, 15 bp, Homo sapiens
catgaaggtgtttaa

SEQ ID NO: 126169 - DNA, 15 bp, Homo sapiens
gcatgaaggtgttta

SEQ ID NO: 126170 - DNA, 15 bp, Homo sapiens
ggcatgaaggtgttt

SEQ ID NO: 126171 - DNA, 15 bp, Homo sapiens
cggcatgaaggtgtt

SEQ ID NO: 126172 - DNA, 15 bp, Homo sapiens
gcggcatgaaggtgt

SEQ ID NO: 126173 - DNA, 15 bp, Homo sapiens
agcggcatgaaggtg

SEQ ID NO: 126174 - DNA, 15 bp, Homo sapiens
aagcggcatgaaggt

SEQ ID NO: 126175 - DNA, 15 bp, Homo sapiens
caagcggcatgaagg

SEQ ID NO: 126176 - DNA, 15 bp, Homo sapiens
acaagcggcatgaag

SEQ ID NO: 126177 - DNA, 15 bp, Homo sapiens
tacaagcggcatgaa

SEQ ID NO: 126178 - DNA, 15 bp, Homo sapiens
ttacaagcggcatga

SEQ ID NO: 126179 - DNA, 15 bp, Homo sapiens
cttacaagcggcatg

SEQ ID NO: 126180 - DNA, 15 bp, Homo sapiens
ccttacaagcggcat

SEQ ID NO: 126181 - DNA, 15 bp, Homo sapiens
gccttacaagcggca

SEQ ID NO: 126182 - DNA, 15 bp, Homo sapiens
agccttacaagcggc

SEQ ID NO: 126183 - DNA, 15 bp, Homo sapiens
aagccttacaagcgg

SEQ ID NO: 126184 - DNA, 15 bp, Homo sapiens
aaagccttacaagcg

SEQ ID NO: 126185 - DNA, 15 bp, Homo sapiens
aaaagccttacaagc

SEQ ID NO: 126186 - DNA, 15 bp, Homo sapiens
gaaaagccttacaag

SEQ ID NO: 126187 - DNA, 15 bp, Homo sapiens
ggaaaagccttacaa

SEQ ID NO: 126188 - DNA, 15 bp, Homo sapiens
aggaaaagccttaca

SEQ ID NO: 126189 - DNA, 15 bp, Homo sapiens
taggaaaagccttac

SEQ ID NO: 126190 - DNA, 15 bp, Homo sapiens
ttaggaaaagcctta

SEQ ID NO: 126191 - DNA, 15 bp, Homo sapiens
attaggaaaagcctt

SEQ ID NO: 126192 - DNA, 15 bp, Homo sapiens
aattaggaaaagcct

SEQ ID NO: 126193 - DNA, 15 bp, Homo sapiens
taattaggaaaagcc

SEQ ID NO: 126194 - DNA, 15 bp, Homo sapiens
gtaattaggaaaagc

SEQ ID NO: 126195 - DNA, 15 bp, Homo sapiens
agtaattaggaaaag

SEQ ID NO: 126196 - DNA, 15 bp, Homo sapiens
aagtaattaggaaaa

SEQ ID NO: 126197 - DNA, 15 bp, Homo sapiens
caagtaattaggaaa

SEQ ID NO: 126198 - DNA, 15 bp, Homo sapiens
acaagtaattaggaa

SEQ ID NO: 126199 - DNA, 15 bp, Homo sapiens
gacaagtaattagga

SEQ ID NO: 126200 - DNA, 15 bp, Homo sapiens
agacaagtaattagg

SEQ ID NO: 126201 - DNA, 15 bp, Homo sapiens
tagacaagtaattag

SEQ ID NO: 126202 - DNA, 15 bp, Homo sapiens
ctagacaagtaatta

SEQ ID NO: 126203 - DNA, 15 bp, Homo sapiens
actagacaagtaatt

SEQ ID NO: 126204 - DNA, 15 bp, Homo sapiens
aactagacaagtaat

SEQ ID NO: 126205 - DNA, 15 bp, Homo sapiens
taactagacaagtaa

SEQ ID NO: 126206 - DNA, 15 bp, Homo sapiens
ataactagacaagta

SEQ ID NO: 126207 - DNA, 15 bp, Homo sapiens
gataactagacaagt

SEQ ID NO: 126208 - DNA, 15 bp, Homo sapiens
tgataactagacaag

SEQ ID NO: 126209 - DNA, 15 bp, Homo sapiens
atgataactagacaa

SEQ ID NO: 126210 - DNA, 15 bp, Homo sapiens
gatgataactagaca

SEQ ID NO: 126211 - DNA, 15 bp, Homo sapiens
agatgataactagac

SEQ ID NO: 126212 - DNA, 15 bp, Homo sapiens
aagatgataactaga

SEQ ID NO: 126213 - DNA, 15 bp, Homo sapiens
aaagatgataactag

SEQ ID NO: 126214 - DNA, 15 bp, Homo sapiens
taaagatgataacta

SEQ ID NO: 126215 - DNA, 15 bp, Homo sapiens
ttaaagatgataact

SEQ ID NO: 126216 - DNA, 15 bp, Homo sapiens
tttaaagatgataac

SEQ ID NO: 126217 - DNA, 15 bp, Homo sapiens
atttaaagatgataa

SEQ ID NO: 126218 - DNA, 15 bp, Homo sapiens
aatttaaagatgata

SEQ ID NO: 126219 - DNA, 15 bp, Homo sapiens
taatttaaagatgat

SEQ ID NO: 126220 - DNA, 15 bp, Homo sapiens
ataatttaaagatga

SEQ ID NO: 126221 - DNA, 15 bp, Homo sapiens
gataatttaaagatg

SEQ ID NO: 126222 - DNA, 15 bp, Homo sapiens
agataatttaaagat

SEQ ID NO: 126223 - DNA, 15 bp, Homo sapiens
aagataatttaaaga

SEQ ID NO: 126224 - DNA, 15 bp, Homo sapiens
gaagataatttaaag

SEQ ID NO: 126225 - DNA, 15 bp, Homo sapiens
agaagataatttaaa

SEQ ID NO: 126226 - DNA, 15 bp, Homo sapiens
gagaagataatttaa

SEQ ID NO: 126227 - DNA, 15 bp, Homo sapiens
ggagaagataattta

SEQ ID NO: 126228 - DNA, 15 bp, Homo sapiens
gggagaagataattt

SEQ ID NO: 126229 - DNA, 15 bp, Homo sapiens
agggagaagataatt

SEQ ID NO: 126230 - DNA, 15 bp, Homo sapiens
aagggagaagataat

SEQ ID NO: 126231 - DNA, 15 bp, Homo sapiens
caagggagaagataa

SEQ ID NO: 126232 - DNA, 15 bp, Homo sapiens
gcaagggagaagata

SEQ ID NO: 126233 - DNA, 15 bp, Homo sapiens
tgcaagggagaagat

SEQ ID NO: 126234 - DNA, 15 bp, Homo sapiens
gtgcaagggagaaga

SEQ ID NO: 126235 - DNA, 15 bp, Homo sapiens
agtgcaagggagaag

SEQ ID NO: 126236 - DNA, 15 bp, Homo sapiens
gagtgcaagggagaa

SEQ ID NO: 126237 - DNA, 15 bp, Homo sapiens
agagtgcaagggaga

SEQ ID NO: 126238 - DNA, 15 bp, Homo sapiens
tagagtgcaagggag

SEQ ID NO: 126239 - DNA, 15 bp, Homo sapiens
ctagagtgcaaggga

SEQ ID NO: 126240 - DNA, 15 bp, Homo sapiens
tctagagtgcaaggg

SEQ ID NO: 126241 - DNA, 15 bp, Homo sapiens
ctctagagtgcaagg

SEQ ID NO: 126242 - DNA, 15 bp, Homo sapiens
tctctagagtgcaag

SEQ ID NO: 126243 - DNA, 15 bp, Homo sapiens
ttctctagagtgcaa

SEQ ID NO: 126244 - DNA, 15 bp, Homo sapiens
gttctctagagtgca

SEQ ID NO: 126245 - DNA, 15 bp, Homo sapiens
ggttctctagagtgc

SEQ ID NO: 126246 - DNA, 15 bp, Homo sapiens
aggttctctagagtg

SEQ ID NO: 126247 - DNA, 15 bp, Homo sapiens
aaggttctctagagt

SEQ ID NO: 126248 - DNA, 15 bp, Homo sapiens
taaggttctctagag

SEQ ID NO: 126249 - DNA, 15 bp, Homo sapiens
ttaaggttctctaga

SEQ ID NO: 126250 - DNA, 15 bp, Homo sapiens
cttaaggttctctag

SEQ ID NO: 126251 - DNA, 15 bp, Homo sapiens
gcttaaggttctcta

SEQ ID NO: 126252 - DNA, 15 bp, Homo sapiens
ggcttaaggttctct

SEQ ID NO: 126253 - DNA, 15 bp, Homo sapiens
tggcttaaggttctc

SEQ ID NO: 126254 - DNA, 15 bp, Homo sapiens
atggcttaaggttct

SEQ ID NO: 126255 - DNA, 15 bp, Homo sapiens
tatggcttaaggttc

SEQ ID NO: 126256 - DNA, 15 bp, Homo sapiens
gtatggcttaaggtt

SEQ ID NO: 126257 - DNA, 15 bp, Homo sapiens
agtatggcttaaggt

SEQ ID NO: 126258 - DNA, 15 bp, Homo sapiens
cagtatggcttaagg

SEQ ID NO: 126259 - DNA, 15 bp, Homo sapiens
tcagtatggcttaag

SEQ ID NO: 126260 - DNA, 15 bp, Homo sapiens
ttcagtatggcttaa

SEQ ID NO: 126261 - DNA, 15 bp, Homo sapiens
cttcagtatggctta

SEQ ID NO: 126262 - DNA, 15 bp, Homo sapiens
acttcagtatggctt

SEQ ID NO: 126263 - DNA, 15 bp, Homo sapiens
tacttcagtatggct

SEQ ID NO: 126264 - DNA, 15 bp, Homo sapiens
gtacttcagtatggc

SEQ ID NO: 126265 - DNA, 15 bp, Homo sapiens
agtacttcagtatgg

SEQ ID NO: 126266 - DNA, 15 bp, Homo sapiens
aagtacttcagtatg

SEQ ID NO: 126267 - DNA, 15 bp, Homo sapiens
aaagtacttcagtat

SEQ ID NO: 126268 - DNA, 15 bp, Homo sapiens
caaagtacttcagta

SEQ ID NO: 126269 - DNA, 15 bp, Homo sapiens
tcaaagtacttcagt

SEQ ID NO: 126270 - DNA, 15 bp, Homo sapiens
ctcaaagtacttcag

SEQ ID NO: 126271 - DNA, 15 bp, Homo sapiens
actcaaagtacttca

SEQ ID NO: 126272 - DNA, 15 bp, Homo sapiens
aactcaaagtacttc

SEQ ID NO: 126273 - DNA, 15 bp, Homo sapiens
gaactcaaagtactt

SEQ ID NO: 126274 - DNA, 15 bp, Homo sapiens
agaactcaaagtact

SEQ ID NO: 126275 - DNA, 15 bp, Homo sapiens
gagaactcaaagtac

SEQ ID NO: 126276 - DNA, 15 bp, Homo sapiens
agagaactcaaagta

SEQ ID NO: 126277 - DNA, 15 bp, Homo sapiens
cagagaactcaaagt

SEQ ID NO: 126278 - DNA, 15 bp, Homo sapiens
tcagagaactcaaag

SEQ ID NO: 126279 - DNA, 15 bp, Homo sapiens
ttcagagaactcaaa

SEQ ID NO: 126280 - DNA, 15 bp, Homo sapiens
gttcagagaactcaa

SEQ ID NO: 126281 - DNA, 15 bp, Homo sapiens
tgttcagagaactca

SEQ ID NO: 126282 - DNA, 15 bp, Homo sapiens
atgttcagagaactc

SEQ ID NO: 126283 - DNA, 15 bp, Homo sapiens
aatgttcagagaact

SEQ ID NO: 126284 - DNA, 15 bp, Homo sapiens
gaatgttcagagaac

SEQ ID NO: 126285 - DNA, 15 bp, Homo sapiens
agaatgttcagagaa

SEQ ID NO: 126286 - DNA, 15 bp, Homo sapiens
gagaatgttcagaga

SEQ ID NO: 126287 - DNA, 15 bp, Homo sapiens
cgagaatgttcagag

SEQ ID NO: 126288 - DNA, 15 bp, Homo sapiens
acgagaatgttcaga

SEQ ID NO: 126289 - DNA, 15 bp, Homo sapiens
cacgagaatgttcag

SEQ ID NO: 126290 - DNA, 15 bp, Homo sapiens
gcacgagaatgttca

SEQ ID NO: 126291 - DNA, 15 bp, Homo sapiens
agcacgagaatgttc

SEQ ID NO: 126292 - DNA, 15 bp, Homo sapiens
aagcacgagaatgtt

SEQ ID NO: 126293 - DNA, 15 bp, Homo sapiens
taagcacgagaatgt

SEQ ID NO: 126294 - DNA, 15 bp, Homo sapiens
ataagcacgagaatg

SEQ ID NO: 126295 - DNA, 15 bp, Homo sapiens
aataagcacgagaat

SEQ ID NO: 126296 - DNA, 15 bp, Homo sapiens
aaataagcacgagaa

SEQ ID NO: 126297 - DNA, 15 bp, Homo sapiens
aaaataagcacgaga

SEQ ID NO: 126298 - DNA, 15 bp, Homo sapiens
caaaataagcacgag

SEQ ID NO: 126299 - DNA, 15 bp, Homo sapiens
gcaaaataagcacga

SEQ ID NO: 126300 - DNA, 15 bp, Homo sapiens
agcaaaataagcacg

SEQ ID NO: 126301 - DNA, 15 bp, Homo sapiens
aagcaaaataagcac

SEQ ID NO: 126302 - DNA, 15 bp, Homo sapiens
gaagcaaaataagca

SEQ ID NO: 126303 - DNA, 15 bp, Homo sapiens
agaagcaaaataagc

SEQ ID NO: 126304 - DNA, 15 bp, Homo sapiens
tagaagcaaaataag

SEQ ID NO: 126305 - DNA, 15 bp, Homo sapiens
ctagaagcaaaataa

SEQ ID NO: 126306 - DNA, 15 bp, Homo sapiens
tctagaagcaaaata

SEQ ID NO: 126307 - DNA, 15 bp, Homo sapiens
gtctagaagcaaaat

SEQ ID NO: 126308 - DNA, 15 bp, Homo sapiens
tgtctagaagcaaaa

SEQ ID NO: 126309 - DNA, 15 bp, Homo sapiens
atgtctagaagcaaa

SEQ ID NO: 126310 - DNA, 15 bp, Homo sapiens
tatgtctagaagcaa

SEQ ID NO: 126311 - DNA, 15 bp, Homo sapiens
atatgtctagaagca

SEQ ID NO: 126312 - DNA, 15 bp, Homo sapiens
catatgtctagaagc

SEQ ID NO: 126313 - DNA, 15 bp, Homo sapiens
acatatgtctagaag

SEQ ID NO: 126314 - DNA, 15 bp, Homo sapiens
tacatatgtctagaa

SEQ ID NO: 126315 - DNA, 15 bp, Homo sapiens
gtacatatgtctaga

SEQ ID NO: 126316 - DNA, 15 bp, Homo sapiens
tgtacatatgtctag

SEQ ID NO: 126317 - DNA, 15 bp, Homo sapiens
ctgtacatatgtcta

SEQ ID NO: 126318 - DNA, 15 bp, Homo sapiens
cctgtacatatgtct

SEQ ID NO: 126319 - DNA, 15 bp, Homo sapiens
acctgtacatatgtc

SEQ ID NO: 126320 - DNA, 15 bp, Homo sapiens
aacctgtacatatgt

SEQ ID NO: 126321 - DNA, 15 bp, Homo sapiens
aaacctgtacatatg

SEQ ID NO: 126322 - DNA, 15 bp, Homo sapiens
taaacctgtacatat

SEQ ID NO: 126323 - DNA, 15 bp, Homo sapiens
gtaaacctgtacata

SEQ ID NO: 126324 - DNA, 15 bp, Homo sapiens
agtaaacctgtacat

SEQ ID NO: 126325 - DNA, 15 bp, Homo sapiens
gagtaaacctgtaca

SEQ ID NO: 126326 - DNA, 15 bp, Homo sapiens
agagtaaacctgtac

SEQ ID NO: 126327 - DNA, 15 bp, Homo sapiens
cagagtaaacctgta

SEQ ID NO: 126328 - DNA, 15 bp, Homo sapiens
gcagagtaaacctgt

SEQ ID NO: 126329 - DNA, 15 bp, Homo sapiens
ggcagagtaaacctg

SEQ ID NO: 126330 - DNA, 15 bp, Homo sapiens
aggcagagtaaacct

SEQ ID NO: 126331 - DNA, 15 bp, Homo sapiens
caggcagagtaaacc

SEQ ID NO: 126332 - DNA, 15 bp, Homo sapiens
ccaggcagagtaaac

SEQ ID NO: 126333 - DNA, 15 bp, Homo sapiens
tccaggcagagtaaa

SEQ ID NO: 126334 - DNA, 15 bp, Homo sapiens
ttccaggcagagtaa

SEQ ID NO: 126335 - DNA, 15 bp, Homo sapiens
attccaggcagagta

SEQ ID NO: 126336 - DNA, 15 bp, Homo sapiens
cattccaggcagagt

SEQ ID NO: 126337 - DNA, 15 bp, Homo sapiens
gcattccaggcagag

SEQ ID NO: 126338 - DNA, 15 bp, Homo sapiens
agcattccaggcaga

SEQ ID NO: 126339 - DNA, 15 bp, Homo sapiens
aagcattccaggcag

SEQ ID NO: 126340 - DNA, 15 bp, Homo sapiens
aaagcattccaggca

SEQ ID NO: 126341 - DNA, 15 bp, Homo sapiens
aaaagcattccaggc

SEQ ID NO: 126342 - DNA, 15 bp, Homo sapiens
aaaaagcattccagg

SEQ ID NO: 126343 - DNA, 15 bp, Homo sapiens
gaaaaagcattccag

SEQ ID NO: 126344 - DNA, 15 bp, Homo sapiens
agaaaaagcattcca

SEQ ID NO: 126345 - DNA, 15 bp, Homo sapiens
gagaaaaagcattcc

SEQ ID NO: 126346 - DNA, 15 bp, Homo sapiens
ggagaaaaagcattc

SEQ ID NO: 126347 - DNA, 15 bp, Homo sapiens
aggagaaaaagcatt

SEQ ID NO: 126348 - DNA, 15 bp, Homo sapiens
gaggagaaaaagcat

SEQ ID NO: 126349 - DNA, 15 bp, Homo sapiens
ggaggagaaaaagca

SEQ ID NO: 126350 - DNA, 15 bp, Homo sapiens
tggaggagaaaaagc

SEQ ID NO: 126351 - DNA, 15 bp, Homo sapiens
gtggaggagaaaaag

SEQ ID NO: 126352 - DNA, 15 bp, Homo sapiens
tgtggaggagaaaaa

SEQ ID NO: 126353 - DNA, 15 bp, Homo sapiens
atgtggaggagaaaa

SEQ ID NO: 126354 - DNA, 15 bp, Homo sapiens
catgtggaggagaaa

SEQ ID NO: 126355 - DNA, 15 bp, Homo sapiens
acatgtggaggagaa

SEQ ID NO: 126356 - DNA, 15 bp, Homo sapiens
gacatgtggaggaga

SEQ ID NO: 126357 - DNA, 15 bp, Homo sapiens
tgacatgtggaggag

SEQ ID NO: 126358 - DNA, 15 bp, Homo sapiens
gtgacatgtggagga

SEQ ID NO: 126359 - DNA, 15 bp, Homo sapiens
ggtgacatgtggagg

SEQ ID NO: 126360 - DNA, 15 bp, Homo sapiens
aggtgacatgtggag

SEQ ID NO: 126361 - DNA, 15 bp, Homo sapiens
gaggtgacatgtgga

SEQ ID NO: 126362 - DNA, 15 bp, Homo sapiens
tgaggtgacatgtgg

SEQ ID NO: 126363 - DNA, 15 bp, Homo sapiens
atgaggtgacatgtg

SEQ ID NO: 126364 - DNA, 15 bp, Homo sapiens
aatgaggtgacatgt

SEQ ID NO: 126365 - DNA, 15 bp, Homo sapiens
aaatgaggtgacatg

SEQ ID NO: 126366 - DNA, 15 bp, Homo sapiens
aaaatgaggtgacat

SEQ ID NO: 126367 - DNA, 15 bp, Homo sapiens
caaaatgaggtgaca

SEQ ID NO: 126368 - DNA, 15 bp, Homo sapiens
tcaaaatgaggtgac

SEQ ID NO: 126369 - DNA, 15 bp, Homo sapiens
gtcaaaatgaggtga

SEQ ID NO: 126370 - DNA, 15 bp, Homo sapiens
ggtcaaaatgaggtg

SEQ ID NO: 126371 - DNA, 15 bp, Homo sapiens
aggtcaaaatgaggt

SEQ ID NO: 126372 - DNA, 15 bp, Homo sapiens
aaggtcaaaatgagg

SEQ ID NO: 126373 - DNA, 15 bp, Homo sapiens
taaggtcaaaatgag

SEQ ID NO: 126374 - DNA, 15 bp, Homo sapiens
ataaggtcaaaatga

SEQ ID NO: 126375 - DNA, 15 bp, Homo sapiens
aataaggtcaaaatg

SEQ ID NO: 126376 - DNA, 15 bp, Homo sapiens
gaataaggtcaaaat

SEQ ID NO: 126377 - DNA, 15 bp, Homo sapiens
ggaataaggtcaaaa

SEQ ID NO: 126378 - DNA, 15 bp, Homo sapiens
aggaataaggtcaaa

SEQ ID NO: 126379 - DNA, 15 bp, Homo sapiens
aaggaataaggtcaa

SEQ ID NO: 126380 - DNA, 15 bp, Homo sapiens
taaggaataaggtca

SEQ ID NO: 126381 - DNA, 15 bp, Homo sapiens
gtaaggaataaggtc

SEQ ID NO: 126382 - DNA, 15 bp, Homo sapiens
tgtaaggaataaggt

SEQ ID NO: 126383 - DNA, 15 bp, Homo sapiens
ttgtaaggaataagg

SEQ ID NO: 126384 - DNA, 15 bp, Homo sapiens
tttgtaaggaataag

SEQ ID NO: 126385 - DNA, 15 bp, Homo sapiens
ctttgtaaggaataa

SEQ ID NO: 126386 - DNA, 15 bp, Homo sapiens
gctttgtaaggaata

SEQ ID NO: 126387 - DNA, 15 bp, Homo sapiens
agctttgtaaggaat

SEQ ID NO: 126388 - DNA, 15 bp, Homo sapiens
aagctttgtaaggaa

SEQ ID NO: 126389 - DNA, 15 bp, Homo sapiens
aaagctttgtaagga

SEQ ID NO: 126390 - DNA, 15 bp, Homo sapiens
gaaagctttgtaagg

SEQ ID NO: 126391 - DNA, 15 bp, Homo sapiens
ggaaagctttgtaag

SEQ ID NO: 126392 - DNA, 15 bp, Homo sapiens
aggaaagctttgtaa

SEQ ID NO: 126393 - DNA, 15 bp, Homo sapiens
aaggaaagctttgta

SEQ ID NO: 126394 - DNA, 15 bp, Homo sapiens
caaggaaagctttgt

SEQ ID NO: 126395 - DNA, 15 bp, Homo sapiens
acaaggaaagctttg

SEQ ID NO: 126396 - DNA, 15 bp, Homo sapiens
cacaaggaaagcttt

SEQ ID NO: 126397 - DNA, 15 bp, Homo sapiens
acacaaggaaagctt

SEQ ID NO: 126398 - DNA, 15 bp, Homo sapiens
tacacaaggaaagct

SEQ ID NO: 126399 - DNA, 15 bp, Homo sapiens
gtacacaaggaaagc

SEQ ID NO: 126400 - DNA, 15 bp, Homo sapiens
agtacacaaggaaag

SEQ ID NO: 126401 - DNA, 15 bp, Homo sapiens
aagtacacaaggaaa

SEQ ID NO: 126402 - DNA, 15 bp, Homo sapiens
caagtacacaaggaa

SEQ ID NO: 126403 - DNA, 15 bp, Homo sapiens
gcaagtacacaagga

SEQ ID NO: 126404 - DNA, 15 bp, Homo sapiens
ggcaagtacacaagg

SEQ ID NO: 126405 - DNA, 15 bp, Homo sapiens
cggcaagtacacaag

SEQ ID NO: 126406 - DNA, 15 bp, Homo sapiens
tcggcaagtacacaa

SEQ ID NO: 126407 - DNA, 15 bp, Homo sapiens
ttcggcaagtacaca

SEQ ID NO: 126408 - DNA, 15 bp, Homo sapiens
cttcggcaagtacac

SEQ ID NO: 126409 - DNA, 15 bp, Homo sapiens
tcttcggcaagtaca

SEQ ID NO: 126410 - DNA, 15 bp, Homo sapiens
atcttcggcaagtac

SEQ ID NO: 126411 - DNA, 15 bp, Homo sapiens
gatcttcggcaagta

SEQ ID NO: 126412 - DNA, 15 bp, Homo sapiens
ggatcttcggcaagt

SEQ ID NO: 126413 - DNA, 15 bp, Homo sapiens
gggatcttcggcaag

SEQ ID NO: 126414 - DNA, 15 bp, Homo sapiens
ggggatcttcggcaa

SEQ ID NO: 126415 - DNA, 15 bp, Homo sapiens
tggggatcttcggca

SEQ ID NO: 126416 - DNA, 15 bp, Homo sapiens
gtggggatcttcggc

SEQ ID NO: 126417 - DNA, 15 bp, Homo sapiens
ggtggggatcttcgg

SEQ ID NO: 126418 - DNA, 15 bp, Homo sapiens
gggtggggatcttcg

SEQ ID NO: 126419 - DNA, 15 bp, Homo sapiens
ggggtggggatcttc

SEQ ID NO: 126420 - DNA, 15 bp, Homo sapiens
gggggtggggatctt

SEQ ID NO: 126421 - DNA, 15 bp, Homo sapiens
agggggtggggatct

SEQ ID NO: 126422 - DNA, 15 bp, Homo sapiens
aagggggtggggatc

SEQ ID NO: 126423 - DNA, 15 bp, Homo sapiens
caagggggtggggat

SEQ ID NO: 126424 - DNA, 15 bp, Homo sapiens
tcaagggggtgggga

SEQ ID NO: 126425 - DNA, 15 bp, Homo sapiens
gtcaagggggtgggg

SEQ ID NO: 126426 - DNA, 15 bp, Homo sapiens
agtcaagggggtggg

SEQ ID NO: 126427 - DNA, 15 bp, Homo sapiens
cagtcaagggggtgg

SEQ ID NO: 126428 - DNA, 15 bp, Homo sapiens
ccagtcaagggggtg

SEQ ID NO: 126429 - DNA, 15 bp, Homo sapiens
accagtcaagggggt

SEQ ID NO: 126430 - DNA, 15 bp, Homo sapiens
aaccagtcaaggggg

SEQ ID NO: 126431 - DNA, 15 bp, Homo sapiens
gaaccagtcaagggg

SEQ ID NO: 126432 - DNA, 15 bp, Homo sapiens
tgaaccagtcaaggg

SEQ ID NO: 126433 - DNA, 15 bp, Homo sapiens
ttgaaccagtcaagg

SEQ ID NO: 126434 - DNA, 15 bp, Homo sapiens
cttgaaccagtcaag

SEQ ID NO: 126435 - DNA, 15 bp, Homo sapiens
tcttgaaccagtcaa

SEQ ID NO: 126436 - DNA, 15 bp, Homo sapiens
ctcttgaaccagtca

SEQ ID NO: 126437 - DNA, 15 bp, Homo sapiens
gctcttgaaccagtc

SEQ ID NO: 126438 - DNA, 15 bp, Homo sapiens
ggctcttgaaccagt

SEQ ID NO: 126439 - DNA, 15 bp, Homo sapiens
aggctcttgaaccag

SEQ ID NO: 126440 - DNA, 15 bp, Homo sapiens
aaggctcttgaacca

SEQ ID NO: 126441 - DNA, 15 bp, Homo sapiens
gaaggctcttgaacc

SEQ ID NO: 126442 - DNA, 15 bp, Homo sapiens
ggaaggctcttgaac

SEQ ID NO: 126443 - DNA, 15 bp, Homo sapiens
gggaaggctcttgaa

SEQ ID NO: 126444 - DNA, 15 bp, Homo sapiens
ggggaaggctcttga

SEQ ID NO: 126445 - DNA, 15 bp, Homo sapiens
aggggaaggctcttg

SEQ ID NO: 126446 - DNA, 15 bp, Homo sapiens
aaggggaaggctctt

SEQ ID NO: 126447 - DNA, 15 bp, Homo sapiens
gaaggggaaggctct

SEQ ID NO: 126448 - DNA, 15 bp, Homo sapiens
agaaggggaaggctc

SEQ ID NO: 126449 - DNA, 15 bp, Homo sapiens
cagaaggggaaggct

SEQ ID NO: 126450 - DNA, 15 bp, Homo sapiens
acagaaggggaaggc

SEQ ID NO: 126451 - DNA, 15 bp, Homo sapiens
aacagaaggggaagg

SEQ ID NO: 126452 - DNA, 15 bp, Homo sapiens
aaacagaaggggaag

SEQ ID NO: 126453 - DNA, 15 bp, Homo sapiens
aaaacagaaggggaa

SEQ ID NO: 126454 - DNA, 15 bp, Homo sapiens
caaaacagaagggga

SEQ ID NO: 126455 - DNA, 15 bp, Homo sapiens
gcaaaacagaagggg

SEQ ID NO: 126456 - DNA, 15 bp, Homo sapiens
tgcaaaacagaaggg

SEQ ID NO: 126457 - DNA, 15 bp, Homo sapiens
ttgcaaaacagaagg

SEQ ID NO: 126458 - DNA, 15 bp, Homo sapiens
attgcaaaacagaag

SEQ ID NO: 126459 - DNA, 15 bp, Homo sapiens
cattgcaaaacagaa

SEQ ID NO: 126460 - DNA, 15 bp, Homo sapiens
acattgcaaaacaga

SEQ ID NO: 126461 - DNA, 15 bp, Homo sapiens
cacattgcaaaacag

SEQ ID NO: 126462 - DNA, 15 bp, Homo sapiens
gcacattgcaaaaca

SEQ ID NO: 126463 - DNA, 15 bp, Homo sapiens
agcacattgcaaaac

SEQ ID NO: 126464 - DNA, 15 bp, Homo sapiens
gagcacattgcaaaa

SEQ ID NO: 126465 - DNA, 15 bp, Homo sapiens
tgagcacattgcaaa

SEQ ID NO: 126466 - DNA, 15 bp, Homo sapiens
gtgagcacattgcaa

SEQ ID NO: 126467 - DNA, 15 bp, Homo sapiens
ggtgagcacattgca

SEQ ID NO: 126468 - DNA, 15 bp, Homo sapiens
gggtgagcacattgc

SEQ ID NO: 126469 - DNA, 15 bp, Homo sapiens
ggggtgagcacattg

SEQ ID NO: 126470 - DNA, 15 bp, Homo sapiens
aggggtgagcacatt

SEQ ID NO: 126471 - DNA, 15 bp, Homo sapiens
taggggtgagcacat

SEQ ID NO: 126472 - DNA, 15 bp, Homo sapiens
ctaggggtgagcaca

SEQ ID NO: 126473 - DNA, 15 bp, Homo sapiens
gctaggggtgagcac

SEQ ID NO: 126474 - DNA, 15 bp, Homo sapiens
tgctaggggtgagca

SEQ ID NO: 126475 - DNA, 15 bp, Homo sapiens
atgctaggggtgagc

SEQ ID NO: 126476 - DNA, 15 bp, Homo sapiens
tatgctaggggtgag

SEQ ID NO: 126477 - DNA, 15 bp, Homo sapiens
ctatgctaggggtga

SEQ ID NO: 126478 - DNA, 15 bp, Homo sapiens
gctatgctaggggtg

SEQ ID NO: 126479 - DNA, 15 bp, Homo sapiens
tgctatgctaggggt

SEQ ID NO: 126480 - DNA, 15 bp, Homo sapiens
gtgctatgctagggg

SEQ ID NO: 126481 - DNA, 15 bp, Homo sapiens
agtgctatgctaggg

SEQ ID NO: 126482 - DNA, 15 bp, Homo sapiens
aagtgctatgctagg

SEQ ID NO: 126483 - DNA, 15 bp, Homo sapiens
taagtgctatgctag

SEQ ID NO: 126484 - DNA, 15 bp, Homo sapiens
ttaagtgctatgcta

SEQ ID NO: 126485 - DNA, 15 bp, Homo sapiens
tttaagtgctatgct

SEQ ID NO: 126486 - DNA, 15 bp, Homo sapiens
gtttaagtgctatgc

SEQ ID NO: 126487 - DNA, 15 bp, Homo sapiens
tgtttaagtgctatg

SEQ ID NO: 126488 - DNA, 15 bp, Homo sapiens
atgtttaagtgctat

SEQ ID NO: 126489 - DNA, 15 bp, Homo sapiens
tatgtttaagtgcta

SEQ ID NO: 126490 - DNA, 15 bp, Homo sapiens
ctatgtttaagtgct

SEQ ID NO: 126491 - DNA, 15 bp, Homo sapiens
tctatgtttaagtgc

SEQ ID NO: 126492 - DNA, 15 bp, Homo sapiens
atctatgtttaagtg

SEQ ID NO: 126493 - DNA, 15 bp, Homo sapiens
catctatgtttaagt

SEQ ID NO: 126494 - DNA, 15 bp, Homo sapiens
acatctatgtttaag

SEQ ID NO: 126495 - DNA, 15 bp, Homo sapiens
aacatctatgtttaa

SEQ ID NO: 126496 - DNA, 15 bp, Homo sapiens
aaacatctatgttta

SEQ ID NO: 126497 - DNA, 15 bp, Homo sapiens
taaacatctatgttt

SEQ ID NO: 126498 - DNA, 15 bp, Homo sapiens
ataaacatctatgtt

SEQ ID NO: 126499 - DNA, 15 bp, Homo sapiens
aataaacatctatgt

SEQ ID NO: 126500 - DNA, 15 bp, Homo sapiens
aaataaacatctatg

SEQ ID NO: 126501 - DNA, 15 bp, Homo sapiens
caaataaacatctat

SEQ ID NO: 126502 - DNA, 15 bp, Homo sapiens
acaaataaacatcta

SEQ ID NO: 126503 - DNA, 15 bp, Homo sapiens
aacaaataaacatct

SEQ ID NO: 126504 - DNA, 15 bp, Homo sapiens
caacaaataaacatc

SEQ ID NO: 126505 - DNA, 15 bp, Homo sapiens
tcaacaaataaacat

SEQ ID NO: 126506 - DNA, 15 bp, Homo sapiens
atcaacaaataaaca

SEQ ID NO: 126507 - DNA, 15 bp, Homo sapiens
gatcaacaaataaac

SEQ ID NO: 126508 - DNA, 15 bp, Homo sapiens
agatcaacaaataaa

SEQ ID NO: 126509 - DNA, 15 bp, Homo sapiens
gagatcaacaaataa

SEQ ID NO: 126510 - DNA, 15 bp, Homo sapiens
ggagatcaacaaata

SEQ ID NO: 126511 - DNA, 15 bp, Homo sapiens
aggagatcaacaaat

SEQ ID NO: 126512 - DNA, 15 bp, Homo sapiens
gaggagatcaacaaa

SEQ ID NO: 126513 - DNA, 15 bp, Homo sapiens
tgaggagatcaacaa

SEQ ID NO: 126514 - DNA, 15 bp, Homo sapiens
ttgaggagatcaaca

SEQ ID NO: 126515 - DNA, 15 bp, Homo sapiens
gttgaggagatcaac

SEQ ID NO: 126516 - DNA, 15 bp, Homo sapiens
ggttgaggagatcaa

SEQ ID NO: 126517 - DNA, 15 bp, Homo sapiens
tggttgaggagatca

SEQ ID NO: 126518 - DNA, 15 bp, Homo sapiens
gtggttgaggagatc

SEQ ID NO: 126519 - DNA, 15 bp, Homo sapiens
tgtggttgaggagat

SEQ ID NO: 126520 - DNA, 15 bp, Homo sapiens
atgtggttgaggaga

SEQ ID NO: 126521 - DNA, 15 bp, Homo sapiens
aatgtggttgaggag

SEQ ID NO: 126522 - DNA, 15 bp, Homo sapiens
caatgtggttgagga

SEQ ID NO: 126523 - DNA, 15 bp, Homo sapiens
acaatgtggttgagg

SEQ ID NO: 126524 - DNA, 15 bp, Homo sapiens
tacaatgtggttgag

SEQ ID NO: 126525 - DNA, 15 bp, Homo sapiens
ttacaatgtggttga

SEQ ID NO: 126526 - DNA, 15 bp, Homo sapiens
cttacaatgtggttg

SEQ ID NO: 126527 - DNA, 15 bp, Homo sapiens
acttacaatgtggtt

SEQ ID NO: 126528 - DNA, 15 bp, Homo sapiens
aacttacaatgtggt

SEQ ID NO: 126529 - DNA, 15 bp, Homo sapiens
gaacttacaatgtgg

SEQ ID NO: 126530 - DNA, 15 bp, Homo sapiens
agaacttacaatgtg

SEQ ID NO: 126531 - DNA, 15 bp, Homo sapiens
aagaacttacaatgt

SEQ ID NO: 126532 - DNA, 15 bp, Homo sapiens
aaagaacttacaatg

SEQ ID NO: 126533 - DNA, 15 bp, Homo sapiens
caaagaacttacaat

SEQ ID NO: 126534 - DNA, 15 bp, Homo sapiens
tcaaagaacttacaa

SEQ ID NO: 126535 - DNA, 15 bp, Homo sapiens
ctcaaagaacttaca

SEQ ID NO: 126536 - DNA, 15 bp, Homo sapiens
cctcaaagaacttac

SEQ ID NO: 126537 - DNA, 15 bp, Homo sapiens
ccctcaaagaactta

SEQ ID NO: 126538 - DNA, 15 bp, Homo sapiens
gccctcaaagaactt

SEQ ID NO: 126539 - DNA, 15 bp, Homo sapiens
tgccctcaaagaact

SEQ ID NO: 126540 - DNA, 15 bp, Homo sapiens
ctgccctcaaagaac

SEQ ID NO: 126541 - DNA, 15 bp, Homo sapiens
cctgccctcaaagaa

SEQ ID NO: 126542 - DNA, 15 bp, Homo sapiens
ccctgccctcaaaga

SEQ ID NO: 126543 - DNA, 15 bp, Homo sapiens
tccctgccctcaaag

SEQ ID NO: 126544 - DNA, 15 bp, Homo sapiens
ctccctgccctcaaa

SEQ ID NO: 126545 - DNA, 15 bp, Homo sapiens
tctccctgccctcaa

SEQ ID NO: 126546 - DNA, 15 bp, Homo sapiens
ctctccctgccctca

SEQ ID NO: 126547 - DNA, 15 bp, Homo sapiens
gctctccctgccctc

SEQ ID NO: 126548 - DNA, 15 bp, Homo sapiens
agctctccctgccct

SEQ ID NO: 126549 - DNA, 15 bp, Homo sapiens
cagctctccctgccc

SEQ ID NO: 126550 - DNA, 15 bp, Homo sapiens
ccagctctccctgcc

SEQ ID NO: 126551 - DNA, 15 bp, Homo sapiens
accagctctccctgc

SEQ ID NO: 126552 - DNA, 15 bp, Homo sapiens
caccagctctccctg

SEQ ID NO: 126553 - DNA, 15 bp, Homo sapiens
tcaccagctctccct

SEQ ID NO: 126554 - DNA, 15 bp, Homo sapiens
ctcaccagctctccc

SEQ ID NO: 126555 - DNA, 15 bp, Homo sapiens
tctcaccagctctcc

SEQ ID NO: 126556 - DNA, 15 bp, Homo sapiens
ttctcaccagctctc

SEQ ID NO: 126557 - DNA, 15 bp, Homo sapiens
gttctcaccagctct

SEQ ID NO: 126558 - DNA, 15 bp, Homo sapiens
agttctcaccagctc

SEQ ID NO: 126559 - DNA, 15 bp, Homo sapiens
cagttctcaccagct

SEQ ID NO: 126560 - DNA, 15 bp, Homo sapiens
acagttctcaccagc

SEQ ID NO: 126561 - DNA, 15 bp, Homo sapiens
aacagttctcaccag

SEQ ID NO: 126562 - DNA, 15 bp, Homo sapiens
aaacagttctcacca

SEQ ID NO: 126563 - DNA, 15 bp, Homo sapiens
taaacagttctcacc

SEQ ID NO: 126564 - DNA, 15 bp, Homo sapiens
ataaacagttctcac

SEQ ID NO: 126565 - DNA, 15 bp, Homo sapiens
cataaacagttctca

SEQ ID NO: 126566 - DNA, 15 bp, Homo sapiens
ccataaacagttctc

SEQ ID NO: 126567 - DNA, 15 bp, Homo sapiens
tccataaacagttct

SEQ ID NO: 126568 - DNA, 15 bp, Homo sapiens
ttccataaacagttc

SEQ ID NO: 126569 - DNA, 15 bp, Homo sapiens
tttccataaacagtt

SEQ ID NO: 126570 - DNA, 15 bp, Homo sapiens
ttttccataaacagt

SEQ ID NO: 126571 - DNA, 15 bp, Homo sapiens
tttttccataaacag

SEQ ID NO: 126572 - DNA, 15 bp, Homo sapiens
ttttttccataaaca

SEQ ID NO: 126573 - DNA, 15 bp, Homo sapiens
tttttttccataaac

SEQ ID NO: 126574 - DNA, 15 bp, Homo sapiens
atttttttccataaa

SEQ ID NO: 126575 - DNA, 15 bp, Homo sapiens
catttttttccataa

SEQ ID NO: 126576 - DNA, 15 bp, Homo sapiens
acatttttttccata

SEQ ID NO: 126577 - DNA, 15 bp, Homo sapiens
aacatttttttccat

SEQ ID NO: 126578 - DNA, 15 bp, Homo sapiens
caacatttttttcca

SEQ ID NO: 126579 - DNA, 15 bp, Homo sapiens
acaacatttttttcc

SEQ ID NO: 126580 - DNA, 15 bp, Homo sapiens
cacaacatttttttc

SEQ ID NO: 126581 - DNA, 15 bp, Homo sapiens
ccacaacattttttt

SEQ ID NO: 126582 - DNA, 15 bp, Homo sapiens
tccacaacatttttt

SEQ ID NO: 126583 - DNA, 15 bp, Homo sapiens
gtccacaacattttt

SEQ ID NO: 126584 - DNA, 15 bp, Homo sapiens
agtccacaacatttt

SEQ ID NO: 126585 - DNA, 15 bp, Homo sapiens
gagtccacaacattt

SEQ ID NO: 126586 - DNA, 15 bp, Homo sapiens
tgagtccacaacatt

SEQ ID NO: 126587 - DNA, 15 bp, Homo sapiens
atgagtccacaacat

SEQ ID NO: 126588 - DNA, 15 bp, Homo sapiens
catgagtccacaaca

SEQ ID NO: 126589 - DNA, 15 bp, Homo sapiens
ccatgagtccacaac

SEQ ID NO: 126590 - DNA, 15 bp, Homo sapiens
tccatgagtccacaa

SEQ ID NO: 126591 - DNA, 15 bp, Homo sapiens
atccatgagtccaca

SEQ ID NO: 126592 - DNA, 15 bp, Homo sapiens
aatccatgagtccac

SEQ ID NO: 126593 - DNA, 15 bp, Homo sapiens
taatccatgagtcca

SEQ ID NO: 126594 - DNA, 15 bp, Homo sapiens
ttaatccatgagtcc

SEQ ID NO: 126595 - DNA, 15 bp, Homo sapiens
tttaatccatgagtc

SEQ ID NO: 126596 - DNA, 15 bp, Homo sapiens
ttttaatccatgagt

SEQ ID NO: 126597 - DNA, 15 bp, Homo sapiens
cttttaatccatgag

SEQ ID NO: 126598 - DNA, 15 bp, Homo sapiens
gcttttaatccatga

SEQ ID NO: 126599 - DNA, 15 bp, Homo sapiens
tgcttttaatccatg

SEQ ID NO: 126600 - DNA, 15 bp, Homo sapiens
ttgcttttaatccat

SEQ ID NO: 126601 - DNA, 15 bp, Homo sapiens
tttgcttttaatcca

SEQ ID NO: 126602 - DNA, 15 bp, Homo sapiens
ctttgcttttaatcc

SEQ ID NO: 126603 - DNA, 15 bp, Homo sapiens
cctttgcttttaatc

SEQ ID NO: 126604 - DNA, 15 bp, Homo sapiens
acctttgcttttaat

SEQ ID NO: 126605 - DNA, 15 bp, Homo sapiens
cacctttgcttttaa

SEQ ID NO: 126606 - DNA, 15 bp, Homo sapiens
gcacctttgctttta

SEQ ID NO: 126607 - DNA, 15 bp, Homo sapiens
ggcacctttgctttt

SEQ ID NO: 126608 - DNA, 15 bp, Homo sapiens
tggcacctttgcttt

SEQ ID NO: 126609 - DNA, 15 bp, Homo sapiens
atggcacctttgctt

SEQ ID NO: 126610 - DNA, 15 bp, Homo sapiens
aatggcacctttgct

SEQ ID NO: 126611 - DNA, 15 bp, Homo sapiens
aaatggcacctttgc

SEQ ID NO: 126612 - DNA, 15 bp, Homo sapiens
aaaatggcacctttg

SEQ ID NO: 126613 - DNA, 15 bp, Homo sapiens
taaaatggcaccttt

SEQ ID NO: 126614 - DNA, 15 bp, Homo sapiens
gtaaaatggcacctt

SEQ ID NO: 126615 - DNA, 15 bp, Homo sapiens
tgtaaaatggcacct

SEQ ID NO: 126616 - DNA, 15 bp, Homo sapiens
ttgtaaaatggcacc

SEQ ID NO: 126617 - DNA, 15 bp, Homo sapiens
tttgtaaaatggcac

SEQ ID NO: 126618 - DNA, 15 bp, Homo sapiens
ctttgtaaaatggca

SEQ ID NO: 126619 - DNA, 15 bp, Homo sapiens
tctttgtaaaatggc

SEQ ID NO: 126620 - DNA, 15 bp, Homo sapiens
ctctttgtaaaatgg

SEQ ID NO: 126621 - DNA, 15 bp, Homo sapiens
cctctttgtaaaatg

SEQ ID NO: 126622 - DNA, 15 bp, Homo sapiens
tcctctttgtaaaat

SEQ ID NO: 126623 - DNA, 15 bp, Homo sapiens
gtcctctttgtaaaa

SEQ ID NO: 126624 - DNA, 15 bp, Homo sapiens
agtcctctttgtaaa

SEQ ID NO: 126625 - DNA, 15 bp, Homo sapiens
tagtcctctttgtaa

SEQ ID NO: 126626 - DNA, 15 bp, Homo sapiens
atagtcctctttgta

SEQ ID NO: 126627 - DNA, 15 bp, Homo sapiens
tatagtcctctttgt

SEQ ID NO: 126628 - DNA, 15 bp, Homo sapiens
ttatagtcctctttg

SEQ ID NO: 126629 - DNA, 15 bp, Homo sapiens
gttatagtcctcttt

SEQ ID NO: 126630 - DNA, 15 bp, Homo sapiens
cgttatagtcctctt

SEQ ID NO: 126631 - DNA, 15 bp, Homo sapiens
ccgttatagtcctct

SEQ ID NO: 126632 - DNA, 15 bp, Homo sapiens
gccgttatagtcctc

SEQ ID NO: 126633 - DNA, 15 bp, Homo sapiens
tgccgttatagtcct

SEQ ID NO: 126634 - DNA, 15 bp, Homo sapiens
ttgccgttatagtcc

SEQ ID NO: 126635 - DNA, 15 bp, Homo sapiens
cttgccgttatagtc

SEQ ID NO: 126636 - DNA, 15 bp, Homo sapiens
acttgccgttatagt

SEQ ID NO: 126637 - DNA, 15 bp, Homo sapiens
cacttgccgttatag

SEQ ID NO: 126638 - DNA, 15 bp, Homo sapiens
ccacttgccgttata

SEQ ID NO: 126639 - DNA, 15 bp, Homo sapiens
tccacttgccgttat

SEQ ID NO: 126640 - DNA, 15 bp, Homo sapiens
atccacttgccgtta

SEQ ID NO: 126641 - DNA, 15 bp, Homo sapiens
aatccacttgccgtt

SEQ ID NO: 126642 - DNA, 15 bp, Homo sapiens
caatccacttgccgt

SEQ ID NO: 126643 - DNA, 15 bp, Homo sapiens
ccaatccacttgccg

SEQ ID NO: 126644 - DNA, 15 bp, Homo sapiens
tccaatccacttgcc

SEQ ID NO: 126645 - DNA, 15 bp, Homo sapiens
atccaatccacttgc

SEQ ID NO: 126646 - DNA, 15 bp, Homo sapiens
tatccaatccacttg

SEQ ID NO: 126647 - DNA, 15 bp, Homo sapiens
atatccaatccactt

SEQ ID NO: 126648 - DNA, 15 bp, Homo sapiens
catatccaatccact

SEQ ID NO: 126649 - DNA, 15 bp, Homo sapiens
acatatccaatccac

SEQ ID NO: 126650 - DNA, 15 bp, Homo sapiens
gacatatccaatcca

SEQ ID NO: 126651 - DNA, 15 bp, Homo sapiens
agacatatccaatcc

SEQ ID NO: 126652 - DNA, 15 bp, Homo sapiens
gagacatatccaatc

SEQ ID NO: 126653 - DNA, 15 bp, Homo sapiens
tgagacatatccaat

SEQ ID NO: 126654 - DNA, 15 bp, Homo sapiens
atgagacatatccaa

SEQ ID NO: 126655 - DNA, 15 bp, Homo sapiens
aatgagacatatcca

SEQ ID NO: 126656 - DNA, 15 bp, Homo sapiens
caatgagacatatcc

SEQ ID NO: 126657 - DNA, 15 bp, Homo sapiens
gcaatgagacatatc

SEQ ID NO: 126658 - DNA, 15 bp, Homo sapiens
ggcaatgagacatat

SEQ ID NO: 126659 - DNA, 15 bp, Homo sapiens
cggcaatgagacata

SEQ ID NO: 126660 - DNA, 15 bp, Homo sapiens
ccggcaatgagacat

SEQ ID NO: 126661 - DNA, 15 bp, Homo sapiens
cccggcaatgagaca

SEQ ID NO: 126662 - DNA, 15 bp, Homo sapiens
gcccggcaatgagac

SEQ ID NO: 126663 - DNA, 15 bp, Homo sapiens
tgcccggcaatgaga

SEQ ID NO: 126664 - DNA, 15 bp, Homo sapiens
ctgcccggcaatgag

SEQ ID NO: 126665 - DNA, 15 bp, Homo sapiens
gctgcccggcaatga

SEQ ID NO: 126666 - DNA, 15 bp, Homo sapiens
ggctgcccggcaatg

SEQ ID NO: 126667 - DNA, 15 bp, Homo sapiens
gggctgcccggcaat

SEQ ID NO: 126668 - DNA, 15 bp, Homo sapiens
tgggctgcccggcaa

SEQ ID NO: 126669 - DNA, 15 bp, Homo sapiens
atgggctgcccggca

SEQ ID NO: 126670 - DNA, 15 bp, Homo sapiens
aatgggctgcccggc

SEQ ID NO: 126671 - DNA, 15 bp, Homo sapiens
taatgggctgcccgg

SEQ ID NO: 126672 - DNA, 15 bp, Homo sapiens
ataatgggctgcccg

SEQ ID NO: 126673 - DNA, 15 bp, Homo sapiens
aataatgggctgccc

SEQ ID NO: 126674 - DNA, 15 bp, Homo sapiens
gaataatgggctgcc

SEQ ID NO: 126675 - DNA, 15 bp, Homo sapiens
ggaataatgggctgc

SEQ ID NO: 126676 - DNA, 15 bp, Homo sapiens
tggaataatgggctg

SEQ ID NO: 126677 - DNA, 15 bp, Homo sapiens
ctggaataatgggct

SEQ ID NO: 126678 - DNA, 15 bp, Homo sapiens
tctggaataatgggc

SEQ ID NO: 126679 - DNA, 15 bp, Homo sapiens
ttctggaataatggg

SEQ ID NO: 126680 - DNA, 15 bp, Homo sapiens
gttctggaataatgg

SEQ ID NO: 126681 - DNA, 15 bp, Homo sapiens
tgttctggaataatg

SEQ ID NO: 126682 - DNA, 15 bp, Homo sapiens
gtgttctggaataat

SEQ ID NO: 126683 - DNA, 15 bp, Homo sapiens
tgtgttctggaataa

SEQ ID NO: 126684 - DNA, 15 bp, Homo sapiens
ctgtgttctggaata

SEQ ID NO: 126685 - DNA, 15 bp, Homo sapiens
tctgtgttctggaat

SEQ ID NO: 126686 - DNA, 15 bp, Homo sapiens
ctctgtgttctggaa

SEQ ID NO: 126687 - DNA, 15 bp, Homo sapiens
actctgtgttctgga

SEQ ID NO: 126688 - DNA, 15 bp, Homo sapiens
tactctgtgttctgg

SEQ ID NO: 126689 - DNA, 15 bp, Homo sapiens
ttactctgtgttctg

SEQ ID NO: 126690 - DNA, 15 bp, Homo sapiens
gttactctgtgttct

SEQ ID NO: 126691 - DNA, 15 bp, Homo sapiens
agttactctgtgttc

SEQ ID NO: 126692 - DNA, 15 bp, Homo sapiens
aagttactctgtgtt

SEQ ID NO: 126693 - DNA, 15 bp, Homo sapiens
aaagttactctgtgt

SEQ ID NO: 126694 - DNA, 15 bp, Homo sapiens
aaaagttactctgtg

SEQ ID NO: 126695 - DNA, 15 bp, Homo sapiens
aaaaagttactctgt

SEQ ID NO: 126696 - DNA, 15 bp, Homo sapiens
aaaaaagttactctg

SEQ ID NO: 126697 - DNA, 15 bp, Homo sapiens
gaaaaaagttactct

SEQ ID NO: 126698 - DNA, 15 bp, Homo sapiens
agaaaaaagttactc

SEQ ID NO: 126699 - DNA, 15 bp, Homo sapiens
cagaaaaaagttact

SEQ ID NO: 126700 - DNA, 15 bp, Homo sapiens
ccagaaaaaagttac

SEQ ID NO: 126701 - DNA, 15 bp, Homo sapiens
cccagaaaaaagtta

SEQ ID NO: 126702 - DNA, 15 bp, Homo sapiens
ccccagaaaaaagtt

SEQ ID NO: 126703 - DNA, 15 bp, Homo sapiens
accccagaaaaaagt

SEQ ID NO: 126704 - DNA, 15 bp, Homo sapiens
gaccccagaaaaaag

SEQ ID NO: 126705 - DNA, 15 bp, Homo sapiens
ggaccccagaaaaaa

SEQ ID NO: 126706 - DNA, 15 bp, Homo sapiens
cggaccccagaaaaa

SEQ ID NO: 126707 - DNA, 15 bp, Homo sapiens
acggaccccagaaaa

SEQ ID NO: 126708 - DNA, 15 bp, Homo sapiens
tacggaccccagaaa

SEQ ID NO: 126709 - DNA, 15 bp, Homo sapiens
gtacggaccccagaa

SEQ ID NO: 126710 - DNA, 15 bp, Homo sapiens
agtacggaccccaga

SEQ ID NO: 126711 - DNA, 15 bp, Homo sapiens
tagtacggaccccag

SEQ ID NO: 126712 - DNA, 15 bp, Homo sapiens
ttagtacggacccca

SEQ ID NO: 126713 - DNA, 15 bp, Homo sapiens
tttagtacggacccc

SEQ ID NO: 126714 - DNA, 15 bp, Homo sapiens
ctttagtacggaccc

SEQ ID NO: 126715 - DNA, 15 bp, Homo sapiens
cctttagtacggacc

SEQ ID NO: 126716 - DNA, 15 bp, Homo sapiens
gcctttagtacggac

SEQ ID NO: 126717 - DNA, 15 bp, Homo sapiens
ggcctttagtacgga

SEQ ID NO: 126718 - DNA, 15 bp, Homo sapiens
tggcctttagtacgg

SEQ ID NO: 126719 - DNA, 15 bp, Homo sapiens
atggcctttagtacg

SEQ ID NO: 126720 - DNA, 15 bp, Homo sapiens
gatggcctttagtac

SEQ ID NO: 126721 - DNA, 15 bp, Homo sapiens
tgatggcctttagta

SEQ ID NO: 126722 - DNA, 15 bp, Homo sapiens
atgatggcctttagt

SEQ ID NO: 126723 - DNA, 15 bp, Homo sapiens
aatgatggcctttag

SEQ ID NO: 126724 - DNA, 15 bp, Homo sapiens
gaatgatggccttta

SEQ ID NO: 126725 - DNA, 15 bp, Homo sapiens
ggaatgatggccttt

SEQ ID NO: 126726 - DNA, 15 bp, Homo sapiens
tggaatgatggcctt

SEQ ID NO: 126727 - DNA, 15 bp, Homo sapiens
atggaatgatggcct

SEQ ID NO: 126728 - DNA, 15 bp, Homo sapiens
aatggaatgatggcc

SEQ ID NO: 126729 - DNA, 15 bp, Homo sapiens
gaatggaatgatggc

SEQ ID NO: 126730 - DNA, 15 bp, Homo sapiens
agaatggaatgatgg

SEQ ID NO: 126731 - DNA, 15 bp, Homo sapiens
aagaatggaatgatg

SEQ ID NO: 126732 - DNA, 15 bp, Homo sapiens
caagaatggaatgat

SEQ ID NO: 126733 - DNA, 15 bp, Homo sapiens
gcaagaatggaatga

SEQ ID NO: 126734 - DNA, 15 bp, Homo sapiens
ggcaagaatggaatg

SEQ ID NO: 126735 - DNA, 15 bp, Homo sapiens
aggcaagaatggaat

SEQ ID NO: 126736 - DNA, 15 bp, Homo sapiens
aaggcaagaatggaa

SEQ ID NO: 126737 - DNA, 15 bp, Homo sapiens
aaaggcaagaatgga

SEQ ID NO: 126738 - DNA, 15 bp, Homo sapiens
gaaaggcaagaatgg

SEQ ID NO: 126739 - DNA, 15 bp, Homo sapiens
agaaaggcaagaatg

SEQ ID NO: 126740 - DNA, 15 bp, Homo sapiens
aagaaaggcaagaat

SEQ ID NO: 126741 - DNA, 15 bp, Homo sapiens
gaagaaaggcaagaa

SEQ ID NO: 126742 - DNA, 15 bp, Homo sapiens
tgaagaaaggcaaga

SEQ ID NO: 126743 - DNA, 15 bp, Homo sapiens
atgaagaaaggcaag

SEQ ID NO: 126744 - DNA, 15 bp, Homo sapiens
aatgaagaaaggcaa

SEQ ID NO: 126745 - DNA, 15 bp, Homo sapiens
aaatgaagaaaggca

SEQ ID NO: 126746 - DNA, 15 bp, Homo sapiens
aaaatgaagaaaggc

SEQ ID NO: 126747 - DNA, 15 bp, Homo sapiens
taaaatgaagaaagg

SEQ ID NO: 126748 - DNA, 15 bp, Homo sapiens
ttaaaatgaagaaag

SEQ ID NO: 126749 - DNA, 15 bp, Homo sapiens
attaaaatgaagaaa

SEQ ID NO: 126750 - DNA, 15 bp, Homo sapiens
aattaaaatgaagaa

SEQ ID NO: 126751 - DNA, 15 bp, Homo sapiens
aaattaaaatgaaga

SEQ ID NO: 126752 - DNA, 15 bp, Homo sapiens
taaattaaaatgaag

SEQ ID NO: 126753 - DNA, 15 bp, Homo sapiens
gtaaattaaaatgaa

SEQ ID NO: 126754 - DNA, 15 bp, Homo sapiens
agtaaattaaaatga

SEQ ID NO: 126755 - DNA, 15 bp, Homo sapiens
tagtaaattaaaatg

SEQ ID NO: 126756 - DNA, 15 bp, Homo sapiens
atagtaaattaaaat

SEQ ID NO: 126757 - DNA, 15 bp, Homo sapiens
aatagtaaattaaaa

SEQ ID NO: 126758 - DNA, 15 bp, Homo sapiens
gaatagtaaattaaa

SEQ ID NO: 126759 - DNA, 15 bp, Homo sapiens
tgaatagtaaattaa

SEQ ID NO: 126760 - DNA, 15 bp, Homo sapiens
ctgaatagtaaatta

SEQ ID NO: 126761 - DNA, 15 bp, Homo sapiens
cctgaatagtaaatt

SEQ ID NO: 126762 - DNA, 15 bp, Homo sapiens
acctgaatagtaaat

SEQ ID NO: 126763 - DNA, 15 bp, Homo sapiens
gacctgaatagtaaa

SEQ ID NO: 126764 - DNA, 15 bp, Homo sapiens
agacctgaatagtaa

SEQ ID NO: 126765 - DNA, 15 bp, Homo sapiens
tagacctgaatagta

SEQ ID NO: 126766 - DNA, 15 bp, Homo sapiens
gtagacctgaatagt

SEQ ID NO: 126767 - DNA, 15 bp, Homo sapiens
agtagacctgaatag

SEQ ID NO: 126768 - DNA, 15 bp, Homo sapiens
gagtagacctgaata

SEQ ID NO: 126769 - DNA, 15 bp, Homo sapiens
cgagtagacctgaat

SEQ ID NO: 126770 - DNA, 15 bp, Homo sapiens
acgagtagacctgaa

SEQ ID NO: 126771 - DNA, 15 bp, Homo sapiens
cacgagtagacctga

SEQ ID NO: 126772 - DNA, 15 bp, Homo sapiens
tcacgagtagacctg

SEQ ID NO: 126773 - DNA, 15 bp, Homo sapiens
ttcacgagtagacct

SEQ ID NO: 126774 - DNA, 15 bp, Homo sapiens
cttcacgagtagacc

SEQ ID NO: 126775 - DNA, 15 bp, Homo sapiens
acttcacgagtagac

SEQ ID NO: 126776 - DNA, 15 bp, Homo sapiens
cacttcacgagtaga

SEQ ID NO: 126777 - DNA, 15 bp, Homo sapiens
gcacttcacgagtag

SEQ ID NO: 126778 - DNA, 15 bp, Homo sapiens
agcacttcacgagta

SEQ ID NO: 126779 - DNA, 15 bp, Homo sapiens
aagcacttcacgagt

SEQ ID NO: 126780 - DNA, 15 bp, Homo sapiens
taagcacttcacgag

SEQ ID NO: 126781 - DNA, 15 bp, Homo sapiens
ttaagcacttcacga

SEQ ID NO: 126782 - DNA, 15 bp, Homo sapiens
tttaagcacttcacg

SEQ ID NO: 126783 - DNA, 15 bp, Homo sapiens
atttaagcacttcac

SEQ ID NO: 126784 - DNA, 15 bp, Homo sapiens
aatttaagcacttca

SEQ ID NO: 126785 - DNA, 15 bp, Homo sapiens
taatttaagcacttc

SEQ ID NO: 126786 - DNA, 15 bp, Homo sapiens
ctaatttaagcactt

SEQ ID NO: 126787 - DNA, 15 bp, Homo sapiens
tctaatttaagcact

SEQ ID NO: 126788 - DNA, 15 bp, Homo sapiens
ctctaatttaagcac

SEQ ID NO: 126789 - DNA, 15 bp, Homo sapiens
actctaatttaagca

SEQ ID NO: 126790 - DNA, 15 bp, Homo sapiens
cactctaatttaagc

SEQ ID NO: 126791 - DNA, 15 bp, Homo sapiens
ccactctaatttaag

SEQ ID NO: 126792 - DNA, 15 bp, Homo sapiens
gccactctaatttaa

SEQ ID NO: 126793 - DNA, 15 bp, Homo sapiens
ggccactctaattta

SEQ ID NO: 126794 - DNA, 15 bp, Homo sapiens
gggccactctaattt

SEQ ID NO: 126795 - DNA, 15 bp, Homo sapiens
agggccactctaatt

SEQ ID NO: 126796 - DNA, 15 bp, Homo sapiens
aagggccactctaat

SEQ ID NO: 126797 - DNA, 15 bp, Homo sapiens
caagggccactctaa

SEQ ID NO: 126798 - DNA, 15 bp, Homo sapiens
ccaagggccactcta

SEQ ID NO: 126799 - DNA, 15 bp, Homo sapiens
cccaagggccactct

SEQ ID NO: 126800 - DNA, 15 bp, Homo sapiens
ccccaagggccactc

SEQ ID NO: 126801 - DNA, 15 bp, Homo sapiens
accccaagggccact

SEQ ID NO: 126802 - DNA, 15 bp, Homo sapiens
taccccaagggccac

SEQ ID NO: 126803 - DNA, 15 bp, Homo sapiens
gtaccccaagggcca

SEQ ID NO: 126804 - DNA, 15 bp, Homo sapiens
agtaccccaagggcc

SEQ ID NO: 126805 - DNA, 15 bp, Homo sapiens
gagtaccccaagggc

SEQ ID NO: 126806 - DNA, 15 bp, Homo sapiens
ggagtaccccaaggg

SEQ ID NO: 126807 - DNA, 15 bp, Homo sapiens
tggagtaccccaagg

SEQ ID NO: 126808 - DNA, 15 bp, Homo sapiens
ctggagtaccccaag

SEQ ID NO: 126809 - DNA, 15 bp, Homo sapiens
gctggagtaccccaa

SEQ ID NO: 126810 - DNA, 15 bp, Homo sapiens
tgctggagtacccca

SEQ ID NO: 126811 - DNA, 15 bp, Homo sapiens
ctgctggagtacccc

SEQ ID NO: 126812 - DNA, 15 bp, Homo sapiens
actgctggagtaccc

SEQ ID NO: 126813 - DNA, 15 bp, Homo sapiens
aactgctggagtacc

SEQ ID NO: 126814 - DNA, 15 bp, Homo sapiens
aaactgctggagtac

SEQ ID NO: 126815 - DNA, 15 bp, Homo sapiens
taaactgctggagta

SEQ ID NO: 126816 - DNA, 15 bp, Homo sapiens
ctaaactgctggagt

SEQ ID NO: 126817 - DNA, 15 bp, Homo sapiens
tctaaactgctggag

SEQ ID NO: 126818 - DNA, 15 bp, Homo sapiens
gtctaaactgctgga

SEQ ID NO: 126819 - DNA, 15 bp, Homo sapiens
tgtctaaactgctgg

SEQ ID NO: 126820 - DNA, 15 bp, Homo sapiens
atgtctaaactgctg

SEQ ID NO: 126821 - DNA, 15 bp, Homo sapiens
catgtctaaactgct

SEQ ID NO: 126822 - DNA, 15 bp, Homo sapiens
acatgtctaaactgc

SEQ ID NO: 126823 - DNA, 15 bp, Homo sapiens
aacatgtctaaactg

SEQ ID NO: 126824 - DNA, 15 bp, Homo sapiens
caacatgtctaaact

SEQ ID NO: 126825 - DNA, 15 bp, Homo sapiens
gcaacatgtctaaac

SEQ ID NO: 126826 - DNA, 15 bp, Homo sapiens
tgcaacatgtctaaa

SEQ ID NO: 126827 - DNA, 15 bp, Homo sapiens
ttgcaacatgtctaa

SEQ ID NO: 126828 - DNA, 15 bp, Homo sapiens
cttgcaacatgtcta

SEQ ID NO: 126829 - DNA, 15 bp, Homo sapiens
tcttgcaacatgtct

SEQ ID NO: 126830 - DNA, 15 bp, Homo sapiens
ttcttgcaacatgtc

SEQ ID NO: 126831 - DNA, 15 bp, Homo sapiens
tttcttgcaacatgt

SEQ ID NO: 126832 - DNA, 15 bp, Homo sapiens
ttttcttgcaacatg

SEQ ID NO: 126833 - DNA, 15 bp, Homo sapiens
cttttcttgcaacat

SEQ ID NO: 126834 - DNA, 15 bp, Homo sapiens
tcttttcttgcaaca

SEQ ID NO: 126835 - DNA, 15 bp, Homo sapiens
atcttttcttgcaac

SEQ ID NO: 126836 - DNA, 15 bp, Homo sapiens
tatcttttcttgcaa

SEQ ID NO: 126837 - DNA, 15 bp, Homo sapiens
atatcttttcttgca

SEQ ID NO: 126838 - DNA, 15 bp, Homo sapiens
aatatcttttcttgc

SEQ ID NO: 126839 - DNA, 15 bp, Homo sapiens
gaatatcttttcttg

SEQ ID NO: 126840 - DNA, 15 bp, Homo sapiens
cgaatatcttttctt

SEQ ID NO: 126841 - DNA, 15 bp, Homo sapiens
acgaatatcttttct

SEQ ID NO: 126842 - DNA, 15 bp, Homo sapiens
tacgaatatcttttc

SEQ ID NO: 126843 - DNA, 15 bp, Homo sapiens
ttacgaatatctttt

SEQ ID NO: 126844 - DNA, 15 bp, Homo sapiens
tttacgaatatcttt

SEQ ID NO: 126845 - DNA, 15 bp, Homo sapiens
atttacgaatatctt

SEQ ID NO: 126846 - DNA, 15 bp, Homo sapiens
tatttacgaatatct

SEQ ID NO: 126847 - DNA, 15 bp, Homo sapiens
ttatttacgaatatc

SEQ ID NO: 126848 - DNA, 15 bp, Homo sapiens
attatttacgaatat

SEQ ID NO: 126849 - DNA, 15 bp, Homo sapiens
aattatttacgaata

SEQ ID NO: 126850 - DNA, 15 bp, Homo sapiens
aaattatttacgaat

SEQ ID NO: 126851 - DNA, 15 bp, Homo sapiens
caaattatttacgaa

SEQ ID NO: 126852 - DNA, 15 bp, Homo sapiens
gcaaattatttacga

SEQ ID NO: 126853 - DNA, 15 bp, Homo sapiens
agcaaattatttacg

SEQ ID NO: 126854 - DNA, 15 bp, Homo sapiens
gagcaaattatttac

SEQ ID NO: 126855 - DNA, 15 bp, Homo sapiens
ggagcaaattattta

SEQ ID NO: 126856 - DNA, 15 bp, Homo sapiens
cggagcaaattattt

SEQ ID NO: 126857 - DNA, 15 bp, Homo sapiens
tcggagcaaattatt

SEQ ID NO: 126858 - DNA, 15 bp, Homo sapiens
ttcggagcaaattat

SEQ ID NO: 126859 - DNA, 15 bp, Homo sapiens
cttcggagcaaatta

SEQ ID NO: 126860 - DNA, 15 bp, Homo sapiens
acttcggagcaaatt

SEQ ID NO: 126861 - DNA, 15 bp, Homo sapiens
gacttcggagcaaat

SEQ ID NO: 126862 - DNA, 15 bp, Homo sapiens
tgacttcggagcaaa

SEQ ID NO: 126863 - DNA, 15 bp, Homo sapiens
ttgacttcggagcaa

SEQ ID NO: 126864 - DNA, 15 bp, Homo sapiens
attgacttcggagca

SEQ ID NO: 126865 - DNA, 15 bp, Homo sapiens
gattgacttcggagc

SEQ ID NO: 126866 - DNA, 15 bp, Homo sapiens
agattgacttcggag

SEQ ID NO: 126867 - DNA, 15 bp, Homo sapiens
tagattgacttcgga

SEQ ID NO: 126868 - DNA, 15 bp, Homo sapiens
ttagattgacttcgg

SEQ ID NO: 126869 - DNA, 15 bp, Homo sapiens
gttagattgacttcg

SEQ ID NO: 126870 - DNA, 15 bp, Homo sapiens
agttagattgacttc

SEQ ID NO: 126871 - DNA, 15 bp, Homo sapiens
tagttagattgactt

SEQ ID NO: 126872 - DNA, 15 bp, Homo sapiens
ttagttagattgact

SEQ ID NO: 126873 - DNA, 15 bp, Homo sapiens
tttagttagattgac

SEQ ID NO: 126874 - DNA, 15 bp, Homo sapiens
atttagttagattga

SEQ ID NO: 126875 - DNA, 15 bp, Homo sapiens
gatttagttagattg

SEQ ID NO: 126876 - DNA, 15 bp, Homo sapiens
agatttagttagatt

SEQ ID NO: 126877 - DNA, 15 bp, Homo sapiens
cagatttagttagat

SEQ ID NO: 126878 - DNA, 15 bp, Homo sapiens
acagatttagttaga

SEQ ID NO: 126879 - DNA, 15 bp, Homo sapiens
aacagatttagttag

SEQ ID NO: 126880 - DNA, 15 bp, Homo sapiens
taacagatttagtta

SEQ ID NO: 126881 - DNA, 15 bp, Homo sapiens
gtaacagatttagtt

SEQ ID NO: 126882 - DNA, 15 bp, Homo sapiens
tgtaacagatttagt

SEQ ID NO: 126883 - DNA, 15 bp, Homo sapiens
atgtaacagatttag

SEQ ID NO: 126884 - DNA, 15 bp, Homo sapiens
tatgtaacagattta

SEQ ID NO: 126885 - DNA, 15 bp, Homo sapiens
ctatgtaacagattt

SEQ ID NO: 126886 - DNA, 15 bp, Homo sapiens
cctatgtaacagatt

SEQ ID NO: 126887 - DNA, 15 bp, Homo sapiens
tcctatgtaacagat

SEQ ID NO: 126888 - DNA, 15 bp, Homo sapiens
atcctatgtaacaga

SEQ ID NO: 126889 - DNA, 15 bp, Homo sapiens
aatcctatgtaacag

SEQ ID NO: 126890 - DNA, 15 bp, Homo sapiens
aaatcctatgtaaca

SEQ ID NO: 126891 - DNA, 15 bp, Homo sapiens
aaaatcctatgtaac

SEQ ID NO: 126892 - DNA, 15 bp, Homo sapiens
taaaatcctatgtaa

SEQ ID NO: 126893 - DNA, 15 bp, Homo sapiens
ttaaaatcctatgta

SEQ ID NO: 126894 - DNA, 15 bp, Homo sapiens
tttaaaatcctatgt

SEQ ID NO: 126895 - DNA, 15 bp, Homo sapiens
ctttaaaatcctatg

SEQ ID NO: 126896 - DNA, 15 bp, Homo sapiens
gctttaaaatcctat

SEQ ID NO: 126897 - DNA, 15 bp, Homo sapiens
agctttaaaatccta

SEQ ID NO: 126898 - DNA, 15 bp, Homo sapiens
tagctttaaaatcct

SEQ ID NO: 126899 - DNA, 15 bp, Homo sapiens
atagctttaaaatcc

SEQ ID NO: 126900 - DNA, 15 bp, Homo sapiens
aatagctttaaaatc

SEQ ID NO: 126901 - DNA, 15 bp, Homo sapiens
aaatagctttaaaat

SEQ ID NO: 126902 - DNA, 15 bp, Homo sapiens
aaaatagctttaaaa

SEQ ID NO: 126903 - DNA, 15 bp, Homo sapiens
caaaatagctttaaa

SEQ ID NO: 126904 - DNA, 15 bp, Homo sapiens
ccaaaatagctttaa

SEQ ID NO: 126905 - DNA, 15 bp, Homo sapiens
accaaaatagcttta

SEQ ID NO: 126906 - DNA, 15 bp, Homo sapiens
caccaaaatagcttt

SEQ ID NO: 126907 - DNA, 15 bp, Homo sapiens
tcaccaaaatagctt

SEQ ID NO: 126908 - DNA, 15 bp, Homo sapiens
atcaccaaaatagct

SEQ ID NO: 126909 - DNA, 15 bp, Homo sapiens
tatcaccaaaatagc

SEQ ID NO: 126910 - DNA, 15 bp, Homo sapiens
atatcaccaaaatag

SEQ ID NO: 126911 - DNA, 15 bp, Homo sapiens
aatatcaccaaaata

SEQ ID NO: 126912 - DNA, 15 bp, Homo sapiens
aaatatcaccaaaat

SEQ ID NO: 126913 - DNA, 15 bp, Homo sapiens
caaatatcaccaaaa

SEQ ID NO: 126914 - DNA, 15 bp, Homo sapiens
tcaaatatcaccaaa

SEQ ID NO: 126915 - DNA, 15 bp, Homo sapiens
gtcaaatatcaccaa

SEQ ID NO: 126916 - DNA, 15 bp, Homo sapiens
ggtcaaatatcacca

SEQ ID NO: 126917 - DNA, 15 bp, Homo sapiens
gggtcaaatatcacc

SEQ ID NO: 126918 - DNA, 15 bp, Homo sapiens
tgggtcaaatatcac

SEQ ID NO: 126919 - DNA, 15 bp, Homo sapiens
ctgggtcaaatatca

SEQ ID NO: 126920 - DNA, 15 bp, Homo sapiens
tctgggtcaaatatc

SEQ ID NO: 126921 - DNA, 15 bp, Homo sapiens
ctctgggtcaaatat

SEQ ID NO: 126922 - DNA, 15 bp, Homo sapiens
cctctgggtcaaata

SEQ ID NO: 126923 - DNA, 15 bp, Homo sapiens
ccctctgggtcaaat

SEQ ID NO: 126924 - DNA, 15 bp, Homo sapiens
tccctctgggtcaaa

SEQ ID NO: 126925 - DNA, 15 bp, Homo sapiens
ttccctctgggtcaa

SEQ ID NO: 126926 - DNA, 15 bp, Homo sapiens
cttccctctgggtca

SEQ ID NO: 126927 - DNA, 15 bp, Homo sapiens
ccttccctctgggtc

SEQ ID NO: 126928 - DNA, 15 bp, Homo sapiens
cccttccctctgggt

SEQ ID NO: 126929 - DNA, 15 bp, Homo sapiens
acccttccctctggg

SEQ ID NO: 126930 - DNA, 15 bp, Homo sapiens
cacccttccctctgg

SEQ ID NO: 126931 - DNA, 15 bp, Homo sapiens
acacccttccctctg

SEQ ID NO: 126932 - DNA, 15 bp, Homo sapiens
tacacccttccctct

SEQ ID NO: 126933 - DNA, 15 bp, Homo sapiens
ctacacccttccctc

SEQ ID NO: 126934 - DNA, 15 bp, Homo sapiens
gctacacccttccct

SEQ ID NO: 126935 - DNA, 15 bp, Homo sapiens
tgctacacccttccc

SEQ ID NO: 126936 - DNA, 15 bp, Homo sapiens
atgctacacccttcc

SEQ ID NO: 126937 - DNA, 15 bp, Homo sapiens
aatgctacacccttc

SEQ ID NO: 126938 - DNA, 15 bp, Homo sapiens
gaatgctacaccctt

SEQ ID NO: 126939 - DNA, 15 bp, Homo sapiens
tgaatgctacaccct

SEQ ID NO: 126940 - DNA, 15 bp, Homo sapiens
atgaatgctacaccc

SEQ ID NO: 126941 - DNA, 15 bp, Homo sapiens
aatgaatgctacacc

SEQ ID NO: 126942 - DNA, 15 bp, Homo sapiens
gaatgaatgctacac

SEQ ID NO: 126943 - DNA, 15 bp, Homo sapiens
ggaatgaatgctaca

SEQ ID NO: 126944 - DNA, 15 bp, Homo sapiens
tggaatgaatgctac

SEQ ID NO: 126945 - DNA, 15 bp, Homo sapiens
atggaatgaatgcta

SEQ ID NO: 126946 - DNA, 15 bp, Homo sapiens
gatggaatgaatgct

SEQ ID NO: 126947 - DNA, 15 bp, Homo sapiens
tgatggaatgaatgc

SEQ ID NO: 126948 - DNA, 15 bp, Homo sapiens
gtgatggaatgaatg

SEQ ID NO: 126949 - DNA, 15 bp, Homo sapiens
tgtgatggaatgaat

SEQ ID NO: 126950 - DNA, 15 bp, Homo sapiens
atgtgatggaatgaa

SEQ ID NO: 126951 - DNA, 15 bp, Homo sapiens
catgtgatggaatga

SEQ ID NO: 126952 - DNA, 15 bp, Homo sapiens
ccatgtgatggaatg

SEQ ID NO: 126953 - DNA, 15 bp, Homo sapiens
accatgtgatggaat

SEQ ID NO: 126954 - DNA, 15 bp, Homo sapiens
taccatgtgatggaa

SEQ ID NO: 126955 - DNA, 15 bp, Homo sapiens
ataccatgtgatgga

SEQ ID NO: 126956 - DNA, 15 bp, Homo sapiens
aataccatgtgatgg

SEQ ID NO: 126957 - DNA, 15 bp, Homo sapiens
aaataccatgtgatg

SEQ ID NO: 126958 - DNA, 15 bp, Homo sapiens
aaaataccatgtgat

SEQ ID NO: 126959 - DNA, 15 bp, Homo sapiens
caaaataccatgtga

SEQ ID NO: 126960 - DNA, 15 bp, Homo sapiens
ccaaaataccatgtg

SEQ ID NO: 126961 - DNA, 15 bp, Homo sapiens
cccaaaataccatgt

SEQ ID NO: 126962 - DNA, 15 bp, Homo sapiens
tcccaaaataccatg

SEQ ID NO: 126963 - DNA, 15 bp, Homo sapiens
ttcccaaaataccat

SEQ ID NO: 126964 - DNA, 15 bp, Homo sapiens
tttcccaaaatacca

SEQ ID NO: 126965 - DNA, 15 bp, Homo sapiens
atttcccaaaatacc

SEQ ID NO: 126966 - DNA, 15 bp, Homo sapiens
tatttcccaaaatac

SEQ ID NO: 126967 - DNA, 15 bp, Homo sapiens
ttatttcccaaaata

SEQ ID NO: 126968 - DNA, 15 bp, Homo sapiens
attatttcccaaaat

SEQ ID NO: 126969 - DNA, 15 bp, Homo sapiens
tattatttcccaaaa

SEQ ID NO: 126970 - DNA, 15 bp, Homo sapiens
gtattatttcccaaa

SEQ ID NO: 126971 - DNA, 15 bp, Homo sapiens
tgtattatttcccaa

SEQ ID NO: 126972 - DNA, 15 bp, Homo sapiens
ctgtattatttccca

SEQ ID NO: 126973 - DNA, 15 bp, Homo sapiens
actgtattatttccc

SEQ ID NO: 126974 - DNA, 15 bp, Homo sapiens
aactgtattatttcc

SEQ ID NO: 126975 - DNA, 15 bp, Homo sapiens
taactgtattatttc

SEQ ID NO: 126976 - DNA, 15 bp, Homo sapiens
ttaactgtattattt

SEQ ID NO: 126977 - DNA, 15 bp, Homo sapiens
tttaactgtattatt

SEQ ID NO: 126978 - DNA, 15 bp, Homo sapiens
ctttaactgtattat

SEQ ID NO: 126979 - DNA, 15 bp, Homo sapiens
cctttaactgtatta

SEQ ID NO: 126980 - DNA, 15 bp, Homo sapiens
gcctttaactgtatt

SEQ ID NO: 126981 - DNA, 15 bp, Homo sapiens
agcctttaactgtat

SEQ ID NO: 126982 - DNA, 15 bp, Homo sapiens
aagcctttaactgta

SEQ ID NO: 126983 - DNA, 15 bp, Homo sapiens
aaagcctttaactgt

SEQ ID NO: 126984 - DNA, 15 bp, Homo sapiens
aaaagcctttaactg

SEQ ID NO: 126985 - DNA, 15 bp, Homo sapiens
caaaagcctttaact

SEQ ID NO: 126986 - DNA, 15 bp, Homo sapiens
acaaaagcctttaac

SEQ ID NO: 126987 - DNA, 15 bp, Homo sapiens
tacaaaagcctttaa

SEQ ID NO: 126988 - DNA, 15 bp, Homo sapiens
ttacaaaagccttta

SEQ ID NO: 126989 - DNA, 15 bp, Homo sapiens
gttacaaaagccttt

SEQ ID NO: 126990 - DNA, 15 bp, Homo sapiens
tgttacaaaagcctt

SEQ ID NO: 126991 - DNA, 15 bp, Homo sapiens
ttgttacaaaagcct

SEQ ID NO: 126992 - DNA, 15 bp, Homo sapiens
tttgttacaaaagcc

SEQ ID NO: 126993 - DNA, 15 bp, Homo sapiens
atttgttacaaaagc

SEQ ID NO: 126994 - DNA, 15 bp, Homo sapiens
tatttgttacaaaag

SEQ ID NO: 126995 - DNA, 15 bp, Homo sapiens
ttatttgttacaaaa

SEQ ID NO: 126996 - DNA, 15 bp, Homo sapiens
tttatttgttacaaa

SEQ ID NO: 126997 - DNA, 15 bp, Homo sapiens
ctttatttgttacaa

SEQ ID NO: 126998 - DNA, 15 bp, Homo sapiens
gctttatttgttaca

SEQ ID NO: 126999 - DNA, 15 bp, Homo sapiens
agctttatttgttac

SEQ ID NO: 127000 - DNA, 15 bp, Homo sapiens
aagctttatttgtta

SEQ ID NO: 127001 - DNA, 15 bp, Homo sapiens
caagctttatttgtt

SEQ ID NO: 127002 - DNA, 15 bp, Homo sapiens
acaagctttatttgt

SEQ ID NO: 127003 - DNA, 15 bp, Homo sapiens
aacaagctttatttg

SEQ ID NO: 127004 - DNA, 15 bp, Homo sapiens
caacaagctttattt

SEQ ID NO: 127005 - DNA, 15 bp, Homo sapiens
ccaacaagctttatt

SEQ ID NO: 127006 - DNA, 15 bp, Homo sapiens
tccaacaagctttat

SEQ ID NO: 127007 - DNA, 15 bp, Homo sapiens
ctccaacaagcttta

SEQ ID NO: 127008 - DNA, 15 bp, Homo sapiens
tctccaacaagcttt

SEQ ID NO: 127009 - DNA, 15 bp, Homo sapiens
ttctccaacaagctt

SEQ ID NO: 127010 - DNA, 15 bp, Homo sapiens
tttctccaacaagct

SEQ ID NO: 127011 - DNA, 15 bp, Homo sapiens
ttttctccaacaagc

SEQ ID NO: 127012 - DNA, 15 bp, Homo sapiens
tttttctccaacaag

SEQ ID NO: 127013 - DNA, 15 bp, Homo sapiens
gtttttctccaacaa

SEQ ID NO: 127014 - DNA, 15 bp, Homo sapiens
ggtttttctccaaca

SEQ ID NO: 127015 - DNA, 15 bp, Homo sapiens
gggtttttctccaac

SEQ ID NO: 127016 - DNA, 15 bp, Homo sapiens
tgggtttttctccaa

SEQ ID NO: 127017 - DNA, 15 bp, Homo sapiens
ttgggtttttctcca

SEQ ID NO: 127018 - DNA, 15 bp, Homo sapiens
gttgggtttttctcc

SEQ ID NO: 127019 - DNA, 15 bp, Homo sapiens
tgttgggtttttctc

SEQ ID NO: 127020 - DNA, 15 bp, Homo sapiens
atgttgggtttttct

SEQ ID NO: 127021 - DNA, 15 bp, Homo sapiens
catgttgggtttttc

SEQ ID NO: 127022 - DNA, 15 bp, Homo sapiens
gcatgttgggttttt

SEQ ID NO: 127023 - DNA, 15 bp, Homo sapiens
tgcatgttgggtttt

SEQ ID NO: 127024 - DNA, 15 bp, Homo sapiens
ctgcatgttgggttt

SEQ ID NO: 127025 - DNA, 15 bp, Homo sapiens
tctgcatgttgggtt

SEQ ID NO: 127026 - DNA, 15 bp, Homo sapiens
ttctgcatgttgggt

SEQ ID NO: 127027 - DNA, 15 bp, Homo sapiens
tttctgcatgttggg

SEQ ID NO: 127028 - DNA, 15 bp, Homo sapiens
atttctgcatgttgg

SEQ ID NO: 127029 - DNA, 15 bp, Homo sapiens
catttctgcatgttg

SEQ ID NO: 127030 - DNA, 15 bp, Homo sapiens
tcatttctgcatgtt

SEQ ID NO: 127031 - DNA, 15 bp, Homo sapiens
ttcatttctgcatgt

SEQ ID NO: 127032 - DNA, 15 bp, Homo sapiens
attcatttctgcatg

SEQ ID NO: 127033 - DNA, 15 bp, Homo sapiens
aattcatttctgcat

SEQ ID NO: 127034 - DNA, 15 bp, Homo sapiens
caattcatttctgca

SEQ ID NO: 127035 - DNA, 15 bp, Homo sapiens
gcaattcatttctgc

SEQ ID NO: 127036 - DNA, 15 bp, Homo sapiens
ggcaattcatttctg

SEQ ID NO: 127037 - DNA, 15 bp, Homo sapiens
tggcaattcatttct

SEQ ID NO: 127038 - DNA, 15 bp, Homo sapiens
ctggcaattcatttc

SEQ ID NO: 127039 - DNA, 15 bp, Homo sapiens
actggcaattcattt

SEQ ID NO: 127040 - DNA, 15 bp, Homo sapiens
aactggcaattcatt

SEQ ID NO: 127041 - DNA, 15 bp, Homo sapiens
taactggcaattcat

SEQ ID NO: 127042 - DNA, 15 bp, Homo sapiens
ataactggcaattca

SEQ ID NO: 127043 - DNA, 15 bp, Homo sapiens
aataactggcaattc

SEQ ID NO: 127044 - DNA, 15 bp, Homo sapiens
taataactggcaatt

SEQ ID NO: 127045 - DNA, 15 bp, Homo sapiens
ttaataactggcaat

SEQ ID NO: 127046 - DNA, 15 bp, Homo sapiens
attaataactggcaa

SEQ ID NO: 127047 - DNA, 15 bp, Homo sapiens
aattaataactggca

SEQ ID NO: 127048 - DNA, 15 bp, Homo sapiens
aaattaataactggc

SEQ ID NO: 127049 - DNA, 15 bp, Homo sapiens
caaattaataactgg

SEQ ID NO: 127050 - DNA, 15 bp, Homo sapiens
gcaaattaataactg

SEQ ID NO: 127051 - DNA, 15 bp, Homo sapiens
tgcaaattaataact

SEQ ID NO: 127052 - DNA, 15 bp, Homo sapiens
gtgcaaattaataac

SEQ ID NO: 127053 - DNA, 15 bp, Homo sapiens
tgtgcaaattaataa

SEQ ID NO: 127054 - DNA, 15 bp, Homo sapiens
ttgtgcaaattaata

SEQ ID NO: 127055 - DNA, 15 bp, Homo sapiens
attgtgcaaattaat

SEQ ID NO: 127056 - DNA, 15 bp, Homo sapiens
aattgtgcaaattaa

SEQ ID NO: 127057 - DNA, 15 bp, Homo sapiens
caattgtgcaaatta

SEQ ID NO: 127058 - DNA, 15 bp, Homo sapiens
acaattgtgcaaatt

SEQ ID NO: 127059 - DNA, 15 bp, Homo sapiens
aacaattgtgcaaat

SEQ ID NO: 127060 - DNA, 15 bp, Homo sapiens
aaacaattgtgcaaa

SEQ ID NO: 127061 - DNA, 15 bp, Homo sapiens
gaaacaattgtgcaa

SEQ ID NO: 127062 - DNA, 15 bp, Homo sapiens
agaaacaattgtgca

SEQ ID NO: 127063 - DNA, 15 bp, Homo sapiens
tagaaacaattgtgc

SEQ ID NO: 127064 - DNA, 15 bp, Homo sapiens
ctagaaacaattgtg

SEQ ID NO: 127065 - DNA, 15 bp, Homo sapiens
cctagaaacaattgt

SEQ ID NO: 127066 - DNA, 15 bp, Homo sapiens
acctagaaacaattg

SEQ ID NO: 127067 - DNA, 15 bp, Homo sapiens
aacctagaaacaatt

SEQ ID NO: 127068 - DNA, 15 bp, Homo sapiens
aaacctagaaacaat

SEQ ID NO: 127069 - DNA, 15 bp, Homo sapiens
gaaacctagaaacaa

SEQ ID NO: 127070 - DNA, 15 bp, Homo sapiens
ggaaacctagaaaca

SEQ ID NO: 127071 - DNA, 15 bp, Homo sapiens
gggaaacctagaaac

SEQ ID NO: 127072 - DNA, 15 bp, Homo sapiens
agggaaacctagaaa

SEQ ID NO: 127073 - DNA, 15 bp, Homo sapiens
tagggaaacctagaa

SEQ ID NO: 127074 - DNA, 15 bp, Homo sapiens
atagggaaacctaga

SEQ ID NO: 127075 - DNA, 15 bp, Homo sapiens
tatagggaaacctag

SEQ ID NO: 127076 - DNA, 15 bp, Homo sapiens
ttatagggaaaccta

SEQ ID NO: 127077 - DNA, 15 bp, Homo sapiens
gttatagggaaacct

SEQ ID NO: 127078 - DNA, 15 bp, Homo sapiens
agttatagggaaacc

SEQ ID NO: 127079 - DNA, 15 bp, Homo sapiens
aagttatagggaaac

SEQ ID NO: 127080 - DNA, 15 bp, Homo sapiens
caagttatagggaaa

SEQ ID NO: 127081 - DNA, 15 bp, Homo sapiens
acaagttatagggaa

SEQ ID NO: 127082 - DNA, 15 bp, Homo sapiens
cacaagttataggga

SEQ ID NO: 127083 - DNA, 15 bp, Homo sapiens
tcacaagttataggg

SEQ ID NO: 127084 - DNA, 15 bp, Homo sapiens
gtcacaagttatagg

SEQ ID NO: 127085 - DNA, 15 bp, Homo sapiens
tgtcacaagttatag

SEQ ID NO: 127086 - DNA, 15 bp, Homo sapiens
ttgtcacaagttata

SEQ ID NO: 127087 - DNA, 15 bp, Homo sapiens
cttgtcacaagttat

SEQ ID NO: 127088 - DNA, 15 bp, Homo sapiens
tcttgtcacaagtta

SEQ ID NO: 127089 - DNA, 15 bp, Homo sapiens
ttcttgtcacaagtt

SEQ ID NO: 127090 - DNA, 15 bp, Homo sapiens
cttcttgtcacaagt

SEQ ID NO: 127091 - DNA, 15 bp, Homo sapiens
acttcttgtcacaag

SEQ ID NO: 127092 - DNA, 15 bp, Homo sapiens
tacttcttgtcacaa

SEQ ID NO: 127093 - DNA, 15 bp, Homo sapiens
ctacttcttgtcaca

SEQ ID NO: 127094 - DNA, 15 bp, Homo sapiens
actacttcttgtcac

SEQ ID NO: 127095 - DNA, 15 bp, Homo sapiens
aactacttcttgtca

SEQ ID NO: 127096 - DNA, 15 bp, Homo sapiens
caactacttcttgtc

SEQ ID NO: 127097 - DNA, 15 bp, Homo sapiens
acaactacttcttgt

SEQ ID NO: 127098 - DNA, 15 bp, Homo sapiens
aacaactacttcttg

SEQ ID NO: 127099 - DNA, 15 bp, Homo sapiens
aaacaactacttctt

SEQ ID NO: 127100 - DNA, 15 bp, Homo sapiens
aaaacaactacttct

SEQ ID NO: 127101 - DNA, 15 bp, Homo sapiens
aaaaacaactacttc

SEQ ID NO: 127102 - DNA, 15 bp, Homo sapiens
aaaaaacaactactt

SEQ ID NO: 127103 - DNA, 15 bp, Homo sapiens
aaaaaaacaactact

SEQ ID NO: 127104 - DNA, 15 bp, Homo sapiens
aaaaaaaacaactac

SEQ ID NO: 127105 - DNA, 15 bp, Homo sapiens
aaaaaaaaacaacta

SEQ ID NO: 127106 - DNA, 15 bp, Homo sapiens
aaaaaaaaaacaact

SEQ ID NO: 127107 - DNA, 15 bp, Homo sapiens
gaaaaaaaaaacaac

SEQ ID NO: 127108 - DNA, 15 bp, Homo sapiens
ggaaaaaaaaaacaa

SEQ ID NO: 127109 - DNA, 15 bp, Homo sapiens
gggaaaaaaaaaaca

SEQ ID NO: 127110 - DNA, 15 bp, Homo sapiens
agggaaaaaaaaaac

SEQ ID NO: 127111 - DNA, 15 bp, Homo sapiens
gagggaaaaaaaaaa

SEQ ID NO: 127112 - DNA, 15 bp, Homo sapiens
agagggaaaaaaaaa

SEQ ID NO: 127113 - DNA, 15 bp, Homo sapiens
aagagggaaaaaaaa

SEQ ID NO: 127114 - DNA, 15 bp, Homo sapiens
taagagggaaaaaaa

SEQ ID NO: 127115 - DNA, 15 bp, Homo sapiens
ttaagagggaaaaaa

SEQ ID NO: 127116 - DNA, 15 bp, Homo sapiens
attaagagggaaaaa

SEQ ID NO: 127117 - DNA, 15 bp, Homo sapiens
tattaagagggaaaa

SEQ ID NO: 127118 - DNA, 15 bp, Homo sapiens
atattaagagggaaa

SEQ ID NO: 127119 - DNA, 15 bp, Homo sapiens
tatattaagagggaa

SEQ ID NO: 127120 - DNA, 15 bp, Homo sapiens
atatattaagaggga

SEQ ID NO: 127121 - DNA, 15 bp, Homo sapiens
tatatattaagaggg

SEQ ID NO: 127122 - DNA, 15 bp, Homo sapiens
atatatattaagagg

SEQ ID NO: 127123 - DNA, 15 bp, Homo sapiens
tatatatattaagag

SEQ ID NO: 127124 - DNA, 15 bp, Homo sapiens
atatatatattaaga

SEQ ID NO: 127125 - DNA, 15 bp, Homo sapiens
tatatatatattaag

SEQ ID NO: 127126 - DNA, 15 bp, Homo sapiens
atatatatatattaa

SEQ ID NO: 127127 - DNA, 15 bp, Homo sapiens
tatatatatatatta

SEQ ID NO: 127128 - DNA, 15 bp, Homo sapiens
atatatatatatatt

SEQ ID NO: 127129 - DNA, 15 bp, Homo sapiens
catatatatatatat

SEQ ID NO: 127130 - DNA, 15 bp, Homo sapiens
ccatatatatatata

SEQ ID NO: 127131 - DNA, 15 bp, Homo sapiens
cccatatatatatat

SEQ ID NO: 127132 - DNA, 15 bp, Homo sapiens
gcccatatatatata

SEQ ID NO: 127133 - DNA, 15 bp, Homo sapiens
agcccatatatatat

SEQ ID NO: 127134 - DNA, 15 bp, Homo sapiens
tagcccatatatata

SEQ ID NO: 127135 - DNA, 15 bp, Homo sapiens
ctagcccatatatat

SEQ ID NO: 127136 - DNA, 15 bp, Homo sapiens
cctagcccatatata

SEQ ID NO: 127137 - DNA, 15 bp, Homo sapiens
tcctagcccatatat

SEQ ID NO: 127138 - DNA, 15 bp, Homo sapiens
ctcctagcccatata

SEQ ID NO: 127139 - DNA, 15 bp, Homo sapiens
actcctagcccatat

SEQ ID NO: 127140 - DNA, 15 bp, Homo sapiens
tactcctagcccata

SEQ ID NO: 127141 - DNA, 15 bp, Homo sapiens
gtactcctagcccat

SEQ ID NO: 127142 - DNA, 15 bp, Homo sapiens
tgtactcctagccca

SEQ ID NO: 127143 - DNA, 15 bp, Homo sapiens
ctgtactcctagccc

SEQ ID NO: 127144 - DNA, 15 bp, Homo sapiens
tctgtactcctagcc

SEQ ID NO: 127145 - DNA, 15 bp, Homo sapiens
gtctgtactcctagc

SEQ ID NO: 127146 - DNA, 15 bp, Homo sapiens
tgtctgtactcctag

SEQ ID NO: 127147 - DNA, 15 bp, Homo sapiens
atgtctgtactccta

SEQ ID NO: 127148 - DNA, 15 bp, Homo sapiens
aatgtctgtactcct

SEQ ID NO: 127149 - DNA, 15 bp, Homo sapiens
aaatgtctgtactcc

SEQ ID NO: 127150 - DNA, 15 bp, Homo sapiens
taaatgtctgtactc

SEQ ID NO: 127151 - DNA, 15 bp, Homo sapiens
ctaaatgtctgtact

SEQ ID NO: 127152 - DNA, 15 bp, Homo sapiens
gctaaatgtctgtac

SEQ ID NO: 127153 - DNA, 15 bp, Homo sapiens
tgctaaatgtctgta

SEQ ID NO: 127154 - DNA, 15 bp, Homo sapiens
atgctaaatgtctgt

SEQ ID NO: 127155 - DNA, 15 bp, Homo sapiens
tatgctaaatgtctg

SEQ ID NO: 127156 - DNA, 15 bp, Homo sapiens
atatgctaaatgtct

SEQ ID NO: 127157 - DNA, 15 bp, Homo sapiens
catatgctaaatgtc

SEQ ID NO: 127158 - DNA, 15 bp, Homo sapiens
gcatatgctaaatgt

SEQ ID NO: 127159 - DNA, 15 bp, Homo sapiens
ggcatatgctaaatg

SEQ ID NO: 127160 - DNA, 15 bp, Homo sapiens
aggcatatgctaaat

SEQ ID NO: 127161 - DNA, 15 bp, Homo sapiens
aaggcatatgctaaa

SEQ ID NO: 127162 - DNA, 15 bp, Homo sapiens
aaaggcatatgctaa

SEQ ID NO: 127163 - DNA, 15 bp, Homo sapiens
aaaaggcatatgcta

SEQ ID NO: 127164 - DNA, 15 bp, Homo sapiens
taaaaggcatatgct

SEQ ID NO: 127165 - DNA, 15 bp, Homo sapiens
ttaaaaggcatatgc

SEQ ID NO: 127166 - DNA, 15 bp, Homo sapiens
tttaaaaggcatatg

SEQ ID NO: 127167 - DNA, 15 bp, Homo sapiens
ttttaaaaggcatat

SEQ ID NO: 127168 - DNA, 15 bp, Homo sapiens
tttttaaaaggcata

SEQ ID NO: 127169 - DNA, 15 bp, Homo sapiens
atttttaaaaggcat

SEQ ID NO: 127170 - DNA, 15 bp, Homo sapiens
gatttttaaaaggca

SEQ ID NO: 127171 - DNA, 15 bp, Homo sapiens
agatttttaaaaggc

SEQ ID NO: 127172 - DNA, 15 bp, Homo sapiens
cagatttttaaaagg

SEQ ID NO: 127173 - DNA, 15 bp, Homo sapiens
acagatttttaaaag

SEQ ID NO: 127174 - DNA, 15 bp, Homo sapiens
aacagatttttaaaa

SEQ ID NO: 127175 - DNA, 15 bp, Homo sapiens
gaacagatttttaaa

SEQ ID NO: 127176 - DNA, 15 bp, Homo sapiens
agaacagatttttaa

SEQ ID NO: 127177 - DNA, 15 bp, Homo sapiens
aagaacagattttta

SEQ ID NO: 127178 - DNA, 15 bp, Homo sapiens
taagaacagattttt

SEQ ID NO: 127179 - DNA, 15 bp, Homo sapiens
ataagaacagatttt

SEQ ID NO: 127180 - DNA, 15 bp, Homo sapiens
cataagaacagattt

SEQ ID NO: 127181 - DNA, 15 bp, Homo sapiens
acataagaacagatt

SEQ ID NO: 127182 - DNA, 15 bp, Homo sapiens
aacataagaacagat

SEQ ID NO: 127183 - DNA, 15 bp, Homo sapiens
taacataagaacaga

SEQ ID NO: 127184 - DNA, 15 bp, Homo sapiens
ttaacataagaacag

SEQ ID NO: 127185 - DNA, 15 bp, Homo sapiens
cttaacataagaaca

SEQ ID NO: 127186 - DNA, 15 bp, Homo sapiens
acttaacataagaac

SEQ ID NO: 127187 - DNA, 15 bp, Homo sapiens
tacttaacataagaa

SEQ ID NO: 127188 - DNA, 15 bp, Homo sapiens
ctacttaacataaga

SEQ ID NO: 127189 - DNA, 15 bp, Homo sapiens
actacttaacataag

SEQ ID NO: 127190 - DNA, 15 bp, Homo sapiens
cactacttaacataa

SEQ ID NO: 127191 - DNA, 15 bp, Homo sapiens
acactacttaacata

SEQ ID NO: 127192 - DNA, 15 bp, Homo sapiens
gacactacttaacat

SEQ ID NO: 127193 - DNA, 15 bp, Homo sapiens
ggacactacttaaca

SEQ ID NO: 127194 - DNA, 15 bp, Homo sapiens
tggacactacttaac

SEQ ID NO: 127195 - DNA, 15 bp, Homo sapiens
atggacactacttaa

SEQ ID NO: 127196 - DNA, 15 bp, Homo sapiens
tatggacactactta

SEQ ID NO: 127197 - DNA, 15 bp, Homo sapiens
ctatggacactactt

SEQ ID NO: 127198 - DNA, 15 bp, Homo sapiens
tctatggacactact

SEQ ID NO: 127199 - DNA, 15 bp, Homo sapiens
ctctatggacactac

SEQ ID NO: 127200 - DNA, 15 bp, Homo sapiens
tctctatggacacta

SEQ ID NO: 127201 - DNA, 15 bp, Homo sapiens
ctctctatggacact

SEQ ID NO: 127202 - DNA, 15 bp, Homo sapiens
tctctctatggacac

SEQ ID NO: 127203 - DNA, 15 bp, Homo sapiens
ttctctctatggaca

SEQ ID NO: 127204 - DNA, 15 bp, Homo sapiens
cttctctctatggac

SEQ ID NO: 127205 - DNA, 15 bp, Homo sapiens
acttctctctatgga

SEQ ID NO: 127206 - DNA, 15 bp, Homo sapiens
aacttctctctatgg

SEQ ID NO: 127207 - DNA, 15 bp, Homo sapiens
gaacttctctctatg

SEQ ID NO: 127208 - DNA, 15 bp, Homo sapiens
tgaacttctctctat

SEQ ID NO: 127209 - DNA, 15 bp, Homo sapiens
ttgaacttctctcta

SEQ ID NO: 127210 - DNA, 15 bp, Homo sapiens
tttgaacttctctct

SEQ ID NO: 127211 - DNA, 15 bp, Homo sapiens
gtttgaacttctctc

SEQ ID NO: 127212 - DNA, 15 bp, Homo sapiens
agtttgaacttctct

SEQ ID NO: 127213 - DNA, 15 bp, Homo sapiens
aagtttgaacttctc

SEQ ID NO: 127214 - DNA, 15 bp, Homo sapiens
aaagtttgaacttct

SEQ ID NO: 127215 - DNA, 15 bp, Homo sapiens
gaaagtttgaacttc

SEQ ID NO: 127216 - DNA, 15 bp, Homo sapiens
ggaaagtttgaactt

SEQ ID NO: 127217 - DNA, 15 bp, Homo sapiens
aggaaagtttgaact

SEQ ID NO: 127218 - DNA, 15 bp, Homo sapiens
aaggaaagtttgaac

SEQ ID NO: 127219 - DNA, 15 bp, Homo sapiens
caaggaaagtttgaa

SEQ ID NO: 127220 - DNA, 15 bp, Homo sapiens
acaaggaaagtttga

SEQ ID NO: 127221 - DNA, 15 bp, Homo sapiens
cacaaggaaagtttg

SEQ ID NO: 127222 - DNA, 15 bp, Homo sapiens
tcacaaggaaagttt

SEQ ID NO: 127223 - DNA, 15 bp, Homo sapiens
atcacaaggaaagtt

SEQ ID NO: 127224 - DNA, 15 bp, Homo sapiens
aatcacaaggaaagt

SEQ ID NO: 127225 - DNA, 15 bp, Homo sapiens
gaatcacaaggaaag

SEQ ID NO: 127226 - DNA, 15 bp, Homo sapiens
tgaatcacaaggaaa

SEQ ID NO: 127227 - DNA, 15 bp, Homo sapiens
ctgaatcacaaggaa

SEQ ID NO: 127228 - DNA, 15 bp, Homo sapiens
gctgaatcacaagga

SEQ ID NO: 127229 - DNA, 15 bp, Homo sapiens
ggctgaatcacaagg

SEQ ID NO: 127230 - DNA, 15 bp, Homo sapiens
aggctgaatcacaag

SEQ ID NO: 127231 - DNA, 15 bp, Homo sapiens
aaggctgaatcacaa

SEQ ID NO: 127232 - DNA, 15 bp, Homo sapiens
aaaggctgaatcaca

SEQ ID NO: 127233 - DNA, 15 bp, Homo sapiens
aaaaggctgaatcac

SEQ ID NO: 127234 - DNA, 15 bp, Homo sapiens
taaaaggctgaatca

SEQ ID NO: 127235 - DNA, 15 bp, Homo sapiens
ttaaaaggctgaatc

SEQ ID NO: 127236 - DNA, 15 bp, Homo sapiens
tttaaaaggctgaat

SEQ ID NO: 127237 - DNA, 15 bp, Homo sapiens
ttttaaaaggctgaa

SEQ ID NO: 127238 - DNA, 15 bp, Homo sapiens
attttaaaaggctga

SEQ ID NO: 127239 - DNA, 15 bp, Homo sapiens
aattttaaaaggctg

SEQ ID NO: 127240 - DNA, 15 bp, Homo sapiens
aaattttaaaaggct

SEQ ID NO: 127241 - DNA, 15 bp, Homo sapiens
aaaattttaaaaggc

SEQ ID NO: 127242 - DNA, 15 bp, Homo sapiens
gaaaattttaaaagg

SEQ ID NO: 127243 - DNA, 15 bp, Homo sapiens
tgaaaattttaaaag

SEQ ID NO: 127244 - DNA, 15 bp, Homo sapiens
ctgaaaattttaaaa

SEQ ID NO: 127245 - DNA, 15 bp, Homo sapiens
tctgaaaattttaaa

SEQ ID NO: 127246 - DNA, 15 bp, Homo sapiens
ctctgaaaattttaa

SEQ ID NO: 127247 - DNA, 15 bp, Homo sapiens
actctgaaaatttta

SEQ ID NO: 127248 - DNA, 15 bp, Homo sapiens
tactctgaaaatttt

SEQ ID NO: 127249 - DNA, 15 bp, Homo sapiens
gtactctgaaaattt

SEQ ID NO: 127250 - DNA, 15 bp, Homo sapiens
tgtactctgaaaatt

SEQ ID NO: 127251 - DNA, 15 bp, Homo sapiens
atgtactctgaaaat

SEQ ID NO: 127252 - DNA, 15 bp, Homo sapiens
aatgtactctgaaaa

SEQ ID NO: 127253 - DNA, 15 bp, Homo sapiens
taatgtactctgaaa

SEQ ID NO: 127254 - DNA, 15 bp, Homo sapiens
ataatgtactctgaa

SEQ ID NO: 127255 - DNA, 15 bp, Homo sapiens
aataatgtactctga

SEQ ID NO: 127256 - DNA, 15 bp, Homo sapiens
caataatgtactctg

SEQ ID NO: 127257 - DNA, 15 bp, Homo sapiens
tcaataatgtactct

SEQ ID NO: 127258 - DNA, 15 bp, Homo sapiens
ttcaataatgtactc

SEQ ID NO: 127259 - DNA, 15 bp, Homo sapiens
tttcaataatgtact

SEQ ID NO: 127260 - DNA, 15 bp, Homo sapiens
atttcaataatgtac

SEQ ID NO: 127261 - DNA, 15 bp, Homo sapiens
catttcaataatgta

SEQ ID NO: 127262 - DNA, 15 bp, Homo sapiens
acatttcaataatgt

SEQ ID NO: 127263 - DNA, 15 bp, Homo sapiens
cacatttcaataatg

SEQ ID NO: 127264 - DNA, 15 bp, Homo sapiens
acacatttcaataat

SEQ ID NO: 127265 - DNA, 15 bp, Homo sapiens
tacacatttcaataa

SEQ ID NO: 127266 - DNA, 15 bp, Homo sapiens
atacacatttcaata

SEQ ID NO: 127267 - DNA, 15 bp, Homo sapiens
catacacatttcaat

SEQ ID NO: 127268 - DNA, 15 bp, Homo sapiens
ccatacacatttcaa

SEQ ID NO: 127269 - DNA, 15 bp, Homo sapiens
cccatacacatttca

SEQ ID NO: 127270 - DNA, 15 bp, Homo sapiens
gcccatacacatttc

SEQ ID NO: 127271 - DNA, 15 bp, Homo sapiens
agcccatacacattt

SEQ ID NO: 127272 - DNA, 15 bp, Homo sapiens
aagcccatacacatt

SEQ ID NO: 127273 - DNA, 15 bp, Homo sapiens
caagcccatacacat

SEQ ID NO: 127274 - DNA, 15 bp, Homo sapiens
tcaagcccatacaca

SEQ ID NO: 127275 - DNA, 15 bp, Homo sapiens
atcaagcccatacac

SEQ ID NO: 127276 - DNA, 15 bp, Homo sapiens
tatcaagcccataca

SEQ ID NO: 127277 - DNA, 15 bp, Homo sapiens
ttatcaagcccatac

SEQ ID NO: 127278 - DNA, 15 bp, Homo sapiens
tttatcaagcccata

SEQ ID NO: 127279 - DNA, 15 bp, Homo sapiens
ttttatcaagcccat

SEQ ID NO: 127280 - DNA, 15 bp, Homo sapiens
gttttatcaagccca

SEQ ID NO: 127281 - DNA, 15 bp, Homo sapiens
agttttatcaagccc

SEQ ID NO: 127282 - DNA, 15 bp, Homo sapiens
aagttttatcaagcc

SEQ ID NO: 127283 - DNA, 15 bp, Homo sapiens
taagttttatcaagc

SEQ ID NO: 127284 - DNA, 15 bp, Homo sapiens
ttaagttttatcaag

SEQ ID NO: 127285 - DNA, 15 bp, Homo sapiens
attaagttttatcaa

SEQ ID NO: 127286 - DNA, 15 bp, Homo sapiens
cattaagttttatca

SEQ ID NO: 127287 - DNA, 15 bp, Homo sapiens
gcattaagttttatc

SEQ ID NO: 127288 - DNA, 15 bp, Homo sapiens
agcattaagttttat

SEQ ID NO: 127289 - DNA, 15 bp, Homo sapiens
aagcattaagtttta

SEQ ID NO: 127290 - DNA, 15 bp, Homo sapiens
caagcattaagtttt

SEQ ID NO: 127291 - DNA, 15 bp, Homo sapiens
acaagcattaagttt

SEQ ID NO: 127292 - DNA, 15 bp, Homo sapiens
gacaagcattaagtt

SEQ ID NO: 127293 - DNA, 15 bp, Homo sapiens
tgacaagcattaagt

SEQ ID NO: 127294 - DNA, 15 bp, Homo sapiens
ttgacaagcattaag

SEQ ID NO: 127295 - DNA, 15 bp, Homo sapiens
attgacaagcattaa

SEQ ID NO: 127296 - DNA, 15 bp, Homo sapiens
cattgacaagcatta

SEQ ID NO: 127297 - DNA, 15 bp, Homo sapiens
acattgacaagcatt

SEQ ID NO: 127298 - DNA, 15 bp, Homo sapiens
tacattgacaagcat

SEQ ID NO: 127299 - DNA, 15 bp, Homo sapiens
gtacattgacaagca

SEQ ID NO: 127300 - DNA, 15 bp, Homo sapiens
ggtacattgacaagc

SEQ ID NO: 127301 - DNA, 15 bp, Homo sapiens
aggtacattgacaag

SEQ ID NO: 127302 - DNA, 15 bp, Homo sapiens
taggtacattgacaa

SEQ ID NO: 127303 - DNA, 15 bp, Homo sapiens
ataggtacattgaca

SEQ ID NO: 127304 - DNA, 15 bp, Homo sapiens
aataggtacattgac

SEQ ID NO: 127305 - DNA, 15 bp, Homo sapiens
aaataggtacattga

SEQ ID NO: 127306 - DNA, 15 bp, Homo sapiens
aaaataggtacattg

SEQ ID NO: 127307 - DNA, 15 bp, Homo sapiens
aaaaataggtacatt

SEQ ID NO: 127308 - DNA, 15 bp, Homo sapiens
aaaaaataggtacat

SEQ ID NO: 127309 - DNA, 15 bp, Homo sapiens
aaaaaaataggtaca

SEQ ID NO: 127310 - DNA, 15 bp, Homo sapiens
caaaaaaataggtac

SEQ ID NO: 127311 - DNA, 15 bp, Homo sapiens
acaaaaaaataggta

SEQ ID NO: 127312 - DNA, 15 bp, Homo sapiens
gacaaaaaaataggt

SEQ ID NO: 127313 - DNA, 15 bp, Homo sapiens
agacaaaaaaatagg

SEQ ID NO: 127314 - DNA, 15 bp, Homo sapiens
gagacaaaaaaatag

SEQ ID NO: 127315 - DNA, 15 bp, Homo sapiens
tgagacaaaaaaata

SEQ ID NO: 127316 - DNA, 15 bp, Homo sapiens
gtgagacaaaaaaat

SEQ ID NO: 127317 - DNA, 15 bp, Homo sapiens
tgtgagacaaaaaaa

SEQ ID NO: 127318 - DNA, 15 bp, Homo sapiens
ctgtgagacaaaaaa

SEQ ID NO: 127319 - DNA, 15 bp, Homo sapiens
tctgtgagacaaaaa

SEQ ID NO: 127320 - DNA, 15 bp, Homo sapiens
atctgtgagacaaaa

SEQ ID NO: 127321 - DNA, 15 bp, Homo sapiens
aatctgtgagacaaa

SEQ ID NO: 127322 - DNA, 15 bp, Homo sapiens
taatctgtgagacaa

SEQ ID NO: 127323 - DNA, 15 bp, Homo sapiens
ataatctgtgagaca

SEQ ID NO: 127324 - DNA, 15 bp, Homo sapiens
aataatctgtgagac

SEQ ID NO: 127325 - DNA, 15 bp, Homo sapiens
gaataatctgtgaga

SEQ ID NO: 127326 - DNA, 15 bp, Homo sapiens
tgaataatctgtgag

SEQ ID NO: 127327 - DNA, 15 bp, Homo sapiens
ctgaataatctgtga

SEQ ID NO: 127328 - DNA, 15 bp, Homo sapiens
actgaataatctgtg

SEQ ID NO: 127329 - DNA, 15 bp, Homo sapiens
cactgaataatctgt

SEQ ID NO: 127330 - DNA, 15 bp, Homo sapiens
gcactgaataatctg

SEQ ID NO: 127331 - DNA, 15 bp, Homo sapiens
tgcactgaataatct

SEQ ID NO: 127332 - DNA, 15 bp, Homo sapiens
atgcactgaataatc

SEQ ID NO: 127333 - DNA, 15 bp, Homo sapiens
aatgcactgaataat

SEQ ID NO: 127334 - DNA, 15 bp, Homo sapiens
aaatgcactgaataa

SEQ ID NO: 127335 - DNA, 15 bp, Homo sapiens
aaaatgcactgaata

SEQ ID NO: 127336 - DNA, 15 bp, Homo sapiens
aaaaatgcactgaat

SEQ ID NO: 127337 - DNA, 15 bp, Homo sapiens
taaaaatgcactgaa

SEQ ID NO: 127338 - DNA, 15 bp, Homo sapiens
ataaaaatgcactga

SEQ ID NO: 127339 - DNA, 15 bp, Homo sapiens
gataaaaatgcactg

SEQ ID NO: 127340 - DNA, 15 bp, Homo sapiens
ggataaaaatgcact

SEQ ID NO: 127341 - DNA, 15 bp, Homo sapiens
aggataaaaatgcac

SEQ ID NO: 127342 - DNA, 15 bp, Homo sapiens
caggataaaaatgca

SEQ ID NO: 127343 - DNA, 15 bp, Homo sapiens
tcaggataaaaatgc

SEQ ID NO: 127344 - DNA, 15 bp, Homo sapiens
atcaggataaaaatg

SEQ ID NO: 127345 - DNA, 15 bp, Homo sapiens
catcaggataaaaat

SEQ ID NO: 127346 - DNA, 15 bp, Homo sapiens
acatcaggataaaaa

SEQ ID NO: 127347 - DNA, 15 bp, Homo sapiens
aacatcaggataaaa

SEQ ID NO: 127348 - DNA, 15 bp, Homo sapiens
aaacatcaggataaa

SEQ ID NO: 127349 - DNA, 15 bp, Homo sapiens
aaaacatcaggataa

SEQ ID NO: 127350 - DNA, 15 bp, Homo sapiens
aaaaacatcaggata

SEQ ID NO: 127351 - DNA, 15 bp, Homo sapiens
caaaaacatcaggat

SEQ ID NO: 127352 - DNA, 15 bp, Homo sapiens
acaaaaacatcagga

SEQ ID NO: 127353 - DNA, 15 bp, Homo sapiens
aacaaaaacatcagg

SEQ ID NO: 127354 - DNA, 15 bp, Homo sapiens
aaacaaaaacatcag

SEQ ID NO: 127355 - DNA, 15 bp, Homo sapiens
caaacaaaaacatca

SEQ ID NO: 127356 - DNA, 15 bp, Homo sapiens
acaaacaaaaacatc

SEQ ID NO: 127357 - DNA, 15 bp, Homo sapiens
tacaaacaaaaacat

SEQ ID NO: 127358 - DNA, 15 bp, Homo sapiens
atacaaacaaaaaca

SEQ ID NO: 127359 - DNA, 15 bp, Homo sapiens
aatacaaacaaaaac

SEQ ID NO: 127360 - DNA, 15 bp, Homo sapiens
aaatacaaacaaaaa

SEQ ID NO: 127361 - DNA, 15 bp, Homo sapiens
aaaatacaaacaaaa

SEQ ID NO: 127362 - DNA, 15 bp, Homo sapiens
caaaatacaaacaaa

SEQ ID NO: 127363 - DNA, 15 bp, Homo sapiens
acaaaatacaaacaa

SEQ ID NO: 127364 - DNA, 15 bp, Homo sapiens
cacaaaatacaaaca

SEQ ID NO: 127365 - DNA, 15 bp, Homo sapiens
acacaaaatacaaac

SEQ ID NO: 127366 - DNA, 15 bp, Homo sapiens
cacacaaaatacaaa

SEQ ID NO: 127367 - DNA, 15 bp, Homo sapiens
acacacaaaatacaa

SEQ ID NO: 127368 - DNA, 15 bp, Homo sapiens
tacacacaaaataca

SEQ ID NO: 127369 - DNA, 15 bp, Homo sapiens
gtacacacaaaatac

SEQ ID NO: 127370 - DNA, 15 bp, Homo sapiens
agtacacacaaaata

SEQ ID NO: 127371 - DNA, 15 bp, Homo sapiens
gagtacacacaaaat

SEQ ID NO: 127372 - DNA, 15 bp, Homo sapiens
agagtacacacaaaa

SEQ ID NO: 127373 - DNA, 15 bp, Homo sapiens
tagagtacacacaaa

SEQ ID NO: 127374 - DNA, 15 bp, Homo sapiens
atagagtacacacaa

SEQ ID NO: 127375 - DNA, 15 bp, Homo sapiens
aatagagtacacaca

SEQ ID NO: 127376 - DNA, 15 bp, Homo sapiens
aaatagagtacacac

SEQ ID NO: 127377 - DNA, 15 bp, Homo sapiens
taaatagagtacaca

SEQ ID NO: 127378 - DNA, 15 bp, Homo sapiens
gtaaatagagtacac

SEQ ID NO: 127379 - DNA, 15 bp, Homo sapiens
agtaaatagagtaca

SEQ ID NO: 127380 - DNA, 15 bp, Homo sapiens
aagtaaatagagtac

SEQ ID NO: 127381 - DNA, 15 bp, Homo sapiens
caagtaaatagagta

SEQ ID NO: 127382 - DNA, 15 bp, Homo sapiens
ccaagtaaatagagt

SEQ ID NO: 127383 - DNA, 15 bp, Homo sapiens
accaagtaaatagag

SEQ ID NO: 127384 - DNA, 15 bp, Homo sapiens
aaccaagtaaataga

SEQ ID NO: 127385 - DNA, 15 bp, Homo sapiens
taaccaagtaaatag

SEQ ID NO: 127386 - DNA, 15 bp, Homo sapiens
ctaaccaagtaaata

SEQ ID NO: 127387 - DNA, 15 bp, Homo sapiens
gctaaccaagtaaat

SEQ ID NO: 127388 - DNA, 15 bp, Homo sapiens
tgctaaccaagtaaa

SEQ ID NO: 127389 - DNA, 15 bp, Homo sapiens
ctgctaaccaagtaa

SEQ ID NO: 127390 - DNA, 15 bp, Homo sapiens
tctgctaaccaagta

SEQ ID NO: 127391 - DNA, 15 bp, Homo sapiens
ttctgctaaccaagt

SEQ ID NO: 127392 - DNA, 15 bp, Homo sapiens
tttctgctaaccaag

SEQ ID NO: 127393 - DNA, 15 bp, Homo sapiens
atttctgctaaccaa

SEQ ID NO: 127394 - DNA, 15 bp, Homo sapiens
catttctgctaacca

SEQ ID NO: 127395 - DNA, 15 bp, Homo sapiens
tcatttctgctaacc

SEQ ID NO: 127396 - DNA, 15 bp, Homo sapiens
atcatttctgctaac

SEQ ID NO: 127397 - DNA, 15 bp, Homo sapiens
aatcatttctgctaa

SEQ ID NO: 127398 - DNA, 15 bp, Homo sapiens
aaatcatttctgcta

SEQ ID NO: 127399 - DNA, 15 bp, Homo sapiens
taaatcatttctgct

SEQ ID NO: 127400 - DNA, 15 bp, Homo sapiens
gtaaatcatttctgc

SEQ ID NO: 127401 - DNA, 15 bp, Homo sapiens
agtaaatcatttctg

SEQ ID NO: 127402 - DNA, 15 bp, Homo sapiens
aagtaaatcatttct

SEQ ID NO: 127403 - DNA, 15 bp, Homo sapiens
aaagtaaatcatttc

SEQ ID NO: 127404 - DNA, 15 bp, Homo sapiens
aaaagtaaatcattt

SEQ ID NO: 127405 - DNA, 15 bp, Homo sapiens
aaaaagtaaatcatt

SEQ ID NO: 127406 - DNA, 15 bp, Homo sapiens
taaaaagtaaatcat

SEQ ID NO: 127407 - DNA, 15 bp, Homo sapiens
gtaaaaagtaaatca

SEQ ID NO: 127408 - DNA, 15 bp, Homo sapiens
agtaaaaagtaaatc

SEQ ID NO: 127409 - DNA, 15 bp, Homo sapiens
aagtaaaaagtaaat

SEQ ID NO: 127410 - DNA, 15 bp, Homo sapiens
aaagtaaaaagtaaa

SEQ ID NO: 127411 - DNA, 15 bp, Homo sapiens
aaaagtaaaaagtaa

SEQ ID NO: 127412 - DNA, 15 bp, Homo sapiens
caaaagtaaaaagta

SEQ ID NO: 127413 - DNA, 15 bp, Homo sapiens
acaaaagtaaaaagt

SEQ ID NO: 127414 - DNA, 15 bp, Homo sapiens
tacaaaagtaaaaag

SEQ ID NO: 127415 - DNA, 15 bp, Homo sapiens
gtacaaaagtaaaaa

SEQ ID NO: 127416 - DNA, 15 bp, Homo sapiens
ggtacaaaagtaaaa

SEQ ID NO: 127417 - DNA, 15 bp, Homo sapiens
gggtacaaaagtaaa

SEQ ID NO: 127418 - DNA, 15 bp, Homo sapiens
agggtacaaaagtaa

SEQ ID NO: 127419 - DNA, 15 bp, Homo sapiens
aagggtacaaaagta

SEQ ID NO: 127420 - DNA, 15 bp, Homo sapiens
caagggtacaaaagt

SEQ ID NO: 127421 - DNA, 15 bp, Homo sapiens
ccaagggtacaaaag

SEQ ID NO: 127422 - DNA, 15 bp, Homo sapiens
accaagggtacaaaa

SEQ ID NO: 127423 - DNA, 15 bp, Homo sapiens
taccaagggtacaaa

SEQ ID NO: 127424 - DNA, 15 bp, Homo sapiens
ataccaagggtacaa

SEQ ID NO: 127425 - DNA, 15 bp, Homo sapiens
aataccaagggtaca

SEQ ID NO: 127426 - DNA, 15 bp, Homo sapiens
aaataccaagggtac

SEQ ID NO: 127427 - DNA, 15 bp, Homo sapiens
gaaataccaagggta

SEQ ID NO: 127428 - DNA, 15 bp, Homo sapiens
tgaaataccaagggt

SEQ ID NO: 127429 - DNA, 15 bp, Homo sapiens
atgaaataccaaggg

SEQ ID NO: 127430 - DNA, 15 bp, Homo sapiens
aatgaaataccaagg

SEQ ID NO: 127431 - DNA, 15 bp, Homo sapiens
aaatgaaataccaag

SEQ ID NO: 127432 - DNA, 15 bp, Homo sapiens
aaaatgaaataccaa

SEQ ID NO: 127433 - DNA, 15 bp, Homo sapiens
caaaatgaaatacca

SEQ ID NO: 127434 - DNA, 15 bp, Homo sapiens
tcaaaatgaaatacc

SEQ ID NO: 127435 - DNA, 15 bp, Homo sapiens
atcaaaatgaaatac

SEQ ID NO: 127436 - DNA, 15 bp, Homo sapiens
aatcaaaatgaaata

SEQ ID NO: 127437 - DNA, 15 bp, Homo sapiens
aaatcaaaatgaaat

SEQ ID NO: 127438 - DNA, 15 bp, Homo sapiens
aaaatcaaaatgaaa

SEQ ID NO: 127439 - DNA, 15 bp, Homo sapiens
aaaaatcaaaatgaa

SEQ ID NO: 127440 - DNA, 15 bp, Homo sapiens
aaaaaatcaaaatga

SEQ ID NO: 127441 - DNA, 15 bp, Homo sapiens
aaaaaaatcaaaatg

SEQ ID NO: 127442 - DNA, 15 bp, Homo sapiens
aaaaaaaatcaaaat

SEQ ID NO: 127443 - DNA, 15 bp, Homo sapiens
aaaaaaaaatcaaaa

SEQ ID NO: 127444 - DNA, 15 bp, Homo sapiens
aaaaaaaaaatcaaa

SEQ ID NO: 127445 - DNA, 15 bp, Homo sapiens
taaaaaaaaaatcaa

SEQ ID NO: 127446 - DNA, 15 bp, Homo sapiens
ttaaaaaaaaaatca

SEQ ID NO: 127447 - DNA, 15 bp, Homo sapiens
cttaaaaaaaaaatc

SEQ ID NO: 127448 - DNA, 15 bp, Homo sapiens
tcttaaaaaaaaaat

SEQ ID NO: 127449 - DNA, 15 bp, Homo sapiens
ttcttaaaaaaaaaa

SEQ ID NO: 127450 - DNA, 15 bp, Homo sapiens
attcttaaaaaaaaa

SEQ ID NO: 127451 - DNA, 15 bp, Homo sapiens
aattcttaaaaaaaa

SEQ ID NO: 127452 - DNA, 15 bp, Homo sapiens
aaattcttaaaaaaa

SEQ ID NO: 127453 - DNA, 15 bp, Homo sapiens
caaattcttaaaaaa

SEQ ID NO: 127454 - DNA, 15 bp, Homo sapiens
tcaaattcttaaaaa

SEQ ID NO: 127455 - DNA, 15 bp, Homo sapiens
atcaaattcttaaaa

SEQ ID NO: 127456 - DNA, 15 bp, Homo sapiens
gatcaaattcttaaa

SEQ ID NO: 127457 - DNA, 15 bp, Homo sapiens
cgatcaaattcttaa

SEQ ID NO: 127458 - DNA, 15 bp, Homo sapiens
ccgatcaaattctta

SEQ ID NO: 127459 - DNA, 15 bp, Homo sapiens
gccgatcaaattctt

SEQ ID NO: 127460 - DNA, 15 bp, Homo sapiens
ggccgatcaaattct

SEQ ID NO: 127461 - DNA, 15 bp, Homo sapiens
tggccgatcaaattc

SEQ ID NO: 127462 - DNA, 15 bp, Homo sapiens
ctggccgatcaaatt

SEQ ID NO: 127463 - DNA, 15 bp, Homo sapiens
cctggccgatcaaat

SEQ ID NO: 127464 - DNA, 15 bp, Homo sapiens
gcctggccgatcaaa

SEQ ID NO: 127465 - DNA, 15 bp, Homo sapiens
cgcctggccgatcaa

SEQ ID NO: 127466 - DNA, 15 bp, Homo sapiens
gcgcctggccgatca

SEQ ID NO: 127467 - DNA, 15 bp, Homo sapiens
cgcgcctggccgatc

SEQ ID NO: 127468 - DNA, 15 bp, Homo sapiens
tcgcgcctggccgat

SEQ ID NO: 127469 - DNA, 15 bp, Homo sapiens
atcgcgcctggccga

SEQ ID NO: 127470 - DNA, 15 bp, Homo sapiens
catcgcgcctggccg

SEQ ID NO: 127471 - DNA, 15 bp, Homo sapiens
ccatcgcgcctggcc

SEQ ID NO: 127472 - DNA, 15 bp, Homo sapiens
gccatcgcgcctggc

SEQ ID NO: 127473 - DNA, 15 bp, Homo sapiens
agccatcgcgcctgg

SEQ ID NO: 127474 - DNA, 15 bp, Homo sapiens
gagccatcgcgcctg

SEQ ID NO: 127475 - DNA, 15 bp, Homo sapiens
tgagccatcgcgcct

SEQ ID NO: 127476 - DNA, 15 bp, Homo sapiens
atgagccatcgcgcc

SEQ ID NO: 127477 - DNA, 15 bp, Homo sapiens
catgagccatcgcgc

SEQ ID NO: 127478 - DNA, 15 bp, Homo sapiens
gcatgagccatcgcg

SEQ ID NO: 127479 - DNA, 15 bp, Homo sapiens
ggcatgagccatcgc

SEQ ID NO: 127480 - DNA, 15 bp, Homo sapiens
aggcatgagccatcg

SEQ ID NO: 127481 - DNA, 15 bp, Homo sapiens
caggcatgagccatc

SEQ ID NO: 127482 - DNA, 15 bp, Homo sapiens
acaggcatgagccat

SEQ ID NO: 127483 - DNA, 15 bp, Homo sapiens
ctacaggcatgagcc

SEQ ID NO: 127484 - DNA, 15 bp, Homo sapiens
actacaggcatgagc

SEQ ID NO: 127485 - DNA, 15 bp, Homo sapiens
gactacaggcatgag

SEQ ID NO: 127486 - DNA, 15 bp, Homo sapiens
ggactacaggcatga

SEQ ID NO: 127487 - DNA, 15 bp, Homo sapiens
gggactacaggcatg

SEQ ID NO: 127488 - DNA, 15 bp, Homo sapiens
cgggactacaggcat

SEQ ID NO: 127489 - DNA, 15 bp, Homo sapiens
tcgggactacaggca

SEQ ID NO: 127490 - DNA, 15 bp, Homo sapiens
gtcgggactacaggc

SEQ ID NO: 127491 - DNA, 15 bp, Homo sapiens
tgtcgggactacagg

SEQ ID NO: 127492 - DNA, 15 bp, Homo sapiens
gtgtcgggactacag

SEQ ID NO: 127493 - DNA, 15 bp, Homo sapiens
agtgtcgggactaca

SEQ ID NO: 127494 - DNA, 15 bp, Homo sapiens
aagtgtcgggactac

SEQ ID NO: 127495 - DNA, 15 bp, Homo sapiens
aaagtgtcgggacta

SEQ ID NO: 127496 - DNA, 15 bp, Homo sapiens
caaagtgtcgggact

SEQ ID NO: 127497 - DNA, 15 bp, Homo sapiens
ccaaagtgtcgggac

SEQ ID NO: 127498 - DNA, 15 bp, Homo sapiens
cccaaagtgtcggga

SEQ ID NO: 127499 - DNA, 15 bp, Homo sapiens
tcccaaagtgtcggg

SEQ ID NO: 127500 - DNA, 15 bp, Homo sapiens
ctcccaaagtgtcgg

SEQ ID NO: 127501 - DNA, 15 bp, Homo sapiens
cctcccaaagtgtcg

SEQ ID NO: 127502 - DNA, 15 bp, Homo sapiens
gcctcccaaagtgtc

SEQ ID NO: 127503 - DNA, 15 bp, Homo sapiens
ggcctcccaaagtgt

SEQ ID NO: 127504 - DNA, 15 bp, Homo sapiens
tgccttggcctccca

SEQ ID NO: 127505 - DNA, 15 bp, Homo sapiens
ctgccttggcctccc

SEQ ID NO: 127506 - DNA, 15 bp, Homo sapiens
cctgccttggcctcc

SEQ ID NO: 127507 - DNA, 15 bp, Homo sapiens
gcctgccttggcctc

SEQ ID NO: 127508 - DNA, 15 bp, Homo sapiens
tgcctgccttggcct

SEQ ID NO: 127509 - DNA, 15 bp, Homo sapiens
ctgcctgccttggcc

SEQ ID NO: 127510 - DNA, 15 bp, Homo sapiens
tctgcctgccttggc

SEQ ID NO: 127511 - DNA, 15 bp, Homo sapiens
atctgcctgccttgg

SEQ ID NO: 127512 - DNA, 15 bp, Homo sapiens
gatctgcctgccttg

SEQ ID NO: 127513 - DNA, 15 bp, Homo sapiens
cgatctgcctgcctt

SEQ ID NO: 127514 - DNA, 15 bp, Homo sapiens
gcgatctgcctgcct

SEQ ID NO: 127515 - DNA, 15 bp, Homo sapiens
ggcgatctgcctgcc

SEQ ID NO: 127516 - DNA, 15 bp, Homo sapiens
aggcgatctgcctgc

SEQ ID NO: 127517 - DNA, 15 bp, Homo sapiens
caggcgatctgcctg

SEQ ID NO: 127518 - DNA, 15 bp, Homo sapiens
tcaggcgatctgcct

SEQ ID NO: 127519 - DNA, 15 bp, Homo sapiens
ctcaggcgatctgcc

SEQ ID NO: 127520 - DNA, 15 bp, Homo sapiens
gctcaggcgatctgc

SEQ ID NO: 127521 - DNA, 15 bp, Homo sapiens
ggctcaggcgatctg

SEQ ID NO: 127522 - DNA, 15 bp, Homo sapiens
gggctcaggcgatct

SEQ ID NO: 127523 - DNA, 15 bp, Homo sapiens
tgggctcaggcgatc

SEQ ID NO: 127524 - DNA, 15 bp, Homo sapiens
ctgggctcaggcgat

SEQ ID NO: 127525 - DNA, 15 bp, Homo sapiens
cctgggctcaggcga

SEQ ID NO: 127526 - DNA, 15 bp, Homo sapiens
tcctgggctcaggcg

SEQ ID NO: 127527 - DNA, 15 bp, Homo sapiens
ttcctgggctcaggc

SEQ ID NO: 127528 - DNA, 15 bp, Homo sapiens
attcctgggctcagg

SEQ ID NO: 127529 - DNA, 15 bp, Homo sapiens
aattcctgggctcag

SEQ ID NO: 127530 - DNA, 15 bp, Homo sapiens
gaattcctgggctca

SEQ ID NO: 127531 - DNA, 15 bp, Homo sapiens
cgaattcctgggctc

SEQ ID NO: 127532 - DNA, 15 bp, Homo sapiens
tcgaattcctgggct

SEQ ID NO: 127533 - DNA, 15 bp, Homo sapiens
ctcgaattcctgggc

SEQ ID NO: 127534 - DNA, 15 bp, Homo sapiens
tctcgaattcctggg

SEQ ID NO: 127535 - DNA, 15 bp, Homo sapiens
gtctcgaattcctgg

SEQ ID NO: 127536 - DNA, 15 bp, Homo sapiens
ggtctcgaattcctg

SEQ ID NO: 127537 - DNA, 15 bp, Homo sapiens
tggtctcgaattcct

SEQ ID NO: 127538 - DNA, 15 bp, Homo sapiens
ctggtctcgaattcc

SEQ ID NO: 127539 - DNA, 15 bp, Homo sapiens
gctggtctcgaattc

SEQ ID NO: 127540 - DNA, 15 bp, Homo sapiens
ggctggtctcgaatt

SEQ ID NO: 127541 - DNA, 15 bp, Homo sapiens
aggctggtctcgaat

SEQ ID NO: 127542 - DNA, 15 bp, Homo sapiens
caggctggtctcgaa

SEQ ID NO: 127543 - DNA, 15 bp, Homo sapiens
ccaggctggtctcga

SEQ ID NO: 127544 - DNA, 15 bp, Homo sapiens
cccaggctggtctcg

SEQ ID NO: 127545 - DNA, 15 bp, Homo sapiens
gcccaggctggtctc

SEQ ID NO: 127546 - DNA, 15 bp, Homo sapiens
tgcccaggctggtct

SEQ ID NO: 127547 - DNA, 15 bp, Homo sapiens
ttgcccaggctggtc

SEQ ID NO: 127548 - DNA, 15 bp, Homo sapiens
attgcccaggctggt

SEQ ID NO: 127549 - DNA, 15 bp, Homo sapiens
cattgcccaggctgg

SEQ ID NO: 127550 - DNA, 15 bp, Homo sapiens
acattgcccaggctg

SEQ ID NO: 127551 - DNA, 15 bp, Homo sapiens
cacattgcccaggct

SEQ ID NO: 127552 - DNA, 15 bp, Homo sapiens
ccacattgcccaggc

SEQ ID NO: 127553 - DNA, 15 bp, Homo sapiens
gccacattgcccagg

SEQ ID NO: 127554 - DNA, 15 bp, Homo sapiens
cgccacattgcccag

SEQ ID NO: 127555 - DNA, 15 bp, Homo sapiens
tcgccacattgccca

SEQ ID NO: 127556 - DNA, 15 bp, Homo sapiens
ttcgccacattgccc

SEQ ID NO: 127557 - DNA, 15 bp, Homo sapiens
tttcgccacattgcc

SEQ ID NO: 127558 - DNA, 15 bp, Homo sapiens
gtttcgccacattgc

SEQ ID NO: 127559 - DNA, 15 bp, Homo sapiens
ggtttcgccacattg

SEQ ID NO: 127560 - DNA, 15 bp, Homo sapiens
gggtttcgccacatt

SEQ ID NO: 127561 - DNA, 15 bp, Homo sapiens
ggggtttcgccacat

SEQ ID NO: 127562 - DNA, 15 bp, Homo sapiens
cggggtttcgccaca

SEQ ID NO: 127563 - DNA, 15 bp, Homo sapiens
acggggtttcgccac

SEQ ID NO: 127564 - DNA, 15 bp, Homo sapiens
gacggggtttcgcca

SEQ ID NO: 127565 - DNA, 15 bp, Homo sapiens
agacggggtttcgcc

SEQ ID NO: 127566 - DNA, 15 bp, Homo sapiens
gagacggggtttcgc

SEQ ID NO: 127567 - DNA, 15 bp, Homo sapiens
agagacggggtttcg

SEQ ID NO: 127568 - DNA, 15 bp, Homo sapiens
tagagacggggtttc

SEQ ID NO: 127569 - DNA, 15 bp, Homo sapiens
gtagagacggggttt

SEQ ID NO: 127570 - DNA, 15 bp, Homo sapiens
tgtagagacggggtt

SEQ ID NO: 127571 - DNA, 15 bp, Homo sapiens
ctgtagagacggggt

SEQ ID NO: 127572 - DNA, 15 bp, Homo sapiens
tctgtagagacgggg

SEQ ID NO: 127573 - DNA, 15 bp, Homo sapiens
ttctgtagagacggg

SEQ ID NO: 127574 - DNA, 15 bp, Homo sapiens
tttctgtagagacgg

SEQ ID NO: 127575 - DNA, 15 bp, Homo sapiens
ctttctgtagagacg

SEQ ID NO: 127576 - DNA, 15 bp, Homo sapiens
actttctgtagagac

SEQ ID NO: 127577 - DNA, 15 bp, Homo sapiens
tactttctgtagaga

SEQ ID NO: 127578 - DNA, 15 bp, Homo sapiens
gtactttctgtagag

SEQ ID NO: 127579 - DNA, 15 bp, Homo sapiens
tgtactttctgtaga

SEQ ID NO: 127580 - DNA, 15 bp, Homo sapiens
ttgtactttctgtag

SEQ ID NO: 127581 - DNA, 15 bp, Homo sapiens
tttgtactttctgta

SEQ ID NO: 127582 - DNA, 15 bp, Homo sapiens
ttttgtactttctgt

SEQ ID NO: 127583 - DNA, 15 bp, Homo sapiens
tttttgtactttctg

SEQ ID NO: 127584 - DNA, 15 bp, Homo sapiens
atttttgtactttct

SEQ ID NO: 127585 - DNA, 15 bp, Homo sapiens
aatttttgtactttc

SEQ ID NO: 127586 - DNA, 15 bp, Homo sapiens
aaatttttgtacttt

SEQ ID NO: 127587 - DNA, 15 bp, Homo sapiens
taaatttttgtactt

SEQ ID NO: 127588 - DNA, 15 bp, Homo sapiens
ctaaatttttgtact

SEQ ID NO: 127589 - DNA, 15 bp, Homo sapiens
gctaaatttttgtac

SEQ ID NO: 127590 - DNA, 15 bp, Homo sapiens
agctaaatttttgta

SEQ ID NO: 127591 - DNA, 15 bp, Homo sapiens
cagctaaatttttgt

SEQ ID NO: 127592 - DNA, 15 bp, Homo sapiens
ccagctaaatttttg

SEQ ID NO: 127593 - DNA, 15 bp, Homo sapiens
cccagctaaattttt

SEQ ID NO: 127594 - DNA, 15 bp, Homo sapiens
acccagctaaatttt

SEQ ID NO: 127595 - DNA, 15 bp, Homo sapiens
tacccagctaaattt

SEQ ID NO: 127596 - DNA, 15 bp, Homo sapiens
atacccagctaaatt

SEQ ID NO: 127597 - DNA, 15 bp, Homo sapiens
catacccagctaaat

SEQ ID NO: 127598 - DNA, 15 bp, Homo sapiens
tcatacccagctaaa

SEQ ID NO: 127599 - DNA, 15 bp, Homo sapiens
atcatacccagctaa

SEQ ID NO: 127600 - DNA, 15 bp, Homo sapiens
catcatacccagcta

SEQ ID NO: 127601 - DNA, 15 bp, Homo sapiens
ccatcatacccagct

SEQ ID NO: 127602 - DNA, 15 bp, Homo sapiens
gccatcatacccagc

SEQ ID NO: 127603 - DNA, 15 bp, Homo sapiens
tgccatcatacccag

SEQ ID NO: 127604 - DNA, 15 bp, Homo sapiens
atgccatcataccca

SEQ ID NO: 127605 - DNA, 15 bp, Homo sapiens
catgccatcataccc

SEQ ID NO: 127606 - DNA, 15 bp, Homo sapiens
gcatgccatcatacc

SEQ ID NO: 127607 - DNA, 15 bp, Homo sapiens
tgcatgccatcatac

SEQ ID NO: 127608 - DNA, 15 bp, Homo sapiens
gtgcatgccatcata

SEQ ID NO: 127609 - DNA, 15 bp, Homo sapiens
cgtgcatgccatcat

SEQ ID NO: 127610 - DNA, 15 bp, Homo sapiens
acgtgcatgccatca

SEQ ID NO: 127611 - DNA, 15 bp, Homo sapiens
cacgtgcatgccatc

SEQ ID NO: 127612 - DNA, 15 bp, Homo sapiens
acacgtgcatgccat

SEQ ID NO: 127613 - DNA, 15 bp, Homo sapiens
aacacgtgcatgcca

SEQ ID NO: 127614 - DNA, 15 bp, Homo sapiens
caacacgtgcatgcc

SEQ ID NO: 127615 - DNA, 15 bp, Homo sapiens
acaacacgtgcatgc

SEQ ID NO: 127616 - DNA, 15 bp, Homo sapiens
gacaacacgtgcatg

SEQ ID NO: 127617 - DNA, 15 bp, Homo sapiens
ggacaacacgtgcat

SEQ ID NO: 127618 - DNA, 15 bp, Homo sapiens
gggacaacacgtgca

SEQ ID NO: 127619 - DNA, 15 bp, Homo sapiens
tgggacaacacgtgc

SEQ ID NO: 127620 - DNA, 15 bp, Homo sapiens
ctgggacaacacgtg

SEQ ID NO: 127621 - DNA, 15 bp, Homo sapiens
gctgggacaacacgt

SEQ ID NO: 127622 - DNA, 15 bp, Homo sapiens
agctgggacaacacg

SEQ ID NO: 127623 - DNA, 15 bp, Homo sapiens
tagctgggacaacac

SEQ ID NO: 127624 - DNA, 15 bp, Homo sapiens
atagctgggacaaca

SEQ ID NO: 127625 - DNA, 15 bp, Homo sapiens
gatagctgggacaac

SEQ ID NO: 127626 - DNA, 15 bp, Homo sapiens
ggatagctgggacaa

SEQ ID NO: 127627 - DNA, 15 bp, Homo sapiens
tggatagctgggaca

SEQ ID NO: 127628 - DNA, 15 bp, Homo sapiens
ctggatagctgggac

SEQ ID NO: 127629 - DNA, 15 bp, Homo sapiens
cctggatagctggga

SEQ ID NO: 127630 - DNA, 15 bp, Homo sapiens
tcctggatagctggg

SEQ ID NO: 127631 - DNA, 15 bp, Homo sapiens
ctcctggatagctgg

SEQ ID NO: 127632 - DNA, 15 bp, Homo sapiens
cctcctggatagctg

SEQ ID NO: 127633 - DNA, 15 bp, Homo sapiens
gcctcctggatagct

SEQ ID NO: 127634 - DNA, 15 bp, Homo sapiens
agcctcctggatagc

SEQ ID NO: 127635 - DNA, 15 bp, Homo sapiens
cagcctcctggatag

SEQ ID NO: 127636 - DNA, 15 bp, Homo sapiens
tcagcctcctggata

SEQ ID NO: 127637 - DNA, 15 bp, Homo sapiens
ctcagcctcctggat

SEQ ID NO: 127638 - DNA, 15 bp, Homo sapiens
cctcagcctcctgga

SEQ ID NO: 127639 - DNA, 15 bp, Homo sapiens
acctcagcctcctgg

SEQ ID NO: 127640 - DNA, 15 bp, Homo sapiens
cacctcagcctcctg

SEQ ID NO: 127641 - DNA, 15 bp, Homo sapiens
ccacctcagcctcct

SEQ ID NO: 127642 - DNA, 15 bp, Homo sapiens
cccacctcagcctcc

SEQ ID NO: 127643 - DNA, 15 bp, Homo sapiens
ttcctcccacctcag

SEQ ID NO: 127644 - DNA, 15 bp, Homo sapiens
gttcctcccacctca

SEQ ID NO: 127645 - DNA, 15 bp, Homo sapiens
tgttcctcccacctc

SEQ ID NO: 127646 - DNA, 15 bp, Homo sapiens
gtgttcctcccacct

SEQ ID NO: 127647 - DNA, 15 bp, Homo sapiens
ggtgttcctcccacc

SEQ ID NO: 127648 - DNA, 15 bp, Homo sapiens
aggtgttcctcccac

SEQ ID NO: 127649 - DNA, 15 bp, Homo sapiens
taggtgttcctccca

SEQ ID NO: 127650 - DNA, 15 bp, Homo sapiens
ctaggtgttcctccc

SEQ ID NO: 127651 - DNA, 15 bp, Homo sapiens
cctaggtgttcctcc

SEQ ID NO: 127652 - DNA, 15 bp, Homo sapiens
ccctaggtgttcctc

SEQ ID NO: 127653 - DNA, 15 bp, Homo sapiens
gccctaggtgttcct

SEQ ID NO: 127654 - DNA, 15 bp, Homo sapiens
ggccctaggtgttcc

SEQ ID NO: 127655 - DNA, 15 bp, Homo sapiens
aggccctaggtgttc

SEQ ID NO: 127656 - DNA, 15 bp, Homo sapiens
caggccctaggtgtt

SEQ ID NO: 127657 - DNA, 15 bp, Homo sapiens
ccaggccctaggtgt

SEQ ID NO: 127658 - DNA, 15 bp, Homo sapiens
cccaggccctaggtg

SEQ ID NO: 127659 - DNA, 15 bp, Homo sapiens
ccccaggccctaggt

SEQ ID NO: 127660 - DNA, 15 bp, Homo sapiens
tccccaggccctagg

SEQ ID NO: 127661 - DNA, 15 bp, Homo sapiens
ctccccaggccctag

SEQ ID NO: 127662 - DNA, 15 bp, Homo sapiens
cctccccaggcccta

SEQ ID NO: 127663 - DNA, 15 bp, Homo sapiens
acctccccaggccct

SEQ ID NO: 127664 - DNA, 15 bp, Homo sapiens
gacctccccaggccc

SEQ ID NO: 127665 - DNA, 15 bp, Homo sapiens
cgacctccccaggcc

SEQ ID NO: 127666 - DNA, 15 bp, Homo sapiens
tcgacctccccaggc

SEQ ID NO: 127667 - DNA, 15 bp, Homo sapiens
ctcgacctccccagg

SEQ ID NO: 127668 - DNA, 15 bp, Homo sapiens
cctcgacctccccag

SEQ ID NO: 127669 - DNA, 15 bp, Homo sapiens
gcctcgacctcccca

SEQ ID NO: 127670 - DNA, 15 bp, Homo sapiens
agcctcgacctcccc

SEQ ID NO: 127671 - DNA, 15 bp, Homo sapiens
tagcctcgacctccc

SEQ ID NO: 127672 - DNA, 15 bp, Homo sapiens
gtagcctcgacctcc

SEQ ID NO: 127673 - DNA, 15 bp, Homo sapiens
tgtagcctcgacctc

SEQ ID NO: 127674 - DNA, 15 bp, Homo sapiens
ctgtagcctcgacct

SEQ ID NO: 127675 - DNA, 15 bp, Homo sapiens
gctgtagcctcgacc

SEQ ID NO: 127676 - DNA, 15 bp, Homo sapiens
cgctgtagcctcgac

SEQ ID NO: 127677 - DNA, 15 bp, Homo sapiens
tcgctgtagcctcga

SEQ ID NO: 127678 - DNA, 15 bp, Homo sapiens
ctcgctgtagcctcg

SEQ ID NO: 127679 - DNA, 15 bp, Homo sapiens
gctcgctgtagcctc

SEQ ID NO: 127680 - DNA, 15 bp, Homo sapiens
ggctcgctgtagcct

SEQ ID NO: 127681 - DNA, 15 bp, Homo sapiens
tggctcgctgtagcc

SEQ ID NO: 127682 - DNA, 15 bp, Homo sapiens
atggctcgctgtagc

SEQ ID NO: 127683 - DNA, 15 bp, Homo sapiens
aatggctcgctgtag

SEQ ID NO: 127684 - DNA, 15 bp, Homo sapiens
taatggctcgctgta

SEQ ID NO: 127685 - DNA, 15 bp, Homo sapiens
ataatggctcgctgt

SEQ ID NO: 127686 - DNA, 15 bp, Homo sapiens
gataatggctcgctg

SEQ ID NO: 127687 - DNA, 15 bp, Homo sapiens
tgataatggctcgct

SEQ ID NO: 127688 - DNA, 15 bp, Homo sapiens
atgataatggctcgc

SEQ ID NO: 127689 - DNA, 15 bp, Homo sapiens
catgataatggctcg

SEQ ID NO: 127690 - DNA, 15 bp, Homo sapiens
gcatgataatggctc

SEQ ID NO: 127691 - DNA, 15 bp, Homo sapiens
ggcatgataatggct

SEQ ID NO: 127692 - DNA, 15 bp, Homo sapiens
tggcatgataatggc

SEQ ID NO: 127693 - DNA, 15 bp, Homo sapiens
gtggcatgataatgg

SEQ ID NO: 127694 - DNA, 15 bp, Homo sapiens
agtggcatgataatg

SEQ ID NO: 127695 - DNA, 15 bp, Homo sapiens
cagtggcatgataat

SEQ ID NO: 127696 - DNA, 15 bp, Homo sapiens
gcagtggcatgataa

SEQ ID NO: 127697 - DNA, 15 bp, Homo sapiens
tgcagtggcatgata

SEQ ID NO: 127698 - DNA, 15 bp, Homo sapiens
gtgcagtggcatgat

SEQ ID NO: 127699 - DNA, 15 bp, Homo sapiens
agtgcagtggcatga

SEQ ID NO: 127700 - DNA, 15 bp, Homo sapiens
gagtgcagtggcatg

SEQ ID NO: 127701 - DNA, 15 bp, Homo sapiens
ggagtgcagtggcat

SEQ ID NO: 127702 - DNA, 15 bp, Homo sapiens
tggagtgcagtggca

SEQ ID NO: 127703 - DNA, 15 bp, Homo sapiens
ctggagtgcagtggc

SEQ ID NO: 127704 - DNA, 15 bp, Homo sapiens
gctggagtgcagtgg

SEQ ID NO: 127705 - DNA, 15 bp, Homo sapiens
ggctggagtgcagtg

SEQ ID NO: 127706 - DNA, 15 bp, Homo sapiens
aggctggagtgcagt

SEQ ID NO: 127707 - DNA, 15 bp, Homo sapiens
caggctggagtgcag

SEQ ID NO: 127708 - DNA, 15 bp, Homo sapiens
ccaggctggagtgca

SEQ ID NO: 127709 - DNA, 15 bp, Homo sapiens
tccaggctggagtgc

SEQ ID NO: 127710 - DNA, 15 bp, Homo sapiens
atccaggctggagtg

SEQ ID NO: 127711 - DNA, 15 bp, Homo sapiens
tatccaggctggagt

SEQ ID NO: 127712 - DNA, 15 bp, Homo sapiens
ttatccaggctggag

SEQ ID NO: 127713 - DNA, 15 bp, Homo sapiens
gttatccaggctgga

SEQ ID NO: 127714 - DNA, 15 bp, Homo sapiens
tgttatccaggctgg

SEQ ID NO: 127715 - DNA, 15 bp, Homo sapiens
ctgttatccaggctg

SEQ ID NO: 127716 - DNA, 15 bp, Homo sapiens
tctgttatccaggct

SEQ ID NO: 127717 - DNA, 15 bp, Homo sapiens
ttctgttatccaggc

SEQ ID NO: 127718 - DNA, 15 bp, Homo sapiens
attctgttatccagg

SEQ ID NO: 127719 - DNA, 15 bp, Homo sapiens
tattctgttatccag

SEQ ID NO: 127720 - DNA, 15 bp, Homo sapiens
ttattctgttatcca

SEQ ID NO: 127721 - DNA, 15 bp, Homo sapiens
tttattctgttatcc

SEQ ID NO: 127722 - DNA, 15 bp, Homo sapiens
ttttattctgttatc

SEQ ID NO: 127723 - DNA, 15 bp, Homo sapiens
tttttattctgttat

SEQ ID NO: 127724 - DNA, 15 bp, Homo sapiens
ctttttattctgtta

SEQ ID NO: 127725 - DNA, 15 bp, Homo sapiens
tctttttattctgtt

SEQ ID NO: 127726 - DNA, 15 bp, Homo sapiens
gtctttttattctgt

SEQ ID NO: 127727 - DNA, 15 bp, Homo sapiens
ggtctttttattctg

SEQ ID NO: 127728 - DNA, 15 bp, Homo sapiens
gggtctttttattct

SEQ ID NO: 127729 - DNA, 15 bp, Homo sapiens
agggtctttttattc

SEQ ID NO: 127730 - DNA, 15 bp, Homo sapiens
cagggtctttttatt

SEQ ID NO: 127731 - DNA, 15 bp, Homo sapiens
acagggtctttttat

SEQ ID NO: 127732 - DNA, 15 bp, Homo sapiens
gacagggtcttttta

SEQ ID NO: 127733 - DNA, 15 bp, Homo sapiens
agacagggtcttttt

SEQ ID NO: 127734 - DNA, 15 bp, Homo sapiens
gagacagggtctttt

SEQ ID NO: 127735 - DNA, 15 bp, Homo sapiens
tgagacagggtcttt

SEQ ID NO: 127736 - DNA, 15 bp, Homo sapiens
ttgagacagggtctt

SEQ ID NO: 127737 - DNA, 15 bp, Homo sapiens
tttgagacagggtct

SEQ ID NO: 127738 - DNA, 15 bp, Homo sapiens
ttttgagacagggtc

SEQ ID NO: 127739 - DNA, 15 bp, Homo sapiens
tttttgagacagggt

SEQ ID NO: 127740 - DNA, 15 bp, Homo sapiens
ttttttgagacaggg

SEQ ID NO: 127741 - DNA, 15 bp, Homo sapiens
tttttttgagacagg

SEQ ID NO: 127742 - DNA, 15 bp, Homo sapiens
ttttttttgagacag

SEQ ID NO: 127743 - DNA, 15 bp, Homo sapiens
tttttttttgagaca

SEQ ID NO: 127744 - DNA, 15 bp, Homo sapiens
ttttttttttgagac

SEQ ID NO: 127745 - DNA, 15 bp, Homo sapiens
tttttttttttgaga

SEQ ID NO: 127746 - DNA, 15 bp, Homo sapiens
ttttttttttttgag

SEQ ID NO: 127747 - DNA, 15 bp, Homo sapiens
tttttttttttttga

SEQ ID NO: 127748 - DNA, 15 bp, Homo sapiens
ttttttttttttttg

SEQ ID NO: 127749 - DNA, 15 bp, Homo sapiens
ttttttttttttttt

SEQ ID NO: 127750 - DNA, 15 bp, Homo sapiens
ctttttttttttttt

SEQ ID NO: 127751 - DNA, 15 bp, Homo sapiens
tcttttttttttttt

SEQ ID NO: 127752 - DNA, 15 bp, Homo sapiens
ctctttttttttttt

SEQ ID NO: 127753 - DNA, 15 bp, Homo sapiens
cctcttttttttttt

SEQ ID NO: 127754 - DNA, 15 bp, Homo sapiens
gcctctttttttttt

SEQ ID NO: 127755 - DNA, 15 bp, Homo sapiens
cgcctcttttttttt

SEQ ID NO: 127756 - DNA, 15 bp, Homo sapiens
ccgcctctttttttt

SEQ ID NO: 127757 - DNA, 15 bp, Homo sapiens
tccgcctcttttttt

SEQ ID NO: 127758 - DNA, 15 bp, Homo sapiens
ctccgcctctttttt

SEQ ID NO: 127759 - DNA, 15 bp, Homo sapiens
cctccgcctcttttt

SEQ ID NO: 127760 - DNA, 15 bp, Homo sapiens
gcctccgcctctttt

SEQ ID NO: 127761 - DNA, 15 bp, Homo sapiens
cgcctccgcctcttt

SEQ ID NO: 127762 - DNA, 15 bp, Homo sapiens
ccgcctccgcctctt

SEQ ID NO: 127763 - DNA, 15 bp, Homo sapiens
cccgcctccgcctct

SEQ ID NO: 127764 - DNA, 15 bp, Homo sapiens
gcccgcctccgcctc

SEQ ID NO: 127765 - DNA, 15 bp, Homo sapiens
cgcccgcctccgcct

SEQ ID NO: 127766 - DNA, 15 bp, Homo sapiens
ccgcccgcctccgcc

SEQ ID NO: 127767 - DNA, 15 bp, Homo sapiens
tccgcccgcctccgc

SEQ ID NO: 127768 - DNA, 15 bp, Homo sapiens
atccgcccgcctccg

SEQ ID NO: 127769 - DNA, 15 bp, Homo sapiens
gatccgcccgcctcc

SEQ ID NO: 127770 - DNA, 15 bp, Homo sapiens
tgatccgcccgcctc

SEQ ID NO: 127771 - DNA, 15 bp, Homo sapiens
gtgatccgcccgcct

SEQ ID NO: 127772 - DNA, 15 bp, Homo sapiens
cgtgatccgcccgcc

SEQ ID NO: 127773 - DNA, 15 bp, Homo sapiens
tcgtgatccgcccgc

SEQ ID NO: 127774 - DNA, 15 bp, Homo sapiens
ctcgtgatccgcccg

SEQ ID NO: 127775 - DNA, 15 bp, Homo sapiens
cctcgtgatccgccc

SEQ ID NO: 127776 - DNA, 15 bp, Homo sapiens
acctcgtgatccgcc

SEQ ID NO: 127777 - DNA, 15 bp, Homo sapiens
gacctcgtgatccgc

SEQ ID NO: 127778 - DNA, 15 bp, Homo sapiens
tgacctcgtgatccg

SEQ ID NO: 127779 - DNA, 15 bp, Homo sapiens
ctgacctcgtgatcc

SEQ ID NO: 127780 - DNA, 15 bp, Homo sapiens
cctgacctcgtgatc

SEQ ID NO: 127781 - DNA, 15 bp, Homo sapiens
tcctgacctcgtgat

SEQ ID NO: 127782 - DNA, 15 bp, Homo sapiens
ctcctgacctcgtga

SEQ ID NO: 127783 - DNA, 15 bp, Homo sapiens
tctcctgacctcgtg

SEQ ID NO: 127784 - DNA, 15 bp, Homo sapiens
atctcctgacctcgt

SEQ ID NO: 127785 - DNA, 15 bp, Homo sapiens
gatctcctgacctcg

SEQ ID NO: 127786 - DNA, 15 bp, Homo sapiens
cgatctcctgacctc

SEQ ID NO: 127787 - DNA, 15 bp, Homo sapiens
tcgatctcctgacct

SEQ ID NO: 127788 - DNA, 15 bp, Homo sapiens
ctcgatctcctgacc

SEQ ID NO: 127789 - DNA, 15 bp, Homo sapiens
tctcgatctcctgac

SEQ ID NO: 127790 - DNA, 15 bp, Homo sapiens
gtctcgatctcctga

SEQ ID NO: 127791 - DNA, 15 bp, Homo sapiens
ggtctcgatctcctg

SEQ ID NO: 127792 - DNA, 15 bp, Homo sapiens
tggtctcgatctcct

SEQ ID NO: 127793 - DNA, 15 bp, Homo sapiens
atggtctcgatctcc

SEQ ID NO: 127794 - DNA, 15 bp, Homo sapiens
gatggtctcgatctc

SEQ ID NO: 127795 - DNA, 15 bp, Homo sapiens
ggatggtctcgatct

SEQ ID NO: 127796 - DNA, 15 bp, Homo sapiens
gggatggtctcgatc

SEQ ID NO: 127797 - DNA, 15 bp, Homo sapiens
tgggatggtctcgat

SEQ ID NO: 127798 - DNA, 15 bp, Homo sapiens
ctgggatggtctcga

SEQ ID NO: 127799 - DNA, 15 bp, Homo sapiens
gctgggatggtctcg

SEQ ID NO: 127800 - DNA, 15 bp, Homo sapiens
agctgggatggtctc

SEQ ID NO: 127801 - DNA, 15 bp, Homo sapiens
tagctgggatggtct

SEQ ID NO: 127802 - DNA, 15 bp, Homo sapiens
ttagctgggatggtc

SEQ ID NO: 127803 - DNA, 15 bp, Homo sapiens
tttagctgggatggt

SEQ ID NO: 127804 - DNA, 15 bp, Homo sapiens
ttttagctgggatgg

SEQ ID NO: 127805 - DNA, 15 bp, Homo sapiens
gttttagctgggatg

SEQ ID NO: 127806 - DNA, 15 bp, Homo sapiens
tgttttagctgggat

SEQ ID NO: 127807 - DNA, 15 bp, Homo sapiens
ctgttttagctggga

SEQ ID NO: 127808 - DNA, 15 bp, Homo sapiens
actgttttagctggg

SEQ ID NO: 127809 - DNA, 15 bp, Homo sapiens
cactgttttagctgg

SEQ ID NO: 127810 - DNA, 15 bp, Homo sapiens
tcactgttttagctg

SEQ ID NO: 127811 - DNA, 15 bp, Homo sapiens
ttcactgttttagct

SEQ ID NO: 127812 - DNA, 15 bp, Homo sapiens
tttcactgttttagc

SEQ ID NO: 127813 - DNA, 15 bp, Homo sapiens
gtttcactgttttag

SEQ ID NO: 127814 - DNA, 15 bp, Homo sapiens
ggtttcactgtttta

SEQ ID NO: 127815 - DNA, 15 bp, Homo sapiens
gggtttcactgtttt

SEQ ID NO: 127816 - DNA, 15 bp, Homo sapiens
agggtttcactgttt

SEQ ID NO: 127817 - DNA, 15 bp, Homo sapiens
cagggtttcactgtt

SEQ ID NO: 127818 - DNA, 15 bp, Homo sapiens
acagggtttcactgt

SEQ ID NO: 127819 - DNA, 15 bp, Homo sapiens
gacagggtttcactg

SEQ ID NO: 127820 - DNA, 15 bp, Homo sapiens
agacagggtttcact

SEQ ID NO: 127821 - DNA, 15 bp, Homo sapiens
gagacagggtttcac

SEQ ID NO: 127822 - DNA, 15 bp, Homo sapiens
agagacagggtttca

SEQ ID NO: 127823 - DNA, 15 bp, Homo sapiens
tagagacagggtttc

SEQ ID NO: 127824 - DNA, 15 bp, Homo sapiens
gtagagacagggttt

SEQ ID NO: 127825 - DNA, 15 bp, Homo sapiens
agtagagacagggtt

SEQ ID NO: 127826 - DNA, 15 bp, Homo sapiens
tagtagagacagggt

SEQ ID NO: 127827 - DNA, 15 bp, Homo sapiens
ttagtagagacaggg

SEQ ID NO: 127828 - DNA, 15 bp, Homo sapiens
tttagtagagacagg

SEQ ID NO: 127829 - DNA, 15 bp, Homo sapiens
ttttagtagagacag

SEQ ID NO: 127830 - DNA, 15 bp, Homo sapiens
tttttagtagagaca

SEQ ID NO: 127831 - DNA, 15 bp, Homo sapiens
ttttttagtagagac

SEQ ID NO: 127832 - DNA, 15 bp, Homo sapiens
tttttttagtagaga

SEQ ID NO: 127833 - DNA, 15 bp, Homo sapiens
gtttttttagtagag

SEQ ID NO: 127834 - DNA, 15 bp, Homo sapiens
tgtttttttagtaga

SEQ ID NO: 127835 - DNA, 15 bp, Homo sapiens
ttgtttttttagtag

SEQ ID NO: 127836 - DNA, 15 bp, Homo sapiens
tttgtttttttagta

SEQ ID NO: 127837 - DNA, 15 bp, Homo sapiens
ttttgtttttttagt

SEQ ID NO: 127838 - DNA, 15 bp, Homo sapiens
gttttgtttttttag

SEQ ID NO: 127839 - DNA, 15 bp, Homo sapiens
tgttttgttttttta

SEQ ID NO: 127840 - DNA, 15 bp, Homo sapiens
atgttttgttttttt

SEQ ID NO: 127841 - DNA, 15 bp, Homo sapiens
aatgttttgtttttt

SEQ ID NO: 127842 - DNA, 15 bp, Homo sapiens
taatgttttgttttt

SEQ ID NO: 127843 - DNA, 15 bp, Homo sapiens
ctaatgttttgtttt

SEQ ID NO: 127844 - DNA, 15 bp, Homo sapiens
gctaatgttttgttt

SEQ ID NO: 127845 - DNA, 15 bp, Homo sapiens
ggctaatgttttgtt

SEQ ID NO: 127846 - DNA, 15 bp, Homo sapiens
cggctaatgttttgt

SEQ ID NO: 127847 - DNA, 15 bp, Homo sapiens
ccggctaatgttttg

SEQ ID NO: 127848 - DNA, 15 bp, Homo sapiens
cccggctaatgtttt

SEQ ID NO: 127849 - DNA, 15 bp, Homo sapiens
gcccggctaatgttt

SEQ ID NO: 127850 - DNA, 15 bp, Homo sapiens
cgcccggctaatgtt

SEQ ID NO: 127851 - DNA, 15 bp, Homo sapiens
acgcccggctaatgt

SEQ ID NO: 127852 - DNA, 15 bp, Homo sapiens
tacgcccggctaatg

SEQ ID NO: 127853 - DNA, 15 bp, Homo sapiens
ctacgcccggctaat

SEQ ID NO: 127854 - DNA, 15 bp, Homo sapiens
actacgcccggctaa

SEQ ID NO: 127855 - DNA, 15 bp, Homo sapiens
cactacgcccggcta

SEQ ID NO: 127856 - DNA, 15 bp, Homo sapiens
ccactacgcccggct

SEQ ID NO: 127857 - DNA, 15 bp, Homo sapiens
gccactacgcccggc

SEQ ID NO: 127858 - DNA, 15 bp, Homo sapiens
cgccactacgcccgg

SEQ ID NO: 127859 - DNA, 15 bp, Homo sapiens
ccgccactacgcccg

SEQ ID NO: 127860 - DNA, 15 bp, Homo sapiens
cccgccactacgccc

SEQ ID NO: 127861 - DNA, 15 bp, Homo sapiens
acccgccactacgcc

SEQ ID NO: 127862 - DNA, 15 bp, Homo sapiens
cacccgccactacgc

SEQ ID NO: 127863 - DNA, 15 bp, Homo sapiens
gcacccgccactacg

SEQ ID NO: 127864 - DNA, 15 bp, Homo sapiens
ggcacccgccactac

SEQ ID NO: 127865 - DNA, 15 bp, Homo sapiens
aggcacccgccacta

SEQ ID NO: 127866 - DNA, 15 bp, Homo sapiens
caggcacccgccact

SEQ ID NO: 127867 - DNA, 15 bp, Homo sapiens
acaggcacccgccac

SEQ ID NO: 127868 - DNA, 15 bp, Homo sapiens
tacaggcacccgcca

SEQ ID NO: 127869 - DNA, 15 bp, Homo sapiens
ctacaggcacccgcc

SEQ ID NO: 127870 - DNA, 15 bp, Homo sapiens
actacaggcacccgc

SEQ ID NO: 127871 - DNA, 15 bp, Homo sapiens
gactacaggcacccg

SEQ ID NO: 127872 - DNA, 15 bp, Homo sapiens
ggactacaggcaccc

SEQ ID NO: 127873 - DNA, 15 bp, Homo sapiens
gggactacaggcacc

SEQ ID NO: 127874 - DNA, 15 bp, Homo sapiens
tgggactacaggcac

SEQ ID NO: 127875 - DNA, 15 bp, Homo sapiens
ctgggactacaggca

SEQ ID NO: 127876 - DNA, 15 bp, Homo sapiens
gctgggactacaggc

SEQ ID NO: 127877 - DNA, 15 bp, Homo sapiens
aagtagctgggacta

SEQ ID NO: 127878 - DNA, 15 bp, Homo sapiens
caagtagctgggact

SEQ ID NO: 127879 - DNA, 15 bp, Homo sapiens
ccaagtagctgggac

SEQ ID NO: 127880 - DNA, 15 bp, Homo sapiens
cccaagtagctggga

SEQ ID NO: 127881 - DNA, 15 bp, Homo sapiens
tcccaagtagctggg

SEQ ID NO: 127882 - DNA, 15 bp, Homo sapiens
ctcccaagtagctgg

SEQ ID NO: 127883 - DNA, 15 bp, Homo sapiens
cctcccaagtagctg

SEQ ID NO: 127884 - DNA, 15 bp, Homo sapiens
gcctcccaagtagct

SEQ ID NO: 127885 - DNA, 15 bp, Homo sapiens
agcctcccaagtagc

SEQ ID NO: 127886 - DNA, 15 bp, Homo sapiens
cagcctcccaagtag

SEQ ID NO: 127887 - DNA, 15 bp, Homo sapiens
tcagcctcccaagta

SEQ ID NO: 127888 - DNA, 15 bp, Homo sapiens
ctcagcctcccaagt

SEQ ID NO: 127889 - DNA, 15 bp, Homo sapiens
cctcagcctcccaag

SEQ ID NO: 127890 - DNA, 15 bp, Homo sapiens
gcctcagcctcccaa

SEQ ID NO: 127891 - DNA, 15 bp, Homo sapiens
tgcctcagcctccca

SEQ ID NO: 127892 - DNA, 15 bp, Homo sapiens
ctgcctcagcctccc

SEQ ID NO: 127893 - DNA, 15 bp, Homo sapiens
cctgcctcagcctcc

SEQ ID NO: 127894 - DNA, 15 bp, Homo sapiens
tcctgcctcagcctc

SEQ ID NO: 127895 - DNA, 15 bp, Homo sapiens
ctcctgcctcagcct

SEQ ID NO: 127896 - DNA, 15 bp, Homo sapiens
tctcctgcctcagcc

SEQ ID NO: 127897 - DNA, 15 bp, Homo sapiens
ttctcctgcctcagc

SEQ ID NO: 127898 - DNA, 15 bp, Homo sapiens
attctcctgcctcag

SEQ ID NO: 127899 - DNA, 15 bp, Homo sapiens
cattctcctgcctca

SEQ ID NO: 127900 - DNA, 15 bp, Homo sapiens
ccattctcctgcctc

SEQ ID NO: 127901 - DNA, 15 bp, Homo sapiens
gccattctcctgcct

SEQ ID NO: 127902 - DNA, 15 bp, Homo sapiens
cgccattctcctgcc

SEQ ID NO: 127903 - DNA, 15 bp, Homo sapiens
acgccattctcctgc

SEQ ID NO: 127904 - DNA, 15 bp, Homo sapiens
cacgccattctcctg

SEQ ID NO: 127905 - DNA, 15 bp, Homo sapiens
tcacgccattctcct

SEQ ID NO: 127906 - DNA, 15 bp, Homo sapiens
ttcacgccattctcc

SEQ ID NO: 127907 - DNA, 15 bp, Homo sapiens
gttcacgccattctc

SEQ ID NO: 127908 - DNA, 15 bp, Homo sapiens
ggttcacgccattct

SEQ ID NO: 127909 - DNA, 15 bp, Homo sapiens
gggttcacgccattc

SEQ ID NO: 127910 - DNA, 15 bp, Homo sapiens
cgggttcacgccatt

SEQ ID NO: 127911 - DNA, 15 bp, Homo sapiens
ccgggttcacgccat

SEQ ID NO: 127912 - DNA, 15 bp, Homo sapiens
cccgggttcacgcca

SEQ ID NO: 127913 - DNA, 15 bp, Homo sapiens
tcccgggttcacgcc

SEQ ID NO: 127914 - DNA, 15 bp, Homo sapiens
ctcccgggttcacgc

SEQ ID NO: 127915 - DNA, 15 bp, Homo sapiens
cctcccgggttcacg

SEQ ID NO: 127916 - DNA, 15 bp, Homo sapiens
acctcccgggttcac

SEQ ID NO: 127917 - DNA, 15 bp, Homo sapiens
cacctcccgggttca

SEQ ID NO: 127918 - DNA, 15 bp, Homo sapiens
ccacctcccgggttc

SEQ ID NO: 127919 - DNA, 15 bp, Homo sapiens
tccacctcccgggtt

SEQ ID NO: 127920 - DNA, 15 bp, Homo sapiens
ctccacctcccgggt

SEQ ID NO: 127921 - DNA, 15 bp, Homo sapiens
gctccacctcccggg

SEQ ID NO: 127922 - DNA, 15 bp, Homo sapiens
agctccacctcccgg

SEQ ID NO: 127923 - DNA, 15 bp, Homo sapiens
aagctccacctcccg

SEQ ID NO: 127924 - DNA, 15 bp, Homo sapiens
caagctccacctccc

SEQ ID NO: 127925 - DNA, 15 bp, Homo sapiens
gcaagctccacctcc

SEQ ID NO: 127926 - DNA, 15 bp, Homo sapiens
tgcaagctccacctc

SEQ ID NO: 127927 - DNA, 15 bp, Homo sapiens
ctgcaagctccacct

SEQ ID NO: 127928 - DNA, 15 bp, Homo sapiens
actgcaagctccacc

SEQ ID NO: 127929 - DNA, 15 bp, Homo sapiens
cactgcaagctccac

SEQ ID NO: 127930 - DNA, 15 bp, Homo sapiens
tcactgcaagctcca

SEQ ID NO: 127931 - DNA, 15 bp, Homo sapiens
ctcactgcaagctcc

SEQ ID NO: 127932 - DNA, 15 bp, Homo sapiens
gctcactgcaagctc

SEQ ID NO: 127933 - DNA, 15 bp, Homo sapiens
ggctcactgcaagct

SEQ ID NO: 127934 - DNA, 15 bp, Homo sapiens
cggctcactgcaagc

SEQ ID NO: 127935 - DNA, 15 bp, Homo sapiens
tcggctcactgcaag

SEQ ID NO: 127936 - DNA, 15 bp, Homo sapiens
ctcggctcactgcaa

SEQ ID NO: 127937 - DNA, 15 bp, Homo sapiens
tctcggctcactgca

SEQ ID NO: 127938 - DNA, 15 bp, Homo sapiens
atctcggctcactgc

SEQ ID NO: 127939 - DNA, 15 bp, Homo sapiens
gatctcggctcactg

SEQ ID NO: 127940 - DNA, 15 bp, Homo sapiens
ggatctcggctcact

SEQ ID NO: 127941 - DNA, 15 bp, Homo sapiens
gggatctcggctcac

SEQ ID NO: 127942 - DNA, 15 bp, Homo sapiens
cgggatctcggctca

SEQ ID NO: 127943 - DNA, 15 bp, Homo sapiens
gcgggatctcggctc

SEQ ID NO: 127944 - DNA, 15 bp, Homo sapiens
ggcgggatctcggct

SEQ ID NO: 127945 - DNA, 15 bp, Homo sapiens
tggcgggatctcggc

SEQ ID NO: 127946 - DNA, 15 bp, Homo sapiens
gtggcgggatctcgg

SEQ ID NO: 127947 - DNA, 15 bp, Homo sapiens
agtggcgggatctcg

SEQ ID NO: 127948 - DNA, 15 bp, Homo sapiens
cagtggcgggatctc

SEQ ID NO: 127949 - DNA, 15 bp, Homo sapiens
gcagtggcgggatct

SEQ ID NO: 127950 - DNA, 15 bp, Homo sapiens
tgcagtggcgggatc

SEQ ID NO: 127951 - DNA, 15 bp, Homo sapiens
gtgcagtggcgggat

SEQ ID NO: 127952 - DNA, 15 bp, Homo sapiens
agtgcagtggcggga

SEQ ID NO: 127953 - DNA, 15 bp, Homo sapiens
gagtgcagtggcggg

SEQ ID NO: 127954 - DNA, 15 bp, Homo sapiens
ggagtgcagtggcgg

SEQ ID NO: 127955 - DNA, 15 bp, Homo sapiens
tggagtgcagtggcg

SEQ ID NO: 127956 - DNA, 15 bp, Homo sapiens
cccaggctggagtgc

SEQ ID NO: 127957 - DNA, 15 bp, Homo sapiens
gcccaggctggagtg

SEQ ID NO: 127958 - DNA, 15 bp, Homo sapiens
cgcccaggctggagt

SEQ ID NO: 127959 - DNA, 15 bp, Homo sapiens
tcgcccaggctggag

SEQ ID NO: 127960 - DNA, 15 bp, Homo sapiens
gtcgcccaggctgga

SEQ ID NO: 127961 - DNA, 15 bp, Homo sapiens
tgtcgcccaggctgg

SEQ ID NO: 127962 - DNA, 15 bp, Homo sapiens
ctgtcgcccaggctg

SEQ ID NO: 127963 - DNA, 15 bp, Homo sapiens
tctgtcgcccaggct

SEQ ID NO: 127964 - DNA, 15 bp, Homo sapiens
ctctgtcgcccaggc

SEQ ID NO: 127965 - DNA, 15 bp, Homo sapiens
gctctgtcgcccagg

SEQ ID NO: 127966 - DNA, 15 bp, Homo sapiens
cgctctgtcgcccag

SEQ ID NO: 127967 - DNA, 15 bp, Homo sapiens
tcgctctgtcgccca

SEQ ID NO: 127968 - DNA, 15 bp, Homo sapiens
ctcgctctgtcgccc

SEQ ID NO: 127969 - DNA, 15 bp, Homo sapiens
tctcgctctgtcgcc

SEQ ID NO: 127970 - DNA, 15 bp, Homo sapiens
gtctcgctctgtcgc

SEQ ID NO: 127971 - DNA, 15 bp, Homo sapiens
agtctcgctctgtcg

SEQ ID NO: 127972 - DNA, 15 bp, Homo sapiens
gagtctcgctctgtc

SEQ ID NO: 127973 - DNA, 15 bp, Homo sapiens
ggagtctcgctctgt

SEQ ID NO: 127974 - DNA, 15 bp, Homo sapiens
cggagtctcgctctg

SEQ ID NO: 127975 - DNA, 15 bp, Homo sapiens
acggagtctcgctct

SEQ ID NO: 127976 - DNA, 15 bp, Homo sapiens
gacggagtctcgctc

SEQ ID NO: 127977 - DNA, 15 bp, Homo sapiens
agacggagtctcgct

SEQ ID NO: 127978 - DNA, 15 bp, Homo sapiens
gagacggagtctcgc

SEQ ID NO: 127979 - DNA, 15 bp, Homo sapiens
tgagacggagtctcg

SEQ ID NO: 127980 - DNA, 15 bp, Homo sapiens
ttgagacggagtctc

SEQ ID NO: 127981 - DNA, 15 bp, Homo sapiens
tttgagacggagtct

SEQ ID NO: 127982 - DNA, 15 bp, Homo sapiens
ttttgagacggagtc

SEQ ID NO: 127983 - DNA, 15 bp, Homo sapiens
tttttgagacggagt

SEQ ID NO: 127984 - DNA, 15 bp, Homo sapiens
ttttttgagacggag

SEQ ID NO: 127985 - DNA, 15 bp, Homo sapiens
tttttttgagacgga

SEQ ID NO: 127986 - DNA, 15 bp, Homo sapiens
ttttttttgagacgg

SEQ ID NO: 127987 - DNA, 15 bp, Homo sapiens
tttttttttgagacg

SEQ ID NO: 127988 - DNA, 15 bp, Homo sapiens
gtttttttttttttt

SEQ ID NO: 127989 - DNA, 15 bp, Homo sapiens
tgttttttttttttt

SEQ ID NO: 127990 - DNA, 15 bp, Homo sapiens
ttgtttttttttttt

SEQ ID NO: 127991 - DNA, 15 bp, Homo sapiens
tttgttttttttttt

SEQ ID NO: 127992 - DNA, 15 bp, Homo sapiens
ttttgtttttttttt

SEQ ID NO: 127993 - DNA, 15 bp, Homo sapiens
tttttgttttttttt

SEQ ID NO: 127994 - DNA, 15 bp, Homo sapiens
ttttttgtttttttt

SEQ ID NO: 127995 - DNA, 15 bp, Homo sapiens
cttttttgttttttt

SEQ ID NO: 127996 - DNA, 15 bp, Homo sapiens
tcttttttgtttttt

SEQ ID NO: 127997 - DNA, 15 bp, Homo sapiens
ttcttttttgttttt

SEQ ID NO: 127998 - DNA, 15 bp, Homo sapiens
tttcttttttgtttt

SEQ ID NO: 127999 - DNA, 15 bp, Homo sapiens
ttttcttttttgttt

SEQ ID NO: 128000 - DNA, 15 bp, Homo sapiens
tttttcttttttgtt

SEQ ID NO: 128001 - DNA, 15 bp, Homo sapiens
ttttttcttttttgt

SEQ ID NO: 128002 - DNA, 15 bp, Homo sapiens
tttttttcttttttg

SEQ ID NO: 128003 - DNA, 15 bp, Homo sapiens
ttttttttctttttt

SEQ ID NO: 128004 - DNA, 15 bp, Homo sapiens
tttttttttcttttt

SEQ ID NO: 128005 - DNA, 15 bp, Homo sapiens
ttttttttttctttt

SEQ ID NO: 128006 - DNA, 15 bp, Homo sapiens
tttttttttttcttt

SEQ ID NO: 128007 - DNA, 15 bp, Homo sapiens
ttttttttttttctt

SEQ ID NO: 128008 - DNA, 15 bp, Homo sapiens
cttttttttttttct

SEQ ID NO: 128009 - DNA, 15 bp, Homo sapiens
tcttttttttttttc

SEQ ID NO: 128010 - DNA, 15 bp, Homo sapiens
ttctttttttttttt

SEQ ID NO: 128011 - DNA, 15 bp, Homo sapiens
tttcttttttttttt

SEQ ID NO: 128012 - DNA, 15 bp, Homo sapiens
ttttctttttttttt

SEQ ID NO: 128013 - DNA, 15 bp, Homo sapiens
tttttcttttttttt

SEQ ID NO: 128014 - DNA, 15 bp, Homo sapiens
ttttttctttttttt

SEQ ID NO: 128015 - DNA, 15 bp, Homo sapiens
attttttcttttttt

SEQ ID NO: 128016 - DNA, 15 bp, Homo sapiens
aattttttctttttt

SEQ ID NO: 128017 - DNA, 15 bp, Homo sapiens
aaattttttcttttt

SEQ ID NO: 128018 - DNA, 15 bp, Homo sapiens
aaaattttttctttt

SEQ ID NO: 128019 - DNA, 15 bp, Homo sapiens
caaaattttttcttt

SEQ ID NO: 128020 - DNA, 15 bp, Homo sapiens
tcaaaattttttctt

SEQ ID NO: 128021 - DNA, 15 bp, Homo sapiens
atcaaaattttttct

SEQ ID NO: 128022 - DNA, 15 bp, Homo sapiens
gatcaaaattttttc

SEQ ID NO: 128023 - DNA, 15 bp, Homo sapiens
tgatcaaaatttttt

SEQ ID NO: 128024 - DNA, 15 bp, Homo sapiens
ctgatcaaaattttt

SEQ ID NO: 128025 - DNA, 15 bp, Homo sapiens
cctgatcaaaatttt

SEQ ID NO: 128026 - DNA, 15 bp, Homo sapiens
tcctgatcaaaattt

SEQ ID NO: 128027 - DNA, 15 bp, Homo sapiens
atcctgatcaaaatt

SEQ ID NO: 128028 - DNA, 15 bp, Homo sapiens
tatcctgatcaaaat

SEQ ID NO: 128029 - DNA, 15 bp, Homo sapiens
ttatcctgatcaaaa

SEQ ID NO: 128030 - DNA, 15 bp, Homo sapiens
tttatcctgatcaaa

SEQ ID NO: 128031 - DNA, 15 bp, Homo sapiens
ctttatcctgatcaa

SEQ ID NO: 128032 - DNA, 15 bp, Homo sapiens
gctttatcctgatca

SEQ ID NO: 128033 - DNA, 15 bp, Homo sapiens
ggctttatcctgatc

SEQ ID NO: 128034 - DNA, 15 bp, Homo sapiens
aggctttatcctgat

SEQ ID NO: 128035 - DNA, 15 bp, Homo sapiens
aaggctttatcctga

SEQ ID NO: 128036 - DNA, 15 bp, Homo sapiens
aaaggctttatcctg

SEQ ID NO: 128037 - DNA, 15 bp, Homo sapiens
gaaaggctttatcct

SEQ ID NO: 128038 - DNA, 15 bp, Homo sapiens
tgaaaggctttatcc

SEQ ID NO: 128039 - DNA, 15 bp, Homo sapiens
atgaaaggctttatc

SEQ ID NO: 128040 - DNA, 15 bp, Homo sapiens
tatgaaaggctttat

SEQ ID NO: 128041 - DNA, 15 bp, Homo sapiens
ttatgaaaggcttta

SEQ ID NO: 128042 - DNA, 15 bp, Homo sapiens
tttatgaaaggcttt

SEQ ID NO: 128043 - DNA, 15 bp, Homo sapiens
atttatgaaaggctt

SEQ ID NO: 128044 - DNA, 15 bp, Homo sapiens
catttatgaaaggct

SEQ ID NO: 128045 - DNA, 15 bp, Homo sapiens
tcatttatgaaaggc

SEQ ID NO: 128046 - DNA, 15 bp, Homo sapiens
ttcatttatgaaagg

SEQ ID NO: 128047 - DNA, 15 bp, Homo sapiens
attcatttatgaaag

SEQ ID NO: 128048 - DNA, 15 bp, Homo sapiens
aattcatttatgaaa

SEQ ID NO: 128049 - DNA, 15 bp, Homo sapiens
taattcatttatgaa

SEQ ID NO: 128050 - DNA, 15 bp, Homo sapiens
ctaattcatttatga

SEQ ID NO: 128051 - DNA, 15 bp, Homo sapiens
tctaattcatttatg

SEQ ID NO: 128052 - DNA, 15 bp, Homo sapiens
ctctaattcatttat

SEQ ID NO: 128053 - DNA, 15 bp, Homo sapiens
gctctaattcattta

SEQ ID NO: 128054 - DNA, 15 bp, Homo sapiens
tgctctaattcattt

SEQ ID NO: 128055 - DNA, 15 bp, Homo sapiens
atgctctaattcatt

SEQ ID NO: 128056 - DNA, 15 bp, Homo sapiens
gatgctctaattcat

SEQ ID NO: 128057 - DNA, 15 bp, Homo sapiens
agatgctctaattca

SEQ ID NO: 128058 - DNA, 15 bp, Homo sapiens
aagatgctctaattc

SEQ ID NO: 128059 - DNA, 15 bp, Homo sapiens
taagatgctctaatt

SEQ ID NO: 128060 - DNA, 15 bp, Homo sapiens
ataagatgctctaat

SEQ ID NO: 128061 - DNA, 15 bp, Homo sapiens
tataagatgctctaa

SEQ ID NO: 128062 - DNA, 15 bp, Homo sapiens
gtataagatgctcta

SEQ ID NO: 128063 - DNA, 15 bp, Homo sapiens
agtataagatgctct

SEQ ID NO: 128064 - DNA, 15 bp, Homo sapiens
tagtataagatgctc

SEQ ID NO: 128065 - DNA, 15 bp, Homo sapiens
gtagtataagatgct

SEQ ID NO: 128066 - DNA, 15 bp, Homo sapiens
agtagtataagatgc

SEQ ID NO: 128067 - DNA, 15 bp, Homo sapiens
gagtagtataagatg

SEQ ID NO: 128068 - DNA, 15 bp, Homo sapiens
tgagtagtataagat

SEQ ID NO: 128069 - DNA, 15 bp, Homo sapiens
atgagtagtataaga

SEQ ID NO: 128070 - DNA, 15 bp, Homo sapiens
aatgagtagtataag

SEQ ID NO: 128071 - DNA, 15 bp, Homo sapiens
aaatgagtagtataa

SEQ ID NO: 128072 - DNA, 15 bp, Homo sapiens
aaaatgagtagtata

SEQ ID NO: 128073 - DNA, 15 bp, Homo sapiens
caaaatgagtagtat

SEQ ID NO: 128074 - DNA, 15 bp, Homo sapiens
acaaaatgagtagta

SEQ ID NO: 128075 - DNA, 15 bp, Homo sapiens
aacaaaatgagtagt

SEQ ID NO: 128076 - DNA, 15 bp, Homo sapiens
aaacaaaatgagtag

SEQ ID NO: 128077 - DNA, 15 bp, Homo sapiens
taaacaaaatgagta

SEQ ID NO: 128078 - DNA, 15 bp, Homo sapiens
ataaacaaaatgagt

SEQ ID NO: 128079 - DNA, 15 bp, Homo sapiens
tataaacaaaatgag

SEQ ID NO: 128080 - DNA, 15 bp, Homo sapiens
gtataaacaaaatga

SEQ ID NO: 128081 - DNA, 15 bp, Homo sapiens
tgtataaacaaaatg

SEQ ID NO: 128082 - DNA, 15 bp, Homo sapiens
atgtataaacaaaat

SEQ ID NO: 128083 - DNA, 15 bp, Homo sapiens
gatgtataaacaaaa

SEQ ID NO: 128084 - DNA, 15 bp, Homo sapiens
agatgtataaacaaa

SEQ ID NO: 128085 - DNA, 15 bp, Homo sapiens
gagatgtataaacaa

SEQ ID NO: 128086 - DNA, 15 bp, Homo sapiens
tgagatgtataaaca

SEQ ID NO: 128087 - DNA, 15 bp, Homo sapiens
atgagatgtataaac

SEQ ID NO: 128088 - DNA, 15 bp, Homo sapiens
catgagatgtataaa

SEQ ID NO: 128089 - DNA, 15 bp, Homo sapiens
ccatgagatgtataa

SEQ ID NO: 128090 - DNA, 15 bp, Homo sapiens
accatgagatgtata

SEQ ID NO: 128091 - DNA, 15 bp, Homo sapiens
taccatgagatgtat

SEQ ID NO: 128092 - DNA, 15 bp, Homo sapiens
ttaccatgagatgta

SEQ ID NO: 128093 - DNA, 15 bp, Homo sapiens
tttaccatgagatgt

SEQ ID NO: 128094 - DNA, 15 bp, Homo sapiens
ctttaccatgagatg

SEQ ID NO: 128095 - DNA, 15 bp, Homo sapiens
gctttaccatgagat

SEQ ID NO: 128096 - DNA, 15 bp, Homo sapiens
agctttaccatgaga

SEQ ID NO: 128097 - DNA, 15 bp, Homo sapiens
aagctttaccatgag

SEQ ID NO: 128098 - DNA, 15 bp, Homo sapiens
caagctttaccatga

SEQ ID NO: 128099 - DNA, 15 bp, Homo sapiens
acaagctttaccatg

SEQ ID NO: 128100 - DNA, 15 bp, Homo sapiens
tacaagctttaccat

SEQ ID NO: 128101 - DNA, 15 bp, Homo sapiens
atacaagctttacca

SEQ ID NO: 128102 - DNA, 15 bp, Homo sapiens
tatacaagctttacc

SEQ ID NO: 128103 - DNA, 15 bp, Homo sapiens
ttatacaagctttac

SEQ ID NO: 128104 - DNA, 15 bp, Homo sapiens
attatacaagcttta

SEQ ID NO: 128105 - DNA, 15 bp, Homo sapiens
aattatacaagcttt

SEQ ID NO: 128106 - DNA, 15 bp, Homo sapiens
aaattatacaagctt

SEQ ID NO: 128107 - DNA, 15 bp, Homo sapiens
aaaattatacaagct

SEQ ID NO: 128108 - DNA, 15 bp, Homo sapiens
caaaattatacaagc

SEQ ID NO: 128109 - DNA, 15 bp, Homo sapiens
tcaaaattatacaag

SEQ ID NO: 128110 - DNA, 15 bp, Homo sapiens
ttcaaaattatacaa

SEQ ID NO: 128111 - DNA, 15 bp, Homo sapiens
attcaaaattataca

SEQ ID NO: 128112 - DNA, 15 bp, Homo sapiens
aattcaaaattatac

SEQ ID NO: 128113 - DNA, 15 bp, Homo sapiens
taattcaaaattata

SEQ ID NO: 128114 - DNA, 15 bp, Homo sapiens
ataattcaaaattat

SEQ ID NO: 128115 - DNA, 15 bp, Homo sapiens
tataattcaaaatta

SEQ ID NO: 128116 - DNA, 15 bp, Homo sapiens
gtataattcaaaatt

SEQ ID NO: 128117 - DNA, 15 bp, Homo sapiens
tgtataattcaaaat

SEQ ID NO: 128118 - DNA, 15 bp, Homo sapiens
atgtataattcaaaa

SEQ ID NO: 128119 - DNA, 15 bp, Homo sapiens
aatgtataattcaaa

SEQ ID NO: 128120 - DNA, 15 bp, Homo sapiens
aaatgtataattcaa

SEQ ID NO: 128121 - DNA, 15 bp, Homo sapiens
aaaatgtataattca

SEQ ID NO: 128122 - DNA, 15 bp, Homo sapiens
caaaatgtataattc

SEQ ID NO: 128123 - DNA, 15 bp, Homo sapiens
acaaaatgtataatt

SEQ ID NO: 128124 - DNA, 15 bp, Homo sapiens
cacaaaatgtataat

SEQ ID NO: 128125 - DNA, 15 bp, Homo sapiens
tcacaaaatgtataa

SEQ ID NO: 128126 - DNA, 15 bp, Homo sapiens
atcacaaaatgtata

SEQ ID NO: 128127 - DNA, 15 bp, Homo sapiens
aatcacaaaatgtat

SEQ ID NO: 128128 - DNA, 15 bp, Homo sapiens
aaatcacaaaatgta

SEQ ID NO: 128129 - DNA, 15 bp, Homo sapiens
aaaatcacaaaatgt

SEQ ID NO: 128130 - DNA, 15 bp, Homo sapiens
caaaatcacaaaatg

SEQ ID NO: 128131 - DNA, 15 bp, Homo sapiens
gcaaaatcacaaaat

SEQ ID NO: 128132 - DNA, 15 bp, Homo sapiens
agcaaaatcacaaaa

SEQ ID NO: 128133 - DNA, 15 bp, Homo sapiens
cagcaaaatcacaaa

SEQ ID NO: 128134 - DNA, 15 bp, Homo sapiens
tcagcaaaatcacaa

SEQ ID NO: 128135 - DNA, 15 bp, Homo sapiens
atcagcaaaatcaca

SEQ ID NO: 128136 - DNA, 15 bp, Homo sapiens
tatcagcaaaatcac

SEQ ID NO: 128137 - DNA, 15 bp, Homo sapiens
gtatcagcaaaatca

SEQ ID NO: 128138 - DNA, 15 bp, Homo sapiens
agtatcagcaaaatc

SEQ ID NO: 128139 - DNA, 15 bp, Homo sapiens
cagtatcagcaaaat

SEQ ID NO: 128140 - DNA, 15 bp, Homo sapiens
tcagtatcagcaaaa

SEQ ID NO: 128141 - DNA, 15 bp, Homo sapiens
ttcagtatcagcaaa

SEQ ID NO: 128142 - DNA, 15 bp, Homo sapiens
attcagtatcagcaa

SEQ ID NO: 128143 - DNA, 15 bp, Homo sapiens
tattcagtatcagca

SEQ ID NO: 128144 - DNA, 15 bp, Homo sapiens
gtattcagtatcagc

SEQ ID NO: 128145 - DNA, 15 bp, Homo sapiens
agtattcagtatcag

SEQ ID NO: 128146 - DNA, 15 bp, Homo sapiens
tagtattcagtatca

SEQ ID NO: 128147 - DNA, 15 bp, Homo sapiens
ctagtattcagtatc

SEQ ID NO: 128148 - DNA, 15 bp, Homo sapiens
actagtattcagtat

SEQ ID NO: 128149 - DNA, 15 bp, Homo sapiens
gactagtattcagta

SEQ ID NO: 128150 - DNA, 15 bp, Homo sapiens
agactagtattcagt

SEQ ID NO: 128151 - DNA, 15 bp, Homo sapiens
aagactagtattcag

SEQ ID NO: 128152 - DNA, 15 bp, Homo sapiens
aaagactagtattca

SEQ ID NO: 128153 - DNA, 15 bp, Homo sapiens
taaagactagtattc

SEQ ID NO: 128154 - DNA, 15 bp, Homo sapiens
ataaagactagtatt

SEQ ID NO: 128155 - DNA, 15 bp, Homo sapiens
tataaagactagtat

SEQ ID NO: 128156 - DNA, 15 bp, Homo sapiens
ttataaagactagta

SEQ ID NO: 128157 - DNA, 15 bp, Homo sapiens
attataaagactagt

SEQ ID NO: 128158 - DNA, 15 bp, Homo sapiens
tattataaagactag

SEQ ID NO: 128159 - DNA, 15 bp, Homo sapiens
ttattataaagacta

SEQ ID NO: 128160 - DNA, 15 bp, Homo sapiens
attattataaagact

SEQ ID NO: 128161 - DNA, 15 bp, Homo sapiens
gattattataaagac

SEQ ID NO: 128162 - DNA, 15 bp, Homo sapiens
agattattataaaga

SEQ ID NO: 128163 - DNA, 15 bp, Homo sapiens
cagattattataaag

SEQ ID NO: 128164 - DNA, 15 bp, Homo sapiens
tcagattattataaa

SEQ ID NO: 128165 - DNA, 15 bp, Homo sapiens
atcagattattataa

SEQ ID NO: 128166 - DNA, 15 bp, Homo sapiens
tatcagattattata

SEQ ID NO: 128167 - DNA, 15 bp, Homo sapiens
gtatcagattattat

SEQ ID NO: 128168 - DNA, 15 bp, Homo sapiens
cgtatcagattatta

SEQ ID NO: 128169 - DNA, 15 bp, Homo sapiens
acgtatcagattatt

SEQ ID NO: 128170 - DNA, 15 bp, Homo sapiens
aacgtatcagattat

SEQ ID NO: 128171 - DNA, 15 bp, Homo sapiens
aaacgtatcagatta

SEQ ID NO: 128172 - DNA, 15 bp, Homo sapiens
taaacgtatcagatt

SEQ ID NO: 128173 - DNA, 15 bp, Homo sapiens
ttaaacgtatcagat

SEQ ID NO: 128174 - DNA, 15 bp, Homo sapiens
tttaaacgtatcaga

SEQ ID NO: 128175 - DNA, 15 bp, Homo sapiens
ttttaaacgtatcag

SEQ ID NO: 128176 - DNA, 15 bp, Homo sapiens
cttttaaacgtatca

SEQ ID NO: 128177 - DNA, 15 bp, Homo sapiens
ccttttaaacgtatc

SEQ ID NO: 128178 - DNA, 15 bp, Homo sapiens
accttttaaacgtat

SEQ ID NO: 128179 - DNA, 15 bp, Homo sapiens
aaccttttaaacgta

SEQ ID NO: 128180 - DNA, 15 bp, Homo sapiens
caaccttttaaacgt

SEQ ID NO: 128181 - DNA, 15 bp, Homo sapiens
gcaaccttttaaacg

SEQ ID NO: 128182 - DNA, 15 bp, Homo sapiens
agcaaccttttaaac

SEQ ID NO: 128183 - DNA, 15 bp, Homo sapiens
tagcaaccttttaaa

SEQ ID NO: 128184 - DNA, 15 bp, Homo sapiens
atagcaaccttttaa

SEQ ID NO: 128185 - DNA, 15 bp, Homo sapiens
aatagcaacctttta

SEQ ID NO: 128186 - DNA, 15 bp, Homo sapiens
caatagcaacctttt

SEQ ID NO: 128187 - DNA, 15 bp, Homo sapiens
tcaatagcaaccttt

SEQ ID NO: 128188 - DNA, 15 bp, Homo sapiens
atcaatagcaacctt

SEQ ID NO: 128189 - DNA, 15 bp, Homo sapiens
gatcaatagcaacct

SEQ ID NO: 128190 - DNA, 15 bp, Homo sapiens
agatcaatagcaacc

SEQ ID NO: 128191 - DNA, 15 bp, Homo sapiens
tagatcaatagcaac

SEQ ID NO: 128192 - DNA, 15 bp, Homo sapiens
atagatcaatagcaa

SEQ ID NO: 128193 - DNA, 15 bp, Homo sapiens
aatagatcaatagca

SEQ ID NO: 128194 - DNA, 15 bp, Homo sapiens
gaatagatcaatagc

SEQ ID NO: 128195 - DNA, 15 bp, Homo sapiens
cgaatagatcaatag

SEQ ID NO: 128196 - DNA, 15 bp, Homo sapiens
acgaatagatcaata

SEQ ID NO: 128197 - DNA, 15 bp, Homo sapiens
tacgaatagatcaat

SEQ ID NO: 128198 - DNA, 15 bp, Homo sapiens
atacgaatagatcaa

SEQ ID NO: 128199 - DNA, 15 bp, Homo sapiens
aatacgaatagatca

SEQ ID NO: 128200 - DNA, 15 bp, Homo sapiens
gaatacgaatagatc

SEQ ID NO: 128201 - DNA, 15 bp, Homo sapiens
tgaatacgaatagat

SEQ ID NO: 128202 - DNA, 15 bp, Homo sapiens
gtgaatacgaataga

SEQ ID NO: 128203 - DNA, 15 bp, Homo sapiens
tgtgaatacgaatag

SEQ ID NO: 128204 - DNA, 15 bp, Homo sapiens
ctgtgaatacgaata

SEQ ID NO: 128205 - DNA, 15 bp, Homo sapiens
actgtgaatacgaat

SEQ ID NO: 128206 - DNA, 15 bp, Homo sapiens
tactgtgaatacgaa

SEQ ID NO: 128207 - DNA, 15 bp, Homo sapiens
ctactgtgaatacga

SEQ ID NO: 128208 - DNA, 15 bp, Homo sapiens
tctactgtgaatacg

SEQ ID NO: 128209 - DNA, 15 bp, Homo sapiens
atctactgtgaatac

SEQ ID NO: 128210 - DNA, 15 bp, Homo sapiens
catctactgtgaata

SEQ ID NO: 128211 - DNA, 15 bp, Homo sapiens
acatctactgtgaat

SEQ ID NO: 128212 - DNA, 15 bp, Homo sapiens
cacatctactgtgaa

SEQ ID NO: 128213 - DNA, 15 bp, Homo sapiens
acacatctactgtga

SEQ ID NO: 128214 - DNA, 15 bp, Homo sapiens
tacacatctactgtg

SEQ ID NO: 128215 - DNA, 15 bp, Homo sapiens
ttacacatctactgt

SEQ ID NO: 128216 - DNA, 15 bp, Homo sapiens
tttacacatctactg

SEQ ID NO: 128217 - DNA, 15 bp, Homo sapiens
ctttacacatctact

SEQ ID NO: 128218 - DNA, 15 bp, Homo sapiens
actttacacatctac

SEQ ID NO: 128219 - DNA, 15 bp, Homo sapiens
tactttacacatcta

SEQ ID NO: 128220 - DNA, 15 bp, Homo sapiens
ctactttacacatct

SEQ ID NO: 128221 - DNA, 15 bp, Homo sapiens
actactttacacatc

SEQ ID NO: 128222 - DNA, 15 bp, Homo sapiens
tactactttacacat

SEQ ID NO: 128223 - DNA, 15 bp, Homo sapiens
atactactttacaca

SEQ ID NO: 128224 - DNA, 15 bp, Homo sapiens
tatactactttacac

SEQ ID NO: 128225 - DNA, 15 bp, Homo sapiens
atatactactttaca

SEQ ID NO: 128226 - DNA, 15 bp, Homo sapiens
gatatactactttac

SEQ ID NO: 128227 - DNA, 15 bp, Homo sapiens
tgatatactacttta

SEQ ID NO: 128228 - DNA, 15 bp, Homo sapiens
ttgatatactacttt

SEQ ID NO: 128229 - DNA, 15 bp, Homo sapiens
gttgatatactactt

SEQ ID NO: 128230 - DNA, 15 bp, Homo sapiens
agttgatatactact

SEQ ID NO: 128231 - DNA, 15 bp, Homo sapiens
tagttgatatactac

SEQ ID NO: 128232 - DNA, 15 bp, Homo sapiens
gtagttgatatacta

SEQ ID NO: 128233 - DNA, 15 bp, Homo sapiens
agtagttgatatact

SEQ ID NO: 128234 - DNA, 15 bp, Homo sapiens
aagtagttgatatac

SEQ ID NO: 128235 - DNA, 15 bp, Homo sapiens
aaagtagttgatata

SEQ ID NO: 128236 - DNA, 15 bp, Homo sapiens
aaaagtagttgatat

SEQ ID NO: 128237 - DNA, 15 bp, Homo sapiens
caaaagtagttgata

SEQ ID NO: 128238 - DNA, 15 bp, Homo sapiens
acaaaagtagttgat

SEQ ID NO: 128239 - DNA, 15 bp, Homo sapiens
aacaaaagtagttga

SEQ ID NO: 128240 - DNA, 15 bp, Homo sapiens
aaacaaaagtagttg

SEQ ID NO: 128241 - DNA, 15 bp, Homo sapiens
aaaacaaaagtagtt

SEQ ID NO: 128242 - DNA, 15 bp, Homo sapiens
gaaaacaaaagtagt

SEQ ID NO: 128243 - DNA, 15 bp, Homo sapiens
tgaaaacaaaagtag

SEQ ID NO: 128244 - DNA, 15 bp, Homo sapiens
atgaaaacaaaagta

SEQ ID NO: 128245 - DNA, 15 bp, Homo sapiens
tatgaaaacaaaagt

SEQ ID NO: 128246 - DNA, 15 bp, Homo sapiens
atatgaaaacaaaag

SEQ ID NO: 128247 - DNA, 15 bp, Homo sapiens
tatatgaaaacaaaa

SEQ ID NO: 128248 - DNA, 15 bp, Homo sapiens
atatatgaaaacaaa

SEQ ID NO: 128249 - DNA, 15 bp, Homo sapiens
aatatatgaaaacaa

SEQ ID NO: 128250 - DNA, 15 bp, Homo sapiens
caatatatgaaaaca

SEQ ID NO: 128251 - DNA, 15 bp, Homo sapiens
tcaatatatgaaaac

SEQ ID NO: 128252 - DNA, 15 bp, Homo sapiens
atcaatatatgaaaa

SEQ ID NO: 128253 - DNA, 15 bp, Homo sapiens
aatcaatatatgaaa

SEQ ID NO: 128254 - DNA, 15 bp, Homo sapiens
aaatcaatatatgaa

SEQ ID NO: 128255 - DNA, 15 bp, Homo sapiens
taaatcaatatatga

SEQ ID NO: 128256 - DNA, 15 bp, Homo sapiens
ataaatcaatatatg

SEQ ID NO: 128257 - DNA, 15 bp, Homo sapiens
tataaatcaatatat

SEQ ID NO: 128258 - DNA, 15 bp, Homo sapiens
atataaatcaatata

SEQ ID NO: 128259 - DNA, 15 bp, Homo sapiens
aatataaatcaatat

SEQ ID NO: 128260 - DNA, 15 bp, Homo sapiens
aaatataaatcaata

SEQ ID NO: 128261 - DNA, 15 bp, Homo sapiens
taaatataaatcaat

SEQ ID NO: 128262 - DNA, 15 bp, Homo sapiens
gtaaatataaatcaa

SEQ ID NO: 128263 - DNA, 15 bp, Homo sapiens
tgtaaatataaatca

SEQ ID NO: 128264 - DNA, 15 bp, Homo sapiens
ctgtaaatataaatc

SEQ ID NO: 128265 - DNA, 15 bp, Homo sapiens
gctgtaaatataaat

SEQ ID NO: 128266 - DNA, 15 bp, Homo sapiens
tgctgtaaatataaa

SEQ ID NO: 128267 - DNA, 15 bp, Homo sapiens
ttgctgtaaatataa

SEQ ID NO: 128268 - DNA, 15 bp, Homo sapiens
tttgctgtaaatata

SEQ ID NO: 128269 - DNA, 15 bp, Homo sapiens
gtttgctgtaaatat

SEQ ID NO: 128270 - DNA, 15 bp, Homo sapiens
tgtttgctgtaaata

SEQ ID NO: 128271 - DNA, 15 bp, Homo sapiens
atgtttgctgtaaat

SEQ ID NO: 128272 - DNA, 15 bp, Homo sapiens
aatgtttgctgtaaa

SEQ ID NO: 128273 - DNA, 15 bp, Homo sapiens
aaatgtttgctgtaa

SEQ ID NO: 128274 - DNA, 15 bp, Homo sapiens
caaatgtttgctgta

SEQ ID NO: 128275 - DNA, 15 bp, Homo sapiens
acaaatgtttgctgt

SEQ ID NO: 128276 - DNA, 15 bp, Homo sapiens
tacaaatgtttgctg

SEQ ID NO: 128277 - DNA, 15 bp, Homo sapiens
atacaaatgtttgct

SEQ ID NO: 128278 - DNA, 15 bp, Homo sapiens
tatacaaatgtttgc

SEQ ID NO: 128279 - DNA, 15 bp, Homo sapiens
gtatacaaatgtttg

SEQ ID NO: 128280 - DNA, 15 bp, Homo sapiens
ggtatacaaatgttt

SEQ ID NO: 128281 - DNA, 15 bp, Homo sapiens
aggtatacaaatgtt

SEQ ID NO: 128282 - DNA, 15 bp, Homo sapiens
caggtatacaaatgt

SEQ ID NO: 128283 - DNA, 15 bp, Homo sapiens
gcaggtatacaaatg

SEQ ID NO: 128284 - DNA, 15 bp, Homo sapiens
agcaggtatacaaat

SEQ ID NO: 128285 - DNA, 15 bp, Homo sapiens
cagcaggtatacaaa

SEQ ID NO: 128286 - DNA, 15 bp, Homo sapiens
acagcaggtatacaa

SEQ ID NO: 128287 - DNA, 15 bp, Homo sapiens
aacagcaggtataca

SEQ ID NO: 128288 - DNA, 15 bp, Homo sapiens
gaacagcaggtatac

SEQ ID NO: 128289 - DNA, 15 bp, Homo sapiens
tgaacagcaggtata

SEQ ID NO: 128290 - DNA, 15 bp, Homo sapiens
gtgaacagcaggtat

SEQ ID NO: 128291 - DNA, 15 bp, Homo sapiens
ggtgaacagcaggta

SEQ ID NO: 128292 - DNA, 15 bp, Homo sapiens
tggtgaacagcaggt

SEQ ID NO: 128293 - DNA, 15 bp, Homo sapiens
ctggtgaacagcagg

SEQ ID NO: 128294 - DNA, 15 bp, Homo sapiens
tctggtgaacagcag

SEQ ID NO: 128295 - DNA, 15 bp, Homo sapiens
atctggtgaacagca

SEQ ID NO: 128296 - DNA, 15 bp, Homo sapiens
gatctggtgaacagc

SEQ ID NO: 128297 - DNA, 15 bp, Homo sapiens
ggatctggtgaacag

SEQ ID NO: 128298 - DNA, 15 bp, Homo sapiens
aggatctggtgaaca

SEQ ID NO: 128299 - DNA, 15 bp, Homo sapiens
caggatctggtgaac

SEQ ID NO: 128300 - DNA, 15 bp, Homo sapiens
acaggatctggtgaa

SEQ ID NO: 128301 - DNA, 15 bp, Homo sapiens
cacaggatctggtga

SEQ ID NO: 128302 - DNA, 15 bp, Homo sapiens
gcacaggatctggtg

SEQ ID NO: 128303 - DNA, 15 bp, Homo sapiens
agcacaggatctggt

SEQ ID NO: 128304 - DNA, 15 bp, Homo sapiens
tagcacaggatctgg

SEQ ID NO: 128305 - DNA, 15 bp, Homo sapiens
ctagcacaggatctg

SEQ ID NO: 128306 - DNA, 15 bp, Homo sapiens
cctagcacaggatct

SEQ ID NO: 128307 - DNA, 15 bp, Homo sapiens
ccctagcacaggatc

SEQ ID NO: 128308 - DNA, 15 bp, Homo sapiens
tccctagcacaggat

SEQ ID NO: 128309 - DNA, 15 bp, Homo sapiens
ttccctagcacagga

SEQ ID NO: 128310 - DNA, 15 bp, Homo sapiens
attccctagcacagg

SEQ ID NO: 128311 - DNA, 15 bp, Homo sapiens
aattccctagcacag

SEQ ID NO: 128312 - DNA, 15 bp, Homo sapiens
taattccctagcaca

SEQ ID NO: 128313 - DNA, 15 bp, Homo sapiens
ctaattccctagcac

SEQ ID NO: 128314 - DNA, 15 bp, Homo sapiens
actaattccctagca

SEQ ID NO: 128315 - DNA, 15 bp, Homo sapiens
gactaattccctagc

SEQ ID NO: 128316 - DNA, 15 bp, Homo sapiens
cgactaattccctag

SEQ ID NO: 128317 - DNA, 15 bp, Homo sapiens
acgactaattcccta

SEQ ID NO: 128318 - DNA, 15 bp, Homo sapiens
aacgactaattccct

SEQ ID NO: 128319 - DNA, 15 bp, Homo sapiens
taacgactaattccc

SEQ ID NO: 128320 - DNA, 15 bp, Homo sapiens
ataacgactaattcc

SEQ ID NO: 128321 - DNA, 15 bp, Homo sapiens
aataacgactaattc

SEQ ID NO: 128322 - DNA, 15 bp, Homo sapiens
aaataacgactaatt

SEQ ID NO: 128323 - DNA, 15 bp, Homo sapiens
caaataacgactaat

SEQ ID NO: 128324 - DNA, 15 bp, Homo sapiens
gcaaataacgactaa

SEQ ID NO: 128325 - DNA, 15 bp, Homo sapiens
tgcaaataacgacta

SEQ ID NO: 128326 - DNA, 15 bp, Homo sapiens
atgcaaataacgact

SEQ ID NO: 128327 - DNA, 15 bp, Homo sapiens
aatgcaaataacgac

SEQ ID NO: 128328 - DNA, 15 bp, Homo sapiens
aaatgcaaataacga

SEQ ID NO: 128329 - DNA, 15 bp, Homo sapiens
aaaatgcaaataacg

SEQ ID NO: 128330 - DNA, 15 bp, Homo sapiens
aaaaatgcaaataac

SEQ ID NO: 128331 - DNA, 15 bp, Homo sapiens
gaaaaatgcaaataa

SEQ ID NO: 128332 - DNA, 15 bp, Homo sapiens
tgaaaaatgcaaata

SEQ ID NO: 128333 - DNA, 15 bp, Homo sapiens
ctgaaaaatgcaaat

SEQ ID NO: 128334 - DNA, 15 bp, Homo sapiens
tctgaaaaatgcaaa

SEQ ID NO: 128335 - DNA, 15 bp, Homo sapiens
atctgaaaaatgcaa

SEQ ID NO: 128336 - DNA, 15 bp, Homo sapiens
aatctgaaaaatgca

SEQ ID NO: 128337 - DNA, 15 bp, Homo sapiens
taatctgaaaaatgc

SEQ ID NO: 128338 - DNA, 15 bp, Homo sapiens
ttaatctgaaaaatg

SEQ ID NO: 128339 - DNA, 15 bp, Homo sapiens
attaatctgaaaaat

SEQ ID NO: 128340 - DNA, 15 bp, Homo sapiens
gattaatctgaaaaa

SEQ ID NO: 128341 - DNA, 15 bp, Homo sapiens
agattaatctgaaaa

SEQ ID NO: 128342 - DNA, 15 bp, Homo sapiens
tagattaatctgaaa

SEQ ID NO: 128343 - DNA, 15 bp, Homo sapiens
atagattaatctgaa

SEQ ID NO: 128344 - DNA, 15 bp, Homo sapiens
gatagattaatctga

SEQ ID NO: 128345 - DNA, 15 bp, Homo sapiens
tgatagattaatctg

SEQ ID NO: 128346 - DNA, 15 bp, Homo sapiens
atgatagattaatct

SEQ ID NO: 128347 - DNA, 15 bp, Homo sapiens
aatgatagattaatc

SEQ ID NO: 128348 - DNA, 15 bp, Homo sapiens
taatgatagattaat

SEQ ID NO: 128349 - DNA, 15 bp, Homo sapiens
gtaatgatagattaa

SEQ ID NO: 128350 - DNA, 15 bp, Homo sapiens
agtaatgatagatta

SEQ ID NO: 128351 - DNA, 15 bp, Homo sapiens
aagtaatgatagatt

SEQ ID NO: 128352 - DNA, 15 bp, Homo sapiens
aaagtaatgatagat

SEQ ID NO: 128353 - DNA, 15 bp, Homo sapiens
aaaagtaatgataga

SEQ ID NO: 128354 - DNA, 15 bp, Homo sapiens
taaaagtaatgatag

SEQ ID NO: 128355 - DNA, 15 bp, Homo sapiens
ataaaagtaatgata

SEQ ID NO: 128356 - DNA, 15 bp, Homo sapiens
tataaaagtaatgat

SEQ ID NO: 128357 - DNA, 15 bp, Homo sapiens
ctataaaagtaatga

SEQ ID NO: 128358 - DNA, 15 bp, Homo sapiens
cctataaaagtaatg

SEQ ID NO: 128359 - DNA, 15 bp, Homo sapiens
tcctataaaagtaat

SEQ ID NO: 128360 - DNA, 15 bp, Homo sapiens
atcctataaaagtaa

SEQ ID NO: 128361 - DNA, 15 bp, Homo sapiens
gatcctataaaagta

SEQ ID NO: 128362 - DNA, 15 bp, Homo sapiens
tgatcctataaaagt

SEQ ID NO: 128363 - DNA, 15 bp, Homo sapiens
atgatcctataaaag

SEQ ID NO: 128364 - DNA, 15 bp, Homo sapiens
aatgatcctataaaa

SEQ ID NO: 128365 - DNA, 15 bp, Homo sapiens
caatgatcctataaa

SEQ ID NO: 128366 - DNA, 15 bp, Homo sapiens
acaatgatcctataa

SEQ ID NO: 128367 - DNA, 15 bp, Homo sapiens
aacaatgatcctata

SEQ ID NO: 128368 - DNA, 15 bp, Homo sapiens
caacaatgatcctat

SEQ ID NO: 128369 - DNA, 15 bp, Homo sapiens
gcaacaatgatccta

SEQ ID NO: 128370 - DNA, 15 bp, Homo sapiens
tgcaacaatgatcct

SEQ ID NO: 128371 - DNA, 15 bp, Homo sapiens
ttgcaacaatgatcc

SEQ ID NO: 128372 - DNA, 15 bp, Homo sapiens
attgcaacaatgatc

SEQ ID NO: 128373 - DNA, 15 bp, Homo sapiens
aattgcaacaatgat

SEQ ID NO: 128374 - DNA, 15 bp, Homo sapiens
aaattgcaacaatga

SEQ ID NO: 128375 - DNA, 15 bp, Homo sapiens
gaaattgcaacaatg

SEQ ID NO: 128376 - DNA, 15 bp, Homo sapiens
agaaattgcaacaat

SEQ ID NO: 128377 - DNA, 15 bp, Homo sapiens
aagaaattgcaacaa

SEQ ID NO: 128378 - DNA, 15 bp, Homo sapiens
aaagaaattgcaaca

SEQ ID NO: 128379 - DNA, 15 bp, Homo sapiens
aaaagaaattgcaac

SEQ ID NO: 128380 - DNA, 15 bp, Homo sapiens
aaaaagaaattgcaa

SEQ ID NO: 128381 - DNA, 15 bp, Homo sapiens
gaaaaagaaattgca

SEQ ID NO: 128382 - DNA, 15 bp, Homo sapiens
tgaaaaagaaattgc

SEQ ID NO: 128383 - DNA, 15 bp, Homo sapiens
ctgaaaaagaaattg

SEQ ID NO: 128384 - DNA, 15 bp, Homo sapiens
cctgaaaaagaaatt

SEQ ID NO: 128385 - DNA, 15 bp, Homo sapiens
ccctgaaaaagaaat

SEQ ID NO: 128386 - DNA, 15 bp, Homo sapiens
accctgaaaaagaaa

SEQ ID NO: 128387 - DNA, 15 bp, Homo sapiens
taccctgaaaaagaa

SEQ ID NO: 128388 - DNA, 15 bp, Homo sapiens
ataccctgaaaaaga

SEQ ID NO: 128389 - DNA, 15 bp, Homo sapiens
cataccctgaaaaag

SEQ ID NO: 128390 - DNA, 15 bp, Homo sapiens
ccataccctgaaaaa

SEQ ID NO: 128391 - DNA, 15 bp, Homo sapiens
accataccctgaaaa

SEQ ID NO: 128392 - DNA, 15 bp, Homo sapiens
taccataccctgaaa

SEQ ID NO: 128393 - DNA, 15 bp, Homo sapiens
gtaccataccctgaa

SEQ ID NO: 128394 - DNA, 15 bp, Homo sapiens
ggtaccataccctga

SEQ ID NO: 128395 - DNA, 15 bp, Homo sapiens
tggtaccataccctg

SEQ ID NO: 128396 - DNA, 15 bp, Homo sapiens
atggtaccataccct

SEQ ID NO: 128397 - DNA, 15 bp, Homo sapiens
aatggtaccataccc

SEQ ID NO: 128398 - DNA, 15 bp, Homo sapiens
aaatggtaccatacc

SEQ ID NO: 128399 - DNA, 15 bp, Homo sapiens
caaatggtaccatac

SEQ ID NO: 128400 - DNA, 15 bp, Homo sapiens
acaaatggtaccata

SEQ ID NO: 128401 - DNA, 15 bp, Homo sapiens
aacaaatggtaccat

SEQ ID NO: 128402 - DNA, 15 bp, Homo sapiens
aaacaaatggtacca

SEQ ID NO: 128403 - DNA, 15 bp, Homo sapiens
aaaacaaatggtacc

SEQ ID NO: 128404 - DNA, 15 bp, Homo sapiens
aaaaacaaatggtac

SEQ ID NO: 128405 - DNA, 15 bp, Homo sapiens
caaaaacaaatggta

SEQ ID NO: 128406 - DNA, 15 bp, Homo sapiens
acaaaaacaaatggt

SEQ ID NO: 128407 - DNA, 15 bp, Homo sapiens
cacaaaaacaaatgg

SEQ ID NO: 128408 - DNA, 15 bp, Homo sapiens
ccacaaaaacaaatg

SEQ ID NO: 128409 - DNA, 15 bp, Homo sapiens
cccacaaaaacaaat

SEQ ID NO: 128410 - DNA, 15 bp, Homo sapiens
tcccacaaaaacaaa

SEQ ID NO: 128411 - DNA, 15 bp, Homo sapiens
ttcccacaaaaacaa

SEQ ID NO: 128412 - DNA, 15 bp, Homo sapiens
gttcccacaaaaaca

SEQ ID NO: 128413 - DNA, 15 bp, Homo sapiens
tgttcccacaaaaac

SEQ ID NO: 128414 - DNA, 15 bp, Homo sapiens
ttgttcccacaaaaa

SEQ ID NO: 128415 - DNA, 15 bp, Homo sapiens
tttgttcccacaaaa

SEQ ID NO: 128416 - DNA, 15 bp, Homo sapiens
ctttgttcccacaaa

SEQ ID NO: 128417 - DNA, 15 bp, Homo sapiens
cctttgttcccacaa

SEQ ID NO: 128418 - DNA, 15 bp, Homo sapiens
tcctttgttcccaca

SEQ ID NO: 128419 - DNA, 15 bp, Homo sapiens
gtcctttgttcccac

SEQ ID NO: 128420 - DNA, 15 bp, Homo sapiens
tgtcctttgttccca

SEQ ID NO: 128421 - DNA, 15 bp, Homo sapiens
ctgtcctttgttccc

SEQ ID NO: 128422 - DNA, 15 bp, Homo sapiens
gctgtcctttgttcc

SEQ ID NO: 128423 - DNA, 15 bp, Homo sapiens
tgctgtcctttgttc

SEQ ID NO: 128424 - DNA, 15 bp, Homo sapiens
atgctgtcctttgtt

SEQ ID NO: 128425 - DNA, 15 bp, Homo sapiens
gatgctgtcctttgt

SEQ ID NO: 128426 - DNA, 15 bp, Homo sapiens
cgatgctgtcctttg

SEQ ID NO: 128427 - DNA, 15 bp, Homo sapiens
gcgatgctgtccttt

SEQ ID NO: 128428 - DNA, 15 bp, Homo sapiens
agcgatgctgtcctt

SEQ ID NO: 128429 - DNA, 15 bp, Homo sapiens
tagcgatgctgtcct

SEQ ID NO: 128430 - DNA, 15 bp, Homo sapiens
ttagcgatgctgtcc

SEQ ID NO: 128431 - DNA, 15 bp, Homo sapiens
attagcgatgctgtc

SEQ ID NO: 128432 - DNA, 15 bp, Homo sapiens
cattagcgatgctgt

SEQ ID NO: 128433 - DNA, 15 bp, Homo sapiens
gcattagcgatgctg

SEQ ID NO: 128434 - DNA, 15 bp, Homo sapiens
ggcattagcgatgct

SEQ ID NO: 128435 - DNA, 15 bp, Homo sapiens
tggcattagcgatgc

SEQ ID NO: 128436 - DNA, 15 bp, Homo sapiens
gtggcattagcgatg

SEQ ID NO: 128437 - DNA, 15 bp, Homo sapiens
agtggcattagcgat

SEQ ID NO: 128438 - DNA, 15 bp, Homo sapiens
cagtggcattagcga

SEQ ID NO: 128439 - DNA, 15 bp, Homo sapiens
acagtggcattagcg

SEQ ID NO: 128440 - DNA, 15 bp, Homo sapiens
aacagtggcattagc

SEQ ID NO: 128441 - DNA, 15 bp, Homo sapiens
gaacagtggcattag

SEQ ID NO: 128442 - DNA, 15 bp, Homo sapiens
agaacagtggcatta

SEQ ID NO: 128443 - DNA, 15 bp, Homo sapiens
aagaacagtggcatt

SEQ ID NO: 128444 - DNA, 15 bp, Homo sapiens
aaagaacagtggcat

SEQ ID NO: 128445 - DNA, 15 bp, Homo sapiens
aaaagaacagtggca

SEQ ID NO: 128446 - DNA, 15 bp, Homo sapiens
caaaagaacagtggc

SEQ ID NO: 128447 - DNA, 15 bp, Homo sapiens
ccaaaagaacagtgg

SEQ ID NO: 128448 - DNA, 15 bp, Homo sapiens
tccaaaagaacagtg

SEQ ID NO: 128449 - DNA, 15 bp, Homo sapiens
atccaaaagaacagt

SEQ ID NO: 128450 - DNA, 15 bp, Homo sapiens
aatccaaaagaacag

SEQ ID NO: 128451 - DNA, 15 bp, Homo sapiens
taatccaaaagaaca

SEQ ID NO: 128452 - DNA, 15 bp, Homo sapiens
ataatccaaaagaac

SEQ ID NO: 128453 - DNA, 15 bp, Homo sapiens
gataatccaaaagaa

SEQ ID NO: 128454 - DNA, 15 bp, Homo sapiens
tgataatccaaaaga

SEQ ID NO: 128455 - DNA, 15 bp, Homo sapiens
gtgataatccaaaag

SEQ ID NO: 128456 - DNA, 15 bp, Homo sapiens
ggtgataatccaaaa

SEQ ID NO: 128457 - DNA, 15 bp, Homo sapiens
aggtgataatccaaa

SEQ ID NO: 128458 - DNA, 15 bp, Homo sapiens
caggtgataatccaa

SEQ ID NO: 128459 - DNA, 15 bp, Homo sapiens
tcaggtgataatcca

SEQ ID NO: 128460 - DNA, 15 bp, Homo sapiens
ttcaggtgataatcc

SEQ ID NO: 128461 - DNA, 15 bp, Homo sapiens
gttcaggtgataatc

SEQ ID NO: 128462 - DNA, 15 bp, Homo sapiens
agttcaggtgataat

SEQ ID NO: 128463 - DNA, 15 bp, Homo sapiens
tagttcaggtgataa

SEQ ID NO: 128464 - DNA, 15 bp, Homo sapiens
atagttcaggtgata

SEQ ID NO: 128465 - DNA, 15 bp, Homo sapiens
aatagttcaggtgat

SEQ ID NO: 128466 - DNA, 15 bp, Homo sapiens
aaatagttcaggtga

SEQ ID NO: 128467 - DNA, 15 bp, Homo sapiens
taaatagttcaggtg

SEQ ID NO: 128468 - DNA, 15 bp, Homo sapiens
ttaaatagttcaggt

SEQ ID NO: 128469 - DNA, 15 bp, Homo sapiens
tttaaatagttcagg

SEQ ID NO: 128470 - DNA, 15 bp, Homo sapiens
ctttaaatagttcag

SEQ ID NO: 128471 - DNA, 15 bp, Homo sapiens
cctttaaatagttca

SEQ ID NO: 128472 - DNA, 15 bp, Homo sapiens
acctttaaatagttc

SEQ ID NO: 128473 - DNA, 15 bp, Homo sapiens
cacctttaaatagtt

SEQ ID NO: 128474 - DNA, 15 bp, Homo sapiens
tcacctttaaatagt

SEQ ID NO: 128475 - DNA, 15 bp, Homo sapiens
ctcacctttaaatag

SEQ ID NO: 128476 - DNA, 15 bp, Homo sapiens
tctcacctttaaata

SEQ ID NO: 128477 - DNA, 15 bp, Homo sapiens
ttctcacctttaaat

SEQ ID NO: 128478 - DNA, 15 bp, Homo sapiens
gttctcacctttaaa

SEQ ID NO: 128479 - DNA, 15 bp, Homo sapiens
tgttctcacctttaa

SEQ ID NO: 128480 - DNA, 15 bp, Homo sapiens
ctgttctcaccttta

SEQ ID NO: 128481 - DNA, 15 bp, Homo sapiens
tctgttctcaccttt

SEQ ID NO: 128482 - DNA, 15 bp, Homo sapiens
ttctgttctcacctt

SEQ ID NO: 128483 - DNA, 15 bp, Homo sapiens
tttctgttctcacct

SEQ ID NO: 128484 - DNA, 15 bp, Homo sapiens
ctttctgttctcacc

SEQ ID NO: 128485 - DNA, 15 bp, Homo sapiens
tctttctgttctcac

SEQ ID NO: 128486 - DNA, 15 bp, Homo sapiens
ttctttctgttctca

SEQ ID NO: 128487 - DNA, 15 bp, Homo sapiens
gttctttctgttctc

SEQ ID NO: 128488 - DNA, 15 bp, Homo sapiens
agttctttctgttct

SEQ ID NO: 128489 - DNA, 15 bp, Homo sapiens
aagttctttctgttc

SEQ ID NO: 128490 - DNA, 15 bp, Homo sapiens
aaagttctttctgtt

SEQ ID NO: 128491 - DNA, 15 bp, Homo sapiens
taaagttctttctgt

SEQ ID NO: 128492 - DNA, 15 bp, Homo sapiens
ttaaagttctttctg

SEQ ID NO: 128493 - DNA, 15 bp, Homo sapiens
gttaaagttctttct

SEQ ID NO: 128494 - DNA, 15 bp, Homo sapiens
agttaaagttctttc

SEQ ID NO: 128495 - DNA, 15 bp, Homo sapiens
aagttaaagttcttt

SEQ ID NO: 128496 - DNA, 15 bp, Homo sapiens
gaagttaaagttctt

SEQ ID NO: 128497 - DNA, 15 bp, Homo sapiens
agaagttaaagttct

SEQ ID NO: 128498 - DNA, 15 bp, Homo sapiens
tagaagttaaagttc

SEQ ID NO: 128499 - DNA, 15 bp, Homo sapiens
ttagaagttaaagtt

SEQ ID NO: 128500 - DNA, 15 bp, Homo sapiens
attagaagttaaagt

SEQ ID NO: 128501 - DNA, 15 bp, Homo sapiens
gattagaagttaaag

SEQ ID NO: 128502 - DNA, 15 bp, Homo sapiens
ggattagaagttaaa

SEQ ID NO: 128503 - DNA, 15 bp, Homo sapiens
aggattagaagttaa

SEQ ID NO: 128504 - DNA, 15 bp, Homo sapiens
aaggattagaagtta

SEQ ID NO: 128505 - DNA, 15 bp, Homo sapiens
aaaggattagaagtt

SEQ ID NO: 128506 - DNA, 15 bp, Homo sapiens
aaaaggattagaagt

SEQ ID NO: 128507 - DNA, 15 bp, Homo sapiens
caaaaggattagaag

SEQ ID NO: 128508 - DNA, 15 bp, Homo sapiens
acaaaaggattagaa

SEQ ID NO: 128509 - DNA, 15 bp, Homo sapiens
tacaaaaggattaga

SEQ ID NO: 128510 - DNA, 15 bp, Homo sapiens
gtacaaaaggattag

SEQ ID NO: 128511 - DNA, 15 bp, Homo sapiens
agtacaaaaggatta

SEQ ID NO: 128512 - DNA, 15 bp, Homo sapiens
tagtacaaaaggatt

SEQ ID NO: 128513 - DNA, 15 bp, Homo sapiens
ttagtacaaaaggat

SEQ ID NO: 128514 - DNA, 15 bp, Homo sapiens
tttagtacaaaagga

SEQ ID NO: 128515 - DNA, 15 bp, Homo sapiens
ttttagtacaaaagg

SEQ ID NO: 128516 - DNA, 15 bp, Homo sapiens
attttagtacaaaag

SEQ ID NO: 128517 - DNA, 15 bp, Homo sapiens
tattttagtacaaaa

SEQ ID NO: 128518 - DNA, 15 bp, Homo sapiens
atattttagtacaaa

SEQ ID NO: 128519 - DNA, 15 bp, Homo sapiens
tatattttagtacaa

SEQ ID NO: 128520 - DNA, 15 bp, Homo sapiens
gtatattttagtaca

SEQ ID NO: 128521 - DNA, 15 bp, Homo sapiens
tgtatattttagtac

SEQ ID NO: 128522 - DNA, 15 bp, Homo sapiens
ttgtatattttagta

SEQ ID NO: 128523 - DNA, 15 bp, Homo sapiens
tttgtatattttagt

SEQ ID NO: 128524 - DNA, 15 bp, Homo sapiens
gtttgtatattttag

SEQ ID NO: 128525 - DNA, 15 bp, Homo sapiens
agtttgtatatttta

SEQ ID NO: 128526 - DNA, 15 bp, Homo sapiens
aagtttgtatatttt

SEQ ID NO: 128527 - DNA, 15 bp, Homo sapiens
aaagtttgtatattt

SEQ ID NO: 128528 - DNA, 15 bp, Homo sapiens
taaagtttgtatatt

SEQ ID NO: 128529 - DNA, 15 bp, Homo sapiens
ataaagtttgtatat

SEQ ID NO: 128530 - DNA, 15 bp, Homo sapiens
tataaagtttgtata

SEQ ID NO: 128531 - DNA, 15 bp, Homo sapiens
ctataaagtttgtat

SEQ ID NO: 128532 - DNA, 15 bp, Homo sapiens
actataaagtttgta

SEQ ID NO: 128533 - DNA, 15 bp, Homo sapiens
tactataaagtttgt

SEQ ID NO: 128534 - DNA, 15 bp, Homo sapiens
ctactataaagtttg

SEQ ID NO: 128535 - DNA, 15 bp, Homo sapiens
tctactataaagttt

SEQ ID NO: 128536 - DNA, 15 bp, Homo sapiens
atctactataaagtt

SEQ ID NO: 128537 - DNA, 15 bp, Homo sapiens
gatctactataaagt

SEQ ID NO: 128538 - DNA, 15 bp, Homo sapiens
agatctactataaag

SEQ ID NO: 128539 - DNA, 15 bp, Homo sapiens
aagatctactataaa

SEQ ID NO: 128540 - DNA, 15 bp, Homo sapiens
aaagatctactataa

SEQ ID NO: 128541 - DNA, 15 bp, Homo sapiens
gaaagatctactata

SEQ ID NO: 128542 - DNA, 15 bp, Homo sapiens
tgaaagatctactat

SEQ ID NO: 128543 - DNA, 15 bp, Homo sapiens
ctgaaagatctacta

SEQ ID NO: 128544 - DNA, 15 bp, Homo sapiens
gctgaaagatctact

SEQ ID NO: 128545 - DNA, 15 bp, Homo sapiens
tgctgaaagatctac

SEQ ID NO: 128546 - DNA, 15 bp, Homo sapiens
ctgctgaaagatcta

SEQ ID NO: 128547 - DNA, 15 bp, Homo sapiens
actgctgaaagatct

SEQ ID NO: 128548 - DNA, 15 bp, Homo sapiens
aactgctgaaagatc

SEQ ID NO: 128549 - DNA, 15 bp, Homo sapiens
taactgctgaaagat

SEQ ID NO: 128550 - DNA, 15 bp, Homo sapiens
ctaactgctgaaaga

SEQ ID NO: 128551 - DNA, 15 bp, Homo sapiens
cctaactgctgaaag

SEQ ID NO: 128552 - DNA, 15 bp, Homo sapiens
tcctaactgctgaaa

SEQ ID NO: 128553 - DNA, 15 bp, Homo sapiens
gtcctaactgctgaa

SEQ ID NO: 128554 - DNA, 15 bp, Homo sapiens
agtcctaactgctga

SEQ ID NO: 128555 - DNA, 15 bp, Homo sapiens
gagtcctaactgctg

SEQ ID NO: 128556 - DNA, 15 bp, Homo sapiens
tgagtcctaactgct

SEQ ID NO: 128557 - DNA, 15 bp, Homo sapiens
atgagtcctaactgc

SEQ ID NO: 128558 - DNA, 15 bp, Homo sapiens
aatgagtcctaactg

SEQ ID NO: 128559 - DNA, 15 bp, Homo sapiens
gaatgagtcctaact

SEQ ID NO: 128560 - DNA, 15 bp, Homo sapiens
agaatgagtcctaac

SEQ ID NO: 128561 - DNA, 15 bp, Homo sapiens
tagaatgagtcctaa

SEQ ID NO: 128562 - DNA, 15 bp, Homo sapiens
ctagaatgagtccta

SEQ ID NO: 128563 - DNA, 15 bp, Homo sapiens
gctagaatgagtcct

SEQ ID NO: 128564 - DNA, 15 bp, Homo sapiens
ggctagaatgagtcc

SEQ ID NO: 128565 - DNA, 15 bp, Homo sapiens
aggctagaatgagtc

SEQ ID NO: 128566 - DNA, 15 bp, Homo sapiens
caggctagaatgagt

SEQ ID NO: 128567 - DNA, 15 bp, Homo sapiens
acaggctagaatgag

SEQ ID NO: 128568 - DNA, 15 bp, Homo sapiens
cacaggctagaatga

SEQ ID NO: 128569 - DNA, 15 bp, Homo sapiens
gcacaggctagaatg

SEQ ID NO: 128570 - DNA, 15 bp, Homo sapiens
tgcacaggctagaat

SEQ ID NO: 128571 - DNA, 15 bp, Homo sapiens
ttgcacaggctagaa

SEQ ID NO: 128572 - DNA, 15 bp, Homo sapiens
tttgcacaggctaga

SEQ ID NO: 128573 - DNA, 15 bp, Homo sapiens
ttttgcacaggctag

SEQ ID NO: 128574 - DNA, 15 bp, Homo sapiens
gttttgcacaggcta

SEQ ID NO: 128575 - DNA, 15 bp, Homo sapiens
tgttttgcacaggct

SEQ ID NO: 128576 - DNA, 15 bp, Homo sapiens
gtgttttgcacaggc

SEQ ID NO: 128577 - DNA, 15 bp, Homo sapiens
agtgttttgcacagg

SEQ ID NO: 128578 - DNA, 15 bp, Homo sapiens
cagtgttttgcacag

SEQ ID NO: 128579 - DNA, 15 bp, Homo sapiens
acagtgttttgcaca

SEQ ID NO: 128580 - DNA, 15 bp, Homo sapiens
tacagtgttttgcac

SEQ ID NO: 128581 - DNA, 15 bp, Homo sapiens
atacagtgttttgca

SEQ ID NO: 128582 - DNA, 15 bp, Homo sapiens
catacagtgttttgc

SEQ ID NO: 128583 - DNA, 15 bp, Homo sapiens
tcatacagtgttttg

SEQ ID NO: 128584 - DNA, 15 bp, Homo sapiens
gtcatacagtgtttt

SEQ ID NO: 128585 - DNA, 15 bp, Homo sapiens
agtcatacagtgttt

SEQ ID NO: 128586 - DNA, 15 bp, Homo sapiens
aagtcatacagtgtt

SEQ ID NO: 128587 - DNA, 15 bp, Homo sapiens
caagtcatacagtgt

SEQ ID NO: 128588 - DNA, 15 bp, Homo sapiens
acaagtcatacagtg

SEQ ID NO: 128589 - DNA, 15 bp, Homo sapiens
gacaagtcatacagt

SEQ ID NO: 128590 - DNA, 15 bp, Homo sapiens
tgacaagtcatacag

SEQ ID NO: 128591 - DNA, 15 bp, Homo sapiens
ttgacaagtcataca

SEQ ID NO: 128592 - DNA, 15 bp, Homo sapiens
tttgacaagtcatac

SEQ ID NO: 128593 - DNA, 15 bp, Homo sapiens
ctttgacaagtcata

SEQ ID NO: 128594 - DNA, 15 bp, Homo sapiens
cctttgacaagtcat

SEQ ID NO: 128595 - DNA, 15 bp, Homo sapiens
acctttgacaagtca

SEQ ID NO: 128596 - DNA, 15 bp, Homo sapiens
tacctttgacaagtc

SEQ ID NO: 128597 - DNA, 15 bp, Homo sapiens
ttacctttgacaagt

SEQ ID NO: 128598 - DNA, 15 bp, Homo sapiens
attacctttgacaag

SEQ ID NO: 128599 - DNA, 15 bp, Homo sapiens
tattacctttgacaa

SEQ ID NO: 128600 - DNA, 15 bp, Homo sapiens
ctattacctttgaca

SEQ ID NO: 128601 - DNA, 15 bp, Homo sapiens
tctattacctttgac

SEQ ID NO: 128602 - DNA, 15 bp, Homo sapiens
ctctattacctttga

SEQ ID NO: 128603 - DNA, 15 bp, Homo sapiens
tctctattacctttg

SEQ ID NO: 128604 - DNA, 15 bp, Homo sapiens
ttctctattaccttt

SEQ ID NO: 128605 - DNA, 15 bp, Homo sapiens
tttctctattacctt

SEQ ID NO: 128606 - DNA, 15 bp, Homo sapiens
ttttctctattacct

SEQ ID NO: 128607 - DNA, 15 bp, Homo sapiens
attttctctattacc

SEQ ID NO: 128608 - DNA, 15 bp, Homo sapiens
tattttctctattac

SEQ ID NO: 128609 - DNA, 15 bp, Homo sapiens
gtattttctctatta

SEQ ID NO: 128610 - DNA, 15 bp, Homo sapiens
cgtattttctctatt

SEQ ID NO: 128611 - DNA, 15 bp, Homo sapiens
acgtattttctctat

SEQ ID NO: 128612 - DNA, 15 bp, Homo sapiens
aacgtattttctcta

SEQ ID NO: 128613 - DNA, 15 bp, Homo sapiens
caacgtattttctct

SEQ ID NO: 128614 - DNA, 15 bp, Homo sapiens
acaacgtattttctc

SEQ ID NO: 128615 - DNA, 15 bp, Homo sapiens
aacaacgtattttct

SEQ ID NO: 128616 - DNA, 15 bp, Homo sapiens
aaacaacgtattttc

SEQ ID NO: 128617 - DNA, 15 bp, Homo sapiens
caaacaacgtatttt

SEQ ID NO: 128618 - DNA, 15 bp, Homo sapiens
ccaaacaacgtattt

SEQ ID NO: 128619 - DNA, 15 bp, Homo sapiens
gccaaacaacgtatt

SEQ ID NO: 128620 - DNA, 15 bp, Homo sapiens
agccaaacaacgtat

SEQ ID NO: 128621 - DNA, 15 bp, Homo sapiens
aagccaaacaacgta

SEQ ID NO: 128622 - DNA, 15 bp, Homo sapiens
taagccaaacaacgt

SEQ ID NO: 128623 - DNA, 15 bp, Homo sapiens
ataagccaaacaacg

SEQ ID NO: 128624 - DNA, 15 bp, Homo sapiens
tataagccaaacaac

SEQ ID NO: 128625 - DNA, 15 bp, Homo sapiens
ttataagccaaacaa

SEQ ID NO: 128626 - DNA, 15 bp, Homo sapiens
attataagccaaaca

SEQ ID NO: 128627 - DNA, 15 bp, Homo sapiens
aattataagccaaac

SEQ ID NO: 128628 - DNA, 15 bp, Homo sapiens
aaattataagccaaa

SEQ ID NO: 128629 - DNA, 15 bp, Homo sapiens
aaaattataagccaa

SEQ ID NO: 128630 - DNA, 15 bp, Homo sapiens
aaaaattataagcca

SEQ ID NO: 128631 - DNA, 15 bp, Homo sapiens
aaaaaattataagcc

SEQ ID NO: 128632 - DNA, 15 bp, Homo sapiens
aaaaaaattataagc

SEQ ID NO: 128633 - DNA, 15 bp, Homo sapiens
taaaaaaattataag

SEQ ID NO: 128634 - DNA, 15 bp, Homo sapiens
ttaaaaaaattataa

SEQ ID NO: 128635 - DNA, 15 bp, Homo sapiens
tttaaaaaaattata

SEQ ID NO: 128636 - DNA, 15 bp, Homo sapiens
ttttaaaaaaattat

SEQ ID NO: 128637 - DNA, 15 bp, Homo sapiens
tttttaaaaaaatta

SEQ ID NO: 128638 - DNA, 15 bp, Homo sapiens
atttttaaaaaaatt

SEQ ID NO: 128639 - DNA, 15 bp, Homo sapiens
catttttaaaaaaat

SEQ ID NO: 128640 - DNA, 15 bp, Homo sapiens
ccatttttaaaaaaa

SEQ ID NO: 128641 - DNA, 15 bp, Homo sapiens
tccatttttaaaaaa

SEQ ID NO: 128642 - DNA, 15 bp, Homo sapiens
ttccatttttaaaaa

SEQ ID NO: 128643 - DNA, 15 bp, Homo sapiens
cttccatttttaaaa

SEQ ID NO: 128644 - DNA, 15 bp, Homo sapiens
acttccatttttaaa

SEQ ID NO: 128645 - DNA, 15 bp, Homo sapiens
gacttccatttttaa

SEQ ID NO: 128646 - DNA, 15 bp, Homo sapiens
agacttccattttta

SEQ ID NO: 128647 - DNA, 15 bp, Homo sapiens
aagacttccattttt

SEQ ID NO: 128648 - DNA, 15 bp, Homo sapiens
aaagacttccatttt

SEQ ID NO: 128649 - DNA, 15 bp, Homo sapiens
taaagacttccattt

SEQ ID NO: 128650 - DNA, 15 bp, Homo sapiens
ataaagacttccatt

SEQ ID NO: 128651 - DNA, 15 bp, Homo sapiens
tataaagacttccat

SEQ ID NO: 128652 - DNA, 15 bp, Homo sapiens
ttataaagacttcca

SEQ ID NO: 128653 - DNA, 15 bp, Homo sapiens
tttataaagacttcc

SEQ ID NO: 128654 - DNA, 15 bp, Homo sapiens
atttataaagacttc

SEQ ID NO: 128655 - DNA, 15 bp, Homo sapiens
aatttataaagactt

SEQ ID NO: 128656 - DNA, 15 bp, Homo sapiens
aaatttataaagact

SEQ ID NO: 128657 - DNA, 15 bp, Homo sapiens
taaatttataaagac

SEQ ID NO: 128658 - DNA, 15 bp, Homo sapiens
ttaaatttataaaga

SEQ ID NO: 128659 - DNA, 15 bp, Homo sapiens
cttaaatttataaag

SEQ ID NO: 128660 - DNA, 15 bp, Homo sapiens
acttaaatttataaa

SEQ ID NO: 128661 - DNA, 15 bp, Homo sapiens
tacttaaatttataa

SEQ ID NO: 128662 - DNA, 15 bp, Homo sapiens
gtacttaaatttata

SEQ ID NO: 128663 - DNA, 15 bp, Homo sapiens
ggtacttaaatttat

SEQ ID NO: 128664 - DNA, 15 bp, Homo sapiens
tggtacttaaattta

SEQ ID NO: 128665 - DNA, 15 bp, Homo sapiens
ttggtacttaaattt

SEQ ID NO: 128666 - DNA, 15 bp, Homo sapiens
attggtacttaaatt

SEQ ID NO: 128667 - DNA, 15 bp, Homo sapiens
tattggtacttaaat

SEQ ID NO: 128668 - DNA, 15 bp, Homo sapiens
atattggtacttaaa

SEQ ID NO: 128669 - DNA, 15 bp, Homo sapiens
tatattggtacttaa

SEQ ID NO: 128670 - DNA, 15 bp, Homo sapiens
gtatattggtactta

SEQ ID NO: 128671 - DNA, 15 bp, Homo sapiens
ggtatattggtactt

SEQ ID NO: 128672 - DNA, 15 bp, Homo sapiens
tggtatattggtact

SEQ ID NO: 128673 - DNA, 15 bp, Homo sapiens
ctggtatattggtac

SEQ ID NO: 128674 - DNA, 15 bp, Homo sapiens
actggtatattggta

SEQ ID NO: 128675 - DNA, 15 bp, Homo sapiens
aactggtatattggt

SEQ ID NO: 128676 - DNA, 15 bp, Homo sapiens
aaactggtatattgg

SEQ ID NO: 128677 - DNA, 15 bp, Homo sapiens
aaaactggtatattg

SEQ ID NO: 128678 - DNA, 15 bp, Homo sapiens
gaaaactggtatatt

SEQ ID NO: 128679 - DNA, 15 bp, Homo sapiens
tgaaaactggtatat

SEQ ID NO: 128680 - DNA, 15 bp, Homo sapiens
ttgaaaactggtata

SEQ ID NO: 128681 - DNA, 15 bp, Homo sapiens
attgaaaactggtat

SEQ ID NO: 128682 - DNA, 15 bp, Homo sapiens
tattgaaaactggta

SEQ ID NO: 128683 - DNA, 15 bp, Homo sapiens
ttattgaaaactggt

SEQ ID NO: 128684 - DNA, 15 bp, Homo sapiens
tttattgaaaactgg

SEQ ID NO: 128685 - DNA, 15 bp, Homo sapiens
ttttattgaaaactg

SEQ ID NO: 128686 - DNA, 15 bp, Homo sapiens
attttattgaaaact

SEQ ID NO: 128687 - DNA, 15 bp, Homo sapiens
aattttattgaaaac

SEQ ID NO: 128688 - DNA, 15 bp, Homo sapiens
aaattttattgaaaa

SEQ ID NO: 128689 - DNA, 15 bp, Homo sapiens
aaaattttattgaaa

SEQ ID NO: 128690 - DNA, 15 bp, Homo sapiens
taaaattttattgaa

SEQ ID NO: 128691 - DNA, 15 bp, Homo sapiens
ataaaattttattga

SEQ ID NO: 128692 - DNA, 15 bp, Homo sapiens
tataaaattttattg

SEQ ID NO: 128693 - DNA, 15 bp, Homo sapiens
gtataaaattttatt

SEQ ID NO: 128694 - DNA, 15 bp, Homo sapiens
agtataaaattttat

SEQ ID NO: 128695 - DNA, 15 bp, Homo sapiens
aagtataaaatttta

SEQ ID NO: 128696 - DNA, 15 bp, Homo sapiens
gaagtataaaatttt

SEQ ID NO: 128697 - DNA, 15 bp, Homo sapiens
ggaagtataaaattt

SEQ ID NO: 128698 - DNA, 15 bp, Homo sapiens
gggaagtataaaatt

SEQ ID NO: 128699 - DNA, 15 bp, Homo sapiens
agggaagtataaaat

SEQ ID NO: 128700 - DNA, 15 bp, Homo sapiens
aagggaagtataaaa

SEQ ID NO: 128701 - DNA, 15 bp, Homo sapiens
aaagggaagtataaa

SEQ ID NO: 128702 - DNA, 15 bp, Homo sapiens
taaagggaagtataa

SEQ ID NO: 128703 - DNA, 15 bp, Homo sapiens
ataaagggaagtata

SEQ ID NO: 128704 - DNA, 15 bp, Homo sapiens
aataaagggaagtat

SEQ ID NO: 128705 - DNA, 15 bp, Homo sapiens
gaataaagggaagta

SEQ ID NO: 128706 - DNA, 15 bp, Homo sapiens
agaataaagggaagt

SEQ ID NO: 128707 - DNA, 15 bp, Homo sapiens
aagaataaagggaag

SEQ ID NO: 128708 - DNA, 15 bp, Homo sapiens
gaagaataaagggaa

SEQ ID NO: 128709 - DNA, 15 bp, Homo sapiens
agaagaataaaggga

SEQ ID NO: 128710 - DNA, 15 bp, Homo sapiens
gagaagaataaaggg

SEQ ID NO: 128711 - DNA, 15 bp, Homo sapiens
agagaagaataaagg

SEQ ID NO: 128712 - DNA, 15 bp, Homo sapiens
aagagaagaataaag

SEQ ID NO: 128713 - DNA, 15 bp, Homo sapiens
taagagaagaataaa

SEQ ID NO: 128714 - DNA, 15 bp, Homo sapiens
ttaagagaagaataa

SEQ ID NO: 128715 - DNA, 15 bp, Homo sapiens
tttaagagaagaata

SEQ ID NO: 128716 - DNA, 15 bp, Homo sapiens
gtttaagagaagaat

SEQ ID NO: 128717 - DNA, 15 bp, Homo sapiens
ggtttaagagaagaa

SEQ ID NO: 128718 - DNA, 15 bp, Homo sapiens
gggtttaagagaaga

SEQ ID NO: 128719 - DNA, 15 bp, Homo sapiens
agggtttaagagaag

SEQ ID NO: 128720 - DNA, 15 bp, Homo sapiens
aagggtttaagagaa

SEQ ID NO: 128721 - DNA, 15 bp, Homo sapiens
taagggtttaagaga

SEQ ID NO: 128722 - DNA, 15 bp, Homo sapiens
gtaagggtttaagag

SEQ ID NO: 128723 - DNA, 15 bp, Homo sapiens
tgtaagggtttaaga

SEQ ID NO: 128724 - DNA, 15 bp, Homo sapiens
gtgtaagggtttaag

SEQ ID NO: 128725 - DNA, 15 bp, Homo sapiens
agtgtaagggtttaa

SEQ ID NO: 128726 - DNA, 15 bp, Homo sapiens
gagtgtaagggttta

SEQ ID NO: 128727 - DNA, 15 bp, Homo sapiens
tgagtgtaagggttt

SEQ ID NO: 128728 - DNA, 15 bp, Homo sapiens
ctgagtgtaagggtt

SEQ ID NO: 128729 - DNA, 15 bp, Homo sapiens
actgagtgtaagggt

SEQ ID NO: 128730 - DNA, 15 bp, Homo sapiens
aactgagtgtaaggg

SEQ ID NO: 128731 - DNA, 15 bp, Homo sapiens
aaactgagtgtaagg

SEQ ID NO: 128732 - DNA, 15 bp, Homo sapiens
taaactgagtgtaag

SEQ ID NO: 128733 - DNA, 15 bp, Homo sapiens
ctaaactgagtgtaa

SEQ ID NO: 128734 - DNA, 15 bp, Homo sapiens
cctaaactgagtgta

SEQ ID NO: 128735 - DNA, 15 bp, Homo sapiens
gcctaaactgagtgt

SEQ ID NO: 128736 - DNA, 15 bp, Homo sapiens
tgcctaaactgagtg

SEQ ID NO: 128737 - DNA, 15 bp, Homo sapiens
ttgcctaaactgagt

SEQ ID NO: 128738 - DNA, 15 bp, Homo sapiens
attgcctaaactgag

SEQ ID NO: 128739 - DNA, 15 bp, Homo sapiens
gattgcctaaactga

SEQ ID NO: 128740 - DNA, 15 bp, Homo sapiens
ggattgcctaaactg

SEQ ID NO: 128741 - DNA, 15 bp, Homo sapiens
aggattgcctaaact

SEQ ID NO: 128742 - DNA, 15 bp, Homo sapiens
caggattgcctaaac

SEQ ID NO: 128743 - DNA, 15 bp, Homo sapiens
acaggattgcctaaa

SEQ ID NO: 128744 - DNA, 15 bp, Homo sapiens
tacaggattgcctaa

SEQ ID NO: 128745 - DNA, 15 bp, Homo sapiens
gtacaggattgccta

SEQ ID NO: 128746 - DNA, 15 bp, Homo sapiens
tgtacaggattgcct

SEQ ID NO: 128747 - DNA, 15 bp, Homo sapiens
atgtacaggattgcc

SEQ ID NO: 128748 - DNA, 15 bp, Homo sapiens
tatgtacaggattgc

SEQ ID NO: 128749 - DNA, 15 bp, Homo sapiens
ctatgtacaggattg

SEQ ID NO: 128750 - DNA, 15 bp, Homo sapiens
gctatgtacaggatt

SEQ ID NO: 128751 - DNA, 15 bp, Homo sapiens
ggctatgtacaggat

SEQ ID NO: 128752 - DNA, 15 bp, Homo sapiens
aggctatgtacagga

SEQ ID NO: 128753 - DNA, 15 bp, Homo sapiens
caggctatgtacagg

SEQ ID NO: 128754 - DNA, 15 bp, Homo sapiens
acaggctatgtacag

SEQ ID NO: 128755 - DNA, 15 bp, Homo sapiens
aacaggctatgtaca

SEQ ID NO: 128756 - DNA, 15 bp, Homo sapiens
taacaggctatgtac

SEQ ID NO: 128757 - DNA, 15 bp, Homo sapiens
ttaacaggctatgta

SEQ ID NO: 128758 - DNA, 15 bp, Homo sapiens
attaacaggctatgt

SEQ ID NO: 128759 - DNA, 15 bp, Homo sapiens
gattaacaggctatg

SEQ ID NO: 128760 - DNA, 15 bp, Homo sapiens
ggattaacaggctat

SEQ ID NO: 128761 - DNA, 15 bp, Homo sapiens
tggattaacaggcta

SEQ ID NO: 128762 - DNA, 15 bp, Homo sapiens
atggattaacaggct

SEQ ID NO: 128763 - DNA, 15 bp, Homo sapiens
aatggattaacaggc

SEQ ID NO: 128764 - DNA, 15 bp, Homo sapiens
aaatggattaacagg

SEQ ID NO: 128765 - DNA, 15 bp, Homo sapiens
caaatggattaacag

SEQ ID NO: 128766 - DNA, 15 bp, Homo sapiens
tcaaatggattaaca

SEQ ID NO: 128767 - DNA, 15 bp, Homo sapiens
atcaaatggattaac

SEQ ID NO: 128768 - DNA, 15 bp, Homo sapiens
gatcaaatggattaa

SEQ ID NO: 128769 - DNA, 15 bp, Homo sapiens
ggatcaaatggatta

SEQ ID NO: 128770 - DNA, 15 bp, Homo sapiens
aggatcaaatggatt

SEQ ID NO: 128771 - DNA, 15 bp, Homo sapiens
aaggatcaaatggat

SEQ ID NO: 128772 - DNA, 15 bp, Homo sapiens
aaaggatcaaatgga

SEQ ID NO: 128773 - DNA, 15 bp, Homo sapiens
gaaaggatcaaatgg

SEQ ID NO: 128774 - DNA, 15 bp, Homo sapiens
agaaaggatcaaatg

SEQ ID NO: 128775 - DNA, 15 bp, Homo sapiens
tagaaaggatcaaat

SEQ ID NO: 128776 - DNA, 15 bp, Homo sapiens
ctagaaaggatcaaa

SEQ ID NO: 128777 - DNA, 15 bp, Homo sapiens
gctagaaaggatcaa

SEQ ID NO: 128778 - DNA, 15 bp, Homo sapiens
tgctagaaaggatca

SEQ ID NO: 128779 - DNA, 15 bp, Homo sapiens
atgctagaaaggatc

SEQ ID NO: 128780 - DNA, 15 bp, Homo sapiens
aatgctagaaaggat

SEQ ID NO: 128781 - DNA, 15 bp, Homo sapiens
aaatgctagaaagga

SEQ ID NO: 128782 - DNA, 15 bp, Homo sapiens
aaaatgctagaaagg

SEQ ID NO: 128783 - DNA, 15 bp, Homo sapiens
caaaatgctagaaag

SEQ ID NO: 128784 - DNA, 15 bp, Homo sapiens
ccaaaatgctagaaa

SEQ ID NO: 128785 - DNA, 15 bp, Homo sapiens
accaaaatgctagaa

SEQ ID NO: 128786 - DNA, 15 bp, Homo sapiens
aaccaaaatgctaga

SEQ ID NO: 128787 - DNA, 15 bp, Homo sapiens
aaaccaaaatgctag

SEQ ID NO: 128788 - DNA, 15 bp, Homo sapiens
aaaaccaaaatgcta

SEQ ID NO: 128789 - DNA, 15 bp, Homo sapiens
aaaaaccaaaatgct

SEQ ID NO: 128790 - DNA, 15 bp, Homo sapiens
aaaaaaccaaaatgc

SEQ ID NO: 128791 - DNA, 15 bp, Homo sapiens
gaaaaaaccaaaatg

SEQ ID NO: 128792 - DNA, 15 bp, Homo sapiens
ggaaaaaaccaaaat

SEQ ID NO: 128793 - DNA, 15 bp, Homo sapiens
tggaaaaaaccaaaa

SEQ ID NO: 128794 - DNA, 15 bp, Homo sapiens
ctggaaaaaaccaaa

SEQ ID NO: 128795 - DNA, 15 bp, Homo sapiens
tctggaaaaaaccaa

SEQ ID NO: 128796 - DNA, 15 bp, Homo sapiens
gtctggaaaaaacca

SEQ ID NO: 128797 - DNA, 15 bp, Homo sapiens
tgtctggaaaaaacc

SEQ ID NO: 128798 - DNA, 15 bp, Homo sapiens
ttgtctggaaaaaac

SEQ ID NO: 128799 - DNA, 15 bp, Homo sapiens
tttgtctggaaaaaa

SEQ ID NO: 128800 - DNA, 15 bp, Homo sapiens
ttttgtctggaaaaa

SEQ ID NO: 128801 - DNA, 15 bp, Homo sapiens
tttttgtctggaaaa

SEQ ID NO: 128802 - DNA, 15 bp, Homo sapiens
atttttgtctggaaa

SEQ ID NO: 128803 - DNA, 15 bp, Homo sapiens
gatttttgtctggaa

SEQ ID NO: 128804 - DNA, 15 bp, Homo sapiens
agatttttgtctgga

SEQ ID NO: 128805 - DNA, 15 bp, Homo sapiens
cagatttttgtctgg

SEQ ID NO: 128806 - DNA, 15 bp, Homo sapiens
acagatttttgtctg

SEQ ID NO: 128807 - DNA, 15 bp, Homo sapiens
cacagatttttgtct

SEQ ID NO: 128808 - DNA, 15 bp, Homo sapiens
acacagatttttgtc

SEQ ID NO: 128809 - DNA, 15 bp, Homo sapiens
gacacagatttttgt

SEQ ID NO: 128810 - DNA, 15 bp, Homo sapiens
agacacagatttttg

SEQ ID NO: 128811 - DNA, 15 bp, Homo sapiens
tagacacagattttt

SEQ ID NO: 128812 - DNA, 15 bp, Homo sapiens
atagacacagatttt

SEQ ID NO: 128813 - DNA, 15 bp, Homo sapiens
tatagacacagattt

SEQ ID NO: 128814 - DNA, 15 bp, Homo sapiens
ttatagacacagatt

SEQ ID NO: 128815 - DNA, 15 bp, Homo sapiens
gttatagacacagat

SEQ ID NO: 128816 - DNA, 15 bp, Homo sapiens
agttatagacacaga

SEQ ID NO: 128817 - DNA, 15 bp, Homo sapiens
gagttatagacacag

SEQ ID NO: 128818 - DNA, 15 bp, Homo sapiens
agagttatagacaca

SEQ ID NO: 128819 - DNA, 15 bp, Homo sapiens
aagagttatagacac

SEQ ID NO: 128820 - DNA, 15 bp, Homo sapiens
caagagttatagaca

SEQ ID NO: 128821 - DNA, 15 bp, Homo sapiens
gcaagagttatagac

SEQ ID NO: 128822 - DNA, 15 bp, Homo sapiens
ggcaagagttataga

SEQ ID NO: 128823 - DNA, 15 bp, Homo sapiens
aggcaagagttatag

SEQ ID NO: 128824 - DNA, 15 bp, Homo sapiens
aaggcaagagttata

SEQ ID NO: 128825 - DNA, 15 bp, Homo sapiens
aaaggcaagagttat

SEQ ID NO: 128826 - DNA, 15 bp, Homo sapiens
taaaggcaagagtta

SEQ ID NO: 128827 - DNA, 15 bp, Homo sapiens
ataaaggcaagagtt

SEQ ID NO: 128828 - DNA, 15 bp, Homo sapiens
aataaaggcaagagt

SEQ ID NO: 128829 - DNA, 15 bp, Homo sapiens
caataaaggcaagag

SEQ ID NO: 128830 - DNA, 15 bp, Homo sapiens
acaataaaggcaaga

SEQ ID NO: 128831 - DNA, 15 bp, Homo sapiens
aacaataaaggcaag

SEQ ID NO: 128832 - DNA, 15 bp, Homo sapiens
gaacaataaaggcaa

SEQ ID NO: 128833 - DNA, 15 bp, Homo sapiens
ggaacaataaaggca

SEQ ID NO: 128834 - DNA, 15 bp, Homo sapiens
aggaacaataaaggc

SEQ ID NO: 128835 - DNA, 15 bp, Homo sapiens
aaggaacaataaagg

SEQ ID NO: 128836 - DNA, 15 bp, Homo sapiens
aaaggaacaataaag

SEQ ID NO: 128837 - DNA, 15 bp, Homo sapiens
aaaaggaacaataaa

SEQ ID NO: 128838 - DNA, 15 bp, Homo sapiens
taaaaggaacaataa

SEQ ID NO: 128839 - DNA, 15 bp, Homo sapiens
ataaaaggaacaata

SEQ ID NO: 128840 - DNA, 15 bp, Homo sapiens
cataaaaggaacaat

SEQ ID NO: 128841 - DNA, 15 bp, Homo sapiens
acataaaaggaacaa

SEQ ID NO: 128842 - DNA, 15 bp, Homo sapiens
gacataaaaggaaca

SEQ ID NO: 128843 - DNA, 15 bp, Homo sapiens
tgacataaaaggaac

SEQ ID NO: 128844 - DNA, 15 bp, Homo sapiens
atgacataaaaggaa

SEQ ID NO: 128845 - DNA, 15 bp, Homo sapiens
aatgacataaaagga

SEQ ID NO: 128846 - DNA, 15 bp, Homo sapiens
aaatgacataaaagg

SEQ ID NO: 128847 - DNA, 15 bp, Homo sapiens
taaatgacataaaag

SEQ ID NO: 128848 - DNA, 15 bp, Homo sapiens
ataaatgacataaaa

SEQ ID NO: 128849 - DNA, 15 bp, Homo sapiens
gataaatgacataaa

SEQ ID NO: 128850 - DNA, 15 bp, Homo sapiens
tgataaatgacataa

SEQ ID NO: 128851 - DNA, 15 bp, Homo sapiens
ttgataaatgacata

SEQ ID NO: 128852 - DNA, 15 bp, Homo sapiens
cttgataaatgacat

SEQ ID NO: 128853 - DNA, 15 bp, Homo sapiens
ccttgataaatgaca

SEQ ID NO: 128854 - DNA, 15 bp, Homo sapiens
tccttgataaatgac

SEQ ID NO: 128855 - DNA, 15 bp, Homo sapiens
ttccttgataaatga

SEQ ID NO: 128856 - DNA, 15 bp, Homo sapiens
tttccttgataaatg

SEQ ID NO: 128857 - DNA, 15 bp, Homo sapiens
atttccttgataaat

SEQ ID NO: 128858 - DNA, 15 bp, Homo sapiens
gatttccttgataaa

SEQ ID NO: 128859 - DNA, 15 bp, Homo sapiens
agatttccttgataa

SEQ ID NO: 128860 - DNA, 15 bp, Homo sapiens
tagatttccttgata

SEQ ID NO: 128861 - DNA, 15 bp, Homo sapiens
ttagatttccttgat

SEQ ID NO: 128862 - DNA, 15 bp, Homo sapiens
cttagatttccttga

SEQ ID NO: 128863 - DNA, 15 bp, Homo sapiens
gcttagatttccttg

SEQ ID NO: 128864 - DNA, 15 bp, Homo sapiens
tgcttagatttcctt

SEQ ID NO: 128865 - DNA, 15 bp, Homo sapiens
atgcttagatttcct

SEQ ID NO: 128866 - DNA, 15 bp, Homo sapiens
aatgcttagatttcc

SEQ ID NO: 128867 - DNA, 15 bp, Homo sapiens
aaatgcttagatttc

SEQ ID NO: 128868 - DNA, 15 bp, Homo sapiens
gaaatgcttagattt

SEQ ID NO: 128869 - DNA, 15 bp, Homo sapiens
tgaaatgcttagatt

SEQ ID NO: 128870 - DNA, 15 bp, Homo sapiens
atgaaatgcttagat

SEQ ID NO: 128871 - DNA, 15 bp, Homo sapiens
catgaaatgcttaga

SEQ ID NO: 128872 - DNA, 15 bp, Homo sapiens
tcatgaaatgcttag

SEQ ID NO: 128873 - DNA, 15 bp, Homo sapiens
ttcatgaaatgctta

SEQ ID NO: 128874 - DNA, 15 bp, Homo sapiens
cttcatgaaatgctt

SEQ ID NO: 128875 - DNA, 15 bp, Homo sapiens
acttcatgaaatgct

SEQ ID NO: 128876 - DNA, 15 bp, Homo sapiens
aacttcatgaaatgc

SEQ ID NO: 128877 - DNA, 15 bp, Homo sapiens
gaacttcatgaaatg

SEQ ID NO: 128878 - DNA, 15 bp, Homo sapiens
agaacttcatgaaat

SEQ ID NO: 128879 - DNA, 15 bp, Homo sapiens
aagaacttcatgaaa

SEQ ID NO: 128880 - DNA, 15 bp, Homo sapiens
aaagaacttcatgaa

SEQ ID NO: 128881 - DNA, 15 bp, Homo sapiens
caaagaacttcatga

SEQ ID NO: 128882 - DNA, 15 bp, Homo sapiens
acaaagaacttcatg

SEQ ID NO: 128883 - DNA, 15 bp, Homo sapiens
aacaaagaacttcat

SEQ ID NO: 128884 - DNA, 15 bp, Homo sapiens
aaacaaagaacttca

SEQ ID NO: 128885 - DNA, 15 bp, Homo sapiens
taaacaaagaacttc

SEQ ID NO: 128886 - DNA, 15 bp, Homo sapiens
ttaaacaaagaactt

SEQ ID NO: 128887 - DNA, 15 bp, Homo sapiens
tttaaacaaagaact

SEQ ID NO: 128888 - DNA, 15 bp, Homo sapiens
atttaaacaaagaac

SEQ ID NO: 128889 - DNA, 15 bp, Homo sapiens
catttaaacaaagaa

SEQ ID NO: 128890 - DNA, 15 bp, Homo sapiens
acatttaaacaaaga

SEQ ID NO: 128891 - DNA, 15 bp, Homo sapiens
aacatttaaacaaag

SEQ ID NO: 128892 - DNA, 15 bp, Homo sapiens
aaacatttaaacaaa

SEQ ID NO: 128893 - DNA, 15 bp, Homo sapiens
taaacatttaaacaa

SEQ ID NO: 128894 - DNA, 15 bp, Homo sapiens
gtaaacatttaaaca

SEQ ID NO: 128895 - DNA, 15 bp, Homo sapiens
ggtaaacatttaaac

SEQ ID NO: 128896 - DNA, 15 bp, Homo sapiens
gggtaaacatttaaa

SEQ ID NO: 128897 - DNA, 15 bp, Homo sapiens
agggtaaacatttaa

SEQ ID NO: 128898 - DNA, 15 bp, Homo sapiens
tagggtaaacattta

SEQ ID NO: 128899 - DNA, 15 bp, Homo sapiens
atagggtaaacattt

SEQ ID NO: 128900 - DNA, 15 bp, Homo sapiens
aatagggtaaacatt

SEQ ID NO: 128901 - DNA, 15 bp, Homo sapiens
aaatagggtaaacat

SEQ ID NO: 128902 - DNA, 15 bp, Homo sapiens
aaaatagggtaaaca

SEQ ID NO: 128903 - DNA, 15 bp, Homo sapiens
aaaaatagggtaaac

SEQ ID NO: 128904 - DNA, 15 bp, Homo sapiens
gaaaaatagggtaaa

SEQ ID NO: 128905 - DNA, 15 bp, Homo sapiens
agaaaaatagggtaa

SEQ ID NO: 128906 - DNA, 15 bp, Homo sapiens
gagaaaaatagggta

SEQ ID NO: 128907 - DNA, 15 bp, Homo sapiens
agagaaaaatagggt

SEQ ID NO: 128908 - DNA, 15 bp, Homo sapiens
aagagaaaaataggg

SEQ ID NO: 128909 - DNA, 15 bp, Homo sapiens
aaagagaaaaatagg

SEQ ID NO: 128910 - DNA, 15 bp, Homo sapiens
taaagagaaaaatag

SEQ ID NO: 128911 - DNA, 15 bp, Homo sapiens
gtaaagagaaaaata

SEQ ID NO: 128912 - DNA, 15 bp, Homo sapiens
agtaaagagaaaaat

SEQ ID NO: 128913 - DNA, 15 bp, Homo sapiens
cagtaaagagaaaaa

SEQ ID NO: 128914 - DNA, 15 bp, Homo sapiens
acagtaaagagaaaa

SEQ ID NO: 128915 - DNA, 15 bp, Homo sapiens
aacagtaaagagaaa

SEQ ID NO: 128916 - DNA, 15 bp, Homo sapiens
taacagtaaagagaa

SEQ ID NO: 128917 - DNA, 15 bp, Homo sapiens
ataacagtaaagaga

SEQ ID NO: 128918 - DNA, 15 bp, Homo sapiens
aataacagtaaagag

SEQ ID NO: 128919 - DNA, 15 bp, Homo sapiens
gaataacagtaaaga

SEQ ID NO: 128920 - DNA, 15 bp, Homo sapiens
tgaataacagtaaag

SEQ ID NO: 128921 - DNA, 15 bp, Homo sapiens
ttgaataacagtaaa

SEQ ID NO: 128922 - DNA, 15 bp, Homo sapiens
tttgaataacagtaa

SEQ ID NO: 128923 - DNA, 15 bp, Homo sapiens
ttttgaataacagta

SEQ ID NO: 128924 - DNA, 15 bp, Homo sapiens
attttgaataacagt

SEQ ID NO: 128925 - DNA, 15 bp, Homo sapiens
tattttgaataacag

SEQ ID NO: 128926 - DNA, 15 bp, Homo sapiens
gtattttgaataaca

SEQ ID NO: 128927 - DNA, 15 bp, Homo sapiens
tgtattttgaataac

SEQ ID NO: 128928 - DNA, 15 bp, Homo sapiens
ttgtattttgaataa

SEQ ID NO: 128929 - DNA, 15 bp, Homo sapiens
tttgtattttgaata

SEQ ID NO: 128930 - DNA, 15 bp, Homo sapiens
gtttgtattttgaat

SEQ ID NO: 128931 - DNA, 15 bp, Homo sapiens
agtttgtattttgaa

SEQ ID NO: 128932 - DNA, 15 bp, Homo sapiens
tagtttgtattttga

SEQ ID NO: 128933 - DNA, 15 bp, Homo sapiens
atagtttgtattttg

SEQ ID NO: 128934 - DNA, 15 bp, Homo sapiens
aatagtttgtatttt

SEQ ID NO: 128935 - DNA, 15 bp, Homo sapiens
aaatagtttgtattt

SEQ ID NO: 128936 - DNA, 15 bp, Homo sapiens
caaatagtttgtatt

SEQ ID NO: 128937 - DNA, 15 bp, Homo sapiens
acaaatagtttgtat

SEQ ID NO: 128938 - DNA, 15 bp, Homo sapiens
cacaaatagtttgta

SEQ ID NO: 128939 - DNA, 15 bp, Homo sapiens
acacaaatagtttgt

SEQ ID NO: 128940 - DNA, 15 bp, Homo sapiens
gacacaaatagtttg

SEQ ID NO: 128941 - DNA, 15 bp, Homo sapiens
agacacaaatagttt

SEQ ID NO: 128942 - DNA, 15 bp, Homo sapiens
aagacacaaatagtt

SEQ ID NO: 128943 - DNA, 15 bp, Homo sapiens
gaagacacaaatagt

SEQ ID NO: 128944 - DNA, 15 bp, Homo sapiens
agaagacacaaatag

SEQ ID NO: 128945 - DNA, 15 bp, Homo sapiens
gagaagacacaaata

SEQ ID NO: 128946 - DNA, 15 bp, Homo sapiens
tgagaagacacaaat

SEQ ID NO: 128947 - DNA, 15 bp, Homo sapiens
atgagaagacacaaa

SEQ ID NO: 128948 - DNA, 15 bp, Homo sapiens
tatgagaagacacaa

SEQ ID NO: 128949 - DNA, 15 bp, Homo sapiens
ttatgagaagacaca

SEQ ID NO: 128950 - DNA, 15 bp, Homo sapiens
tttatgagaagacac

SEQ ID NO: 128951 - DNA, 15 bp, Homo sapiens
atttatgagaagaca

SEQ ID NO: 128952 - DNA, 15 bp, Homo sapiens
catttatgagaagac

SEQ ID NO: 128953 - DNA, 15 bp, Homo sapiens
acatttatgagaaga

SEQ ID NO: 128954 - DNA, 15 bp, Homo sapiens
aacatttatgagaag

SEQ ID NO: 128955 - DNA, 15 bp, Homo sapiens
gaacatttatgagaa

SEQ ID NO: 128956 - DNA, 15 bp, Homo sapiens
tgaacatttatgaga

SEQ ID NO: 128957 - DNA, 15 bp, Homo sapiens
ctgaacatttatgag

SEQ ID NO: 128958 - DNA, 15 bp, Homo sapiens
actgaacatttatga

SEQ ID NO: 128959 - DNA, 15 bp, Homo sapiens
aactgaacatttatg

SEQ ID NO: 128960 - DNA, 15 bp, Homo sapiens
aaactgaacatttat

SEQ ID NO: 128961 - DNA, 15 bp, Homo sapiens
taaactgaacattta

SEQ ID NO: 128962 - DNA, 15 bp, Homo sapiens
ctaaactgaacattt

SEQ ID NO: 128963 - DNA, 15 bp, Homo sapiens
actaaactgaacatt

SEQ ID NO: 128964 - DNA, 15 bp, Homo sapiens
aactaaactgaacat

SEQ ID NO: 128965 - DNA, 15 bp, Homo sapiens
taactaaactgaaca

SEQ ID NO: 128966 - DNA, 15 bp, Homo sapiens
ctaactaaactgaac

SEQ ID NO: 128967 - DNA, 15 bp, Homo sapiens
actaactaaactgaa

SEQ ID NO: 128968 - DNA, 15 bp, Homo sapiens
cactaactaaactga

SEQ ID NO: 128969 - DNA, 15 bp, Homo sapiens
acactaactaaactg

SEQ ID NO: 128970 - DNA, 15 bp, Homo sapiens
cacactaactaaact

SEQ ID NO: 128971 - DNA, 15 bp, Homo sapiens
tcacactaactaaac

SEQ ID NO: 128972 - DNA, 15 bp, Homo sapiens
atcacactaactaaa

SEQ ID NO: 128973 - DNA, 15 bp, Homo sapiens
catcacactaactaa

SEQ ID NO: 128974 - DNA, 15 bp, Homo sapiens
gcatcacactaacta

SEQ ID NO: 128975 - DNA, 15 bp, Homo sapiens
cgcatcacactaact

SEQ ID NO: 128976 - DNA, 15 bp, Homo sapiens
ccgcatcacactaac

SEQ ID NO: 128977 - DNA, 15 bp, Homo sapiens
accgcatcacactaa

SEQ ID NO: 128978 - DNA, 15 bp, Homo sapiens
aaccgcatcacacta

SEQ ID NO: 128979 - DNA, 15 bp, Homo sapiens
taaccgcatcacact

SEQ ID NO: 128980 - DNA, 15 bp, Homo sapiens
ataaccgcatcacac

SEQ ID NO: 128981 - DNA, 15 bp, Homo sapiens
cataaccgcatcaca

SEQ ID NO: 128982 - DNA, 15 bp, Homo sapiens
gcataaccgcatcac

SEQ ID NO: 128983 - DNA, 15 bp, Homo sapiens
ggcataaccgcatca

SEQ ID NO: 128984 - DNA, 15 bp, Homo sapiens
aggcataaccgcatc

SEQ ID NO: 128985 - DNA, 15 bp, Homo sapiens
gaggcataaccgcat

SEQ ID NO: 128986 - DNA, 15 bp, Homo sapiens
ggaggcataaccgca

SEQ ID NO: 128987 - DNA, 15 bp, Homo sapiens
aggaggcataaccgc

SEQ ID NO: 128988 - DNA, 15 bp, Homo sapiens
aaggaggcataaccg

SEQ ID NO: 128989 - DNA, 15 bp, Homo sapiens
taaggaggcataacc

SEQ ID NO: 128990 - DNA, 15 bp, Homo sapiens
ttaaggaggcataac

SEQ ID NO: 128991 - DNA, 15 bp, Homo sapiens
tttaaggaggcataa

SEQ ID NO: 128992 - DNA, 15 bp, Homo sapiens
ttttaaggaggcata

SEQ ID NO: 128993 - DNA, 15 bp, Homo sapiens
attttaaggaggcat

SEQ ID NO: 128994 - DNA, 15 bp, Homo sapiens
aattttaaggaggca

SEQ ID NO: 128995 - DNA, 15 bp, Homo sapiens
aaattttaaggaggc

SEQ ID NO: 128996 - DNA, 15 bp, Homo sapiens
gaaattttaaggagg

SEQ ID NO: 128997 - DNA, 15 bp, Homo sapiens
tgaaattttaaggag

SEQ ID NO: 128998 - DNA, 15 bp, Homo sapiens
ttgaaattttaagga

SEQ ID NO: 128999 - DNA, 15 bp, Homo sapiens
tttgaaattttaagg

SEQ ID NO: 129000 - DNA, 15 bp, Homo sapiens
gtttgaaattttaag

SEQ ID NO: 129001 - DNA, 15 bp, Homo sapiens
agtttgaaattttaa

SEQ ID NO: 129002 - DNA, 15 bp, Homo sapiens
cagtttgaaatttta

SEQ ID NO: 129003 - DNA, 15 bp, Homo sapiens
ccagtttgaaatttt

SEQ ID NO: 129004 - DNA, 15 bp, Homo sapiens
tccagtttgaaattt

SEQ ID NO: 129005 - DNA, 15 bp, Homo sapiens
ttccagtttgaaatt

SEQ ID NO: 129006 - DNA, 15 bp, Homo sapiens
cttccagtttgaaat

SEQ ID NO: 129007 - DNA, 15 bp, Homo sapiens
tcttccagtttgaaa

SEQ ID NO: 129008 - DNA, 15 bp, Homo sapiens
atcttccagtttgaa

SEQ ID NO: 129009 - DNA, 15 bp, Homo sapiens
tatcttccagtttga

SEQ ID NO: 129010 - DNA, 15 bp, Homo sapiens
ctatcttccagtttg

SEQ ID NO: 129011 - DNA, 15 bp, Homo sapiens
cctatcttccagttt

SEQ ID NO: 129012 - DNA, 15 bp, Homo sapiens
tcctatcttccagtt

SEQ ID NO: 129013 - DNA, 15 bp, Homo sapiens
ttcctatcttccagt

SEQ ID NO: 129014 - DNA, 15 bp, Homo sapiens
gttcctatcttccag

SEQ ID NO: 129015 - DNA, 15 bp, Homo sapiens
cgttcctatcttcca

SEQ ID NO: 129016 - DNA, 15 bp, Homo sapiens
tcgttcctatcttcc

SEQ ID NO: 129017 - DNA, 15 bp, Homo sapiens
ctcgttcctatcttc

SEQ ID NO: 129018 - DNA, 15 bp, Homo sapiens
cctcgttcctatctt

SEQ ID NO: 129019 - DNA, 15 bp, Homo sapiens
tcctcgttcctatct

SEQ ID NO: 129020 - DNA, 15 bp, Homo sapiens
ctcctcgttcctatc

SEQ ID NO: 129021 - DNA, 15 bp, Homo sapiens
cctcctcgttcctat

SEQ ID NO: 129022 - DNA, 15 bp, Homo sapiens
gcctcctcgttccta

SEQ ID NO: 129023 - DNA, 15 bp, Homo sapiens
agcctcctcgttcct

SEQ ID NO: 129024 - DNA, 15 bp, Homo sapiens
tagcctcctcgttcc

SEQ ID NO: 129025 - DNA, 15 bp, Homo sapiens
gtagcctcctcgttc

SEQ ID NO: 129026 - DNA, 15 bp, Homo sapiens
tgtagcctcctcgtt

SEQ ID NO: 129027 - DNA, 15 bp, Homo sapiens
ttgtagcctcctcgt

SEQ ID NO: 129028 - DNA, 15 bp, Homo sapiens
cttgtagcctcctcg

SEQ ID NO: 129029 - DNA, 15 bp, Homo sapiens
ccttgtagcctcctc

SEQ ID NO: 129030 - DNA, 15 bp, Homo sapiens
accttgtagcctcct

SEQ ID NO: 129031 - DNA, 15 bp, Homo sapiens
caccttgtagcctcc

SEQ ID NO: 129032 - DNA, 15 bp, Homo sapiens
acaccttgtagcctc

SEQ ID NO: 129033 - DNA, 15 bp, Homo sapiens
tacaccttgtagcct

SEQ ID NO: 129034 - DNA, 15 bp, Homo sapiens
ctacaccttgtagcc

SEQ ID NO: 129035 - DNA, 15 bp, Homo sapiens
actacaccttgtagc

SEQ ID NO: 129036 - DNA, 15 bp, Homo sapiens
cactacaccttgtag

SEQ ID NO: 129037 - DNA, 15 bp, Homo sapiens
ccactacaccttgta

SEQ ID NO: 129038 - DNA, 15 bp, Homo sapiens
tccactacaccttgt

SEQ ID NO: 129039 - DNA, 15 bp, Homo sapiens
ctccactacaccttg

SEQ ID NO: 129040 - DNA, 15 bp, Homo sapiens
gctccactacacctt

SEQ ID NO: 129041 - DNA, 15 bp, Homo sapiens
tgctccactacacct

SEQ ID NO: 129042 - DNA, 15 bp, Homo sapiens
ttgctccactacacc

SEQ ID NO: 129043 - DNA, 15 bp, Homo sapiens
cttgctccactacac

SEQ ID NO: 129044 - DNA, 15 bp, Homo sapiens
gcttgctccactaca

SEQ ID NO: 129045 - DNA, 15 bp, Homo sapiens
tgcttgctccactac

SEQ ID NO: 129046 - DNA, 15 bp, Homo sapiens
gtgcttgctccacta

SEQ ID NO: 129047 - DNA, 15 bp, Homo sapiens
agtgcttgctccact

SEQ ID NO: 129048 - DNA, 15 bp, Homo sapiens
cagtgcttgctccac

SEQ ID NO: 129049 - DNA, 15 bp, Homo sapiens
ccagtgcttgctcca

SEQ ID NO: 129050 - DNA, 15 bp, Homo sapiens
tccagtgcttgctcc

SEQ ID NO: 129051 - DNA, 15 bp, Homo sapiens
atccagtgcttgctc

SEQ ID NO: 129052 - DNA, 15 bp, Homo sapiens
catccagtgcttgct

SEQ ID NO: 129053 - DNA, 15 bp, Homo sapiens
ccatccagtgcttgc

SEQ ID NO: 129054 - DNA, 15 bp, Homo sapiens
cccatccagtgcttg

SEQ ID NO: 129055 - DNA, 15 bp, Homo sapiens
gcccatccagtgctt

SEQ ID NO: 129056 - DNA, 15 bp, Homo sapiens
tgcccatccagtgct

SEQ ID NO: 129057 - DNA, 15 bp, Homo sapiens
ttgcccatccagtgc

SEQ ID NO: 129058 - DNA, 15 bp, Homo sapiens
attgcccatccagtg

SEQ ID NO: 129059 - DNA, 15 bp, Homo sapiens
cattgcccatccagt

SEQ ID NO: 129060 - DNA, 15 bp, Homo sapiens
gcattgcccatccag

SEQ ID NO: 129061 - DNA, 15 bp, Homo sapiens
tgcattgcccatcca

SEQ ID NO: 129062 - DNA, 15 bp, Homo sapiens
ctgcattgcccatcc

SEQ ID NO: 129063 - DNA, 15 bp, Homo sapiens
gctgcattgcccatc

SEQ ID NO: 129064 - DNA, 15 bp, Homo sapiens
tgctgcattgcccat

SEQ ID NO: 129065 - DNA, 15 bp, Homo sapiens
ttgctgcattgccca

SEQ ID NO: 129066 - DNA, 15 bp, Homo sapiens
attgctgcattgccc

SEQ ID NO: 129067 - DNA, 15 bp, Homo sapiens
aattgctgcattgcc

SEQ ID NO: 129068 - DNA, 15 bp, Homo sapiens
aaattgctgcattgc

SEQ ID NO: 129069 - DNA, 15 bp, Homo sapiens
taaattgctgcattg

SEQ ID NO: 129070 - DNA, 15 bp, Homo sapiens
gtaaattgctgcatt

SEQ ID NO: 129071 - DNA, 15 bp, Homo sapiens
agtaaattgctgcat

SEQ ID NO: 129072 - DNA, 15 bp, Homo sapiens
aagtaaattgctgca

SEQ ID NO: 129073 - DNA, 15 bp, Homo sapiens
taagtaaattgctgc

SEQ ID NO: 129074 - DNA, 15 bp, Homo sapiens
ataagtaaattgctg

SEQ ID NO: 129075 - DNA, 15 bp, Homo sapiens
tataagtaaattgct

SEQ ID NO: 129076 - DNA, 15 bp, Homo sapiens
ttataagtaaattgc

SEQ ID NO: 129077 - DNA, 15 bp, Homo sapiens
cttataagtaaattg

SEQ ID NO: 129078 - DNA, 15 bp, Homo sapiens
tcttataagtaaatt

SEQ ID NO: 129079 - DNA, 15 bp, Homo sapiens
gtcttataagtaaat

SEQ ID NO: 129080 - DNA, 15 bp, Homo sapiens
agtcttataagtaaa

SEQ ID NO: 129081 - DNA, 15 bp, Homo sapiens
aagtcttataagtaa

SEQ ID NO: 129082 - DNA, 15 bp, Homo sapiens
gaagtcttataagta

SEQ ID NO: 129083 - DNA, 15 bp, Homo sapiens
tgaagtcttataagt

SEQ ID NO: 129084 - DNA, 15 bp, Homo sapiens
ctgaagtcttataag

SEQ ID NO: 129085 - DNA, 15 bp, Homo sapiens
gctgaagtcttataa

SEQ ID NO: 129086 - DNA, 15 bp, Homo sapiens
tgctgaagtcttata

SEQ ID NO: 129087 - DNA, 15 bp, Homo sapiens
ttgctgaagtcttat

SEQ ID NO: 129088 - DNA, 15 bp, Homo sapiens
tttgctgaagtctta

SEQ ID NO: 129089 - DNA, 15 bp, Homo sapiens
atttgctgaagtctt

SEQ ID NO: 129090 - DNA, 15 bp, Homo sapiens
catttgctgaagtct

SEQ ID NO: 129091 - DNA, 15 bp, Homo sapiens
tcatttgctgaagtc

SEQ ID NO: 129092 - DNA, 15 bp, Homo sapiens
ttcatttgctgaagt

SEQ ID NO: 129093 - DNA, 15 bp, Homo sapiens
gttcatttgctgaag

SEQ ID NO: 129094 - DNA, 15 bp, Homo sapiens
agttcatttgctgaa

SEQ ID NO: 129095 - DNA, 15 bp, Homo sapiens
tagttcatttgctga

SEQ ID NO: 129096 - DNA, 15 bp, Homo sapiens
ctagttcatttgctg

SEQ ID NO: 129097 - DNA, 15 bp, Homo sapiens
gctagttcatttgct

SEQ ID NO: 129098 - DNA, 15 bp, Homo sapiens
agctagttcatttgc

SEQ ID NO: 129099 - DNA, 15 bp, Homo sapiens
cagctagttcatttg

SEQ ID NO: 129100 - DNA, 15 bp, Homo sapiens
acagctagttcattt

SEQ ID NO: 129101 - DNA, 15 bp, Homo sapiens
cacagctagttcatt

SEQ ID NO: 129102 - DNA, 15 bp, Homo sapiens
acacagctagttcat

SEQ ID NO: 129103 - DNA, 15 bp, Homo sapiens
cacacagctagttca

SEQ ID NO: 129104 - DNA, 15 bp, Homo sapiens
tcacacagctagttc

SEQ ID NO: 129105 - DNA, 15 bp, Homo sapiens
gtcacacagctagtt

SEQ ID NO: 129106 - DNA, 15 bp, Homo sapiens
agtcacacagctagt

SEQ ID NO: 129107 - DNA, 15 bp, Homo sapiens
aagtcacacagctag

SEQ ID NO: 129108 - DNA, 15 bp, Homo sapiens
aaagtcacacagcta

SEQ ID NO: 129109 - DNA, 15 bp, Homo sapiens
taaagtcacacagct

SEQ ID NO: 129110 - DNA, 15 bp, Homo sapiens
ctaaagtcacacagc

SEQ ID NO: 129111 - DNA, 15 bp, Homo sapiens
cctaaagtcacacag

SEQ ID NO: 129112 - DNA, 15 bp, Homo sapiens
gcctaaagtcacaca

SEQ ID NO: 129113 - DNA, 15 bp, Homo sapiens
tgcctaaagtcacac

SEQ ID NO: 129114 - DNA, 15 bp, Homo sapiens
ttgcctaaagtcaca

SEQ ID NO: 129115 - DNA, 15 bp, Homo sapiens
cttgcctaaagtcac

SEQ ID NO: 129116 - DNA, 15 bp, Homo sapiens
acttgcctaaagtca

SEQ ID NO: 129117 - DNA, 15 bp, Homo sapiens
gacttgcctaaagtc

SEQ ID NO: 129118 - DNA, 15 bp, Homo sapiens
tgacttgcctaaagt

SEQ ID NO: 129119 - DNA, 15 bp, Homo sapiens
gtgacttgcctaaag

SEQ ID NO: 129120 - DNA, 15 bp, Homo sapiens
agtgacttgcctaaa

SEQ ID NO: 129121 - DNA, 15 bp, Homo sapiens
aagtgacttgcctaa

SEQ ID NO: 129122 - DNA, 15 bp, Homo sapiens
gaagtgacttgccta

SEQ ID NO: 129123 - DNA, 15 bp, Homo sapiens
ggaagtgacttgcct

SEQ ID NO: 129124 - DNA, 15 bp, Homo sapiens
gggaagtgacttgcc

SEQ ID NO: 129125 - DNA, 15 bp, Homo sapiens
agggaagtgacttgc

SEQ ID NO: 129126 - DNA, 15 bp, Homo sapiens
tagggaagtgacttg

SEQ ID NO: 129127 - DNA, 15 bp, Homo sapiens
gtagggaagtgactt

SEQ ID NO: 129128 - DNA, 15 bp, Homo sapiens
tgtagggaagtgact

SEQ ID NO: 129129 - DNA, 15 bp, Homo sapiens
gtgtagggaagtgac

SEQ ID NO: 129130 - DNA, 15 bp, Homo sapiens
agtgtagggaagtga

SEQ ID NO: 129131 - DNA, 15 bp, Homo sapiens
tagtgtagggaagtg

SEQ ID NO: 129132 - DNA, 15 bp, Homo sapiens
ctagtgtagggaagt

SEQ ID NO: 129133 - DNA, 15 bp, Homo sapiens
tctagtgtagggaag

SEQ ID NO: 129134 - DNA, 15 bp, Homo sapiens
atctagtgtagggaa

SEQ ID NO: 129135 - DNA, 15 bp, Homo sapiens
catctagtgtaggga

SEQ ID NO: 129136 - DNA, 15 bp, Homo sapiens
gcatctagtgtaggg

SEQ ID NO: 129137 - DNA, 15 bp, Homo sapiens
agcatctagtgtagg

SEQ ID NO: 129138 - DNA, 15 bp, Homo sapiens
aagcatctagtgtag

SEQ ID NO: 129139 - DNA, 15 bp, Homo sapiens
gaagcatctagtgta

SEQ ID NO: 129140 - DNA, 15 bp, Homo sapiens
agaagcatctagtgt

SEQ ID NO: 129141 - DNA, 15 bp, Homo sapiens
aagaagcatctagtg

SEQ ID NO: 129142 - DNA, 15 bp, Homo sapiens
caagaagcatctagt

SEQ ID NO: 129143 - DNA, 15 bp, Homo sapiens
tcaagaagcatctag

SEQ ID NO: 129144 - DNA, 15 bp, Homo sapiens
ttcaagaagcatcta

SEQ ID NO: 129145 - DNA, 15 bp, Homo sapiens
tttcaagaagcatct

SEQ ID NO: 129146 - DNA, 15 bp, Homo sapiens
atttcaagaagcatc

SEQ ID NO: 129147 - DNA, 15 bp, Homo sapiens
aatttcaagaagcat

SEQ ID NO: 129148 - DNA, 15 bp, Homo sapiens
gaatttcaagaagca

SEQ ID NO: 129149 - DNA, 15 bp, Homo sapiens
ggaatttcaagaagc

SEQ ID NO: 129150 - DNA, 15 bp, Homo sapiens
aggaatttcaagaag

SEQ ID NO: 129151 - DNA, 15 bp, Homo sapiens
aaggaatttcaagaa

SEQ ID NO: 129152 - DNA, 15 bp, Homo sapiens
aaaggaatttcaaga

SEQ ID NO: 129153 - DNA, 15 bp, Homo sapiens
aaaaggaatttcaag

SEQ ID NO: 129154 - DNA, 15 bp, Homo sapiens
caaaaggaatttcaa

SEQ ID NO: 129155 - DNA, 15 bp, Homo sapiens
ccaaaaggaatttca

SEQ ID NO: 129156 - DNA, 15 bp, Homo sapiens
gccaaaaggaatttc

SEQ ID NO: 129157 - DNA, 15 bp, Homo sapiens
ggccaaaaggaattt

SEQ ID NO: 129158 - DNA, 15 bp, Homo sapiens
tggccaaaaggaatt

SEQ ID NO: 129159 - DNA, 15 bp, Homo sapiens
ttggccaaaaggaat

SEQ ID NO: 129160 - DNA, 15 bp, Homo sapiens
tttggccaaaaggaa

SEQ ID NO: 129161 - DNA, 15 bp, Homo sapiens
ttttggccaaaagga

SEQ ID NO: 129162 - DNA, 15 bp, Homo sapiens
attttggccaaaagg

SEQ ID NO: 129163 - DNA, 15 bp, Homo sapiens
cattttggccaaaag

SEQ ID NO: 129164 - DNA, 15 bp, Homo sapiens
acattttggccaaaa

SEQ ID NO: 129165 - DNA, 15 bp, Homo sapiens
aacattttggccaaa

SEQ ID NO: 129166 - DNA, 15 bp, Homo sapiens
gaacattttggccaa

SEQ ID NO: 129167 - DNA, 15 bp, Homo sapiens
agaacattttggcca

SEQ ID NO: 129168 - DNA, 15 bp, Homo sapiens
tagaacattttggcc

SEQ ID NO: 129169 - DNA, 15 bp, Homo sapiens
atagaacattttggc

SEQ ID NO: 129170 - DNA, 15 bp, Homo sapiens
tatagaacattttgg

SEQ ID NO: 129171 - DNA, 15 bp, Homo sapiens
gtatagaacattttg

SEQ ID NO: 129172 - DNA, 15 bp, Homo sapiens
agtatagaacatttt

SEQ ID NO: 129173 - DNA, 15 bp, Homo sapiens
aagtatagaacattt

SEQ ID NO: 129174 - DNA, 15 bp, Homo sapiens
aaagtatagaacatt

SEQ ID NO: 129175 - DNA, 15 bp, Homo sapiens
taaagtatagaacat

SEQ ID NO: 129176 - DNA, 15 bp, Homo sapiens
ttaaagtatagaaca

SEQ ID NO: 129177 - DNA, 15 bp, Homo sapiens
attaaagtatagaac

SEQ ID NO: 129178 - DNA, 15 bp, Homo sapiens
cattaaagtatagaa

SEQ ID NO: 129179 - DNA, 15 bp, Homo sapiens
tcattaaagtataga

SEQ ID NO: 129180 - DNA, 15 bp, Homo sapiens
ttcattaaagtatag

SEQ ID NO: 129181 - DNA, 15 bp, Homo sapiens
tttcattaaagtata

SEQ ID NO: 129182 - DNA, 15 bp, Homo sapiens
atttcattaaagtat

SEQ ID NO: 129183 - DNA, 15 bp, Homo sapiens
catttcattaaagta

SEQ ID NO: 129184 - DNA, 15 bp, Homo sapiens
ccatttcattaaagt

SEQ ID NO: 129185 - DNA, 15 bp, Homo sapiens
tccatttcattaaag

SEQ ID NO: 129186 - DNA, 15 bp, Homo sapiens
ttccatttcattaaa

SEQ ID NO: 129187 - DNA, 15 bp, Homo sapiens
tttccatttcattaa

SEQ ID NO: 129188 - DNA, 15 bp, Homo sapiens
gtttccatttcatta

SEQ ID NO: 129189 - DNA, 15 bp, Homo sapiens
agtttccatttcatt

SEQ ID NO: 129190 - DNA, 15 bp, Homo sapiens
cagtttccatttcat

SEQ ID NO: 129191 - DNA, 15 bp, Homo sapiens
tcagtttccatttca

SEQ ID NO: 129192 - DNA, 15 bp, Homo sapiens
atcagtttccatttc

SEQ ID NO: 129193 - DNA, 15 bp, Homo sapiens
gatcagtttccattt

SEQ ID NO: 129194 - DNA, 15 bp, Homo sapiens
agatcagtttccatt

SEQ ID NO: 129195 - DNA, 15 bp, Homo sapiens
tagatcagtttccat

SEQ ID NO: 129196 - DNA, 15 bp, Homo sapiens
gtagatcagtttcca

SEQ ID NO: 129197 - DNA, 15 bp, Homo sapiens
agtagatcagtttcc

SEQ ID NO: 129198 - DNA, 15 bp, Homo sapiens
aagtagatcagtttc

SEQ ID NO: 129199 - DNA, 15 bp, Homo sapiens
gaagtagatcagttt

SEQ ID NO: 129200 - DNA, 15 bp, Homo sapiens
tgaagtagatcagtt

SEQ ID NO: 129201 - DNA, 15 bp, Homo sapiens
atgaagtagatcagt

SEQ ID NO: 129202 - DNA, 15 bp, Homo sapiens
aatgaagtagatcag

SEQ ID NO: 129203 - DNA, 15 bp, Homo sapiens
aaatgaagtagatca

SEQ ID NO: 129204 - DNA, 15 bp, Homo sapiens
aaaatgaagtagatc

SEQ ID NO: 129205 - DNA, 15 bp, Homo sapiens
gaaaatgaagtagat

SEQ ID NO: 129206 - DNA, 15 bp, Homo sapiens
tgaaaatgaagtaga

SEQ ID NO: 129207 - DNA, 15 bp, Homo sapiens
atgaaaatgaagtag

SEQ ID NO: 129208 - DNA, 15 bp, Homo sapiens
tatgaaaatgaagta

SEQ ID NO: 129209 - DNA, 15 bp, Homo sapiens
ttatgaaaatgaagt

SEQ ID NO: 129210 - DNA, 15 bp, Homo sapiens
attatgaaaatgaag

SEQ ID NO: 129211 - DNA, 15 bp, Homo sapiens
cattatgaaaatgaa

SEQ ID NO: 129212 - DNA, 15 bp, Homo sapiens
acattatgaaaatga

SEQ ID NO: 129213 - DNA, 15 bp, Homo sapiens
aacattatgaaaatg

SEQ ID NO: 129214 - DNA, 15 bp, Homo sapiens
aaacattatgaaaat

SEQ ID NO: 129215 - DNA, 15 bp, Homo sapiens
aaaacattatgaaaa

SEQ ID NO: 129216 - DNA, 15 bp, Homo sapiens
taaaacattatgaaa

SEQ ID NO: 129217 - DNA, 15 bp, Homo sapiens
ataaaacattatgaa

SEQ ID NO: 129218 - DNA, 15 bp, Homo sapiens
aataaaacattatga

SEQ ID NO: 129219 - DNA, 15 bp, Homo sapiens
aaataaaacattatg

SEQ ID NO: 129220 - DNA, 15 bp, Homo sapiens
caaataaaacattat

SEQ ID NO: 129221 - DNA, 15 bp, Homo sapiens
acaaataaaacatta

SEQ ID NO: 129222 - DNA, 15 bp, Homo sapiens
tacaaataaaacatt

SEQ ID NO: 129223 - DNA, 15 bp, Homo sapiens
atacaaataaaacat

SEQ ID NO: 129224 - DNA, 15 bp, Homo sapiens
gatacaaataaaaca

SEQ ID NO: 129225 - DNA, 15 bp, Homo sapiens
ggatacaaataaaac

SEQ ID NO: 129226 - DNA, 15 bp, Homo sapiens
tggatacaaataaaa

SEQ ID NO: 129227 - DNA, 15 bp, Homo sapiens
atggatacaaataaa

SEQ ID NO: 129228 - DNA, 15 bp, Homo sapiens
tatggatacaaataa

SEQ ID NO: 129229 - DNA, 15 bp, Homo sapiens
gtatggatacaaata

SEQ ID NO: 129230 - DNA, 15 bp, Homo sapiens
tgtatggatacaaat

SEQ ID NO: 129231 - DNA, 15 bp, Homo sapiens
atgtatggatacaaa

SEQ ID NO: 129232 - DNA, 15 bp, Homo sapiens
tatgtatggatacaa

SEQ ID NO: 129233 - DNA, 15 bp, Homo sapiens
atatgtatggataca

SEQ ID NO: 129234 - DNA, 15 bp, Homo sapiens
gatatgtatggatac

SEQ ID NO: 129235 - DNA, 15 bp, Homo sapiens
tgatatgtatggata

SEQ ID NO: 129236 - DNA, 15 bp, Homo sapiens
ttgatatgtatggat

SEQ ID NO: 129237 - DNA, 15 bp, Homo sapiens
tttgatatgtatgga

SEQ ID NO: 129238 - DNA, 15 bp, Homo sapiens
ttttgatatgtatgg

SEQ ID NO: 129239 - DNA, 15 bp, Homo sapiens
attttgatatgtatg

SEQ ID NO: 129240 - DNA, 15 bp, Homo sapiens
aattttgatatgtat

SEQ ID NO: 129241 - DNA, 15 bp, Homo sapiens
taattttgatatgta

SEQ ID NO: 129242 - DNA, 15 bp, Homo sapiens
ataattttgatatgt

SEQ ID NO: 129243 - DNA, 15 bp, Homo sapiens
tataattttgatatg

SEQ ID NO: 129244 - DNA, 15 bp, Homo sapiens
ttataattttgatat

SEQ ID NO: 129245 - DNA, 15 bp, Homo sapiens
attataattttgata

SEQ ID NO: 129246 - DNA, 15 bp, Homo sapiens
cattataattttgat

SEQ ID NO: 129247 - DNA, 15 bp, Homo sapiens
acattataattttga

SEQ ID NO: 129248 - DNA, 15 bp, Homo sapiens
tacattataattttg

SEQ ID NO: 129249 - DNA, 15 bp, Homo sapiens
ctacattataatttt

SEQ ID NO: 129250 - DNA, 15 bp, Homo sapiens
gctacattataattt

SEQ ID NO: 129251 - DNA, 15 bp, Homo sapiens
agctacattataatt

SEQ ID NO: 129252 - DNA, 15 bp, Homo sapiens
cagctacattataat

SEQ ID NO: 129253 - DNA, 15 bp, Homo sapiens
ccagctacattataa

SEQ ID NO: 129254 - DNA, 15 bp, Homo sapiens
accagctacattata

SEQ ID NO: 129255 - DNA, 15 bp, Homo sapiens
taccagctacattat

SEQ ID NO: 129256 - DNA, 15 bp, Homo sapiens
ataccagctacatta

SEQ ID NO: 129257 - DNA, 15 bp, Homo sapiens
aataccagctacatt

SEQ ID NO: 129258 - DNA, 15 bp, Homo sapiens
taataccagctacat

SEQ ID NO: 129259 - DNA, 15 bp, Homo sapiens
ttaataccagctaca

SEQ ID NO: 129260 - DNA, 15 bp, Homo sapiens
tttaataccagctac

SEQ ID NO: 129261 - DNA, 15 bp, Homo sapiens
atttaataccagcta

SEQ ID NO: 129262 - DNA, 15 bp, Homo sapiens
catttaataccagct

SEQ ID NO: 129263 - DNA, 15 bp, Homo sapiens
acatttaataccagc

SEQ ID NO: 129264 - DNA, 15 bp, Homo sapiens
aacatttaataccag

SEQ ID NO: 129265 - DNA, 15 bp, Homo sapiens
aaacatttaatacca

SEQ ID NO: 129266 - DNA, 15 bp, Homo sapiens
aaaacatttaatacc

SEQ ID NO: 129267 - DNA, 15 bp, Homo sapiens
aaaaacatttaatac

SEQ ID NO: 129268 - DNA, 15 bp, Homo sapiens
taaaaacatttaata

SEQ ID NO: 129269 - DNA, 15 bp, Homo sapiens
ttaaaaacatttaat

SEQ ID NO: 129270 - DNA, 15 bp, Homo sapiens
tttaaaaacatttaa

SEQ ID NO: 129271 - DNA, 15 bp, Homo sapiens
ttttaaaaacattta

SEQ ID NO: 129272 - DNA, 15 bp, Homo sapiens
tttttaaaaacattt

SEQ ID NO: 129273 - DNA, 15 bp, Homo sapiens
ctttttaaaaacatt

SEQ ID NO: 129274 - DNA, 15 bp, Homo sapiens
gctttttaaaaacat

SEQ ID NO: 129275 - DNA, 15 bp, Homo sapiens
tgctttttaaaaaca

SEQ ID NO: 129276 - DNA, 15 bp, Homo sapiens
atgctttttaaaaac

SEQ ID NO: 129277 - DNA, 15 bp, Homo sapiens
aatgctttttaaaaa

SEQ ID NO: 129278 - DNA, 15 bp, Homo sapiens
aaatgctttttaaaa

SEQ ID NO: 129279 - DNA, 15 bp, Homo sapiens
gaaatgctttttaaa

SEQ ID NO: 129280 - DNA, 15 bp, Homo sapiens
tgaaatgctttttaa

SEQ ID NO: 129281 - DNA, 15 bp, Homo sapiens
ttgaaatgcttttta

SEQ ID NO: 129282 - DNA, 15 bp, Homo sapiens
gttgaaatgcttttt

SEQ ID NO: 129283 - DNA, 15 bp, Homo sapiens
agttgaaatgctttt

SEQ ID NO: 129284 - DNA, 15 bp, Homo sapiens
gagttgaaatgcttt

SEQ ID NO: 129285 - DNA, 15 bp, Homo sapiens
agagttgaaatgctt

SEQ ID NO: 129286 - DNA, 15 bp, Homo sapiens
tagagttgaaatgct

SEQ ID NO: 129287 - DNA, 15 bp, Homo sapiens
atagagttgaaatgc

SEQ ID NO: 129288 - DNA, 15 bp, Homo sapiens
aatagagttgaaatg

SEQ ID NO: 129289 - DNA, 15 bp, Homo sapiens
aaatagagttgaaat

SEQ ID NO: 129290 - DNA, 15 bp, Homo sapiens
taaatagagttgaaa

SEQ ID NO: 129291 - DNA, 15 bp, Homo sapiens
ataaatagagttgaa

SEQ ID NO: 129292 - DNA, 15 bp, Homo sapiens
cataaatagagttga

SEQ ID NO: 129293 - DNA, 15 bp, Homo sapiens
ccataaatagagttg

SEQ ID NO: 129294 - DNA, 15 bp, Homo sapiens
gccataaatagagtt

SEQ ID NO: 129295 - DNA, 15 bp, Homo sapiens
tgccataaatagagt

SEQ ID NO: 129296 - DNA, 15 bp, Homo sapiens
atgccataaatagag

SEQ ID NO: 129297 - DNA, 15 bp, Homo sapiens
aatgccataaataga

SEQ ID NO: 129298 - DNA, 15 bp, Homo sapiens
taatgccataaatag

SEQ ID NO: 129299 - DNA, 15 bp, Homo sapiens
ttaatgccataaata

SEQ ID NO: 129300 - DNA, 15 bp, Homo sapiens
cttaatgccataaat

SEQ ID NO: 129301 - DNA, 15 bp, Homo sapiens
tcttaatgccataaa

SEQ ID NO: 129302 - DNA, 15 bp, Homo sapiens
ttcttaatgccataa

SEQ ID NO: 129303 - DNA, 15 bp, Homo sapiens
attcttaatgccata

SEQ ID NO: 129304 - DNA, 15 bp, Homo sapiens
aattcttaatgccat

SEQ ID NO: 129305 - DNA, 15 bp, Homo sapiens
aaattcttaatgcca

SEQ ID NO: 129306 - DNA, 15 bp, Homo sapiens
aaaattcttaatgcc

SEQ ID NO: 129307 - DNA, 15 bp, Homo sapiens
aaaaattcttaatgc

SEQ ID NO: 129308 - DNA, 15 bp, Homo sapiens
aaaaaattcttaatg

SEQ ID NO: 129309 - DNA, 15 bp, Homo sapiens
aaaaaaattcttaat

SEQ ID NO: 129310 - DNA, 15 bp, Homo sapiens
caaaaaaattcttaa

SEQ ID NO: 129311 - DNA, 15 bp, Homo sapiens
gcaaaaaaattctta

SEQ ID NO: 129312 - DNA, 15 bp, Homo sapiens
agcaaaaaaattctt

SEQ ID NO: 129313 - DNA, 15 bp, Homo sapiens
cagcaaaaaaattct

SEQ ID NO: 129314 - DNA, 15 bp, Homo sapiens
tcagcaaaaaaattc

SEQ ID NO: 129315 - DNA, 15 bp, Homo sapiens
atcagcaaaaaaatt

SEQ ID NO: 129316 - DNA, 15 bp, Homo sapiens
aatcagcaaaaaaat

SEQ ID NO: 129317 - DNA, 15 bp, Homo sapiens
aaatcagcaaaaaaa

SEQ ID NO: 129318 - DNA, 15 bp, Homo sapiens
gaaatcagcaaaaaa

SEQ ID NO: 129319 - DNA, 15 bp, Homo sapiens
agaaatcagcaaaaa

SEQ ID NO: 129320 - DNA, 15 bp, Homo sapiens
aagaaatcagcaaaa

SEQ ID NO: 129321 - DNA, 15 bp, Homo sapiens
caagaaatcagcaaa

SEQ ID NO: 129322 - DNA, 15 bp, Homo sapiens
tcaagaaatcagcaa

SEQ ID NO: 129323 - DNA, 15 bp, Homo sapiens
ttcaagaaatcagca

SEQ ID NO: 129324 - DNA, 15 bp, Homo sapiens
tttcaagaaatcagc

SEQ ID NO: 129325 - DNA, 15 bp, Homo sapiens
ctttcaagaaatcag

SEQ ID NO: 129326 - DNA, 15 bp, Homo sapiens
tctttcaagaaatca

SEQ ID NO: 129327 - DNA, 15 bp, Homo sapiens
ttctttcaagaaatc

SEQ ID NO: 129328 - DNA, 15 bp, Homo sapiens
tttctttcaagaaat

SEQ ID NO: 129329 - DNA, 15 bp, Homo sapiens
atttctttcaagaaa

SEQ ID NO: 129330 - DNA, 15 bp, Homo sapiens
tatttctttcaagaa

SEQ ID NO: 129331 - DNA, 15 bp, Homo sapiens
ttatttctttcaaga

SEQ ID NO: 129332 - DNA, 15 bp, Homo sapiens
tttatttctttcaag

SEQ ID NO: 129333 - DNA, 15 bp, Homo sapiens
ttttatttctttcaa

SEQ ID NO: 129334 - DNA, 15 bp, Homo sapiens
tttttatttctttca

SEQ ID NO: 129335 - DNA, 15 bp, Homo sapiens
ctttttatttctttc

SEQ ID NO: 129336 - DNA, 15 bp, Homo sapiens
actttttatttcttt

SEQ ID NO: 129337 - DNA, 15 bp, Homo sapiens
tactttttatttctt

SEQ ID NO: 129338 - DNA, 15 bp, Homo sapiens
gtactttttatttct

SEQ ID NO: 129339 - DNA, 15 bp, Homo sapiens
tgtactttttatttc

SEQ ID NO: 129340 - DNA, 15 bp, Homo sapiens
atgtactttttattt

SEQ ID NO: 129341 - DNA, 15 bp, Homo sapiens
catgtactttttatt

SEQ ID NO: 129342 - DNA, 15 bp, Homo sapiens
tcatgtactttttat

SEQ ID NO: 129343 - DNA, 15 bp, Homo sapiens
atcatgtacttttta

SEQ ID NO: 129344 - DNA, 15 bp, Homo sapiens
aatcatgtacttttt

SEQ ID NO: 129345 - DNA, 15 bp, Homo sapiens
aaatcatgtactttt

SEQ ID NO: 129346 - DNA, 15 bp, Homo sapiens
gaaatcatgtacttt

SEQ ID NO: 129347 - DNA, 15 bp, Homo sapiens
agaaatcatgtactt

SEQ ID NO: 129348 - DNA, 15 bp, Homo sapiens
cagaaatcatgtact

SEQ ID NO: 129349 - DNA, 15 bp, Homo sapiens
gcagaaatcatgtac

SEQ ID NO: 129350 - DNA, 15 bp, Homo sapiens
agcagaaatcatgta

SEQ ID NO: 129351 - DNA, 15 bp, Homo sapiens
aagcagaaatcatgt

SEQ ID NO: 129352 - DNA, 15 bp, Homo sapiens
caagcagaaatcatg

SEQ ID NO: 129353 - DNA, 15 bp, Homo sapiens
acaagcagaaatcat

SEQ ID NO: 129354 - DNA, 15 bp, Homo sapiens
cacaagcagaaatca

SEQ ID NO: 129355 - DNA, 15 bp, Homo sapiens
acacaagcagaaatc

SEQ ID NO: 129356 - DNA, 15 bp, Homo sapiens
cacacaagcagaaat

SEQ ID NO: 129357 - DNA, 15 bp, Homo sapiens
acacacaagcagaaa

SEQ ID NO: 129358 - DNA, 15 bp, Homo sapiens
tacacacaagcagaa

SEQ ID NO: 129359 - DNA, 15 bp, Homo sapiens
ttacacacaagcaga

SEQ ID NO: 129360 - DNA, 15 bp, Homo sapiens
tttacacacaagcag

SEQ ID NO: 129361 - DNA, 15 bp, Homo sapiens
atttacacacaagca

SEQ ID NO: 129362 - DNA, 15 bp, Homo sapiens
tatttacacacaagc

SEQ ID NO: 129363 - DNA, 15 bp, Homo sapiens
ttatttacacacaag

SEQ ID NO: 129364 - DNA, 15 bp, Homo sapiens
cttatttacacacaa

SEQ ID NO: 129365 - DNA, 15 bp, Homo sapiens
tcttatttacacaca

SEQ ID NO: 129366 - DNA, 15 bp, Homo sapiens
ttcttatttacacac

SEQ ID NO: 129367 - DNA, 15 bp, Homo sapiens
attcttatttacaca

SEQ ID NO: 129368 - DNA, 15 bp, Homo sapiens
cattcttatttacac

SEQ ID NO: 129369 - DNA, 15 bp, Homo sapiens
tcattcttatttaca

SEQ ID NO: 129370 - DNA, 15 bp, Homo sapiens
ttcattcttatttac

SEQ ID NO: 129371 - DNA, 15 bp, Homo sapiens
tttcattcttattta

SEQ ID NO: 129372 - DNA, 15 bp, Homo sapiens
ctttcattcttattt

SEQ ID NO: 129373 - DNA, 15 bp, Homo sapiens
cctttcattcttatt

SEQ ID NO: 129374 - DNA, 15 bp, Homo sapiens
tcctttcattcttat

SEQ ID NO: 129375 - DNA, 15 bp, Homo sapiens
ttcctttcattctta

SEQ ID NO: 129376 - DNA, 15 bp, Homo sapiens
cttcctttcattctt

SEQ ID NO: 129377 - DNA, 15 bp, Homo sapiens
tcttcctttcattct

SEQ ID NO: 129378 - DNA, 15 bp, Homo sapiens
ttcttcctttcattc

SEQ ID NO: 129379 - DNA, 15 bp, Homo sapiens
tttcttcctttcatt

SEQ ID NO: 129380 - DNA, 15 bp, Homo sapiens
ttttcttcctttcat

SEQ ID NO: 129381 - DNA, 15 bp, Homo sapiens
tttttcttcctttca

SEQ ID NO: 129382 - DNA, 15 bp, Homo sapiens
ctttttcttcctttc

SEQ ID NO: 129383 - DNA, 15 bp, Homo sapiens
actttttcttccttt

SEQ ID NO: 129384 - DNA, 15 bp, Homo sapiens
cactttttcttcctt

SEQ ID NO: 129385 - DNA, 15 bp, Homo sapiens
acactttttcttcct

SEQ ID NO: 129386 - DNA, 15 bp, Homo sapiens
tacactttttcttcc

SEQ ID NO: 129387 - DNA, 15 bp, Homo sapiens
ttacactttttcttc

SEQ ID NO: 129388 - DNA, 15 bp, Homo sapiens
attacactttttctt

SEQ ID NO: 129389 - DNA, 15 bp, Homo sapiens
tattacactttttct

SEQ ID NO: 129390 - DNA, 15 bp, Homo sapiens
gtattacactttttc

SEQ ID NO: 129391 - DNA, 15 bp, Homo sapiens
agtattacacttttt

SEQ ID NO: 129392 - DNA, 15 bp, Homo sapiens
cagtattacactttt

SEQ ID NO: 129393 - DNA, 15 bp, Homo sapiens
ccagtattacacttt

SEQ ID NO: 129394 - DNA, 15 bp, Homo sapiens
cccagtattacactt

SEQ ID NO: 129395 - DNA, 15 bp, Homo sapiens
gcccagtattacact

SEQ ID NO: 129396 - DNA, 15 bp, Homo sapiens
tgcccagtattacac

SEQ ID NO: 129397 - DNA, 15 bp, Homo sapiens
atgcccagtattaca

SEQ ID NO: 129398 - DNA, 15 bp, Homo sapiens
catgcccagtattac

SEQ ID NO: 129399 - DNA, 15 bp, Homo sapiens
gcatgcccagtatta

SEQ ID NO: 129400 - DNA, 15 bp, Homo sapiens
ggcatgcccagtatt

SEQ ID NO: 129401 - DNA, 15 bp, Homo sapiens
tggcatgcccagtat

SEQ ID NO: 129402 - DNA, 15 bp, Homo sapiens
atggcatgcccagta

SEQ ID NO: 129403 - DNA, 15 bp, Homo sapiens
aatggcatgcccagt

SEQ ID NO: 129404 - DNA, 15 bp, Homo sapiens
gaatggcatgcccag

SEQ ID NO: 129405 - DNA, 15 bp, Homo sapiens
tgaatggcatgccca

SEQ ID NO: 129406 - DNA, 15 bp, Homo sapiens
atgaatggcatgccc

SEQ ID NO: 129407 - DNA, 15 bp, Homo sapiens
aatgaatggcatgcc

SEQ ID NO: 129408 - DNA, 15 bp, Homo sapiens
gaatgaatggcatgc

SEQ ID NO: 129409 - DNA, 15 bp, Homo sapiens
agaatgaatggcatg

SEQ ID NO: 129410 - DNA, 15 bp, Homo sapiens
aagaatgaatggcat

SEQ ID NO: 129411 - DNA, 15 bp, Homo sapiens
taagaatgaatggca

SEQ ID NO: 129412 - DNA, 15 bp, Homo sapiens
ataagaatgaatggc

SEQ ID NO: 129413 - DNA, 15 bp, Homo sapiens
cataagaatgaatgg

SEQ ID NO: 129414 - DNA, 15 bp, Homo sapiens
ccataagaatgaatg

SEQ ID NO: 129415 - DNA, 15 bp, Homo sapiens
accataagaatgaat

SEQ ID NO: 129416 - DNA, 15 bp, Homo sapiens
caccataagaatgaa

SEQ ID NO: 129417 - DNA, 15 bp, Homo sapiens
ccaccataagaatga

SEQ ID NO: 129418 - DNA, 15 bp, Homo sapiens
gccaccataagaatg

SEQ ID NO: 129419 - DNA, 15 bp, Homo sapiens
ggccaccataagaat

SEQ ID NO: 129420 - DNA, 15 bp, Homo sapiens
tggccaccataagaa

SEQ ID NO: 129421 - DNA, 15 bp, Homo sapiens
ctggccaccataaga

SEQ ID NO: 129422 - DNA, 15 bp, Homo sapiens
actggccaccataag

SEQ ID NO: 129423 - DNA, 15 bp, Homo sapiens
aactggccaccataa

SEQ ID NO: 129424 - DNA, 15 bp, Homo sapiens
taactggccaccata

SEQ ID NO: 129425 - DNA, 15 bp, Homo sapiens
ttaactggccaccat

SEQ ID NO: 129426 - DNA, 15 bp, Homo sapiens
attaactggccacca

SEQ ID NO: 129427 - DNA, 15 bp, Homo sapiens
aattaactggccacc

SEQ ID NO: 129428 - DNA, 15 bp, Homo sapiens
taattaactggccac

SEQ ID NO: 129429 - DNA, 15 bp, Homo sapiens
ttaattaactggcca

SEQ ID NO: 129430 - DNA, 15 bp, Homo sapiens
tttaattaactggcc

SEQ ID NO: 129431 - DNA, 15 bp, Homo sapiens
ttttaattaactggc

SEQ ID NO: 129432 - DNA, 15 bp, Homo sapiens
cttttaattaactgg

SEQ ID NO: 129433 - DNA, 15 bp, Homo sapiens
acttttaattaactg

SEQ ID NO: 129434 - DNA, 15 bp, Homo sapiens
cacttttaattaact

SEQ ID NO: 129435 - DNA, 15 bp, Homo sapiens
ccacttttaattaac

SEQ ID NO: 129436 - DNA, 15 bp, Homo sapiens
tccacttttaattaa

SEQ ID NO: 129437 - DNA, 15 bp, Homo sapiens
ttccacttttaatta

SEQ ID NO: 129438 - DNA, 15 bp, Homo sapiens
tttccacttttaatt

SEQ ID NO: 129439 - DNA, 15 bp, Homo sapiens
ctttccacttttaat

SEQ ID NO: 129440 - DNA, 15 bp, Homo sapiens
cctttccacttttaa

SEQ ID NO: 129441 - DNA, 15 bp, Homo sapiens
acctttccactttta

SEQ ID NO: 129442 - DNA, 15 bp, Homo sapiens
aacctttccactttt

SEQ ID NO: 129443 - DNA, 15 bp, Homo sapiens
aaacctttccacttt

SEQ ID NO: 129444 - DNA, 15 bp, Homo sapiens
gaaacctttccactt

SEQ ID NO: 129445 - DNA, 15 bp, Homo sapiens
tgaaacctttccact

SEQ ID NO: 129446 - DNA, 15 bp, Homo sapiens
atgaaacctttccac

SEQ ID NO: 129447 - DNA, 15 bp, Homo sapiens
gatgaaacctttcca

SEQ ID NO: 129448 - DNA, 15 bp, Homo sapiens
ggatgaaacctttcc

SEQ ID NO: 129449 - DNA, 15 bp, Homo sapiens
tggatgaaacctttc

SEQ ID NO: 129450 - DNA, 15 bp, Homo sapiens
ctggatgaaaccttt

SEQ ID NO: 129451 - DNA, 15 bp, Homo sapiens
gctggatgaaacctt

SEQ ID NO: 129452 - DNA, 15 bp, Homo sapiens
tgctggatgaaacct

SEQ ID NO: 129453 - DNA, 15 bp, Homo sapiens
ttgctggatgaaacc

SEQ ID NO: 129454 - DNA, 15 bp, Homo sapiens
cttgctggatgaaac

SEQ ID NO: 129455 - DNA, 15 bp, Homo sapiens
ccttgctggatgaaa

SEQ ID NO: 129456 - DNA, 15 bp, Homo sapiens
accttgctggatgaa

SEQ ID NO: 129457 - DNA, 15 bp, Homo sapiens
aaccttgctggatga

SEQ ID NO: 129458 - DNA, 15 bp, Homo sapiens
aaaccttgctggatg

SEQ ID NO: 129459 - DNA, 15 bp, Homo sapiens
taaaccttgctggat

SEQ ID NO: 129460 - DNA, 15 bp, Homo sapiens
gtaaaccttgctgga

SEQ ID NO: 129461 - DNA, 15 bp, Homo sapiens
tgtaaaccttgctgg

SEQ ID NO: 129462 - DNA, 15 bp, Homo sapiens
atgtaaaccttgctg

SEQ ID NO: 129463 - DNA, 15 bp, Homo sapiens
catgtaaaccttgct

SEQ ID NO: 129464 - DNA, 15 bp, Homo sapiens
ccatgtaaaccttgc

SEQ ID NO: 129465 - DNA, 15 bp, Homo sapiens
cccatgtaaaccttg

SEQ ID NO: 129466 - DNA, 15 bp, Homo sapiens
acccatgtaaacctt

SEQ ID NO: 129467 - DNA, 15 bp, Homo sapiens
tacccatgtaaacct

SEQ ID NO: 129468 - DNA, 15 bp, Homo sapiens
ctacccatgtaaacc

SEQ ID NO: 129469 - DNA, 15 bp, Homo sapiens
cctacccatgtaaac

SEQ ID NO: 129470 - DNA, 15 bp, Homo sapiens
tcctacccatgtaaa

SEQ ID NO: 129471 - DNA, 15 bp, Homo sapiens
atcctacccatgtaa

SEQ ID NO: 129472 - DNA, 15 bp, Homo sapiens
tatcctacccatgta

SEQ ID NO: 129473 - DNA, 15 bp, Homo sapiens
gtatcctacccatgt

SEQ ID NO: 129474 - DNA, 15 bp, Homo sapiens
ggtatcctacccatg

SEQ ID NO: 129475 - DNA, 15 bp, Homo sapiens
aggtatcctacccat

SEQ ID NO: 129476 - DNA, 15 bp, Homo sapiens
gaggtatcctaccca

SEQ ID NO: 129477 - DNA, 15 bp, Homo sapiens
agaggtatcctaccc

SEQ ID NO: 129478 - DNA, 15 bp, Homo sapiens
aagaggtatcctacc

SEQ ID NO: 129479 - DNA, 15 bp, Homo sapiens
aaagaggtatcctac

SEQ ID NO: 129480 - DNA, 15 bp, Homo sapiens
caaagaggtatccta

SEQ ID NO: 129481 - DNA, 15 bp, Homo sapiens
tcaaagaggtatcct

SEQ ID NO: 129482 - DNA, 15 bp, Homo sapiens
atcaaagaggtatcc

SEQ ID NO: 129483 - DNA, 15 bp, Homo sapiens
aatcaaagaggtatc

SEQ ID NO: 129484 - DNA, 15 bp, Homo sapiens
aaatcaaagaggtat

SEQ ID NO: 129485 - DNA, 15 bp, Homo sapiens
aaaatcaaagaggta

SEQ ID NO: 129486 - DNA, 15 bp, Homo sapiens
aaaaatcaaagaggt

SEQ ID NO: 129487 - DNA, 15 bp, Homo sapiens
aaaaaatcaaagagg

SEQ ID NO: 129488 - DNA, 15 bp, Homo sapiens
aaaaaaatcaaagag

SEQ ID NO: 129489 - DNA, 15 bp, Homo sapiens
aaaaaaaatcaaaga

SEQ ID NO: 129490 - DNA, 15 bp, Homo sapiens
aaaaaaaaatcaaag

SEQ ID NO: 129491 - DNA, 15 bp, Homo sapiens
taaaaaaaaatcaaa

SEQ ID NO: 129492 - DNA, 15 bp, Homo sapiens
ttaaaaaaaaatcaa

SEQ ID NO: 129493 - DNA, 15 bp, Homo sapiens
cttaaaaaaaaatca

SEQ ID NO: 129494 - DNA, 15 bp, Homo sapiens
acttaaaaaaaaatc

SEQ ID NO: 129495 - DNA, 15 bp, Homo sapiens
tacttaaaaaaaaat

SEQ ID NO: 129496 - DNA, 15 bp, Homo sapiens
atacttaaaaaaaaa

SEQ ID NO: 129497 - DNA, 15 bp, Homo sapiens
catacttaaaaaaaa

SEQ ID NO: 129498 - DNA, 15 bp, Homo sapiens
acatacttaaaaaaa

SEQ ID NO: 129499 - DNA, 15 bp, Homo sapiens
aacatacttaaaaaa

SEQ ID NO: 129500 - DNA, 15 bp, Homo sapiens
aaacatacttaaaaa

SEQ ID NO: 129501 - DNA, 15 bp, Homo sapiens
taaacatacttaaaa

SEQ ID NO: 129502 - DNA, 15 bp, Homo sapiens
ataaacatacttaaa

SEQ ID NO: 129503 - DNA, 15 bp, Homo sapiens
cataaacatacttaa

SEQ ID NO: 129504 - DNA, 15 bp, Homo sapiens
acataaacatactta

SEQ ID NO: 129505 - DNA, 15 bp, Homo sapiens
cacataaacatactt

SEQ ID NO: 129506 - DNA, 15 bp, Homo sapiens
acacataaacatact

SEQ ID NO: 129507 - DNA, 15 bp, Homo sapiens
tacacataaacatac

SEQ ID NO: 129508 - DNA, 15 bp, Homo sapiens
ttacacataaacata

SEQ ID NO: 129509 - DNA, 15 bp, Homo sapiens
attacacataaacat

SEQ ID NO: 129510 - DNA, 15 bp, Homo sapiens
gattacacataaaca

SEQ ID NO: 129511 - DNA, 15 bp, Homo sapiens
agattacacataaac

SEQ ID NO: 129512 - DNA, 15 bp, Homo sapiens
gagattacacataaa

SEQ ID NO: 129513 - DNA, 15 bp, Homo sapiens
agagattacacataa

SEQ ID NO: 129514 - DNA, 15 bp, Homo sapiens
gagagattacacata

SEQ ID NO: 129515 - DNA, 15 bp, Homo sapiens
agagagattacacat

SEQ ID NO: 129516 - DNA, 15 bp, Homo sapiens
cagagagattacaca

SEQ ID NO: 129517 - DNA, 15 bp, Homo sapiens
acagagagattacac

SEQ ID NO: 129518 - DNA, 15 bp, Homo sapiens
cacagagagattaca

SEQ ID NO: 129519 - DNA, 15 bp, Homo sapiens
acacagagagattac

SEQ ID NO: 129520 - DNA, 15 bp, Homo sapiens
cacacagagagatta

SEQ ID NO: 129521 - DNA, 15 bp, Homo sapiens
acacacagagagatt

SEQ ID NO: 129522 - DNA, 15 bp, Homo sapiens
cacacacagagagat

SEQ ID NO: 129523 - DNA, 15 bp, Homo sapiens
acacacacagagaga

SEQ ID NO: 129524 - DNA, 15 bp, Homo sapiens
cacacacacagagag

SEQ ID NO: 129525 - DNA, 15 bp, Homo sapiens
acacacacacagaga

SEQ ID NO: 129526 - DNA, 15 bp, Homo sapiens
gacacacacacagag

SEQ ID NO: 129527 - DNA, 15 bp, Homo sapiens
agacacacacacaga

SEQ ID NO: 129528 - DNA, 15 bp, Homo sapiens
gagacacacacacag

SEQ ID NO: 129529 - DNA, 15 bp, Homo sapiens
agagacacacacaca

SEQ ID NO: 129530 - DNA, 15 bp, Homo sapiens
gagagacacacacac

SEQ ID NO: 129531 - DNA, 15 bp, Homo sapiens
agagagacacacaca

SEQ ID NO: 129532 - DNA, 15 bp, Homo sapiens
gagagagacacacac

SEQ ID NO: 129533 - DNA, 15 bp, Homo sapiens
cgagagagacacaca

SEQ ID NO: 129534 - DNA, 15 bp, Homo sapiens
acgagagagacacac

SEQ ID NO: 129535 - DNA, 15 bp, Homo sapiens
tacgagagagacaca

SEQ ID NO: 129536 - DNA, 15 bp, Homo sapiens
ttacgagagagacac

SEQ ID NO: 129537 - DNA, 15 bp, Homo sapiens
attacgagagagaca

SEQ ID NO: 129538 - DNA, 15 bp, Homo sapiens
aattacgagagagac

SEQ ID NO: 129539 - DNA, 15 bp, Homo sapiens
taattacgagagaga

SEQ ID NO: 129540 - DNA, 15 bp, Homo sapiens
ctaattacgagagag

SEQ ID NO: 129541 - DNA, 15 bp, Homo sapiens
gctaattacgagaga

SEQ ID NO: 129542 - DNA, 15 bp, Homo sapiens
agctaattacgagag

SEQ ID NO: 129543 - DNA, 15 bp, Homo sapiens
aagctaattacgaga

SEQ ID NO: 129544 - DNA, 15 bp, Homo sapiens
taagctaattacgag

SEQ ID NO: 129545 - DNA, 15 bp, Homo sapiens
ttaagctaattacga

SEQ ID NO: 129546 - DNA, 15 bp, Homo sapiens
tttaagctaattacg

SEQ ID NO: 129547 - DNA, 15 bp, Homo sapiens
atttaagctaattac

SEQ ID NO: 129548 - DNA, 15 bp, Homo sapiens
gatttaagctaatta

SEQ ID NO: 129549 - DNA, 15 bp, Homo sapiens
tgatttaagctaatt

SEQ ID NO: 129550 - DNA, 15 bp, Homo sapiens
atgatttaagctaat

SEQ ID NO: 129551 - DNA, 15 bp, Homo sapiens
gatgatttaagctaa

SEQ ID NO: 129552 - DNA, 15 bp, Homo sapiens
tgatgatttaagcta

SEQ ID NO: 129553 - DNA, 15 bp, Homo sapiens
atgatgatttaagct

SEQ ID NO: 129554 - DNA, 15 bp, Homo sapiens
catgatgatttaagc

SEQ ID NO: 129555 - DNA, 15 bp, Homo sapiens
tcatgatgatttaag

SEQ ID NO: 129556 - DNA, 15 bp, Homo sapiens
ttcatgatgatttaa

SEQ ID NO: 129557 - DNA, 15 bp, Homo sapiens
cttcatgatgattta

SEQ ID NO: 129558 - DNA, 15 bp, Homo sapiens
ccttcatgatgattt

SEQ ID NO: 129559 - DNA, 15 bp, Homo sapiens
gccttcatgatgatt

SEQ ID NO: 129560 - DNA, 15 bp, Homo sapiens
ggccttcatgatgat

SEQ ID NO: 129561 - DNA, 15 bp, Homo sapiens
aggccttcatgatga

SEQ ID NO: 129562 - DNA, 15 bp, Homo sapiens
caggccttcatgatg

SEQ ID NO: 129563 - DNA, 15 bp, Homo sapiens
ccaggccttcatgat

SEQ ID NO: 129564 - DNA, 15 bp, Homo sapiens
tccaggccttcatga

SEQ ID NO: 129565 - DNA, 15 bp, Homo sapiens
ctccaggccttcatg

SEQ ID NO: 129566 - DNA, 15 bp, Homo sapiens
tctccaggccttcat

SEQ ID NO: 129567 - DNA, 15 bp, Homo sapiens
ctctccaggccttca

SEQ ID NO: 129568 - DNA, 15 bp, Homo sapiens
actctccaggccttc

SEQ ID NO: 129569 - DNA, 15 bp, Homo sapiens
aactctccaggcctt

SEQ ID NO: 129570 - DNA, 15 bp, Homo sapiens
taactctccaggcct

SEQ ID NO: 129571 - DNA, 15 bp, Homo sapiens
ctaactctccaggcc

SEQ ID NO: 129572 - DNA, 15 bp, Homo sapiens
cctaactctccaggc

SEQ ID NO: 129573 - DNA, 15 bp, Homo sapiens
tcctaactctccagg

SEQ ID NO: 129574 - DNA, 15 bp, Homo sapiens
atcctaactctccag

SEQ ID NO: 129575 - DNA, 15 bp, Homo sapiens
aatcctaactctcca

SEQ ID NO: 129576 - DNA, 15 bp, Homo sapiens
caatcctaactctcc

SEQ ID NO: 129577 - DNA, 15 bp, Homo sapiens
gcaatcctaactctc

SEQ ID NO: 129578 - DNA, 15 bp, Homo sapiens
tgcaatcctaactct

SEQ ID NO: 129579 - DNA, 15 bp, Homo sapiens
atgcaatcctaactc

SEQ ID NO: 129580 - DNA, 15 bp, Homo sapiens
aatgcaatcctaact

SEQ ID NO: 129581 - DNA, 15 bp, Homo sapiens
caatgcaatcctaac

SEQ ID NO: 129582 - DNA, 15 bp, Homo sapiens
acaatgcaatcctaa

SEQ ID NO: 129583 - DNA, 15 bp, Homo sapiens
tacaatgcaatccta

SEQ ID NO: 129584 - DNA, 15 bp, Homo sapiens
atacaatgcaatcct

SEQ ID NO: 129585 - DNA, 15 bp, Homo sapiens
gatacaatgcaatcc

SEQ ID NO: 129586 - DNA, 15 bp, Homo sapiens
tgatacaatgcaatc

SEQ ID NO: 129587 - DNA, 15 bp, Homo sapiens
ttgatacaatgcaat

SEQ ID NO: 129588 - DNA, 15 bp, Homo sapiens
tttgatacaatgcaa

SEQ ID NO: 129589 - DNA, 15 bp, Homo sapiens
atttgatacaatgca

SEQ ID NO: 129590 - DNA, 15 bp, Homo sapiens
gatttgatacaatgc

SEQ ID NO: 129591 - DNA, 15 bp, Homo sapiens
ggatttgatacaatg

SEQ ID NO: 129592 - DNA, 15 bp, Homo sapiens
gggatttgatacaat

SEQ ID NO: 129593 - DNA, 15 bp, Homo sapiens
agggatttgatacaa

SEQ ID NO: 129594 - DNA, 15 bp, Homo sapiens
aagggatttgataca

SEQ ID NO: 129595 - DNA, 15 bp, Homo sapiens
caagggatttgatac

SEQ ID NO: 129596 - DNA, 15 bp, Homo sapiens
acaagggatttgata

SEQ ID NO: 129597 - DNA, 15 bp, Homo sapiens
aacaagggatttgat

SEQ ID NO: 129598 - DNA, 15 bp, Homo sapiens
gaacaagggatttga

SEQ ID NO: 129599 - DNA, 15 bp, Homo sapiens
agaacaagggatttg

SEQ ID NO: 129600 - DNA, 15 bp, Homo sapiens
aagaacaagggattt

SEQ ID NO: 129601 - DNA, 15 bp, Homo sapiens
aaagaacaagggatt

SEQ ID NO: 129602 - DNA, 15 bp, Homo sapiens
aaaagaacaagggat

SEQ ID NO: 129603 - DNA, 15 bp, Homo sapiens
caaaagaacaaggga

SEQ ID NO: 129604 - DNA, 15 bp, Homo sapiens
tcaaaagaacaaggg

SEQ ID NO: 129605 - DNA, 15 bp, Homo sapiens
gtcaaaagaacaagg

SEQ ID NO: 129606 - DNA, 15 bp, Homo sapiens
agtcaaaagaacaag

SEQ ID NO: 129607 - DNA, 15 bp, Homo sapiens
tagtcaaaagaacaa

SEQ ID NO: 129608 - DNA, 15 bp, Homo sapiens
ttagtcaaaagaaca

SEQ ID NO: 129609 - DNA, 15 bp, Homo sapiens
attagtcaaaagaac

SEQ ID NO: 129610 - DNA, 15 bp, Homo sapiens
cattagtcaaaagaa

SEQ ID NO: 129611 - DNA, 15 bp, Homo sapiens
acattagtcaaaaga

SEQ ID NO: 129612 - DNA, 15 bp, Homo sapiens
aacattagtcaaaag

SEQ ID NO: 129613 - DNA, 15 bp, Homo sapiens
gaacattagtcaaaa

SEQ ID NO: 129614 - DNA, 15 bp, Homo sapiens
agaacattagtcaaa

SEQ ID NO: 129615 - DNA, 15 bp, Homo sapiens
aagaacattagtcaa

SEQ ID NO: 129616 - DNA, 15 bp, Homo sapiens
aaagaacattagtca

SEQ ID NO: 129617 - DNA, 15 bp, Homo sapiens
gaaagaacattagtc

SEQ ID NO: 129618 - DNA, 15 bp, Homo sapiens
agaaagaacattagt

SEQ ID NO: 129619 - DNA, 15 bp, Homo sapiens
aagaaagaacattag

SEQ ID NO: 129620 - DNA, 15 bp, Homo sapiens
taagaaagaacatta

SEQ ID NO: 129621 - DNA, 15 bp, Homo sapiens
ctaagaaagaacatt

SEQ ID NO: 129622 - DNA, 15 bp, Homo sapiens
tctaagaaagaacat

SEQ ID NO: 129623 - DNA, 15 bp, Homo sapiens
atctaagaaagaaca

SEQ ID NO: 129624 - DNA, 15 bp, Homo sapiens
gatctaagaaagaac

SEQ ID NO: 129625 - DNA, 15 bp, Homo sapiens
ggatctaagaaagaa

SEQ ID NO: 129626 - DNA, 15 bp, Homo sapiens
aggatctaagaaaga

SEQ ID NO: 129627 - DNA, 15 bp, Homo sapiens
aaggatctaagaaag

SEQ ID NO: 129628 - DNA, 15 bp, Homo sapiens
aaaggatctaagaaa

SEQ ID NO: 129629 - DNA, 15 bp, Homo sapiens
caaaggatctaagaa

SEQ ID NO: 129630 - DNA, 15 bp, Homo sapiens
tcaaaggatctaaga

SEQ ID NO: 129631 - DNA, 15 bp, Homo sapiens
atcaaaggatctaag

SEQ ID NO: 129632 - DNA, 15 bp, Homo sapiens
aatcaaaggatctaa

SEQ ID NO: 129633 - DNA, 15 bp, Homo sapiens
aaatcaaaggatcta

SEQ ID NO: 129634 - DNA, 15 bp, Homo sapiens
taaatcaaaggatct

SEQ ID NO: 129635 - DNA, 15 bp, Homo sapiens
ataaatcaaaggatc

SEQ ID NO: 129636 - DNA, 15 bp, Homo sapiens
aataaatcaaaggat

SEQ ID NO: 129637 - DNA, 15 bp, Homo sapiens
gaataaatcaaagga

SEQ ID NO: 129638 - DNA, 15 bp, Homo sapiens
agaataaatcaaagg

SEQ ID NO: 129639 - DNA, 15 bp, Homo sapiens
gagaataaatcaaag

SEQ ID NO: 129640 - DNA, 15 bp, Homo sapiens
tgagaataaatcaaa

SEQ ID NO: 129641 - DNA, 15 bp, Homo sapiens
ttgagaataaatcaa

SEQ ID NO: 129642 - DNA, 15 bp, Homo sapiens
cttgagaataaatca

SEQ ID NO: 129643 - DNA, 15 bp, Homo sapiens
tcttgagaataaatc

SEQ ID NO: 129644 - DNA, 15 bp, Homo sapiens
ttcttgagaataaat

SEQ ID NO: 129645 - DNA, 15 bp, Homo sapiens
attcttgagaataaa

SEQ ID NO: 129646 - DNA, 15 bp, Homo sapiens
tattcttgagaataa

SEQ ID NO: 129647 - DNA, 15 bp, Homo sapiens
atattcttgagaata

SEQ ID NO: 129648 - DNA, 15 bp, Homo sapiens
gatattcttgagaat

SEQ ID NO: 129649 - DNA, 15 bp, Homo sapiens
agatattcttgagaa

SEQ ID NO: 129650 - DNA, 15 bp, Homo sapiens
aagatattcttgaga

SEQ ID NO: 129651 - DNA, 15 bp, Homo sapiens
gaagatattcttgag

SEQ ID NO: 129652 - DNA, 15 bp, Homo sapiens
agaagatattcttga

SEQ ID NO: 129653 - DNA, 15 bp, Homo sapiens
aagaagatattcttg

SEQ ID NO: 129654 - DNA, 15 bp, Homo sapiens
aaagaagatattctt

SEQ ID NO: 129655 - DNA, 15 bp, Homo sapiens
caaagaagatattct

SEQ ID NO: 129656 - DNA, 15 bp, Homo sapiens
ccaaagaagatattc

SEQ ID NO: 129657 - DNA, 15 bp, Homo sapiens
accaaagaagatatt

SEQ ID NO: 129658 - DNA, 15 bp, Homo sapiens
aaccaaagaagatat

SEQ ID NO: 129659 - DNA, 15 bp, Homo sapiens
taaccaaagaagata

SEQ ID NO: 129660 - DNA, 15 bp, Homo sapiens
ataaccaaagaagat

SEQ ID NO: 129661 - DNA, 15 bp, Homo sapiens
gataaccaaagaaga

SEQ ID NO: 129662 - DNA, 15 bp, Homo sapiens
tgataaccaaagaag

SEQ ID NO: 129663 - DNA, 15 bp, Homo sapiens
ctgataaccaaagaa

SEQ ID NO: 129664 - DNA, 15 bp, Homo sapiens
gctgataaccaaaga

SEQ ID NO: 129665 - DNA, 15 bp, Homo sapiens
tgctgataaccaaag

SEQ ID NO: 129666 - DNA, 15 bp, Homo sapiens
ctgctgataaccaaa

SEQ ID NO: 129667 - DNA, 15 bp, Homo sapiens
gctgctgataaccaa

SEQ ID NO: 129668 - DNA, 15 bp, Homo sapiens
agctgctgataacca

SEQ ID NO: 129669 - DNA, 15 bp, Homo sapiens
cagctgctgataacc

SEQ ID NO: 129670 - DNA, 15 bp, Homo sapiens
gcagctgctgataac

SEQ ID NO: 129671 - DNA, 15 bp, Homo sapiens
ggcagctgctgataa

SEQ ID NO: 129672 - DNA, 15 bp, Homo sapiens
gggcagctgctgata

SEQ ID NO: 129673 - DNA, 15 bp, Homo sapiens
agggcagctgctgat

SEQ ID NO: 129674 - DNA, 15 bp, Homo sapiens
cagggcagctgctga

SEQ ID NO: 129675 - DNA, 15 bp, Homo sapiens
acagggcagctgctg

SEQ ID NO: 129676 - DNA, 15 bp, Homo sapiens
aacagggcagctgct

SEQ ID NO: 129677 - DNA, 15 bp, Homo sapiens
caacagggcagctgc

SEQ ID NO: 129678 - DNA, 15 bp, Homo sapiens
gcaacagggcagctg

SEQ ID NO: 129679 - DNA, 15 bp, Homo sapiens
ggcaacagggcagct

SEQ ID NO: 129680 - DNA, 15 bp, Homo sapiens
tggcaacagggcagc

SEQ ID NO: 129681 - DNA, 15 bp, Homo sapiens
atggcaacagggcag

SEQ ID NO: 129682 - DNA, 15 bp, Homo sapiens
aatggcaacagggca

SEQ ID NO: 129683 - DNA, 15 bp, Homo sapiens
gaatggcaacagggc

SEQ ID NO: 129684 - DNA, 15 bp, Homo sapiens
agaatggcaacaggg

SEQ ID NO: 129685 - DNA, 15 bp, Homo sapiens
aagaatggcaacagg

SEQ ID NO: 129686 - DNA, 15 bp, Homo sapiens
aaagaatggcaacag

SEQ ID NO: 129687 - DNA, 15 bp, Homo sapiens
gaaagaatggcaaca

SEQ ID NO: 129688 - DNA, 15 bp, Homo sapiens
ggaaagaatggcaac

SEQ ID NO: 129689 - DNA, 15 bp, Homo sapiens
tggaaagaatggcaa

SEQ ID NO: 129690 - DNA, 15 bp, Homo sapiens
atggaaagaatggca

SEQ ID NO: 129691 - DNA, 15 bp, Homo sapiens
gatggaaagaatggc

SEQ ID NO: 129692 - DNA, 15 bp, Homo sapiens
tgatggaaagaatgg

SEQ ID NO: 129693 - DNA, 15 bp, Homo sapiens
gtgatggaaagaatg

SEQ ID NO: 129694 - DNA, 15 bp, Homo sapiens
ggtgatggaaagaat

SEQ ID NO: 129695 - DNA, 15 bp, Homo sapiens
tggtgatggaaagaa

SEQ ID NO: 129696 - DNA, 15 bp, Homo sapiens
ctggtgatggaaaga

SEQ ID NO: 129697 - DNA, 15 bp, Homo sapiens
tctggtgatggaaag

SEQ ID NO: 129698 - DNA, 15 bp, Homo sapiens
ttctggtgatggaaa

SEQ ID NO: 129699 - DNA, 15 bp, Homo sapiens
gttctggtgatggaa

SEQ ID NO: 129700 - DNA, 15 bp, Homo sapiens
agttctggtgatgga

SEQ ID NO: 129701 - DNA, 15 bp, Homo sapiens
aagttctggtgatgg

SEQ ID NO: 129702 - DNA, 15 bp, Homo sapiens
gaagttctggtgatg

SEQ ID NO: 129703 - DNA, 15 bp, Homo sapiens
ggaagttctggtgat

SEQ ID NO: 129704 - DNA, 15 bp, Homo sapiens
gggaagttctggtga

SEQ ID NO: 129705 - DNA, 15 bp, Homo sapiens
agggaagttctggtg

SEQ ID NO: 129706 - DNA, 15 bp, Homo sapiens
gagggaagttctggt

SEQ ID NO: 129707 - DNA, 15 bp, Homo sapiens
cgagggaagttctgg

SEQ ID NO: 129708 - DNA, 15 bp, Homo sapiens
acgagggaagttctg

SEQ ID NO: 129709 - DNA, 15 bp, Homo sapiens
aacgagggaagttct

SEQ ID NO: 129710 - DNA, 15 bp, Homo sapiens
aaacgagggaagttc

SEQ ID NO: 129711 - DNA, 15 bp, Homo sapiens
caaacgagggaagtt

SEQ ID NO: 129712 - DNA, 15 bp, Homo sapiens
ccaaacgagggaagt

SEQ ID NO: 129713 - DNA, 15 bp, Homo sapiens
cccaaacgagggaag

SEQ ID NO: 129714 - DNA, 15 bp, Homo sapiens
gcccaaacgagggaa

SEQ ID NO: 129715 - DNA, 15 bp, Homo sapiens
ggcccaaacgaggga

SEQ ID NO: 129716 - DNA, 15 bp, Homo sapiens
aggcccaaacgaggg

SEQ ID NO: 129717 - DNA, 15 bp, Homo sapiens
caggcccaaacgagg

SEQ ID NO: 129718 - DNA, 15 bp, Homo sapiens
ccaggcccaaacgag

SEQ ID NO: 129719 - DNA, 15 bp, Homo sapiens
gccaggcccaaacga

SEQ ID NO: 129720 - DNA, 15 bp, Homo sapiens
tgccaggcccaaacg

SEQ ID NO: 129721 - DNA, 15 bp, Homo sapiens
atgccaggcccaaac

SEQ ID NO: 129722 - DNA, 15 bp, Homo sapiens
gatgccaggcccaaa

SEQ ID NO: 129723 - DNA, 15 bp, Homo sapiens
agatgccaggcccaa

SEQ ID NO: 129724 - DNA, 15 bp, Homo sapiens
gagatgccaggccca

SEQ ID NO: 129725 - DNA, 15 bp, Homo sapiens
agagatgccaggccc

SEQ ID NO: 129726 - DNA, 15 bp, Homo sapiens
gagagatgccaggcc

SEQ ID NO: 129727 - DNA, 15 bp, Homo sapiens
tgagagatgccaggc

SEQ ID NO: 129728 - DNA, 15 bp, Homo sapiens
gtgagagatgccagg

SEQ ID NO: 129729 - DNA, 15 bp, Homo sapiens
ggtgagagatgccag

SEQ ID NO: 129730 - DNA, 15 bp, Homo sapiens
tggtgagagatgcca

SEQ ID NO: 129731 - DNA, 15 bp, Homo sapiens
ttggtgagagatgcc

SEQ ID NO: 129732 - DNA, 15 bp, Homo sapiens
tttggtgagagatgc

SEQ ID NO: 129733 - DNA, 15 bp, Homo sapiens
ttttggtgagagatg

SEQ ID NO: 129734 - DNA, 15 bp, Homo sapiens
cttttggtgagagat

SEQ ID NO: 129735 - DNA, 15 bp, Homo sapiens
ccttttggtgagaga

SEQ ID NO: 129736 - DNA, 15 bp, Homo sapiens
accttttggtgagag

SEQ ID NO: 129737 - DNA, 15 bp, Homo sapiens
caccttttggtgaga

SEQ ID NO: 129738 - DNA, 15 bp, Homo sapiens
tcaccttttggtgag

SEQ ID NO: 129739 - DNA, 15 bp, Homo sapiens
gtcaccttttggtga

SEQ ID NO: 129740 - DNA, 15 bp, Homo sapiens
agtcaccttttggtg

SEQ ID NO: 129741 - DNA, 15 bp, Homo sapiens
cagtcaccttttggt

SEQ ID NO: 129742 - DNA, 15 bp, Homo sapiens
gcagtcaccttttgg

SEQ ID NO: 129743 - DNA, 15 bp, Homo sapiens
agcagtcaccttttg

SEQ ID NO: 129744 - DNA, 15 bp, Homo sapiens
aagcagtcacctttt

SEQ ID NO: 129745 - DNA, 15 bp, Homo sapiens
aaagcagtcaccttt

SEQ ID NO: 129746 - DNA, 15 bp, Homo sapiens
caaagcagtcacctt

SEQ ID NO: 129747 - DNA, 15 bp, Homo sapiens
gcaaagcagtcacct

SEQ ID NO: 129748 - DNA, 15 bp, Homo sapiens
ggcaaagcagtcacc

SEQ ID NO: 129749 - DNA, 15 bp, Homo sapiens
gggcaaagcagtcac

SEQ ID NO: 129750 - DNA, 15 bp, Homo sapiens
ggggcaaagcagtca

SEQ ID NO: 129751 - DNA, 15 bp, Homo sapiens
tggggcaaagcagtc

SEQ ID NO: 129752 - DNA, 15 bp, Homo sapiens
ctggggcaaagcagt

SEQ ID NO: 129753 - DNA, 15 bp, Homo sapiens
actggggcaaagcag

SEQ ID NO: 129754 - DNA, 15 bp, Homo sapiens
cactggggcaaagca

SEQ ID NO: 129755 - DNA, 15 bp, Homo sapiens
ccactggggcaaagc

SEQ ID NO: 129756 - DNA, 15 bp, Homo sapiens
cccactggggcaaag

SEQ ID NO: 129757 - DNA, 15 bp, Homo sapiens
tcccactggggcaaa

SEQ ID NO: 129758 - DNA, 15 bp, Homo sapiens
atcccactggggcaa

SEQ ID NO: 129759 - DNA, 15 bp, Homo sapiens
tatcccactggggca

SEQ ID NO: 129760 - DNA, 15 bp, Homo sapiens
ttatcccactggggc

SEQ ID NO: 129761 - DNA, 15 bp, Homo sapiens
gttatcccactgggg

SEQ ID NO: 129762 - DNA, 15 bp, Homo sapiens
ggttatcccactggg

SEQ ID NO: 129763 - DNA, 15 bp, Homo sapiens
aggttatcccactgg

SEQ ID NO: 129764 - DNA, 15 bp, Homo sapiens
caggttatcccactg

SEQ ID NO: 129765 - DNA, 15 bp, Homo sapiens
ccaggttatcccact

SEQ ID NO: 129766 - DNA, 15 bp, Homo sapiens
tccaggttatcccac

SEQ ID NO: 129767 - DNA, 15 bp, Homo sapiens
gtccaggttatccca

SEQ ID NO: 129768 - DNA, 15 bp, Homo sapiens
agtccaggttatccc

SEQ ID NO: 129769 - DNA, 15 bp, Homo sapiens
tagtccaggttatcc

SEQ ID NO: 129770 - DNA, 15 bp, Homo sapiens
gtagtccaggttatc

SEQ ID NO: 129771 - DNA, 15 bp, Homo sapiens
agtagtccaggttat

SEQ ID NO: 129772 - DNA, 15 bp, Homo sapiens
gagtagtccaggtta

SEQ ID NO: 129773 - DNA, 15 bp, Homo sapiens
agagtagtccaggtt

SEQ ID NO: 129774 - DNA, 15 bp, Homo sapiens
aagagtagtccaggt

SEQ ID NO: 129775 - DNA, 15 bp, Homo sapiens
gaagagtagtccagg

SEQ ID NO: 129776 - DNA, 15 bp, Homo sapiens
agaagagtagtccag

SEQ ID NO: 129777 - DNA, 15 bp, Homo sapiens
cagaagagtagtcca

SEQ ID NO: 129778 - DNA, 15 bp, Homo sapiens
acagaagagtagtcc

SEQ ID NO: 129779 - DNA, 15 bp, Homo sapiens
aacagaagagtagtc

SEQ ID NO: 129780 - DNA, 15 bp, Homo sapiens
aaacagaagagtagt

SEQ ID NO: 129781 - DNA, 15 bp, Homo sapiens
aaaacagaagagtag

SEQ ID NO: 129782 - DNA, 15 bp, Homo sapiens
caaaacagaagagta

SEQ ID NO: 129783 - DNA, 15 bp, Homo sapiens
gcaaaacagaagagt

SEQ ID NO: 129784 - DNA, 15 bp, Homo sapiens
tgcaaaacagaagag

SEQ ID NO: 129785 - DNA, 15 bp, Homo sapiens
ttgcaaaacagaaga

SEQ ID NO: 129786 - DNA, 15 bp, Homo sapiens
cttgcaaaacagaag

SEQ ID NO: 129787 - DNA, 15 bp, Homo sapiens
tcttgcaaaacagaa

SEQ ID NO: 129788 - DNA, 15 bp, Homo sapiens
atcttgcaaaacaga

SEQ ID NO: 129789 - DNA, 15 bp, Homo sapiens
tatcttgcaaaacag

SEQ ID NO: 129790 - DNA, 15 bp, Homo sapiens
atatcttgcaaaaca

SEQ ID NO: 129791 - DNA, 15 bp, Homo sapiens
aatatcttgcaaaac

SEQ ID NO: 129792 - DNA, 15 bp, Homo sapiens
gaatatcttgcaaaa

SEQ ID NO: 129793 - DNA, 15 bp, Homo sapiens
ggaatatcttgcaaa

SEQ ID NO: 129794 - DNA, 15 bp, Homo sapiens
aggaatatcttgcaa

SEQ ID NO: 129795 - DNA, 15 bp, Homo sapiens
taggaatatcttgca

SEQ ID NO: 129796 - DNA, 15 bp, Homo sapiens
ataggaatatcttgc

SEQ ID NO: 129797 - DNA, 15 bp, Homo sapiens
aataggaatatcttg

SEQ ID NO: 129798 - DNA, 15 bp, Homo sapiens
gaataggaatatctt

SEQ ID NO: 129799 - DNA, 15 bp, Homo sapiens
ggaataggaatatct

SEQ ID NO: 129800 - DNA, 15 bp, Homo sapiens
tggaataggaatatc

SEQ ID NO: 129801 - DNA, 15 bp, Homo sapiens
atggaataggaatat

SEQ ID NO: 129802 - DNA, 15 bp, Homo sapiens
catggaataggaata

SEQ ID NO: 129803 - DNA, 15 bp, Homo sapiens
tcatggaataggaat

SEQ ID NO: 129804 - DNA, 15 bp, Homo sapiens
ctcatggaataggaa

SEQ ID NO: 129805 - DNA, 15 bp, Homo sapiens
gctcatggaatagga

SEQ ID NO: 129806 - DNA, 15 bp, Homo sapiens
agctcatggaatagg

SEQ ID NO: 129807 - DNA, 15 bp, Homo sapiens
tagctcatggaatag

SEQ ID NO: 129808 - DNA, 15 bp, Homo sapiens
atagctcatggaata

SEQ ID NO: 129809 - DNA, 15 bp, Homo sapiens
aatagctcatggaat

SEQ ID NO: 129810 - DNA, 15 bp, Homo sapiens
taatagctcatggaa

SEQ ID NO: 129811 - DNA, 15 bp, Homo sapiens
gtaatagctcatgga

SEQ ID NO: 129812 - DNA, 15 bp, Homo sapiens
agtaatagctcatgg

SEQ ID NO: 129813 - DNA, 15 bp, Homo sapiens
tagtaatagctcatg

SEQ ID NO: 129814 - DNA, 15 bp, Homo sapiens
atagtaatagctcat

SEQ ID NO: 129815 - DNA, 15 bp, Homo sapiens
tatagtaatagctca

SEQ ID NO: 129816 - DNA, 15 bp, Homo sapiens
gtatagtaatagctc

SEQ ID NO: 129817 - DNA, 15 bp, Homo sapiens
ggtatagtaatagct

SEQ ID NO: 129818 - DNA, 15 bp, Homo sapiens
aggtatagtaatagc

SEQ ID NO: 129819 - DNA, 15 bp, Homo sapiens
aaggtatagtaatag

SEQ ID NO: 129820 - DNA, 15 bp, Homo sapiens
aaaggtatagtaata

SEQ ID NO: 129821 - DNA, 15 bp, Homo sapiens
caaaggtatagtaat

SEQ ID NO: 129822 - DNA, 15 bp, Homo sapiens
ccaaaggtatagtaa

SEQ ID NO: 129823 - DNA, 15 bp, Homo sapiens
tccaaaggtatagta

SEQ ID NO: 129824 - DNA, 15 bp, Homo sapiens
ctccaaaggtatagt

SEQ ID NO: 129825 - DNA, 15 bp, Homo sapiens
cctccaaaggtatag

SEQ ID NO: 129826 - DNA, 15 bp, Homo sapiens
tcctccaaaggtata

SEQ ID NO: 129827 - DNA, 15 bp, Homo sapiens
ttcctccaaaggtat

SEQ ID NO: 129828 - DNA, 15 bp, Homo sapiens
cttcctccaaaggta

SEQ ID NO: 129829 - DNA, 15 bp, Homo sapiens
acttcctccaaaggt

SEQ ID NO: 129830 - DNA, 15 bp, Homo sapiens
gacttcctccaaagg

SEQ ID NO: 129831 - DNA, 15 bp, Homo sapiens
tgacttcctccaaag

SEQ ID NO: 129832 - DNA, 15 bp, Homo sapiens
gtgacttcctccaaa

SEQ ID NO: 129833 - DNA, 15 bp, Homo sapiens
agtgacttcctccaa

SEQ ID NO: 129834 - DNA, 15 bp, Homo sapiens
gagtgacttcctcca

SEQ ID NO: 129835 - DNA, 15 bp, Homo sapiens
tgagtgacttcctcc

SEQ ID NO: 129836 - DNA, 15 bp, Homo sapiens
gtgagtgacttcctc

SEQ ID NO: 129837 - DNA, 15 bp, Homo sapiens
agtgagtgacttcct

SEQ ID NO: 129838 - DNA, 15 bp, Homo sapiens
gagtgagtgacttcc

SEQ ID NO: 129839 - DNA, 15 bp, Homo sapiens
tgagtgagtgacttc

SEQ ID NO: 129840 - DNA, 15 bp, Homo sapiens
ctgagtgagtgactt

SEQ ID NO: 129841 - DNA, 15 bp, Homo sapiens
gctgagtgagtgact

SEQ ID NO: 129842 - DNA, 15 bp, Homo sapiens
agctgagtgagtgac

SEQ ID NO: 129843 - DNA, 15 bp, Homo sapiens
cagctgagtgagtga

SEQ ID NO: 129844 - DNA, 15 bp, Homo sapiens
gcagctgagtgagtg

SEQ ID NO: 129845 - DNA, 15 bp, Homo sapiens
tgcagctgagtgagt

SEQ ID NO: 129846 - DNA, 15 bp, Homo sapiens
ctgcagctgagtgag

SEQ ID NO: 129847 - DNA, 15 bp, Homo sapiens
actgcagctgagtga

SEQ ID NO: 129848 - DNA, 15 bp, Homo sapiens
gactgcagctgagtg

SEQ ID NO: 129849 - DNA, 15 bp, Homo sapiens
agactgcagctgagt

SEQ ID NO: 129850 - DNA, 15 bp, Homo sapiens
gagactgcagctgag

SEQ ID NO: 129851 - DNA, 15 bp, Homo sapiens
agagactgcagctga

SEQ ID NO: 129852 - DNA, 15 bp, Homo sapiens
gagagactgcagctg

SEQ ID NO: 129853 - DNA, 15 bp, Homo sapiens
ggagagactgcagct

SEQ ID NO: 129854 - DNA, 15 bp, Homo sapiens
aggagagactgcagc

SEQ ID NO: 129855 - DNA, 15 bp, Homo sapiens
aaggagagactgcag

SEQ ID NO: 129856 - DNA, 15 bp, Homo sapiens
aaaggagagactgca

SEQ ID NO: 129857 - DNA, 15 bp, Homo sapiens
caaaggagagactgc

SEQ ID NO: 129858 - DNA, 15 bp, Homo sapiens
gcaaaggagagactg

SEQ ID NO: 129859 - DNA, 15 bp, Homo sapiens
agcaaaggagagact

SEQ ID NO: 129860 - DNA, 15 bp, Homo sapiens
gagcaaaggagagac

SEQ ID NO: 129861 - DNA, 15 bp, Homo sapiens
tgagcaaaggagaga

SEQ ID NO: 129862 - DNA, 15 bp, Homo sapiens
ttgagcaaaggagag

SEQ ID NO: 129863 - DNA, 15 bp, Homo sapiens
tttgagcaaaggaga

SEQ ID NO: 129864 - DNA, 15 bp, Homo sapiens
atttgagcaaaggag

SEQ ID NO: 129865 - DNA, 15 bp, Homo sapiens
aatttgagcaaagga

SEQ ID NO: 129866 - DNA, 15 bp, Homo sapiens
gaatttgagcaaagg

SEQ ID NO: 129867 - DNA, 15 bp, Homo sapiens
agaatttgagcaaag

SEQ ID NO: 129868 - DNA, 15 bp, Homo sapiens
tagaatttgagcaaa

SEQ ID NO: 129869 - DNA, 15 bp, Homo sapiens
atagaatttgagcaa

SEQ ID NO: 129870 - DNA, 15 bp, Homo sapiens
catagaatttgagca

SEQ ID NO: 129871 - DNA, 15 bp, Homo sapiens
acatagaatttgagc

SEQ ID NO: 129872 - DNA, 15 bp, Homo sapiens
tacatagaatttgag

SEQ ID NO: 129873 - DNA, 15 bp, Homo sapiens
ttacatagaatttga

SEQ ID NO: 129874 - DNA, 15 bp, Homo sapiens
tttacatagaatttg

SEQ ID NO: 129875 - DNA, 15 bp, Homo sapiens
ttttacatagaattt

SEQ ID NO: 129876 - DNA, 15 bp, Homo sapiens
gttttacatagaatt

SEQ ID NO: 129877 - DNA, 15 bp, Homo sapiens
tgttttacatagaat

SEQ ID NO: 129878 - DNA, 15 bp, Homo sapiens
ctgttttacatagaa

SEQ ID NO: 129879 - DNA, 15 bp, Homo sapiens
tctgttttacataga

SEQ ID NO: 129880 - DNA, 15 bp, Homo sapiens
atctgttttacatag

SEQ ID NO: 129881 - DNA, 15 bp, Homo sapiens
aatctgttttacata

SEQ ID NO: 129882 - DNA, 15 bp, Homo sapiens
gaatctgttttacat

SEQ ID NO: 129883 - DNA, 15 bp, Homo sapiens
agaatctgttttaca

SEQ ID NO: 129884 - DNA, 15 bp, Homo sapiens
cagaatctgttttac

SEQ ID NO: 129885 - DNA, 15 bp, Homo sapiens
ccagaatctgtttta

SEQ ID NO: 129886 - DNA, 15 bp, Homo sapiens
accagaatctgtttt

SEQ ID NO: 129887 - DNA, 15 bp, Homo sapiens
caccagaatctgttt

SEQ ID NO: 129888 - DNA, 15 bp, Homo sapiens
acaccagaatctgtt

SEQ ID NO: 129889 - DNA, 15 bp, Homo sapiens
tacaccagaatctgt

SEQ ID NO: 129890 - DNA, 15 bp, Homo sapiens
ttacaccagaatctg

SEQ ID NO: 129891 - DNA, 15 bp, Homo sapiens
gttacaccagaatct

SEQ ID NO: 129892 - DNA, 15 bp, Homo sapiens
agttacaccagaatc

SEQ ID NO: 129893 - DNA, 15 bp, Homo sapiens
tagttacaccagaat

SEQ ID NO: 129894 - DNA, 15 bp, Homo sapiens
atagttacaccagaa

SEQ ID NO: 129895 - DNA, 15 bp, Homo sapiens
catagttacaccaga

SEQ ID NO: 129896 - DNA, 15 bp, Homo sapiens
acatagttacaccag

SEQ ID NO: 129897 - DNA, 15 bp, Homo sapiens
tacatagttacacca

SEQ ID NO: 129898 - DNA, 15 bp, Homo sapiens
ttacatagttacacc

SEQ ID NO: 129899 - DNA, 15 bp, Homo sapiens
tttacatagttacac

SEQ ID NO: 129900 - DNA, 15 bp, Homo sapiens
atttacatagttaca

SEQ ID NO: 129901 - DNA, 15 bp, Homo sapiens
aatttacatagttac

SEQ ID NO: 129902 - DNA, 15 bp, Homo sapiens
caatttacatagtta

SEQ ID NO: 129903 - DNA, 15 bp, Homo sapiens
gcaatttacatagtt

SEQ ID NO: 129904 - DNA, 15 bp, Homo sapiens
agcaatttacatagt

SEQ ID NO: 129905 - DNA, 15 bp, Homo sapiens
tagcaatttacatag

SEQ ID NO: 129906 - DNA, 15 bp, Homo sapiens
ttagcaatttacata

SEQ ID NO: 129907 - DNA, 15 bp, Homo sapiens
attagcaatttacat

SEQ ID NO: 129908 - DNA, 15 bp, Homo sapiens
cattagcaatttaca

SEQ ID NO: 129909 - DNA, 15 bp, Homo sapiens
tcattagcaatttac

SEQ ID NO: 129910 - DNA, 15 bp, Homo sapiens
atcattagcaattta

SEQ ID NO: 129911 - DNA, 15 bp, Homo sapiens
catcattagcaattt

SEQ ID NO: 129912 - DNA, 15 bp, Homo sapiens
ccatcattagcaatt

SEQ ID NO: 129913 - DNA, 15 bp, Homo sapiens
gccatcattagcaat

SEQ ID NO: 129914 - DNA, 15 bp, Homo sapiens
tgccatcattagcaa

SEQ ID NO: 129915 - DNA, 15 bp, Homo sapiens
ctgccatcattagca

SEQ ID NO: 129916 - DNA, 15 bp, Homo sapiens
tctgccatcattagc

SEQ ID NO: 129917 - DNA, 15 bp, Homo sapiens
ctctgccatcattag

SEQ ID NO: 129918 - DNA, 15 bp, Homo sapiens
gctctgccatcatta

SEQ ID NO: 129919 - DNA, 15 bp, Homo sapiens
tgctctgccatcatt

SEQ ID NO: 129920 - DNA, 15 bp, Homo sapiens
gtgctctgccatcat

SEQ ID NO: 129921 - DNA, 15 bp, Homo sapiens
tgtgctctgccatca

SEQ ID NO: 129922 - DNA, 15 bp, Homo sapiens
ctgtgctctgccatc

SEQ ID NO: 129923 - DNA, 15 bp, Homo sapiens
tctgtgctctgccat

SEQ ID NO: 129924 - DNA, 15 bp, Homo sapiens
atctgtgctctgcca

SEQ ID NO: 129925 - DNA, 15 bp, Homo sapiens
catctgtgctctgcc

SEQ ID NO: 129926 - DNA, 15 bp, Homo sapiens
tcatctgtgctctgc

SEQ ID NO: 129927 - DNA, 15 bp, Homo sapiens
ttcatctgtgctctg

SEQ ID NO: 129928 - DNA, 15 bp, Homo sapiens
tttcatctgtgctct

SEQ ID NO: 129929 - DNA, 15 bp, Homo sapiens
gtttcatctgtgctc

SEQ ID NO: 129930 - DNA, 15 bp, Homo sapiens
cgtttcatctgtgct

SEQ ID NO: 129931 - DNA, 15 bp, Homo sapiens
ccgtttcatctgtgc

SEQ ID NO: 129932 - DNA, 15 bp, Homo sapiens
tccgtttcatctgtg

SEQ ID NO: 129933 - DNA, 15 bp, Homo sapiens
gtccgtttcatctgt

SEQ ID NO: 129934 - DNA, 15 bp, Homo sapiens
ggtccgtttcatctg

SEQ ID NO: 129935 - DNA, 15 bp, Homo sapiens
tggtccgtttcatct

SEQ ID NO: 129936 - DNA, 15 bp, Homo sapiens
ttggtccgtttcatc

SEQ ID NO: 129937 - DNA, 15 bp, Homo sapiens
tttggtccgtttcat

SEQ ID NO: 129938 - DNA, 15 bp, Homo sapiens
atttggtccgtttca

SEQ ID NO: 129939 - DNA, 15 bp, Homo sapiens
gatttggtccgtttc

SEQ ID NO: 129940 - DNA, 15 bp, Homo sapiens
ggatttggtccgttt

SEQ ID NO: 129941 - DNA, 15 bp, Homo sapiens
aggatttggtccgtt

SEQ ID NO: 129942 - DNA, 15 bp, Homo sapiens
aaggatttggtccgt

SEQ ID NO: 129943 - DNA, 15 bp, Homo sapiens
taaggatttggtccg

SEQ ID NO: 129944 - DNA, 15 bp, Homo sapiens
gtaaggatttggtcc

SEQ ID NO: 129945 - DNA, 15 bp, Homo sapiens
ggtaaggatttggtc

SEQ ID NO: 129946 - DNA, 15 bp, Homo sapiens
aggtaaggatttggt

SEQ ID NO: 129947 - DNA, 15 bp, Homo sapiens
caggtaaggatttgg

SEQ ID NO: 129948 - DNA, 15 bp, Homo sapiens
tcaggtaaggatttg

SEQ ID NO: 129949 - DNA, 15 bp, Homo sapiens
gtcaggtaaggattt

SEQ ID NO: 129950 - DNA, 15 bp, Homo sapiens
ggtcaggtaaggatt

SEQ ID NO: 129951 - DNA, 15 bp, Homo sapiens
aggtcaggtaaggat

SEQ ID NO: 129952 - DNA, 15 bp, Homo sapiens
aaggtcaggtaagga

SEQ ID NO: 129953 - DNA, 15 bp, Homo sapiens
aaaggtcaggtaagg

SEQ ID NO: 129954 - DNA, 15 bp, Homo sapiens
gaaaggtcaggtaag

SEQ ID NO: 129955 - DNA, 15 bp, Homo sapiens
agaaaggtcaggtaa

SEQ ID NO: 129956 - DNA, 15 bp, Homo sapiens
aagaaaggtcaggta

SEQ ID NO: 129957 - DNA, 15 bp, Homo sapiens
aaagaaaggtcaggt

SEQ ID NO: 129958 - DNA, 15 bp, Homo sapiens
aaaagaaaggtcagg

SEQ ID NO: 129959 - DNA, 15 bp, Homo sapiens
gaaaagaaaggtcag

SEQ ID NO: 129960 - DNA, 15 bp, Homo sapiens
ggaaaagaaaggtca

SEQ ID NO: 129961 - DNA, 15 bp, Homo sapiens
tggaaaagaaaggtc

SEQ ID NO: 129962 - DNA, 15 bp, Homo sapiens
ctggaaaagaaaggt

SEQ ID NO: 129963 - DNA, 15 bp, Homo sapiens
tctggaaaagaaagg

SEQ ID NO: 129964 - DNA, 15 bp, Homo sapiens
ttctggaaaagaaag

SEQ ID NO: 129965 - DNA, 15 bp, Homo sapiens
cttctggaaaagaaa

SEQ ID NO: 129966 - DNA, 15 bp, Homo sapiens
gcttctggaaaagaa

SEQ ID NO: 129967 - DNA, 15 bp, Homo sapiens
agcttctggaaaaga

SEQ ID NO: 129968 - DNA, 15 bp, Homo sapiens
cagcttctggaaaag

SEQ ID NO: 129969 - DNA, 15 bp, Homo sapiens
gcagcttctggaaaa

SEQ ID NO: 129970 - DNA, 15 bp, Homo sapiens
ggcagcttctggaaa

SEQ ID NO: 129971 - DNA, 15 bp, Homo sapiens
tggcagcttctggaa

SEQ ID NO: 129972 - DNA, 15 bp, Homo sapiens
gtggcagcttctgga

SEQ ID NO: 129973 - DNA, 15 bp, Homo sapiens
tgtggcagcttctgg

SEQ ID NO: 129974 - DNA, 15 bp, Homo sapiens
ttgtggcagcttctg

SEQ ID NO: 129975 - DNA, 15 bp, Homo sapiens
gttgtggcagcttct

SEQ ID NO: 129976 - DNA, 15 bp, Homo sapiens
ggttgtggcagcttc

SEQ ID NO: 129977 - DNA, 15 bp, Homo sapiens
tggttgtggcagctt

SEQ ID NO: 129978 - DNA, 15 bp, Homo sapiens
ttggttgtggcagct

SEQ ID NO: 129979 - DNA, 15 bp, Homo sapiens
cttggttgtggcagc

SEQ ID NO: 129980 - DNA, 15 bp, Homo sapiens
tcttggttgtggcag

SEQ ID NO: 129981 - DNA, 15 bp, Homo sapiens
atcttggttgtggca

SEQ ID NO: 129982 - DNA, 15 bp, Homo sapiens
aatcttggttgtggc

SEQ ID NO: 129983 - DNA, 15 bp, Homo sapiens
aaatcttggttgtgg

SEQ ID NO: 129984 - DNA, 15 bp, Homo sapiens
aaaatcttggttgtg

SEQ ID NO: 129985 - DNA, 15 bp, Homo sapiens
taaaatcttggttgt

SEQ ID NO: 129986 - DNA, 15 bp, Homo sapiens
ctaaaatcttggttg

SEQ ID NO: 129987 - DNA, 15 bp, Homo sapiens
tctaaaatcttggtt

SEQ ID NO: 129988 - DNA, 15 bp, Homo sapiens
ttctaaaatcttggt

SEQ ID NO: 129989 - DNA, 15 bp, Homo sapiens
tttctaaaatcttgg

SEQ ID NO: 129990 - DNA, 15 bp, Homo sapiens
gtttctaaaatcttg

SEQ ID NO: 129991 - DNA, 15 bp, Homo sapiens
agtttctaaaatctt

SEQ ID NO: 129992 - DNA, 15 bp, Homo sapiens
aagtttctaaaatct

SEQ ID NO: 129993 - DNA, 15 bp, Homo sapiens
taagtttctaaaatc

SEQ ID NO: 129994 - DNA, 15 bp, Homo sapiens
ctaagtttctaaaat

SEQ ID NO: 129995 - DNA, 15 bp, Homo sapiens
gctaagtttctaaaa

SEQ ID NO: 129996 - DNA, 15 bp, Homo sapiens
agctaagtttctaaa

SEQ ID NO: 129997 - DNA, 15 bp, Homo sapiens
aagctaagtttctaa

SEQ ID NO: 129998 - DNA, 15 bp, Homo sapiens
aaagctaagtttcta

SEQ ID NO: 129999 - DNA, 15 bp, Homo sapiens
taaagctaagtttct

SEQ ID NO: 130000 - DNA, 15 bp, Homo sapiens
gtaaagctaagtttc

SEQ ID NO: 130001 - DNA, 15 bp, Homo sapiens
tgtaaagctaagttt

SEQ ID NO: 130002 - DNA, 15 bp, Homo sapiens
ctgtaaagctaagtt

SEQ ID NO: 130003 - DNA, 15 bp, Homo sapiens
cctgtaaagctaagt

SEQ ID NO: 130004 - DNA, 15 bp, Homo sapiens
tcctgtaaagctaag

SEQ ID NO: 130005 - DNA, 15 bp, Homo sapiens
ctcctgtaaagctaa

SEQ ID NO: 130006 - DNA, 15 bp, Homo sapiens
gctcctgtaaagcta

SEQ ID NO: 130007 - DNA, 15 bp, Homo sapiens
agctcctgtaaagct

SEQ ID NO: 130008 - DNA, 15 bp, Homo sapiens
aagctcctgtaaagc

SEQ ID NO: 130009 - DNA, 15 bp, Homo sapiens
gaagctcctgtaaag

SEQ ID NO: 130010 - DNA, 15 bp, Homo sapiens
agaagctcctgtaaa

SEQ ID NO: 130011 - DNA, 15 bp, Homo sapiens
gagaagctcctgtaa

SEQ ID NO: 130012 - DNA, 15 bp, Homo sapiens
ggagaagctcctgta

SEQ ID NO: 130013 - DNA, 15 bp, Homo sapiens
tggagaagctcctgt

SEQ ID NO: 130014 - DNA, 15 bp, Homo sapiens
ttggagaagctcctg

SEQ ID NO: 130015 - DNA, 15 bp, Homo sapiens
attggagaagctcct

SEQ ID NO: 130016 - DNA, 15 bp, Homo sapiens
cattggagaagctcc

SEQ ID NO: 130017 - DNA, 15 bp, Homo sapiens
tcattggagaagctc

SEQ ID NO: 130018 - DNA, 15 bp, Homo sapiens
gtcattggagaagct

SEQ ID NO: 130019 - DNA, 15 bp, Homo sapiens
agtcattggagaagc

SEQ ID NO: 130020 - DNA, 15 bp, Homo sapiens
cagtcattggagaag

SEQ ID NO: 130021 - DNA, 15 bp, Homo sapiens
acagtcattggagaa

SEQ ID NO: 130022 - DNA, 15 bp, Homo sapiens
aacagtcattggaga

SEQ ID NO: 130023 - DNA, 15 bp, Homo sapiens
gaacagtcattggag

SEQ ID NO: 130024 - DNA, 15 bp, Homo sapiens
tgaacagtcattgga

SEQ ID NO: 130025 - DNA, 15 bp, Homo sapiens
atgaacagtcattgg

SEQ ID NO: 130026 - DNA, 15 bp, Homo sapiens
catgaacagtcattg

SEQ ID NO: 130027 - DNA, 15 bp, Homo sapiens
acatgaacagtcatt

SEQ ID NO: 130028 - DNA, 15 bp, Homo sapiens
tacatgaacagtcat

SEQ ID NO: 130029 - DNA, 15 bp, Homo sapiens
ctacatgaacagtca

SEQ ID NO: 130030 - DNA, 15 bp, Homo sapiens
tctacatgaacagtc

SEQ ID NO: 130031 - DNA, 15 bp, Homo sapiens
gtctacatgaacagt

SEQ ID NO: 130032 - DNA, 15 bp, Homo sapiens
tgtctacatgaacag

SEQ ID NO: 130033 - DNA, 15 bp, Homo sapiens
ctgtctacatgaaca

SEQ ID NO: 130034 - DNA, 15 bp, Homo sapiens
actgtctacatgaac

SEQ ID NO: 130035 - DNA, 15 bp, Homo sapiens
gactgtctacatgaa

SEQ ID NO: 130036 - DNA, 15 bp, Homo sapiens
agactgtctacatga

SEQ ID NO: 130037 - DNA, 15 bp, Homo sapiens
gagactgtctacatg

SEQ ID NO: 130038 - DNA, 15 bp, Homo sapiens
agagactgtctacat

SEQ ID NO: 130039 - DNA, 15 bp, Homo sapiens
tagagactgtctaca

SEQ ID NO: 130040 - DNA, 15 bp, Homo sapiens
atagagactgtctac

SEQ ID NO: 130041 - DNA, 15 bp, Homo sapiens
catagagactgtcta

SEQ ID NO: 130042 - DNA, 15 bp, Homo sapiens
tcatagagactgtct

SEQ ID NO: 130043 - DNA, 15 bp, Homo sapiens
atcatagagactgtc

SEQ ID NO: 130044 - DNA, 15 bp, Homo sapiens
tatcatagagactgt

SEQ ID NO: 130045 - DNA, 15 bp, Homo sapiens
ttatcatagagactg

SEQ ID NO: 130046 - DNA, 15 bp, Homo sapiens
gttatcatagagact

SEQ ID NO: 130047 - DNA, 15 bp, Homo sapiens
ggttatcatagagac

SEQ ID NO: 130048 - DNA, 15 bp, Homo sapiens
aggttatcatagaga

SEQ ID NO: 130049 - DNA, 15 bp, Homo sapiens
gaggttatcatagag

SEQ ID NO: 130050 - DNA, 15 bp, Homo sapiens
agaggttatcataga

SEQ ID NO: 130051 - DNA, 15 bp, Homo sapiens
cagaggttatcatag

SEQ ID NO: 130052 - DNA, 15 bp, Homo sapiens
gcagaggttatcata

SEQ ID NO: 130053 - DNA, 15 bp, Homo sapiens
agcagaggttatcat

SEQ ID NO: 130054 - DNA, 15 bp, Homo sapiens
aagcagaggttatca

SEQ ID NO: 130055 - DNA, 15 bp, Homo sapiens
gaagcagaggttatc

SEQ ID NO: 130056 - DNA, 15 bp, Homo sapiens
tgaagcagaggttat

SEQ ID NO: 130057 - DNA, 15 bp, Homo sapiens
gtgaagcagaggtta

SEQ ID NO: 130058 - DNA, 15 bp, Homo sapiens
agtgaagcagaggtt

SEQ ID NO: 130059 - DNA, 15 bp, Homo sapiens
cagtgaagcagaggt

SEQ ID NO: 130060 - DNA, 15 bp, Homo sapiens
tcagtgaagcagagg

SEQ ID NO: 130061 - DNA, 15 bp, Homo sapiens
ctcagtgaagcagag

SEQ ID NO: 130062 - DNA, 15 bp, Homo sapiens
tctcagtgaagcaga

SEQ ID NO: 130063 - DNA, 15 bp, Homo sapiens
gtctcagtgaagcag

SEQ ID NO: 130064 - DNA, 15 bp, Homo sapiens
cgtctcagtgaagca

SEQ ID NO: 130065 - DNA, 15 bp, Homo sapiens
gcgtctcagtgaagc

SEQ ID NO: 130066 - DNA, 15 bp, Homo sapiens
ggcgtctcagtgaag

SEQ ID NO: 130067 - DNA, 15 bp, Homo sapiens
aggcgtctcagtgaa

SEQ ID NO: 130068 - DNA, 15 bp, Homo sapiens
taggcgtctcagtga

SEQ ID NO: 130069 - DNA, 15 bp, Homo sapiens
gtaggcgtctcagtg

SEQ ID NO: 130070 - DNA, 15 bp, Homo sapiens
agtaggcgtctcagt

SEQ ID NO: 130071 - DNA, 15 bp, Homo sapiens
tagtaggcgtctcag

SEQ ID NO: 130072 - DNA, 15 bp, Homo sapiens
gtagtaggcgtctca

SEQ ID NO: 130073 - DNA, 15 bp, Homo sapiens
agtagtaggcgtctc

SEQ ID NO: 130074 - DNA, 15 bp, Homo sapiens
tagtagtaggcgtct

SEQ ID NO: 130075 - DNA, 15 bp, Homo sapiens
gtagtagtaggcgtc

SEQ ID NO: 130076 - DNA, 15 bp, Homo sapiens
agtagtagtaggcgt

SEQ ID NO: 130077 - DNA, 15 bp, Homo sapiens
tagtagtagtaggcg

SEQ ID NO: 130078 - DNA, 15 bp, Homo sapiens
atagtagtagtaggc

SEQ ID NO: 130079 - DNA, 15 bp, Homo sapiens
tatagtagtagtagg

SEQ ID NO: 130080 - DNA, 15 bp, Homo sapiens
ctatagtagtagtag

SEQ ID NO: 130081 - DNA, 15 bp, Homo sapiens
actatagtagtagta

SEQ ID NO: 130082 - DNA, 15 bp, Homo sapiens
aactatagtagtagt

SEQ ID NO: 130083 - DNA, 15 bp, Homo sapiens
taactatagtagtag

SEQ ID NO: 130084 - DNA, 15 bp, Homo sapiens
ataactatagtagta

SEQ ID NO: 130085 - DNA, 15 bp, Homo sapiens
cataactatagtagt

SEQ ID NO: 130086 - DNA, 15 bp, Homo sapiens
tcataactatagtag

SEQ ID NO: 130087 - DNA, 15 bp, Homo sapiens
ttcataactatagta

SEQ ID NO: 130088 - DNA, 15 bp, Homo sapiens
attcataactatagt

SEQ ID NO: 130089 - DNA, 15 bp, Homo sapiens
gattcataactatag

SEQ ID NO: 130090 - DNA, 15 bp, Homo sapiens
agattcataactata

SEQ ID NO: 130091 - DNA, 15 bp, Homo sapiens
cagattcataactat

SEQ ID NO: 130092 - DNA, 15 bp, Homo sapiens
tcagattcataacta

SEQ ID NO: 130093 - DNA, 15 bp, Homo sapiens
atcagattcataact

SEQ ID NO: 130094 - DNA, 15 bp, Homo sapiens
aatcagattcataac

SEQ ID NO: 130095 - DNA, 15 bp, Homo sapiens
gaatcagattcataa

SEQ ID NO: 130096 - DNA, 15 bp, Homo sapiens
ggaatcagattcata

SEQ ID NO: 130097 - DNA, 15 bp, Homo sapiens
gggaatcagattcat

SEQ ID NO: 130098 - DNA, 15 bp, Homo sapiens
ggggaatcagattca

SEQ ID NO: 130099 - DNA, 15 bp, Homo sapiens
cggggaatcagattc

SEQ ID NO: 130100 - DNA, 15 bp, Homo sapiens
acggggaatcagatt

SEQ ID NO: 130101 - DNA, 15 bp, Homo sapiens
tacggggaatcagat

SEQ ID NO: 130102 - DNA, 15 bp, Homo sapiens
ctacggggaatcaga

SEQ ID NO: 130103 - DNA, 15 bp, Homo sapiens
gctacggggaatcag

SEQ ID NO: 130104 - DNA, 15 bp, Homo sapiens
ggctacggggaatca

SEQ ID NO: 130105 - DNA, 15 bp, Homo sapiens
tggctacggggaatc

SEQ ID NO: 130106 - DNA, 15 bp, Homo sapiens
ctggctacggggaat

SEQ ID NO: 130107 - DNA, 15 bp, Homo sapiens
actggctacggggaa

SEQ ID NO: 130108 - DNA, 15 bp, Homo sapiens
tactggctacgggga

SEQ ID NO: 130109 - DNA, 15 bp, Homo sapiens
ttactggctacgggg

SEQ ID NO: 130110 - DNA, 15 bp, Homo sapiens
tttactggctacggg

SEQ ID NO: 130111 - DNA, 15 bp, Homo sapiens
atttactggctacgg

SEQ ID NO: 130112 - DNA, 15 bp, Homo sapiens
catttactggctacg

SEQ ID NO: 130113 - DNA, 15 bp, Homo sapiens
tcatttactggctac

SEQ ID NO: 130114 - DNA, 15 bp, Homo sapiens
ctcatttactggcta

SEQ ID NO: 130115 - DNA, 15 bp, Homo sapiens
tctcatttactggct

SEQ ID NO: 130116 - DNA, 15 bp, Homo sapiens
atctcatttactggc

SEQ ID NO: 130117 - DNA, 15 bp, Homo sapiens
catctcatttactgg

SEQ ID NO: 130118 - DNA, 15 bp, Homo sapiens
acatctcatttactg

SEQ ID NO: 130119 - DNA, 15 bp, Homo sapiens
aacatctcatttact

SEQ ID NO: 130120 - DNA, 15 bp, Homo sapiens
aaacatctcatttac

SEQ ID NO: 130121 - DNA, 15 bp, Homo sapiens
taaacatctcattta

SEQ ID NO: 130122 - DNA, 15 bp, Homo sapiens
ataaacatctcattt

SEQ ID NO: 130123 - DNA, 15 bp, Homo sapiens
cataaacatctcatt

SEQ ID NO: 130124 - DNA, 15 bp, Homo sapiens
tcataaacatctcat

SEQ ID NO: 130125 - DNA, 15 bp, Homo sapiens
ctcataaacatctca

SEQ ID NO: 130126 - DNA, 15 bp, Homo sapiens
actcataaacatctc

SEQ ID NO: 130127 - DNA, 15 bp, Homo sapiens
cactcataaacatct

SEQ ID NO: 130128 - DNA, 15 bp, Homo sapiens
ccactcataaacatc

SEQ ID NO: 130129 - DNA, 15 bp, Homo sapiens
tccactcataaacat

SEQ ID NO: 130130 - DNA, 15 bp, Homo sapiens
atccactcataaaca

SEQ ID NO: 130131 - DNA, 15 bp, Homo sapiens
aatccactcataaac

SEQ ID NO: 130132 - DNA, 15 bp, Homo sapiens
caatccactcataaa

SEQ ID NO: 130133 - DNA, 15 bp, Homo sapiens
ccaatccactcataa

SEQ ID NO: 130134 - DNA, 15 bp, Homo sapiens
tccaatccactcata

SEQ ID NO: 130135 - DNA, 15 bp, Homo sapiens
ttccaatccactcat

SEQ ID NO: 130136 - DNA, 15 bp, Homo sapiens
cttccaatccactca

SEQ ID NO: 130137 - DNA, 15 bp, Homo sapiens
ccttccaatccactc

SEQ ID NO: 130138 - DNA, 15 bp, Homo sapiens
tccttccaatccact

SEQ ID NO: 130139 - DNA, 15 bp, Homo sapiens
gtccttccaatccac

SEQ ID NO: 130140 - DNA, 15 bp, Homo sapiens
tgtccttccaatcca

SEQ ID NO: 130141 - DNA, 15 bp, Homo sapiens
ctgtccttccaatcc

SEQ ID NO: 130142 - DNA, 15 bp, Homo sapiens
actgtccttccaatc

SEQ ID NO: 130143 - DNA, 15 bp, Homo sapiens
cactgtccttccaat

SEQ ID NO: 130144 - DNA, 15 bp, Homo sapiens
ccactgtccttccaa

SEQ ID NO: 130145 - DNA, 15 bp, Homo sapiens
accactgtccttcca

SEQ ID NO: 130146 - DNA, 15 bp, Homo sapiens
aaccactgtccttcc

SEQ ID NO: 130147 - DNA, 15 bp, Homo sapiens
taaccactgtccttc

SEQ ID NO: 130148 - DNA, 15 bp, Homo sapiens
ctaaccactgtcctt

SEQ ID NO: 130149 - DNA, 15 bp, Homo sapiens
tctaaccactgtcct

SEQ ID NO: 130150 - DNA, 15 bp, Homo sapiens
ttctaaccactgtcc

SEQ ID NO: 130151 - DNA, 15 bp, Homo sapiens
tttctaaccactgtc

SEQ ID NO: 130152 - DNA, 15 bp, Homo sapiens
atttctaaccactgt

SEQ ID NO: 130153 - DNA, 15 bp, Homo sapiens
catttctaaccactg

SEQ ID NO: 130154 - DNA, 15 bp, Homo sapiens
tcatttctaaccact

SEQ ID NO: 130155 - DNA, 15 bp, Homo sapiens
ctcatttctaaccac

SEQ ID NO: 130156 - DNA, 15 bp, Homo sapiens
cctcatttctaacca

SEQ ID NO: 130157 - DNA, 15 bp, Homo sapiens
acctcatttctaacc

SEQ ID NO: 130158 - DNA, 15 bp, Homo sapiens
aacctcatttctaac

SEQ ID NO: 130159 - DNA, 15 bp, Homo sapiens
aaacctcatttctaa

SEQ ID NO: 130160 - DNA, 15 bp, Homo sapiens
gaaacctcatttcta

SEQ ID NO: 130161 - DNA, 15 bp, Homo sapiens
tgaaacctcatttct

SEQ ID NO: 130162 - DNA, 15 bp, Homo sapiens
atgaaacctcatttc

SEQ ID NO: 130163 - DNA, 15 bp, Homo sapiens
gatgaaacctcattt

SEQ ID NO: 130164 - DNA, 15 bp, Homo sapiens
agatgaaacctcatt

SEQ ID NO: 130165 - DNA, 15 bp, Homo sapiens
cagatgaaacctcat

SEQ ID NO: 130166 - DNA, 15 bp, Homo sapiens
ccagatgaaacctca

SEQ ID NO: 130167 - DNA, 15 bp, Homo sapiens
accagatgaaacctc

SEQ ID NO: 130168 - DNA, 15 bp, Homo sapiens
aaccagatgaaacct

SEQ ID NO: 130169 - DNA, 15 bp, Homo sapiens
aaaccagatgaaacc

SEQ ID NO: 130170 - DNA, 15 bp, Homo sapiens
aaaaccagatgaaac

SEQ ID NO: 130171 - DNA, 15 bp, Homo sapiens
taaaaccagatgaaa

SEQ ID NO: 130172 - DNA, 15 bp, Homo sapiens
ttaaaaccagatgaa

SEQ ID NO: 130173 - DNA, 15 bp, Homo sapiens
gttaaaaccagatga

SEQ ID NO: 130174 - DNA, 15 bp, Homo sapiens
tgttaaaaccagatg

SEQ ID NO: 130175 - DNA, 15 bp, Homo sapiens
ctgttaaaaccagat

SEQ ID NO: 130176 - DNA, 15 bp, Homo sapiens
tctgttaaaaccaga

SEQ ID NO: 130177 - DNA, 15 bp, Homo sapiens
ttctgttaaaaccag

SEQ ID NO: 130178 - DNA, 15 bp, Homo sapiens
gttctgttaaaacca

SEQ ID NO: 130179 - DNA, 15 bp, Homo sapiens
ggttctgttaaaacc

SEQ ID NO: 130180 - DNA, 15 bp, Homo sapiens
gggttctgttaaaac

SEQ ID NO: 130181 - DNA, 15 bp, Homo sapiens
tgggttctgttaaaa

SEQ ID NO: 130182 - DNA, 15 bp, Homo sapiens
ttgggttctgttaaa

SEQ ID NO: 130183 - DNA, 15 bp, Homo sapiens
gttgggttctgttaa

SEQ ID NO: 130184 - DNA, 15 bp, Homo sapiens
tgttgggttctgtta

SEQ ID NO: 130185 - DNA, 15 bp, Homo sapiens
atgttgggttctgtt

SEQ ID NO: 130186 - DNA, 15 bp, Homo sapiens
tatgttgggttctgt

SEQ ID NO: 130187 - DNA, 15 bp, Homo sapiens
gtatgttgggttctg

SEQ ID NO: 130188 - DNA, 15 bp, Homo sapiens
agtatgttgggttct

SEQ ID NO: 130189 - DNA, 15 bp, Homo sapiens
cagtatgttgggttc

SEQ ID NO: 130190 - DNA, 15 bp, Homo sapiens
ccagtatgttgggtt

SEQ ID NO: 130191 - DNA, 15 bp, Homo sapiens
tccagtatgttgggt

SEQ ID NO: 130192 - DNA, 15 bp, Homo sapiens
ttccagtatgttggg

SEQ ID NO: 130193 - DNA, 15 bp, Homo sapiens
cttccagtatgttgg

SEQ ID NO: 130194 - DNA, 15 bp, Homo sapiens
acttccagtatgttg

SEQ ID NO: 130195 - DNA, 15 bp, Homo sapiens
cacttccagtatgtt

SEQ ID NO: 130196 - DNA, 15 bp, Homo sapiens
gcacttccagtatgt

SEQ ID NO: 130197 - DNA, 15 bp, Homo sapiens
agcacttccagtatg

SEQ ID NO: 130198 - DNA, 15 bp, Homo sapiens
aagcacttccagtat

SEQ ID NO: 130199 - DNA, 15 bp, Homo sapiens
aaagcacttccagta

SEQ ID NO: 130200 - DNA, 15 bp, Homo sapiens
aaaagcacttccagt

SEQ ID NO: 130201 - DNA, 15 bp, Homo sapiens
aaaaagcacttccag

SEQ ID NO: 130202 - DNA, 15 bp, Homo sapiens
caaaaagcacttcca

SEQ ID NO: 130203 - DNA, 15 bp, Homo sapiens
acaaaaagcacttcc

SEQ ID NO: 130204 - DNA, 15 bp, Homo sapiens
tacaaaaagcacttc

SEQ ID NO: 130205 - DNA, 15 bp, Homo sapiens
ttacaaaaagcactt

SEQ ID NO: 130206 - DNA, 15 bp, Homo sapiens
cttacaaaaagcact

SEQ ID NO: 130207 - DNA, 15 bp, Homo sapiens
ccttacaaaaagcac

SEQ ID NO: 130208 - DNA, 15 bp, Homo sapiens
cccttacaaaaagca

SEQ ID NO: 130209 - DNA, 15 bp, Homo sapiens
acccttacaaaaagc

SEQ ID NO: 130210 - DNA, 15 bp, Homo sapiens
gacccttacaaaaag

SEQ ID NO: 130211 - DNA, 15 bp, Homo sapiens
agacccttacaaaaa

SEQ ID NO: 130212 - DNA, 15 bp, Homo sapiens
cagacccttacaaaa

SEQ ID NO: 130213 - DNA, 15 bp, Homo sapiens
acagacccttacaaa

SEQ ID NO: 130214 - DNA, 15 bp, Homo sapiens
gacagacccttacaa

SEQ ID NO: 130215 - DNA, 15 bp, Homo sapiens
tgacagacccttaca

SEQ ID NO: 130216 - DNA, 15 bp, Homo sapiens
atgacagacccttac

SEQ ID NO: 130217 - DNA, 15 bp, Homo sapiens
aatgacagaccctta

SEQ ID NO: 130218 - DNA, 15 bp, Homo sapiens
caatgacagaccctt

SEQ ID NO: 130219 - DNA, 15 bp, Homo sapiens
ccaatgacagaccct

SEQ ID NO: 130220 - DNA, 15 bp, Homo sapiens
tccaatgacagaccc

SEQ ID NO: 130221 - DNA, 15 bp, Homo sapiens
gtccaatgacagacc

SEQ ID NO: 130222 - DNA, 15 bp, Homo sapiens
ggtccaatgacagac

SEQ ID NO: 130223 - DNA, 15 bp, Homo sapiens
gggtccaatgacaga

SEQ ID NO: 130224 - DNA, 15 bp, Homo sapiens
ggggtccaatgacag

SEQ ID NO: 130225 - DNA, 15 bp, Homo sapiens
tggggtccaatgaca

SEQ ID NO: 130226 - DNA, 15 bp, Homo sapiens
ctggggtccaatgac

SEQ ID NO: 130227 - DNA, 15 bp, Homo sapiens
cctggggtccaatga

SEQ ID NO: 130228 - DNA, 15 bp, Homo sapiens
acctggggtccaatg

SEQ ID NO: 130229 - DNA, 15 bp, Homo sapiens
cacctggggtccaat

SEQ ID NO: 130230 - DNA, 15 bp, Homo sapiens
acacctggggtccaa

SEQ ID NO: 130231 - DNA, 15 bp, Homo sapiens
tacacctggggtcca

SEQ ID NO: 130232 - DNA, 15 bp, Homo sapiens
atacacctggggtcc

SEQ ID NO: 130233 - DNA, 15 bp, Homo sapiens
tatacacctggggtc

SEQ ID NO: 130234 - DNA, 15 bp, Homo sapiens
atatacacctggggt

SEQ ID NO: 130235 - DNA, 15 bp, Homo sapiens
aatatacacctgggg

SEQ ID NO: 130236 - DNA, 15 bp, Homo sapiens
aaatatacacctggg

SEQ ID NO: 130237 - DNA, 15 bp, Homo sapiens
gaaatatacacctgg

SEQ ID NO: 130238 - DNA, 15 bp, Homo sapiens
agaaatatacacctg

SEQ ID NO: 130239 - DNA, 15 bp, Homo sapiens
tagaaatatacacct

SEQ ID NO: 130240 - DNA, 15 bp, Homo sapiens
atagaaatatacacc

SEQ ID NO: 130241 - DNA, 15 bp, Homo sapiens
gatagaaatatacac

SEQ ID NO: 130242 - DNA, 15 bp, Homo sapiens
tgatagaaatataca

SEQ ID NO: 130243 - DNA, 15 bp, Homo sapiens
ttgatagaaatatac

SEQ ID NO: 130244 - DNA, 15 bp, Homo sapiens
gttgatagaaatata

SEQ ID NO: 130245 - DNA, 15 bp, Homo sapiens
agttgatagaaatat

SEQ ID NO: 130246 - DNA, 15 bp, Homo sapiens
tagttgatagaaata

SEQ ID NO: 130247 - DNA, 15 bp, Homo sapiens
ttagttgatagaaat

SEQ ID NO: 130248 - DNA, 15 bp, Homo sapiens
tttagttgatagaaa

SEQ ID NO: 130249 - DNA, 15 bp, Homo sapiens
atttagttgatagaa

SEQ ID NO: 130250 - DNA, 15 bp, Homo sapiens
catttagttgataga

SEQ ID NO: 130251 - DNA, 15 bp, Homo sapiens
acatttagttgatag

SEQ ID NO: 130252 - DNA, 15 bp, Homo sapiens
tacatttagttgata

SEQ ID NO: 130253 - DNA, 15 bp, Homo sapiens
atacatttagttgat

SEQ ID NO: 130254 - DNA, 15 bp, Homo sapiens
tatacatttagttga

SEQ ID NO: 130255 - DNA, 15 bp, Homo sapiens
gtatacatttagttg

SEQ ID NO: 130256 - DNA, 15 bp, Homo sapiens
agtatacatttagtt

SEQ ID NO: 130257 - DNA, 15 bp, Homo sapiens
cagtatacatttagt

SEQ ID NO: 130258 - DNA, 15 bp, Homo sapiens
acagtatacatttag

SEQ ID NO: 130259 - DNA, 15 bp, Homo sapiens
aacagtatacattta

SEQ ID NO: 130260 - DNA, 15 bp, Homo sapiens
aaacagtatacattt

SEQ ID NO: 130261 - DNA, 15 bp, Homo sapiens
gaaacagtatacatt

SEQ ID NO: 130262 - DNA, 15 bp, Homo sapiens
agaaacagtatacat

SEQ ID NO: 130263 - DNA, 15 bp, Homo sapiens
gagaaacagtataca

SEQ ID NO: 130264 - DNA, 15 bp, Homo sapiens
cgagaaacagtatac

SEQ ID NO: 130265 - DNA, 15 bp, Homo sapiens
acgagaaacagtata

SEQ ID NO: 130266 - DNA, 15 bp, Homo sapiens
tacgagaaacagtat

SEQ ID NO: 130267 - DNA, 15 bp, Homo sapiens
gtacgagaaacagta

SEQ ID NO: 130268 - DNA, 15 bp, Homo sapiens
agtacgagaaacagt

SEQ ID NO: 130269 - DNA, 15 bp, Homo sapiens
aagtacgagaaacag

SEQ ID NO: 130270 - DNA, 15 bp, Homo sapiens
caagtacgagaaaca

SEQ ID NO: 130271 - DNA, 15 bp, Homo sapiens
acaagtacgagaaac

SEQ ID NO: 130272 - DNA, 15 bp, Homo sapiens
aacaagtacgagaaa

SEQ ID NO: 130273 - DNA, 15 bp, Homo sapiens
caacaagtacgagaa

SEQ ID NO: 130274 - DNA, 15 bp, Homo sapiens
acaacaagtacgaga

SEQ ID NO: 130275 - DNA, 15 bp, Homo sapiens
tacaacaagtacgag

SEQ ID NO: 130276 - DNA, 15 bp, Homo sapiens
ctacaacaagtacga

SEQ ID NO: 130277 - DNA, 15 bp, Homo sapiens
gctacaacaagtacg

SEQ ID NO: 130278 - DNA, 15 bp, Homo sapiens
tgctacaacaagtac

SEQ ID NO: 130279 - DNA, 15 bp, Homo sapiens
ctgctacaacaagta

SEQ ID NO: 130280 - DNA, 15 bp, Homo sapiens
tctgctacaacaagt

SEQ ID NO: 130281 - DNA, 15 bp, Homo sapiens
ctctgctacaacaag

SEQ ID NO: 130282 - DNA, 15 bp, Homo sapiens
actctgctacaacaa

SEQ ID NO: 130283 - DNA, 15 bp, Homo sapiens
aactctgctacaaca

SEQ ID NO: 130284 - DNA, 15 bp, Homo sapiens
caactctgctacaac

SEQ ID NO: 130285 - DNA, 15 bp, Homo sapiens
acaactctgctacaa

SEQ ID NO: 130286 - DNA, 15 bp, Homo sapiens
tacaactctgctaca

SEQ ID NO: 130287 - DNA, 15 bp, Homo sapiens
ctacaactctgctac

SEQ ID NO: 130288 - DNA, 15 bp, Homo sapiens
actacaactctgcta

SEQ ID NO: 130289 - DNA, 15 bp, Homo sapiens
gactacaactctgct

SEQ ID NO: 130290 - DNA, 15 bp, Homo sapiens
agactacaactctgc

SEQ ID NO: 130291 - DNA, 15 bp, Homo sapiens
aagactacaactctg

SEQ ID NO: 130292 - DNA, 15 bp, Homo sapiens
aaagactacaactct

SEQ ID NO: 130293 - DNA, 15 bp, Homo sapiens
taaagactacaactc

SEQ ID NO: 130294 - DNA, 15 bp, Homo sapiens
ctaaagactacaact

SEQ ID NO: 130295 - DNA, 15 bp, Homo sapiens
cctaaagactacaac

SEQ ID NO: 130296 - DNA, 15 bp, Homo sapiens
tcctaaagactacaa

SEQ ID NO: 130297 - DNA, 15 bp, Homo sapiens
ttcctaaagactaca

SEQ ID NO: 130298 - DNA, 15 bp, Homo sapiens
cttcctaaagactac

SEQ ID NO: 130299 - DNA, 15 bp, Homo sapiens
acttcctaaagacta

SEQ ID NO: 130300 - DNA, 15 bp, Homo sapiens
aacttcctaaagact

SEQ ID NO: 130301 - DNA, 15 bp, Homo sapiens
aaacttcctaaagac

SEQ ID NO: 130302 - DNA, 15 bp, Homo sapiens
aaaacttcctaaaga

SEQ ID NO: 130303 - DNA, 15 bp, Homo sapiens
gaaaacttcctaaag

SEQ ID NO: 130304 - DNA, 15 bp, Homo sapiens
tgaaaacttcctaaa

SEQ ID NO: 130305 - DNA, 15 bp, Homo sapiens
ttgaaaacttcctaa

SEQ ID NO: 130306 - DNA, 15 bp, Homo sapiens
cttgaaaacttccta

SEQ ID NO: 130307 - DNA, 15 bp, Homo sapiens
ccttgaaaacttcct

SEQ ID NO: 130308 - DNA, 15 bp, Homo sapiens
gccttgaaaacttcc

SEQ ID NO: 130309 - DNA, 15 bp, Homo sapiens
tgccttgaaaacttc

SEQ ID NO: 130310 - DNA, 15 bp, Homo sapiens
atgccttgaaaactt

SEQ ID NO: 130311 - DNA, 15 bp, Homo sapiens
catgccttgaaaact

SEQ ID NO: 130312 - DNA, 15 bp, Homo sapiens
tcatgccttgaaaac

SEQ ID NO: 130313 - DNA, 15 bp, Homo sapiens
atcatgccttgaaaa

SEQ ID NO: 130314 - DNA, 15 bp, Homo sapiens
catcatgccttgaaa

SEQ ID NO: 130315 - DNA, 15 bp, Homo sapiens
acatcatgccttgaa

SEQ ID NO: 130316 - DNA, 15 bp, Homo sapiens
tacatcatgccttga

SEQ ID NO: 130317 - DNA, 15 bp, Homo sapiens
ttacatcatgccttg

SEQ ID NO: 130318 - DNA, 15 bp, Homo sapiens
cttacatcatgcctt

SEQ ID NO: 130319 - DNA, 15 bp, Homo sapiens
tcttacatcatgcct

SEQ ID NO: 130320 - DNA, 15 bp, Homo sapiens
gtcttacatcatgcc

SEQ ID NO: 130321 - DNA, 15 bp, Homo sapiens
ggtcttacatcatgc

SEQ ID NO: 130322 - DNA, 15 bp, Homo sapiens
aggtcttacatcatg

SEQ ID NO: 130323 - DNA, 15 bp, Homo sapiens
taggtcttacatcat

SEQ ID NO: 130324 - DNA, 15 bp, Homo sapiens
ctaggtcttacatca

SEQ ID NO: 130325 - DNA, 15 bp, Homo sapiens
gctaggtcttacatc

SEQ ID NO: 130326 - DNA, 15 bp, Homo sapiens
agctaggtcttacat

SEQ ID NO: 130327 - DNA, 15 bp, Homo sapiens
cagctaggtcttaca

SEQ ID NO: 130328 - DNA, 15 bp, Homo sapiens
acagctaggtcttac

SEQ ID NO: 130329 - DNA, 15 bp, Homo sapiens
gacagctaggtctta

SEQ ID NO: 130330 - DNA, 15 bp, Homo sapiens
agacagctaggtctt

SEQ ID NO: 130331 - DNA, 15 bp, Homo sapiens
cagacagctaggtct

SEQ ID NO: 130332 - DNA, 15 bp, Homo sapiens
ccagacagctaggtc

SEQ ID NO: 130333 - DNA, 15 bp, Homo sapiens
accagacagctaggt

SEQ ID NO: 130334 - DNA, 15 bp, Homo sapiens
gaccagacagctagg

SEQ ID NO: 130335 - DNA, 15 bp, Homo sapiens
tgaccagacagctag

SEQ ID NO: 130336 - DNA, 15 bp, Homo sapiens
ctgaccagacagcta

SEQ ID NO: 130337 - DNA, 15 bp, Homo sapiens
gctgaccagacagct

SEQ ID NO: 130338 - DNA, 15 bp, Homo sapiens
agctgaccagacagc

SEQ ID NO: 130339 - DNA, 15 bp, Homo sapiens
tagctgaccagacag

SEQ ID NO: 130340 - DNA, 15 bp, Homo sapiens
atagctgaccagaca

SEQ ID NO: 130341 - DNA, 15 bp, Homo sapiens
aatagctgaccagac

SEQ ID NO: 130342 - DNA, 15 bp, Homo sapiens
taatagctgaccaga

SEQ ID NO: 130343 - DNA, 15 bp, Homo sapiens
ttaatagctgaccag

SEQ ID NO: 130344 - DNA, 15 bp, Homo sapiens
tttaatagctgacca

SEQ ID NO: 130345 - DNA, 15 bp, Homo sapiens
atttaatagctgacc

SEQ ID NO: 130346 - DNA, 15 bp, Homo sapiens
tatttaatagctgac

SEQ ID NO: 130347 - DNA, 15 bp, Homo sapiens
ctatttaatagctga

SEQ ID NO: 130348 - DNA, 15 bp, Homo sapiens
actatttaatagctg

SEQ ID NO: 130349 - DNA, 15 bp, Homo sapiens
aactatttaatagct

SEQ ID NO: 130350 - DNA, 15 bp, Homo sapiens
aaactatttaatagc

SEQ ID NO: 130351 - DNA, 15 bp, Homo sapiens
aaaactatttaatag

SEQ ID NO: 130352 - DNA, 15 bp, Homo sapiens
caaaactatttaata

SEQ ID NO: 130353 - DNA, 15 bp, Homo sapiens
acaaaactatttaat

SEQ ID NO: 130354 - DNA, 15 bp, Homo sapiens
aacaaaactatttaa

SEQ ID NO: 130355 - DNA, 15 bp, Homo sapiens
aaacaaaactattta

SEQ ID NO: 130356 - DNA, 15 bp, Homo sapiens
aaaacaaaactattt

SEQ ID NO: 130357 - DNA, 15 bp, Homo sapiens
gaaaacaaaactatt

SEQ ID NO: 130358 - DNA, 15 bp, Homo sapiens
ggaaaacaaaactat

SEQ ID NO: 130359 - DNA, 15 bp, Homo sapiens
gggaaaacaaaacta

SEQ ID NO: 130360 - DNA, 15 bp, Homo sapiens
ggggaaaacaaaact

SEQ ID NO: 130361 - DNA, 15 bp, Homo sapiens
aggggaaaacaaaac

SEQ ID NO: 130362 - DNA, 15 bp, Homo sapiens
gaggggaaaacaaaa

SEQ ID NO: 130363 - DNA, 15 bp, Homo sapiens
tgaggggaaaacaaa

SEQ ID NO: 130364 - DNA, 15 bp, Homo sapiens
atgaggggaaaacaa

SEQ ID NO: 130365 - DNA, 15 bp, Homo sapiens
catgaggggaaaaca

SEQ ID NO: 130366 - DNA, 15 bp, Homo sapiens
tcatgaggggaaaac

SEQ ID NO: 130367 - DNA, 15 bp, Homo sapiens
ctcatgaggggaaaa

SEQ ID NO: 130368 - DNA, 15 bp, Homo sapiens
cctcatgaggggaaa

SEQ ID NO: 130369 - DNA, 15 bp, Homo sapiens
tcctcatgaggggaa

SEQ ID NO: 130370 - DNA, 15 bp, Homo sapiens
ttcctcatgagggga

SEQ ID NO: 130371 - DNA, 15 bp, Homo sapiens
attcctcatgagggg

SEQ ID NO: 130372 - DNA, 15 bp, Homo sapiens
tattcctcatgaggg

SEQ ID NO: 130373 - DNA, 15 bp, Homo sapiens
ctattcctcatgagg

SEQ ID NO: 130374 - DNA, 15 bp, Homo sapiens
actattcctcatgag

SEQ ID NO: 130375 - DNA, 15 bp, Homo sapiens
gactattcctcatga

SEQ ID NO: 130376 - DNA, 15 bp, Homo sapiens
tgactattcctcatg

SEQ ID NO: 130377 - DNA, 15 bp, Homo sapiens
ctgactattcctcat

SEQ ID NO: 130378 - DNA, 15 bp, Homo sapiens
gctgactattcctca

SEQ ID NO: 130379 - DNA, 15 bp, Homo sapiens
tgctgactattcctc

SEQ ID NO: 130380 - DNA, 15 bp, Homo sapiens
atgctgactattcct

SEQ ID NO: 130381 - DNA, 15 bp, Homo sapiens
aatgctgactattcc

SEQ ID NO: 130382 - DNA, 15 bp, Homo sapiens
aaatgctgactattc

SEQ ID NO: 130383 - DNA, 15 bp, Homo sapiens
aaaatgctgactatt

SEQ ID NO: 130384 - DNA, 15 bp, Homo sapiens
gaaaatgctgactat

SEQ ID NO: 130385 - DNA, 15 bp, Homo sapiens
tgaaaatgctgacta

SEQ ID NO: 130386 - DNA, 15 bp, Homo sapiens
ctgaaaatgctgact

SEQ ID NO: 130387 - DNA, 15 bp, Homo sapiens
actgaaaatgctgac

SEQ ID NO: 130388 - DNA, 15 bp, Homo sapiens
aactgaaaatgctga

SEQ ID NO: 130389 - DNA, 15 bp, Homo sapiens
caactgaaaatgctg

SEQ ID NO: 130390 - DNA, 15 bp, Homo sapiens
tcaactgaaaatgct

SEQ ID NO: 130391 - DNA, 15 bp, Homo sapiens
atcaactgaaaatgc

SEQ ID NO: 130392 - DNA, 15 bp, Homo sapiens
catcaactgaaaatg

SEQ ID NO: 130393 - DNA, 15 bp, Homo sapiens
tcatcaactgaaaat

SEQ ID NO: 130394 - DNA, 15 bp, Homo sapiens
ttcatcaactgaaaa

SEQ ID NO: 130395 - DNA, 15 bp, Homo sapiens
tttcatcaactgaaa

SEQ ID NO: 130396 - DNA, 15 bp, Homo sapiens
ttttcatcaactgaa

SEQ ID NO: 130397 - DNA, 15 bp, Homo sapiens
tttttcatcaactga

SEQ ID NO: 130398 - DNA, 15 bp, Homo sapiens
ttttttcatcaactg

SEQ ID NO: 130399 - DNA, 15 bp, Homo sapiens
attttttcatcaact

SEQ ID NO: 130400 - DNA, 15 bp, Homo sapiens
gattttttcatcaac

SEQ ID NO: 130401 - DNA, 15 bp, Homo sapiens
tgattttttcatcaa

SEQ ID NO: 130402 - DNA, 15 bp, Homo sapiens
atgattttttcatca

SEQ ID NO: 130403 - DNA, 15 bp, Homo sapiens
aatgattttttcatc

SEQ ID NO: 130404 - DNA, 15 bp, Homo sapiens
caatgattttttcat

SEQ ID NO: 130405 - DNA, 15 bp, Homo sapiens
acaatgattttttca

SEQ ID NO: 130406 - DNA, 15 bp, Homo sapiens
aacaatgattttttc

SEQ ID NO: 130407 - DNA, 15 bp, Homo sapiens
gaacaatgatttttt

SEQ ID NO: 130408 - DNA, 15 bp, Homo sapiens
ggaacaatgattttt

SEQ ID NO: 130409 - DNA, 15 bp, Homo sapiens
aggaacaatgatttt

SEQ ID NO: 130410 - DNA, 15 bp, Homo sapiens
aaggaacaatgattt

SEQ ID NO: 130411 - DNA, 15 bp, Homo sapiens
taaggaacaatgatt

SEQ ID NO: 130412 - DNA, 15 bp, Homo sapiens
ttaaggaacaatgat

SEQ ID NO: 130413 - DNA, 15 bp, Homo sapiens
gttaaggaacaatga

SEQ ID NO: 130414 - DNA, 15 bp, Homo sapiens
ggttaaggaacaatg

SEQ ID NO: 130415 - DNA, 15 bp, Homo sapiens
tggttaaggaacaat

SEQ ID NO: 130416 - DNA, 15 bp, Homo sapiens
atggttaaggaacaa

SEQ ID NO: 130417 - DNA, 15 bp, Homo sapiens
tatggttaaggaaca

SEQ ID NO: 130418 - DNA, 15 bp, Homo sapiens
ctatggttaaggaac

SEQ ID NO: 130419 - DNA, 15 bp, Homo sapiens
actatggttaaggaa

SEQ ID NO: 130420 - DNA, 15 bp, Homo sapiens
tactatggttaagga

SEQ ID NO: 130421 - DNA, 15 bp, Homo sapiens
atactatggttaagg

SEQ ID NO: 130422 - DNA, 15 bp, Homo sapiens
tatactatggttaag

SEQ ID NO: 130423 - DNA, 15 bp, Homo sapiens
atatactatggttaa

SEQ ID NO: 130424 - DNA, 15 bp, Homo sapiens
catatactatggtta

SEQ ID NO: 130425 - DNA, 15 bp, Homo sapiens
acatatactatggtt

SEQ ID NO: 130426 - DNA, 15 bp, Homo sapiens
aacatatactatggt

SEQ ID NO: 130427 - DNA, 15 bp, Homo sapiens
gaacatatactatgg

SEQ ID NO: 130428 - DNA, 15 bp, Homo sapiens
agaacatatactatg

SEQ ID NO: 130429 - DNA, 15 bp, Homo sapiens
aagaacatatactat

SEQ ID NO: 130430 - DNA, 15 bp, Homo sapiens
aaagaacatatacta

SEQ ID NO: 130431 - DNA, 15 bp, Homo sapiens
aaaagaacatatact

SEQ ID NO: 130432 - DNA, 15 bp, Homo sapiens
taaaagaacatatac

SEQ ID NO: 130433 - DNA, 15 bp, Homo sapiens
ttaaaagaacatata

SEQ ID NO: 130434 - DNA, 15 bp, Homo sapiens
tttaaaagaacatat

SEQ ID NO: 130435 - DNA, 15 bp, Homo sapiens
ttttaaaagaacata

SEQ ID NO: 130436 - DNA, 15 bp, Homo sapiens
gttttaaaagaacat

SEQ ID NO: 130437 - DNA, 15 bp, Homo sapiens
tgttttaaaagaaca

SEQ ID NO: 130438 - DNA, 15 bp, Homo sapiens
ttgttttaaaagaac

SEQ ID NO: 130439 - DNA, 15 bp, Homo sapiens
tttgttttaaaagaa

SEQ ID NO: 130440 - DNA, 15 bp, Homo sapiens
ttttgttttaaaaga

SEQ ID NO: 130441 - DNA, 15 bp, Homo sapiens
cttttgttttaaaag

SEQ ID NO: 130442 - DNA, 15 bp, Homo sapiens
tcttttgttttaaaa

SEQ ID NO: 130443 - DNA, 15 bp, Homo sapiens
atcttttgttttaaa

SEQ ID NO: 130444 - DNA, 15 bp, Homo sapiens
catcttttgttttaa

SEQ ID NO: 130445 - DNA, 15 bp, Homo sapiens
ccatcttttgtttta

SEQ ID NO: 130446 - DNA, 15 bp, Homo sapiens
gccatcttttgtttt

SEQ ID NO: 130447 - DNA, 15 bp, Homo sapiens
ggccatcttttgttt

SEQ ID NO: 130448 - DNA, 15 bp, Homo sapiens
gggccatcttttgtt

SEQ ID NO: 130449 - DNA, 15 bp, Homo sapiens
tgggccatcttttgt

SEQ ID NO: 130450 - DNA, 15 bp, Homo sapiens
ttgggccatcttttg

SEQ ID NO: 130451 - DNA, 15 bp, Homo sapiens
tttgggccatctttt

SEQ ID NO: 130452 - DNA, 15 bp, Homo sapiens
gtttgggccatcttt

SEQ ID NO: 130453 - DNA, 15 bp, Homo sapiens
agtttgggccatctt

SEQ ID NO: 130454 - DNA, 15 bp, Homo sapiens
gagtttgggccatct

SEQ ID NO: 130455 - DNA, 15 bp, Homo sapiens
tgagtttgggccatc

SEQ ID NO: 130456 - DNA, 15 bp, Homo sapiens
ttgagtttgggccat

SEQ ID NO: 130457 - DNA, 15 bp, Homo sapiens
attgagtttgggcca

SEQ ID NO: 130458 - DNA, 15 bp, Homo sapiens
cattgagtttgggcc

SEQ ID NO: 130459 - DNA, 15 bp, Homo sapiens
gcattgagtttgggc

SEQ ID NO: 130460 - DNA, 15 bp, Homo sapiens
agcattgagtttggg

SEQ ID NO: 130461 - DNA, 15 bp, Homo sapiens
aagcattgagtttgg

SEQ ID NO: 130462 - DNA, 15 bp, Homo sapiens
aaagcattgagtttg

SEQ ID NO: 130463 - DNA, 15 bp, Homo sapiens
caaagcattgagttt

SEQ ID NO: 130464 - DNA, 15 bp, Homo sapiens
acaaagcattgagtt

SEQ ID NO: 130465 - DNA, 15 bp, Homo sapiens
tacaaagcattgagt

SEQ ID NO: 130466 - DNA, 15 bp, Homo sapiens
ttacaaagcattgag

SEQ ID NO: 130467 - DNA, 15 bp, Homo sapiens
tttacaaagcattga

SEQ ID NO: 130468 - DNA, 15 bp, Homo sapiens
atttacaaagcattg

SEQ ID NO: 130469 - DNA, 15 bp, Homo sapiens
aatttacaaagcatt

SEQ ID NO: 130470 - DNA, 15 bp, Homo sapiens
taatttacaaagcat

SEQ ID NO: 130471 - DNA, 15 bp, Homo sapiens
ttaatttacaaagca

SEQ ID NO: 130472 - DNA, 15 bp, Homo sapiens
cttaatttacaaagc

SEQ ID NO: 130473 - DNA, 15 bp, Homo sapiens
tcttaatttacaaag

SEQ ID NO: 130474 - DNA, 15 bp, Homo sapiens
atcttaatttacaaa

SEQ ID NO: 130475 - DNA, 15 bp, Homo sapiens
tatcttaatttacaa

SEQ ID NO: 130476 - DNA, 15 bp, Homo sapiens
atatcttaatttaca

SEQ ID NO: 130477 - DNA, 15 bp, Homo sapiens
aatatcttaatttac

SEQ ID NO: 130478 - DNA, 15 bp, Homo sapiens
taatatcttaattta

SEQ ID NO: 130479 - DNA, 15 bp, Homo sapiens
ttaatatcttaattt

SEQ ID NO: 130480 - DNA, 15 bp, Homo sapiens
gttaatatcttaatt

SEQ ID NO: 130481 - DNA, 15 bp, Homo sapiens
agttaatatcttaat

SEQ ID NO: 130482 - DNA, 15 bp, Homo sapiens
cagttaatatcttaa

SEQ ID NO: 130483 - DNA, 15 bp, Homo sapiens
ccagttaatatctta

SEQ ID NO: 130484 - DNA, 15 bp, Homo sapiens
gccagttaatatctt

SEQ ID NO: 130485 - DNA, 15 bp, Homo sapiens
tgccagttaatatct

SEQ ID NO: 130486 - DNA, 15 bp, Homo sapiens
ttgccagttaatatc

SEQ ID NO: 130487 - DNA, 15 bp, Homo sapiens
tttgccagttaatat

SEQ ID NO: 130488 - DNA, 15 bp, Homo sapiens
atttgccagttaata

SEQ ID NO: 130489 - DNA, 15 bp, Homo sapiens
gatttgccagttaat

SEQ ID NO: 130490 - DNA, 15 bp, Homo sapiens
agatttgccagttaa

SEQ ID NO: 130491 - DNA, 15 bp, Homo sapiens
tagatttgccagtta

SEQ ID NO: 130492 - DNA, 15 bp, Homo sapiens
atagatttgccagtt

SEQ ID NO: 130493 - DNA, 15 bp, Homo sapiens
aatagatttgccagt

SEQ ID NO: 130494 - DNA, 15 bp, Homo sapiens
aaatagatttgccag

SEQ ID NO: 130495 - DNA, 15 bp, Homo sapiens
aaaatagatttgcca

SEQ ID NO: 130496 - DNA, 15 bp, Homo sapiens
taaaatagatttgcc

SEQ ID NO: 130497 - DNA, 15 bp, Homo sapiens
ttaaaatagatttgc

SEQ ID NO: 130498 - DNA, 15 bp, Homo sapiens
attaaaatagatttg

SEQ ID NO: 130499 - DNA, 15 bp, Homo sapiens
gattaaaatagattt

SEQ ID NO: 130500 - DNA, 15 bp, Homo sapiens
tgattaaaatagatt

SEQ ID NO: 130501 - DNA, 15 bp, Homo sapiens
ttgattaaaatagat

SEQ ID NO: 130502 - DNA, 15 bp, Homo sapiens
cttgattaaaataga

SEQ ID NO: 130503 - DNA, 15 bp, Homo sapiens
tcttgattaaaatag

SEQ ID NO: 130504 - DNA, 15 bp, Homo sapiens
atcttgattaaaata

SEQ ID NO: 130505 - DNA, 15 bp, Homo sapiens
aatcttgattaaaat

SEQ ID NO: 130506 - DNA, 15 bp, Homo sapiens
taatcttgattaaaa

SEQ ID NO: 130507 - DNA, 15 bp, Homo sapiens
ataatcttgattaaa

SEQ ID NO: 130508 - DNA, 15 bp, Homo sapiens
aataatcttgattaa

SEQ ID NO: 130509 - DNA, 15 bp, Homo sapiens
aaataatcttgatta

SEQ ID NO: 130510 - DNA, 15 bp, Homo sapiens
taaataatcttgatt

SEQ ID NO: 130511 - DNA, 15 bp, Homo sapiens
gtaaataatcttgat

SEQ ID NO: 130512 - DNA, 15 bp, Homo sapiens
tgtaaataatcttga

SEQ ID NO: 130513 - DNA, 15 bp, Homo sapiens
ttgtaaataatcttg

SEQ ID NO: 130514 - DNA, 15 bp, Homo sapiens
attgtaaataatctt

SEQ ID NO: 130515 - DNA, 15 bp, Homo sapiens
cattgtaaataatct

SEQ ID NO: 130516 - DNA, 15 bp, Homo sapiens
acattgtaaataatc

SEQ ID NO: 130517 - DNA, 15 bp, Homo sapiens
cacattgtaaataat

SEQ ID NO: 130518 - DNA, 15 bp, Homo sapiens
acacattgtaaataa

SEQ ID NO: 130519 - DNA, 15 bp, Homo sapiens
cacacattgtaaata

SEQ ID NO: 130520 - DNA, 15 bp, Homo sapiens
tcacacattgtaaat

SEQ ID NO: 130521 - DNA, 15 bp, Homo sapiens
atcacacattgtaaa

SEQ ID NO: 130522 - DNA, 15 bp, Homo sapiens
aatcacacattgtaa

SEQ ID NO: 130523 - DNA, 15 bp, Homo sapiens
aaatcacacattgta

SEQ ID NO: 130524 - DNA, 15 bp, Homo sapiens
aaaatcacacattgt

SEQ ID NO: 130525 - DNA, 15 bp, Homo sapiens
aaaaatcacacattg

SEQ ID NO: 130526 - DNA, 15 bp, Homo sapiens
aaaaaatcacacatt

SEQ ID NO: 130527 - DNA, 15 bp, Homo sapiens
taaaaaatcacacat

SEQ ID NO: 130528 - DNA, 15 bp, Homo sapiens
ttaaaaaatcacaca

SEQ ID NO: 130529 - DNA, 15 bp, Homo sapiens
cttaaaaaatcacac

SEQ ID NO: 130530 - DNA, 15 bp, Homo sapiens
ccttaaaaaatcaca

SEQ ID NO: 130531 - DNA, 15 bp, Homo sapiens
accttaaaaaatcac

SEQ ID NO: 130532 - DNA, 15 bp, Homo sapiens
aaccttaaaaaatca

SEQ ID NO: 130533 - DNA, 15 bp, Homo sapiens
taaccttaaaaaatc

SEQ ID NO: 130534 - DNA, 15 bp, Homo sapiens
ctaaccttaaaaaat

SEQ ID NO: 130535 - DNA, 15 bp, Homo sapiens
gctaaccttaaaaaa

SEQ ID NO: 130536 - DNA, 15 bp, Homo sapiens
agctaaccttaaaaa

SEQ ID NO: 130537 - DNA, 15 bp, Homo sapiens
cagctaaccttaaaa

SEQ ID NO: 130538 - DNA, 15 bp, Homo sapiens
ccagctaaccttaaa

SEQ ID NO: 130539 - DNA, 15 bp, Homo sapiens
accagctaaccttaa

SEQ ID NO: 130540 - DNA, 15 bp, Homo sapiens
aaccagctaacctta

SEQ ID NO: 130541 - DNA, 15 bp, Homo sapiens
taaccagctaacctt

SEQ ID NO: 130542 - DNA, 15 bp, Homo sapiens
ataaccagctaacct

SEQ ID NO: 130543 - DNA, 15 bp, Homo sapiens
tataaccagctaacc

SEQ ID NO: 130544 - DNA, 15 bp, Homo sapiens
gtataaccagctaac

SEQ ID NO: 130545 - DNA, 15 bp, Homo sapiens
ggtataaccagctaa

SEQ ID NO: 130546 - DNA, 15 bp, Homo sapiens
aggtataaccagcta

SEQ ID NO: 130547 - DNA, 15 bp, Homo sapiens
aaggtataaccagct

SEQ ID NO: 130548 - DNA, 15 bp, Homo sapiens
caaggtataaccagc

SEQ ID NO: 130549 - DNA, 15 bp, Homo sapiens
tcaaggtataaccag

SEQ ID NO: 130550 - DNA, 15 bp, Homo sapiens
ttcaaggtataacca

SEQ ID NO: 130551 - DNA, 15 bp, Homo sapiens
attcaaggtataacc

SEQ ID NO: 130552 - DNA, 15 bp, Homo sapiens
cattcaaggtataac

SEQ ID NO: 130553 - DNA, 15 bp, Homo sapiens
acattcaaggtataa

SEQ ID NO: 130554 - DNA, 15 bp, Homo sapiens
gacattcaaggtata

SEQ ID NO: 130555 - DNA, 15 bp, Homo sapiens
tgacattcaaggtat

SEQ ID NO: 130556 - DNA, 15 bp, Homo sapiens
atgacattcaaggta

SEQ ID NO: 130557 - DNA, 15 bp, Homo sapiens
aatgacattcaaggt

SEQ ID NO: 130558 - DNA, 15 bp, Homo sapiens
aaatgacattcaagg

SEQ ID NO: 130559 - DNA, 15 bp, Homo sapiens
taaatgacattcaag

SEQ ID NO: 130560 - DNA, 15 bp, Homo sapiens
ataaatgacattcaa

SEQ ID NO: 130561 - DNA, 15 bp, Homo sapiens
gataaatgacattca

SEQ ID NO: 130562 - DNA, 15 bp, Homo sapiens
agataaatgacattc

SEQ ID NO: 130563 - DNA, 15 bp, Homo sapiens
tagataaatgacatt

SEQ ID NO: 130564 - DNA, 15 bp, Homo sapiens
atagataaatgacat

SEQ ID NO: 130565 - DNA, 15 bp, Homo sapiens
tatagataaatgaca

SEQ ID NO: 130566 - DNA, 15 bp, Homo sapiens
atatagataaatgac

SEQ ID NO: 130567 - DNA, 15 bp, Homo sapiens
aatatagataaatga

SEQ ID NO: 130568 - DNA, 15 bp, Homo sapiens
gaatatagataaatg

SEQ ID NO: 130569 - DNA, 15 bp, Homo sapiens
tgaatatagataaat

SEQ ID NO: 130570 - DNA, 15 bp, Homo sapiens
atgaatatagataaa

SEQ ID NO: 130571 - DNA, 15 bp, Homo sapiens
tatgaatatagataa

SEQ ID NO: 130572 - DNA, 15 bp, Homo sapiens
gtatgaatatagata

SEQ ID NO: 130573 - DNA, 15 bp, Homo sapiens
tgtatgaatatagat

SEQ ID NO: 130574 - DNA, 15 bp, Homo sapiens
atgtatgaatataga

SEQ ID NO: 130575 - DNA, 15 bp, Homo sapiens
aatgtatgaatatag

SEQ ID NO: 130576 - DNA, 15 bp, Homo sapiens
aaatgtatgaatata

SEQ ID NO: 130577 - DNA, 15 bp, Homo sapiens
aaaatgtatgaatat

SEQ ID NO: 130578 - DNA, 15 bp, Homo sapiens
taaaatgtatgaata

SEQ ID NO: 130579 - DNA, 15 bp, Homo sapiens
ctaaaatgtatgaat

SEQ ID NO: 130580 - DNA, 15 bp, Homo sapiens
gctaaaatgtatgaa

SEQ ID NO: 130581 - DNA, 15 bp, Homo sapiens
tgctaaaatgtatga

SEQ ID NO: 130582 - DNA, 15 bp, Homo sapiens
atgctaaaatgtatg

SEQ ID NO: 130583 - DNA, 15 bp, Homo sapiens
catgctaaaatgtat

SEQ ID NO: 130584 - DNA, 15 bp, Homo sapiens
acatgctaaaatgta

SEQ ID NO: 130585 - DNA, 15 bp, Homo sapiens
aacatgctaaaatgt

SEQ ID NO: 130586 - DNA, 15 bp, Homo sapiens
aaacatgctaaaatg

SEQ ID NO: 130587 - DNA, 15 bp, Homo sapiens
aaaacatgctaaaat

SEQ ID NO: 130588 - DNA, 15 bp, Homo sapiens
taaaacatgctaaaa

SEQ ID NO: 130589 - DNA, 15 bp, Homo sapiens
ataaaacatgctaaa

SEQ ID NO: 130590 - DNA, 15 bp, Homo sapiens
aataaaacatgctaa

SEQ ID NO: 130591 - DNA, 15 bp, Homo sapiens
aaataaaacatgcta

SEQ ID NO: 130592 - DNA, 15 bp, Homo sapiens
taaataaaacatgct

SEQ ID NO: 130593 - DNA, 15 bp, Homo sapiens
ttaaataaaacatgc

SEQ ID NO: 130594 - DNA, 15 bp, Homo sapiens
attaaataaaacatg

SEQ ID NO: 130595 - DNA, 15 bp, Homo sapiens
tattaaataaaacat

SEQ ID NO: 130596 - DNA, 15 bp, Homo sapiens
atattaaataaaaca

SEQ ID NO: 130597 - DNA, 15 bp, Homo sapiens
gatattaaataaaac

SEQ ID NO: 130598 - DNA, 15 bp, Homo sapiens
ggatattaaataaaa

SEQ ID NO: 130599 - DNA, 15 bp, Homo sapiens
aggatattaaataaa

SEQ ID NO: 130600 - DNA, 15 bp, Homo sapiens
taggatattaaataa

SEQ ID NO: 130601 - DNA, 15 bp, Homo sapiens
ataggatattaaata

SEQ ID NO: 130602 - DNA, 15 bp, Homo sapiens
gataggatattaaat

SEQ ID NO: 130603 - DNA, 15 bp, Homo sapiens
tgataggatattaaa

SEQ ID NO: 130604 - DNA, 15 bp, Homo sapiens
atgataggatattaa

SEQ ID NO: 130605 - DNA, 15 bp, Homo sapiens
catgataggatatta

SEQ ID NO: 130606 - DNA, 15 bp, Homo sapiens
tcatgataggatatt

SEQ ID NO: 130607 - DNA, 15 bp, Homo sapiens
ttcatgataggatat

SEQ ID NO: 130608 - DNA, 15 bp, Homo sapiens
cttcatgataggata

SEQ ID NO: 130609 - DNA, 15 bp, Homo sapiens
tcttcatgataggat

SEQ ID NO: 130610 - DNA, 15 bp, Homo sapiens
ttcttcatgatagga

SEQ ID NO: 130611 - DNA, 15 bp, Homo sapiens
cttcttcatgatagg

SEQ ID NO: 130612 - DNA, 15 bp, Homo sapiens
acttcttcatgatag

SEQ ID NO: 130613 - DNA, 15 bp, Homo sapiens
gacttcttcatgata

SEQ ID NO: 130614 - DNA, 15 bp, Homo sapiens
ggacttcttcatgat

SEQ ID NO: 130615 - DNA, 15 bp, Homo sapiens
gggacttcttcatga

SEQ ID NO: 130616 - DNA, 15 bp, Homo sapiens
ggggacttcttcatg

SEQ ID NO: 130617 - DNA, 15 bp, Homo sapiens
tggggacttcttcat

SEQ ID NO: 130618 - DNA, 15 bp, Homo sapiens
ttggggacttcttca

SEQ ID NO: 130619 - DNA, 15 bp, Homo sapiens
tttggggacttcttc

SEQ ID NO: 130620 - DNA, 15 bp, Homo sapiens
ttttggggacttctt

SEQ ID NO: 130621 - DNA, 15 bp, Homo sapiens
attttggggacttct

SEQ ID NO: 130622 - DNA, 15 bp, Homo sapiens
tattttggggacttc

SEQ ID NO: 130623 - DNA, 15 bp, Homo sapiens
ctattttggggactt

SEQ ID NO: 130624 - DNA, 15 bp, Homo sapiens
gctattttggggact

SEQ ID NO: 130625 - DNA, 15 bp, Homo sapiens
tgctattttggggac

SEQ ID NO: 130626 - DNA, 15 bp, Homo sapiens
atgctattttgggga

SEQ ID NO: 130627 - DNA, 15 bp, Homo sapiens
tatgctattttgggg

SEQ ID NO: 130628 - DNA, 15 bp, Homo sapiens
atatgctattttggg

SEQ ID NO: 130629 - DNA, 15 bp, Homo sapiens
gatatgctattttgg

SEQ ID NO: 130630 - DNA, 15 bp, Homo sapiens
agatatgctattttg

SEQ ID NO: 130631 - DNA, 15 bp, Homo sapiens
cagatatgctatttt

SEQ ID NO: 130632 - DNA, 15 bp, Homo sapiens
acagatatgctattt

SEQ ID NO: 130633 - DNA, 15 bp, Homo sapiens
cacagatatgctatt

SEQ ID NO: 130634 - DNA, 15 bp, Homo sapiens
gcacagatatgctat

SEQ ID NO: 130635 - DNA, 15 bp, Homo sapiens
ggcacagatatgcta

SEQ ID NO: 130636 - DNA, 15 bp, Homo sapiens
aggcacagatatgct

SEQ ID NO: 130637 - DNA, 15 bp, Homo sapiens
aaggcacagatatgc

SEQ ID NO: 130638 - DNA, 15 bp, Homo sapiens
taaggcacagatatg

SEQ ID NO: 130639 - DNA, 15 bp, Homo sapiens
ctaaggcacagatat

SEQ ID NO: 130640 - DNA, 15 bp, Homo sapiens
gctaaggcacagata

SEQ ID NO: 130641 - DNA, 15 bp, Homo sapiens
tgctaaggcacagat

SEQ ID NO: 130642 - DNA, 15 bp, Homo sapiens
ctgctaaggcacaga

SEQ ID NO: 130643 - DNA, 15 bp, Homo sapiens
actgctaaggcacag

SEQ ID NO: 130644 - DNA, 15 bp, Homo sapiens
tactgctaaggcaca

SEQ ID NO: 130645 - DNA, 15 bp, Homo sapiens
ctactgctaaggcac

SEQ ID NO: 130646 - DNA, 15 bp, Homo sapiens
tctactgctaaggca

SEQ ID NO: 130647 - DNA, 15 bp, Homo sapiens
ttctactgctaaggc

SEQ ID NO: 130648 - DNA, 15 bp, Homo sapiens
attctactgctaagg

SEQ ID NO: 130649 - DNA, 15 bp, Homo sapiens
tattctactgctaag

SEQ ID NO: 130650 - DNA, 15 bp, Homo sapiens
ttattctactgctaa

SEQ ID NO: 130651 - DNA, 15 bp, Homo sapiens
attattctactgcta

SEQ ID NO: 130652 - DNA, 15 bp, Homo sapiens
aattattctactgct

SEQ ID NO: 130653 - DNA, 15 bp, Homo sapiens
caattattctactgc

SEQ ID NO: 130654 - DNA, 15 bp, Homo sapiens
ccaattattctactg

SEQ ID NO: 130655 - DNA, 15 bp, Homo sapiens
tccaattattctact

SEQ ID NO: 130656 - DNA, 15 bp, Homo sapiens
atccaattattctac

SEQ ID NO: 130657 - DNA, 15 bp, Homo sapiens
tatccaattattcta

SEQ ID NO: 130658 - DNA, 15 bp, Homo sapiens
ttatccaattattct

SEQ ID NO: 130659 - DNA, 15 bp, Homo sapiens
attatccaattattc

SEQ ID NO: 130660 - DNA, 15 bp, Homo sapiens
tattatccaattatt

SEQ ID NO: 130661 - DNA, 15 bp, Homo sapiens
ctattatccaattat

SEQ ID NO: 130662 - DNA, 15 bp, Homo sapiens
actattatccaatta

SEQ ID NO: 130663 - DNA, 15 bp, Homo sapiens
cactattatccaatt

SEQ ID NO: 130664 - DNA, 15 bp, Homo sapiens
gcactattatccaat

SEQ ID NO: 130665 - DNA, 15 bp, Homo sapiens
ggcactattatccaa

SEQ ID NO: 130666 - DNA, 15 bp, Homo sapiens
tggcactattatcca

SEQ ID NO: 130667 - DNA, 15 bp, Homo sapiens
ttggcactattatcc

SEQ ID NO: 130668 - DNA, 15 bp, Homo sapiens
tttggcactattatc

SEQ ID NO: 130669 - DNA, 15 bp, Homo sapiens
atttggcactattat

SEQ ID NO: 130670 - DNA, 15 bp, Homo sapiens
aatttggcactatta

SEQ ID NO: 130671 - DNA, 15 bp, Homo sapiens
taatttggcactatt

SEQ ID NO: 130672 - DNA, 15 bp, Homo sapiens
ctaatttggcactat

SEQ ID NO: 130673 - DNA, 15 bp, Homo sapiens
tctaatttggcacta

SEQ ID NO: 130674 - DNA, 15 bp, Homo sapiens
gtctaatttggcact

SEQ ID NO: 130675 - DNA, 15 bp, Homo sapiens
tgtctaatttggcac

SEQ ID NO: 130676 - DNA, 15 bp, Homo sapiens
ttgtctaatttggca

SEQ ID NO: 130677 - DNA, 15 bp, Homo sapiens
gttgtctaatttggc

SEQ ID NO: 130678 - DNA, 15 bp, Homo sapiens
agttgtctaatttgg

SEQ ID NO: 130679 - DNA, 15 bp, Homo sapiens
aagttgtctaatttg

SEQ ID NO: 130680 - DNA, 15 bp, Homo sapiens
aaagttgtctaattt

SEQ ID NO: 130681 - DNA, 15 bp, Homo sapiens
taaagttgtctaatt

SEQ ID NO: 130682 - DNA, 15 bp, Homo sapiens
ttaaagttgtctaat

SEQ ID NO: 130683 - DNA, 15 bp, Homo sapiens
tttaaagttgtctaa

SEQ ID NO: 130684 - DNA, 15 bp, Homo sapiens
atttaaagttgtcta

SEQ ID NO: 130685 - DNA, 15 bp, Homo sapiens
aatttaaagttgtct

SEQ ID NO: 130686 - DNA, 15 bp, Homo sapiens
aaatttaaagttgtc

SEQ ID NO: 130687 - DNA, 15 bp, Homo sapiens
aaaatttaaagttgt

SEQ ID NO: 130688 - DNA, 15 bp, Homo sapiens
taaaatttaaagttg

SEQ ID NO: 130689 - DNA, 15 bp, Homo sapiens
ataaaatttaaagtt

SEQ ID NO: 130690 - DNA, 15 bp, Homo sapiens
aataaaatttaaagt

SEQ ID NO: 130691 - DNA, 15 bp, Homo sapiens
gaataaaatttaaag

SEQ ID NO: 130692 - DNA, 15 bp, Homo sapiens
tgaataaaatttaaa

SEQ ID NO: 130693 - DNA, 15 bp, Homo sapiens
ctgaataaaatttaa

SEQ ID NO: 130694 - DNA, 15 bp, Homo sapiens
actgaataaaattta

SEQ ID NO: 130695 - DNA, 15 bp, Homo sapiens
tactgaataaaattt

SEQ ID NO: 130696 - DNA, 15 bp, Homo sapiens
atactgaataaaatt

SEQ ID NO: 130697 - DNA, 15 bp, Homo sapiens
tatactgaataaaat

SEQ ID NO: 130698 - DNA, 15 bp, Homo sapiens
ttatactgaataaaa

SEQ ID NO: 130699 - DNA, 15 bp, Homo sapiens
attatactgaataaa

SEQ ID NO: 130700 - DNA, 15 bp, Homo sapiens
aattatactgaataa

SEQ ID NO: 130701 - DNA, 15 bp, Homo sapiens
aaattatactgaata

SEQ ID NO: 130702 - DNA, 15 bp, Homo sapiens
aaaattatactgaat

SEQ ID NO: 130703 - DNA, 15 bp, Homo sapiens
taaaattatactgaa

SEQ ID NO: 130704 - DNA, 15 bp, Homo sapiens
gtaaaattatactga

SEQ ID NO: 130705 - DNA, 15 bp, Homo sapiens
agtaaaattatactg

SEQ ID NO: 130706 - DNA, 15 bp, Homo sapiens
cagtaaaattatact

SEQ ID NO: 130707 - DNA, 15 bp, Homo sapiens
gcagtaaaattatac

SEQ ID NO: 130708 - DNA, 15 bp, Homo sapiens
agcagtaaaattata

SEQ ID NO: 130709 - DNA, 15 bp, Homo sapiens
cagcagtaaaattat

SEQ ID NO: 130710 - DNA, 15 bp, Homo sapiens
tcagcagtaaaatta

SEQ ID NO: 130711 - DNA, 15 bp, Homo sapiens
ctcagcagtaaaatt

SEQ ID NO: 130712 - DNA, 15 bp, Homo sapiens
actcagcagtaaaat

SEQ ID NO: 130713 - DNA, 15 bp, Homo sapiens
cactcagcagtaaaa

SEQ ID NO: 130714 - DNA, 15 bp, Homo sapiens
acactcagcagtaaa

SEQ ID NO: 130715 - DNA, 15 bp, Homo sapiens
aacactcagcagtaa

SEQ ID NO: 130716 - DNA, 15 bp, Homo sapiens
aaacactcagcagta

SEQ ID NO: 130717 - DNA, 15 bp, Homo sapiens
aaaacactcagcagt

SEQ ID NO: 130718 - DNA, 15 bp, Homo sapiens
aaaaacactcagcag

SEQ ID NO: 130719 - DNA, 15 bp, Homo sapiens
caaaaacactcagca

SEQ ID NO: 130720 - DNA, 15 bp, Homo sapiens
acaaaaacactcagc

SEQ ID NO: 130721 - DNA, 15 bp, Homo sapiens
aacaaaaacactcag

SEQ ID NO: 130722 - DNA, 15 bp, Homo sapiens
taacaaaaacactca

SEQ ID NO: 130723 - DNA, 15 bp, Homo sapiens
ataacaaaaacactc

SEQ ID NO: 130724 - DNA, 15 bp, Homo sapiens
tataacaaaaacact

SEQ ID NO: 130725 - DNA, 15 bp, Homo sapiens
atataacaaaaacac

SEQ ID NO: 130726 - DNA, 15 bp, Homo sapiens
gatataacaaaaaca

SEQ ID NO: 130727 - DNA, 15 bp, Homo sapiens
agatataacaaaaac

SEQ ID NO: 130728 - DNA, 15 bp, Homo sapiens
gagatataacaaaaa

SEQ ID NO: 130729 - DNA, 15 bp, Homo sapiens
agagatataacaaaa

SEQ ID NO: 130730 - DNA, 15 bp, Homo sapiens
tagagatataacaaa

SEQ ID NO: 130731 - DNA, 15 bp, Homo sapiens
ttagagatataacaa

SEQ ID NO: 130732 - DNA, 15 bp, Homo sapiens
attagagatataaca

SEQ ID NO: 130733 - DNA, 15 bp, Homo sapiens
aattagagatataac

SEQ ID NO: 130734 - DNA, 15 bp, Homo sapiens
gaattagagatataa

SEQ ID NO: 130735 - DNA, 15 bp, Homo sapiens
agaattagagatata

SEQ ID NO: 130736 - DNA, 15 bp, Homo sapiens
aagaattagagatat

SEQ ID NO: 130737 - DNA, 15 bp, Homo sapiens
caagaattagagata

SEQ ID NO: 130738 - DNA, 15 bp, Homo sapiens
tcaagaattagagat

SEQ ID NO: 130739 - DNA, 15 bp, Homo sapiens
gtcaagaattagaga

SEQ ID NO: 130740 - DNA, 15 bp, Homo sapiens
tgtcaagaattagag

SEQ ID NO: 130741 - DNA, 15 bp, Homo sapiens
atgtcaagaattaga

SEQ ID NO: 130742 - DNA, 15 bp, Homo sapiens
gatgtcaagaattag

SEQ ID NO: 130743 - DNA, 15 bp, Homo sapiens
tgatgtcaagaatta

SEQ ID NO: 130744 - DNA, 15 bp, Homo sapiens
ttgatgtcaagaatt

SEQ ID NO: 130745 - DNA, 15 bp, Homo sapiens
attgatgtcaagaat

SEQ ID NO: 130746 - DNA, 15 bp, Homo sapiens
tattgatgtcaagaa

SEQ ID NO: 130747 - DNA, 15 bp, Homo sapiens
ttattgatgtcaaga

SEQ ID NO: 130748 - DNA, 15 bp, Homo sapiens
attattgatgtcaag

SEQ ID NO: 130749 - DNA, 15 bp, Homo sapiens
gattattgatgtcaa

SEQ ID NO: 130750 - DNA, 15 bp, Homo sapiens
agattattgatgtca

SEQ ID NO: 130751 - DNA, 15 bp, Homo sapiens
cagattattgatgtc

SEQ ID NO: 130752 - DNA, 15 bp, Homo sapiens
acagattattgatgt

SEQ ID NO: 130753 - DNA, 15 bp, Homo sapiens
aacagattattgatg

SEQ ID NO: 130754 - DNA, 15 bp, Homo sapiens
taacagattattgat

SEQ ID NO: 130755 - DNA, 15 bp, Homo sapiens
ataacagattattga

SEQ ID NO: 130756 - DNA, 15 bp, Homo sapiens
gataacagattattg

SEQ ID NO: 130757 - DNA, 15 bp, Homo sapiens
agataacagattatt

SEQ ID NO: 130758 - DNA, 15 bp, Homo sapiens
cagataacagattat

SEQ ID NO: 130759 - DNA, 15 bp, Homo sapiens
acagataacagatta

SEQ ID NO: 130760 - DNA, 15 bp, Homo sapiens
tacagataacagatt

SEQ ID NO: 130761 - DNA, 15 bp, Homo sapiens
ctacagataacagat

SEQ ID NO: 130762 - DNA, 15 bp, Homo sapiens
actacagataacaga

SEQ ID NO: 130763 - DNA, 15 bp, Homo sapiens
tactacagataacag

SEQ ID NO: 130764 - DNA, 15 bp, Homo sapiens
ttactacagataaca

SEQ ID NO: 130765 - DNA, 15 bp, Homo sapiens
attactacagataac

SEQ ID NO: 130766 - DNA, 15 bp, Homo sapiens
aattactacagataa

SEQ ID NO: 130767 - DNA, 15 bp, Homo sapiens
aaattactacagata

SEQ ID NO: 130768 - DNA, 15 bp, Homo sapiens
aaaattactacagat

SEQ ID NO: 130769 - DNA, 15 bp, Homo sapiens
gaaaattactacaga

SEQ ID NO: 130770 - DNA, 15 bp, Homo sapiens
agaaaattactacag

SEQ ID NO: 130771 - DNA, 15 bp, Homo sapiens
aagaaaattactaca

SEQ ID NO: 130772 - DNA, 15 bp, Homo sapiens
aaagaaaattactac

SEQ ID NO: 130773 - DNA, 15 bp, Homo sapiens
aaaagaaaattacta

SEQ ID NO: 130774 - DNA, 15 bp, Homo sapiens
aaaaagaaaattact

SEQ ID NO: 130775 - DNA, 15 bp, Homo sapiens
taaaaagaaaattac

SEQ ID NO: 130776 - DNA, 15 bp, Homo sapiens
ttaaaaagaaaatta

SEQ ID NO: 130777 - DNA, 15 bp, Homo sapiens
cttaaaaagaaaatt

SEQ ID NO: 130778 - DNA, 15 bp, Homo sapiens
ccttaaaaagaaaat

SEQ ID NO: 130779 - DNA, 15 bp, Homo sapiens
tccttaaaaagaaaa

SEQ ID NO: 130780 - DNA, 15 bp, Homo sapiens
ctccttaaaaagaaa

SEQ ID NO: 130781 - DNA, 15 bp, Homo sapiens
tctccttaaaaagaa

SEQ ID NO: 130782 - DNA, 15 bp, Homo sapiens
atctccttaaaaaga

SEQ ID NO: 130783 - DNA, 15 bp, Homo sapiens
gatctccttaaaaag

SEQ ID NO: 130784 - DNA, 15 bp, Homo sapiens
tgatctccttaaaaa

SEQ ID NO: 130785 - DNA, 15 bp, Homo sapiens
atgatctccttaaaa

SEQ ID NO: 130786 - DNA, 15 bp, Homo sapiens
aatgatctccttaaa

SEQ ID NO: 130787 - DNA, 15 bp, Homo sapiens
gaatgatctccttaa

SEQ ID NO: 130788 - DNA, 15 bp, Homo sapiens
tgaatgatctcctta

SEQ ID NO: 130789 - DNA, 15 bp, Homo sapiens
ttgaatgatctcctt

SEQ ID NO: 130790 - DNA, 15 bp, Homo sapiens
attgaatgatctcct

SEQ ID NO: 130791 - DNA, 15 bp, Homo sapiens
aattgaatgatctcc

SEQ ID NO: 130792 - DNA, 15 bp, Homo sapiens
aaattgaatgatctc

SEQ ID NO: 130793 - DNA, 15 bp, Homo sapiens
gaaattgaatgatct

SEQ ID NO: 130794 - DNA, 15 bp, Homo sapiens
ggaaattgaatgatc

SEQ ID NO: 130795 - DNA, 15 bp, Homo sapiens
aggaaattgaatgat

SEQ ID NO: 130796 - DNA, 15 bp, Homo sapiens
caggaaattgaatga

SEQ ID NO: 130797 - DNA, 15 bp, Homo sapiens
tcaggaaattgaatg

SEQ ID NO: 130798 - DNA, 15 bp, Homo sapiens
atcaggaaattgaat

SEQ ID NO: 130799 - DNA, 15 bp, Homo sapiens
tatcaggaaattgaa

SEQ ID NO: 130800 - DNA, 15 bp, Homo sapiens
ttatcaggaaattga

SEQ ID NO: 130801 - DNA, 15 bp, Homo sapiens
attatcaggaaattg

SEQ ID NO: 130802 - DNA, 15 bp, Homo sapiens
aattatcaggaaatt

SEQ ID NO: 130803 - DNA, 15 bp, Homo sapiens
gaattatcaggaaat

SEQ ID NO: 130804 - DNA, 15 bp, Homo sapiens
agaattatcaggaaa

SEQ ID NO: 130805 - DNA, 15 bp, Homo sapiens
cagaattatcaggaa

SEQ ID NO: 130806 - DNA, 15 bp, Homo sapiens
acagaattatcagga

SEQ ID NO: 130807 - DNA, 15 bp, Homo sapiens
cacagaattatcagg

SEQ ID NO: 130808 - DNA, 15 bp, Homo sapiens
acacagaattatcag

SEQ ID NO: 130809 - DNA, 15 bp, Homo sapiens
tacacagaattatca

SEQ ID NO: 130810 - DNA, 15 bp, Homo sapiens
ttacacagaattatc

SEQ ID NO: 130811 - DNA, 15 bp, Homo sapiens
gttacacagaattat

SEQ ID NO: 130812 - DNA, 15 bp, Homo sapiens
tgttacacagaatta

SEQ ID NO: 130813 - DNA, 15 bp, Homo sapiens
ctgttacacagaatt

SEQ ID NO: 130814 - DNA, 15 bp, Homo sapiens
actgttacacagaat

SEQ ID NO: 130815 - DNA, 15 bp, Homo sapiens
cactgttacacagaa

SEQ ID NO: 130816 - DNA, 15 bp, Homo sapiens
acactgttacacaga

SEQ ID NO: 130817 - DNA, 15 bp, Homo sapiens
aacactgttacacag

SEQ ID NO: 130818 - DNA, 15 bp, Homo sapiens
aaacactgttacaca

SEQ ID NO: 130819 - DNA, 15 bp, Homo sapiens
taaacactgttacac

SEQ ID NO: 130820 - DNA, 15 bp, Homo sapiens
gtaaacactgttaca

SEQ ID NO: 130821 - DNA, 15 bp, Homo sapiens
agtaaacactgttac

SEQ ID NO: 130822 - DNA, 15 bp, Homo sapiens
cagtaaacactgtta

SEQ ID NO: 130823 - DNA, 15 bp, Homo sapiens
acagtaaacactgtt

SEQ ID NO: 130824 - DNA, 15 bp, Homo sapiens
tacagtaaacactgt

SEQ ID NO: 130825 - DNA, 15 bp, Homo sapiens
ttacagtaaacactg

SEQ ID NO: 130826 - DNA, 15 bp, Homo sapiens
tttacagtaaacact

SEQ ID NO: 130827 - DNA, 15 bp, Homo sapiens
atttacagtaaacac

SEQ ID NO: 130828 - DNA, 15 bp, Homo sapiens
aatttacagtaaaca

SEQ ID NO: 130829 - DNA, 15 bp, Homo sapiens
aaatttacagtaaac

SEQ ID NO: 130830 - DNA, 15 bp, Homo sapiens
taaatttacagtaaa

SEQ ID NO: 130831 - DNA, 15 bp, Homo sapiens
ctaaatttacagtaa

SEQ ID NO: 130832 - DNA, 15 bp, Homo sapiens
tctaaatttacagta

SEQ ID NO: 130833 - DNA, 15 bp, Homo sapiens
ttctaaatttacagt

SEQ ID NO: 130834 - DNA, 15 bp, Homo sapiens
gttctaaatttacag

SEQ ID NO: 130835 - DNA, 15 bp, Homo sapiens
agttctaaatttaca

SEQ ID NO: 130836 - DNA, 15 bp, Homo sapiens
cagttctaaatttac

SEQ ID NO: 130837 - DNA, 15 bp, Homo sapiens
tcagttctaaattta

SEQ ID NO: 130838 - DNA, 15 bp, Homo sapiens
ttcagttctaaattt

SEQ ID NO: 130839 - DNA, 15 bp, Homo sapiens
tttcagttctaaatt

SEQ ID NO: 130840 - DNA, 15 bp, Homo sapiens
atttcagttctaaat

SEQ ID NO: 130841 - DNA, 15 bp, Homo sapiens
aatttcagttctaaa

SEQ ID NO: 130842 - DNA, 15 bp, Homo sapiens
caatttcagttctaa

SEQ ID NO: 130843 - DNA, 15 bp, Homo sapiens
tcaatttcagttcta

SEQ ID NO: 130844 - DNA, 15 bp, Homo sapiens
ttcaatttcagttct

SEQ ID NO: 130845 - DNA, 15 bp, Homo sapiens
tttcaatttcagttc

SEQ ID NO: 130846 - DNA, 15 bp, Homo sapiens
atttcaatttcagtt

SEQ ID NO: 130847 - DNA, 15 bp, Homo sapiens
tatttcaatttcagt

SEQ ID NO: 130848 - DNA, 15 bp, Homo sapiens
atatttcaatttcag

SEQ ID NO: 130849 - DNA, 15 bp, Homo sapiens
aatatttcaatttca

SEQ ID NO: 130850 - DNA, 15 bp, Homo sapiens
gaatatttcaatttc

SEQ ID NO: 130851 - DNA, 15 bp, Homo sapiens
ggaatatttcaattt

SEQ ID NO: 130852 - DNA, 15 bp, Homo sapiens
tggaatatttcaatt

SEQ ID NO: 130853 - DNA, 15 bp, Homo sapiens
ctggaatatttcaat

SEQ ID NO: 130854 - DNA, 15 bp, Homo sapiens
actggaatatttcaa

SEQ ID NO: 130855 - DNA, 15 bp, Homo sapiens
tactggaatatttca

SEQ ID NO: 130856 - DNA, 15 bp, Homo sapiens
atactggaatatttc

SEQ ID NO: 130857 - DNA, 15 bp, Homo sapiens
tatactggaatattt

SEQ ID NO: 130858 - DNA, 15 bp, Homo sapiens
atatactggaatatt

SEQ ID NO: 130859 - DNA, 15 bp, Homo sapiens
aatatactggaatat

SEQ ID NO: 130860 - DNA, 15 bp, Homo sapiens
aaatatactggaata

SEQ ID NO: 130861 - DNA, 15 bp, Homo sapiens
aaaatatactggaat

SEQ ID NO: 130862 - DNA, 15 bp, Homo sapiens
aaaaatatactggaa

SEQ ID NO: 130863 - DNA, 15 bp, Homo sapiens
taaaaatatactgga

SEQ ID NO: 130864 - DNA, 15 bp, Homo sapiens
ataaaaatatactgg

SEQ ID NO: 130865 - DNA, 15 bp, Homo sapiens
gataaaaatatactg

SEQ ID NO: 130866 - DNA, 15 bp, Homo sapiens
agataaaaatatact

SEQ ID NO: 130867 - DNA, 15 bp, Homo sapiens
cagataaaaatatac

SEQ ID NO: 130868 - DNA, 15 bp, Homo sapiens
tcagataaaaatata

SEQ ID NO: 130869 - DNA, 15 bp, Homo sapiens
atcagataaaaatat

SEQ ID NO: 130870 - DNA, 15 bp, Homo sapiens
catcagataaaaata

SEQ ID NO: 130871 - DNA, 15 bp, Homo sapiens
tcatcagataaaaat

SEQ ID NO: 130872 - DNA, 15 bp, Homo sapiens
ttcatcagataaaaa

SEQ ID NO: 130873 - DNA, 15 bp, Homo sapiens
tttcatcagataaaa

SEQ ID NO: 130874 - DNA, 15 bp, Homo sapiens
ttttcatcagataaa

SEQ ID NO: 130875 - DNA, 15 bp, Homo sapiens
cttttcatcagataa

SEQ ID NO: 130876 - DNA, 15 bp, Homo sapiens
ccttttcatcagata

SEQ ID NO: 130877 - DNA, 15 bp, Homo sapiens
tccttttcatcagat

SEQ ID NO: 130878 - DNA, 15 bp, Homo sapiens
ctccttttcatcaga

SEQ ID NO: 130879 - DNA, 15 bp, Homo sapiens
tctccttttcatcag

SEQ ID NO: 130880 - DNA, 15 bp, Homo sapiens
ttctccttttcatca

SEQ ID NO: 130881 - DNA, 15 bp, Homo sapiens
tttctccttttcatc

SEQ ID NO: 130882 - DNA, 15 bp, Homo sapiens
ctttctccttttcat

SEQ ID NO: 130883 - DNA, 15 bp, Homo sapiens
cctttctccttttca

SEQ ID NO: 130884 - DNA, 15 bp, Homo sapiens
acctttctccttttc

SEQ ID NO: 130885 - DNA, 15 bp, Homo sapiens
aacctttctcctttt

SEQ ID NO: 130886 - DNA, 15 bp, Homo sapiens
aaacctttctccttt

SEQ ID NO: 130887 - DNA, 15 bp, Homo sapiens
aaaacctttctcctt

SEQ ID NO: 130888 - DNA, 15 bp, Homo sapiens
taaaacctttctcct

SEQ ID NO: 130889 - DNA, 15 bp, Homo sapiens
ataaaacctttctcc

SEQ ID NO: 130890 - DNA, 15 bp, Homo sapiens
aataaaacctttctc

SEQ ID NO: 130891 - DNA, 15 bp, Homo sapiens
taataaaacctttct

SEQ ID NO: 130892 - DNA, 15 bp, Homo sapiens
ttaataaaacctttc

SEQ ID NO: 130893 - DNA, 15 bp, Homo sapiens
cttaataaaaccttt

SEQ ID NO: 130894 - DNA, 15 bp, Homo sapiens
acttaataaaacctt

SEQ ID NO: 130895 - DNA, 15 bp, Homo sapiens
tacttaataaaacct

SEQ ID NO: 130896 - DNA, 15 bp, Homo sapiens
ttacttaataaaacc

SEQ ID NO: 130897 - DNA, 15 bp, Homo sapiens
tttacttaataaaac

SEQ ID NO: 130898 - DNA, 15 bp, Homo sapiens
ttttacttaataaaa

SEQ ID NO: 130899 - DNA, 15 bp, Homo sapiens
attttacttaataaa

SEQ ID NO: 130900 - DNA, 15 bp, Homo sapiens
cattttacttaataa

SEQ ID NO: 130901 - DNA, 15 bp, Homo sapiens
acattttacttaata

SEQ ID NO: 130902 - DNA, 15 bp, Homo sapiens
gacattttacttaat

SEQ ID NO: 130903 - DNA, 15 bp, Homo sapiens
tgacattttacttaa

SEQ ID NO: 130904 - DNA, 15 bp, Homo sapiens
ttgacattttactta

SEQ ID NO: 130905 - DNA, 15 bp, Homo sapiens
tttgacattttactt

SEQ ID NO: 130906 - DNA, 15 bp, Homo sapiens
atttgacattttact

SEQ ID NO: 130907 - DNA, 15 bp, Homo sapiens
aatttgacattttac

SEQ ID NO: 130908 - DNA, 15 bp, Homo sapiens
taatttgacatttta

SEQ ID NO: 130909 - DNA, 15 bp, Homo sapiens
ataatttgacatttt

SEQ ID NO: 130910 - DNA, 15 bp, Homo sapiens
aataatttgacattt

SEQ ID NO: 130911 - DNA, 15 bp, Homo sapiens
aaataatttgacatt

SEQ ID NO: 130912 - DNA, 15 bp, Homo sapiens
aaaataatttgacat

SEQ ID NO: 130913 - DNA, 15 bp, Homo sapiens
aaaaataatttgaca

SEQ ID NO: 130914 - DNA, 15 bp, Homo sapiens
taaaaataatttgac

SEQ ID NO: 130915 - DNA, 15 bp, Homo sapiens
gtaaaaataatttga

SEQ ID NO: 130916 - DNA, 15 bp, Homo sapiens
agtaaaaataatttg

SEQ ID NO: 130917 - DNA, 15 bp, Homo sapiens
cagtaaaaataattt

SEQ ID NO: 130918 - DNA, 15 bp, Homo sapiens
acagtaaaaataatt

SEQ ID NO: 130919 - DNA, 15 bp, Homo sapiens
aacagtaaaaataat

SEQ ID NO: 130920 - DNA, 15 bp, Homo sapiens
taacagtaaaaataa

SEQ ID NO: 130921 - DNA, 15 bp, Homo sapiens
ataacagtaaaaata

SEQ ID NO: 130922 - DNA, 15 bp, Homo sapiens
gataacagtaaaaat

SEQ ID NO: 130923 - DNA, 15 bp, Homo sapiens
agataacagtaaaaa

SEQ ID NO: 130924 - DNA, 15 bp, Homo sapiens
aagataacagtaaaa

SEQ ID NO: 130925 - DNA, 15 bp, Homo sapiens
caagataacagtaaa

SEQ ID NO: 130926 - DNA, 15 bp, Homo sapiens
acaagataacagtaa

SEQ ID NO: 130927 - DNA, 15 bp, Homo sapiens
tacaagataacagta

SEQ ID NO: 130928 - DNA, 15 bp, Homo sapiens
atacaagataacagt

SEQ ID NO: 130929 - DNA, 15 bp, Homo sapiens
tatacaagataacag

SEQ ID NO: 130930 - DNA, 15 bp, Homo sapiens
atatacaagataaca

SEQ ID NO: 130931 - DNA, 15 bp, Homo sapiens
aatatacaagataac

SEQ ID NO: 130932 - DNA, 15 bp, Homo sapiens
aaatatacaagataa

SEQ ID NO: 130933 - DNA, 15 bp, Homo sapiens
aaaatatacaagata

SEQ ID NO: 130934 - DNA, 15 bp, Homo sapiens
taaaatatacaagat

SEQ ID NO: 130935 - DNA, 15 bp, Homo sapiens
ttaaaatatacaaga

SEQ ID NO: 130936 - DNA, 15 bp, Homo sapiens
tttaaaatatacaag

SEQ ID NO: 130937 - DNA, 15 bp, Homo sapiens
atttaaaatatacaa

SEQ ID NO: 130938 - DNA, 15 bp, Homo sapiens
tatttaaaatataca

SEQ ID NO: 130939 - DNA, 15 bp, Homo sapiens
ctatttaaaatatac

SEQ ID NO: 130940 - DNA, 15 bp, Homo sapiens
cctatttaaaatata

SEQ ID NO: 130941 - DNA, 15 bp, Homo sapiens
tcctatttaaaatat

SEQ ID NO: 130942 - DNA, 15 bp, Homo sapiens
ttcctatttaaaata

SEQ ID NO: 130943 - DNA, 15 bp, Homo sapiens
cttcctatttaaaat

SEQ ID NO: 130944 - DNA, 15 bp, Homo sapiens
acttcctatttaaaa

SEQ ID NO: 130945 - DNA, 15 bp, Homo sapiens
tacttcctatttaaa

SEQ ID NO: 130946 - DNA, 15 bp, Homo sapiens
ctacttcctatttaa

SEQ ID NO: 130947 - DNA, 15 bp, Homo sapiens
tctacttcctattta

SEQ ID NO: 130948 - DNA, 15 bp, Homo sapiens
gtctacttcctattt

SEQ ID NO: 130949 - DNA, 15 bp, Homo sapiens
ggtctacttcctatt

SEQ ID NO: 130950 - DNA, 15 bp, Homo sapiens
tggtctacttcctat

SEQ ID NO: 130951 - DNA, 15 bp, Homo sapiens
ctggtctacttccta

SEQ ID NO: 130952 - DNA, 15 bp, Homo sapiens
actggtctacttcct

SEQ ID NO: 130953 - DNA, 15 bp, Homo sapiens
aactggtctacttcc

SEQ ID NO: 130954 - DNA, 15 bp, Homo sapiens
caactggtctacttc

SEQ ID NO: 130955 - DNA, 15 bp, Homo sapiens
gcaactggtctactt

SEQ ID NO: 130956 - DNA, 15 bp, Homo sapiens
cgcaactggtctact

SEQ ID NO: 130957 - DNA, 15 bp, Homo sapiens
acgcaactggtctac

SEQ ID NO: 130958 - DNA, 15 bp, Homo sapiens
aacgcaactggtcta

SEQ ID NO: 130959 - DNA, 15 bp, Homo sapiens
aaacgcaactggtct

SEQ ID NO: 130960 - DNA, 15 bp, Homo sapiens
caaacgcaactggtc

SEQ ID NO: 130961 - DNA, 15 bp, Homo sapiens
ccaaacgcaactggt

SEQ ID NO: 130962 - DNA, 15 bp, Homo sapiens
tccaaacgcaactgg

SEQ ID NO: 130963 - DNA, 15 bp, Homo sapiens
ctccaaacgcaactg

SEQ ID NO: 130964 - DNA, 15 bp, Homo sapiens
tctccaaacgcaact

SEQ ID NO: 130965 - DNA, 15 bp, Homo sapiens
ctctccaaacgcaac

SEQ ID NO: 130966 - DNA, 15 bp, Homo sapiens
tctctccaaacgcaa

SEQ ID NO: 130967 - DNA, 15 bp, Homo sapiens
atctctccaaacgca

SEQ ID NO: 130968 - DNA, 15 bp, Homo sapiens
aatctctccaaacgc

SEQ ID NO: 130969 - DNA, 15 bp, Homo sapiens
taatctctccaaacg

SEQ ID NO: 130970 - DNA, 15 bp, Homo sapiens
gtaatctctccaaac

SEQ ID NO: 130971 - DNA, 15 bp, Homo sapiens
tgtaatctctccaaa

SEQ ID NO: 130972 - DNA, 15 bp, Homo sapiens
ttgtaatctctccaa

SEQ ID NO: 130973 - DNA, 15 bp, Homo sapiens
tttgtaatctctcca

SEQ ID NO: 130974 - DNA, 15 bp, Homo sapiens
atttgtaatctctcc

SEQ ID NO: 130975 - DNA, 15 bp, Homo sapiens
aatttgtaatctctc

SEQ ID NO: 130976 - DNA, 15 bp, Homo sapiens
caatttgtaatctct

SEQ ID NO: 130977 - DNA, 15 bp, Homo sapiens
tcaatttgtaatctc

SEQ ID NO: 130978 - DNA, 15 bp, Homo sapiens
atcaatttgtaatct

SEQ ID NO: 130979 - DNA, 15 bp, Homo sapiens
catcaatttgtaatc

SEQ ID NO: 130980 - DNA, 15 bp, Homo sapiens
tcatcaatttgtaat

SEQ ID NO: 130981 - DNA, 15 bp, Homo sapiens
ctcatcaatttgtaa

SEQ ID NO: 130982 - DNA, 15 bp, Homo sapiens
gctcatcaatttgta

SEQ ID NO: 130983 - DNA, 15 bp, Homo sapiens
tgctcatcaatttgt

SEQ ID NO: 130984 - DNA, 15 bp, Homo sapiens
ctgctcatcaatttg

SEQ ID NO: 130985 - DNA, 15 bp, Homo sapiens
actgctcatcaattt

SEQ ID NO: 130986 - DNA, 15 bp, Homo sapiens
aactgctcatcaatt

SEQ ID NO: 130987 - DNA, 15 bp, Homo sapiens
caactgctcatcaat

SEQ ID NO: 130988 - DNA, 15 bp, Homo sapiens
gcaactgctcatcaa

SEQ ID NO: 130989 - DNA, 15 bp, Homo sapiens
cgcaactgctcatca

SEQ ID NO: 130990 - DNA, 15 bp, Homo sapiens
tcgcaactgctcatc

SEQ ID NO: 130991 - DNA, 15 bp, Homo sapiens
gtcgcaactgctcat

SEQ ID NO: 130992 - DNA, 15 bp, Homo sapiens
tgtcgcaactgctca

SEQ ID NO: 130993 - DNA, 15 bp, Homo sapiens
ctgtcgcaactgctc

SEQ ID NO: 130994 - DNA, 15 bp, Homo sapiens
tctgtcgcaactgct

SEQ ID NO: 130995 - DNA, 15 bp, Homo sapiens
atctgtcgcaactgc

SEQ ID NO: 130996 - DNA, 15 bp, Homo sapiens
aatctgtcgcaactg

SEQ ID NO: 130997 - DNA, 15 bp, Homo sapiens
caatctgtcgcaact

SEQ ID NO: 130998 - DNA, 15 bp, Homo sapiens
ccaatctgtcgcaac

SEQ ID NO: 130999 - DNA, 15 bp, Homo sapiens
tccaatctgtcgcaa

SEQ ID NO: 131000 - DNA, 15 bp, Homo sapiens
ctccaatctgtcgca

SEQ ID NO: 131001 - DNA, 15 bp, Homo sapiens
gctccaatctgtcgc

SEQ ID NO: 131002 - DNA, 15 bp, Homo sapiens
agctccaatctgtcg

SEQ ID NO: 131003 - DNA, 15 bp, Homo sapiens
tagctccaatctgtc

SEQ ID NO: 131004 - DNA, 15 bp, Homo sapiens
ctagctccaatctgt

SEQ ID NO: 131005 - DNA, 15 bp, Homo sapiens
actagctccaatctg

SEQ ID NO: 131006 - DNA, 15 bp, Homo sapiens
aactagctccaatct

SEQ ID NO: 131007 - DNA, 15 bp, Homo sapiens
gaactagctccaatc

SEQ ID NO: 131008 - DNA, 15 bp, Homo sapiens
agaactagctccaat

SEQ ID NO: 131009 - DNA, 15 bp, Homo sapiens
tagaactagctccaa

SEQ ID NO: 131010 - DNA, 15 bp, Homo sapiens
ctagaactagctcca

SEQ ID NO: 131011 - DNA, 15 bp, Homo sapiens
tctagaactagctcc

SEQ ID NO: 131012 - DNA, 15 bp, Homo sapiens
gtctagaactagctc

SEQ ID NO: 131013 - DNA, 15 bp, Homo sapiens
ggtctagaactagct

SEQ ID NO: 131014 - DNA, 15 bp, Homo sapiens
tggtctagaactagc

SEQ ID NO: 131015 - DNA, 15 bp, Homo sapiens
gtggtctagaactag

SEQ ID NO: 131016 - DNA, 15 bp, Homo sapiens
ggtggtctagaacta

SEQ ID NO: 131017 - DNA, 15 bp, Homo sapiens
tggtggtctagaact

SEQ ID NO: 131018 - DNA, 15 bp, Homo sapiens
gtggtggtctagaac

SEQ ID NO: 131019 - DNA, 15 bp, Homo sapiens
ggtggtggtctagaa

SEQ ID NO: 131020 - DNA, 15 bp, Homo sapiens
tggtggtggtctaga

SEQ ID NO: 131021 - DNA, 15 bp, Homo sapiens
ttggtggtggtctag

SEQ ID NO: 131022 - DNA, 15 bp, Homo sapiens
tttggtggtggtcta

SEQ ID NO: 131023 - DNA, 15 bp, Homo sapiens
atttggtggtggtct

SEQ ID NO: 131024 - DNA, 15 bp, Homo sapiens
gatttggtggtggtc

SEQ ID NO: 131025 - DNA, 15 bp, Homo sapiens
cgatttggtggtggt

SEQ ID NO: 131026 - DNA, 15 bp, Homo sapiens
acgatttggtggtgg

SEQ ID NO: 131027 - DNA, 15 bp, Homo sapiens
tacgatttggtggtg

SEQ ID NO: 131028 - DNA, 15 bp, Homo sapiens
gtacgatttggtggt

SEQ ID NO: 131029 - DNA, 15 bp, Homo sapiens
tgtacgatttggtgg

SEQ ID NO: 131030 - DNA, 15 bp, Homo sapiens
ctgtacgatttggtg

SEQ ID NO: 131031 - DNA, 15 bp, Homo sapiens
tctgtacgatttggt

SEQ ID NO: 131032 - DNA, 15 bp, Homo sapiens
atctgtacgatttgg

SEQ ID NO: 131033 - DNA, 15 bp, Homo sapiens
tatctgtacgatttg

SEQ ID NO: 131034 - DNA, 15 bp, Homo sapiens
ttatctgtacgattt

SEQ ID NO: 131035 - DNA, 15 bp, Homo sapiens
cttatctgtacgatt

SEQ ID NO: 131036 - DNA, 15 bp, Homo sapiens
ccttatctgtacgat

SEQ ID NO: 131037 - DNA, 15 bp, Homo sapiens
tccttatctgtacga

SEQ ID NO: 131038 - DNA, 15 bp, Homo sapiens
ttccttatctgtacg

SEQ ID NO: 131039 - DNA, 15 bp, Homo sapiens
tttccttatctgtac

SEQ ID NO: 131040 - DNA, 15 bp, Homo sapiens
ttttccttatctgta

SEQ ID NO: 131041 - DNA, 15 bp, Homo sapiens
tttttccttatctgt

SEQ ID NO: 131042 - DNA, 15 bp, Homo sapiens
ttttttccttatctg

SEQ ID NO: 131043 - DNA, 15 bp, Homo sapiens
cttttttccttatct

SEQ ID NO: 131044 - DNA, 15 bp, Homo sapiens
gcttttttccttatc

SEQ ID NO: 131045 - DNA, 15 bp, Homo sapiens
agcttttttccttat

SEQ ID NO: 131046 - DNA, 15 bp, Homo sapiens
tagcttttttcctta

SEQ ID NO: 131047 - DNA, 15 bp, Homo sapiens
atagcttttttcctt

SEQ ID NO: 131048 - DNA, 15 bp, Homo sapiens
catagcttttttcct

SEQ ID NO: 131049 - DNA, 15 bp, Homo sapiens
acatagcttttttcc

SEQ ID NO: 131050 - DNA, 15 bp, Homo sapiens
cacatagcttttttc

SEQ ID NO: 131051 - DNA, 15 bp, Homo sapiens
tcacatagctttttt

SEQ ID NO: 131052 - DNA, 15 bp, Homo sapiens
gtcacatagcttttt

SEQ ID NO: 131053 - DNA, 15 bp, Homo sapiens
agtcacatagctttt

SEQ ID NO: 131054 - DNA, 15 bp, Homo sapiens
cagtcacatagcttt

SEQ ID NO: 131055 - DNA, 15 bp, Homo sapiens
tcagtcacatagctt

SEQ ID NO: 131056 - DNA, 15 bp, Homo sapiens
atcagtcacatagct

SEQ ID NO: 131057 - DNA, 15 bp, Homo sapiens
catcagtcacatagc

SEQ ID NO: 131058 - DNA, 15 bp, Homo sapiens
tcatcagtcacatag

SEQ ID NO: 131059 - DNA, 15 bp, Homo sapiens
atcatcagtcacata

SEQ ID NO: 131060 - DNA, 15 bp, Homo sapiens
catcatcagtcacat

SEQ ID NO: 131061 - DNA, 15 bp, Homo sapiens
ccatcatcagtcaca

SEQ ID NO: 131062 - DNA, 15 bp, Homo sapiens
accatcatcagtcac

SEQ ID NO: 131063 - DNA, 15 bp, Homo sapiens
gaccatcatcagtca

SEQ ID NO: 131064 - DNA, 15 bp, Homo sapiens
tgaccatcatcagtc

SEQ ID NO: 131065 - DNA, 15 bp, Homo sapiens
ttgaccatcatcagt

SEQ ID NO: 131066 - DNA, 15 bp, Homo sapiens
cttgaccatcatcag

SEQ ID NO: 131067 - DNA, 15 bp, Homo sapiens
ccttgaccatcatca

SEQ ID NO: 131068 - DNA, 15 bp, Homo sapiens
tccttgaccatcatc

SEQ ID NO: 131069 - DNA, 15 bp, Homo sapiens
ttccttgaccatcat

SEQ ID NO: 131070 - DNA, 15 bp, Homo sapiens
attccttgaccatca

SEQ ID NO: 131071 - DNA, 15 bp, Homo sapiens
cattccttgaccatc

SEQ ID NO: 131072 - DNA, 15 bp, Homo sapiens
ccattccttgaccat

SEQ ID NO: 131073 - DNA, 15 bp, Homo sapiens
cccattccttgacca

SEQ ID NO: 131074 - DNA, 15 bp, Homo sapiens
acccattccttgacc

SEQ ID NO: 131075 - DNA, 15 bp, Homo sapiens
gacccattccttgac

SEQ ID NO: 131076 - DNA, 15 bp, Homo sapiens
cgacccattccttga

SEQ ID NO: 131077 - DNA, 15 bp, Homo sapiens
tcgacccattccttg

SEQ ID NO: 131078 - DNA, 15 bp, Homo sapiens
ctcgacccattcctt

SEQ ID NO: 131079 - DNA, 15 bp, Homo sapiens
cctcgacccattcct

SEQ ID NO: 131080 - DNA, 15 bp, Homo sapiens
acctcgacccattcc

SEQ ID NO: 131081 - DNA, 15 bp, Homo sapiens
tacctcgacccattc

SEQ ID NO: 131082 - DNA, 15 bp, Homo sapiens
ctacctcgacccatt

SEQ ID NO: 131083 - DNA, 15 bp, Homo sapiens
actacctcgacccat

SEQ ID NO: 131084 - DNA, 15 bp, Homo sapiens
tactacctcgaccca

SEQ ID NO: 131085 - DNA, 15 bp, Homo sapiens
ctactacctcgaccc

SEQ ID NO: 131086 - DNA, 15 bp, Homo sapiens
tctactacctcgacc

SEQ ID NO: 131087 - DNA, 15 bp, Homo sapiens
gtctactacctcgac

SEQ ID NO: 131088 - DNA, 15 bp, Homo sapiens
ggtctactacctcga

SEQ ID NO: 131089 - DNA, 15 bp, Homo sapiens
aggtctactacctcg

SEQ ID NO: 131090 - DNA, 15 bp, Homo sapiens
aaggtctactacctc

SEQ ID NO: 131091 - DNA, 15 bp, Homo sapiens
taaggtctactacct

SEQ ID NO: 131092 - DNA, 15 bp, Homo sapiens
gtaaggtctactacc

SEQ ID NO: 131093 - DNA, 15 bp, Homo sapiens
tgtaaggtctactac

SEQ ID NO: 131094 - DNA, 15 bp, Homo sapiens
ctgtaaggtctacta

SEQ ID NO: 131095 - DNA, 15 bp, Homo sapiens
tctgtaaggtctact

SEQ ID NO: 131096 - DNA, 15 bp, Homo sapiens
ttctgtaaggtctac

SEQ ID NO: 131097 - DNA, 15 bp, Homo sapiens
tttctgtaaggtcta

SEQ ID NO: 131098 - DNA, 15 bp, Homo sapiens
atttctgtaaggtct

SEQ ID NO: 131099 - DNA, 15 bp, Homo sapiens
tatttctgtaaggtc

SEQ ID NO: 131100 - DNA, 15 bp, Homo sapiens
ctatttctgtaaggt

SEQ ID NO: 131101 - DNA, 15 bp, Homo sapiens
cctatttctgtaagg

SEQ ID NO: 131102 - DNA, 15 bp, Homo sapiens
ccctatttctgtaag

SEQ ID NO: 131103 - DNA, 15 bp, Homo sapiens
cccctatttctgtaa

SEQ ID NO: 131104 - DNA, 15 bp, Homo sapiens
ccccctatttctgta

SEQ ID NO: 131105 - DNA, 15 bp, Homo sapiens
gccccctatttctgt

SEQ ID NO: 131106 - DNA, 15 bp, Homo sapiens
tgccccctatttctg

SEQ ID NO: 131107 - DNA, 15 bp, Homo sapiens
gtgccccctatttct

SEQ ID NO: 131108 - DNA, 15 bp, Homo sapiens
cgtgccccctatttc

SEQ ID NO: 131109 - DNA, 15 bp, Homo sapiens
ccgtgccccctattt

SEQ ID NO: 131110 - DNA, 15 bp, Homo sapiens
gccgtgccccctatt

SEQ ID NO: 131111 - DNA, 15 bp, Homo sapiens
tgccgtgccccctat

SEQ ID NO: 131112 - DNA, 15 bp, Homo sapiens
ctgccgtgcccccta

SEQ ID NO: 131113 - DNA, 15 bp, Homo sapiens
tctgccgtgccccct

SEQ ID NO: 131114 - DNA, 15 bp, Homo sapiens
gtctgccgtgccccc

SEQ ID NO: 131115 - DNA, 15 bp, Homo sapiens
cgtctgccgtgcccc

SEQ ID NO: 131116 - DNA, 15 bp, Homo sapiens
gcgtctgccgtgccc

SEQ ID NO: 131117 - DNA, 15 bp, Homo sapiens
cgcgtctgccgtgcc

SEQ ID NO: 131118 - DNA, 15 bp, Homo sapiens
ccgcgtctgccgtgc

SEQ ID NO: 131119 - DNA, 15 bp, Homo sapiens
accgcgtctgccgtg

SEQ ID NO: 131120 - DNA, 15 bp, Homo sapiens
gaccgcgtctgccgt

SEQ ID NO: 131121 - DNA, 15 bp, Homo sapiens
ggaccgcgtctgccg

SEQ ID NO: 131122 - DNA, 15 bp, Homo sapiens
aggaccgcgtctgcc

SEQ ID NO: 131123 - DNA, 15 bp, Homo sapiens
caggaccgcgtctgc

SEQ ID NO: 131124 - DNA, 15 bp, Homo sapiens
ccaggaccgcgtctg

SEQ ID NO: 131125 - DNA, 15 bp, Homo sapiens
tccaggaccgcgtct

SEQ ID NO: 131126 - DNA, 15 bp, Homo sapiens
atccaggaccgcgtc

SEQ ID NO: 131127 - DNA, 15 bp, Homo sapiens
tatccaggaccgcgt

SEQ ID NO: 131128 - DNA, 15 bp, Homo sapiens
atatccaggaccgcg

SEQ ID NO: 131129 - DNA, 15 bp, Homo sapiens
tatatccaggaccgc

SEQ ID NO: 131130 - DNA, 15 bp, Homo sapiens
gtatatccaggaccg

SEQ ID NO: 131131 - DNA, 15 bp, Homo sapiens
agtatatccaggacc

SEQ ID NO: 131132 - DNA, 15 bp, Homo sapiens
aagtatatccaggac

SEQ ID NO: 131133 - DNA, 15 bp, Homo sapiens
gaagtatatccagga

SEQ ID NO: 131134 - DNA, 15 bp, Homo sapiens
tgaagtatatccagg

SEQ ID NO: 131135 - DNA, 15 bp, Homo sapiens
ctgaagtatatccag

SEQ ID NO: 131136 - DNA, 15 bp, Homo sapiens
cctgaagtatatcca

SEQ ID NO: 131137 - DNA, 15 bp, Homo sapiens
acctgaagtatatcc

SEQ ID NO: 131138 - DNA, 15 bp, Homo sapiens
tacctgaagtatatc

SEQ ID NO: 131139 - DNA, 15 bp, Homo sapiens
gtacctgaagtatat

SEQ ID NO: 131140 - DNA, 15 bp, Homo sapiens
tgtacctgaagtata

SEQ ID NO: 131141 - DNA, 15 bp, Homo sapiens
ttgtacctgaagtat

SEQ ID NO: 131142 - DNA, 15 bp, Homo sapiens
tttgtacctgaagta

SEQ ID NO: 131143 - DNA, 15 bp, Homo sapiens
gtttgtacctgaagt

SEQ ID NO: 131144 - DNA, 15 bp, Homo sapiens
agtttgtacctgaag

SEQ ID NO: 131145 - DNA, 15 bp, Homo sapiens
tagtttgtacctgaa

SEQ ID NO: 131146 - DNA, 15 bp, Homo sapiens
ttagtttgtacctga

SEQ ID NO: 131147 - DNA, 15 bp, Homo sapiens
cttagtttgtacctg

SEQ ID NO: 131148 - DNA, 15 bp, Homo sapiens
gcttagtttgtacct

SEQ ID NO: 131149 - DNA, 15 bp, Homo sapiens
tgcttagtttgtacc

SEQ ID NO: 131150 - DNA, 15 bp, Homo sapiens
atgcttagtttgtac

SEQ ID NO: 131151 - DNA, 15 bp, Homo sapiens
aatgcttagtttgta

SEQ ID NO: 131152 - DNA, 15 bp, Homo sapiens
aaatgcttagtttgt

SEQ ID NO: 131153 - DNA, 15 bp, Homo sapiens
aaaatgcttagtttg

SEQ ID NO: 131154 - DNA, 15 bp, Homo sapiens
taaaatgcttagttt

SEQ ID NO: 131155 - DNA, 15 bp, Homo sapiens
gtaaaatgcttagtt

SEQ ID NO: 131156 - DNA, 15 bp, Homo sapiens
agtaaaatgcttagt

SEQ ID NO: 131157 - DNA, 15 bp, Homo sapiens
gagtaaaatgcttag

SEQ ID NO: 131158 - DNA, 15 bp, Homo sapiens
tgagtaaaatgctta

SEQ ID NO: 131159 - DNA, 15 bp, Homo sapiens
ctgagtaaaatgctt

SEQ ID NO: 131160 - DNA, 15 bp, Homo sapiens
actgagtaaaatgct

SEQ ID NO: 131161 - DNA, 15 bp, Homo sapiens
tactgagtaaaatgc

SEQ ID NO: 131162 - DNA, 15 bp, Homo sapiens
ttactgagtaaaatg

SEQ ID NO: 131163 - DNA, 15 bp, Homo sapiens
gttactgagtaaaat

SEQ ID NO: 131164 - DNA, 15 bp, Homo sapiens
agttactgagtaaaa

SEQ ID NO: 131165 - DNA, 15 bp, Homo sapiens
aagttactgagtaaa

SEQ ID NO: 131166 - DNA, 15 bp, Homo sapiens
aaagttactgagtaa

SEQ ID NO: 131167 - DNA, 15 bp, Homo sapiens
taaagttactgagta

SEQ ID NO: 131168 - DNA, 15 bp, Homo sapiens
ataaagttactgagt

SEQ ID NO: 131169 - DNA, 15 bp, Homo sapiens
gataaagttactgag

SEQ ID NO: 131170 - DNA, 15 bp, Homo sapiens
agataaagttactga

SEQ ID NO: 131171 - DNA, 15 bp, Homo sapiens
cagataaagttactg

SEQ ID NO: 131172 - DNA, 15 bp, Homo sapiens
acagataaagttact

SEQ ID NO: 131173 - DNA, 15 bp, Homo sapiens
aacagataaagttac

SEQ ID NO: 131174 - DNA, 15 bp, Homo sapiens
gaacagataaagtta

SEQ ID NO: 131175 - DNA, 15 bp, Homo sapiens
ggaacagataaagtt

SEQ ID NO: 131176 - DNA, 15 bp, Homo sapiens
aggaacagataaagt

SEQ ID NO: 131177 - DNA, 15 bp, Homo sapiens
taggaacagataaag

SEQ ID NO: 131178 - DNA, 15 bp, Homo sapiens
ctaggaacagataaa

SEQ ID NO: 131179 - DNA, 15 bp, Homo sapiens
tctaggaacagataa

SEQ ID NO: 131180 - DNA, 15 bp, Homo sapiens
gtctaggaacagata

SEQ ID NO: 131181 - DNA, 15 bp, Homo sapiens
agtctaggaacagat

SEQ ID NO: 131182 - DNA, 15 bp, Homo sapiens
aagtctaggaacaga

SEQ ID NO: 131183 - DNA, 15 bp, Homo sapiens
taagtctaggaacag

SEQ ID NO: 131184 - DNA, 15 bp, Homo sapiens
ataagtctaggaaca

SEQ ID NO: 131185 - DNA, 15 bp, Homo sapiens
tataagtctaggaac

SEQ ID NO: 131186 - DNA, 15 bp, Homo sapiens
ctataagtctaggaa

SEQ ID NO: 131187 - DNA, 15 bp, Homo sapiens
gctataagtctagga

SEQ ID NO: 131188 - DNA, 15 bp, Homo sapiens
agctataagtctagg

SEQ ID NO: 131189 - DNA, 15 bp, Homo sapiens
cagctataagtctag

SEQ ID NO: 131190 - DNA, 15 bp, Homo sapiens
gcagctataagtcta

SEQ ID NO: 131191 - DNA, 15 bp, Homo sapiens
agcagctataagtct

SEQ ID NO: 131192 - DNA, 15 bp, Homo sapiens
tagcagctataagtc

SEQ ID NO: 131193 - DNA, 15 bp, Homo sapiens
ttagcagctataagt

SEQ ID NO: 131194 - DNA, 15 bp, Homo sapiens
attagcagctataag

SEQ ID NO: 131195 - DNA, 15 bp, Homo sapiens
gattagcagctataa

SEQ ID NO: 131196 - DNA, 15 bp, Homo sapiens
agattagcagctata

SEQ ID NO: 131197 - DNA, 15 bp, Homo sapiens
gagattagcagctat

SEQ ID NO: 131198 - DNA, 15 bp, Homo sapiens
agagattagcagcta

SEQ ID NO: 131199 - DNA, 15 bp, Homo sapiens
tagagattagcagct

SEQ ID NO: 131200 - DNA, 15 bp, Homo sapiens
ttagagattagcagc

SEQ ID NO: 131201 - DNA, 15 bp, Homo sapiens
attagagattagcag

SEQ ID NO: 131202 - DNA, 15 bp, Homo sapiens
tattagagattagca

SEQ ID NO: 131203 - DNA, 15 bp, Homo sapiens
atattagagattagc

SEQ ID NO: 131204 - DNA, 15 bp, Homo sapiens
aatattagagattag

SEQ ID NO: 131205 - DNA, 15 bp, Homo sapiens
gaatattagagatta

SEQ ID NO: 131206 - DNA, 15 bp, Homo sapiens
tgaatattagagatt

SEQ ID NO: 131207 - DNA, 15 bp, Homo sapiens
atgaatattagagat

SEQ ID NO: 131208 - DNA, 15 bp, Homo sapiens
aatgaatattagaga

SEQ ID NO: 131209 - DNA, 15 bp, Homo sapiens
taatgaatattagag

SEQ ID NO: 131210 - DNA, 15 bp, Homo sapiens
ctaatgaatattaga

SEQ ID NO: 131211 - DNA, 15 bp, Homo sapiens
tctaatgaatattag

SEQ ID NO: 131212 - DNA, 15 bp, Homo sapiens
ttctaatgaatatta

SEQ ID NO: 131213 - DNA, 15 bp, Homo sapiens
gttctaatgaatatt

SEQ ID NO: 131214 - DNA, 15 bp, Homo sapiens
ggttctaatgaatat

SEQ ID NO: 131215 - DNA, 15 bp, Homo sapiens
gggttctaatgaata

SEQ ID NO: 131216 - DNA, 15 bp, Homo sapiens
ggggttctaatgaat

SEQ ID NO: 131217 - DNA, 15 bp, Homo sapiens
tggggttctaatgaa

SEQ ID NO: 131218 - DNA, 15 bp, Homo sapiens
atggggttctaatga

SEQ ID NO: 131219 - DNA, 15 bp, Homo sapiens
aatggggttctaatg

SEQ ID NO: 131220 - DNA, 15 bp, Homo sapiens
taatggggttctaat

SEQ ID NO: 131221 - DNA, 15 bp, Homo sapiens
ataatggggttctaa

SEQ ID NO: 131222 - DNA, 15 bp, Homo sapiens
tataatggggttcta

SEQ ID NO: 131223 - DNA, 15 bp, Homo sapiens
ttataatggggttct

SEQ ID NO: 131224 - DNA, 15 bp, Homo sapiens
gttataatggggttc

SEQ ID NO: 131225 - DNA, 15 bp, Homo sapiens
tgttataatggggtt

SEQ ID NO: 131226 - DNA, 15 bp, Homo sapiens
ttgttataatggggt

SEQ ID NO: 131227 - DNA, 15 bp, Homo sapiens
attgttataatgggg

SEQ ID NO: 131228 - DNA, 15 bp, Homo sapiens
aattgttataatggg

SEQ ID NO: 131229 - DNA, 15 bp, Homo sapiens
aaattgttataatgg

SEQ ID NO: 131230 - DNA, 15 bp, Homo sapiens
caaattgttataatg

SEQ ID NO: 131231 - DNA, 15 bp, Homo sapiens
gcaaattgttataat

SEQ ID NO: 131232 - DNA, 15 bp, Homo sapiens
ggcaaattgttataa

SEQ ID NO: 131233 - DNA, 15 bp, Homo sapiens
cggcaaattgttata

SEQ ID NO: 131234 - DNA, 15 bp, Homo sapiens
gcggcaaattgttat

SEQ ID NO: 131235 - DNA, 15 bp, Homo sapiens
agcggcaaattgtta

SEQ ID NO: 131236 - DNA, 15 bp, Homo sapiens
tagcggcaaattgtt

SEQ ID NO: 131237 - DNA, 15 bp, Homo sapiens
gtagcggcaaattgt

SEQ ID NO: 131238 - DNA, 15 bp, Homo sapiens
tgtagcggcaaattg

SEQ ID NO: 131239 - DNA, 15 bp, Homo sapiens
atgtagcggcaaatt

SEQ ID NO: 131240 - DNA, 15 bp, Homo sapiens
catgtagcggcaaat

SEQ ID NO: 131241 - DNA, 15 bp, Homo sapiens
ccatgtagcggcaaa

SEQ ID NO: 131242 - DNA, 15 bp, Homo sapiens
accatgtagcggcaa

SEQ ID NO: 131243 - DNA, 15 bp, Homo sapiens
aaccatgtagcggca

SEQ ID NO: 131244 - DNA, 15 bp, Homo sapiens
aaaccatgtagcggc

SEQ ID NO: 131245 - DNA, 15 bp, Homo sapiens
gaaaccatgtagcgg

SEQ ID NO: 131246 - DNA, 15 bp, Homo sapiens
ggaaaccatgtagcg

SEQ ID NO: 131247 - DNA, 15 bp, Homo sapiens
tggaaaccatgtagc

SEQ ID NO: 131248 - DNA, 15 bp, Homo sapiens
ttggaaaccatgtag

SEQ ID NO: 131249 - DNA, 15 bp, Homo sapiens
attggaaaccatgta

SEQ ID NO: 131250 - DNA, 15 bp, Homo sapiens
aattggaaaccatgt

SEQ ID NO: 131251 - DNA, 15 bp, Homo sapiens
gaattggaaaccatg

SEQ ID NO: 131252 - DNA, 15 bp, Homo sapiens
tgaattggaaaccat

SEQ ID NO: 131253 - DNA, 15 bp, Homo sapiens
gtgaattggaaacca

SEQ ID NO: 131254 - DNA, 15 bp, Homo sapiens
tgtgaattggaaacc

SEQ ID NO: 131255 - DNA, 15 bp, Homo sapiens
ctgtgaattggaaac

SEQ ID NO: 131256 - DNA, 15 bp, Homo sapiens
actgtgaattggaaa

SEQ ID NO: 131257 - DNA, 15 bp, Homo sapiens
cactgtgaattggaa

SEQ ID NO: 131258 - DNA, 15 bp, Homo sapiens
ccactgtgaattgga

SEQ ID NO: 131259 - DNA, 15 bp, Homo sapiens
cccactgtgaattgg

SEQ ID NO: 131260 - DNA, 15 bp, Homo sapiens
acccactgtgaattg

SEQ ID NO: 131261 - DNA, 15 bp, Homo sapiens
aacccactgtgaatt

SEQ ID NO: 131262 - DNA, 15 bp, Homo sapiens
taacccactgtgaat

SEQ ID NO: 131263 - DNA, 15 bp, Homo sapiens
ttaacccactgtgaa

SEQ ID NO: 131264 - DNA, 15 bp, Homo sapiens
tttaacccactgtga

SEQ ID NO: 131265 - DNA, 15 bp, Homo sapiens
atttaacccactgtg

SEQ ID NO: 131266 - DNA, 15 bp, Homo sapiens
aatttaacccactgt

SEQ ID NO: 131267 - DNA, 15 bp, Homo sapiens
caatttaacccactg

SEQ ID NO: 131268 - DNA, 15 bp, Homo sapiens
acaatttaacccact

SEQ ID NO: 131269 - DNA, 15 bp, Homo sapiens
cacaatttaacccac

SEQ ID NO: 131270 - DNA, 15 bp, Homo sapiens
acacaatttaaccca

SEQ ID NO: 131271 - DNA, 15 bp, Homo sapiens
aacacaatttaaccc

SEQ ID NO: 131272 - DNA, 15 bp, Homo sapiens
taacacaatttaacc

SEQ ID NO: 131273 - DNA, 15 bp, Homo sapiens
gtaacacaatttaac

SEQ ID NO: 131274 - DNA, 15 bp, Homo sapiens
tgtaacacaatttaa

SEQ ID NO: 131275 - DNA, 15 bp, Homo sapiens
ctgtaacacaattta

SEQ ID NO: 131276 - DNA, 15 bp, Homo sapiens
cctgtaacacaattt

SEQ ID NO: 131277 - DNA, 15 bp, Homo sapiens
tcctgtaacacaatt

SEQ ID NO: 131278 - DNA, 15 bp, Homo sapiens
ctcctgtaacacaat

SEQ ID NO: 131279 - DNA, 15 bp, Homo sapiens
tctcctgtaacacaa

SEQ ID NO: 131280 - DNA, 15 bp, Homo sapiens
gtctcctgtaacaca

SEQ ID NO: 131281 - DNA, 15 bp, Homo sapiens
tgtctcctgtaacac

SEQ ID NO: 131282 - DNA, 15 bp, Homo sapiens
atgtctcctgtaaca

SEQ ID NO: 131283 - DNA, 15 bp, Homo sapiens
tatgtctcctgtaac

SEQ ID NO: 131284 - DNA, 15 bp, Homo sapiens
ctatgtctcctgtaa

SEQ ID NO: 131285 - DNA, 15 bp, Homo sapiens
tctatgtctcctgta

SEQ ID NO: 131286 - DNA, 15 bp, Homo sapiens
ctctatgtctcctgt

SEQ ID NO: 131287 - DNA, 15 bp, Homo sapiens
actctatgtctcctg

SEQ ID NO: 131288 - DNA, 15 bp, Homo sapiens
tactctatgtctcct

SEQ ID NO: 131289 - DNA, 15 bp, Homo sapiens
ttactctatgtctcc

SEQ ID NO: 131290 - DNA, 15 bp, Homo sapiens
tttactctatgtctc

SEQ ID NO: 131291 - DNA, 15 bp, Homo sapiens
ttttactctatgtct

SEQ ID NO: 131292 - DNA, 15 bp, Homo sapiens
tttttactctatgtc

SEQ ID NO: 131293 - DNA, 15 bp, Homo sapiens
gtttttactctatgt

SEQ ID NO: 131294 - DNA, 15 bp, Homo sapiens
ggtttttactctatg

SEQ ID NO: 131295 - DNA, 15 bp, Homo sapiens
aggtttttactctat

SEQ ID NO: 131296 - DNA, 15 bp, Homo sapiens
caggtttttactcta

SEQ ID NO: 131297 - DNA, 15 bp, Homo sapiens
tcaggtttttactct

SEQ ID NO: 131298 - DNA, 15 bp, Homo sapiens
atcaggtttttactc

SEQ ID NO: 131299 - DNA, 15 bp, Homo sapiens
catcaggtttttact

SEQ ID NO: 131300 - DNA, 15 bp, Homo sapiens
tcatcaggtttttac

SEQ ID NO: 131301 - DNA, 15 bp, Homo sapiens
atcatcaggttttta

SEQ ID NO: 131302 - DNA, 15 bp, Homo sapiens
tatcatcaggttttt

SEQ ID NO: 131303 - DNA, 15 bp, Homo sapiens
ttatcatcaggtttt

SEQ ID NO: 131304 - DNA, 15 bp, Homo sapiens
tttatcatcaggttt

SEQ ID NO: 131305 - DNA, 15 bp, Homo sapiens
gtttatcatcaggtt

SEQ ID NO: 131306 - DNA, 15 bp, Homo sapiens
tgtttatcatcaggt

SEQ ID NO: 131307 - DNA, 15 bp, Homo sapiens
gtgtttatcatcagg

SEQ ID NO: 131308 - DNA, 15 bp, Homo sapiens
cgtgtttatcatcag

SEQ ID NO: 131309 - DNA, 15 bp, Homo sapiens
acgtgtttatcatca

SEQ ID NO: 131310 - DNA, 15 bp, Homo sapiens
tacgtgtttatcatc

SEQ ID NO: 131311 - DNA, 15 bp, Homo sapiens
ctacgtgtttatcat

SEQ ID NO: 131312 - DNA, 15 bp, Homo sapiens
tctacgtgtttatca

SEQ ID NO: 131313 - DNA, 15 bp, Homo sapiens
ctctacgtgtttatc

SEQ ID NO: 131314 - DNA, 15 bp, Homo sapiens
actctacgtgtttat

SEQ ID NO: 131315 - DNA, 15 bp, Homo sapiens
aactctacgtgttta

SEQ ID NO: 131316 - DNA, 15 bp, Homo sapiens
gaactctacgtgttt

SEQ ID NO: 131317 - DNA, 15 bp, Homo sapiens
tgaactctacgtgtt

SEQ ID NO: 131318 - DNA, 15 bp, Homo sapiens
gtgaactctacgtgt

SEQ ID NO: 131319 - DNA, 15 bp, Homo sapiens
tgtgaactctacgtg

SEQ ID NO: 131320 - DNA, 15 bp, Homo sapiens
ctgtgaactctacgt

SEQ ID NO: 131321 - DNA, 15 bp, Homo sapiens
cctgtgaactctacg

SEQ ID NO: 131322 - DNA, 15 bp, Homo sapiens
ccctgtgaactctac

SEQ ID NO: 131323 - DNA, 15 bp, Homo sapiens
gccctgtgaactcta

SEQ ID NO: 131324 - DNA, 15 bp, Homo sapiens
ggccctgtgaactct

SEQ ID NO: 131325 - DNA, 15 bp, Homo sapiens
cggccctgtgaactc

SEQ ID NO: 131326 - DNA, 15 bp, Homo sapiens
ccggccctgtgaact

SEQ ID NO: 131327 - DNA, 15 bp, Homo sapiens
accggccctgtgaac

SEQ ID NO: 131328 - DNA, 15 bp, Homo sapiens
caccggccctgtgaa

SEQ ID NO: 131329 - DNA, 15 bp, Homo sapiens
gcaccggccctgtga

SEQ ID NO: 131330 - DNA, 15 bp, Homo sapiens
tgcaccggccctgtg

SEQ ID NO: 131331 - DNA, 15 bp, Homo sapiens
ttgcaccggccctgt

SEQ ID NO: 131332 - DNA, 15 bp, Homo sapiens
cttgcaccggccctg

SEQ ID NO: 131333 - DNA, 15 bp, Homo sapiens
acttgcaccggccct

SEQ ID NO: 131334 - DNA, 15 bp, Homo sapiens
aacttgcaccggccc

SEQ ID NO: 131335 - DNA, 15 bp, Homo sapiens
gaacttgcaccggcc

SEQ ID NO: 131336 - DNA, 15 bp, Homo sapiens
agaacttgcaccggc

SEQ ID NO: 131337 - DNA, 15 bp, Homo sapiens
cagaacttgcaccgg

SEQ ID NO: 131338 - DNA, 15 bp, Homo sapiens
acagaacttgcaccg

SEQ ID NO: 131339 - DNA, 15 bp, Homo sapiens
aacagaacttgcacc

SEQ ID NO: 131340 - DNA, 15 bp, Homo sapiens
gaacagaacttgcac

SEQ ID NO: 131341 - DNA, 15 bp, Homo sapiens
tgaacagaacttgca

SEQ ID NO: 131342 - DNA, 15 bp, Homo sapiens
atgaacagaacttgc

SEQ ID NO: 131343 - DNA, 15 bp, Homo sapiens
catgaacagaacttg

SEQ ID NO: 131344 - DNA, 15 bp, Homo sapiens
gcatgaacagaactt

SEQ ID NO: 131345 - DNA, 15 bp, Homo sapiens
agcatgaacagaact

SEQ ID NO: 131346 - DNA, 15 bp, Homo sapiens
gagcatgaacagaac

SEQ ID NO: 131347 - DNA, 15 bp, Homo sapiens
agagcatgaacagaa

SEQ ID NO: 131348 - DNA, 15 bp, Homo sapiens
cagagcatgaacaga

SEQ ID NO: 131349 - DNA, 15 bp, Homo sapiens
tcagagcatgaacag

SEQ ID NO: 131350 - DNA, 15 bp, Homo sapiens
atcagagcatgaaca

SEQ ID NO: 131351 - DNA, 15 bp, Homo sapiens
aatcagagcatgaac

SEQ ID NO: 131352 - DNA, 15 bp, Homo sapiens
caatcagagcatgaa

SEQ ID NO: 131353 - DNA, 15 bp, Homo sapiens
ccaatcagagcatga

SEQ ID NO: 131354 - DNA, 15 bp, Homo sapiens
cccaatcagagcatg

SEQ ID NO: 131355 - DNA, 15 bp, Homo sapiens
ccccaatcagagcat

SEQ ID NO: 131356 - DNA, 15 bp, Homo sapiens
cccccaatcagagca

SEQ ID NO: 131357 - DNA, 15 bp, Homo sapiens
acccccaatcagagc

SEQ ID NO: 131358 - DNA, 15 bp, Homo sapiens
tacccccaatcagag

SEQ ID NO: 131359 - DNA, 15 bp, Homo sapiens
ttacccccaatcaga

SEQ ID NO: 131360 - DNA, 15 bp, Homo sapiens
tttacccccaatcag

SEQ ID NO: 131361 - DNA, 15 bp, Homo sapiens
atttacccccaatca

SEQ ID NO: 131362 - DNA, 15 bp, Homo sapiens
gatttacccccaatc

SEQ ID NO: 131363 - DNA, 15 bp, Homo sapiens
agatttacccccaat

SEQ ID NO: 131364 - DNA, 15 bp, Homo sapiens
cagatttacccccaa

SEQ ID NO: 131365 - DNA, 15 bp, Homo sapiens
gcagatttaccccca

SEQ ID NO: 131366 - DNA, 15 bp, Homo sapiens
tgcagatttaccccc

SEQ ID NO: 131367 - DNA, 15 bp, Homo sapiens
ttgcagatttacccc

SEQ ID NO: 131368 - DNA, 15 bp, Homo sapiens
tttgcagatttaccc

SEQ ID NO: 131369 - DNA, 15 bp, Homo sapiens
ctttgcagatttacc

SEQ ID NO: 131370 - DNA, 15 bp, Homo sapiens
gctttgcagatttac

SEQ ID NO: 131371 - DNA, 15 bp, Homo sapiens
ggctttgcagattta

SEQ ID NO: 131372 - DNA, 15 bp, Homo sapiens
gggctttgcagattt

SEQ ID NO: 131373 - DNA, 15 bp, Homo sapiens
agggctttgcagatt

SEQ ID NO: 131374 - DNA, 15 bp, Homo sapiens
aagggctttgcagat

SEQ ID NO: 131375 - DNA, 15 bp, Homo sapiens
caagggctttgcaga

SEQ ID NO: 131376 - DNA, 15 bp, Homo sapiens
acaagggctttgcag

SEQ ID NO: 131377 - DNA, 15 bp, Homo sapiens
cacaagggctttgca

SEQ ID NO: 131378 - DNA, 15 bp, Homo sapiens
acacaagggctttgc

SEQ ID NO: 131379 - DNA, 15 bp, Homo sapiens
cacacaagggctttg

SEQ ID NO: 131380 - DNA, 15 bp, Homo sapiens
acacacaagggcttt

SEQ ID NO: 131381 - DNA, 15 bp, Homo sapiens
aacacacaagggctt

SEQ ID NO: 131382 - DNA, 15 bp, Homo sapiens
caacacacaagggct

SEQ ID NO: 131383 - DNA, 15 bp, Homo sapiens
tcaacacacaagggc

SEQ ID NO: 131384 - DNA, 15 bp, Homo sapiens
atcaacacacaaggg

SEQ ID NO: 131385 - DNA, 15 bp, Homo sapiens
catcaacacacaagg

SEQ ID NO: 131386 - DNA, 15 bp, Homo sapiens
tcatcaacacacaag

SEQ ID NO: 131387 - DNA, 15 bp, Homo sapiens
atcatcaacacacaa

SEQ ID NO: 131388 - DNA, 15 bp, Homo sapiens
aatcatcaacacaca

SEQ ID NO: 131389 - DNA, 15 bp, Homo sapiens
aaatcatcaacacac

SEQ ID NO: 131390 - DNA, 15 bp, Homo sapiens
aaaatcatcaacaca

SEQ ID NO: 131391 - DNA, 15 bp, Homo sapiens
gaaaatcatcaacac

SEQ ID NO: 131392 - DNA, 15 bp, Homo sapiens
agaaaatcatcaaca

SEQ ID NO: 131393 - DNA, 15 bp, Homo sapiens
aagaaaatcatcaac

SEQ ID NO: 131394 - DNA, 15 bp, Homo sapiens
taagaaaatcatcaa

SEQ ID NO: 131395 - DNA, 15 bp, Homo sapiens
ttaagaaaatcatca

SEQ ID NO: 131396 - DNA, 15 bp, Homo sapiens
cttaagaaaatcatc

SEQ ID NO: 131397 - DNA, 15 bp, Homo sapiens
ccttaagaaaatcat

SEQ ID NO: 131398 - DNA, 15 bp, Homo sapiens
gccttaagaaaatca

SEQ ID NO: 131399 - DNA, 15 bp, Homo sapiens
ggccttaagaaaatc

SEQ ID NO: 131400 - DNA, 15 bp, Homo sapiens
aggccttaagaaaat

SEQ ID NO: 131401 - DNA, 15 bp, Homo sapiens
gaggccttaagaaaa

SEQ ID NO: 131402 - DNA, 15 bp, Homo sapiens
agaggccttaagaaa

SEQ ID NO: 131403 - DNA, 15 bp, Homo sapiens
gagaggccttaagaa

SEQ ID NO: 131404 - DNA, 15 bp, Homo sapiens
ggagaggccttaaga

SEQ ID NO: 131405 - DNA, 15 bp, Homo sapiens
aggagaggccttaag

SEQ ID NO: 131406 - DNA, 15 bp, Homo sapiens
caggagaggccttaa

SEQ ID NO: 131407 - DNA, 15 bp, Homo sapiens
tcaggagaggcctta

SEQ ID NO: 131408 - DNA, 15 bp, Homo sapiens
atcaggagaggcctt

SEQ ID NO: 131409 - DNA, 15 bp, Homo sapiens
aatcaggagaggcct

SEQ ID NO: 131410 - DNA, 15 bp, Homo sapiens
aaatcaggagaggcc

SEQ ID NO: 131411 - DNA, 15 bp, Homo sapiens
aaaatcaggagaggc

SEQ ID NO: 131412 - DNA, 15 bp, Homo sapiens
taaaatcaggagagg

SEQ ID NO: 131413 - DNA, 15 bp, Homo sapiens
ataaaatcaggagag

SEQ ID NO: 131414 - DNA, 15 bp, Homo sapiens
tataaaatcaggaga

SEQ ID NO: 131415 - DNA, 15 bp, Homo sapiens
ttataaaatcaggag

SEQ ID NO: 131416 - DNA, 15 bp, Homo sapiens
gttataaaatcagga

SEQ ID NO: 131417 - DNA, 15 bp, Homo sapiens
agttataaaatcagg

SEQ ID NO: 131418 - DNA, 15 bp, Homo sapiens
cagttataaaatcag

SEQ ID NO: 131419 - DNA, 15 bp, Homo sapiens
acagttataaaatca

SEQ ID NO: 131420 - DNA, 15 bp, Homo sapiens
tacagttataaaatc

SEQ ID NO: 131421 - DNA, 15 bp, Homo sapiens
atacagttataaaat

SEQ ID NO: 131422 - DNA, 15 bp, Homo sapiens
tatacagttataaaa

SEQ ID NO: 131423 - DNA, 15 bp, Homo sapiens
ctatacagttataaa

SEQ ID NO: 131424 - DNA, 15 bp, Homo sapiens
actatacagttataa

SEQ ID NO: 131425 - DNA, 15 bp, Homo sapiens
gactatacagttata

SEQ ID NO: 131426 - DNA, 15 bp, Homo sapiens
tgactatacagttat

SEQ ID NO: 131427 - DNA, 15 bp, Homo sapiens
ttgactatacagtta

SEQ ID NO: 131428 - DNA, 15 bp, Homo sapiens
tttgactatacagtt

SEQ ID NO: 131429 - DNA, 15 bp, Homo sapiens
ttttgactatacagt

SEQ ID NO: 131430 - DNA, 15 bp, Homo sapiens
gttttgactatacag

SEQ ID NO: 131431 - DNA, 15 bp, Homo sapiens
agttttgactataca

SEQ ID NO: 131432 - DNA, 15 bp, Homo sapiens
aagttttgactatac

SEQ ID NO: 131433 - DNA, 15 bp, Homo sapiens
aaagttttgactata

SEQ ID NO: 131434 - DNA, 15 bp, Homo sapiens
aaaagttttgactat

SEQ ID NO: 131435 - DNA, 15 bp, Homo sapiens
aaaaagttttgacta

SEQ ID NO: 131436 - DNA, 15 bp, Homo sapiens
aaaaaagttttgact

SEQ ID NO: 131437 - DNA, 15 bp, Homo sapiens
gaaaaaagttttgac

SEQ ID NO: 131438 - DNA, 15 bp, Homo sapiens
tgaaaaaagttttga

SEQ ID NO: 131439 - DNA, 15 bp, Homo sapiens
atgaaaaaagttttg

SEQ ID NO: 131440 - DNA, 15 bp, Homo sapiens
aatgaaaaaagtttt

SEQ ID NO: 131441 - DNA, 15 bp, Homo sapiens
aaatgaaaaaagttt

SEQ ID NO: 131442 - DNA, 15 bp, Homo sapiens
caaatgaaaaaagtt

SEQ ID NO: 131443 - DNA, 15 bp, Homo sapiens
acaaatgaaaaaagt

SEQ ID NO: 131444 - DNA, 15 bp, Homo sapiens
cacaaatgaaaaaag

SEQ ID NO: 131445 - DNA, 15 bp, Homo sapiens
acacaaatgaaaaaa

SEQ ID NO: 131446 - DNA, 15 bp, Homo sapiens
tacacaaatgaaaaa

SEQ ID NO: 131447 - DNA, 15 bp, Homo sapiens
gtacacaaatgaaaa

SEQ ID NO: 131448 - DNA, 15 bp, Homo sapiens
agtacacaaatgaaa

SEQ ID NO: 131449 - DNA, 15 bp, Homo sapiens
cagtacacaaatgaa

SEQ ID NO: 131450 - DNA, 15 bp, Homo sapiens
acagtacacaaatga

SEQ ID NO: 131451 - DNA, 15 bp, Homo sapiens
cacagtacacaaatg

SEQ ID NO: 131452 - DNA, 15 bp, Homo sapiens
ccacagtacacaaat

SEQ ID NO: 131453 - DNA, 15 bp, Homo sapiens
gccacagtacacaaa

SEQ ID NO: 131454 - DNA, 15 bp, Homo sapiens
agccacagtacacaa

SEQ ID NO: 131455 - DNA, 15 bp, Homo sapiens
gagccacagtacaca

SEQ ID NO: 131456 - DNA, 15 bp, Homo sapiens
tgagccacagtacac

SEQ ID NO: 131457 - DNA, 15 bp, Homo sapiens
atgagccacagtaca

SEQ ID NO: 131458 - DNA, 15 bp, Homo sapiens
aatgagccacagtac

SEQ ID NO: 131459 - DNA, 15 bp, Homo sapiens
aaatgagccacagta

SEQ ID NO: 131460 - DNA, 15 bp, Homo sapiens
aaaatgagccacagt

SEQ ID NO: 131461 - DNA, 15 bp, Homo sapiens
aaaaatgagccacag

SEQ ID NO: 131462 - DNA, 15 bp, Homo sapiens
taaaaatgagccaca

SEQ ID NO: 131463 - DNA, 15 bp, Homo sapiens
ataaaaatgagccac

SEQ ID NO: 131464 - DNA, 15 bp, Homo sapiens
aataaaaatgagcca

SEQ ID NO: 131465 - DNA, 15 bp, Homo sapiens
aaataaaaatgagcc

SEQ ID NO: 131466 - DNA, 15 bp, Homo sapiens
aaaataaaaatgagc

SEQ ID NO: 131467 - DNA, 15 bp, Homo sapiens
caaaataaaaatgag

SEQ ID NO: 131468 - DNA, 15 bp, Homo sapiens
acaaaataaaaatga

SEQ ID NO: 131469 - DNA, 15 bp, Homo sapiens
gacaaaataaaaatg

SEQ ID NO: 131470 - DNA, 15 bp, Homo sapiens
tgacaaaataaaaat

SEQ ID NO: 131471 - DNA, 15 bp, Homo sapiens
ctgacaaaataaaaa

SEQ ID NO: 131472 - DNA, 15 bp, Homo sapiens
cctgacaaaataaaa

SEQ ID NO: 131473 - DNA, 15 bp, Homo sapiens
acctgacaaaataaa

SEQ ID NO: 131474 - DNA, 15 bp, Homo sapiens
tacctgacaaaataa

SEQ ID NO: 131475 - DNA, 15 bp, Homo sapiens
atacctgacaaaata

SEQ ID NO: 131476 - DNA, 15 bp, Homo sapiens
catacctgacaaaat

SEQ ID NO: 131477 - DNA, 15 bp, Homo sapiens
acatacctgacaaaa

SEQ ID NO: 131478 - DNA, 15 bp, Homo sapiens
cacatacctgacaaa

SEQ ID NO: 131479 - DNA, 15 bp, Homo sapiens
gcacatacctgacaa

SEQ ID NO: 131480 - DNA, 15 bp, Homo sapiens
agcacatacctgaca

SEQ ID NO: 131481 - DNA, 15 bp, Homo sapiens
cagcacatacctgac

SEQ ID NO: 131482 - DNA, 15 bp, Homo sapiens
ccagcacatacctga

SEQ ID NO: 131483 - DNA, 15 bp, Homo sapiens
accagcacatacctg

SEQ ID NO: 131484 - DNA, 15 bp, Homo sapiens
gaccagcacatacct

SEQ ID NO: 131485 - DNA, 15 bp, Homo sapiens
tgaccagcacatacc

SEQ ID NO: 131486 - DNA, 15 bp, Homo sapiens
atgaccagcacatac

SEQ ID NO: 131487 - DNA, 15 bp, Homo sapiens
tatgaccagcacata

SEQ ID NO: 131488 - DNA, 15 bp, Homo sapiens
gtatgaccagcacat

SEQ ID NO: 131489 - DNA, 15 bp, Homo sapiens
agtatgaccagcaca

SEQ ID NO: 131490 - DNA, 15 bp, Homo sapiens
aagtatgaccagcac

SEQ ID NO: 131491 - DNA, 15 bp, Homo sapiens
caagtatgaccagca

SEQ ID NO: 131492 - DNA, 15 bp, Homo sapiens
gcaagtatgaccagc

SEQ ID NO: 131493 - DNA, 15 bp, Homo sapiens
agcaagtatgaccag

SEQ ID NO: 131494 - DNA, 15 bp, Homo sapiens
cagcaagtatgacca

SEQ ID NO: 131495 - DNA, 15 bp, Homo sapiens
ccagcaagtatgacc

SEQ ID NO: 131496 - DNA, 15 bp, Homo sapiens
tccagcaagtatgac

SEQ ID NO: 131497 - DNA, 15 bp, Homo sapiens
atccagcaagtatga

SEQ ID NO: 131498 - DNA, 15 bp, Homo sapiens
catccagcaagtatg

SEQ ID NO: 131499 - DNA, 15 bp, Homo sapiens
ccatccagcaagtat

SEQ ID NO: 131500 - DNA, 15 bp, Homo sapiens
tccatccagcaagta

SEQ ID NO: 131501 - DNA, 15 bp, Homo sapiens
gtccatccagcaagt

SEQ ID NO: 131502 - DNA, 15 bp, Homo sapiens
agtccatccagcaag

SEQ ID NO: 131503 - DNA, 15 bp, Homo sapiens
cagtccatccagcaa

SEQ ID NO: 131504 - DNA, 15 bp, Homo sapiens
acagtccatccagca

SEQ ID NO: 131505 - DNA, 15 bp, Homo sapiens
cacagtccatccagc

SEQ ID NO: 131506 - DNA, 15 bp, Homo sapiens
acacagtccatccag

SEQ ID NO: 131507 - DNA, 15 bp, Homo sapiens
tacacagtccatcca

SEQ ID NO: 131508 - DNA, 15 bp, Homo sapiens
ttacacagtccatcc

SEQ ID NO: 131509 - DNA, 15 bp, Homo sapiens
tttacacagtccatc

SEQ ID NO: 131510 - DNA, 15 bp, Homo sapiens
atttacacagtccat

SEQ ID NO: 131511 - DNA, 15 bp, Homo sapiens
gatttacacagtcca

SEQ ID NO: 131512 - DNA, 15 bp, Homo sapiens
tgatttacacagtcc

SEQ ID NO: 131513 - DNA, 15 bp, Homo sapiens
ctgatttacacagtc

SEQ ID NO: 131514 - DNA, 15 bp, Homo sapiens
cctgatttacacagt

SEQ ID NO: 131515 - DNA, 15 bp, Homo sapiens
ccctgatttacacag

SEQ ID NO: 131516 - DNA, 15 bp, Homo sapiens
cccctgatttacaca

SEQ ID NO: 131517 - DNA, 15 bp, Homo sapiens
acccctgatttacac

SEQ ID NO: 131518 - DNA, 15 bp, Homo sapiens
gacccctgatttaca

SEQ ID NO: 131519 - DNA, 15 bp, Homo sapiens
agacccctgatttac

SEQ ID NO: 131520 - DNA, 15 bp, Homo sapiens
cagacccctgattta

SEQ ID NO: 131521 - DNA, 15 bp, Homo sapiens
gcagacccctgattt

SEQ ID NO: 131522 - DNA, 15 bp, Homo sapiens
ggcagacccctgatt

SEQ ID NO: 131523 - DNA, 15 bp, Homo sapiens
aggcagacccctgat

SEQ ID NO: 131524 - DNA, 15 bp, Homo sapiens
gaggcagacccctga

SEQ ID NO: 131525 - DNA, 15 bp, Homo sapiens
agaggcagacccctg

SEQ ID NO: 131526 - DNA, 15 bp, Homo sapiens
aagaggcagacccct

SEQ ID NO: 131527 - DNA, 15 bp, Homo sapiens
caagaggcagacccc

SEQ ID NO: 131528 - DNA, 15 bp, Homo sapiens
acaagaggcagaccc

SEQ ID NO: 131529 - DNA, 15 bp, Homo sapiens
cacaagaggcagacc

SEQ ID NO: 131530 - DNA, 15 bp, Homo sapiens
ccacaagaggcagac

SEQ ID NO: 131531 - DNA, 15 bp, Homo sapiens
gccacaagaggcaga

SEQ ID NO: 131532 - DNA, 15 bp, Homo sapiens
agccacaagaggcag

SEQ ID NO: 131533 - DNA, 15 bp, Homo sapiens
gagccacaagaggca

SEQ ID NO: 131534 - DNA, 15 bp, Homo sapiens
tgagccacaagaggc

SEQ ID NO: 131535 - DNA, 15 bp, Homo sapiens
atgagccacaagagg

SEQ ID NO: 131536 - DNA, 15 bp, Homo sapiens
tatgagccacaagag

SEQ ID NO: 131537 - DNA, 15 bp, Homo sapiens
ttatgagccacaaga

SEQ ID NO: 131538 - DNA, 15 bp, Homo sapiens
cttatgagccacaag

SEQ ID NO: 131539 - DNA, 15 bp, Homo sapiens
ccttatgagccacaa

SEQ ID NO: 131540 - DNA, 15 bp, Homo sapiens
accttatgagccaca

SEQ ID NO: 131541 - DNA, 15 bp, Homo sapiens
caccttatgagccac

SEQ ID NO: 131542 - DNA, 15 bp, Homo sapiens
tcaccttatgagcca

SEQ ID NO: 131543 - DNA, 15 bp, Homo sapiens
atcaccttatgagcc

SEQ ID NO: 131544 - DNA, 15 bp, Homo sapiens
aatcaccttatgagc

SEQ ID NO: 131545 - DNA, 15 bp, Homo sapiens
aaatcaccttatgag

SEQ ID NO: 131546 - DNA, 15 bp, Homo sapiens
aaaatcaccttatga

SEQ ID NO: 131547 - DNA, 15 bp, Homo sapiens
caaaatcaccttatg

SEQ ID NO: 131548 - DNA, 15 bp, Homo sapiens
tcaaaatcaccttat

SEQ ID NO: 131549 - DNA, 15 bp, Homo sapiens
ctcaaaatcacctta

SEQ ID NO: 131550 - DNA, 15 bp, Homo sapiens
actcaaaatcacctt

SEQ ID NO: 131551 - DNA, 15 bp, Homo sapiens
cactcaaaatcacct

SEQ ID NO: 131552 - DNA, 15 bp, Homo sapiens
tcactcaaaatcacc

SEQ ID NO: 131553 - DNA, 15 bp, Homo sapiens
gtcactcaaaatcac

SEQ ID NO: 131554 - DNA, 15 bp, Homo sapiens
tgtcactcaaaatca

SEQ ID NO: 131555 - DNA, 15 bp, Homo sapiens
atgtcactcaaaatc

SEQ ID NO: 131556 - DNA, 15 bp, Homo sapiens
catgtcactcaaaat

SEQ ID NO: 131557 - DNA, 15 bp, Homo sapiens
ccatgtcactcaaaa

SEQ ID NO: 131558 - DNA, 15 bp, Homo sapiens
gccatgtcactcaaa

SEQ ID NO: 131559 - DNA, 15 bp, Homo sapiens
ggccatgtcactcaa

SEQ ID NO: 131560 - DNA, 15 bp, Homo sapiens
tggccatgtcactca

SEQ ID NO: 131561 - DNA, 15 bp, Homo sapiens
ttggccatgtcactc

SEQ ID NO: 131562 - DNA, 15 bp, Homo sapiens
tttggccatgtcact

SEQ ID NO: 131563 - DNA, 15 bp, Homo sapiens
ctttggccatgtcac

SEQ ID NO: 131564 - DNA, 15 bp, Homo sapiens
actttggccatgtca

SEQ ID NO: 131565 - DNA, 15 bp, Homo sapiens
gactttggccatgtc

SEQ ID NO: 131566 - DNA, 15 bp, Homo sapiens
tgactttggccatgt

SEQ ID NO: 131567 - DNA, 15 bp, Homo sapiens
ctgactttggccatg

SEQ ID NO: 131568 - DNA, 15 bp, Homo sapiens
gctgactttggccat

SEQ ID NO: 131569 - DNA, 15 bp, Homo sapiens
aagagctccacggtg

SEQ ID NO: 131570 - DNA, 15 bp, Homo sapiens
aaagagctccacggt

SEQ ID NO: 131571 - DNA, 15 bp, Homo sapiens
aaaagagctccacgg

SEQ ID NO: 131572 - DNA, 15 bp, Homo sapiens
aaaaagagctccacg

SEQ ID NO: 131573 - DNA, 15 bp, Homo sapiens
gaaaaagagctccac

SEQ ID NO: 131574 - DNA, 15 bp, Homo sapiens
agaaaaagagctcca

SEQ ID NO: 131575 - DNA, 15 bp, Homo sapiens
gagaaaaagagctcc

SEQ ID NO: 131576 - DNA, 15 bp, Homo sapiens
ggagaaaaagagctc

SEQ ID NO: 131577 - DNA, 15 bp, Homo sapiens
cggagaaaaagagct

SEQ ID NO: 131578 - DNA, 15 bp, Homo sapiens
gcggagaaaaagagc

SEQ ID NO: 131579 - DNA, 15 bp, Homo sapiens
agcggagaaaaagag

SEQ ID NO: 131580 - DNA, 15 bp, Homo sapiens
gagcggagaaaaaga

SEQ ID NO: 131581 - DNA, 15 bp, Homo sapiens
ggagcggagaaaaag

SEQ ID NO: 131582 - DNA, 15 bp, Homo sapiens
aggagcggagaaaaa

SEQ ID NO: 131583 - DNA, 15 bp, Homo sapiens
caggagcggagaaaa
